United States Patent Application Publication US 2007/0048756 A1 - sequence listing, part 20

SEQ ID NO: 690398 - DNA, 33 bp, Homo sapien
tacctgtcagtcaaggtccattaaatgagatga

SEQ ID NO: 690399 - DNA, 33 bp, Homo sapien
caccctctttctcccacgagtgtacagtagagt

SEQ ID NO: 690400 - DNA, 33 bp, Homo sapien
caccctctttctcccatgagtgtacagtagagt

SEQ ID NO: 690401 - DNA, 33 bp, Homo sapien
gttaatggtactgaatcaaggtcaacgttctgg

SEQ ID NO: 690402 - DNA, 33 bp, Homo sapien
gttaatggtactgaatgaaggtcaacgttctgg

SEQ ID NO: 690403 - DNA, 33 bp, Homo sapien
caatgtttaatacacaggatagtacacttaaca

SEQ ID NO: 690404 - DNA, 33 bp, Homo sapien
caatgtttaatacacatgatagtacacttaaca

SEQ ID NO: 690405 - DNA, 33 bp, Homo sapien
gatgagtgtagagaagcaacagactgtgaggta

SEQ ID NO: 690406 - DNA, 33 bp, Homo sapien
gatgagtgtagagaaggaacagactgtgaggta

SEQ ID NO: 690407 - DNA, 33 bp, Homo sapien
agcttatctaacacacacattttctccgtaagg

SEQ ID NO: 690408 - DNA, 33 bp, Homo sapien
agcttatctaacacacgcattttctccgtaagg

SEQ ID NO: 690409 - DNA, 33 bp, Homo sapien
aagcccacagttaagacctattgttcagggaaa

SEQ ID NO: 690410 - DNA, 33 bp, Homo sapien
aagcccacagttaagatctattgttcagggaaa

SEQ ID NO: 690411 - DNA, 33 bp, Homo sapien
gtcttaggaaagcagacgtgaattttcttcagc

SEQ ID NO: 690412 - DNA, 33 bp, Homo sapien
gtcttaggaaagcagatgtgaattttcttcagc

SEQ ID NO: 690413 - DNA, 33 bp, Homo sapien
caagcccactttcaacaccatgctctcagaaat

SEQ ID NO: 690414 - DNA, 33 bp, Homo sapien
caagcccactttcaactccatgctctcagaaat

SEQ ID NO: 690415 - DNA, 33 bp, Homo sapien
ggcactcactgtggtccgaagttacaggtctcc

SEQ ID NO: 690416 - DNA, 33 bp, Homo sapien
ggcactcactgtggtctgaagttacaggtctcc

SEQ ID NO: 690417 - DNA, 33 bp, Homo sapien
aattctagttggtatccatgcaaagacattaga

SEQ ID NO: 690418 - DNA, 33 bp, Homo sapien
aattctagttggtatcgatgcaaagacattaga

SEQ ID NO: 690419 - DNA, 33 bp, Homo sapien
atacaaaaaagcttcacagaggttgaacgactt

SEQ ID NO: 690420 - DNA, 33 bp, Homo sapien
atacaaaaaagcttcatagaggttgaacgactt

SEQ ID NO: 690421 - DNA, 33 bp, Homo sapien
gcccaacacacactagacactaaatacattctt

SEQ ID NO: 690422 - DNA, 33 bp, Homo sapien
gcccaacacacactaggcactaaatacattctt

SEQ ID NO: 690423 - DNA, 33 bp, Homo sapien
gaaaggcctgttttgaggttatgaatgatggat

SEQ ID NO: 690424 - DNA, 33 bp, Homo sapien
gaaaggcctgttttgatgttatgaatgatggat

SEQ ID NO: 690425 - DNA, 33 bp, Homo sapien
ccagggggtgatccataaactcctctgatggcg

SEQ ID NO: 690426 - DNA, 33 bp, Homo sapien
ccagggggtgatccatgaactcctctgatggcg

SEQ ID NO: 690427 - DNA, 33 bp, Homo sapien
attatactgtattttaagttagagcggattaga

SEQ ID NO: 690428 - DNA, 33 bp, Homo sapien
attatactgtattttaggttagagcggattaga

SEQ ID NO: 690429 - DNA, 33 bp, Homo sapien
atcccaaatttgtagaggaagctggcagctgaa

SEQ ID NO: 690430 - DNA, 33 bp, Homo sapien
atcccaaatttgtagatgaagctggcagctgaa

SEQ ID NO: 690431 - DNA, 33 bp, Homo sapien
accatactatgcataccattttgctaactaagt

SEQ ID NO: 690432 - DNA, 33 bp, Homo sapien
accatactatgcatactattttgctaactaagt

SEQ ID NO: 690433 - DNA, 33 bp, Homo sapien
aaagacgtatccacacagtcttccactgaaagg

SEQ ID NO: 690434 - DNA, 33 bp, Homo sapien
aaagacgtatccacacggtcttccactgaaagg

SEQ ID NO: 690435 - DNA, 33 bp, Homo sapien
attgaggaaggagaaaatgaacagatatgacca

SEQ ID NO: 690436 - DNA, 33 bp, Homo sapien
attgaggaaggagaaattgaacagatatgacca

SEQ ID NO: 690437 - DNA, 33 bp, Homo sapien
ctggagcccggagaaccaactggagtaagatac

SEQ ID NO: 690438 - DNA, 33 bp, Homo sapien
ctggagcccggagaacgaactggagtaagatac

SEQ ID NO: 690439 - DNA, 33 bp, Homo sapien
tagacaggtgagcaaccggaatgacatgactag

SEQ ID NO: 690440 - DNA, 33 bp, Homo sapien
tagacaggtgagcaactggaatgacatgactag

SEQ ID NO: 690441 - DNA, 33 bp, Homo sapien
tctctctcctatcagcaccccaactttcctcca

SEQ ID NO: 690442 - DNA, 33 bp, Homo sapien
tctctctcctatcagcgccccaactttcctcca

SEQ ID NO: 690443 - DNA, 33 bp, Homo sapien
gtggccacgtgaattacactatatttattctct

SEQ ID NO: 690444 - DNA, 33 bp, Homo sapien
gtggccacgtgaattatactatatttattctct

SEQ ID NO: 690445 - DNA, 33 bp, Homo sapien
aatgatgaaggatagaaaatggaatcctggcaa

SEQ ID NO: 690446 - DNA, 33 bp, Homo sapien
aatgatgaaggatagagaatggaatcctggcaa

SEQ ID NO: 690447 - DNA, 33 bp, Homo sapien
aggtatgagccttcacacccaaactgggacatt

SEQ ID NO: 690448 - DNA, 33 bp, Homo sapien
aggtatgagccttcacgcccaaactgggacatt

SEQ ID NO: 690449 - DNA, 33 bp, Homo sapien
ttctttacaccttgaaactgggctagacttaaa

SEQ ID NO: 690450 - DNA, 33 bp, Homo sapien
ttctttacaccttgaatctgggctagacttaaa

SEQ ID NO: 690451 - DNA, 33 bp, Homo sapien
aacttggttgttcatcacaattatctggggagt

SEQ ID NO: 690452 - DNA, 33 bp, Homo sapien
aacttggttgttcatcccaattatctggggagt

SEQ ID NO: 690453 - DNA, 33 bp, Homo sapien
taaagagaatgatctgcaaaggtagaaagtgct

SEQ ID NO: 690454 - DNA, 33 bp, Homo sapien
taaagagaatgatctggaaaggtagaaagtgct

SEQ ID NO: 690455 - DNA, 33 bp, Homo sapien
ctcttgatgtgttccactatgtatgtgaaagct

SEQ ID NO: 690456 - DNA, 33 bp, Homo sapien
ctcttgatgtgttccattatgtatgtgaaagct

SEQ ID NO: 690457 - DNA, 33 bp, Homo sapien
catgaggattcaagaacagataacatcatcctt

SEQ ID NO: 690458 - DNA, 33 bp, Homo sapien
catgaggattcaagaatagataacatcatcctt

SEQ ID NO: 690459 - DNA, 33 bp, Homo sapien
atgtaggagtctgtgcagaaagaggtacataga

SEQ ID NO: 690460 - DNA, 33 bp, Homo sapien
atgtaggagtctgtgcggaaagaggtacataga

SEQ ID NO: 690461 - DNA, 33 bp, Homo sapien
tttcgtgtcccctcgaatcactacatcctatca

SEQ ID NO: 690462 - DNA, 33 bp, Homo sapien
tttcgtgtcccctcgagtcactacatcctatca

SEQ ID NO: 690463 - DNA, 33 bp, Homo sapien
catcacttcattcacccggattcaatgcagtac

SEQ ID NO: 690464 - DNA, 33 bp, Homo sapien
catcacttcattcacctggattcaatgcagtac

SEQ ID NO: 690465 - DNA, 33 bp, Homo sapien
agtcatggaattactacaggaaatcaacaagtc

SEQ ID NO: 690466 - DNA, 33 bp, Homo sapien
agtcatggaattactataggaaatcaacaagtc

SEQ ID NO: 690467 - DNA, 33 bp, Homo sapien
tttagaaatgtatgtagcgaaagctttaaaagc

SEQ ID NO: 690468 - DNA, 33 bp, Homo sapien
tttagaaatgtatgtatcgaaagctttaaaagc

SEQ ID NO: 690469 - DNA, 33 bp, Homo sapien
atctgaggaaatactacatatgcacgcacaagt

SEQ ID NO: 690470 - DNA, 33 bp, Homo sapien
atctgaggaaatactatatatgcacgcacaagt

SEQ ID NO: 690471 - DNA, 33 bp, Homo sapien
ataggtaatgggtatactaacagccacttcacc

SEQ ID NO: 690472 - DNA, 33 bp, Homo sapien
ataggtaatgggtatagtaacagccacttcacc

SEQ ID NO: 690473 - DNA, 33 bp, Homo sapien
gagtccatctgtgacaccaatgagtttacagac

SEQ ID NO: 690474 - DNA, 33 bp, Homo sapien
gagtccatctgtgacatcaatgagtttacagac

SEQ ID NO: 690475 - DNA, 33 bp, Homo sapien
ctcacccagttgctcaataactagaaacacatg

SEQ ID NO: 690476 - DNA, 33 bp, Homo sapien
ctcacccagttgctcagtaactagaaacacatg

SEQ ID NO: 690477 - DNA, 33 bp, Homo sapien
cataaaaagtcactaaaaatttccataataaac

SEQ ID NO: 690478 - DNA, 33 bp, Homo sapien
cataaaaagtcactaacaatttccataataaac

SEQ ID NO: 690479 - DNA, 33 bp, Homo sapien
agaaataagaaaaacactgaagatgataggaag

SEQ ID NO: 690480 - DNA, 33 bp, Homo sapien
agaaataagaaaaacattgaagatgataggaag

SEQ ID NO: 690481 - DNA, 33 bp, Homo sapien
caccttaagaaacataactgcaagcccacccac

SEQ ID NO: 690482 - DNA, 33 bp, Homo sapien
caccttaagaaacatagctgcaagcccacccac

SEQ ID NO: 690483 - DNA, 33 bp, Homo sapien
cctggaactaaattcacctgaaggtacaaccaa

SEQ ID NO: 690484 - DNA, 33 bp, Homo sapien
cctggaactaaattcatctgaaggtacaaccaa

SEQ ID NO: 690485 - DNA, 33 bp, Homo sapien
ctattccagtctacacaataatagtggtttata

SEQ ID NO: 690486 - DNA, 33 bp, Homo sapien
ctattccagtctacaccataatagtggtttata

SEQ ID NO: 690487 - DNA, 33 bp, Homo sapien
agaaatgtggataccacgggcagttttttgaga

SEQ ID NO: 690488 - DNA, 33 bp, Homo sapien
agaaatgtggataccaggggcagttttttgaga

SEQ ID NO: 690489 - DNA, 33 bp, Homo sapien
tcctgctctgtggaaacgaaggaaagcaactgg

SEQ ID NO: 690490 - DNA, 33 bp, Homo sapien
tcctgctctgtggaaatgaaggaaagcaactgg

SEQ ID NO: 690491 - DNA, 33 bp, Homo sapien
gctgacacccctgtaaaaaaaggcagagcaaca

SEQ ID NO: 690492 - DNA, 33 bp, Homo sapien
gctgacacccctgtaagaaaaggcagagcaaca

SEQ ID NO: 690493 - DNA, 33 bp, Homo sapien
ttctcattaaagtttaagccacctgaagagttg

SEQ ID NO: 690494 - DNA, 33 bp, Homo sapien
ttctcattaaagtttatgccacctgaagagttg

SEQ ID NO: 690495 - DNA, 33 bp, Homo sapien
aagagatagaaataatcaaaaatggcaaagggt

SEQ ID NO: 690496 - DNA, 33 bp, Homo sapien
aagagatagaaataatgaaaaatggcaaagggt

SEQ ID NO: 690497 - DNA, 33 bp, Homo sapien
ctctggttagcaggacaatagatgatttttatt

SEQ ID NO: 690498 - DNA, 33 bp, Homo sapien
ctctggttagcaggacgatagatgatttttatt

SEQ ID NO: 690499 - DNA, 33 bp, Homo sapien
tgtatcttttgaacaacgactttcctcaattta

SEQ ID NO: 690500 - DNA, 33 bp, Homo sapien
tgtatcttttgaacaatgactttcctcaattta

SEQ ID NO: 690501 - DNA, 33 bp, Homo sapien
taactttggcttcctgaagaacttgaattgaaa

SEQ ID NO: 690502 - DNA, 33 bp, Homo sapien
taactttggcttcctggagaacttgaattgaaa

SEQ ID NO: 690503 - DNA, 33 bp, Homo sapien
tttctgtctgtgtcccaacaaaccctaaactaa

SEQ ID NO: 690504 - DNA, 33 bp, Homo sapien
tttctgtctgtgtccccacaaaccctaaactaa

SEQ ID NO: 690505 - DNA, 33 bp, Homo sapien
ctgaatcctgtaggggccatgtggaggaggctg

SEQ ID NO: 690506 - DNA, 33 bp, Homo sapien
ctgaatcctgtaggggtcatgtggaggaggctg

SEQ ID NO: 690507 - DNA, 33 bp, Homo sapien
gcagctaagtttcagaaatgttggggagtagat

SEQ ID NO: 690508 - DNA, 33 bp, Homo sapien
gcagctaagtttcagagatgttggggagtagat

SEQ ID NO: 690509 - DNA, 33 bp, Homo sapien
gcaatatggagaatgacaaaatccctgcaagtg

SEQ ID NO: 690510 - DNA, 33 bp, Homo sapien
gcaatatggagaatgataaaatccctgcaagtg

SEQ ID NO: 690511 - DNA, 33 bp, Homo sapien
ggtcttgtgcccggaaaacttttcagctctcag

SEQ ID NO: 690512 - DNA, 33 bp, Homo sapien
ggtcttgtgcccggaagacttttcagctctcag

SEQ ID NO: 690513 - DNA, 33 bp, Homo sapien
tccagacagcttttcacggctttgattgctgga

SEQ ID NO: 690514 - DNA, 33 bp, Homo sapien
tccagacagcttttcatggctttgattgctgga

SEQ ID NO: 690515 - DNA, 33 bp, Homo sapien
tgtgattttcttaaacccatgtatggacataaa

SEQ ID NO: 690516 - DNA, 33 bp, Homo sapien
tgtgattttcttaaactcatgtatggacataaa

SEQ ID NO: 690517 - DNA, 33 bp, Homo sapien
taaagaactctataaaaggcactgaatgttgag

SEQ ID NO: 690518 - DNA, 33 bp, Homo sapien
taaagaactctataaacggcactgaatgttgag

SEQ ID NO: 690519 - DNA, 33 bp, Homo sapien
agacagatggtgcagaatcaggaagatttcttc

SEQ ID NO: 690520 - DNA, 33 bp, Homo sapien
agacagatggtgcagagtcaggaagatttcttc

SEQ ID NO: 690521 - DNA, 33 bp, Homo sapien
agttgtacatacatggccagacatattcataaa

SEQ ID NO: 690522 - DNA, 33 bp, Homo sapien
agttgtacatacatggtcagacatattcataaa

SEQ ID NO: 690523 - DNA, 33 bp, Homo sapien
atggggacacttcgccaagaggagcaaattaaa

SEQ ID NO: 690524 - DNA, 33 bp, Homo sapien
atggggacacttcgccgagaggagcaaattaaa

SEQ ID NO: 690525 - DNA, 33 bp, Homo sapien
cctacaacacgttgagaattcaagatgagattt

SEQ ID NO: 690526 - DNA, 33 bp, Homo sapien
cctacaacacgttgagcattcaagatgagattt

SEQ ID NO: 690527 - DNA, 33 bp, Homo sapien
caaggtggggcctgaaagtcagcacttaatgta

SEQ ID NO: 690528 - DNA, 33 bp, Homo sapien
caaggtggggcctgaatgtcagcacttaatgta

SEQ ID NO: 690529 - DNA, 33 bp, Homo sapien
atccaaaggctggcaggctactgtacaaggaag

SEQ ID NO: 690530 - DNA, 33 bp, Homo sapien
atccaaaggctggcagtctactgtacaaggaag

SEQ ID NO: 690531 - DNA, 33 bp, Homo sapien
ttccaaagagattgtacagcattgttatttctt

SEQ ID NO: 690532 - DNA, 33 bp, Homo sapien
ttccaaagagattgtatagcattgttatttctt

SEQ ID NO: 690533 - DNA, 33 bp, Homo sapien
aattaccacaaatccaacttttgctatccttgt

SEQ ID NO: 690534 - DNA, 33 bp, Homo sapien
aattaccacaaatccagcttttgctatccttgt

SEQ ID NO: 690535 - DNA, 33 bp, Homo sapien
aacttcaactaggctcaaaagaccattttatct

SEQ ID NO: 690536 - DNA, 33 bp, Homo sapien
aacttcaactaggctctaaagaccattttatct

SEQ ID NO: 690537 - DNA, 33 bp, Homo sapien
gaactgctgaactgctcacggtgtaaaggtgta

SEQ ID NO: 690538 - DNA, 33 bp, Homo sapien
gaactgctgaactgcttacggtgtaaaggtgta

SEQ ID NO: 690539 - DNA, 33 bp, Homo sapien
ttagtgcagataccaacagatacctgggaacat

SEQ ID NO: 690540 - DNA, 33 bp, Homo sapien
ttagtgcagataccaatagatacctgggaacat

SEQ ID NO: 690541 - DNA, 33 bp, Homo sapien
tcatgatgaattttccaatacttactaaggaaa

SEQ ID NO: 690542 - DNA, 33 bp, Homo sapien
tcatgatgaattttccgatacttactaaggaaa

SEQ ID NO: 690543 - DNA, 33 bp, Homo sapien
tgggattctggaaacacgttgaatgtgaagaca

SEQ ID NO: 690544 - DNA, 33 bp, Homo sapien
tgggattctggaaacaggttgaatgtgaagaca

SEQ ID NO: 690545 - DNA, 33 bp, Homo sapien
aagctgagatgggaaactgtgatgtcttcatta

SEQ ID NO: 690546 - DNA, 33 bp, Homo sapien
aagctgagatgggaaagtgtgatgtcttcatta

SEQ ID NO: 690547 - DNA, 33 bp, Homo sapien
aaccattctctggaaacgtaaacttccaaaatg

SEQ ID NO: 690548 - DNA, 33 bp, Homo sapien
aaccattctctggaaatgtaaacttccaaaatg

SEQ ID NO: 690549 - DNA, 33 bp, Homo sapien
cacagacaagaagtaacgcacctgggtggaggg

SEQ ID NO: 690550 - DNA, 33 bp, Homo sapien
cacagacaagaagtaatgcacctgggtggaggg

SEQ ID NO: 690551 - DNA, 33 bp, Homo sapien
gaaagatcatctcttccaggcctacatccttgt

SEQ ID NO: 690552 - DNA, 33 bp, Homo sapien
gaaagatcatctcttctaggcctacatccttgt

SEQ ID NO: 690553 - DNA, 33 bp, Homo sapien
agccaggtccatgaccacctctggaagcttgaa

SEQ ID NO: 690554 - DNA, 33 bp, Homo sapien
agccaggtccatgaccgcctctggaagcttgaa

SEQ ID NO: 690555 - DNA, 33 bp, Homo sapien
caatattcagtctccaaaaagcaaagtcataac

SEQ ID NO: 690556 - DNA, 33 bp, Homo sapien
caatattcagtctccagaaagcaaagtcataac

SEQ ID NO: 690557 - DNA, 33 bp, Homo sapien
tatcaaagtctgtttaaagtccatagtgtaccc

SEQ ID NO: 690558 - DNA, 33 bp, Homo sapien
tatcaaagtctgtttagagtccatagtgtaccc

SEQ ID NO: 690559 - DNA, 33 bp, Homo sapien
ttatggtgaagagctcacggggtctctggcatt

SEQ ID NO: 690560 - DNA, 33 bp, Homo sapien
ttatggtgaagagctcgcggggtctctggcatt

SEQ ID NO: 690561 - DNA, 33 bp, Homo sapien
tattggccaacaaaaacgtcttcaagatttaag

SEQ ID NO: 690562 - DNA, 33 bp, Homo sapien
tattggccaacaaaaatgtcttcaagatttaag

SEQ ID NO: 690563 - DNA, 33 bp, Homo sapien
agtgctaccagtttacacaaaatccaggcaaag

SEQ ID NO: 690564 - DNA, 33 bp, Homo sapien
agtgctaccagtttacgcaaaatccaggcaaag

SEQ ID NO: 690565 - DNA, 33 bp, Homo sapien
gtctcttgaattgccaaccgtatctctttgttg

SEQ ID NO: 690566 - DNA, 33 bp, Homo sapien
gtctcttgaattgccagccgtatctctttgttg

SEQ ID NO: 690567 - DNA, 33 bp, Homo sapien
cttgttcaccttctcaaattatctcaaccactc

SEQ ID NO: 690568 - DNA, 33 bp, Homo sapien
cttgttcaccttctcagattatctcaaccactc

SEQ ID NO: 690569 - DNA, 33 bp, Homo sapien
gactctaagttttttgcaagtcagtagtgtaac

SEQ ID NO: 690570 - DNA, 33 bp, Homo sapien
gactctaagttttttgtaagtcagtagtgtaac

SEQ ID NO: 690571 - DNA, 33 bp, Homo sapien
ggtcttatctctttacactgaggcattggagaa

SEQ ID NO: 690572 - DNA, 33 bp, Homo sapien
ggtcttatctctttacgctgaggcattggagaa

SEQ ID NO: 690573 - DNA, 33 bp, Homo sapien
tgtcttttccaatgaccgctttcaaccattctc

SEQ ID NO: 690574 - DNA, 33 bp, Homo sapien
tgtcttttccaatgactgctttcaaccattctc

SEQ ID NO: 690575 - DNA, 33 bp, Homo sapien
attgagacaggaatacaaaggtcttagaggcat

SEQ ID NO: 690576 - DNA, 33 bp, Homo sapien
attgagacaggaatacgaaggtcttagaggcat

SEQ ID NO: 690577 - DNA, 33 bp, Homo sapien
taaagcaaataaaatcaccatgcaaaagaccaa

SEQ ID NO: 690578 - DNA, 33 bp, Homo sapien
taaagcaaataaaatcgccatgcaaaagaccaa

SEQ ID NO: 690579 - DNA, 33 bp, Homo sapien
actgatcctatccagccaagatgactcattgga

SEQ ID NO: 690580 - DNA, 33 bp, Homo sapien
actgatcctatccagctaagatgactcattgga

SEQ ID NO: 690581 - DNA, 33 bp, Homo sapien
ttatcatagggttagaactgatgatcacagggg

SEQ ID NO: 690582 - DNA, 33 bp, Homo sapien
ttatcatagggttagagctgatgatcacagggg

SEQ ID NO: 690583 - DNA, 33 bp, Homo sapien
aaccctatgataacaacggctaccatgtattgt

SEQ ID NO: 690584 - DNA, 33 bp, Homo sapien
aaccctatgataacaatggctaccatgtattgt

SEQ ID NO: 690585 - DNA, 33 bp, Homo sapien
gcttcggctctgccccaagttgctccgggtgtg

SEQ ID NO: 690586 - DNA, 33 bp, Homo sapien
gcttcggctctgccccgagttgctccgggtgtg

SEQ ID NO: 690587 - DNA, 33 bp, Homo sapien
acattcccatcaggtacatcactggaaaagtaa

SEQ ID NO: 690588 - DNA, 33 bp, Homo sapien
acattcccatcaggtatatcactggaaaagtaa

SEQ ID NO: 690589 - DNA, 33 bp, Homo sapien
ttgtttcccttaatgcaccaaggaaagcagtac

SEQ ID NO: 690590 - DNA, 33 bp, Homo sapien
ttgtttcccttaatgccccaaggaaagcagtac

SEQ ID NO: 690591 - DNA, 33 bp, Homo sapien
cagtaggtgcccagtgaatactgaatatacaag

SEQ ID NO: 690592 - DNA, 33 bp, Homo sapien
cagtaggtgcccagtggatactgaatatacaag

SEQ ID NO: 690593 - DNA, 33 bp, Homo sapien
atatgatgaaggtactaagctaactgaggttag

SEQ ID NO: 690594 - DNA, 33 bp, Homo sapien
atatgatgaaggtactgagctaactgaggttag

SEQ ID NO: 690595 - DNA, 33 bp, Homo sapien
gtcattataaagactgcagcattctgaaagttt

SEQ ID NO: 690596 - DNA, 33 bp, Homo sapien
gtcattataaagactgtagcattctgaaagttt

SEQ ID NO: 690597 - DNA, 33 bp, Homo sapien
gaatcaatgtattccaactcaaactttcagaat

SEQ ID NO: 690598 - DNA, 33 bp, Homo sapien
gaatcaatgtattccagctcaaactttcagaat

SEQ ID NO: 690599 - DNA, 33 bp, Homo sapien
caagtagaacactgtacgtttagtatcttgaaa

SEQ ID NO: 690600 - DNA, 33 bp, Homo sapien
caagtagaacactgtatgtttagtatcttgaaa

SEQ ID NO: 690601 - DNA, 33 bp, Homo sapien
tacttgtattatcctacatttgaccacagatag

SEQ ID NO: 690602 - DNA, 33 bp, Homo sapien
tacttgtattatcctatatttgaccacagatag

SEQ ID NO: 690603 - DNA, 33 bp, Homo sapien
tcttgttgcccagaaactgaggatttacttaga

SEQ ID NO: 690604 - DNA, 33 bp, Homo sapien
tcttgttgcccagaaagtgaggatttacttaga

SEQ ID NO: 690605 - DNA, 33 bp, Homo sapien
ccaagagacatgaaaaccaatggtagtgcctga

SEQ ID NO: 690606 - DNA, 33 bp, Homo sapien
ccaagagacatgaaaatcaatggtagtgcctga

SEQ ID NO: 690607 - DNA, 33 bp, Homo sapien
atttaaatggacagaaaagtttcaagaagagca

SEQ ID NO: 690608 - DNA, 33 bp, Homo sapien
atttaaatggacagaagagtttcaagaagagca

SEQ ID NO: 690609 - DNA, 33 bp, Homo sapien
aatataagttctaagaagacatggagtatgctt

SEQ ID NO: 690610 - DNA, 33 bp, Homo sapien
aatataagttctaagaggacatggagtatgctt

SEQ ID NO: 690611 - DNA, 33 bp, Homo sapien
taacttgccaatgtaacaagttagtgtcaaagc

SEQ ID NO: 690612 - DNA, 33 bp, Homo sapien
taacttgccaatgtaataagttagtgtcaaagc

SEQ ID NO: 690613 - DNA, 33 bp, Homo sapien
agatatatttagaaggaagaattgattaagact

SEQ ID NO: 690614 - DNA, 33 bp, Homo sapien
agatatatttagaaggtagaattgattaagact

SEQ ID NO: 690615 - DNA, 33 bp, Homo sapien
tttctcaacattggcaccattgatatttgaggc

SEQ ID NO: 690616 - DNA, 33 bp, Homo sapien
tttctcaacattggcatcattgatatttgaggc

SEQ ID NO: 690617 - DNA, 33 bp, Homo sapien
aaaaaaagtctccatccattgtcaaaaagtgtg

SEQ ID NO: 690618 - DNA, 33 bp, Homo sapien
aaaaaaagtctccatctattgtcaaaaagtgtg

SEQ ID NO: 690619 - DNA, 33 bp, Homo sapien
aacacattctcaaggcaatgagactcctttgac

SEQ ID NO: 690620 - DNA, 33 bp, Homo sapien
aacacattctcaaggcgatgagactcctttgac

SEQ ID NO: 690621 - DNA, 33 bp, Homo sapien
tccaaaatggctaggaaacagtagtgataggtt

SEQ ID NO: 690622 - DNA, 33 bp, Homo sapien
tccaaaatggctaggatacagtagtgataggtt

SEQ ID NO: 690623 - DNA, 33 bp, Homo sapien
attctcagcctcttacccccattccactgcgat

SEQ ID NO: 690624 - DNA, 33 bp, Homo sapien
attctcagcctcttactcccattccactgcgat

SEQ ID NO: 690625 - DNA, 33 bp, Homo sapien
atgaaaacaaacaagacggttacagattgctaa

SEQ ID NO: 690626 - DNA, 33 bp, Homo sapien
atgaaaacaaacaagatggttacagattgctaa

SEQ ID NO: 690627 - DNA, 33 bp, Homo sapien
gccaaggaattgcaagaccacattatgtagcag

SEQ ID NO: 690628 - DNA, 33 bp, Homo sapien
gccaaggaattgcaaggccacattatgtagcag

SEQ ID NO: 690629 - DNA, 33 bp, Homo sapien
caggaaaggcttactgaagtcaggtgtcgcaat

SEQ ID NO: 690630 - DNA, 33 bp, Homo sapien
caggaaaggcttactgcagtcaggtgtcgcaat

SEQ ID NO: 690631 - DNA, 33 bp, Homo sapien
cctccatgtagcagccaaaatgccctttctaaa

SEQ ID NO: 690632 - DNA, 33 bp, Homo sapien
cctccatgtagcagccgaaatgccctttctaaa

SEQ ID NO: 690633 - DNA, 33 bp, Homo sapien
tagccagactagggcactagaaatgaagcgtta

SEQ ID NO: 690634 - DNA, 33 bp, Homo sapien
tagccagactagggcattagaaatgaagcgtta

SEQ ID NO: 690635 - DNA, 33 bp, Homo sapien
ttccttttactaagtacaaatgtccagcataca

SEQ ID NO: 690636 - DNA, 33 bp, Homo sapien
ttccttttactaagtataaatgtccagcataca

SEQ ID NO: 690637 - DNA, 33 bp, Homo sapien
gaggactgggagtgaacgaacaggtgtcacaga

SEQ ID NO: 690638 - DNA, 33 bp, Homo sapien
gaggactgggagtgaaggaacaggtgtcacaga

SEQ ID NO: 690639 - DNA, 33 bp, Homo sapien
aagttcaccaagactcaaatttctatccaaaaa

SEQ ID NO: 690640 - DNA, 33 bp, Homo sapien
aagttcaccaagactcgaatttctatccaaaaa

SEQ ID NO: 690641 - DNA, 33 bp, Homo sapien
gactgaatggcacccaatggcaaaatgtagtat

SEQ ID NO: 690642 - DNA, 33 bp, Homo sapien
gactgaatggcacccagtggcaaaatgtagtat

SEQ ID NO: 690643 - DNA, 33 bp, Homo sapien
tacccccaatgtctaacgtgggacaatctgatc

SEQ ID NO: 690644 - DNA, 33 bp, Homo sapien
tacccccaatgtctaatgtgggacaatctgatc

SEQ ID NO: 690645 - DNA, 33 bp, Homo sapien
cacaaatgtattgcacggctgcgtttggttgtt

SEQ ID NO: 690646 - DNA, 33 bp, Homo sapien
cacaaatgtattgcactgctgcgtttggttgtt

SEQ ID NO: 690647 - DNA, 33 bp, Homo sapien
gataaatgtcatgaacagcatagtggaagggca

SEQ ID NO: 690648 - DNA, 33 bp, Homo sapien
gataaatgtcatgaacggcatagtggaagggca

SEQ ID NO: 690649 - DNA, 33 bp, Homo sapien
agcttctggtgttatccgagtgctttggtttga

SEQ ID NO: 690650 - DNA, 33 bp, Homo sapien
agcttctggtgttatctgagtgctttggtttga

SEQ ID NO: 690651 - DNA, 33 bp, Homo sapien
atattttctttggagcacttaccattgtctgga

SEQ ID NO: 690652 - DNA, 33 bp, Homo sapien
atattttctttggagcgcttaccattgtctgga

SEQ ID NO: 690653 - DNA, 33 bp, Homo sapien
gtctcctaaacacagaaggttgccatgaagata

SEQ ID NO: 690654 - DNA, 33 bp, Homo sapien
gtctcctaaacacagagggttgccatgaagata

SEQ ID NO: 690655 - DNA, 33 bp, Homo sapien
tatatatcttggagccacctgctttttgatctt

SEQ ID NO: 690656 - DNA, 33 bp, Homo sapien
tatatatcttggagccgcctgctttttgatctt

SEQ ID NO: 690657 - DNA, 33 bp, Homo sapien
agtagcctgcttttcaataaagacatggagata

SEQ ID NO: 690658 - DNA, 33 bp, Homo sapien
agtagcctgcttttcagtaaagacatggagata

SEQ ID NO: 690659 - DNA, 33 bp, Homo sapien
cattgcaacacagaataagaagtgacaagacag

SEQ ID NO: 690660 - DNA, 33 bp, Homo sapien
cattgcaacacagaatgagaagtgacaagacag

SEQ ID NO: 690661 - DNA, 33 bp, Homo sapien
acgaggttcagggcaactgacttctttagactt

SEQ ID NO: 690662 - DNA, 33 bp, Homo sapien
acgaggttcagggcaagtgacttctttagactt

SEQ ID NO: 690663 - DNA, 33 bp, Homo sapien
agcagtgtgagaacataatacagtcacccttgg

SEQ ID NO: 690664 - DNA, 33 bp, Homo sapien
agcagtgtgagaacatgatacagtcacccttgg

SEQ ID NO: 690665 - DNA, 33 bp, Homo sapien
ttgttgacaagcttaaacacagctatataaaga

SEQ ID NO: 690666 - DNA, 33 bp, Homo sapien
ttgttgacaagcttaatcacagctatataaaga

SEQ ID NO: 690667 - DNA, 33 bp, Homo sapien
tcagggaagtcttatcaatcataacagtagcta

SEQ ID NO: 690668 - DNA, 33 bp, Homo sapien
tcagggaagtcttatcgatcataacagtagcta

SEQ ID NO: 690669 - DNA, 33 bp, Homo sapien
tacattcaaaattcatcacactgaaggaaggga

SEQ ID NO: 690670 - DNA, 33 bp, Homo sapien
tacattcaaaattcatgacactgaaggaaggga

SEQ ID NO: 690671 - DNA, 33 bp, Homo sapien
gaattctatgtcttccacctctcttgatcctag

SEQ ID NO: 690672 - DNA, 33 bp, Homo sapien
gaattctatgtcttccgcctctcttgatcctag

SEQ ID NO: 690673 - DNA, 33 bp, Homo sapien
caaattgcctggtctacatgggtaattttacat

SEQ ID NO: 690674 - DNA, 33 bp, Homo sapien
caaattgcctggtctagatgggtaattttacat

SEQ ID NO: 690675 - DNA, 33 bp, Homo sapien
atggctactgtaccccaatgcaattactgggta

SEQ ID NO: 690676 - DNA, 33 bp, Homo sapien
atggctactgtaccccgatgcaattactgggta

SEQ ID NO: 690677 - DNA, 33 bp, Homo sapien
ttgaatatattatgacaatttggaaactccttt

SEQ ID NO: 690678 - DNA, 33 bp, Homo sapien
ttgaatatattatgactatttggaaactccttt

SEQ ID NO: 690679 - DNA, 33 bp, Homo sapien
acagtccactccactaaatataaaacagaatgt

SEQ ID NO: 690680 - DNA, 33 bp, Homo sapien
acagtccactccactagatataaaacagaatgt

SEQ ID NO: 690681 - DNA, 33 bp, Homo sapien
tcaaagcaaagcaatcactccattaattataaa

SEQ ID NO: 690682 - DNA, 33 bp, Homo sapien
tcaaagcaaagcaatcgctccattaattataaa

SEQ ID NO: 690683 - DNA, 33 bp, Homo sapien
tgtagatgacaatgaaacctttgagcggtggca

SEQ ID NO: 690684 - DNA, 33 bp, Homo sapien
tgtagatgacaatgaagcctttgagcggtggca

SEQ ID NO: 690685 - DNA, 33 bp, Homo sapien
attaattcatccaaaaatagtgttctagggacc

SEQ ID NO: 690686 - DNA, 33 bp, Homo sapien
attaattcatccaaaattagtgttctagggacc

SEQ ID NO: 690687 - DNA, 33 bp, Homo sapien
tcctctgtggacccagaaaggaaagaaaaacca

SEQ ID NO: 690688 - DNA, 33 bp, Homo sapien
tcctctgtggacccaggaaggaaagaaaaacca

SEQ ID NO: 690689 - DNA, 33 bp, Homo sapien
agagtaccagctttaaatctaggtaaaactaat

SEQ ID NO: 690690 - DNA, 33 bp, Homo sapien
agagtaccagctttaagtctaggtaaaactaat

SEQ ID NO: 690691 - DNA, 33 bp, Homo sapien
tttgcaccgaaatcaacggcagcagatttctat

SEQ ID NO: 690692 - DNA, 33 bp, Homo sapien
tttgcaccgaaatcaatggcagcagatttctat

SEQ ID NO: 690693 - DNA, 33 bp, Homo sapien
taatggattaactttcaatattttccttactta

SEQ ID NO: 690694 - DNA, 33 bp, Homo sapien
taatggattaactttctatattttccttactta

SEQ ID NO: 690695 - DNA, 33 bp, Homo sapien
tccagctgcctccttacgggccatttttggact

SEQ ID NO: 690696 - DNA, 33 bp, Homo sapien
tccagctgcctccttatgggccatttttggact

SEQ ID NO: 690697 - DNA, 33 bp, Homo sapien
tagaatgataactgccaaaagatgcttgtgtcc

SEQ ID NO: 690698 - DNA, 33 bp, Homo sapien
tagaatgataactgccgaaagatgcttgtgtcc

SEQ ID NO: 690699 - DNA, 33 bp, Homo sapien
gggggttcaagctggaaaactcaggtaagagga

SEQ ID NO: 690700 - DNA, 33 bp, Homo sapien
gggggttcaagctggagaactcaggtaagagga

SEQ ID NO: 690701 - DNA, 33 bp, Homo sapien
tcctctttttccctccagagcatctacgcatca

SEQ ID NO: 690702 - DNA, 33 bp, Homo sapien
tcctctttttccctccggagcatctacgcatca

SEQ ID NO: 690703 - DNA, 33 bp, Homo sapien
cactcacatagagagaggatcagccaaccactc

SEQ ID NO: 690704 - DNA, 33 bp, Homo sapien
cactcacatagagagatgatcagccaaccactc

SEQ ID NO: 690705 - DNA, 33 bp, Homo sapien
caggaacactacagtaaaagttcaaaaatctgg

SEQ ID NO: 690706 - DNA, 33 bp, Homo sapien
caggaacactacagtagaagttcaaaaatctgg

SEQ ID NO: 690707 - DNA, 33 bp, Homo sapien
attttagagacagagacggtggggagcaaagct

SEQ ID NO: 690708 - DNA, 33 bp, Homo sapien
attttagagacagagatggtggggagcaaagct

SEQ ID NO: 690709 - DNA, 33 bp, Homo sapien
aactttatccttgaacagaatctggaaaactct

SEQ ID NO: 690710 - DNA, 33 bp, Homo sapien
aactttatccttgaaccgaatctggaaaactct

SEQ ID NO: 690711 - DNA, 33 bp, Homo sapien
acactctgtgttggcaaaactgaacattgtatc

SEQ ID NO: 690712 - DNA, 33 bp, Homo sapien
acactctgtgttggcagaactgaacattgtatc

SEQ ID NO: 690713 - DNA, 33 bp, Homo sapien
ttatatgtatccactgcaattttgtttactgat

SEQ ID NO: 690714 - DNA, 33 bp, Homo sapien
ttatatgtatccactggaattttgtttactgat

SEQ ID NO: 690715 - DNA, 33 bp, Homo sapien
atcaaatcacatcttacatacagcagtcagaga

SEQ ID NO: 690716 - DNA, 33 bp, Homo sapien
atcaaatcacatcttatatacagcagtcagaga

SEQ ID NO: 690717 - DNA, 33 bp, Homo sapien
ctaggccagaggacacagggcaaccacacagga

SEQ ID NO: 690718 - DNA, 33 bp, Homo sapien
ctaggccagaggacacggggcaaccacacagga

SEQ ID NO: 690719 - DNA, 33 bp, Homo sapien
caggacagagtccatggagttttgcttatacca

SEQ ID NO: 690720 - DNA, 33 bp, Homo sapien
caggacagagtccatgtagttttgcttatacca

SEQ ID NO: 690721 - DNA, 33 bp, Homo sapien
attctcaaagcaaaaaactgggcacatgctgac

SEQ ID NO: 690722 - DNA, 33 bp, Homo sapien
attctcaaagcaaaaatctgggcacatgctgac

SEQ ID NO: 690723 - DNA, 33 bp, Homo sapien
gtctcccaggaaggaaatgctgagcacttttta

SEQ ID NO: 690724 - DNA, 33 bp, Homo sapien
gtctcccaggaaggaactgctgagcacttttta

SEQ ID NO: 690725 - DNA, 33 bp, Homo sapien
cgttttatgtttgaaacgtgtacttacagaaca

SEQ ID NO: 690726 - DNA, 33 bp, Homo sapien
cgttttatgtttgaaatgtgtacttacagaaca

SEQ ID NO: 690727 - DNA, 33 bp, Homo sapien
acagtgtctggccataacaagtgctcagtgatc

SEQ ID NO: 690728 - DNA, 33 bp, Homo sapien
acagtgtctggccatagcaagtgctcagtgatc

SEQ ID NO: 690729 - DNA, 33 bp, Homo sapien
gcagaatgggtagtgccgacatgaatcctggct

SEQ ID NO: 690730 - DNA, 33 bp, Homo sapien
gcagaatgggtagtgcggacatgaatcctggct

SEQ ID NO: 690731 - DNA, 33 bp, Homo sapien
tccgtctgatgtgcaacgcatcctcagagtccc

SEQ ID NO: 690732 - DNA, 33 bp, Homo sapien
tccgtctgatgtgcaatgcatcctcagagtccc

SEQ ID NO: 690733 - DNA, 33 bp, Homo sapien
gctgtccccgctagcaaaggccagatctgagca

SEQ ID NO: 690734 - DNA, 33 bp, Homo sapien
gctgtccccgctagcagaggccagatctgagca

SEQ ID NO: 690735 - DNA, 33 bp, Homo sapien
tccacttaccactaaagaaattctgggaaagtt

SEQ ID NO: 690736 - DNA, 33 bp, Homo sapien
tccacttaccactaaataaattctgggaaagtt

SEQ ID NO: 690737 - DNA, 33 bp, Homo sapien
ttaacaccatcaaaccaacctgccatcactctg

SEQ ID NO: 690738 - DNA, 33 bp, Homo sapien
ttaacaccatcaaaccgacctgccatcactctg

SEQ ID NO: 690739 - DNA, 33 bp, Homo sapien
ttcagttatacctcaacagacttggcgaaaaag

SEQ ID NO: 690740 - DNA, 33 bp, Homo sapien
ttcagttatacctcaagagacttggcgaaaaag

SEQ ID NO: 690741 - DNA, 33 bp, Homo sapien
agagcatatggacatcaaccatctccagccatc

SEQ ID NO: 690742 - DNA, 33 bp, Homo sapien
agagcatatggacatcgaccatctccagccatc

SEQ ID NO: 690743 - DNA, 33 bp, Homo sapien
tttatcacagagaaaacctgacgtagacatata

SEQ ID NO: 690744 - DNA, 33 bp, Homo sapien
tttatcacagagaaaatctgacgtagacatata

SEQ ID NO: 690745 - DNA, 33 bp, Homo sapien
ctcataagcacaggataaggttgttctctgaca

SEQ ID NO: 690746 - DNA, 33 bp, Homo sapien
ctcataagcacaggatgaggttgttctctgaca

SEQ ID NO: 690747 - DNA, 33 bp, Homo sapien
tttactcatagagtgaccaaattaattatagtc

SEQ ID NO: 690748 - DNA, 33 bp, Homo sapien
tttactcatagagtgatcaaattaattatagtc

SEQ ID NO: 690749 - DNA, 33 bp, Homo sapien
gtccattttgtgttgaataccaaaaactgggta

SEQ ID NO: 690750 - DNA, 33 bp, Homo sapien
gtccattttgtgttgagtaccaaaaactgggta

SEQ ID NO: 690751 - DNA, 33 bp, Homo sapien
gtcatggttccttccaacaattatatattccca

SEQ ID NO: 690752 - DNA, 33 bp, Homo sapien
gtcatggttccttccagcaattatatattccca

SEQ ID NO: 690753 - DNA, 33 bp, Homo sapien
ggaacagatttccacccaccacaacaatgttac

SEQ ID NO: 690754 - DNA, 33 bp, Homo sapien
ggaacagatttccacctaccacaacaatgttac

SEQ ID NO: 690755 - DNA, 33 bp, Homo sapien
ggggtggacgttttgcaataaacctgaaccctc

SEQ ID NO: 690756 - DNA, 33 bp, Homo sapien
ggggtggacgttttgctataaacctgaaccctc

SEQ ID NO: 690757 - DNA, 33 bp, Homo sapien
aagttggcaagagttcacatgctagccagtgct

SEQ ID NO: 690758 - DNA, 33 bp, Homo sapien
aagttggcaagagttcgcatgctagccagtgct

SEQ ID NO: 690759 - DNA, 33 bp, Homo sapien
aaacagaagagctatcactgactttgcagtaag

SEQ ID NO: 690760 - DNA, 33 bp, Homo sapien
aaacagaagagctatcgctgactttgcagtaag

SEQ ID NO: 690761 - DNA, 33 bp, Homo sapien
gcctcaactgaactcaacaaagctttaaaatca

SEQ ID NO: 690762 - DNA, 33 bp, Homo sapien
gcctcaactgaactcagcaaagctttaaaatca

SEQ ID NO: 690763 - DNA, 33 bp, Homo sapien
gccccacgcccgctgacacatgatgagtttatg

SEQ ID NO: 690764 - DNA, 33 bp, Homo sapien
gccccacgcccgctgagacatgatgagtttatg

SEQ ID NO: 690765 - DNA, 33 bp, Homo sapien
tgccagcctggccacaatccagtggtatcctgc

SEQ ID NO: 690766 - DNA, 33 bp, Homo sapien
tgccagcctggccacactccagtggtatcctgc

SEQ ID NO: 690767 - DNA, 33 bp, Homo sapien
catctaaggaggacagacactctgcaagctact

SEQ ID NO: 690768 - DNA, 33 bp, Homo sapien
catctaaggaggacaggcactctgcaagctact

SEQ ID NO: 690769 - DNA, 33 bp, Homo sapien
gtgaaccactgatatgcatgcagtctgtttgta

SEQ ID NO: 690770 - DNA, 33 bp, Homo sapien
gtgaaccactgatatggatgcagtctgtttgta

SEQ ID NO: 690771 - DNA, 33 bp, Homo sapien
cgccaaccagatttgccgaaattattgagaaga

SEQ ID NO: 690772 - DNA, 33 bp, Homo sapien
cgccaaccagatttgctgaaattattgagaaga

SEQ ID NO: 690773 - DNA, 33 bp, Homo sapien
tggtgcgattgtgcacacctctatttgcagcta

SEQ ID NO: 690774 - DNA, 33 bp, Homo sapien
tggtgcgattgtgcacgcctctatttgcagcta

SEQ ID NO: 690775 - DNA, 33 bp, Homo sapien
cctggcctagactccacattcttattaaaattt

SEQ ID NO: 690776 - DNA, 33 bp, Homo sapien
cctggcctagactccatattcttattaaaattt

SEQ ID NO: 690777 - DNA, 33 bp, Homo sapien
ggttgcttagaagttacagtacaagagagtggg

SEQ ID NO: 690778 - DNA, 33 bp, Homo sapien
ggttgcttagaagttatagtacaagagagtggg

SEQ ID NO: 690779 - DNA, 33 bp, Homo sapien
aggtcagtgtatatcaaagaaacacaggcagtt

SEQ ID NO: 690780 - DNA, 33 bp, Homo sapien
aggtcagtgtatatcagagaaacacaggcagtt

SEQ ID NO: 690781 - DNA, 33 bp, Homo sapien
gctgaactgagaaagagagtggagtttggtatt

SEQ ID NO: 690782 - DNA, 33 bp, Homo sapien
gctgaactgagaaagatagtggagtttggtatt

SEQ ID NO: 690783 - DNA, 33 bp, Homo sapien
ttaacaataaacttcaaccttagcataaaaata

SEQ ID NO: 690784 - DNA, 33 bp, Homo sapien
ttaacaataaacttcacccttagcataaaaata

SEQ ID NO: 690785 - DNA, 33 bp, Homo sapien
ttcaccctgcatcgataaggatgtcttcagacc

SEQ ID NO: 690786 - DNA, 33 bp, Homo sapien
ttcaccctgcatcgatgaggatgtcttcagacc

SEQ ID NO: 690787 - DNA, 33 bp, Homo sapien
aataaatattctgaaactgatatgtgggttagc

SEQ ID NO: 690788 - DNA, 33 bp, Homo sapien
aataaatattctgaaagtgatatgtgggttagc

SEQ ID NO: 690789 - DNA, 33 bp, Homo sapien
accaactggttgggaacggaatgttagtatgat

SEQ ID NO: 690790 - DNA, 33 bp, Homo sapien
accaactggttgggaatggaatgttagtatgat

SEQ ID NO: 690791 - DNA, 33 bp, Homo sapien
gtggacatcaaagaagacttcccagagagcagg

SEQ ID NO: 690792 - DNA, 33 bp, Homo sapien
gtggacatcaaagaaggcttcccagagagcagg

SEQ ID NO: 690793 - DNA, 33 bp, Homo sapien
cagatgtttccattggcatggtgtcttgccatc

SEQ ID NO: 690794 - DNA, 33 bp, Homo sapien
cagatgtttccattggtatggtgtcttgccatc

SEQ ID NO: 690795 - DNA, 33 bp, Homo sapien
atctcctgattctcagactactatactcttttc

SEQ ID NO: 690796 - DNA, 33 bp, Homo sapien
atctcctgattctcaggctactatactcttttc

SEQ ID NO: 690797 - DNA, 33 bp, Homo sapien
gttttaagactttgaactacctcaagaagagga

SEQ ID NO: 690798 - DNA, 33 bp, Homo sapien
gttttaagactttgaattacctcaagaagagga

SEQ ID NO: 690799 - DNA, 33 bp, Homo sapien; identical to SEQ ID NO: 690797

SEQ ID NO: 690800 - DNA, 33 bp, Homo sapien; identical to SEQ ID NO: 690798

SEQ ID NO: 690801 - DNA, 33 bp, Homo sapien
aatgcctgtatttgaaaaagttgggtctattca

SEQ ID NO: 690802 - DNA, 33 bp, Homo sapien
aatgcctgtatttgaacaagttgggtctattca

SEQ ID NO: 690803 - DNA, 33 bp, Homo sapien
ggaatcatgtgtgccaaatttagctgttgctga

SEQ ID NO: 690804 - DNA, 33 bp, Homo sapien
ggaatcatgtgtgccagatttagctgttgctga

SEQ ID NO: 690805 - DNA, 33 bp, Homo sapien
gagaactcaaccaagcagcaaggtagagcctaa

SEQ ID NO: 690806 - DNA, 33 bp, Homo sapien
gagaactcaaccaagccgcaaggtagagcctaa

SEQ ID NO: 690807 - DNA, 33 bp, Homo sapien
aaggaaaatgagactcacagtaagccatcccag

SEQ ID NO: 690808 - DNA, 33 bp, Homo sapien
aaggaaaatgagactcccagtaagccatcccag

SEQ ID NO: 690809 - DNA, 33 bp, Homo sapien
agctgttctttctcaactctgtgctgctctctt

SEQ ID NO: 690810 - DNA, 33 bp, Homo sapien
agctgttctttctcaattctgtgctgctctctt

SEQ ID NO: 690811 - DNA, 33 bp, Homo sapien
ccactcagcagaaccacgccatgaaagcccagc

SEQ ID NO: 690812 - DNA, 33 bp, Homo sapien
ccactcagcagaaccatgccatgaaagcccagc

SEQ ID NO: 690813 - DNA, 33 bp, Homo sapien
cttgcctttcctgggacgttttcttcaaataaa

SEQ ID NO: 690814 - DNA, 33 bp, Homo sapien
cttgcctttcctgggatgttttcttcaaataaa

SEQ ID NO: 690815 - DNA, 33 bp, Homo sapien
catacaaacagaatcacgtgggatgcattctct

SEQ ID NO: 690816 - DNA, 33 bp, Homo sapien
catacaaacagaatcatgtgggatgcattctct

SEQ ID NO: 690817 - DNA, 33 bp, Homo sapien
gcaaaacaattctaataagaccagtagctagga

SEQ ID NO: 690818 - DNA, 33 bp, Homo sapien
gcaaaacaattctaatgagaccagtagctagga

SEQ ID NO: 690819 - DNA, 33 bp, Homo sapien
gggtgctagacatgccaattaactcctttcctc

SEQ ID NO: 690820 - DNA, 33 bp, Homo sapien
gggtgctagacatgccgattaactcctttcctc

SEQ ID NO: 690821 - DNA, 33 bp, Homo sapien
caactatttattgatccccacggtcaagttcaa

SEQ ID NO: 690822 - DNA, 33 bp, Homo sapien
caactatttattgatctccacggtcaagttcaa

SEQ ID NO: 690823 - DNA, 33 bp, Homo sapien
ggtggaagttttcatacatacacctgcccacgc

SEQ ID NO: 690824 - DNA, 33 bp, Homo sapien
ggtggaagttttcatatatacacctgcccacgc

SEQ ID NO: 690825 - DNA, 33 bp, Homo sapien
ttagtaaaactttgaaactacgagaatcaagga

SEQ ID NO: 690826 - DNA, 33 bp, Homo sapien
ttagtaaaactttgaatctacgagaatcaagga

SEQ ID NO: 690827 - DNA, 33 bp, Homo sapien
acccggcaaattccacaggagcaagagttagca

SEQ ID NO: 690828 - DNA, 33 bp, Homo sapien
acccggcaaattccacgggagcaagagttagca

SEQ ID NO: 690829 - DNA, 33 bp, Homo sapien
gtatcttcaacagggcaagaggaagagatggag

SEQ ID NO: 690830 - DNA, 33 bp, Homo sapien
gtatcttcaacagggcgagaggaagagatggag

SEQ ID NO: 690831 - DNA, 33 bp, Homo sapien
tgcttgaggtgagccccgaccaaatgcaagcct

SEQ ID NO: 690832 - DNA, 33 bp, Homo sapien
tgcttgaggtgagccctgaccaaatgcaagcct

SEQ ID NO: 690833 - DNA, 33 bp, Homo sapien
agaaaacacgtgttaacgtcacaacacaaagcc

SEQ ID NO: 690834 - DNA, 33 bp, Homo sapien
agaaaacacgtgttaaggtcacaacacaaagcc

SEQ ID NO: 690835 - DNA, 33 bp, Homo sapien
gatgacacagctggaacgtaactgcaccgctca

SEQ ID NO: 690836 - DNA, 33 bp, Homo sapien
gatgacacagctggaatgtaactgcaccgctca

SEQ ID NO: 690837 - DNA, 33 bp, Homo sapien
tcagctaagaggaacaaactatctcattcactc

SEQ ID NO: 690838 - DNA, 33 bp, Homo sapien
tcagctaagaggaacagactatctcattcactc

SEQ ID NO: 690839 - DNA, 33 bp, Homo sapien
tgttgaatgaatgagtaacacaatgtctaccta

SEQ ID NO: 690840 - DNA, 33 bp, Homo sapien
tgttgaatgaatgagtgacacaatgtctaccta

SEQ ID NO: 690841 - DNA, 33 bp, Homo sapien
caccatcactcttaccccagttaccaccacagc

SEQ ID NO: 690842 - DNA, 33 bp, Homo sapien
caccatcactcttacctcagttaccaccacagc

SEQ ID NO: 690843 - DNA, 33 bp, Homo sapien
acctgtagatctaatgaacatgataacagtagc

SEQ ID NO: 690844 - DNA, 33 bp, Homo sapien
acctgtagatctaatggacatgataacagtagc

SEQ ID NO: 690845 - DNA, 33 bp, Homo sapien
ggtaccactgaggagacagggaagtggaggaat

SEQ ID NO: 690846 - DNA, 33 bp, Homo sapien
ggtaccactgaggagagagggaagtggaggaat

SEQ ID NO: 690847 - DNA, 33 bp, Homo sapien
ttactgctgaaattgactatttccatctgaggg

SEQ ID NO: 690848 - DNA, 33 bp, Homo sapien
ttactgctgaaattgattatttccatctgaggg

SEQ ID NO: 690849 - DNA, 33 bp, Homo sapien
tgcctggagaactgaccgagctatctaatacgg

SEQ ID NO: 690850 - DNA, 33 bp, Homo sapien
tgcctggagaactgactgagctatctaatacgg

SEQ ID NO: 690851 - DNA, 33 bp, Homo sapien
atctgcaccccttccccaggagtcagtgtatgc

SEQ ID NO: 690852 - DNA, 33 bp, Homo sapien
atctgcaccccttccctaggagtcagtgtatgc

SEQ ID NO: 690853 - DNA, 33 bp, Homo sapien
ctttggagaaggcataaggagctgtgctatcta

SEQ ID NO: 690854 - DNA, 33 bp, Homo sapien
ctttggagaaggcatagggagctgtgctatcta

SEQ ID NO: 690855 - DNA, 33 bp, Homo sapien
tgctgaccccgaagcacggtcaaggtagcaatt

SEQ ID NO: 690856 - DNA, 33 bp, Homo sapien
tgctgaccccgaagcatggtcaaggtagcaatt

SEQ ID NO: 690857 - DNA, 33 bp, Homo sapien
ggccaagtagaggaaaagatcactggagataag

SEQ ID NO: 690858 - DNA, 33 bp, Homo sapien
ggccaagtagaggaaatgatcactggagataag

SEQ ID NO: 690859 - DNA, 33 bp, Homo sapien
gctttccccattacttgttgcgattaccacgat

SEQ ID NO: 690860 - DNA, 33 bp, Homo sapien
gctttccccattactttttgcgattaccacgat

SEQ ID NO: 690861 - DNA, 33 bp, Homo sapien
gtgtgcagttctttgacctttaggttctattcc

SEQ ID NO: 690862 - DNA, 33 bp, Homo sapien
gtgtgcagttctttgatctttaggttctattcc

SEQ ID NO: 690863 - DNA, 33 bp, Homo sapien
aagtgctctgaaaattaaaaggacaattcacac

SEQ ID NO: 690864 - DNA, 33 bp, Homo sapien
aagtgctctgaaaattgaaaggacaattcacac

SEQ ID NO: 690865 - DNA, 33 bp, Homo sapien
caaaatcagcagcattcaaaactagaccaagac

SEQ ID NO: 690866 - DNA, 33 bp, Homo sapien
caaaatcagcagcattgaaaactagaccaagac

SEQ ID NO: 690867 - DNA, 33 bp, Homo sapien
tcctaaagatccaacaaacagatcttaggatga

SEQ ID NO: 690868 - DNA, 33 bp, Homo sapien
tcctaaagatccaacagacagatcttaggatga

SEQ ID NO: 690869 - DNA, 33 bp, Homo sapien
gaagctgccaagctcaagtataaggagtcgaat

SEQ ID NO: 690870 - DNA, 33 bp, Homo sapien
gaagctgccaagctcaggtataaggagtcgaat

SEQ ID NO: 690871 - DNA, 33 bp, Homo sapien
tgctagccagtcaaaaagtacatttccctgatc

SEQ ID NO: 690872 - DNA, 33 bp, Homo sapien
tgctagccagtcaaaacgtacatttccctgatc

SEQ ID NO: 690873 - DNA, 33 bp, Homo sapien
gggctttctggttgcaccctgagtaaccagaat

SEQ ID NO: 690874 - DNA, 33 bp, Homo sapien
gggctttctggttgcatcctgagtaaccagaat

SEQ ID NO: 690875 - DNA, 33 bp, Homo sapien
aagctacatctgtgatgacaggaattagaagca

SEQ ID NO: 690876 - DNA, 33 bp, Homo sapien
aagctacatctgtgattacaggaattagaagca

SEQ ID NO: 690877 - DNA, 33 bp, Homo sapien
acggactggctcttagcccaaaagtgaaaacaa

SEQ ID NO: 690878 - DNA, 33 bp, Homo sapien
acggactggctcttaggccaaaagtgaaaacaa

SEQ ID NO: 690879 - DNA, 33 bp, Homo sapien
caaatgactcaatagacgctgtgaaacaagcta

SEQ ID NO: 690880 - DNA, 33 bp, Homo sapien
caaatgactcaatagatgctgtgaaacaagcta

SEQ ID NO: 690881 - DNA, 33 bp, Homo sapien
gagattctggaggtaaagtagtttctcattact

SEQ ID NO: 690882 - DNA, 33 bp, Homo sapien
gagattctggaggtaaggtagtttctcattact

SEQ ID NO: 690883 - DNA, 33 bp, Homo sapien
caagatcaattgataaatgcttattgttcagaa

SEQ ID NO: 690884 - DNA, 33 bp, Homo sapien
caagatcaattgataactgcttattgttcagaa

SEQ ID NO: 690885 - DNA, 33 bp, Homo sapien
tacttactgaactaaacacaatgaataatgcca

SEQ ID NO: 690886 - DNA, 33 bp, Homo sapien
tacttactgaactaaatacaatgaataatgcca

SEQ ID NO: 690887 - DNA, 33 bp, Homo sapien
tccttatgcttgtctactaagctctctgatgag

SEQ ID NO: 690888 - DNA, 33 bp, Homo sapien
tccttatgcttgtctattaagctctctgatgag

SEQ ID NO: 690889 - DNA, 33 bp, Homo sapien
catagcatttagaatggattcctgagaaaacca

SEQ ID NO: 690890 - DNA, 33 bp, Homo sapien
catagcatttagaatgtattcctgagaaaacca

SEQ ID NO: 690891 - DNA, 33 bp, Homo sapien
aatagaaaatgctaacacaaataatccttcagc

SEQ ID NO: 690892 - DNA, 33 bp, Homo sapien
aatagaaaatgctaacgcaaataatccttcagc

SEQ ID NO: 690893 - DNA, 33 bp, Homo sapien
acatttttattggtgaaagaccattccagccat

SEQ ID NO: 690894 - DNA, 33 bp, Homo sapien
acatttttattggtgagagaccattccagccat

SEQ ID NO: 690895 - DNA, 33 bp, Homo sapien
gaatacttggagaaatcacaagggaaaagaaaa

SEQ ID NO: 690896 - DNA, 33 bp, Homo sapien
gaatacttggagaaattacaagggaaaagaaaa

SEQ ID NO: 690897 - DNA, 33 bp, Homo sapien
tgttgtgactgccaacgaatagtcttttcctta

SEQ ID NO: 690898 - DNA, 33 bp, Homo sapien
tgttgtgactgccaactaatagtcttttcctta

SEQ ID NO: 690899 - DNA, 33 bp, Homo sapien
ataatctagtttggaccaaaaaagtatcacatg

SEQ ID NO: 690900 - DNA, 33 bp, Homo sapien
ataatctagtttggactaaaaaagtatcacatg

SEQ ID NO: 690901 - DNA, 33 bp, Homo sapien
tattttggagtgtagcacacctcatcatggatc

SEQ ID NO: 690902 - DNA, 33 bp, Homo sapien
tattttggagtgtagcgcacctcatcatggatc

SEQ ID NO: 690903 - DNA, 33 bp, Homo sapien
aggacattgcttgttacagtaggatacggtgga

SEQ ID NO: 690904 - DNA, 33 bp, Homo sapien
aggacattgcttgttatagtaggatacggtgga

SEQ ID NO: 690905 - DNA, 33 bp, Homo sapien
gtattttattattgcaacccaaatagactaaga

SEQ ID NO: 690906 - DNA, 33 bp, Homo sapien
gtattttattattgcagcccaaatagactaaga

SEQ ID NO: 690907 - DNA, 33 bp, Homo sapien
gagaagcaagtatgtaacccatgttgaagagta

SEQ ID NO: 690908 - DNA, 33 bp, Homo sapien
gagaagcaagtatgtatcccatgttgaagagta

SEQ ID NO: 690909 - DNA, 33 bp, Homo sapien
aacaatgaatggagtacggaagaatccagtaca

SEQ ID NO: 690910 - DNA, 33 bp, Homo sapien
aacaatgaatggagtatggaagaatccagtaca

SEQ ID NO: 690911 - DNA, 33 bp, Homo sapien
tgaagccatagacaaaccaactggatgaaaaaa

SEQ ID NO: 690912 - DNA, 33 bp, Homo sapien
tgaagccatagacaaagcaactggatgaaaaaa

SEQ ID NO: 690913 - DNA, 33 bp, Homo sapien
tgatgatacagttggtaaattcatgagttactc

SEQ ID NO: 690914 - DNA, 33 bp, Homo sapien
tgatgatacagttggtgaattcatgagttactc

SEQ ID NO: 690915 - DNA, 33 bp, Homo sapien
ggactggactaaattgaacagataatatgtaca

SEQ ID NO: 690916 - DNA, 33 bp, Homo sapien
ggactggactaaattggacagataatatgtaca

SEQ ID NO: 690917 - DNA, 33 bp, Homo sapien
ccagtcttcaagttccaagattacttcctcagc

SEQ ID NO: 690918 - DNA, 33 bp, Homo sapien
ccagtcttcaagttccgagattacttcctcagc

SEQ ID NO: 690919 - DNA, 33 bp, Homo sapien
actccctcctcatctcacttgagccttaatata

SEQ ID NO: 690920 - DNA, 33 bp, Homo sapien
actccctcctcatctcgcttgagccttaatata

SEQ ID NO: 690921 - DNA, 33 bp, Homo sapien
gattctttctggtaggaatcctgatgaacagtg

SEQ ID NO: 690922 - DNA, 33 bp, Homo sapien
gattctttctggtagggatcctgatgaacagtg

SEQ ID NO: 690923 - DNA, 33 bp, Homo sapien
aagatagatacgcccgaataattcgctttggtc

SEQ ID NO: 690924 - DNA, 33 bp, Homo sapien
aagatagatacgcccgtataattcgctttggtc

SEQ ID NO: 690925 - DNA, 33 bp, Homo sapien
actgtaaactggtgaccagaaggatagatcaca

SEQ ID NO: 690926 - DNA, 33 bp, Homo sapien
actgtaaactggtgactagaaggatagatcaca

SEQ ID NO: 690927 - DNA, 33 bp, Homo sapien
gtattacaggtcagaaccaaaggaaatacagta

SEQ ID NO: 690928 - DNA, 33 bp, Homo sapien
gtattacaggtcagaatcaaaggaaatacagta

SEQ ID NO: 690929 - DNA, 33 bp, Homo sapien
ccccataacgtagggccatgtatgccgtactaa

SEQ ID NO: 690930 - DNA, 33 bp, Homo sapien
ccccataacgtagggctatgtatgccgtactaa

SEQ ID NO: 690931 - DNA, 33 bp, Homo sapien
ttgagagtccaaccaacgcttacttataatagt

SEQ ID NO: 690932 - DNA, 33 bp, Homo sapien
ttgagagtccaaccaatgcttacttataatagt

SEQ ID NO: 690933 - DNA, 33 bp, Homo sapien
ataatagcatcttaaccgaatggaggaataata

SEQ ID NO: 690934 - DNA, 33 bp, Homo sapien
ataatagcatcttaactgaatggaggaataata

SEQ ID NO: 690935 - DNA, 33 bp, Homo sapien
tactataaatatctaccggtcaaaaaagaactc

SEQ ID NO: 690936 - DNA, 33 bp, Homo sapien
tactataaatatctactggtcaaaaaagaactc

SEQ ID NO: 690937 - DNA, 33 bp, Homo sapien
tcaagaaaatcactcaataaatacagagcaaga

SEQ ID NO: 690938 - DNA, 33 bp, Homo sapien
tcaagaaaatcactcagtaaatacagagcaaga

SEQ ID NO: 690939 - DNA, 33 bp, Homo sapien
atatgcattgtaaaaaaggagcttagaaatcta

SEQ ID NO: 690940 - DNA, 33 bp, Homo sapien
atatgcattgtaaaaatggagcttagaaatcta

SEQ ID NO: 690941 - DNA, 33 bp, Homo sapien
tatgtggaacactttcaagtcttcttcaaattg

SEQ ID NO: 690942 - DNA, 33 bp, Homo sapien
tatgtggaacactttccagtcttcttcaaattg

SEQ ID NO: 690943 - DNA, 33 bp, Homo sapien
aagcaattgtgaatttcaaaagtgagggttagg

SEQ ID NO: 690944 - DNA, 33 bp, Homo sapien
aagcaattgtgaatttgaaaagtgagggttagg

SEQ ID NO: 690945 - DNA, 33 bp, Homo sapien
cacttgctagcaaaaacctagacatgaaatcca

SEQ ID NO: 690946 - DNA, 33 bp, Homo sapien
cacttgctagcaaaaatctagacatgaaatcca

SEQ ID NO: 690947 - DNA, 33 bp, Homo sapien
tccctatctacaatgaagctcaagaagttacat

SEQ ID NO: 690948 - DNA, 33 bp, Homo sapien
tccctatctacaatgaggctcaagaagttacat

SEQ ID NO: 690949 - DNA, 33 bp, Homo sapien
ccatgcagtcttcggacgagtatttattgagtg

SEQ ID NO: 690950 - DNA, 33 bp, Homo sapien
ccatgcagtcttcggatgagtatttattgagtg

SEQ ID NO: 690951 - DNA, 33 bp, Homo sapien
tgtcctccttcaaagaaagagaagttgagctga

SEQ ID NO: 690952 - DNA, 33 bp, Homo sapien
tgtcctccttcaaagatagagaagttgagctga

SEQ ID NO: 690953 - DNA, 33 bp, Homo sapien
caagtgttcctatagacaagaaaaatggagatt

SEQ ID NO: 690954 - DNA, 33 bp, Homo sapien
caagtgttcctatagagaagaaaaatggagatt

SEQ ID NO: 690955 - DNA, 33 bp, Homo sapien
agactgtaaagggaataaaatgagaaaatgctt

SEQ ID NO: 690956 - DNA, 33 bp, Homo sapien
agactgtaaagggaatgaaatgagaaaatgctt

SEQ ID NO: 690957 - DNA, 33 bp, Homo sapien
caacatacattagagaactagaagattctgagt

SEQ ID NO: 690958 - DNA, 33 bp, Homo sapien
caacatacattagagagctagaagattctgagt

SEQ ID NO: 690959 - DNA, 33 bp, Homo sapien
tctagtcctcctcataacaattatatatggtct

SEQ ID NO: 690960 - DNA, 33 bp, Homo sapien
tctagtcctcctcatagcaattatatatggtct

SEQ ID NO: 690961 - DNA, 33 bp, Homo sapien
ttactttcaggcagtacggtcaacctccaatct

SEQ ID NO: 690962 - DNA, 33 bp, Homo sapien
ttactttcaggcagtatggtcaacctccaatct

SEQ ID NO: 690963 - DNA, 33 bp, Homo sapien
atttcacttcaccaacacgtttgccctgtatga

SEQ ID NO: 690964 - DNA, 33 bp, Homo sapien
atttcacttcaccaacccgtttgccctgtatga

SEQ ID NO: 690965 - DNA, 33 bp, Homo sapien
gtggagctaaggggtaaatcttgatagaccagc

SEQ ID NO: 690966 - DNA, 33 bp, Homo sapien
gtggagctaaggggtagatcttgatagaccagc

SEQ ID NO: 690967 - DNA, 33 bp, Homo sapien
gcactttgaggactatcactcacatttggaaaa

SEQ ID NO: 690968 - DNA, 33 bp, Homo sapien
gcactttgaggactattactcacatttggaaaa

SEQ ID NO: 690969 - DNA, 33 bp, Homo sapien
aaattctgggaaaatgaatgaggtttatcttcc

SEQ ID NO: 690970 - DNA, 33 bp, Homo sapien
aaattctgggaaaatggatgaggtttatcttcc

SEQ ID NO: 690971 - DNA, 33 bp, Homo sapien
tgctttgtgagattgcaaaagctgtctgagacc

SEQ ID NO: 690972 - DNA, 33 bp, Homo sapien
tgctttgtgagattgccaaagctgtctgagacc

SEQ ID NO: 690973 - DNA, 33 bp, Homo sapien
tgtgtgtacaaaaaaaattcggttcgcagatta

SEQ ID NO: 690974 - DNA, 33 bp, Homo sapien
tgtgtgtacaaaaaaatttcggttcgcagatta

SEQ ID NO: 690975 - DNA, 33 bp, Homo sapien
gaattctcatgtcttacaccagtgcccaccttg

SEQ ID NO: 690976 - DNA, 33 bp, Homo sapien
gaattctcatgtcttataccagtgcccaccttg

SEQ ID NO: 690977 - DNA, 33 bp, Homo sapien
atttcagaaagttggacatctcagagaactttc

SEQ ID NO: 690978 - DNA, 33 bp, Homo sapien
atttcagaaagttggagatctcagagaactttc

SEQ ID NO: 690979 - DNA, 33 bp, Homo sapien
actaatcattatacaaaacaaaaatgtatgctt

SEQ ID NO: 690980 - DNA, 33 bp, Homo sapien
actaatcattatacaagacaaaaatgtatgctt

SEQ ID NO: 690981 - DNA, 33 bp, Homo sapien
atatagcaggcaacaaagcagataagggccttg

SEQ ID NO: 690982 - DNA, 33 bp, Homo sapien
atatagcaggcaacaaggcagataagggccttg

SEQ ID NO: 690983 - DNA, 33 bp, Homo sapien
attgttatggaccaccaaataaagacatttgct

SEQ ID NO: 690984 - DNA, 33 bp, Homo sapien
attgttatggaccacccaataaagacatttgct

SEQ ID NO: 690985 - DNA, 33 bp, Homo sapien
aatgcaattttttccaaatgatgtattcttggt

SEQ ID NO: 690986 - DNA, 33 bp, Homo sapien
aatgcaattttttccacatgatgtattcttggt

SEQ ID NO: 690987 - DNA, 33 bp, Homo sapien
aagatatcacctcacagccactaattgactact

SEQ ID NO: 690988 - DNA, 33 bp, Homo sapien
aagatatcacctcacatccactaattgactact

SEQ ID NO: 690989 - DNA, 33 bp, Homo sapien
ctcccagcccgagacaaaagaggctctccaggg

SEQ ID NO: 690990 - DNA, 33 bp, Homo sapien
ctcccagcccgagacagaagaggctctccaggg

SEQ ID NO: 690991 - DNA, 33 bp, Homo sapien
gaacaaactaagatacagagaactatttgctcc

SEQ ID NO: 690992 - DNA, 33 bp, Homo sapien
gaacaaactaagataccgagaactatttgctcc

SEQ ID NO: 690993 - DNA, 33 bp, Homo sapien
tccaccattgggataactgataagattcagaga

SEQ ID NO: 690994 - DNA, 33 bp, Homo sapien
tccaccattgggataagtgataagattcagaga

SEQ ID NO: 690995 - DNA, 33 bp, Homo sapien
gaaaggagatgagaaaagttgcaggggcttata

SEQ ID NO: 690996 - DNA, 33 bp, Homo sapien
gaaaggagatgagaaaggttgcaggggcttata

SEQ ID NO: 690997 - DNA, 33 bp, Homo sapien
aggggcttatagaccacgtcaagaatttgggat

SEQ ID NO: 690998 - DNA, 33 bp, Homo sapien
aggggcttatagaccatgtcaagaatttgggat

SEQ ID NO: 690999 - DNA, 33 bp, Homo sapien
gaggtggggaccagagaagaatttatgtagggt

SEQ ID NO: 691000 - DNA, 33 bp, Homo sapien
gaggtggggaccagaggagaatttatgtagggt

SEQ ID NO: 691001 - DNA, 33 bp, Homo sapien
ttccccaacaaaaataccttggcaaattatgac

SEQ ID NO: 691002 - DNA, 33 bp, Homo sapien
ttccccaacaaaaatatcttggcaaattatgac

SEQ ID NO: 691003 - DNA, 33 bp, Homo sapien
caatgactgattgagacggaggtatataggcca

SEQ ID NO: 691004 - DNA, 33 bp, Homo sapien
caatgactgattgagatggaggtatataggcca

SEQ ID NO: 691005 - DNA, 33 bp, Homo sapien
ctttactgaagctctaaaaaaagatactgagag

SEQ ID NO: 691006 - DNA, 33 bp, Homo sapien
ctttactgaagctctagaaaaagatactgagag

SEQ ID NO: 691007 - DNA, 33 bp, Homo sapien
acccctggcctatagaacagagtaccagtgaaa

SEQ ID NO: 691008 - DNA, 33 bp, Homo sapien
acccctggcctatagagcagagtaccagtgaaa

SEQ ID NO: 691009 - DNA, 33 bp, Homo sapien
ctacagaggtcctagaaagcagacacagaggca

SEQ ID NO: 691010 - DNA, 33 bp, Homo sapien
ctacagaggtcctagagagcagacacagaggca

SEQ ID NO: 691011 - DNA, 33 bp, Homo sapien
gttctaccaaaaaaaaaccatacatttgtatgt

SEQ ID NO: 691012 - DNA, 33 bp, Homo sapien
gttctaccaaaaaaaacccatacatttgtatgt

SEQ ID NO: 691013 - DNA, 33 bp, Homo sapien
atattatttttgtctcactttccatggtagttt

SEQ ID NO: 691014 - DNA, 33 bp, Homo sapien
atattatttttgtctcgctttccatggtagttt

SEQ ID NO: 691015 - DNA, 33 bp, Homo sapien
attaaaatcacccgtcaaatctttactagctac

SEQ ID NO: 691016 - DNA, 33 bp, Homo sapien
attaaaatcacccgtcgaatctttactagctac

SEQ ID NO: 691017 - DNA, 33 bp, Homo sapien
ccagtttgttcacactccactgtatccctgccc

SEQ ID NO: 691018 - DNA, 33 bp, Homo sapien
ccagtttgttcacacttcactgtatccctgccc

SEQ ID NO: 691019 - DNA, 33 bp, Homo sapien
ccacttaaaagatacaaaactgaagaatgggta

SEQ ID NO: 691020 - DNA, 33 bp, Homo sapien
ccacttaaaagatacagaactgaagaatgggta

SEQ ID NO: 691021 - DNA, 33 bp, Homo sapien
gccagaactcgggggagcgtgcaaatatggggt

SEQ ID NO: 691022 - DNA, 33 bp, Homo sapien
gccagaactcgggggatcgtgcaaatatggggt

SEQ ID NO: 691023 - DNA, 33 bp, Homo sapien
tgtctgctgctgaaggaatcagctatttccctg

SEQ ID NO: 691024 - DNA, 33 bp, Homo sapien
tgtctgctgctgaagggatcagctatttccctg

SEQ ID NO: 691025 - DNA, 33 bp, Homo sapien
tgactagtgtcttcccaaaaaaagtaacttgtg

SEQ ID NO: 691026 - DNA, 33 bp, Homo sapien
tgactagtgtcttccccaaaaaagtaacttgtg

SEQ ID NO: 691027 - DNA, 33 bp, Homo sapien
gagggcagagccaagaaagatggaaggaacagg

SEQ ID NO: 691028 - DNA, 33 bp, Homo sapien
gagggcagagccaagacagatggaaggaacagg

SEQ ID NO: 691029 - DNA, 33 bp, Homo sapien
catgatcaccgtaacactaatgaagactacatt

SEQ ID NO: 691030 - DNA, 33 bp, Homo sapien
catgatcaccgtaacattaatgaagactacatt

SEQ ID NO: 691031 - DNA, 33 bp, Homo sapien
atggtgaagatcagagcaaattctttttgagct

SEQ ID NO: 691032 - DNA, 33 bp, Homo sapien
atggtgaagatcagagtaaattctttttgagct

SEQ ID NO: 691033 - DNA, 33 bp, Homo sapien
aagtgtggactaaactgagagttaacatctcct

SEQ ID NO: 691034 - DNA, 33 bp, Homo sapien
aagtgtggactaaacttagagttaacatctcct

SEQ ID NO: 691035 - DNA, 33 bp, Homo sapien
ttgtttttccaggaacaagaccatatttaccag

SEQ ID NO: 691036 - DNA, 33 bp, Homo sapien
ttgtttttccaggaacgagaccatatttaccag

SEQ ID NO: 691037 - DNA, 33 bp, Homo sapien
cacccacactaagggactcacggtgagaatact

SEQ ID NO: 691038 - DNA, 33 bp, Homo sapien
cacccacactaagggattcacggtgagaatact

SEQ ID NO: 691039 - DNA, 33 bp, Homo sapien
gtgggtccttcacagacaccgaagctctgcagt

SEQ ID NO: 691040 - DNA, 33 bp, Homo sapien
gtgggtccttcacagataccgaagctctgcagt

SEQ ID NO: 691041 - DNA, 33 bp, Homo sapien
gcttagctcattctataaaccagttacaaaata

SEQ ID NO: 691042 - DNA, 33 bp, Homo sapien
gcttagctcattctatgaaccagttacaaaata

SEQ ID NO: 691043 - DNA, 33 bp, Homo sapien
aataaggctgggacaaaaatcagactgctatgc

SEQ ID NO: 691044 - DNA, 33 bp, Homo sapien
aataaggctgggacaataatcagactgctatgc

SEQ ID NO: 691045 - DNA, 33 bp, Homo sapien
caagcagttttatggcagcatttgttcctgggt

SEQ ID NO: 691046 - DNA, 33 bp, Homo sapien
caagcagttttatggcggcatttgttcctgggt

SEQ ID NO: 691047 - DNA, 33 bp, Homo sapien
agaaaactgaggcttacagaaattaagtacacc

SEQ ID NO: 691048 - DNA, 33 bp, Homo sapien
agaaaactgaggcttagagaaattaagtacacc

SEQ ID NO: 691049 - DNA, 33 bp, Homo sapien
gaatgtggctatgttaagaagacaatctgtaag

SEQ ID NO: 691050 - DNA, 33 bp, Homo sapien
gaatgtggctatgttatgaagacaatctgtaag

SEQ ID NO: 691051 - DNA, 33 bp, Homo sapien
agaagtattttcccagaagatcaaggaaaccgt

SEQ ID NO: 691052 - DNA, 33 bp, Homo sapien
agaagtattttcccaggagatcaaggaaaccgt

SEQ ID NO: 691053 - DNA, 33 bp, Homo sapien
aaataggtaaagaaagccctctgatgaattgag

SEQ ID NO: 691054 - DNA, 33 bp, Homo sapien
aaataggtaaagaaagtcctctgatgaattgag

SEQ ID NO: 691055 - DNA, 33 bp, Homo sapien
tctcatcacctgcttacctacccatttattcat

SEQ ID NO: 691056 - DNA, 33 bp, Homo sapien
tctcatcacctgcttatctacccatttattcat

SEQ ID NO: 691057 - DNA, 33 bp, Homo sapien
gtacctaagttctcaaagggtgaatattattag

SEQ ID NO: 691058 - DNA, 33 bp, Homo sapien
gtacctaagttctcaaggggtgaatattattag

SEQ ID NO: 691059 - DNA, 33 bp, Homo sapien
caggttgggtaaaacaaatctgaacaaccatcc

SEQ ID NO: 691060 - DNA, 33 bp, Homo sapien
caggttgggtaaaacagatctgaacaaccatcc

SEQ ID NO: 691061 - DNA, 33 bp, Homo sapien
gtgcagatacagctaaaatcagcttcagaacaa

SEQ ID NO: 691062 - DNA, 33 bp, Homo sapien
gtgcagatacagctaagatcagcttcagaacaa

SEQ ID NO: 691063 - DNA, 33 bp, Homo sapien
tgaagatagaatggcaaataccctatcctatcc

SEQ ID NO: 691064 - DNA, 33 bp, Homo sapien
tgaagatagaatggcagataccctatcctatcc

SEQ ID NO: 691065 - DNA, 33 bp, Homo sapien
tttctattgaacattacggatctagagggtaag

SEQ ID NO: 691066 - DNA, 33 bp, Homo sapien
tttctattgaacattatggatctagagggtaag

SEQ ID NO: 691067 - DNA, 33 bp, Homo sapien
aggatgagctcgatacaaaagcagcgctgcgct

SEQ ID NO: 691068 - DNA, 33 bp, Homo sapien
aggatgagctcgataccaaagcagcgctgcgct

SEQ ID NO: 691069 - DNA, 33 bp, Homo sapien
ctcttatttgttggacccaaacaataacaatac

SEQ ID NO: 691070 - DNA, 33 bp, Homo sapien
ctcttatttgttggactcaaacaataacaatac

SEQ ID NO: 691071 - DNA, 33 bp, Homo sapien
tagatgctgcaggaagactagtggttgccagga

SEQ ID NO: 691072 - DNA, 33 bp, Homo sapien
tagatgctgcaggaagtctagtggttgccagga

SEQ ID NO: 691073 - DNA, 33 bp, Homo sapien
ctgagacagagattaacgtgaccaatttcacaa

SEQ ID NO: 691074 - DNA, 33 bp, Homo sapien
ctgagacagagattaatgtgaccaatttcacaa

SEQ ID NO: 691075 - DNA, 33 bp, Homo sapien
tgttagtttttcttgaatagcaccatctttaat

SEQ ID NO: 691076 - DNA, 33 bp, Homo sapien
tgttagtttttcttgagtagcaccatctttaat

SEQ ID NO: 691077 - DNA, 33 bp, Homo sapien
aatcaggtgtgtaaaagagcacaacgtgtttag

SEQ ID NO: 691078 - DNA, 33 bp, Homo sapien
aatcaggtgtgtaaaatagcacaacgtgtttag

SEQ ID NO: 691079 - DNA, 33 bp, Homo sapien
tcctcaggcagaagaaaaatgaatacaaattga

SEQ ID NO: 691080 - DNA, 33 bp, Homo sapien
tcctcaggcagaagaagaatgaatacaaattga

SEQ ID NO: 691081 - DNA, 33 bp, Homo sapien
gatagagacctgaccagaaaattggacttgaga

SEQ ID NO: 691082 - DNA, 33 bp, Homo sapien
gatagagacctgaccataaaattggacttgaga

SEQ ID NO: 691083 - DNA, 33 bp, Homo sapien
gagaatatttgaaaagcagttgtcagcctcttc

SEQ ID NO: 691084 - DNA, 33 bp, Homo sapien
gagaatatttgaaaaggagttgtcagcctcttc

SEQ ID NO: 691085 - DNA, 33 bp, Homo sapien
actgtcaattgctaacccagtttctgataagaa

SEQ ID NO: 691086 - DNA, 33 bp, Homo sapien
actgtcaattgctaactcagtttctgataagaa

SEQ ID NO: 691087 - DNA, 33 bp, Homo sapien
ctatggagtttaatgaaagtttagaagctgtgc

SEQ ID NO: 691088 - DNA, 33 bp, Homo sapien
ctatggagtttaatgagagtttagaagctgtgc

SEQ ID NO: 691089 - DNA, 33 bp, Homo sapien
agacgtggttgccaaactctgtccatctctaat

SEQ ID NO: 691090 - DNA, 33 bp, Homo sapien
agacgtggttgccaaagtctgtccatctctaat

SEQ ID NO: 691091 - DNA, 33 bp, Homo sapien
gtaaatgcactatgtacaggctagggaactttt

SEQ ID NO: 691092 - DNA, 33 bp, Homo sapien
gtaaatgcactatgtagaggctagggaactttt

SEQ ID NO: 691093 - DNA, 33 bp, Homo sapien
ttaaggaacaaggggcacagagtaaagccgatg

SEQ ID NO: 691094 - DNA, 33 bp, Homo sapien
ttaaggaacaaggggcgcagagtaaagccgatg

SEQ ID NO: 691095 - DNA, 33 bp, Homo sapien
tgattgaactaatttacgcttcatgatttttaa

SEQ ID NO: 691096 - DNA, 33 bp, Homo sapien
tgattgaactaatttatgcttcatgatttttaa

SEQ ID NO: 691097 - DNA, 33 bp, Homo sapien
ggacattgcaaattgaaggcatataaactgtaa

SEQ ID NO: 691098 - DNA, 33 bp, Homo sapien
ggacattgcaaattgatggcatataaactgtaa

SEQ ID NO: 691099 - DNA, 33 bp, Homo sapien
tagagtaaactagtcaaatgtgatttctgagca

SEQ ID NO: 691100 - DNA, 33 bp, Homo sapien
tagagtaaactagtcacatgtgatttctgagca

SEQ ID NO: 691101 - DNA, 33 bp, Homo sapien
ttcaatattccaaaatcaatcaatataatttac

SEQ ID NO: 691102 - DNA, 33 bp, Homo sapien
ttcaatattccaaaatgaatcaatataatttac

SEQ ID NO: 691103 - DNA, 33 bp, Homo sapien
attttctgtgtcatcaccataaccccacttgcg

SEQ ID NO: 691104 - DNA, 33 bp, Homo sapien
attttctgtgtcatcatcataaccccacttgcg

SEQ ID NO: 691105 - DNA, 33 bp, Homo sapien
atttgttcaatgaatacgttcttttggtcccac

SEQ ID NO: 691106 - DNA, 33 bp, Homo sapien
atttgttcaatgaatatgttcttttggtcccac

SEQ ID NO: 691107 - DNA, 33 bp, Homo sapien
agaggtatctggatcactgagctattgcatgga

SEQ ID NO: 691108 - DNA, 33 bp, Homo sapien
agaggtatctggatcattgagctattgcatgga

SEQ ID NO: 691109 - DNA, 33 bp, Homo sapien
aatccttccttggaaacaatgaaatacagagtc

SEQ ID NO: 691110 - DNA, 33 bp, Homo sapien
aatccttccttggaaataatgaaatacagagtc

SEQ ID NO: 691111 - DNA, 33 bp, Homo sapien
acagacttcctgcaaccggtaataagtaaagca

SEQ ID NO: 691112 - DNA, 33 bp, Homo sapien
acagacttcctgcaactggtaataagtaaagca

SEQ ID NO: 691113 - DNA, 33 bp, Homo sapien
aaagtgtaggcattccagcaaatggcagtgtgg

SEQ ID NO: 691114 - DNA, 33 bp, Homo sapien
aaagtgtaggcattccggcaaatggcagtgtgg

SEQ ID NO: 691115 - DNA, 33 bp, Homo sapien
tagtggtacgtgctacggaaaggaaaggaaggc

SEQ ID NO: 691116 - DNA, 33 bp, Homo sapien
tagtggtacgtgctactgaaaggaaaggaaggc

SEQ ID NO: 691117 - DNA, 33 bp, Homo sapien
cacgtaagtaaagacccgaagaagtgagaggat

SEQ ID NO: 691118 - DNA, 33 bp, Homo sapien
cacgtaagtaaagacctgaagaagtgagaggat

SEQ ID NO: 691119 - DNA, 33 bp, Homo sapien
gcacagagaagagcaaccgcaaggccctgacat

SEQ ID NO: 691120 - DNA, 33 bp, Homo sapien
gcacagagaagagcaagcgcaaggccctgacat

SEQ ID NO: 691121 - DNA, 33 bp, Homo sapien
tttttcaattatttgcagattccaactaggtgt

SEQ ID NO: 691122 - DNA, 33 bp, Homo sapien
tttttcaattatttgcggattccaactaggtgt

SEQ ID NO: 691123 - DNA, 33 bp, Homo sapien
gctaagagattcagataagataataaatgtgaa

SEQ ID NO: 691124 - DNA, 33 bp, Homo sapien
gctaagagattcagatgagataataaatgtgaa

SEQ ID NO: 691125 - DNA, 33 bp, Homo sapien
tgggtctggaggtgaacaaagctatctatatac

SEQ ID NO: 691126 - DNA, 33 bp, Homo sapien
tgggtctggaggtgaagaaagctatctatatac

SEQ ID NO: 691127 - DNA, 33 bp, Homo sapien
cctacgttttcttctacgatttttgtggtttta

SEQ ID NO: 691128 - DNA, 33 bp, Homo sapien
cctacgttttcttctaggatttttgtggtttta

SEQ ID NO: 691129 - DNA, 33 bp, Homo sapien
caggtgagtatctaaaagaagagcattccaagc

SEQ ID NO: 691130 - DNA, 33 bp, Homo sapien
caggtgagtatctaaaggaagagcattccaagc

SEQ ID NO: 691131 - DNA, 33 bp, Homo sapien
agtgactcctctttggaaccttctttgaacatt

SEQ ID NO: 691132 - DNA, 33 bp, Homo sapien
agtgactcctctttgggaccttctttgaacatt

SEQ ID NO: 691133 - DNA, 33 bp, Homo sapien
gtaagtagccaaaaaaggtgaaaaagtgctcaa

SEQ ID NO: 691134 - DNA, 33 bp, Homo sapien
gtaagtagccaaaaaatgtgaaaaagtgctcaa

SEQ ID NO: 691135 - DNA, 33 bp, Homo sapien
acctcactctccatcaaaagacaaagcaccctc

SEQ ID NO: 691136 - DNA, 33 bp, Homo sapien
acctcactctccatcagaagacaaagcaccctc

SEQ ID NO: 691137 - DNA, 33 bp, Homo sapien
acataaatataaactcccatgactgtcttattt

SEQ ID NO: 691138 - DNA, 33 bp, Homo sapien
acataaatataaactcgcatgactgtcttattt

SEQ ID NO: 691139 - DNA, 33 bp, Homo sapien
gtcaatctggggtaacacaaaaagaaggagtac

SEQ ID NO: 691140 - DNA, 33 bp, Homo sapien
gtcaatctggggtaacgcaaaaagaaggagtac

SEQ ID NO: 691141 - DNA, 33 bp, Homo sapien
gttacaaacaagtaccagagaagctagttaaaa

SEQ ID NO: 691142 - DNA, 33 bp, Homo sapien
gttacaaacaagtaccggagaagctagttaaaa

SEQ ID NO: 691143 - DNA, 33 bp, Homo sapien
ctacaacagttttcaactcaaccatgttgagga

SEQ ID NO: 691144 - DNA, 33 bp, Homo sapien
ctacaacagttttcaattcaaccatgttgagga

SEQ ID NO: 691145 - DNA, 33 bp, Homo sapien
gacagcttttcttaaacaccagtgtcccacaag

SEQ ID NO: 691146 - DNA, 33 bp, Homo sapien
gacagcttttcttaaataccagtgtcccacaag

SEQ ID NO: 691147 - DNA, 33 bp, Homo sapien
ttccctatggacagtcaaaaatgacaaggaact

SEQ ID NO: 691148 - DNA, 33 bp, Homo sapien
ttccctatggacagtcgaaaatgacaaggaact

SEQ ID NO: 691149 - DNA, 33 bp, Homo sapien
ttaacctacttgatcaatacaacctgttgaagg

SEQ ID NO: 691150 - DNA, 33 bp, Homo sapien
ttaacctacttgatcagtacaacctgttgaagg

SEQ ID NO: 691151 - DNA, 33 bp, Homo sapien
gtatatatgaacagtacctactctacaacccat

SEQ ID NO: 691152 - DNA, 33 bp, Homo sapien
gtatatatgaacagtatctactctacaacccat

SEQ ID NO: 691153 - DNA, 33 bp, Homo sapien
cagaagacttctgtgcgattatttacaggaaat

SEQ ID NO: 691154 - DNA, 33 bp, Homo sapien
cagaagacttctgtgctattatttacaggaaat

SEQ ID NO: 691155 - DNA, 33 bp, Homo sapien
gtaatacttaggaaaacaaaatgatagcatcag

SEQ ID NO: 691156 - DNA, 33 bp, Homo sapien
gtaatacttaggaaaagaaaatgatagcatcag

SEQ ID NO: 691157 - DNA, 33 bp, Homo sapien
ggacagaaaacaaggcgcaagcagtttcaaggg

SEQ ID NO: 691158 - DNA, 33 bp, Homo sapien
ggacagaaaacaaggctcaagcagtttcaaggg

SEQ ID NO: 691159 - DNA, 33 bp, Homo sapien
ttggtggggagctacaactttggtagaaatcaa

SEQ ID NO: 691160 - DNA, 33 bp, Homo sapien
ttggtggggagctacagctttggtagaaatcaa

SEQ ID NO: 691161 - DNA, 33 bp, Homo sapien
atatcagaaaagaacaatgatgtctgcaactct

SEQ ID NO: 691162 - DNA, 33 bp, Homo sapien
atatcagaaaagaacagtgatgtctgcaactct

SEQ ID NO: 691163 - DNA, 33 bp, Homo sapien
gcaggactccactgaaagatgatgcttgtttct

SEQ ID NO: 691164 - DNA, 33 bp, Homo sapien
gcaggactccactgaaggatgatgcttgtttct

SEQ ID NO: 691165 - DNA, 33 bp, Homo sapien
ttagtatttctacatcaactcttatcaacttct

SEQ ID NO: 691166 - DNA, 33 bp, Homo sapien
ttagtatttctacatccactcttatcaacttct

SEQ ID NO: 691167 - DNA, 33 bp, Homo sapien
cacagtccttagctcaatatatgtggtggttgt

SEQ ID NO: 691168 - DNA, 33 bp, Homo sapien
cacagtccttagctcagtatatgtggtggttgt

SEQ ID NO: 691169 - DNA, 33 bp, Homo sapien
acattccagttcaaaaattgagtagtccaagta

SEQ ID NO: 691170 - DNA, 33 bp, Homo sapien
acattccagttcaaaatttgagtagtccaagta

SEQ ID NO: 691171 - DNA, 33 bp, Homo sapien
tcctatttggcaaaaacagcacaatataagcag

SEQ ID NO: 691172 - DNA, 33 bp, Homo sapien
tcctatttggcaaaaagagcacaatataagcag

SEQ ID NO: 691173 - DNA, 33 bp, Homo sapien
gctgttcttggtatccaaaggcagtcagacctg

SEQ ID NO: 691174 - DNA, 33 bp, Homo sapien
gctgttcttggtatccgaaggcagtcagacctg

SEQ ID NO: 691175 - DNA, 33 bp, Homo sapien
ttacttatcattttctaaaattgaggacaaatg

SEQ ID NO: 691176 - DNA, 33 bp, Homo sapien
ttacttatcattttcttaaattgaggacaaatg

SEQ ID NO: 691177 - DNA, 33 bp, Homo sapien
cccacactcctttagaccaaaaccagctgccag

SEQ ID NO: 691178 - DNA, 33 bp, Homo sapien
cccacactcctttagagcaaaaccagctgccag

SEQ ID NO: 691179 - DNA, 33 bp, Homo sapien
gtggaaatgtgaagcacacaacttggtttcaaa

SEQ ID NO: 691180 - DNA, 33 bp, Homo sapien
gtggaaatgtgaagcagacaacttggtttcaaa

SEQ ID NO: 691181 - DNA, 33 bp, Homo sapien
ccagtggttcctgtacgagacaacacaactcta

SEQ ID NO: 691182 - DNA, 33 bp, Homo sapien
ccagtggttcctgtactagacaacacaactcta

SEQ ID NO: 691183 - DNA, 33 bp, Homo sapien
agtaagctttttagatcaatttattatggatga

SEQ ID NO: 691184 - DNA, 33 bp, Homo sapien
agtaagctttttagatgaatttattatggatga

SEQ ID NO: 691185 - DNA, 33 bp, Homo sapien
tgtataaagatgaccacggctgacaactggaaa

SEQ ID NO: 691186 - DNA, 33 bp, Homo sapien
tgtataaagatgaccatggctgacaactggaaa

SEQ ID NO: 691187 - DNA, 33 bp, Homo sapien
agtctaagagaagagaaataatgtctgattttt

SEQ ID NO: 691188 - DNA, 33 bp, Homo sapien
agtctaagagaagagagataatgtctgattttt

SEQ ID NO: 691189 - DNA, 33 bp, Homo sapien
gaatcttcgaggcttgcaggggcatgatctggc

SEQ ID NO: 691190 - DNA, 33 bp, Homo sapien
gaatcttcgaggcttgtaggggcatgatctggc

SEQ ID NO: 691191 - DNA, 33 bp, Homo sapien
aagtgctgagaggatacgccagagggaatctga

SEQ ID NO: 691192 - DNA, 33 bp, Homo sapien
aagtgctgagaggatatgccagagggaatctga

SEQ ID NO: 691193 - DNA, 33 bp, Homo sapien
ccttttggcaagatcacattgatagtagtgtag

SEQ ID NO: 691194 - DNA, 33 bp, Homo sapien
ccttttggcaagatcatattgatagtagtgtag

SEQ ID NO: 691195 - DNA, 33 bp, Homo sapien
gggctacctaacactcaagacagggtttaaggt

SEQ ID NO: 691196 - DNA, 33 bp, Homo sapien
gggctacctaacactcgagacagggtttaaggt

SEQ ID NO: 691197 - DNA, 33 bp, Homo sapien
agataatcatgtctcactatgtatatgcaatgt

SEQ ID NO: 691198 - DNA, 33 bp, Homo sapien
agataatcatgtctcattatgtatatgcaatgt

SEQ ID NO: 691199 - DNA, 33 bp, Homo sapien
tgatgtcttctgatctcaagtagaatgctgttt

SEQ ID NO: 691200 - DNA, 33 bp, Homo sapien
tgatgtcttctgatctgaagtagaatgctgttt

SEQ ID NO: 691201 - DNA, 33 bp, Homo sapien
tgagaaatcatgctcagctgacagttgaataat

SEQ ID NO: 691202 - DNA, 33 bp, Homo sapien
tgagaaatcatgctcatctgacagttgaataat

SEQ ID NO: 691203 - DNA, 33 bp, Homo sapien
gttacataatcactccagatgtgggtggggagc

SEQ ID NO: 691204 - DNA, 33 bp, Homo sapien
gttacataatcactccggatgtgggtggggagc

SEQ ID NO: 691205 - DNA, 33 bp, Homo sapien
cagacacatttcaagacaagacacacatgtggc

SEQ ID NO: 691206 - DNA, 33 bp, Homo sapien
cagacacatttcaagagaagacacacatgtggc

SEQ ID NO: 691207 - DNA, 33 bp, Homo sapien
ctaatattcaaccatccgacctacaaaaacatc

SEQ ID NO: 691208 - DNA, 33 bp, Homo sapien
ctaatattcaaccatctgacctacaaaaacatc

SEQ ID NO: 691209 - DNA, 33 bp, Homo sapien
aagtataggggtgaataagtggtcagtgtgtat

SEQ ID NO: 691210 - DNA, 33 bp, Homo sapien
aagtataggggtgaatcagtggtcagtgtgtat

SEQ ID NO: 691211 - DNA, 33 bp, Homo sapien
aagagtcacgaaagaaaagatgctggataggat

SEQ ID NO: 691212 - DNA, 33 bp, Homo sapien
aagagtcacgaaagaacagatgctggataggat

SEQ ID NO: 691213 - DNA, 33 bp, Homo sapien
ttttgtgtcttttggtaaacttgatgcttgtga

SEQ ID NO: 691214 - DNA, 33 bp, Homo sapien
ttttgtgtcttttggtcaacttgatgcttgtga

SEQ ID NO: 691215 - DNA, 33 bp, Homo sapien
atagctagtgaatccgcataaagttgtacaatc

SEQ ID NO: 691216 - DNA, 33 bp, Homo sapien
atagctagtgaatccgtataaagttgtacaatc

SEQ ID NO: 691217 - DNA, 33 bp, Homo sapien
acattcacagaagtaaatgcatgaaaagcaaac

SEQ ID NO: 691218 - DNA, 33 bp, Homo sapien
acattcacagaagtaagtgcatgaaaagcaaac

SEQ ID NO: 691219 - DNA, 33 bp, Homo sapien
attgagatgatttgtcaaaccttgatcaggatt

SEQ ID NO: 691220 - DNA, 33 bp, Homo sapien
attgagatgatttgtcgaaccttgatcaggatt

SEQ ID NO: 691221 - DNA, 33 bp, Homo sapien
aaggtgaacacattaggatatcacctgagaatg

SEQ ID NO: 691222 - DNA, 33 bp, Homo sapien
aaggtgaacacattagtatatcacctgagaatg

SEQ ID NO: 691223 - DNA, 33 bp, Homo sapien
atgaaatgcatttatcaatatgtgtatgttgaa

SEQ ID NO: 691224 - DNA, 33 bp, Homo sapien
atgaaatgcatttatcgatatgtgtatgttgaa

SEQ ID NO: 691225 - DNA, 33 bp, Homo sapien
ataattccagttagagcatagagcggaaaaaat

SEQ ID NO: 691226 - DNA, 33 bp, Homo sapien
ataattccagttagagtatagagcggaaaaaat

SEQ ID NO: 691227 - DNA, 33 bp, Homo sapien
gtgaaaattggagtaacgtgctaagtgattttg

SEQ ID NO: 691228 - DNA, 33 bp, Homo sapien
gtgaaaattggagtaatgtgctaagtgattttg

SEQ ID NO: 691229 - DNA, 33 bp, Homo sapien
ggagataatactgacaatggaggttaagagcac

SEQ ID NO: 691230 - DNA, 33 bp, Homo sapien
ggagataatactgacattggaggttaagagcac

SEQ ID NO: 691231 - DNA, 33 bp, Homo sapien
cacatattttccatcaagagttggttgaatctg

SEQ ID NO: 691232 - DNA, 33 bp, Homo sapien
cacatattttccatcaggagttggttgaatctg

SEQ ID NO: 691233 - DNA, 33 bp, Homo sapien
tccacaatgatttatacataggatgctgattgg

SEQ ID NO: 691234 - DNA, 33 bp, Homo sapien
tccacaatgatttatatataggatgctgattgg

SEQ ID NO: 691235 - DNA, 33 bp, Homo sapien
agaacttaacttcagcaccaaacctgcctgttg

SEQ ID NO: 691236 - DNA, 33 bp, Homo sapien
agaacttaacttcagcgccaaacctgcctgttg

SEQ ID NO: 691237 - DNA, 33 bp, Homo sapien
ctctcctgagtctggagagagtttagaaggata

SEQ ID NO: 691238 - DNA, 33 bp, Homo sapien
ctctcctgagtctggatagagtttagaaggata

SEQ ID NO: 691239 - DNA, 33 bp, Homo sapien
ttaaatactcagtacaaatatcaccaattgtat

SEQ ID NO: 691240 - DNA, 33 bp, Homo sapien
ttaaatactcagtacagatatcaccaattgtat

SEQ ID NO: 691241 - DNA, 33 bp, Homo sapien
agatgggacctaattaaactgaaatgcttttgc

SEQ ID NO: 691242 - DNA, 33 bp, Homo sapien
agatgggacctaattatactgaaatgcttttgc

SEQ ID NO: 691243 - DNA, 33 bp, Homo sapien
tcatggaattgtcacaactctatgcaataggta

SEQ ID NO: 691244 - DNA, 33 bp, Homo sapien
tcatggaattgtcacatctctatgcaataggta

SEQ ID NO: 691245 - DNA, 33 bp, Homo sapien
gcgtagaaccttaaaagattcatttgcggctgg

SEQ ID NO: 691246 - DNA, 33 bp, Homo sapien
gcgtagaaccttaaaatattcatttgcggctgg

SEQ ID NO: 691247 - DNA, 33 bp, Homo sapien
tttggggtattaaacacagaatggatggccata

SEQ ID NO: 691248 - DNA, 33 bp, Homo sapien
tttggggtattaaacatagaatggatggccata

SEQ ID NO: 691249 - DNA, 33 bp, Homo sapien
taattgtggtgaaatacagaattttggtcagac

SEQ ID NO: 691250 - DNA, 33 bp, Homo sapien
taattgtggtgaaatatagaattttggtcagac

SEQ ID NO: 691251 - DNA, 33 bp, Homo sapien
acagcagaatgaatgaaacatcacatccatgat

SEQ ID NO: 691252 - DNA, 33 bp, Homo sapien
acagcagaatgaatgagacatcacatccatgat

SEQ ID NO: 691253 - DNA, 33 bp, Homo sapien
ctatcatttgatccaaactggcctgctagatag

SEQ ID NO: 691254 - DNA, 33 bp, Homo sapien
ctatcatttgatccaacctggcctgctagatag

SEQ ID NO: 691255 - DNA, 33 bp, Homo sapien
tttaaatgacctctccactctccaaacatctgg

SEQ ID NO: 691256 - DNA, 33 bp, Homo sapien
tttaaatgacctctccgctctccaaacatctgg

SEQ ID NO: 691257 - DNA, 33 bp, Homo sapien
cagcctagcaaacttacatccctaaacccacga

SEQ ID NO: 691258 - DNA, 33 bp, Homo sapien
cagcctagcaaacttatatccctaaacccacga

SEQ ID NO: 691259 - DNA, 33 bp, Homo sapien
catggctagtttgttaaattctttgcacttcag

SEQ ID NO: 691260 - DNA, 33 bp, Homo sapien
catggctagtttgttacattctttgcacttcag

SEQ ID NO: 691261 - DNA, 33 bp, Homo sapien
aagttttcctgagacaataacttgggctgaata

SEQ ID NO: 691262 - DNA, 33 bp, Homo sapien
aagttttcctgagacactaacttgggctgaata

SEQ ID NO: 691263 - DNA, 33 bp, Homo sapien
acccaggaattgaacagcactcgtattacagat

SEQ ID NO: 691264 - DNA, 33 bp, Homo sapien
acccaggaattgaacatcactcgtattacagat

SEQ ID NO: 691265 - DNA, 33 bp, Homo sapien
cagtgctcttctgggacgaaacttccagaggaa

SEQ ID NO: 691266 - DNA, 33 bp, Homo sapien
cagtgctcttctgggatgaaacttccagaggaa

SEQ ID NO: 691267 - DNA, 33 bp, Homo sapien
ccttttcactcactaaaagcacacctaccacaa

SEQ ID NO: 691268 - DNA, 33 bp, Homo sapien
ccttttcactcactaagagcacacctaccacaa

SEQ ID NO: 691269 - DNA, 33 bp, Homo sapien
gagaataatcttgtgaacttgagttaggcagag

SEQ ID NO: 691270 - DNA, 33 bp, Homo sapien
gagaataatcttgtgaccttgagttaggcagag

SEQ ID NO: 691271 - DNA, 33 bp, Homo sapien
catacacttagcttcaaaaggggtggatgttaa

SEQ ID NO: 691272 - DNA, 33 bp, Homo sapien
catacacttagcttcagaaggggtggatgttaa

SEQ ID NO: 691273 - DNA, 33 bp, Homo sapien
aactagagttacaaagaagaatattgcaaagca

SEQ ID NO: 691274 - DNA, 33 bp, Homo sapien
aactagagttacaaaggagaatattgcaaagca

SEQ ID NO: 691275 - DNA, 33 bp, Homo sapien
actggtttcaattataagcctgtgtcgtactat

SEQ ID NO: 691276 - DNA, 33 bp, Homo sapien
actggtttcaattataggcctgtgtcgtactat

SEQ ID NO: 691277 - DNA, 33 bp, Homo sapien
attcgagcatttaaagccagacttctttgcaga

SEQ ID NO: 691278 - DNA, 33 bp, Homo sapien
attcgagcatttaaaggcagacttctttgcaga

SEQ ID NO: 691279 - DNA, 33 bp, Homo sapien
ttatgctttcttctacccaaatttagttgctct

SEQ ID NO: 691280 - DNA, 33 bp, Homo sapien
ttatgctttcttctactcaaatttagttgctct

SEQ ID NO: 691281 - DNA, 33 bp, Homo sapien
actgactttccctcaaataagatgcatgatttt

SEQ ID NO: 691282 - DNA, 33 bp, Homo sapien
actgactttccctcaagtaagatgcatgatttt

SEQ ID NO: 691283 - DNA, 33 bp, Homo sapien
tgctagtattgtggatcaatgtgcatcagaatt

SEQ ID NO: 691284 - DNA, 33 bp, Homo sapien
tgctagtattgtggatgaatgtgcatcagaatt

SEQ ID NO: 691285 - DNA, 33 bp, Homo sapien
gttagttctggtttggaacaactgttatctgac

SEQ ID NO: 691286 - DNA, 33 bp, Homo sapien
gttagttctggtttgggacaactgttatctgac

SEQ ID NO: 691287 - DNA, 33 bp, Homo sapien
aaacaacttgtcagaagttcaagaaagaagacc

SEQ ID NO: 691288 - DNA, 33 bp, Homo sapien
aaacaacttgtcagaatttcaagaaagaagacc

SEQ ID NO: 691289 - DNA, 33 bp, Homo sapien
tcttaattaaacactccatttgaagtgcagaga

SEQ ID NO: 691290 - DNA, 33 bp, Homo sapien
tcttaattaaacactctatttgaagtgcagaga

SEQ ID NO: 691291 - DNA, 33 bp, Homo sapien
aaggagaatggacctgcagaacaagacaggaag

SEQ ID NO: 691292 - DNA, 33 bp, Homo sapien
aaggagaatggacctggagaacaagacaggaag

SEQ ID NO: 691293 - DNA, 33 bp, Homo sapien
aagtggaagttatatacgtaattgtcagtctgg

SEQ ID NO: 691294 - DNA, 33 bp, Homo sapien
aagtggaagttatatatgtaattgtcagtctgg

SEQ ID NO: 691295 - DNA, 33 bp, Homo sapien
catggaaagcggaaccacagatcagcaaagact

SEQ ID NO: 691296 - DNA, 33 bp, Homo sapien
catggaaagcggaaccgcagatcagcaaagact

SEQ ID NO: 691297 - DNA, 33 bp, Homo sapien
taattccctcattttaaccagcactatcctctc

SEQ ID NO: 691298 - DNA, 33 bp, Homo sapien
taattccctcattttatccagcactatcctctc

SEQ ID NO: 691299 - DNA, 33 bp, Homo sapien
atatccatcaccacacagccttatagaagacag

SEQ ID NO: 691300 - DNA, 33 bp, Homo sapien
atatccatcaccacacggccttatagaagacag

SEQ ID NO: 691301 - DNA, 33 bp, Homo sapien
aaagatgcttcttacaatggtaataatctacat

SEQ ID NO: 691302 - DNA, 33 bp, Homo sapien
aaagatgcttcttacagtggtaataatctacat

SEQ ID NO: 691303 - DNA, 33 bp, Homo sapien
cattcttagaggccacaaaggctgtaaaaagtg

SEQ ID NO: 691304 - DNA, 33 bp, Homo sapien
cattcttagaggccacgaaggctgtaaaaagtg

SEQ ID NO: 691305 - DNA, 33 bp, Homo sapien
aattagctcctagcaaacctatctgcaaataca

SEQ ID NO: 691306 - DNA, 33 bp, Homo sapien
aattagctcctagcaaccctatctgcaaataca

SEQ ID NO: 691307 - DNA, 33 bp, Homo sapien
ctcttttatttccacaatgtatttctgtttaca

SEQ ID NO: 691308 - DNA, 33 bp, Homo sapien
ctcttttatttccacagtgtatttctgtttaca

SEQ ID NO: 691309 - DNA, 33 bp, Homo sapien
tagttcaggcaatataatagatggtcagtaaac

SEQ ID NO: 691310 - DNA, 33 bp, Homo sapien
tagttcaggcaatatagtagatggtcagtaaac

SEQ ID NO: 691311 - DNA, 33 bp, Homo sapien
aatgttgactgtgatcaaaagaatatagttcag

SEQ ID NO: 691312 - DNA, 33 bp, Homo sapien
aatgttgactgtgatcgaaagaatatagttcag

SEQ ID NO: 691313 - DNA, 33 bp, Homo sapien
gtccatattggtcttgaactgtctaaagctacc

SEQ ID NO: 691314 - DNA, 33 bp, Homo sapien
gtccatattggtcttggactgtctaaagctacc

SEQ ID NO: 691315 - DNA, 33 bp, Homo sapien
gattgcttgtgaataacgggaagagcaatggat

SEQ ID NO: 691316 - DNA, 33 bp, Homo sapien
gattgcttgtgaataatgggaagagcaatggat

SEQ ID NO: 691317 - DNA, 33 bp, Homo sapien
atggcattatatctgcaatccatttgtccacac

SEQ ID NO: 691318 - DNA, 33 bp, Homo sapien
atggcattatatctgcgatccatttgtccacac

SEQ ID NO: 691319 - DNA, 33 bp, Homo sapien
ccatctaggcgcctcaccttgggcagtggaatc

SEQ ID NO: 691320 - DNA, 33 bp, Homo sapien
ccatctaggcgcctcatcttgggcagtggaatc

SEQ ID NO: 691321 - DNA, 33 bp, Homo sapien
acacataacataacacaagattaaaatacacaa

SEQ ID NO: 691322 - DNA, 33 bp, Homo sapien
acacataacataacacgagattaaaatacacaa

SEQ ID NO: 691323 - DNA, 33 bp, Homo sapien
gcttatctatacatccgctgaaatgtagaagag

SEQ ID NO: 691324 - DNA, 33 bp, Homo sapien
gcttatctatacatcctctgaaatgtagaagag

SEQ ID NO: 691325 - DNA, 33 bp, Homo sapien
ggggagagtgaattatcacccttaacttgtaac

SEQ ID NO: 691326 - DNA, 33 bp, Homo sapien
ggggagagtgaattattacccttaacttgtaac

SEQ ID NO: 691327 - DNA, 33 bp, Homo sapien
gacagccaccaagagaaaaaccaggccagtgaa

SEQ ID NO: 691328 - DNA, 33 bp, Homo sapien
gacagccaccaagagacaaaccaggccagtgaa

SEQ ID NO: 691329 - DNA, 33 bp, Homo sapien
atgatgatgaaaggaaatgtttctaggagacat

SEQ ID NO: 691330 - DNA, 33 bp, Homo sapien
atgatgatgaaaggaattgtttctaggagacat

SEQ ID NO: 691331 - DNA, 33 bp, Homo sapien
ttctggaacacaactacggattcttggagtcag

SEQ ID NO: 691332 - DNA, 33 bp, Homo sapien
ttctggaacacaactatggattcttggagtcag

SEQ ID NO: 691333 - DNA, 33 bp, Homo sapien
tttccttctgaacccccaagttatttccttaca

SEQ ID NO: 691334 - DNA, 33 bp, Homo sapien
tttccttctgaaccccgaagttatttccttaca

SEQ ID NO: 691335 - DNA, 33 bp, Homo sapien
ctgttttgcactcctaaccaaaagctactttgg

SEQ ID NO: 691336 - DNA, 33 bp, Homo sapien
ctgttttgcactcctagccaaaagctactttgg

SEQ ID NO: 691337 - DNA, 33 bp, Homo sapien
ctgaaaagccagttaacgaaacactctcaaaac

SEQ ID NO: 691338 - DNA, 33 bp, Homo sapien
ctgaaaagccagttaatgaaacactctcaaaac

SEQ ID NO: 691339 - DNA, 33 bp, Homo sapien
gtttcctcatcgatacccttcagccccactgac

SEQ ID NO: 691340 - DNA, 33 bp, Homo sapien
gtttcctcatcgatactcttcagccccactgac

SEQ ID NO: 691341 - DNA, 33 bp, Homo sapien
agagactgaaagagtacaggagatgcctgagga

SEQ ID NO: 691342 - DNA, 33 bp, Homo sapien
agagactgaaagagtataggagatgcctgagga

SEQ ID NO: 691343 - DNA, 33 bp, Homo sapien
cctctaattctgtgaaaatgctgcctgggaatt

SEQ ID NO: 691344 - DNA, 33 bp, Homo sapien
cctctaattctgtgaagatgctgcctgggaatt

SEQ ID NO: 691345 - DNA, 33 bp, Homo sapien
gaaacggtcagtatgtaaatgtatctatacttg

SEQ ID NO: 691346 - DNA, 33 bp, Homo sapien
gaaacggtcagtatgtcaatgtatctatacttg

SEQ ID NO: 691347 - DNA, 33 bp, Homo sapien
atgttacagccagaagaaacgatacgctcccag

SEQ ID NO: 691348 - DNA, 33 bp, Homo sapien
atgttacagccagaaggaacgatacgctcccag

SEQ ID NO: 691349 - DNA, 33 bp, Homo sapien
gctgtgaacccagatggagcagatctaaaagtt

SEQ ID NO: 691350 - DNA, 33 bp, Homo sapien
gctgtgaacccagatgtagcagatctaaaagtt

SEQ ID NO: 691351 - DNA, 33 bp, Homo sapien
ttgaactctagcaacaatgtcacaaactcaatt

SEQ ID NO: 691352 - DNA, 33 bp, Homo sapien
ttgaactctagcaacagtgtcacaaactcaatt

SEQ ID NO: 691353 - DNA, 33 bp, Homo sapien
gggagacagtactgggcaaggactttgaatttc

SEQ ID NO: 691354 - DNA, 33 bp, Homo sapien
gggagacagtactgggtaaggactttgaatttc

SEQ ID NO: 691355 - DNA, 33 bp, Homo sapien
caggcactccctaaaacgttttcaatgtatatt

SEQ ID NO: 691356 - DNA, 33 bp, Homo sapien
caggcactccctaaaatgttttcaatgtatatt

SEQ ID NO: 691357 - DNA, 33 bp, Homo sapien
tttactgacttctactaaaaccttgacagatgt

SEQ ID NO: 691358 - DNA, 33 bp, Homo sapien
tttactgacttctactgaaaccttgacagatgt

SEQ ID NO: 691359 - DNA, 33 bp, Homo sapien
gttcaaataatgagaaagtcaattatatccaat

SEQ ID NO: 691360 - DNA, 33 bp, Homo sapien
gttcaaataatgagaaggtcaattatatccaat

SEQ ID NO: 691361 - DNA, 33 bp, Homo sapien
ggaagtccaaagattaagcctggggtggagcgt

SEQ ID NO: 691362 - DNA, 33 bp, Homo sapien
ggaagtccaaagattatgcctggggtggagcgt

SEQ ID NO: 691363 - DNA, 33 bp, Homo sapien
cttctataactttccactgacacgagaagagaa

SEQ ID NO: 691364 - DNA, 33 bp, Homo sapien
cttctataactttccagtgacacgagaagagaa

SEQ ID NO: 691365 - DNA, 33 bp, Homo sapien
agaatttgaagagctgaagaggtaatcgataat

SEQ ID NO: 691366 - DNA, 33 bp, Homo sapien
agaatttgaagagctggagaggtaatcgataat

SEQ ID NO: 691367 - DNA, 33 bp, Homo sapien
tacctgccacgtgtcaagtcctaaatatgtgct

SEQ ID NO: 691368 - DNA, 33 bp, Homo sapien
tacctgccacgtgtcaggtcctaaatatgtgct

SEQ ID NO: 691369 - DNA, 33 bp, Homo sapien
actgatgatttatgccagagaaagactgtgaat

SEQ ID NO: 691370 - DNA, 33 bp, Homo sapien
actgatgatttatgccggagaaagactgtgaat

SEQ ID NO: 691371 - DNA, 33 bp, Homo sapien
cactgacggcaaaatgaaagttaatttaagagt

SEQ ID NO: 691372 - DNA, 33 bp, Homo sapien
cactgacggcaaaatggaagttaatttaagagt

SEQ ID NO: 691373 - DNA, 33 bp, Homo sapien
tttgaaaagtatactaaaatgggaagcaataaa

SEQ ID NO: 691374 - DNA, 33 bp, Homo sapien
tttgaaaagtatactacaatgggaagcaataaa

SEQ ID NO: 691375 - DNA, 33 bp, Homo sapien
gtgtgctgttggcaggaaaaaaggaatttcaag

SEQ ID NO: 691376 - DNA, 33 bp, Homo sapien
gtgtgctgttggcaggtaaaaaggaatttcaag

SEQ ID NO: 691377 - DNA, 33 bp, Homo sapien
aacatgtatgataataacattgagattcaaaat

SEQ ID NO: 691378 - DNA, 33 bp, Homo sapien
aacatgtatgataataccattgagattcaaaat

SEQ ID NO: 691379 - DNA, 33 bp, Homo sapien
tagatacatggagagaacggtacccagaaaaga

SEQ ID NO: 691380 - DNA, 33 bp, Homo sapien
tagatacatggagagatcggtacccagaaaaga

SEQ ID NO: 691381 - DNA, 33 bp, Homo sapien
tttacttgtagaaatcggaaaatacatcaaact

SEQ ID NO: 691382 - DNA, 33 bp, Homo sapien
tttacttgtagaaatctgaaaatacatcaaact

SEQ ID NO: 691383 - DNA, 33 bp, Homo sapien
caaactagaaagaaaactggtgcgatttttatg

SEQ ID NO: 691384 - DNA, 33 bp, Homo sapien
caaactagaaagaaaagtggtgcgatttttatg

SEQ ID NO: 691385 - DNA, 33 bp, Homo sapien
ttttggttttctctcacgctaaatatttcccac

SEQ ID NO: 691386 - DNA, 33 bp, Homo sapien
ttttggttttctctcatgctaaatatttcccac

SEQ ID NO: 691387 - DNA, 33 bp, Homo sapien
aattcttatataccggacacagcatagaagacc

SEQ ID NO: 691388 - DNA, 33 bp, Homo sapien
aattcttatataccgggcacagcatagaagacc

SEQ ID NO: 691389 - DNA, 33 bp, Homo sapien
gcataaatctgagtacaaacagccaaatctata

SEQ ID NO: 691390 - DNA, 33 bp, Homo sapien
gcataaatctgagtaccaacagccaaatctata

SEQ ID NO: 691391 - DNA, 33 bp, Homo sapien
tactcaagtatttgaaacactactctaaaatat

SEQ ID NO: 691392 - DNA, 33 bp, Homo sapien
tactcaagtatttgaaccactactctaaaatat

SEQ ID NO: 691393 - DNA, 33 bp, Homo sapien
ttccatttgatcttcagaaacactgtaggatat

SEQ ID NO: 691394 - DNA, 33 bp, Homo sapien
ttccatttgatcttcataaacactgtaggatat

SEQ ID NO: 691395 - DNA, 33 bp, Homo sapien
ggggactttaccactcaactttcaactatgggc

SEQ ID NO: 691396 - DNA, 33 bp, Homo sapien
ggggactttaccactccactttcaactatgggc

SEQ ID NO: 691397 - DNA, 33 bp, Homo sapien
ttctgccttttcatcacactacatagaccaata

SEQ ID NO: 691398 - DNA, 33 bp, Homo sapien
ttctgccttttcatcagactacatagaccaata

SEQ ID NO: 691399 - DNA, 33 bp, Homo sapien
ctgaatgtataactaaaagattcctgttgactc

SEQ ID NO: 691400 - DNA, 33 bp, Homo sapien
ctgaatgtataactaacagattcctgttgactc

SEQ ID NO: 691401 - DNA, 33 bp, Homo sapien
ctttaaatgaatcatacctttggcagctaatct

SEQ ID NO: 691402 - DNA, 33 bp, Homo sapien
ctttaaatgaatcatatctttggcagctaatct

SEQ ID NO: 691403 - DNA, 33 bp, Homo sapien
cattccataacagccaacataaaagaaacccag

SEQ ID NO: 691404 - DNA, 33 bp, Homo sapien
cattccataacagccaccataaaagaaacccag

SEQ ID NO: 691405 - DNA, 33 bp, Homo sapien
taaagcattcacttacaagtacagtcatgcacc

SEQ ID NO: 691406 - DNA, 33 bp, Homo sapien
taaagcattcacttacgagtacagtcatgcacc

SEQ ID NO: 691407 - DNA, 33 bp, Homo sapien
aggataaacatggggaaaaaatagttccacatt

SEQ ID NO: 691408 - DNA, 33 bp, Homo sapien
aggataaacatggggagaaaatagttccacatt

SEQ ID NO: 691409 - DNA, 33 bp, Homo sapien
ccataactcatgttccacactttttggaagtat

SEQ ID NO: 691410 - DNA, 33 bp, Homo sapien
ccataactcatgttccgcactttttggaagtat

SEQ ID NO: 691411 - DNA, 33 bp, Homo sapien
tatcccagaaccaaaaatatttcctgagactta

SEQ ID NO: 691412 - DNA, 33 bp, Homo sapien
tatcccagaaccaaaagtatttcctgagactta

SEQ ID NO: 691413 - DNA, 33 bp, Homo sapien
cttacataaaccaaaacgtctaatatgcagttc

SEQ ID NO: 691414 - DNA, 33 bp, Homo sapien
cttacataaaccaaaatgtctaatatgcagttc

SEQ ID NO: 691415 - DNA, 33 bp, Homo sapien
tcttcattctttattaccaaactctccctgact

SEQ ID NO: 691416 - DNA, 33 bp, Homo sapien
tcttcattctttattatcaaactctccctgact

SEQ ID NO: 691417 - DNA, 33 bp, Homo sapien
cttctccctgcagccaaaaattagttcatgcct

SEQ ID NO: 691418 - DNA, 33 bp, Homo sapien
cttctccctgcagccagaaattagttcatgcct

SEQ ID NO: 691419 - DNA, 33 bp, Homo sapien
actttattttgacacacgatttctttaataccc

SEQ ID NO: 691420 - DNA, 33 bp, Homo sapien
actttattttgacacatgatttctttaataccc

SEQ ID NO: 691421 - DNA, 33 bp, Homo sapien
tgggattgttgacaaaaaggagatgatagataa

SEQ ID NO: 691422 - DNA, 33 bp, Homo sapien
tgggattgttgacaaacaggagatgatagataa

SEQ ID NO: 691423 - DNA, 33 bp, Homo sapien
ccaccagaagctgaacagatacctgaaccatgc

SEQ ID NO: 691424 - DNA, 33 bp, Homo sapien
ccaccagaagctgaacggatacctgaaccatgc

SEQ ID NO: 691425 - DNA, 33 bp, Homo sapien
ttgaccacctgtggaactgcacaaatttagagt

SEQ ID NO: 691426 - DNA, 33 bp, Homo sapien
ttgaccacctgtggaattgcacaaatttagagt

SEQ ID NO: 691427 - DNA, 33 bp, Homo sapien
attaacctggtccgagccattgttctctcttac

SEQ ID NO: 691428 - DNA, 33 bp, Homo sapien
attaacctggtccgagtcattgttctctcttac

SEQ ID NO: 691429 - DNA, 33 bp, Homo sapien
gatctcgttgcttaaaagtgtgtagccctttcc

SEQ ID NO: 691430 - DNA, 33 bp, Homo sapien
gatctcgttgcttaaaggtgtgtagccctttcc

SEQ ID NO: 691431 - DNA, 33 bp, Homo sapien
tttcctattaaagctacgttcatttactcagag

SEQ ID NO: 691432 - DNA, 33 bp, Homo sapien
tttcctattaaagctatgttcatttactcagag

SEQ ID NO: 691433 - DNA, 33 bp, Homo sapien
agtcttcctaattctaagcaacattaattattt

SEQ ID NO: 691434 - DNA, 33 bp, Homo sapien
agtcttcctaattctaggcaacattaattattt

SEQ ID NO: 691435 - DNA, 33 bp, Homo sapien
gtctcctaaacttcaagctcactggacctagca

SEQ ID NO: 691436 - DNA, 33 bp, Homo sapien
gtctcctaaacttcaatctcactggacctagca

SEQ ID NO: 691437 - DNA, 33 bp, Homo sapien
cagcgatttaaattcacggcaaattgtctccta

SEQ ID NO: 691438 - DNA, 33 bp, Homo sapien
cagcgatttaaattcatggcaaattgtctccta

SEQ ID NO: 691439 - DNA, 33 bp, Homo sapien
gcgtgctacttggtaaaccagatgtccactgaa

SEQ ID NO: 691440 - DNA, 33 bp, Homo sapien
gcgtgctacttggtaatccagatgtccactgaa

SEQ ID NO: 691441 - DNA, 33 bp, Homo sapien
ggctctgtatgtactaacatgacagtgagaaac

SEQ ID NO: 691442 - DNA, 33 bp, Homo sapien
ggctctgtatgtactatcatgacagtgagaaac

SEQ ID NO: 691443 - DNA, 33 bp, Homo sapien
agttcattcttatggtgaaagcttaccttctgg

SEQ ID NO: 691444 - DNA, 33 bp, Homo sapien
agttcattcttatggttaaagcttaccttctgg

SEQ ID NO: 691445 - DNA, 33 bp, Homo sapien
aatcaggcaaatccagacaggctactcccagag

SEQ ID NO: 691446 - DNA, 33 bp, Homo sapien
aatcaggcaaatccaggcaggctactcccagag

SEQ ID NO: 691447 - DNA, 33 bp, Homo sapien
tgttataatctatttcagaaaaagctcagagaa

SEQ ID NO: 691448 - DNA, 33 bp, Homo sapien
tgttataatctatttcggaaaaagctcagagaa

SEQ ID NO: 691449 - DNA, 33 bp, Homo sapien
attattctaggttgtaagacctacttcaggaag

SEQ ID NO: 691450 - DNA, 33 bp, Homo sapien
attattctaggttgtatgacctacttcaggaag

SEQ ID NO: 691451 - DNA, 33 bp, Homo sapien
agaaggtctagaacacagctttctgataccaca

SEQ ID NO: 691452 - DNA, 33 bp, Homo sapien
agaaggtctagaacacggctttctgataccaca

SEQ ID NO: 691453 - DNA, 33 bp, Homo sapien
cactgagtgagaaacaggttaggatagtgtgaa

SEQ ID NO: 691454 - DNA, 33 bp, Homo sapien
cactgagtgagaaacatgttaggatagtgtgaa

SEQ ID NO: 691455 - DNA, 33 bp, Homo sapien
ggtcattgttcaaatcccaattccacaagtgac

SEQ ID NO: 691456 - DNA, 33 bp, Homo sapien
ggtcattgttcaaatcgcaattccacaagtgac

SEQ ID NO: 691457 - DNA, 33 bp, Homo sapien
aatatctggataacatcagtaacaacacttttt

SEQ ID NO: 691458 - DNA, 33 bp, Homo sapien
aatatctggataacattagtaacaacacttttt

SEQ ID NO: 691459 - DNA, 33 bp, Homo sapien
catgcacataatattgaagtgtttgccttcctg

SEQ ID NO: 691460 - DNA, 33 bp, Homo sapien
catgcacataatattgtagtgtttgccttcctg

SEQ ID NO: 691461 - DNA, 33 bp, Homo sapien
ttactgagataaatcaactttgaccttcattaa

SEQ ID NO: 691462 - DNA, 33 bp, Homo sapien
ttactgagataaatcatctttgaccttcattaa

SEQ ID NO: 691463 - DNA, 33 bp, Homo sapien
tgattgtaagtcaaaactgtatccagaattgtg

SEQ ID NO: 691464 - DNA, 33 bp, Homo sapien
tgattgtaagtcaaaagtgtatccagaattgtg

SEQ ID NO: 691465 - DNA, 33 bp, Homo sapien
ttggctaattaagagacactggatagaatcaca

SEQ ID NO: 691466 - DNA, 33 bp, Homo sapien
ttggctaattaagagatactggatagaatcaca

SEQ ID NO: 691467 - DNA, 33 bp, Homo sapien
catcaaaggatgatgcaaaagttaaaggtatga

SEQ ID NO: 691468 - DNA, 33 bp, Homo sapien
catcaaaggatgatgcgaaagttaaaggtatga

SEQ ID NO: 691469 - DNA, 33 bp, Homo sapien
ctgaaagtccataaaggcatgagtcatgtgttc

SEQ ID NO: 691470 - DNA, 33 bp, Homo sapien
ctgaaagtccataaagtcatgagtcatgtgttc

SEQ ID NO: 691471 - DNA, 33 bp, Homo sapien
tggccaagctcaacatcagcagggcagcaacac

SEQ ID NO: 691472 - DNA, 33 bp, Homo sapien
tggccaagctcaacattagcagggcagcaacac

SEQ ID NO: 691473 - DNA, 33 bp, Homo sapien
tctagtctctgagacaaggcaaaaagtagaggc

SEQ ID NO: 691474 - DNA, 33 bp, Homo sapien
tctagtctctgagacagggcaaaaagtagaggc

SEQ ID NO: 691475 - DNA, 33 bp, Homo sapien
aagcaaagaactagaactggctcattgcattct

SEQ ID NO: 691476 - DNA, 33 bp, Homo sapien
aagcaaagaactagaattggctcattgcattct

SEQ ID NO: 691477 - DNA, 33 bp, Homo sapien
agttgtttaattttcaccaaaatccagttttgg

SEQ ID NO: 691478 - DNA, 33 bp, Homo sapien
agttgtttaattttcagcaaaatccagttttgg

SEQ ID NO: 691479 - DNA, 33 bp, Homo sapien
gacgcccaggactaaaacacaatgtgaggatgg

SEQ ID NO: 691480 - DNA, 33 bp, Homo sapien
gacgcccaggactaaagcacaatgtgaggatgg

SEQ ID NO: 691481 - DNA, 33 bp, Homo sapien
ttagcaactggcacaccacaaggtgttctacat

SEQ ID NO: 691482 - DNA, 33 bp, Homo sapien
ttagcaactggcacactacaaggtgttctacat

SEQ ID NO: 691483 - DNA, 33 bp, Homo sapien
ggaggaaaacgttgtacggagttttataataga

SEQ ID NO: 691484 - DNA, 33 bp, Homo sapien
ggaggaaaacgttgtatggagttttataataga

SEQ ID NO: 691485 - DNA, 33 bp, Homo sapien
aacatggcagattagacggagttacgtttgcct

SEQ ID NO: 691486 - DNA, 33 bp, Homo sapien
aacatggcagattagatggagttacgtttgcct

SEQ ID NO: 691487 - DNA, 33 bp, Homo sapien
acaatgcagctttatacgtttctaagcattgcc

SEQ ID NO: 691488 - DNA, 33 bp, Homo sapien
acaatgcagctttatatgtttctaagcattgcc

SEQ ID NO: 691489 - DNA, 33 bp, Homo sapien
gccactcaatatggataaggaccatgtgataca

SEQ ID NO: 691490 - DNA, 33 bp, Homo sapien
gccactcaatatggatgaggaccatgtgataca

SEQ ID NO: 691491 - DNA, 33 bp, Homo sapien
aagactcagtctaagaccaagttgttagtagga

SEQ ID NO: 691492 - DNA, 33 bp, Homo sapien
aagactcagtctaagatcaagttgttagtagga

SEQ ID NO: 691493 - DNA, 33 bp, Homo sapien
gagttcctgcttactcaaggatagtcagtcttt

SEQ ID NO: 691494 - DNA, 33 bp, Homo sapien
gagttcctgcttactcgaggatagtcagtcttt

SEQ ID NO: 691495 - DNA, 33 bp, Homo sapien
ggtagtaatcaaaaaacagcagcaatattatgg

SEQ ID NO: 691496 - DNA, 33 bp, Homo sapien
ggtagtaatcaaaaaagagcagcaatattatgg

SEQ ID NO: 691497 - DNA, 33 bp, Homo sapien
ctatgtgccttctttcactattcttgaatttct

SEQ ID NO: 691498 - DNA, 33 bp, Homo sapien
ctatgtgccttctttcgctattcttgaatttct

SEQ ID NO: 691499 - DNA, 33 bp, Homo sapien
atttcatagggcaagaatagaccaagaataaaa

SEQ ID NO: 691500 - DNA, 33 bp, Homo sapien
atttcatagggcaagagtagaccaagaataaaa

SEQ ID NO: 691501 - DNA, 33 bp, Homo sapien
tccctcactcagctaactgtttcagtacattaa

SEQ ID NO: 691502 - DNA, 33 bp, Homo sapien
tccctcactcagctaagtgtttcagtacattaa

SEQ ID NO: 691503 - DNA, 33 bp, Homo sapien
ccatgcagatgcaataactttgtccctcagaat

SEQ ID NO: 691504 - DNA, 33 bp, Homo sapien
ccatgcagatgcaatacctttgtccctcagaat

SEQ ID NO: 691505 - DNA, 33 bp, Homo sapien
ctatggcattaaacaaatcacctcacgtcatat

SEQ ID NO: 691506 - DNA, 33 bp, Homo sapien
ctatggcattaaacaagtcacctcacgtcatat

SEQ ID NO: 691507 - DNA, 33 bp, Homo sapien
ctcatgaatgaatgtacgatccaattttgggta

SEQ ID NO: 691508 - DNA, 33 bp, Homo sapien
ctcatgaatgaatgtatgatccaattttgggta

SEQ ID NO: 691509 - DNA, 33 bp, Homo sapien
ataaccagcatatctgaatcttcacagggtcct

SEQ ID NO: 691510 - DNA, 33 bp, Homo sapien
ataaccagcatatctgcatcttcacagggtcct

SEQ ID NO: 691511 - DNA, 33 bp, Homo sapien
atgtgtaattgggataacagaaggagaaaatgg

SEQ ID NO: 691512 - DNA, 33 bp, Homo sapien
atgtgtaattgggatatcagaaggagaaaatgg

SEQ ID NO: 691513 - DNA, 33 bp, Homo sapien
agtaatcttgaatacaagccaatagaagcttct

SEQ ID NO: 691514 - DNA, 33 bp, Homo sapien
agtaatcttgaatacaggccaatagaagcttct

SEQ ID NO: 691515 - DNA, 33 bp, Homo sapien
ataggtttacttgttcaaaatctgtttcctctt

SEQ ID NO: 691516 - DNA, 33 bp, Homo sapien
ataggtttacttgttcgaaatctgtttcctctt

SEQ ID NO: 691517 - DNA, 33 bp, Homo sapien
catttcaactctatgcacttcacaaataatatt

SEQ ID NO: 691518 - DNA, 33 bp, Homo sapien
catttcaactctatgcgcttcacaaataatatt

SEQ ID NO: 691519 - DNA, 33 bp, Homo sapien
gaaaggatctacaaaggcatactgtatgtgcac

SEQ ID NO: 691520 - DNA, 33 bp, Homo sapien
gaaaggatctacaaagtcatactgtatgtgcac

SEQ ID NO: 691521 - DNA, 33 bp, Homo sapien
tattcaaaatatttcacagggtgtcttccatcg

SEQ ID NO: 691522 - DNA, 33 bp, Homo sapien
tattcaaaatatttcatagggtgtcttccatcg

SEQ ID NO: 691523 - DNA, 33 bp, Homo sapien
aatttcggagttaaaaataagtctctggcttca

SEQ ID NO: 691524 - DNA, 33 bp, Homo sapien
aatttcggagttaaaagtaagtctctggcttca

SEQ ID NO: 691525 - DNA, 33 bp, Homo sapien
tgtttcaagattatcactctttgacaaaccaaa

SEQ ID NO: 691526 - DNA, 33 bp, Homo sapien
tgtttcaagattatcagtctttgacaaaccaaa

SEQ ID NO: 691527 - DNA, 33 bp, Homo sapien
actattgtcctatgtaataagttcatgtaatgt

SEQ ID NO: 691528 - DNA, 33 bp, Homo sapien
actattgtcctatgtagtaagttcatgtaatgt

SEQ ID NO: 691529 - DNA, 33 bp, Homo sapien
ttgaatagaatcatgacacaaagtgaaacctgg

SEQ ID NO: 691530 - DNA, 33 bp, Homo sapien
ttgaatagaatcatgatacaaagtgaaacctgg

SEQ ID NO: 691531 - DNA, 33 bp, Homo sapien
ctaaggcttcattctagcatctgtaaattaaag

SEQ ID NO: 691532 - DNA, 33 bp, Homo sapien
ctaaggcttcattctatcatctgtaaattaaag

SEQ ID NO: 691533 - DNA, 33 bp, Homo sapien
tattgcaaccatcctaaaatagcccagttgaaa

SEQ ID NO: 691534 - DNA, 33 bp, Homo sapien
tattgcaaccatcctataatagcccagttgaaa

SEQ ID NO: 691535 - DNA, 33 bp, Homo sapien
tttaagaggccaaactaaatacaatgaaaccta

SEQ ID NO: 691536 - DNA, 33 bp, Homo sapien
tttaagaggccaaactgaatacaatgaaaccta

SEQ ID NO: 691537 - DNA, 33 bp, Homo sapien
atataaccggtcaccactgcaaaactaaattta

SEQ ID NO: 691538 - DNA, 33 bp, Homo sapien
atataaccggtcaccattgcaaaactaaattta

SEQ ID NO: 691539 - DNA, 33 bp, Homo sapien
cagcgatccttttcccactctaatttaacttgg

SEQ ID NO: 691540 - DNA, 33 bp, Homo sapien
cagcgatccttttccctctctaatttaacttgg

SEQ ID NO: 691541 - DNA, 33 bp, Homo sapien
tctggcacctgcataacggaaacccagggatcg

SEQ ID NO: 691542 - DNA, 33 bp, Homo sapien
tctggcacctgcataatggaaacccagggatcg

SEQ ID NO: 691543 - DNA, 33 bp, Homo sapien
gcttaatattacatcacagtgaggacaaaaata

SEQ ID NO: 691544 - DNA, 33 bp, Homo sapien
gcttaatattacatcatagtgaggacaaaaata

SEQ ID NO: 691545 - DNA, 33 bp, Homo sapien
aaatcaagcctgatgaagcattttcttaagaat

SEQ ID NO: 691546 - DNA, 33 bp, Homo sapien
aaatcaagcctgatgatgcattttcttaagaat

SEQ ID NO: 691547 - DNA, 33 bp, Homo sapien
tagcttattgtagatagagacatctgaataacc

SEQ ID NO: 691548 - DNA, 33 bp, Homo sapien
tagcttattgtagatatagacatctgaataacc

SEQ ID NO: 691549 - DNA, 33 bp, Homo sapien
taattccaagtaggagaagccaggcagtgcatg

SEQ ID NO: 691550 - DNA, 33 bp, Homo sapien
taattccaagtaggagcagccaggcagtgcatg

SEQ ID NO: 691551 - DNA, 33 bp, Homo sapien
tttaggcctttctagcacaagtactttcaacta

SEQ ID NO: 691552 - DNA, 33 bp, Homo sapien
tttaggcctttctagcgcaagtactttcaacta

SEQ ID NO: 691553 - DNA, 33 bp, Homo sapien
taacagtcaattcaaaactttcaaaacactctc

SEQ ID NO: 691554 - DNA, 33 bp, Homo sapien
taacagtcaattcaaatctttcaaaacactctc

SEQ ID NO: 691555 - DNA, 33 bp, Homo sapien
ggtactcaatacataactgctgtttaaaataac

SEQ ID NO: 691556 - DNA, 33 bp, Homo sapien
ggtactcaatacataattgctgtttaaaataac

SEQ ID NO: 691557 - DNA, 33 bp, Homo sapien
gacatgaatctggaacaagtgatacaaaataat

SEQ ID NO: 691558 - DNA, 33 bp, Homo sapien
gacatgaatctggaacgagtgatacaaaataat

SEQ ID NO: 691559 - DNA, 33 bp, Homo sapien
tcacaccgaagttcaactatttcctgcatatga

SEQ ID NO: 691560 - DNA, 33 bp, Homo sapien
tcacaccgaagttcaagtatttcctgcatatga

SEQ ID NO: 691561 - DNA, 33 bp, Homo sapien
atcacactgattcctcaatttcagtcctacgtg

SEQ ID NO: 691562 - DNA, 33 bp, Homo sapien
atcacactgattcctcgatttcagtcctacgtg

SEQ ID NO: 691563 - DNA, 33 bp, Homo sapien
tcaaactcctcaaaaacatggattgtgtcattt

SEQ ID NO: 691564 - DNA, 33 bp, Homo sapien
tcaaactcctcaaaaagatggattgtgtcattt

SEQ ID NO: 691565 - DNA, 33 bp, Homo sapien
cttcacaaaaagtaacccacaatgattcacaga

SEQ ID NO: 691566 - DNA, 33 bp, Homo sapien
cttcacaaaaagtaactcacaatgattcacaga

SEQ ID NO: 691567 - DNA, 33 bp, Homo sapien
caatgaagagttaataccactttgagcagctct

SEQ ID NO: 691568 - DNA, 33 bp, Homo sapien
caatgaagagttaatatcactttgagcagctct

SEQ ID NO: 691569 - DNA, 33 bp, Homo sapien
gtgacacaaccaatcaagacaatcattttcttt

SEQ ID NO: 691570 - DNA, 33 bp, Homo sapien
gtgacacaaccaatcaggacaatcattttcttt

SEQ ID NO: 691571 - DNA, 33 bp, Homo sapien
taatataaaatatgcccatacttgctaaatgaa

SEQ ID NO: 691572 - DNA, 33 bp, Homo sapien
taatataaaatatgcctatacttgctaaatgaa

SEQ ID NO: 691573 - DNA, 33 bp, Homo sapien
gccttccacacctcacccacttggcaaaatctt

SEQ ID NO: 691574 - DNA, 33 bp, Homo sapien
gccttccacacctcacgcacttggcaaaatctt

SEQ ID NO: 691575 - DNA, 33 bp, Homo sapien
ctcacactttcctaaaggatctctcagttcatt

SEQ ID NO: 691576 - DNA, 33 bp, Homo sapien
ctcacactttcctaaatgatctctcagttcatt

SEQ ID NO: 691577 - DNA, 33 bp, Homo sapien
tttccttaaaaaaataagagatagagcacaatt

SEQ ID NO: 691578 - DNA, 33 bp, Homo sapien
tttccttaaaaaaataggagatagagcacaatt

SEQ ID NO: 691579 - DNA, 33 bp, Homo sapien
ttctgactaccaactggatataaatcattgact

SEQ ID NO: 691580 - DNA, 33 bp, Homo sapien
ttctgactaccaactgtatataaatcattgact

SEQ ID NO: 691581 - DNA, 33 bp, Homo sapien
ggaaatggaagcttagaagagttaaataattgc

SEQ ID NO: 691582 - DNA, 33 bp, Homo sapien
ggaaatggaagcttagtagagttaaataattgc

SEQ ID NO: 691583 - DNA, 33 bp, Homo sapien
gatgttaacctaccaactagagacttgatgaag

SEQ ID NO: 691584 - DNA, 33 bp, Homo sapien
gatgttaacctaccaattagagacttgatgaag

SEQ ID NO: 691585 - DNA, 33 bp, Homo sapien
tttctggtgattattaagtacaaagtaagcaaa

SEQ ID NO: 691586 - DNA, 33 bp, Homo sapien
tttctggtgattattaggtacaaagtaagcaaa

SEQ ID NO: 691587 - DNA, 33 bp, Homo sapien
tactaggcatacaaaagcatgcttcctgtcctc

SEQ ID NO: 691588 - DNA, 33 bp, Homo sapien
tactaggcatacaaaatcatgcttcctgtcctc

SEQ ID NO: 691589 - DNA, 33 bp, Homo sapien
cagtaggctcccagaaataatatcgtaagcata

SEQ ID NO: 691590 - DNA, 33 bp, Homo sapien
cagtaggctcccagaactaatatcgtaagcata

SEQ ID NO: 691591 - DNA, 33 bp, Homo sapien
cctgaaggaggagatgacaatcatgaaatcagc

SEQ ID NO: 691592 - DNA, 33 bp, Homo sapien
cctgaaggaggagatgccaatcatgaaatcagc

SEQ ID NO: 691593 - DNA, 33 bp, Homo sapien
cttgaaaccacagttcacggatggcctgcctgc

SEQ ID NO: 691594 - DNA, 33 bp, Homo sapien
cttgaaaccacagttcgcggatggcctgcctgc

SEQ ID NO: 691595 - DNA, 33 bp, Homo sapien
ggtgtcttgcgtttggcagctttcactcggtgt

SEQ ID NO: 691596 - DNA, 33 bp, Homo sapien
ggtgtcttgcgtttggtagctttcactcggtgt

SEQ ID NO: 691597 - DNA, 33 bp, Homo sapien
gcaccttcagcccattaaaaaatgcttgacatg

SEQ ID NO: 691598 - DNA, 33 bp, Homo sapien
gcaccttcagcccattgaaaaatgcttgacatg

SEQ ID NO: 691599 - DNA, 33 bp, Homo sapien
agtccactaaaatgaggactgttgatctctgaa

SEQ ID NO: 691600 - DNA, 33 bp, Homo sapien
agtccactaaaatgagtactgttgatctctgaa

SEQ ID NO: 691601 - DNA, 33 bp, Homo sapien
cactcattatccacaagagtgtcatgtcacaat

SEQ ID NO: 691602 - DNA, 33 bp, Homo sapien
cactcattatccacaatagtgtcatgtcacaat

SEQ ID NO: 691603 - DNA, 33 bp, Homo sapien
ccatctacaagataaactgagcaatgttcagat

SEQ ID NO: 691604 - DNA, 33 bp, Homo sapien
ccatctacaagataaagtgagcaatgttcagat

SEQ ID NO: 691605 - DNA, 33 bp, Homo sapien
acctcttggattgtaaactcactgaaaataaag

SEQ ID NO: 691606 - DNA, 33 bp, Homo sapien
acctcttggattgtaagctcactgaaaataaag

SEQ ID NO: 691607 - DNA, 33 bp, Homo sapien
gctgatacatttaaccactaactcagagtatta

SEQ ID NO: 691608 - DNA, 33 bp, Homo sapien
gctgatacatttaaccgctaactcagagtatta

SEQ ID NO: 691609 - DNA, 33 bp, Homo sapien
gggtcagctttcaaacggaagggaatctgggga

SEQ ID NO: 691610 - DNA, 33 bp, Homo sapien
gggtcagctttcaaactgaagggaatctgggga

SEQ ID NO: 691611 - DNA, 33 bp, Homo sapien
cagctggtaaggcaaacgcaggatcagaaccca

SEQ ID NO: 691612 - DNA, 33 bp, Homo sapien
cagctggtaaggcaaatgcaggatcagaaccca

SEQ ID NO: 691613 - DNA, 33 bp, Homo sapien
actagagccagattcccacatgagccaggacaa

SEQ ID NO: 691614 - DNA, 33 bp, Homo sapien
actagagccagattcctacatgagccaggacaa

SEQ ID NO: 691615 - DNA, 33 bp, Homo sapien
ttatagtaaaggtgccaaaagtaggaacctgag

SEQ ID NO: 691616 - DNA, 33 bp, Homo sapien
ttatagtaaaggtgccgaaagtaggaacctgag

SEQ ID NO: 691617 - DNA, 33 bp, Homo sapien
tctggaaaaacttccacgaataatgatgaggaa

SEQ ID NO: 691618 - DNA, 33 bp, Homo sapien
tctggaaaaacttccatgaataatgatgaggaa

SEQ ID NO: 691619 - DNA, 33 bp, Homo sapien
tcatttgctcaagtacactaattctattagtct

SEQ ID NO: 691620 - DNA, 33 bp, Homo sapien
tcatttgctcaagtacgctaattctattagtct

SEQ ID NO: 691621 - DNA, 33 bp, Homo sapien
aacttgaaataacaaactgaggtgttctttttt

SEQ ID NO: 691622 - DNA, 33 bp, Homo sapien
aacttgaaataacaaattgaggtgttctttttt

SEQ ID NO: 691623 - DNA, 33 bp, Homo sapien
tgaactgtatttaatacgcatactttggaacac

SEQ ID NO: 691624 - DNA, 33 bp, Homo sapien
tgaactgtatttaatatgcatactttggaacac

SEQ ID NO: 691625 - DNA, 33 bp, Homo sapien
gctcctgaagtctaacaaattggatgcagtttc

SEQ ID NO: 691626 - DNA, 33 bp, Homo sapien
gctcctgaagtctaaccaattggatgcagtttc

SEQ ID NO: 691627 - DNA, 33 bp, Homo sapien
tacttgaaatttacccaggatatttgctgttga

SEQ ID NO: 691628 - DNA, 33 bp, Homo sapien
tacttgaaatttacccgggatatttgctgttga

SEQ ID NO: 691629 - DNA, 33 bp, Homo sapien
actggaagatatacaaagtttcatagagagaaa

SEQ ID NO: 691630 - DNA, 33 bp, Homo sapien
actggaagatatacaaggtttcatagagagaaa

SEQ ID NO: 691631 - DNA, 33 bp, Homo sapien
ggccacacaataggaacgagaattgaactcaca

SEQ ID NO: 691632 - DNA, 33 bp, Homo sapien
ggccacacaataggaaggagaattgaactcaca

SEQ ID NO: 691633 - DNA, 33 bp, Homo sapien
catttcaagcaaatacaaccaatcaataattta

SEQ ID NO: 691634 - DNA, 33 bp, Homo sapien
catttcaagcaaataccaccaatcaataattta

SEQ ID NO: 691635 - DNA, 33 bp, Homo sapien
tttcctagaaccttgggatcatgagtagtttgt

SEQ ID NO: 691636 - DNA, 33 bp, Homo sapien
tttcctagaaccttggtatcatgagtagtttgt

SEQ ID NO: 691637 - DNA, 33 bp, Homo sapien
atgtggacataaaacaactttctgaaagggctt

SEQ ID NO: 691638 - DNA, 33 bp, Homo sapien
atgtggacataaaacagctttctgaaagggctt

SEQ ID NO: 691639 - DNA, 33 bp, Homo sapien
gtactcactaatacaaagaaatgagcaattgat

SEQ ID NO: 691640 - DNA, 33 bp, Homo sapien
gtactcactaatacaaggaaatgagcaattgat

SEQ ID NO: 691641 - DNA, 33 bp, Homo sapien
tccaatgttgcaagtcaaaaataataatgttat

SEQ ID NO: 691642 - DNA, 33 bp, Homo sapien
tccaatgttgcaagtccaaaataataatgttat

SEQ ID NO: 691643 - DNA, 33 bp, Homo sapien
tgccttttagtgtaaaacaacctatcccatact

SEQ ID NO: 691644 - DNA, 33 bp, Homo sapien
tgccttttagtgtaaatcaacctatcccatact

SEQ ID NO: 691645 - DNA, 33 bp, Homo sapien
ctagtaccaacaacaaccaaccaatcaaaaatg

SEQ ID NO: 691646 - DNA, 33 bp, Homo sapien
ctagtaccaacaacaatcaaccaatcaaaaatg

SEQ ID NO: 691647 - DNA, 33 bp, Homo sapien
tgtaaagttcttagaaaactgcctggaacacag

SEQ ID NO: 691648 - DNA, 33 bp, Homo sapien
tgtaaagttcttagaacactgcctggaacacag

SEQ ID NO: 691649 - DNA, 33 bp, Homo sapien
gggtcctaatcccatcaaagaggtctctatcct

SEQ ID NO: 691650 - DNA, 33 bp, Homo sapien
gggtcctaatcccatccaagaggtctctatcct

SEQ ID NO: 691651 - DNA, 33 bp, Homo sapien
caagtataatataaaacgaagttgagactgtgc

SEQ ID NO: 691652 - DNA, 33 bp, Homo sapien
caagtataatataaaatgaagttgagactgtgc

SEQ ID NO: 691653 - DNA, 33 bp, Homo sapien
gaaagacgtaaactaacaagaattatctgcaga

SEQ ID NO: 691654 - DNA, 33 bp, Homo sapien
gaaagacgtaaactaagaagaattatctgcaga

SEQ ID NO: 691655 - DNA, 33 bp, Homo sapien
ctataactacaatacccagtgtgctaccaaaag

SEQ ID NO: 691656 - DNA, 33 bp, Homo sapien
ctataactacaatacctagtgtgctaccaaaag

SEQ ID NO: 691657 - DNA, 33 bp, Homo sapien
tcaatcagagtggagacggcaaatggccaccaa

SEQ ID NO: 691658 - DNA, 33 bp, Homo sapien
tcaatcagagtggagatggcaaatggccaccaa

SEQ ID NO: 691659 - DNA, 33 bp, Homo sapien
caggttcaaacactccaatgcaggcactacgct

SEQ ID NO: 691660 - DNA, 33 bp, Homo sapien
caggttcaaacactccgatgcaggcactacgct

SEQ ID NO: 691661 - DNA, 33 bp, Homo sapien
aaagaacatatgtaaaatgtctagcgtagtgcc

SEQ ID NO: 691662 - DNA, 33 bp, Homo sapien
aaagaacatatgtaaattgtctagcgtagtgcc

SEQ ID NO: 691663 - DNA, 33 bp, Homo sapien
gtcaattcataaatgcaagtgtacaggacaacc

SEQ ID NO: 691664 - DNA, 33 bp, Homo sapien
gtcaattcataaatgccagtgtacaggacaacc

SEQ ID NO: 691665 - DNA, 33 bp, Homo sapien
tctattatttcagatacattgtgaagaaaaaat

SEQ ID NO: 691666 - DNA, 33 bp, Homo sapien
tctattatttcagatagattgtgaagaaaaaat

SEQ ID NO: 691667 - DNA, 33 bp, Homo sapien
gtagagtactagcagacggagcatacagcattt

SEQ ID NO: 691668 - DNA, 33 bp, Homo sapien
gtagagtactagcagatggagcatacagcattt

SEQ ID NO: 691669 - DNA, 33 bp, Homo sapien
ttatcaatcctcatcccacatacaggatgaaag

SEQ ID NO: 691670 - DNA, 33 bp, Homo sapien
ttatcaatcctcatccgacatacaggatgaaag

SEQ ID NO: 691671 - DNA, 33 bp, Homo sapien
tattatatcagaactcaatacaaaggggtgaaa

SEQ ID NO: 691672 - DNA, 33 bp, Homo sapien
tattatatcagaactccatacaaaggggtgaaa

SEQ ID NO: 691673 - DNA, 33 bp, Homo sapien
gctgtaacccaaaagagcccctctggaaatgac

SEQ ID NO: 691674 - DNA, 33 bp, Homo sapien
gctgtaacccaaaagatcccctctggaaatgac

SEQ ID NO: 691675 - DNA, 33 bp, Homo sapien
gtttccttctatgtaaaacaccaggcacgttga

SEQ ID NO: 691676 - DNA, 33 bp, Homo sapien
gtttccttctatgtaagacaccaggcacgttga

SEQ ID NO: 691677 - DNA, 33 bp, Homo sapien
actagccattatcctccacttcagaacccagaa

SEQ ID NO: 691678 - DNA, 33 bp, Homo sapien
actagccattatcctctacttcagaacccagaa

SEQ ID NO: 691679 - DNA, 33 bp, Homo sapien
tgtggtcagatctcagaaatccttcaataccaa

SEQ ID NO: 691680 - DNA, 33 bp, Homo sapien
tgtggtcagatctcaggaatccttcaataccaa

SEQ ID NO: 691681 - DNA, 33 bp, Homo sapien
agtcttcatacctaggaaaacttgctgttggat

SEQ ID NO: 691682 - DNA, 33 bp, Homo sapien
agtcttcatacctaggtaaacttgctgttggat

SEQ ID NO: 691683 - DNA, 33 bp, Homo sapien
agaaacagctcatccacgtattaattcattcaa

SEQ ID NO: 691684 - DNA, 33 bp, Homo sapien
agaaacagctcatccatgtattaattcattcaa

SEQ ID NO: 691685 - DNA, 33 bp, Homo sapien
cagtgaaaattttttgaattccacagactaggt

SEQ ID NO: 691686 - DNA, 33 bp, Homo sapien
cagtgaaaattttttggattccacagactaggt

SEQ ID NO: 691687 - DNA, 33 bp, Homo sapien
catatatccttcaaaggcttcctgctgctctta

SEQ ID NO: 691688 - DNA, 33 bp, Homo sapien
catatatccttcaaagtcttcctgctgctctta

SEQ ID NO: 691689 - DNA, 33 bp, Homo sapien
attaagcaataggaaggagtgaagtactggaaa

SEQ ID NO: 691690 - DNA, 33 bp, Homo sapien
attaagcaataggaagtagtgaagtactggaaa

SEQ ID NO: 691691 - DNA, 33 bp, Homo sapien
atctactttcactgtacatttgttcattctggg

SEQ ID NO: 691692 - DNA, 33 bp, Homo sapien
atctactttcactgtatatttgttcattctggg

SEQ ID NO: 691693 - DNA, 33 bp, Homo sapien
ccactgttgccatagtaactaagtgccacaacc

SEQ ID NO: 691694 - DNA, 33 bp, Homo sapien
ccactgttgccatagtgactaagtgccacaacc

SEQ ID NO: 691695 - DNA, 33 bp, Homo sapien
ttcatttactacatttcaaacctgagttgagta

SEQ ID NO: 691696 - DNA, 33 bp, Homo sapien
ttcatttactacattttaaacctgagttgagta

SEQ ID NO: 691697 - DNA, 33 bp, Homo sapien
ctaaaaatataattcaagtcatcataatgggaa

SEQ ID NO: 691698 - DNA, 33 bp, Homo sapien
ctaaaaatataattcaggtcatcataatgggaa

SEQ ID NO: 691699 - DNA, 33 bp, Homo sapien
atagtagcttactttacagtcttgttcaaagga

SEQ ID NO: 691700 - DNA, 33 bp, Homo sapien
atagtagcttactttatagtcttgttcaaagga

SEQ ID NO: 691701 - DNA, 33 bp, Homo sapien
caacaattctgctggacgtatagaaggcatggc

SEQ ID NO: 691702 - DNA, 33 bp, Homo sapien
caacaattctgctggatgtatagaaggcatggc

SEQ ID NO: 691703 - DNA, 33 bp, Homo sapien
cactttttaattgatgaagttaaagtgtaggca

SEQ ID NO: 691704 - DNA, 33 bp, Homo sapien
cactttttaattgatgtagttaaagtgtaggca

SEQ ID NO: 691705 - DNA, 33 bp, Homo sapien
aaaagacaattacacaagctgtatttaaagtat

SEQ ID NO: 691706 - DNA, 33 bp, Homo sapien
aaaagacaattacacaggctgtatttaaagtat

SEQ ID NO: 691707 - DNA, 33 bp, Homo sapien
taagtgcactggaaaaaagtaatcctatggtgc

SEQ ID NO: 691708 - DNA, 33 bp, Homo sapien
taagtgcactggaaaagagtaatcctatggtgc

SEQ ID NO: 691709 - DNA, 33 bp, Homo sapien
ctcatggttcctgaaacgattatataggtctct

SEQ ID NO: 691710 - DNA, 33 bp, Homo sapien
ctcatggttcctgaaatgattatataggtctct

SEQ ID NO: 691711 - DNA, 33 bp, Homo sapien
ccgtgtcattcatcccacttcatctcaggacat

SEQ ID NO: 691712 - DNA, 33 bp, Homo sapien
ccgtgtcattcatcccgcttcatctcaggacat

SEQ ID NO: 691713 - DNA, 33 bp, Homo sapien
aagttcgtttgagaaaacatccaagtcatagaa

SEQ ID NO: 691714 - DNA, 33 bp, Homo sapien
aagttcgtttgagaaagcatccaagtcatagaa

SEQ ID NO: 691715 - DNA, 33 bp, Homo sapien
tgttactctttttgacaagtagtatttcacacc

SEQ ID NO: 691716 - DNA, 33 bp, Homo sapien
tgttactctttttgacgagtagtatttcacacc

SEQ ID NO: 691717 - DNA, 33 bp, Homo sapien
agaggcagtagtaaccagaatagtgaacaaatt

SEQ ID NO: 691718 - DNA, 33 bp, Homo sapien
agaggcagtagtaaccggaatagtgaacaaatt

SEQ ID NO: 691719 - DNA, 33 bp, Homo sapien
agagaaaatataagccagaaattataaatgtct

SEQ ID NO: 691720 - DNA, 33 bp, Homo sapien
agagaaaatataagccggaaattataaatgtct

SEQ ID NO: 691721 - DNA, 33 bp, Homo sapien
cctgtggagggctaaaaattgctacacagatac

SEQ ID NO: 691722 - DNA, 33 bp, Homo sapien
cctgtggagggctaaagattgctacacagatac

SEQ ID NO: 691723 - DNA, 33 bp, Homo sapien
aaatgaattcatgtaaactagtaatatttgaat

SEQ ID NO: 691724 - DNA, 33 bp, Homo sapien
aaatgaattcatgtaacctagtaatatttgaat

SEQ ID NO: 691725 - DNA, 33 bp, Homo sapien
ccagggcattcagtcacagaaggatggagcacg

SEQ ID NO: 691726 - DNA, 33 bp, Homo sapien
ccagggcattcagtcatagaaggatggagcacg

SEQ ID NO: 691727 - DNA, 33 bp, Homo sapien
aagctcagttctggaacaagatgccatagctca

SEQ ID NO: 691728 - DNA, 33 bp, Homo sapien
aagctcagttctggaagaagatgccatagctca

SEQ ID NO: 691729 - DNA, 33 bp, Homo sapien
accaaaggaatatttcccaccaaaacatggaaa

SEQ ID NO: 691730 - DNA, 33 bp, Homo sapien
accaaaggaatatttctcaccaaaacatggaaa

SEQ ID NO: 691731 - DNA, 33 bp, Homo sapien
accccgctcgtctcccagataagccgcagctcc

SEQ ID NO: 691732 - DNA, 33 bp, Homo sapien
accccgctcgtctcccggataagccgcagctcc

SEQ ID NO: 691733 - DNA, 33 bp, Homo sapien
cagggaaaatgtgcacaaaataatatggaacaa

SEQ ID NO: 691734 - DNA, 33 bp, Homo sapien
cagggaaaatgtgcaccaaataatatggaacaa

SEQ ID NO: 691735 - DNA, 33 bp, Homo sapien
ccttgtaattgaagtacgaattgtatgtcttac

SEQ ID NO: 691736 - DNA, 33 bp, Homo sapien
ccttgtaattgaagtatgaattgtatgtcttac

SEQ ID NO: 691737 - DNA, 33 bp, Homo sapien
ggatgctctgtattgccagtggtacctgtttat

SEQ ID NO: 691738 - DNA, 33 bp, Homo sapien
ggatgctctgtattgctagtggtacctgtttat

SEQ ID NO: 691739 - DNA, 33 bp, Homo sapien
ctaggacattatgcagcatccaaaaaaaactca

SEQ ID NO: 691740 - DNA, 33 bp, Homo sapien
ctaggacattatgcagtatccaaaaaaaactca

SEQ ID NO: 691741 - DNA, 33 bp, Homo sapien
ggtagcagctgttactcacttatatctctgaat

SEQ ID NO: 691742 - DNA, 33 bp, Homo sapien
ggtagcagctgttacttacttatatctctgaat

SEQ ID NO: 691743 - DNA, 33 bp, Homo sapien
cacatgatacagatgccaagtagctcacctgaa

SEQ ID NO: 691744 - DNA, 33 bp, Homo sapien
cacatgatacagatgcgaagtagctcacctgaa

SEQ ID NO: 691745 - DNA, 33 bp, Homo sapien
aaatgcattgtgcacccgggacaattcattttc

SEQ ID NO: 691746 - DNA, 33 bp, Homo sapien
aaatgcattgtgcacctgggacaattcattttc

SEQ ID NO: 691747 - DNA, 33 bp, Homo sapien
ttagagaaggaatggaatacttaatagaaggta

SEQ ID NO: 691748 - DNA, 33 bp, Homo sapien
ttagagaaggaatggagtacttaatagaaggta

SEQ ID NO: 691749 - DNA, 33 bp, Homo sapien
aggaactcagtaaatacctacagatacatttac

SEQ ID NO: 691750 - DNA, 33 bp, Homo sapien
aggaactcagtaaatagctacagatacatttac

SEQ ID NO: 691751 - DNA, 33 bp, Homo sapien
aagtcagtgtctctgccccattttaattccccg

SEQ ID NO: 691752 - DNA, 33 bp, Homo sapien
aagtcagtgtctctgctccattttaattccccg

SEQ ID NO: 691753 - DNA, 33 bp, Homo sapien
tgagcaccagtttgcacatgttccaagtgtgag

SEQ ID NO: 691754 - DNA, 33 bp, Homo sapien
tgagcaccagtttgcatatgttccaagtgtgag

SEQ ID NO: 691755 - DNA, 33 bp, Homo sapien
acgcatagactttagcaaaggagagctgaagga

SEQ ID NO: 691756 - DNA, 33 bp, Homo sapien
acgcatagactttagcgaaggagagctgaagga

SEQ ID NO: 691757 - DNA, 33 bp, Homo sapien
gctggattgcagtgacgcactctcggctcatgg

SEQ ID NO: 691758 - DNA, 33 bp, Homo sapien
gctggattgcagtgactcactctcggctcatgg

SEQ ID NO: 691759 - DNA, 33 bp, Homo sapien
gcacattgttaagggcactaaaaatgttccaaa

SEQ ID NO: 691760 - DNA, 33 bp, Homo sapien
gcacattgttaagggcgctaaaaatgttccaaa

SEQ ID NO: 691761 - DNA, 33 bp, Homo sapien
attaaaaaacaaacttaaagccgtgtgtgggag

SEQ ID NO: 691762 - DNA, 33 bp, Homo sapien
attaaaaaacaaacttgaagccgtgtgtgggag

SEQ ID NO: 691763 - DNA, 33 bp, Homo sapien
taaagaatctattggcaatctctctcttcattg

SEQ ID NO: 691764 - DNA, 33 bp, Homo sapien
taaagaatctattggcgatctctctcttcattg

SEQ ID NO: 691765 - DNA, 33 bp, Homo sapien
gtttgcagtttaataacacagtacaatttaata

SEQ ID NO: 691766 - DNA, 33 bp, Homo sapien
gtttgcagtttaataagacagtacaatttaata

SEQ ID NO: 691767 - DNA, 33 bp, Homo sapien
tgacatctggaaaatgacacataaaccgcatta

SEQ ID NO: 691768 - DNA, 33 bp, Homo sapien
tgacatctggaaaatggcacataaaccgcatta

SEQ ID NO: 691769 - DNA, 33 bp, Homo sapien
taaacgtcttctttaacgagcatccctacagag

SEQ ID NO: 691770 - DNA, 33 bp, Homo sapien
taaacgtcttctttaatgagcatccctacagag

SEQ ID NO: 691771 - DNA, 33 bp, Homo sapien
ttacaaggtctcctacacaagcataaatataca

SEQ ID NO: 691772 - DNA, 33 bp, Homo sapien
ttacaaggtctcctacgcaagcataaatataca

SEQ ID NO: 691773 - DNA, 33 bp, Homo sapien
agagatattgatattacgattgtcactgagatc

SEQ ID NO: 691774 - DNA, 33 bp, Homo sapien
agagatattgatattatgattgtcactgagatc

SEQ ID NO: 691775 - DNA, 33 bp, Homo sapien
gaatgcaatttcattacatcaagaaaagctatc

SEQ ID NO: 691776 - DNA, 33 bp, Homo sapien
gaatgcaatttcattagatcaagaaaagctatc

SEQ ID NO: 691777 - DNA, 33 bp, Homo sapien
agaaaaaagtggttagcaacgaactgttagtca

SEQ ID NO: 691778 - DNA, 33 bp, Homo sapien
agaaaaaagtggttagtaacgaactgttagtca

SEQ ID NO: 691779 - DNA, 33 bp, Homo sapien
ggttctatttatcaaacttggttaatacagctt

SEQ ID NO: 691780 - DNA, 33 bp, Homo sapien
ggttctatttatcaaatttggttaatacagctt

SEQ ID NO: 691781 - DNA, 33 bp, Homo sapien
cacatcacattcaaaactgtatacctcaaaagg

SEQ ID NO: 691782 - DNA, 33 bp, Homo sapien
cacatcacattcaaaattgtatacctcaaaagg

SEQ ID NO: 691783 - DNA, 33 bp, Homo sapien
ttagaattgcgttctcaaattttcttctgagat

SEQ ID NO: 691784 - DNA, 33 bp, Homo sapien
ttagaattgcgttctctaattttcttctgagat

SEQ ID NO: 691785 - DNA, 33 bp, Homo sapien
ggcaagttgtatttgacagaggaaaaactagta

SEQ ID NO: 691786 - DNA, 33 bp, Homo sapien
ggcaagttgtatttgatagaggaaaaactagta

SEQ ID NO: 691787 - DNA, 33 bp, Homo sapien
catgaagaatcttccaacgaatcaatattattt

SEQ ID NO: 691788 - DNA, 33 bp, Homo sapien
catgaagaatcttccagcgaatcaatattattt

SEQ ID NO: 691789 - DNA, 33 bp, Homo sapien
aaaaaacattaggtaaatcaagtccacttatct

SEQ ID NO: 691790 - DNA, 33 bp, Homo sapien
aaaaaacattaggtaagtcaagtccacttatct

SEQ ID NO: 691791 - DNA, 33 bp, Homo sapien
ctatctactacaaataagtgaagtgtcaccttc

SEQ ID NO: 691792 - DNA, 33 bp, Homo sapien
ctatctactacaaatacgtgaagtgtcaccttc

SEQ ID NO: 691793 - DNA, 33 bp, Homo sapien
gtcaagcctgctctaacactgccttctcaatcc

SEQ ID NO: 691794 - DNA, 33 bp, Homo sapien
gtcaagcctgctctaatactgccttctcaatcc

SEQ ID NO: 691795 - DNA, 33 bp, Homo sapien
agtgcttatatggatccgactaccctgtcctgc

SEQ ID NO: 691796 - DNA, 33 bp, Homo sapien
agtgcttatatggatctgactaccctgtcctgc

SEQ ID NO: 691797 - DNA, 33 bp, Homo sapien
agacaggctggtgatacatcttccactgttttt

SEQ ID NO: 691798 - DNA, 33 bp, Homo sapien
agacaggctggtgatatatcttccactgttttt

SEQ ID NO: 691799 - DNA, 33 bp, Homo sapien
catctcaccacttcagcataaacctattgacaa

SEQ ID NO: 691800 - DNA, 33 bp, Homo sapien
catctcaccacttcaggataaacctattgacaa

SEQ ID NO: 691801 - DNA, 33 bp, Homo sapien
caacacttttacataacgtaattcttcacatga

SEQ ID NO: 691802 - DNA, 33 bp, Homo sapien
caacacttttacataaggtaattcttcacatga

SEQ ID NO: 691803 - DNA, 33 bp, Homo sapien
attattgccaatgaacagagagctaatttgagc

SEQ ID NO: 691804 - DNA, 33 bp, Homo sapien
attattgccaatgaacggagagctaatttgagc

SEQ ID NO: 691805 - DNA, 33 bp, Homo sapien
ttacagagaaacggcacggaaacagatatgaag

SEQ ID NO: 691806 - DNA, 33 bp, Homo sapien
ttacagagaaacggcatggaaacagatatgaag

SEQ ID NO: 691807 - DNA, 33 bp, Homo sapien
ttaatttaaaggcataaaatcccttctagcacc

SEQ ID NO: 691808 - DNA, 33 bp, Homo sapien
ttaatttaaaggcatacaatcccttctagcacc

SEQ ID NO: 691809 - DNA, 33 bp, Homo sapien
tgttgctacatcggacaactgtatccaagcaag

SEQ ID NO: 691810 - DNA, 33 bp, Homo sapien
tgttgctacatcggacgactgtatccaagcaag

SEQ ID NO: 691811 - DNA, 33 bp, Homo sapien
tcttccatataccagagagttatttatcccatg

SEQ ID NO: 691812 - DNA, 33 bp, Homo sapien
tcttccatataccagatagttatttatcccatg

SEQ ID NO: 691813 - DNA, 33 bp, Homo sapien
tttaactatgcctaaacagcaatgtcagttgtg

SEQ ID NO: 691814 - DNA, 33 bp, Homo sapien
tttaactatgcctaaatagcaatgtcagttgtg

SEQ ID NO: 691815 - DNA, 33 bp, Homo sapien
tggatgtgtttcttggccattgtctgtacttta

SEQ ID NO: 691816 - DNA, 33 bp, Homo sapien
tggatgtgtttcttggtcattgtctgtacttta

SEQ ID NO: 691817 - DNA, 33 bp, Homo sapien
caggaggccttctcaactggatgtactgtgagc

SEQ ID NO: 691818 - DNA, 33 bp, Homo sapien
caggaggccttctcaattggatgtactgtgagc

SEQ ID NO: 691819 - DNA, 33 bp, Homo sapien
ggctatcataaaatcaagaattattctgagtca

SEQ ID NO: 691820 - DNA, 33 bp, Homo sapien
ggctatcataaaatcaggaattattctgagtca

SEQ ID NO: 691821 - DNA, 33 bp, Homo sapien
tatgcaaagtccgagaaaggaaaacagaaatct

SEQ ID NO: 691822 - DNA, 33 bp, Homo sapien
tatgcaaagtccgagagaggaaaacagaaatct

SEQ ID NO: 691823 - DNA, 33 bp, Homo sapien
ccctgcatcagactgccctaggaaaggtgtatg

SEQ ID NO: 691824 - DNA, 33 bp, Homo sapien
ccctgcatcagactgctctaggaaaggtgtatg

SEQ ID NO: 691825 - DNA, 33 bp, Homo sapien
cctctgagattcagaaagcagcaaacttatacc

SEQ ID NO: 691826 - DNA, 33 bp, Homo sapien
cctctgagattcagaacgcagcaaacttatacc

SEQ ID NO: 691827 - DNA, 33 bp, Homo sapien
gaaatacttctggaaacgatagatatgaagttc

SEQ ID NO: 691828 - DNA, 33 bp, Homo sapien
gaaatacttctggaaatgatagatatgaagttc

SEQ ID NO: 691829 - DNA, 33 bp, Homo sapien
taaatctagacctttacagcaaatgcttacaac

SEQ ID NO: 691830 - DNA, 33 bp, Homo sapien
taaatctagacctttatagcaaatgcttacaac

SEQ ID NO: 691831 - DNA, 33 bp, Homo sapien
catgtggtagggaccacggttagaagcactgag

SEQ ID NO: 691832 - DNA, 33 bp, Homo sapien
catgtggtagggaccagggttagaagcactgag

SEQ ID NO: 691833 - DNA, 33 bp, Homo sapien
gctgagccacaatcatcatacaaagcaaagtgg

SEQ ID NO: 691834 - DNA, 33 bp, Homo sapien
gctgagccacaatcattatacaaagcaaagtgg

SEQ ID NO: 691835 - DNA, 33 bp, Homo sapien
tacggcagcaataggaaacgaatacagtgtctt

SEQ ID NO: 691836 - DNA, 33 bp, Homo sapien
tacggcagcaataggagacgaatacagtgtctt

SEQ ID NO: 691837 - DNA, 33 bp, Homo sapien
ttatggaaggaaaagactatctgactctccatc

SEQ ID NO: 691838 - DNA, 33 bp, Homo sapien
ttatggaaggaaaagattatctgactctccatc

SEQ ID NO: 691839 - DNA, 33 bp, Homo sapien
caactctaagagatgaagtatggaaggtaaata

SEQ ID NO: 691840 - DNA, 33 bp, Homo sapien
caactctaagagatgacgtatggaaggtaaata

SEQ ID NO: 691841 - DNA, 33 bp, Homo sapien
gtgttggtgtatgaacaatggacgatgacacgg

SEQ ID NO: 691842 - DNA, 33 bp, Homo sapien
gtgttggtgtatgaaccatggacgatgacacgg

SEQ ID NO: 691843 - DNA, 33 bp, Homo sapien
aaacacaacaaagaaactcattatctagtaggc

SEQ ID NO: 691844 - DNA, 33 bp, Homo sapien
aaacacaacaaagaaattcattatctagtaggc

SEQ ID NO: 691845 - DNA, 33 bp, Homo sapien
tagaaaataagtgctcaacaactaatccagatt

SEQ ID NO: 691846 - DNA, 33 bp, Homo sapien
tagaaaataagtgctcgacaactaatccagatt

SEQ ID NO: 691847 - DNA, 33 bp, Homo sapien
agtttcagcaaattgcccaagctctgtcacatc

SEQ ID NO: 691848 - DNA, 33 bp, Homo sapien
agtttcagcaaattgcgcaagctctgtcacatc

SEQ ID NO: 691849 - DNA, 33 bp, Homo sapien
aagtgagaaatagcaccgagaagagaaaaataa

SEQ ID NO: 691850 - DNA, 33 bp, Homo sapien
aagtgagaaatagcactgagaagagaaaaataa

SEQ ID NO: 691851 - DNA, 33 bp, Homo sapien
gagtttcgaggtaagccctggattattttcata

SEQ ID NO: 691852 - DNA, 33 bp, Homo sapien
gagtttcgaggtaagctctggattattttcata

SEQ ID NO: 691853 - DNA, 33 bp, Homo sapien
ttgaattcaagcacgaagaatagaatcaccttc

SEQ ID NO: 691854 - DNA, 33 bp, Homo sapien
ttgaattcaagcacgaggaatagaatcaccttc

SEQ ID NO: 691855 - DNA, 33 bp, Homo sapien
agatggacaatgtcaaactcaagtataactgtg

SEQ ID NO: 691856 - DNA, 33 bp, Homo sapien
agatggacaatgtcaacctcaagtataactgtg

SEQ ID NO: 691857 - DNA, 33 bp, Homo sapien
tttttcttgtgagaaccggaacaaacataagtt

SEQ ID NO: 691858 - DNA, 33 bp, Homo sapien
tttttcttgtgagaactggaacaaacataagtt

SEQ ID NO: 691859 - DNA, 33 bp, Homo sapien
ttcacaggcaatgaaagaaatgcaatggtcatc

SEQ ID NO: 691860 - DNA, 33 bp, Homo sapien
ttcacaggcaatgaaataaatgcaatggtcatc

SEQ ID NO: 691861 - DNA, 33 bp, Homo sapien
aaagtggttaaataggaactgcagattaaaaaa

SEQ ID NO: 691862 - DNA, 33 bp, Homo sapien
aaagtggttaaataggcactgcagattaaaaaa

SEQ ID NO: 691863 - DNA, 33 bp, Homo sapien
aggtctttgccattcacaagataggtatcatat

SEQ ID NO: 691864 - DNA, 33 bp, Homo sapien
aggtctttgccattcataagataggtatcatat

SEQ ID NO: 691865 - DNA, 33 bp, Homo sapien
tcaagcaattcatagacgtcaagattggaaact

SEQ ID NO: 691866 - DNA, 33 bp, Homo sapien
tcaagcaattcatagatgtcaagattggaaact

SEQ ID NO: 691867 - DNA, 33 bp, Homo sapien
tccagagaaactacgaagctacattgattcctt

SEQ ID NO: 691868 - DNA, 33 bp, Homo sapien
tccagagaaactacgaggctacattgattcctt

SEQ ID NO: 691869 - DNA, 33 bp, Homo sapien
ctcctcctcagtctgaaaacacgaacaccagct

SEQ ID NO: 691870 - DNA, 33 bp, Homo sapien
ctcctcctcagtctgagaacacgaacaccagct

SEQ ID NO: 691871 - DNA, 33 bp, Homo sapien
ggtgtcttgtagtttacagttccttaattaatc

SEQ ID NO: 691872 - DNA, 33 bp, Homo sapien
ggtgtcttgtagtttagagttccttaattaatc

SEQ ID NO: 691873 - DNA, 33 bp, Homo sapien
ttccagtttcttcatacgtccagagtctacaat

SEQ ID NO: 691874 - DNA, 33 bp, Homo sapien
ttccagtttcttcatatgtccagagtctacaat

SEQ ID NO: 691875 - DNA, 33 bp, Homo sapien
cttcagtgtgtatttacgatcaccttagatgca

SEQ ID NO: 691876 - DNA, 33 bp, Homo sapien
cttcagtgtgtatttaggatcaccttagatgca

SEQ ID NO: 691877 - DNA, 33 bp, Homo sapien
agaacaaacgtgatcaaatctgtactttgagaa

SEQ ID NO: 691878 - DNA, 33 bp, Homo sapien
agaacaaacgtgatcatatctgtactttgagaa

SEQ ID NO: 691879 - DNA, 33 bp, Homo sapien
ttcaggacaagtaggcacaaaaattagcctggt

SEQ ID NO: 691880 - DNA, 33 bp, Homo sapien
ttcaggacaagtaggcgcaaaaattagcctggt

SEQ ID NO: 691881 - DNA, 33 bp, Homo sapien
aatccagttacatgggacaatcctttaatgtta

SEQ ID NO: 691882 - DNA, 33 bp, Homo sapien
aatccagttacatgggccaatcctttaatgtta

SEQ ID NO: 691883 - DNA, 33 bp, Homo sapien
tcactagcttgaaccaatgcgataagtttgaag

SEQ ID NO: 691884 - DNA, 33 bp, Homo sapien
tcactagcttgaaccactgcgataagtttgaag

SEQ ID NO: 691885 - DNA, 33 bp, Homo sapien
cgaagatgtaacttcaataagcacttgggagat

SEQ ID NO: 691886 - DNA, 33 bp, Homo sapien
cgaagatgtaacttcagtaagcacttgggagat

SEQ ID NO: 691887 - DNA, 33 bp, Homo sapien
gatttgctatatggtacggacaagatgccttag

SEQ ID NO: 691888 - DNA, 33 bp, Homo sapien
gatttgctatatggtatggacaagatgccttag

SEQ ID NO: 691889 - DNA, 33 bp, Homo sapien
ggccacacttcttgaaaaccaggttcatccaac

SEQ ID NO: 691890 - DNA, 33 bp, Homo sapien
ggccacacttcttgaagaccaggttcatccaac

SEQ ID NO: 691891 - DNA, 33 bp, Homo sapien
tgtgattcacctcctccgagcactgacttttgg

SEQ ID NO: 691892 - DNA, 33 bp, Homo sapien
tgtgattcacctcctctgagcactgacttttgg

SEQ ID NO: 691893 - DNA, 33 bp, Homo sapien
tgtttcttctccaaaacttgatcatctgcaaag

SEQ ID NO: 691894 - DNA, 33 bp, Homo sapien
tgtttcttctccaaaatttgatcatctgcaaag

SEQ ID NO: 691895 - DNA, 33 bp, Homo sapien
tgggagaaagacagaccccattcattcagacag

SEQ ID NO: 691896 - DNA, 33 bp, Homo sapien
tgggagaaagacagactccattcattcagacag

SEQ ID NO: 691897 - DNA, 33 bp, Homo sapien
agttgacactgcagaacatttttatagggtttc

SEQ ID NO: 691898 - DNA, 33 bp, Homo sapien
agttgacactgcagaatatttttatagggtttc

SEQ ID NO: 691899 - DNA, 33 bp, Homo sapien
ggtatgaattctctgactaaattgctgttgtgg

SEQ ID NO: 691900 - DNA, 33 bp, Homo sapien
ggtatgaattctctgagtaaattgctgttgtgg

SEQ ID NO: 691901 - DNA, 33 bp, Homo sapien
gatgtgaagaggatggaattagaagaaatcctt

SEQ ID NO: 691902 - DNA, 33 bp, Homo sapien
gatgtgaagaggatggcattagaagaaatcctt

SEQ ID NO: 691903 - DNA, 33 bp, Homo sapien
agctggactgaaggataatatttgagacacaag

SEQ ID NO: 691904 - DNA, 33 bp, Homo sapien
agctggactgaaggatgatatttgagacacaag

SEQ ID NO: 691905 - DNA, 33 bp, Homo sapien
agctgcaaatcatcccactaatataccagcaaa

SEQ ID NO: 691906 - DNA, 33 bp, Homo sapien
agctgcaaatcatccccctaatataccagcaaa

SEQ ID NO: 691907 - DNA, 33 bp, Homo sapien
tagaaaaacagaaccaatacatactcatgtgca

SEQ ID NO: 691908 - DNA, 33 bp, Homo sapien
tagaaaaacagaaccagtacatactcatgtgca

SEQ ID NO: 691909 - DNA, 33 bp, Homo sapien
gatacagggaaagaatcaacaaagaagaaaagt

SEQ ID NO: 691910 - DNA, 33 bp, Homo sapien
gatacagggaaagaatgaacaaagaagaaaagt

SEQ ID NO: 691911 - DNA, 33 bp, Homo sapien
caaggtcatatgttaaagtgtccagctgctctg

SEQ ID NO: 691912 - DNA, 33 bp, Homo sapien
caaggtcatatgttaaggtgtccagctgctctg

SEQ ID NO: 691913 - DNA, 33 bp, Homo sapien
cgctaagggcccacataacaattttctgctatt

SEQ ID NO: 691914 - DNA, 33 bp, Homo sapien
cgctaagggcccacatgacaattttctgctatt

SEQ ID NO: 691915 - DNA, 33 bp, Homo sapien
caatttcacacaagtaaaaatccactccatggt

SEQ ID NO: 691916 - DNA, 33 bp, Homo sapien
caatttcacacaagtagaaatccactccatggt

SEQ ID NO: 691917 - DNA, 33 bp, Homo sapien
ggcaacgtgaagatccaacttttgttctgagtg

SEQ ID NO: 691918 - DNA, 33 bp, Homo sapien
ggcaacgtgaagatccgacttttgttctgagtg

SEQ ID NO: 691919 - DNA, 33 bp, Homo sapien
tggtttagacagaaagcaaatcaaatttgaatc

SEQ ID NO: 691920 - DNA, 33 bp, Homo sapien
tggtttagacagaaaggaaatcaaatttgaatc

SEQ ID NO: 691921 - DNA, 33 bp, Homo sapien
aactttgagatgctcacgatttcttccaaataa

SEQ ID NO: 691922 - DNA, 33 bp, Homo sapien
aactttgagatgctcatgatttcttccaaataa

SEQ ID NO: 691923 - DNA, 33 bp, Homo sapien
agggtatttggatgagaattcacaagtcatatc

SEQ ID NO: 691924 - DNA, 33 bp, Homo sapien
agggtatttggatgaggattcacaagtcatatc

SEQ ID NO: 691925 - DNA, 33 bp, Homo sapien
gcactcttcatgaatgcagctgaaggtgtcttg

SEQ ID NO: 691926 - DNA, 33 bp, Homo sapien
gcactcttcatgaatgtagctgaaggtgtcttg

SEQ ID NO: 691927 - DNA, 33 bp, Homo sapien
ttataaatggatttctcactttaccaaagagtt

SEQ ID NO: 691928 - DNA, 33 bp, Homo sapien
ttataaatggatttctgactttaccaaagagtt

SEQ ID NO: 691929 - DNA, 33 bp, Homo sapien
tgaacactggatataactgcacagccaaaaata

SEQ ID NO: 691930 - DNA, 33 bp, Homo sapien
tgaacactggatataattgcacagccaaaaata

SEQ ID NO: 691931 - DNA, 33 bp, Homo sapien
ctaatttattcaattcaagcagggatgatagaa

SEQ ID NO: 691932 - DNA, 33 bp, Homo sapien
ctaatttattcaattcgagcagggatgatagaa

SEQ ID NO: 691933 - DNA, 33 bp, Homo sapien
tgtaatgtgatgtccaatagtaacaaacactag

SEQ ID NO: 691934 - DNA, 33 bp, Homo sapien
tgtaatgtgatgtccagtagtaacaaacactag

SEQ ID NO: 691935 - DNA, 33 bp, Homo sapien
ctctgcaatttactacaaattacttgctgccca

SEQ ID NO: 691936 - DNA, 33 bp, Homo sapien
ctctgcaatttactaccaattacttgctgccca

SEQ ID NO: 691937 - DNA, 33 bp, Homo sapien
cctattttagactctcagaatcaacctttccat

SEQ ID NO: 691938 - DNA, 33 bp, Homo sapien
cctattttagactctcggaatcaacctttccat

SEQ ID NO: 691939 - DNA, 33 bp, Homo sapien
aggaaactgagttttacgtagagcaactggtca

SEQ ID NO: 691940 - DNA, 33 bp, Homo sapien
aggaaactgagttttaggtagagcaactggtca

SEQ ID NO: 691941 - DNA, 33 bp, Homo sapien
atttgcatttaggaagaacccatctggctgaca

SEQ ID NO: 691942 - DNA, 33 bp, Homo sapien
atttgcatttaggaagtacccatctggctgaca

SEQ ID NO: 691943 - DNA, 33 bp, Homo sapien
tctctggaaaataagagggttgaatgacctcca

SEQ ID NO: 691944 - DNA, 33 bp, Homo sapien
tctctggaaaataagatggttgaatgacctcca

SEQ ID NO: 691945 - DNA, 33 bp, Homo sapien
gagcaaatgcagaagacgagttagcaaggttga

SEQ ID NO: 691946 - DNA, 33 bp, Homo sapien
gagcaaatgcagaagatgagttagcaaggttga

SEQ ID NO: 691947 - DNA, 33 bp, Homo sapien
gtccattgctcactaaaacacggtgcctgacac

SEQ ID NO: 691948 - DNA, 33 bp, Homo sapien
gtccattgctcactaagacacggtgcctgacac

SEQ ID NO: 691949 - DNA, 33 bp, Homo sapien
gtcttcactgtaacaacctgcaattaagagcca

SEQ ID NO: 691950 - DNA, 33 bp, Homo sapien
gtcttcactgtaacaatctgcaattaagagcca

SEQ ID NO: 691951 - DNA, 33 bp, Homo sapien
catttcatcctcctagaacttagcctactttac

SEQ ID NO: 691952 - DNA, 33 bp, Homo sapien
catttcatcctcctagtacttagcctactttac

SEQ ID NO: 691953 - DNA, 33 bp, Homo sapien
gcagcaaagcaaaattcaataagtattgaccca

SEQ ID NO: 691954 - DNA, 33 bp, Homo sapien
gcagcaaagcaaaatttaataagtattgaccca

SEQ ID NO: 691955 - DNA, 33 bp, Homo sapien
agtgagagtacggtaacagcgactgctcgcatg

SEQ ID NO: 691956 - DNA, 33 bp, Homo sapien
agtgagagtacggtaatagcgactgctcgcatg

SEQ ID NO: 691957 - DNA, 33 bp, Homo sapien
taatacattttattcaagagtttcaagatgcta

SEQ ID NO: 691958 - DNA, 33 bp, Homo sapien
taatacattttattcaggagtttcaagatgcta

SEQ ID NO: 691959 - DNA, 33 bp, Homo sapien
atcatgactcaaagtcaagggcaaaggcaaaag

SEQ ID NO: 691960 - DNA, 33 bp, Homo sapien
atcatgactcaaagtcgagggcaaaggcaaaag

SEQ ID NO: 691961 - DNA, 33 bp, Homo sapien
ggaaagcaaatgcccacgtaactttagagtggt

SEQ ID NO: 691962 - DNA, 33 bp, Homo sapien
ggaaagcaaatgcccatgtaactttagagtggt

SEQ ID NO: 691963 - DNA, 33 bp, Homo sapien
aaccatatagaagtctcaagttgcttttagtca

SEQ ID NO: 691964 - DNA, 33 bp, Homo sapien
aaccatatagaagtctgaagttgcttttagtca

SEQ ID NO: 691965 - DNA, 33 bp, Homo sapien
gaaatcagtgggtgtacacaaatctctaaatta

SEQ ID NO: 691966 - DNA, 33 bp, Homo sapien
gaaatcagtgggtgtatacaaatctctaaatta

SEQ ID NO: 691967 - DNA, 33 bp, Homo sapien
cccaccttgaacccttcaacacagaaaccttat

SEQ ID NO: 691968 - DNA, 33 bp, Homo sapien
cccaccttgaaccctttaacacagaaaccttat

SEQ ID NO: 691969 - DNA, 33 bp, Homo sapien
agagaatgtggattgcacccataaagaatgatg

SEQ ID NO: 691970 - DNA, 33 bp, Homo sapien
agagaatgtggattgcgcccataaagaatgatg

SEQ ID NO: 691971 - DNA, 33 bp, Homo sapien
taagctcaatgctgcccaaaagaagctcaaatt

SEQ ID NO: 691972 - DNA, 33 bp, Homo sapien
taagctcaatgctgcctaaaagaagctcaaatt

SEQ ID NO: 691973 - DNA, 33 bp, Homo sapien
gggttatcccaatgcaaattgctaaactcttca

SEQ ID NO: 691974 - DNA, 33 bp, Homo sapien
gggttatcccaatgcacattgctaaactcttca

SEQ ID NO: 691975 - DNA, 33 bp, Homo sapien
agcctgtgcaaaaagaacataacttcgtctcaa

SEQ ID NO: 691976 - DNA, 33 bp, Homo sapien
agcctgtgcaaaaagagcataacttcgtctcaa

SEQ ID NO: 691977 - DNA, 33 bp, Homo sapien
ggcatgaggtgcgaagaataaacattattttta

SEQ ID NO: 691978 - DNA, 33 bp, Homo sapien
ggcatgaggtgcgaaggataaacattattttta

SEQ ID NO: 691979 - DNA, 33 bp, Homo sapien
ggaggcgattgaagcacagagagactacgcatc

SEQ ID NO: 691980 - DNA, 33 bp, Homo sapien
ggaggcgattgaagcatagagagactacgcatc

SEQ ID NO: 691981 - DNA, 33 bp, Homo sapien
tgggaagaaattcaaaagttacctcttggaaga

SEQ ID NO: 691982 - DNA, 33 bp, Homo sapien
tgggaagaaattcaaatgttacctcttggaaga

SEQ ID NO: 691983 - DNA, 33 bp, Homo sapien
tgccttcctgagactaaacaatttgagtaggtc

SEQ ID NO: 691984 - DNA, 33 bp, Homo sapien
tgccttcctgagactagacaatttgagtaggtc

SEQ ID NO: 691985 - DNA, 33 bp, Homo sapien
tgtaggagcataaaggccaacatgggccactca

SEQ ID NO: 691986 - DNA, 33 bp, Homo sapien
tgtaggagcataaaggtcaacatgggccactca

SEQ ID NO: 691987 - DNA, 33 bp, Homo sapien
atttgtgtagcggaacaaggataaatcagactt

SEQ ID NO: 691988 - DNA, 33 bp, Homo sapien
atttgtgtagcggaacgaggataaatcagactt

SEQ ID NO: 691989 - DNA, 33 bp, Homo sapien
acatctgaacattttaagattggccccactcac

SEQ ID NO: 691990 - DNA, 33 bp, Homo sapien
acatctgaacattttaggattggccccactcac

SEQ ID NO: 691991 - DNA, 33 bp, Homo sapien
tttaaaggagaatgagaaaagatgagatttgaa

SEQ ID NO: 691992 - DNA, 33 bp, Homo sapien
tttaaaggagaatgagtaaagatgagatttgaa

SEQ ID NO: 691993 - DNA, 33 bp, Homo sapien
tttcaacagcaatgcagaggagtttctgttgtt

SEQ ID NO: 691994 - DNA, 33 bp, Homo sapien
tttcaacagcaatgcataggagtttctgttgtt

SEQ ID NO: 691995 - DNA, 33 bp, Homo sapien
atataatgcagaggaaaaggactgagtcaatgt

SEQ ID NO: 691996 - DNA, 33 bp, Homo sapien
atataatgcagaggaagaggactgagtcaatgt

SEQ ID NO: 691997 - DNA, 33 bp, Homo sapien
cttgaggacataggagaatttaatttacattgt

SEQ ID NO: 691998 - DNA, 33 bp, Homo sapien
cttgaggacataggaggatttaatttacattgt

SEQ ID NO: 691999 - DNA, 33 bp, Homo sapien
aggccatgaggactgcaatccctgggcaagtcc

SEQ ID NO: 692000 - DNA, 33 bp, Homo sapien
aggccatgaggactgcgatccctgggcaagtcc

SEQ ID NO: 692001 - DNA, 33 bp, Homo sapien
ttgtatagacagccaaatatactacaatagcta

SEQ ID NO: 692002 - DNA, 33 bp, Homo sapien
ttgtatagacagccaagtatactacaatagcta

SEQ ID NO: 692003 - DNA, 33 bp, Homo sapien
agaactgaagagttacaatgaacctaggaaagt

SEQ ID NO: 692004 - DNA, 33 bp, Homo sapien
agaactgaagagttacgatgaacctaggaaagt

SEQ ID NO: 692005 - DNA, 33 bp, Homo sapien
aactcaattaaggtcaaatgtcattaacttcgg

SEQ ID NO: 692006 - DNA, 33 bp, Homo sapien
aactcaattaaggtcagatgtcattaacttcgg

SEQ ID NO: 692007 - DNA, 33 bp, Homo sapien
attcttatcagagccaataaataaatgattgca

SEQ ID NO: 692008 - DNA, 33 bp, Homo sapien
attcttatcagagccagtaaataaatgattgca

SEQ ID NO: 692009 - DNA, 33 bp, Homo sapien
gccagaagccagaattaaaggtgccaatagggt

SEQ ID NO: 692010 - DNA, 33 bp, Homo sapien
gccagaagccagaattgaaggtgccaatagggt

SEQ ID NO: 692011 - DNA, 33 bp, Homo sapien
tttttgaaatcaccagacaatttcctgcctcca

SEQ ID NO: 692012 - DNA, 33 bp, Homo sapien
tttttgaaatcaccaggcaatttcctgcctcca

SEQ ID NO: 692013 - DNA, 33 bp, Homo sapien
aatcagatagagcagcagccttgaccaaccaga

SEQ ID NO: 692014 - DNA, 33 bp, Homo sapien
aatcagatagagcagcggccttgaccaaccaga

SEQ ID NO: 692015 - DNA, 33 bp, Homo sapien
atacttcatgagaaaaagtacagtaagcagccc

SEQ ID NO: 692016 - DNA, 33 bp, Homo sapien
atacttcatgagaaaaggtacagtaagcagccc

SEQ ID NO: 692017 - DNA, 33 bp, Homo sapien
ggtaggagaaaaaagaagatctatagcatagat

SEQ ID NO: 692018 - DNA, 33 bp, Homo sapien
ggtaggagaaaaaagaggatctatagcatagat

SEQ ID NO: 692019 - DNA, 33 bp, Homo sapien
aaacacctctaaaaaaataacggctttgagaca

SEQ ID NO: 692020 - DNA, 33 bp, Homo sapien
aaacacctctaaaaaactaacggctttgagaca

SEQ ID NO: 692021 - DNA, 33 bp, Homo sapien
gtctatggggagctcgaaaaaggcaggtgcagc

SEQ ID NO: 692022 - DNA, 33 bp, Homo sapien
gtctatggggagctcggaaaaggcaggtgcagc

SEQ ID NO: 692023 - DNA, 33 bp, Homo sapien
ccttttttataactgccgagtaatgttctgttg

SEQ ID NO: 692024 - DNA, 33 bp, Homo sapien
ccttttttataactgctgagtaatgttctgttg

SEQ ID NO: 692025 - DNA, 33 bp, Homo sapien
acctgactctctaaatctgtttgggatttctat

SEQ ID NO: 692026 - DNA, 33 bp, Homo sapien
acctgactctctaaatttgtttgggatttctat

SEQ ID NO: 692027 - DNA, 33 bp, Homo sapien
gtaggcaatcctttgaagtccttctcatctaga

SEQ ID NO: 692028 - DNA, 33 bp, Homo sapien
gtaggcaatcctttgaggtccttctcatctaga

SEQ ID NO: 692029 - DNA, 33 bp, Homo sapien
gataggtttattacagcccatcatgggatcagg

SEQ ID NO: 692030 - DNA, 33 bp, Homo sapien
gataggtttattacagtccatcatgggatcagg

SEQ ID NO: 692031 - DNA, 33 bp, Homo sapien
ctaaagccgtaagaacaatgatctctgcctgca

SEQ ID NO: 692032 - DNA, 33 bp, Homo sapien
ctaaagccgtaagaacgatgatctctgcctgca

SEQ ID NO: 692033 - DNA, 33 bp, Homo sapien
agtggggcaaactgtcacacactcagcttcctt

SEQ ID NO: 692034 - DNA, 33 bp, Homo sapien
agtggggcaaactgtcgcacactcagcttcctt

SEQ ID NO: 692035 - DNA, 33 bp, Homo sapien
gcaatttctaagtgtaaaagctcctatatgcct

SEQ ID NO: 692036 - DNA, 33 bp, Homo sapien
gcaatttctaagtgtagaagctcctatatgcct

SEQ ID NO: 692037 - DNA, 33 bp, Homo sapien
tgtgtttgagaatcaccgcaatttttctgcctc

SEQ ID NO: 692038 - DNA, 33 bp, Homo sapien
tgtgtttgagaatcactgcaatttttctgcctc

SEQ ID NO: 692039 - DNA, 33 bp, Homo sapien
tgcctggccgcaaaaaattcttattctaacatg

SEQ ID NO: 692040 - DNA, 33 bp, Homo sapien
tgcctggccgcaaaaatttcttattctaacatg

SEQ ID NO: 692041 - DNA, 33 bp, Homo sapien
tttagtggttgaagaaatatctgatagagccca

SEQ ID NO: 692042 - DNA, 33 bp, Homo sapien
tttagtggttgaagaagtatctgatagagccca

SEQ ID NO: 692043 - DNA, 33 bp, Homo sapien
ctactgaggattattaacttgatatactgcaaa

SEQ ID NO: 692044 - DNA, 33 bp, Homo sapien
ctactgaggattattaccttgatatactgcaaa

SEQ ID NO: 692045 - DNA, 33 bp, Homo sapien
tgagaaaactgattgcaagaggtagaacaacaa

SEQ ID NO: 692046 - DNA, 33 bp, Homo sapien
tgagaaaactgattgctagaggtagaacaacaa

SEQ ID NO: 692047 - DNA, 33 bp, Homo sapien
attgagaaagtcttcaaaatttggcttttagga

SEQ ID NO: 692048 - DNA, 33 bp, Homo sapien
attgagaaagtcttcagaatttggcttttagga

SEQ ID NO: 692049 - DNA, 33 bp, Homo sapien
cataggaagatagcaactctgacctcagatctt

SEQ ID NO: 692050 - DNA, 33 bp, Homo sapien
cataggaagatagcaattctgacctcagatctt

SEQ ID NO: 692051 - DNA, 33 bp, Homo sapien
aacatagtaagaatataaaaatgccaaatgagt

SEQ ID NO: 692052 - DNA, 33 bp, Homo sapien
aacatagtaagaatatgaaaatgccaaatgagt

SEQ ID NO: 692053 - DNA, 33 bp, Homo sapien
aataaaatgatttggcaaattgaattgtgctgt

SEQ ID NO: 692054 - DNA, 33 bp, Homo sapien
aataaaatgatttggccaattgaattgtgctgt

SEQ ID NO: 692055 - DNA, 33 bp, Homo sapien
tatgtacatttccttcaaaggccatttatcagt

SEQ ID NO: 692056 - DNA, 33 bp, Homo sapien
tatgtacatttccttcgaaggccatttatcagt

SEQ ID NO: 692057 - DNA, 33 bp, Homo sapien
tgcctctgccaaggaaccttagaagacattatt

SEQ ID NO: 692058 - DNA, 33 bp, Homo sapien
tgcctctgccaaggaatcttagaagacattatt

SEQ ID NO: 692059 - DNA, 33 bp, Homo sapien
ttcattagttaataaacagctattggacgttct

SEQ ID NO: 692060 - DNA, 33 bp, Homo sapien
ttcattagttaataaagagctattggacgttct

SEQ ID NO: 692061 - DNA, 33 bp, Homo sapien
tagttataaacattataagagcagaaatttatt

SEQ ID NO: 692062 - DNA, 33 bp, Homo sapien
tagttataaacattattagagcagaaatttatt

SEQ ID NO: 692063 - DNA, 33 bp, Homo sapien
aatctctttgagcagagaaagacagtttagagc

SEQ ID NO: 692064 - DNA, 33 bp, Homo sapien
aatctctttgagcagataaagacagtttagagc

SEQ ID NO: 692065 - DNA, 33 bp, Homo sapien
tcagcaaatcaagaacaaaaggaaacttcctca

SEQ ID NO: 692066 - DNA, 33 bp, Homo sapien
tcagcaaatcaagaaccaaaggaaacttcctca

SEQ ID NO: 692067 - DNA, 33 bp, Homo sapien
gattgtcagcaaacataaaatcactgtatctaa

SEQ ID NO: 692068 - DNA, 33 bp, Homo sapien
gattgtcagcaaacattaaatcactgtatctaa

SEQ ID NO: 692069 - DNA, 33 bp, Homo sapien
tctttgttctttaaaacggatgatctttccttc

SEQ ID NO: 692070 - DNA, 33 bp, Homo sapien
tctttgttctttaaaatggatgatctttccttc

SEQ ID NO: 692071 - DNA, 33 bp, Homo sapien
tcctatttcatagatacggaagtttgatttgtt

SEQ ID NO: 692072 - DNA, 33 bp, Homo sapien
tcctatttcatagatatggaagtttgatttgtt

SEQ ID NO: 692073 - DNA, 33 bp, Homo sapien
aaaatcttcgttccaaccaatgtttatgttttc

SEQ ID NO: 692074 - DNA, 33 bp, Homo sapien
aaaatcttcgttccaatcaatgtttatgttttc

SEQ ID NO: 692075 - DNA, 33 bp, Homo sapien
gaataggcagttttggaagggagaagttaagtg

SEQ ID NO: 692076 - DNA, 33 bp, Homo sapien
gaataggcagttttggtagggagaagttaagtg

SEQ ID NO: 692077 - DNA, 33 bp, Homo sapien
atatctcctgtgtcaccgagaaaaggagtcacc

SEQ ID NO: 692078 - DNA, 33 bp, Homo sapien
atatctcctgtgtcactgagaaaaggagtcacc

SEQ ID NO: 692079 - DNA, 33 bp, Homo sapien
tatttccttagcaaaaatttatgtgaaggatgc

SEQ ID NO: 692080 - DNA, 33 bp, Homo sapien
tatttccttagcaaaactttatgtgaaggatgc

SEQ ID NO: 692081 - DNA, 33 bp, Homo sapien
tgtttaatttgcaagaactgaaagctgaaatga

SEQ ID NO: 692082 - DNA, 33 bp, Homo sapien
tgtttaatttgcaagagctgaaagctgaaatga

SEQ ID NO: 692083 - DNA, 33 bp, Homo sapien
aaatgtcaatgtaataataaaggcatttgtatc

SEQ ID NO: 692084 - DNA, 33 bp, Homo sapien
aaatgtcaatgtaatattaaaggcatttgtatc

SEQ ID NO: 692085 - DNA, 33 bp, Homo sapien
agaaaagttgagttaaatgaacttcagaaggac

SEQ ID NO: 692086 - DNA, 33 bp, Homo sapien
agaaaagttgagttaattgaacttcagaaggac

SEQ ID NO: 692087 - DNA, 33 bp, Homo sapien
cagtatagtcttttaaatgatgtatgaaaccaa

SEQ ID NO: 692088 - DNA, 33 bp, Homo sapien
cagtatagtcttttaagtgatgtatgaaaccaa

SEQ ID NO: 692089 - DNA, 33 bp, Homo sapien
caggtttcttattcagccgtataatgtcaggca

SEQ ID NO: 692090 - DNA, 33 bp, Homo sapien
caggtttcttattcaggcgtataatgtcaggca

SEQ ID NO: 692091 - DNA, 33 bp, Homo sapien
tttaaacactgtgccaactagcaagtaaatcca

SEQ ID NO: 692092 - DNA, 33 bp, Homo sapien
tttaaacactgtgccagctagcaagtaaatcca

SEQ ID NO: 692093 - DNA, 33 bp, Homo sapien
atgtctaacacagtgacacagcactcaatggtc

SEQ ID NO: 692094 - DNA, 33 bp, Homo sapien
atgtctaacacagtgagacagcactcaatggtc

SEQ ID NO: 692095 - DNA, 33 bp, Homo sapien
tatgcccatgatgcaacttcctatctatgtctt

SEQ ID NO: 692096 - DNA, 33 bp, Homo sapien
tatgcccatgatgcaagttcctatctatgtctt

SEQ ID NO: 692097 - DNA, 33 bp, Homo sapien
tgtaaaccggatataaatgtgtccctaactcag

SEQ ID NO: 692098 - DNA, 33 bp, Homo sapien
tgtaaaccggatataattgtgtccctaactcag

SEQ ID NO: 692099 - DNA, 33 bp, Homo sapien
ccaaagaggttaaaaacttgcccaaatcagggc

SEQ ID NO: 692100 - DNA, 33 bp, Homo sapien
ccaaagaggttaaaaatttgcccaaatcagggc

SEQ ID NO: 692101 - DNA, 33 bp, Homo sapien
ttttgtcccagctttaagatacagggataaaat

SEQ ID NO: 692102 - DNA, 33 bp, Homo sapien
ttttgtcccagctttatgatacagggataaaat

SEQ ID NO: 692103 - DNA, 33 bp, Homo sapien
gcattatgctaggagacgtgaggttagtagttt

SEQ ID NO: 692104 - DNA, 33 bp, Homo sapien
gcattatgctaggagatgtgaggttagtagttt

SEQ ID NO: 692105 - DNA, 33 bp, Homo sapien
agggctttttcatcaacgtttgatctgatagat

SEQ ID NO: 692106 - DNA, 33 bp, Homo sapien
agggctttttcatcaatgtttgatctgatagat

SEQ ID NO: 692107 - DNA, 33 bp, Homo sapien
acccaatggtctcctactactaccagaaaagga

SEQ ID NO: 692108 - DNA, 33 bp, Homo sapien
acccaatggtctcctattactaccagaaaagga

SEQ ID NO: 692109 - DNA, 33 bp, Homo sapien
acctgaacacaaacgacgtctactaaatacttc

SEQ ID NO: 692110 - DNA, 33 bp, Homo sapien
acctgaacacaaacgatgtctactaaatacttc

SEQ ID NO: 692111 - DNA, 33 bp, Homo sapien
tttgcacttaggtttacagacccctgaatgctc

SEQ ID NO: 692112 - DNA, 33 bp, Homo sapien
tttgcacttaggtttatagacccctgaatgctc

SEQ ID NO: 692113 - DNA, 33 bp, Homo sapien
atcaaaggtacaataaagacttcaaagtagaag

SEQ ID NO: 692114 - DNA, 33 bp, Homo sapien
atcaaaggtacaataatgacttcaaagtagaag

SEQ ID NO: 692115 - DNA, 33 bp, Homo sapien
atagattgagggtacacgtgaaattttgatacc

SEQ ID NO: 692116 - DNA, 33 bp, Homo sapien
atagattgagggtacatgtgaaattttgatacc

SEQ ID NO: 692117 - DNA, 33 bp, Homo sapien
aggaaagttgaaatgccgagaggttaagtgtga

SEQ ID NO: 692118 - DNA, 33 bp, Homo sapien
aggaaagttgaaatgctgagaggttaagtgtga

SEQ ID NO: 692119 - DNA, 33 bp, Homo sapien
agttctgttccaaataccctgtttgagtgttta

SEQ ID NO: 692120 - DNA, 33 bp, Homo sapien
agttctgttccaaatatcctgtttgagtgttta

SEQ ID NO: 692121 - DNA, 33 bp, Homo sapien
taaagaggtctgataacaaacaatcacacagtt

SEQ ID NO: 692122 - DNA, 33 bp, Homo sapien
taaagaggtctgataagaaacaatcacacagtt

SEQ ID NO: 692123 - DNA, 33 bp, Homo sapien
gtgttttccctttctcacaaactacgtcatggg

SEQ ID NO: 692124 - DNA, 33 bp, Homo sapien
gtgttttccctttctcgcaaactacgtcatggg

SEQ ID NO: 692125 - DNA, 33 bp, Homo sapien
atattcttctagctggacaaattttaacaacat

SEQ ID NO: 692126 - DNA, 33 bp, Homo sapien
atattcttctagctgggcaaattttaacaacat

SEQ ID NO: 692127 - DNA, 33 bp, Homo sapien
tcctggcaacggtcaagaaaacttcctgggcaa

SEQ ID NO: 692128 - DNA, 33 bp, Homo sapien
tcctggcaacggtcaataaaacttcctgggcaa

SEQ ID NO: 692129 - DNA, 33 bp, Homo sapien
ctatagtccgcatcacacttacttatgatgtct

SEQ ID NO: 692130 - DNA, 33 bp, Homo sapien
ctatagtccgcatcacccttacttatgatgtct

SEQ ID NO: 692131 - DNA, 33 bp, Homo sapien
attttgaactgttttacaatcagtagcatggtt

SEQ ID NO: 692132 - DNA, 33 bp, Homo sapien
attttgaactgttttataatcagtagcatggtt

SEQ ID NO: 692133 - DNA, 33 bp, Homo sapien
tattagctcattcaatgaatttttttccagcac

SEQ ID NO: 692134 - DNA, 33 bp, Homo sapien
tattagctcattcaattaatttttttccagcac

SEQ ID NO: 692135 - DNA, 33 bp, Homo sapien
gtatggaaagtaaaacaatcatggaaagagtat

SEQ ID NO: 692136 - DNA, 33 bp, Homo sapien
gtatggaaagtaaaacgatcatggaaagagtat

SEQ ID NO: 692137 - DNA, 33 bp, Homo sapien
actgtttgttctaccactacgttgatgcaaaat

SEQ ID NO: 692138 - DNA, 33 bp, Homo sapien
actgtttgttctaccattacgttgatgcaaaat

SEQ ID NO: 692139 - DNA, 33 bp, Homo sapien
ttggttgagcaggggaaaattaacatggccaaa

SEQ ID NO: 692140 - DNA, 33 bp, Homo sapien
ttggttgagcaggggagaattaacatggccaaa

SEQ ID NO: 692141 - DNA, 33 bp, Homo sapien
atccaattctggttgaagtttccatgaaagagt

SEQ ID NO: 692142 - DNA, 33 bp, Homo sapien
atccaattctggttgacgtttccatgaaagagt

SEQ ID NO: 692143 - DNA, 33 bp, Homo sapien
atttgcaggtgtaacactagcctcagagaacct

SEQ ID NO: 692144 - DNA, 33 bp, Homo sapien
atttgcaggtgtaacattagcctcagagaacct

SEQ ID NO: 692145 - DNA, 33 bp, Homo sapien
ccatatcttcccatgaataagtgacttgactta

SEQ ID NO: 692146 - DNA, 33 bp, Homo sapien
ccatatcttcccatgagtaagtgacttgactta

SEQ ID NO: 692147 - DNA, 33 bp, Homo sapien
ccttgggagcaaaataaccataacacccacctt

SEQ ID NO: 692148 - DNA, 33 bp, Homo sapien
ccttgggagcaaaatagccataacacccacctt

SEQ ID NO: 692149 - DNA, 33 bp, Homo sapien
agtcatgtgttgagtgaatgccataaatcagac

SEQ ID NO: 692150 - DNA, 33 bp, Homo sapien
agtcatgtgttgagtggatgccataaatcagac

SEQ ID NO: 692151 - DNA, 33 bp, Homo sapien
agatcagaagggaagaaaggcttcacagaattg

SEQ ID NO: 692152 - DNA, 33 bp, Homo sapien
agatcagaagggaagagaggcttcacagaattg

SEQ ID NO: 692153 - DNA, 33 bp, Homo sapien
aaatgaaaatctgttaaatcatggtgttaatga

SEQ ID NO: 692154 - DNA, 33 bp, Homo sapien
aaatgaaaatctgttatatcatggtgttaatga

SEQ ID NO: 692155 - DNA, 33 bp, Homo sapien
atgaaatgtcttctaacctttagacgtttatca

SEQ ID NO: 692156 - DNA, 33 bp, Homo sapien
atgaaatgtcttctaatctttagacgtttatca

SEQ ID NO: 692157 - DNA, 33 bp, Homo sapien
gctgtcttcatcccaaatagattaaacccttct

SEQ ID NO: 692158 - DNA, 33 bp, Homo sapien
gctgtcttcatcccaagtagattaaacccttct

SEQ ID NO: 692159 - DNA, 33 bp, Homo sapien
actactgttacctccaaaatagtcacctcactg

SEQ ID NO: 692160 - DNA, 33 bp, Homo sapien
actactgttacctccagaatagtcacctcactg

SEQ ID NO: 692161 - DNA, 33 bp, Homo sapien
taaaaatcacaatataactggcctcatcttctc

SEQ ID NO: 692162 - DNA, 33 bp, Homo sapien
taaaaatcacaatatatctggcctcatcttctc

SEQ ID NO: 692163 - DNA, 33 bp, Homo sapien
ggtattttgcctgtgaagtccatgtttataacc

SEQ ID NO: 692164 - DNA, 33 bp, Homo sapien
ggtattttgcctgtgaggtccatgtttataacc

SEQ ID NO: 692165 - DNA, 33 bp, Homo sapien
actttacaataggaaactccagatttgaagcca

SEQ ID NO: 692166 - DNA, 33 bp, Homo sapien
actttacaataggaaagtccagatttgaagcca

SEQ ID NO: 692167 - DNA, 33 bp, Homo sapien
aacaagcccaccaaaaatttgccaaagacttga

SEQ ID NO: 692168 - DNA, 33 bp, Homo sapien
aacaagcccaccaaaactttgccaaagacttga

SEQ ID NO: 692169 - DNA, 33 bp, Homo sapien
aaggcacggggtaggaagaaaagagacaagatt

SEQ ID NO: 692170 - DNA, 33 bp, Homo sapien
aaggcacggggtaggaggaaaagagacaagatt

SEQ ID NO: 692171 - DNA, 33 bp, Homo sapien
aagtcctccctaaatgccaatactcaaaacaca

SEQ ID NO: 692172 - DNA, 33 bp, Homo sapien
aagtcctccctaaatgtcaatactcaaaacaca

SEQ ID NO: 692173 - DNA, 33 bp, Homo sapien
gactgcttctagggaaatgccctgggctcatgg

SEQ ID NO: 692174 - DNA, 33 bp, Homo sapien
gactgcttctagggaagtgccctgggctcatgg

SEQ ID NO: 692175 - DNA, 33 bp, Homo sapien
ggaagtgataatagcagctgattattgactgag

SEQ ID NO: 692176 - DNA, 33 bp, Homo sapien
ggaagtgataatagcatctgattattgactgag

SEQ ID NO: 692177 - DNA, 33 bp, Homo sapien
tgttccttggggtataactagtcactggtggga

SEQ ID NO: 692178 - DNA, 33 bp, Homo sapien
tgttccttggggtatagctagtcactggtggga

SEQ ID NO: 692179 - DNA, 33 bp, Homo sapien
agtatggggtacaagcacaagggctagcattct

SEQ ID NO: 692180 - DNA, 33 bp, Homo sapien
agtatggggtacaagcgcaagggctagcattct

SEQ ID NO: 692181 - DNA, 33 bp, Homo sapien
gggacattaactttgacccaaagagctagagca

SEQ ID NO: 692182 - DNA, 33 bp, Homo sapien
gggacattaactttgatccaaagagctagagca

SEQ ID NO: 692183 - DNA, 33 bp, Homo sapien
taatgataacataccaaaattggtgaataattt

SEQ ID NO: 692184 - DNA, 33 bp, Homo sapien
taatgataacataccacaattggtgaataattt

SEQ ID NO: 692185 - DNA, 33 bp, Homo sapien
ctgggtaaagaccagggactatagagataggat

SEQ ID NO: 692186 - DNA, 33 bp, Homo sapien
ctgggtaaagaccaggtactatagagataggat

SEQ ID NO: 692187 - DNA, 33 bp, Homo sapien
atccagatcctcacacagtcatcctgtcttatg

SEQ ID NO: 692188 - DNA, 33 bp, Homo sapien
atccagatcctcacactgtcatcctgtcttatg

SEQ ID NO: 692189 - DNA, 33 bp, Homo sapien
ggggatcactaagtgaatatttgctgatttttt

SEQ ID NO: 692190 - DNA, 33 bp, Homo sapien
ggggatcactaagtgagtatttgctgatttttt

SEQ ID NO: 692191 - DNA, 33 bp, Homo sapien
tgggaagattttgaaccattcctagaaagtaga

SEQ ID NO: 692192 - DNA, 33 bp, Homo sapien
tgggaagattttgaactattcctagaaagtaga

SEQ ID NO: 692193 - DNA, 33 bp, Homo sapien
actgagtatacctgcaaaaagataagctgcccc

SEQ ID NO: 692194 - DNA, 33 bp, Homo sapien
actgagtatacctgcagaaagataagctgcccc

SEQ ID NO: 692195 - DNA, 33 bp, Homo sapien
actgtagctgcctatccagcctcaaaatcttca

SEQ ID NO: 692196 - DNA, 33 bp, Homo sapien
actgtagctgcctatctagcctcaaaatcttca

SEQ ID NO: 692197 - DNA, 33 bp, Homo sapien
ttcaggccattgcctccaaaatgcagtttctat

SEQ ID NO: 692198 - DNA, 33 bp, Homo sapien
ttcaggccattgcctcgaaaatgcagtttctat

SEQ ID NO: 692199 - DNA, 33 bp, Homo sapien
cttcttccagcttctgaagtctgaccgtagcct

SEQ ID NO: 692200 - DNA, 33 bp, Homo sapien
cttcttccagcttctggagtctgaccgtagcct

SEQ ID NO: 692201 - DNA, 33 bp, Homo sapien
tgatgatgctatcaaaaagctaaatatggcaat

SEQ ID NO: 692202 - DNA, 33 bp, Homo sapien
tgatgatgctatcaaagagctaaatatggcaat

SEQ ID NO: 692203 - DNA, 33 bp, Homo sapien
tgtcaatcatgacccactatgagttcagtttaa

SEQ ID NO: 692204 - DNA, 33 bp, Homo sapien
tgtcaatcatgacccagtatgagttcagtttaa

SEQ ID NO: 692205 - DNA, 33 bp, Homo sapien
aagaaacagttaccaaatcccaaatgctgctga

SEQ ID NO: 692206 - DNA, 33 bp, Homo sapien
aagaaacagttaccaactcccaaatgctgctga

SEQ ID NO: 692207 - DNA, 33 bp, Homo sapien
atttccttacaaaacacggaaggcaaacacttt

SEQ ID NO: 692208 - DNA, 33 bp, Homo sapien
atttccttacaaaacatggaaggcaaacacttt

SEQ ID NO: 692209 - DNA, 33 bp, Homo sapien
ctagtatccagcttaacattgttgcaatatcat

SEQ ID NO: 692210 - DNA, 33 bp, Homo sapien
ctagtatccagcttaatattgttgcaatatcat

SEQ ID NO: 692211 - DNA, 33 bp, Homo sapien
ctgctaacaacataccaaataggcttcaagtcc

SEQ ID NO: 692212 - DNA, 33 bp, Homo sapien
ctgctaacaacataccgaataggcttcaagtcc

SEQ ID NO: 692213 - DNA, 33 bp, Homo sapien
aggtccccttgttttgcaagtgaagatttgttt

SEQ ID NO: 692214 - DNA, 33 bp, Homo sapien
aggtccccttgttttggaagtgaagatttgttt

SEQ ID NO: 692215 - DNA, 33 bp, Homo sapien
tcttcttaaattgccaaatgaacgcaatgccca

SEQ ID NO: 692216 - DNA, 33 bp, Homo sapien
tcttcttaaattgccagatgaacgcaatgccca

SEQ ID NO: 692217 - DNA, 33 bp, Homo sapien
cttgttgggagcatcaactgagtcaagtcatgt

SEQ ID NO: 692218 - DNA, 33 bp, Homo sapien
cttgttgggagcatcatctgagtcaagtcatgt

SEQ ID NO: 692219 - DNA, 33 bp, Homo sapien
attcaacaattgaagacgtgtcccgagatttta

SEQ ID NO: 692220 - DNA, 33 bp, Homo sapien
attcaacaattgaagatgtgtcccgagatttta

SEQ ID NO: 692221 - DNA, 33 bp, Homo sapien
gaacgaggtgctttaaatagcaaggaaccaggg

SEQ ID NO: 692222 - DNA, 33 bp, Homo sapien
gaacgaggtgctttaactagcaaggaaccaggg

SEQ ID NO: 692223 - DNA, 33 bp, Homo sapien
gttgtacccaataactcagtctacaaactcaac

SEQ ID NO: 692224 - DNA, 33 bp, Homo sapien
gttgtacccaataactgagtctacaaactcaac

SEQ ID NO: 692225 - DNA, 33 bp, Homo sapien
gcgtaatgcaagcgatcaaagcacaacttacct

SEQ ID NO: 692226 - DNA, 33 bp, Homo sapien
gcgtaatgcaagcgatgaaagcacaacttacct

SEQ ID NO: 692227 - DNA, 33 bp, Homo sapien
attagatttgtcagccagccagtttcacaacat

SEQ ID NO: 692228 - DNA, 33 bp, Homo sapien
attagatttgtcagccggccagtttcacaacat

SEQ ID NO: 692229 - DNA, 33 bp, Homo sapien
ttttgcttgaataattaaaaaagtgcgctagca

SEQ ID NO: 692230 - DNA, 33 bp, Homo sapien
ttttgcttgaataatttaaaaagtgcgctagca

SEQ ID NO: 692231 - DNA, 33 bp, Homo sapien
tatgaacatcccaaaaattatggattattttcc

SEQ ID NO: 692232 - DNA, 33 bp, Homo sapien
tatgaacatcccaaaagttatggattattttcc

SEQ ID NO: 692233 - DNA, 33 bp, Homo sapien
ggttatttggttaaagcatagagaagtgcagag

SEQ ID NO: 692234 - DNA, 33 bp, Homo sapien
ggttatttggttaaagtatagagaagtgcagag

SEQ ID NO: 692235 - DNA, 33 bp, Homo sapien
cagtgatattcaaagggattcagtcttggtcct

SEQ ID NO: 692236 - DNA, 33 bp, Homo sapien
cagtgatattcaaaggtattcagtcttggtcct

SEQ ID NO: 692237 - DNA, 33 bp, Homo sapien
ttattgctctcttaaacgaaaaagtttggagag

SEQ ID NO: 692238 - DNA, 33 bp, Homo sapien
ttattgctctcttaaatgaaaaagtttggagag

SEQ ID NO: 692239 - DNA, 33 bp, Homo sapien
caagtgtcagaataacagtagggtattttagcc

SEQ ID NO: 692240 - DNA, 33 bp, Homo sapien
caagtgtcagaataacggtagggtattttagcc

SEQ ID NO: 692241 - DNA, 33 bp, Homo sapien
ttatgtaattaacagtcaaatgagaataactac

SEQ ID NO: 692242 - DNA, 33 bp, Homo sapien
ttatgtaattaacagtgaaatgagaataactac

SEQ ID NO: 692243 - DNA, 33 bp, Homo sapien
tcttgaatgctaaacacataaacaatgaggtag

SEQ ID NO: 692244 - DNA, 33 bp, Homo sapien
tcttgaatgctaaacatataaacaatgaggtag

SEQ ID NO: 692245 - DNA, 33 bp, Homo sapien
aagtttaacaatatcaccaaatgggagcaaaga

SEQ ID NO: 692246 - DNA, 33 bp, Homo sapien
aagtttaacaatatcagcaaatgggagcaaaga

SEQ ID NO: 692247 - DNA, 33 bp, Homo sapien
aaaaaagaaggaaacacatatcaggtcagtcca

SEQ ID NO: 692248 - DNA, 33 bp, Homo sapien
aaaaaagaaggaaacatatatcaggtcagtcca

SEQ ID NO: 692249 - DNA, 33 bp, Homo sapien
tgtcatttcctatcaactatgcgatttctttat

SEQ ID NO: 692250 - DNA, 33 bp, Homo sapien
tgtcatttcctatcaattatgcgatttctttat

SEQ ID NO: 692251 - DNA, 33 bp, Homo sapien
tcacattagttgaggcaaacactgataaaacaa

SEQ ID NO: 692252 - DNA, 33 bp, Homo sapien
tcacattagttgaggccaacactgataaaacaa

SEQ ID NO: 692253 - DNA, 33 bp, Homo sapien
attgttaaattgctggcagcttaattatgatta

SEQ ID NO: 692254 - DNA, 33 bp, Homo sapien
attgttaaattgctggtagcttaattatgatta

SEQ ID NO: 692255 - DNA, 33 bp, Homo sapien
catgaaattttatccaatgagtctgtgactgtc

SEQ ID NO: 692256 - DNA, 33 bp, Homo sapien
catgaaattttatccagtgagtctgtgactgtc

SEQ ID NO: 692257 - DNA, 33 bp, Homo sapien
agatactcacgtttaaaatcacaattagttgga

SEQ ID NO: 692258 - DNA, 33 bp, Homo sapien
agatactcacgtttaacatcacaattagttgga

SEQ ID NO: 692259 - DNA, 33 bp, Homo sapien
cagtcctttttgttaacatggccaactccatgg

SEQ ID NO: 692260 - DNA, 33 bp, Homo sapien
cagtcctttttgttaatatggccaactccatgg

SEQ ID NO: 692261 - DNA, 33 bp, Homo sapien
cccggaaatgtacaacacatgtcagagaagaat

SEQ ID NO: 692262 - DNA, 33 bp, Homo sapien
cccggaaatgtacaacccatgtcagagaagaat

SEQ ID NO: 692263 - DNA, 33 bp, Homo sapien
cacagcctgttgacaccaaaaccagttcagttt

SEQ ID NO: 692264 - DNA, 33 bp, Homo sapien
cacagcctgttgacacgaaaaccagttcagttt

SEQ ID NO: 692265 - DNA, 33 bp, Homo sapien
aattcaagttcacatacaaagtcagtgttattg

SEQ ID NO: 692266 - DNA, 33 bp, Homo sapien
aattcaagttcacatagaaagtcagtgttattg

SEQ ID NO: 692267 - DNA, 33 bp, Homo sapien
catgtgttttacatagaatttatgacagtactt

SEQ ID NO: 692268 - DNA, 33 bp, Homo sapien
catgtgttttacataggatttatgacagtactt

SEQ ID NO: 692269 - DNA, 33 bp, Homo sapien
ttaacttcccatagtcaaaaatttaatctggct

SEQ ID NO: 692270 - DNA, 33 bp, Homo sapien
ttaacttcccatagtcgaaaatttaatctggct

SEQ ID NO: 692271 - DNA, 33 bp, Homo sapien
aagaggaggatgacatcaatcacatcttctttt

SEQ ID NO: 692272 - DNA, 33 bp, Homo sapien
aagaggaggatgacattaatcacatcttctttt

SEQ ID NO: 692273 - DNA, 33 bp, Homo sapien
ctgcctactgagacaactgttagatgtaaaggt

SEQ ID NO: 692274 - DNA, 33 bp, Homo sapien
ctgcctactgagacaattgttagatgtaaaggt

SEQ ID NO: 692275 - DNA, 33 bp, Homo sapien
ttttagcaagatgataagtgtaaaattatagct

SEQ ID NO: 692276 - DNA, 33 bp, Homo sapien
ttttagcaagatgataggtgtaaaattatagct

SEQ ID NO: 692277 - DNA, 33 bp, Homo sapien
cagaacttatcagctcacatacacaatcatttt

SEQ ID NO: 692278 - DNA, 33 bp, Homo sapien
cagaacttatcagctctcatacacaatcatttt

SEQ ID NO: 692279 - DNA, 33 bp, Homo sapien
atgaatggatgtgacacgaataaatatatccag

SEQ ID NO: 692280 - DNA, 33 bp, Homo sapien
atgaatggatgtgacaggaataaatatatccag

SEQ ID NO: 692281 - DNA, 33 bp, Homo sapien
acaccatagcatctgcccttgaggtttgaatag

SEQ ID NO: 692282 - DNA, 33 bp, Homo sapien
acaccatagcatctgctcttgaggtttgaatag

SEQ ID NO: 692283 - DNA, 33 bp, Homo sapien
ataggatattttcactaaaggatgcaactctca

SEQ ID NO: 692284 - DNA, 33 bp, Homo sapien
ataggatattttcacttaaggatgcaactctca

SEQ ID NO: 692285 - DNA, 33 bp, Homo sapien
ctgagttgtttgtctacgtgttttcagactgag

SEQ ID NO: 692286 - DNA, 33 bp, Homo sapien
ctgagttgtttgtctatgtgttttcagactgag

SEQ ID NO: 692287 - DNA, 33 bp, Homo sapien
agggttccaagctcaccggaaatataattatgc

SEQ ID NO: 692288 - DNA, 33 bp, Homo sapien
agggttccaagctcactggaaatataattatgc

SEQ ID NO: 692289 - DNA, 33 bp, Homo sapien
gattaaaggtgcagaaactttgtaacataataa

SEQ ID NO: 692290 - DNA, 33 bp, Homo sapien
gattaaaggtgcagaagctttgtaacataataa

SEQ ID NO: 692291 - DNA, 33 bp, Homo sapien
cagataagtaccagaaagtagcataatacacta

SEQ ID NO: 692292 - DNA, 33 bp, Homo sapien
cagataagtaccagaaggtagcataatacacta

SEQ ID NO: 692293 - DNA, 33 bp, Homo sapien
tacaaaaatatgctgacgattatttaatacatt

SEQ ID NO: 692294 - DNA, 33 bp, Homo sapien
tacaaaaatatgctgatgattatttaatacatt

SEQ ID NO: 692295 - DNA, 33 bp, Homo sapien
atgtgctaaatgctcaatacattttttctcatc

SEQ ID NO: 692296 - DNA, 33 bp, Homo sapien
atgtgctaaatgctcagtacattttttctcatc

SEQ ID NO: 692297 - DNA, 33 bp, Homo sapien
cttttcctttcacccactgaaaactaatgaaag

SEQ ID NO: 692298 - DNA, 33 bp, Homo sapien
cttttcctttcacccattgaaaactaatgaaag

SEQ ID NO: 692299 - DNA, 33 bp, Homo sapien
tttctctctcaaactccccaaactaaattggtt

SEQ ID NO: 692300 - DNA, 33 bp, Homo sapien
tttctctctcaaactctccaaactaaattggtt

SEQ ID NO: 692301 - DNA, 33 bp, Homo sapien
atttccattgttcttcacaaaaagctatgagga

SEQ ID NO: 692302 - DNA, 33 bp, Homo sapien
atttccattgttcttcgcaaaaagctatgagga

SEQ ID NO: 692303 - DNA, 33 bp, Homo sapien
tgaggagattcatttaacacttcagagactcca

SEQ ID NO: 692304 - DNA, 33 bp, Homo sapien
tgaggagattcatttaccacttcagagactcca

SEQ ID NO: 692305 - DNA, 33 bp, Homo sapien
ttgacacctttacatgaaggctttgaagtactc

SEQ ID NO: 692306 - DNA, 33 bp, Homo sapien
ttgacacctttacatggaggctttgaagtactc

SEQ ID NO: 692307 - DNA, 33 bp, Homo sapien
tagtggctattgcataagtcagaaagaagctca

SEQ ID NO: 692308 - DNA, 33 bp, Homo sapien
tagtggctattgcataggtcagaaagaagctca

SEQ ID NO: 692309 - DNA, 33 bp, Homo sapien
gtaaagtgtggccacaaggaaatgagatggttg

SEQ ID NO: 692310 - DNA, 33 bp, Homo sapien
gtaaagtgtggccacagggaaatgagatggttg

SEQ ID NO: 692311 - DNA, 33 bp, Homo sapien
gtacttctacatttgccagaaccttgatctcct

SEQ ID NO: 692312 - DNA, 33 bp, Homo sapien
gtacttctacatttgcgagaaccttgatctcct

SEQ ID NO: 692313 - DNA, 33 bp, Homo sapien
aaattttagtagcttacgaaaggatcaaggtaa

SEQ ID NO: 692314 - DNA, 33 bp, Homo sapien
aaattttagtagcttatgaaaggatcaaggtaa

SEQ ID NO: 692315 - DNA, 33 bp, Homo sapien
gttcttgcttgcataaagttgaatgattttgca

SEQ ID NO: 692316 - DNA, 33 bp, Homo sapien
gttcttgcttgcataatgttgaatgattttgca

SEQ ID NO: 692317 - DNA, 33 bp, Homo sapien
ttgctagctgtcaaaccgggtgctgctctctgc

SEQ ID NO: 692318 - DNA, 33 bp, Homo sapien
ttgctagctgtcaaactgggtgctgctctctgc

SEQ ID NO: 692319 - DNA, 33 bp, Homo sapien
atgcctccgacaacttaaaagtataaagctttc

SEQ ID NO: 692320 - DNA, 33 bp, Homo sapien
atgcctccgacaacttgaaagtataaagctttc

SEQ ID NO: 692321 - DNA, 33 bp, Homo sapien
gatccgaaatgctgcaaaatataaacatttttg

SEQ ID NO: 692322 - DNA, 33 bp, Homo sapien
gatccgaaatgctgcagaatataaacatttttg

SEQ ID NO: 692323 - DNA, 33 bp, Homo sapien
cacaaaattaaatgtactacaagttgaatatcc

SEQ ID NO: 692324 - DNA, 33 bp, Homo sapien
cacaaaattaaatgtagtacaagttgaatatcc

SEQ ID NO: 692325 - DNA, 33 bp, Homo sapien
gacttcagagtgaataaaacaagaaatcttatg

SEQ ID NO: 692326 - DNA, 33 bp, Homo sapien
gacttcagagtgaatagaacaagaaatcttatg

SEQ ID NO: 692327 - DNA, 33 bp, Homo sapien
gtctggcaagtagtaaacatcatataattgtgg

SEQ ID NO: 692328 - DNA, 33 bp, Homo sapien
gtctggcaagtagtaagcatcatataattgtgg

SEQ ID NO: 692329 - DNA, 33 bp, Homo sapien
tttctcatagcagacaaatctaagggggttata

SEQ ID NO: 692330 - DNA, 33 bp, Homo sapien
tttctcatagcagacagatctaagggggttata

SEQ ID NO: 692331 - DNA, 33 bp, Homo sapien
gttaaatggacaagaaccagggaccgatgatgc

SEQ ID NO: 692332 - DNA, 33 bp, Homo sapien
gttaaatggacaagaatcagggaccgatgatgc

SEQ ID NO: 692333 - DNA, 33 bp, Homo sapien
tggctttggcagattcaaaagattgagaactgt

SEQ ID NO: 692334 - DNA, 33 bp, Homo sapien
tggctttggcagattcgaaagattgagaactgt

SEQ ID NO: 692335 - DNA, 33 bp, Homo sapien
aacacaggggaaaggacgtaccactatttcgct

SEQ ID NO: 692336 - DNA, 33 bp, Homo sapien
aacacaggggaaaggatgtaccactatttcgct

SEQ ID NO: 692337 - DNA, 33 bp, Homo sapien
ggaaagtagaagtgacactatttgaactgggtc

SEQ ID NO: 692338 - DNA, 33 bp, Homo sapien
ggaaagtagaagtgacgctatttgaactgggtc

SEQ ID NO: 692339 - DNA, 33 bp, Homo sapien
gacatcaatggaaaaacgttttaagttacagaa

SEQ ID NO: 692340 - DNA, 33 bp, Homo sapien
gacatcaatggaaaaatgttttaagttacagaa

SEQ ID NO: 692341 - DNA, 33 bp, Homo sapien
tgctcttagaaacacactctagtggcttgcttt

SEQ ID NO: 692342 - DNA, 33 bp, Homo sapien
tgctcttagaaacacattctagtggcttgcttt

SEQ ID NO: 692343 - DNA, 33 bp, Homo sapien
caaactcaagtctgacactagatttctttctct

SEQ ID NO: 692344 - DNA, 33 bp, Homo sapien
caaactcaagtctgaccctagatttctttctct

SEQ ID NO: 692345 - DNA, 33 bp, Homo sapien
tctgaataggctgacacatccttacaaaaggag

SEQ ID NO: 692346 - DNA, 33 bp, Homo sapien
tctgaataggctgacatatccttacaaaaggag

SEQ ID NO: 692347 - DNA, 33 bp, Homo sapien
agtgtcagctctcctgcataagctctcagcaca

SEQ ID NO: 692348 - DNA, 33 bp, Homo sapien
agtgtcagctctcctggataagctctcagcaca

SEQ ID NO: 692349 - DNA, 33 bp, Homo sapien
gctatacttaatgtcaccaagtggagtgacaga

SEQ ID NO: 692350 - DNA, 33 bp, Homo sapien
gctatacttaatgtcatcaagtggagtgacaga

SEQ ID NO: 692351 - DNA, 33 bp, Homo sapien
gttaataattaagacaatgacaggatcacatga

SEQ ID NO: 692352 - DNA, 33 bp, Homo sapien
gttaataattaagacagtgacaggatcacatga

SEQ ID NO: 692353 - DNA, 33 bp, Homo sapien
cactttccattcattaagtcttgaatattgagt

SEQ ID NO: 692354 - DNA, 33 bp, Homo sapien
cactttccattcattaggtcttgaatattgagt

SEQ ID NO: 692355 - DNA, 33 bp, Homo sapien
tattttgtgaaaggcaaagtatataatcctggt

SEQ ID NO: 692356 - DNA, 33 bp, Homo sapien
tattttgtgaaaggcagagtatataatcctggt

SEQ ID NO: 692357 - DNA, 33 bp, Homo sapien
tctgttatggtatgcaaattctttatgactaaa

SEQ ID NO: 692358 - DNA, 33 bp, Homo sapien
tctgttatggtatgcagattctttatgactaaa

SEQ ID NO: 692359 - DNA, 33 bp, Homo sapien
atttagagagtatagacagcaaattggccaaat

SEQ ID NO: 692360 - DNA, 33 bp, Homo sapien
atttagagagtatagagagcaaattggccaaat

SEQ ID NO: 692361 - DNA, 33 bp, Homo sapien
cataagaaatggttacacttgcttggagaggat

SEQ ID NO: 692362 - DNA, 33 bp, Homo sapien
cataagaaatggttacgcttgcttggagaggat

SEQ ID NO: 692363 - DNA, 33 bp, Homo sapien
caaccaacgccttgtaccatggcccaactctct

SEQ ID NO: 692364 - DNA, 33 bp, Homo sapien
caaccaacgccttgtatcatggcccaactctct

SEQ ID NO: 692365 - DNA, 33 bp, Homo sapien
tactgagggggaagacacatttgtactaagcaa

SEQ ID NO: 692366 - DNA, 33 bp, Homo sapien
tactgagggggaagacgcatttgtactaagcaa

SEQ ID NO: 692367 - DNA, 33 bp, Homo sapien
tcttggtcctttcctcacttttagctccacacc

SEQ ID NO: 692368 - DNA, 33 bp, Homo sapien
tcttggtcctttcctcgcttttagctccacacc

SEQ ID NO: 692369 - DNA, 33 bp, Homo sapien
actggtgcatgaatgcaaaagaaccagggtgct

SEQ ID NO: 692370 - DNA, 33 bp, Homo sapien
actggtgcatgaatgcgaaagaaccagggtgct

SEQ ID NO: 692371 - DNA, 33 bp, Homo sapien
tcaaatcaagatctgaagaatgttgacagcaaa

SEQ ID NO: 692372 - DNA, 33 bp, Homo sapien
tcaaatcaagatctgacgaatgttgacagcaaa

SEQ ID NO: 692373 - DNA, 33 bp, Homo sapien
tgtaaaaaagtcaatccatttatggtacttaac

SEQ ID NO: 692374 - DNA, 33 bp, Homo sapien
tgtaaaaaagtcaatctatttatggtacttaac

SEQ ID NO: 692375 - DNA, 33 bp, Homo sapien
aaggagctcatacacaagtattcatgatggaaa

SEQ ID NO: 692376 - DNA, 33 bp, Homo sapien
aaggagctcatacacaggtattcatgatggaaa

SEQ ID NO: 692377 - DNA, 33 bp, Homo sapien
cagtccaaactatcataaaaccaaatctgatta

SEQ ID NO: 692378 - DNA, 33 bp, Homo sapien
cagtccaaactatcatcaaaccaaatctgatta

SEQ ID NO: 692379 - DNA, 33 bp, Homo sapien
gctctccttgaccacaccatcaaacgctaagtg

SEQ ID NO: 692380 - DNA, 33 bp, Homo sapien
gctctccttgaccacatcatcaaacgctaagtg

SEQ ID NO: 692381 - DNA, 33 bp, Homo sapien
gaaatggtggccaataggtttccttccttctgt

SEQ ID NO: 692382 - DNA, 33 bp, Homo sapien
gaaatggtggccaatatgtttccttccttctgt

SEQ ID NO: 692383 - DNA, 33 bp, Homo sapien
tccatcctcagtgatacgttaaaaaggatcctg

SEQ ID NO: 692384 - DNA, 33 bp, Homo sapien
tccatcctcagtgatatgttaaaaaggatcctg

SEQ ID NO: 692385 - DNA, 33 bp, Homo sapien
tgattgcagctatcaacaatagacacttacaag

SEQ ID NO: 692386 - DNA, 33 bp, Homo sapien
tgattgcagctatcaagaatagacacttacaag

SEQ ID NO: 692387 - DNA, 33 bp, Homo sapien
acggaaaggtacaagaccaactatggaagaatc

SEQ ID NO: 692388 - DNA, 33 bp, Homo sapien
acggaaaggtacaagatcaactatggaagaatc

SEQ ID NO: 692389 - DNA, 33 bp, Homo sapien
aaggtcatgtgctcaaccatccagtcccgagtt

SEQ ID NO: 692390 - DNA, 33 bp, Homo sapien
aaggtcatgtgctcaatcatccagtcccgagtt

SEQ ID NO: 692391 - DNA, 33 bp, Homo sapien
aataagagtttctgtacggagcctgagatatct

SEQ ID NO: 692392 - DNA, 33 bp, Homo sapien
aataagagtttctgtatggagcctgagatatct

SEQ ID NO: 692393 - DNA, 33 bp, Homo sapien
ttcagaaaacttttgcaattgaactgttgaaaa

SEQ ID NO: 692394 - DNA, 33 bp, Homo sapien
ttcagaaaacttttgctattgaactgttgaaaa

SEQ ID NO: 692395 - DNA, 33 bp, Homo sapien
agtgaattggactctaacagggcatcaaatagg

SEQ ID NO: 692396 - DNA, 33 bp, Homo sapien
agtgaattggactctagcagggcatcaaatagg

SEQ ID NO: 692397 - DNA, 33 bp, Homo sapien
tatatgtggtttgaataaatgtacttaagagaa

SEQ ID NO: 692398 - DNA, 33 bp, Homo sapien
tatatgtggtttgaatgaatgtacttaagagaa

SEQ ID NO: 692399 - DNA, 33 bp, Homo sapien
taaccctcaaggaaaacggagtcagaggaaaat

SEQ ID NO: 692400 - DNA, 33 bp, Homo sapien
taaccctcaaggaaaatggagtcagaggaaaat

SEQ ID NO: 692401 - DNA, 33 bp, Homo sapien
ttgcacatttcattaaaaatgctccatctagac

SEQ ID NO: 692402 - DNA, 33 bp, Homo sapien
ttgcacatttcattaagaatgctccatctagac

SEQ ID NO: 692403 - DNA, 33 bp, Homo sapien
gacgtgaaattgtggagtataggtttggggctt

SEQ ID NO: 692404 - DNA, 33 bp, Homo sapien
gacgtgaaattgtggattataggtttggggctt

SEQ ID NO: 692405 - DNA, 33 bp, Homo sapien
aataacatcatatccaatcaaatgtctttcttg

SEQ ID NO: 692406 - DNA, 33 bp, Homo sapien
aataacatcatatccagtcaaatgtctttcttg

SEQ ID NO: 692407 - DNA, 33 bp, Homo sapien
aaatgtgcttacctacagaagttaagtctacct

SEQ ID NO: 692408 - DNA, 33 bp, Homo sapien
aaatgtgcttacctacggaagttaagtctacct

SEQ ID NO: 692409 - DNA, 33 bp, Homo sapien
ctcgttttgcagggataaaggacatcagtgtat

SEQ ID NO: 692410 - DNA, 33 bp, Homo sapien
ctcgttttgcagggatgaaggacatcagtgtat

SEQ ID NO: 692411 - DNA, 33 bp, Homo sapien
ttggcctaactctgaaatggcaaagtagggttg

SEQ ID NO: 692412 - DNA, 33 bp, Homo sapien
ttggcctaactctgaagtggcaaagtagggttg

SEQ ID NO: 692413 - DNA, 33 bp, Homo sapien
ttttctgggtatgtgaatatttgcctaaaggtg

SEQ ID NO: 692414 - DNA, 33 bp, Homo sapien
ttttctgggtatgtgagtatttgcctaaaggtg

SEQ ID NO: 692415 - DNA, 33 bp, Homo sapien
cttctgattttcattacaaagctatctattctt

SEQ ID NO: 692416 - DNA, 33 bp, Homo sapien
cttctgattttcattataaagctatctattctt

SEQ ID NO: 692417 - DNA, 33 bp, Homo sapien
actgaatcacattggaaattgatggaagaaaag

SEQ ID NO: 692418 - DNA, 33 bp, Homo sapien
actgaatcacattggacattgatggaagaaaag

SEQ ID NO: 692419 - DNA, 33 bp, Homo sapien
tataccttgggagacggaaagattttcatgaca

SEQ ID NO: 692420 - DNA, 33 bp, Homo sapien
tataccttgggagacgtaaagattttcatgaca

SEQ ID NO: 692421 - DNA, 33 bp, Homo sapien
atttagttttcctccaacgtgggcacttcagca

SEQ ID NO: 692422 - DNA, 33 bp, Homo sapien
atttagttttcctccagcgtgggcacttcagca

SEQ ID NO: 692423 - DNA, 33 bp, Homo sapien
tttgcgtagatgttaaagtcctagttttaggaa

SEQ ID NO: 692424 - DNA, 33 bp, Homo sapien
tttgcgtagatgttaacgtcctagttttaggaa

SEQ ID NO: 692425 - DNA, 33 bp, Homo sapien
aatatacatgagtgaacccaatagacaaaattg

SEQ ID NO: 692426 - DNA, 33 bp, Homo sapien
aatatacatgagtgaatccaatagacaaaattg

SEQ ID NO: 692427 - DNA, 33 bp, Homo sapien
caacaatacacaaatacaggcagtgggatcctt

SEQ ID NO: 692428 - DNA, 33 bp, Homo sapien
caacaatacacaaatataggcagtgggatcctt

SEQ ID NO: 692429 - DNA, 33 bp, Homo sapien
tcttgggaatcactacactcgtcattccttgaa

SEQ ID NO: 692430 - DNA, 33 bp, Homo sapien
tcttgggaatcactacgctcgtcattccttgaa

SEQ ID NO: 692431 - DNA, 33 bp, Homo sapien
tgtcagcctaattttacggaatattgggcttga

SEQ ID NO: 692432 - DNA, 33 bp, Homo sapien
tgtcagcctaattttatggaatattgggcttga

SEQ ID NO: 692433 - DNA, 33 bp, Homo sapien
ccaggaaaatcagtcaaggaacaaatgcatgac

SEQ ID NO: 692434 - DNA, 33 bp, Homo sapien
ccaggaaaatcagtcagggaacaaatgcatgac

SEQ ID NO: 692435 - DNA, 33 bp, Homo sapien
ataataggagttggcaccattttcattatttta

SEQ ID NO: 692436 - DNA, 33 bp, Homo sapien
ataataggagttggcatcattttcattatttta

SEQ ID NO: 692437 - DNA, 33 bp, Homo sapien
tgaaggttacacataccgaattgccaatgcata

SEQ ID NO: 692438 - DNA, 33 bp, Homo sapien
tgaaggttacacatactgaattgccaatgcata

SEQ ID NO: 692439 - DNA, 33 bp, Homo sapien
agcacaaagaactcacaacaaatggctcagaaa

SEQ ID NO: 692440 - DNA, 33 bp, Homo sapien
agcacaaagaactcaccacaaatggctcagaaa

SEQ ID NO: 692441 - DNA, 33 bp, Homo sapien
aaaaattgggattggcgcataaaaaatgaagag

SEQ ID NO: 692442 - DNA, 33 bp, Homo sapien
aaaaattgggattggctcataaaaaatgaagag

SEQ ID NO: 692443 - DNA, 33 bp, Homo sapien
agaagctgtggaatgacgtttttgaatatgttc

SEQ ID NO: 692444 - DNA, 33 bp, Homo sapien
agaagctgtggaatgatgtttttgaatatgttc

SEQ ID NO: 692445 - DNA, 33 bp, Homo sapien
tcctgcagtagcaacacacggatattcatgagc

SEQ ID NO: 692446 - DNA, 33 bp, Homo sapien
tcctgcagtagcaacatacggatattcatgagc

SEQ ID NO: 692447 - DNA, 33 bp, Homo sapien
cacaagccctgagcaacgttctgaaattcatac

SEQ ID NO: 692448 - DNA, 33 bp, Homo sapien
cacaagccctgagcaatgttctgaaattcatac

SEQ ID NO: 692449 - DNA, 33 bp, Homo sapien
catccattctttatggccagttaaatgcagtat

SEQ ID NO: 692450 - DNA, 33 bp, Homo sapien
catccattctttatggtcagttaaatgcagtat

SEQ ID NO: 692451 - DNA, 33 bp, Homo sapien
tcagcctggaattaagaaacttagactctaagt

SEQ ID NO: 692452 - DNA, 33 bp, Homo sapien
tcagcctggaattaagtaacttagactctaagt

SEQ ID NO: 692453 - DNA, 33 bp, Homo sapien
cttcctctagtacccacgtgatatggttaggct

SEQ ID NO: 692454 - DNA, 33 bp, Homo sapien
cttcctctagtacccatgtgatatggttaggct

SEQ ID NO: 692455 - DNA, 33 bp, Homo sapien
aaaagagaatgggtggaatttagcctagctata

SEQ ID NO: 692456 - DNA, 33 bp, Homo sapien
aaaagagaatgggtgggatttagcctagctata

SEQ ID NO: 692457 - DNA, 33 bp, Homo sapien
tacagcttagttgtacggagaacctaacaggca

SEQ ID NO: 692458 - DNA, 33 bp, Homo sapien
tacagcttagttgtactgagaacctaacaggca

SEQ ID NO: 692459 - DNA, 33 bp, Homo sapien
atgcgagcccttactgcaggcttattttaaatc

SEQ ID NO: 692460 - DNA, 33 bp, Homo sapien
atgcgagcccttactgtaggcttattttaaatc

SEQ ID NO: 692461 - DNA, 33 bp, Homo sapien
ggactgttgattccaaatctctggctcaatctg

SEQ ID NO: 692462 - DNA, 33 bp, Homo sapien
ggactgttgattccaagtctctggctcaatctg

SEQ ID NO: 692463 - DNA, 33 bp, Homo sapien
aaccatgagtaattgaactgcacggcaacatta

SEQ ID NO: 692464 - DNA, 33 bp, Homo sapien
aaccatgagtaattgagctgcacggcaacatta

SEQ ID NO: 692465 - DNA, 33 bp, Homo sapien
gtcaatttctgagttaagggctgtttgaaagag

SEQ ID NO: 692466 - DNA, 33 bp, Homo sapien
gtcaatttctgagttaggggctgtttgaaagag

SEQ ID NO: 692467 - DNA, 33 bp, Homo sapien
aaatgagatcggtatacgccaagtgcagtgcta

SEQ ID NO: 692468 - DNA, 33 bp, Homo sapien
aaatgagatcggtatatgccaagtgcagtgcta

SEQ ID NO: 692469 - DNA, 33 bp, Homo sapien
aataaataaaacacacactttctgactctcagt

SEQ ID NO: 692470 - DNA, 33 bp, Homo sapien
aataaataaaacacactctttctgactctcagt

SEQ ID NO: 692471 - DNA, 33 bp, Homo sapien
gatgcttgctttcaggaagtagtgtgtatgttt

SEQ ID NO: 692472 - DNA, 33 bp, Homo sapien
gatgcttgctttcaggtagtagtgtgtatgttt

SEQ ID NO: 692473 - DNA, 33 bp, Homo sapien
tgccaaagcaaccaaacttaccaccgacatatc

SEQ ID NO: 692474 - DNA, 33 bp, Homo sapien
tgccaaagcaaccaaatttaccaccgacatatc

SEQ ID NO: 692475 - DNA, 33 bp, Homo sapien
cgacatatctatttcactattgacagagctctt

SEQ ID NO: 692476 - DNA, 33 bp, Homo sapien
cgacatatctatttcagtattgacagagctctt

SEQ ID NO: 692477 - DNA, 33 bp, Homo sapien
tctggtactgtttagacagagagcagaatctat

SEQ ID NO: 692478 - DNA, 33 bp, Homo sapien
tctggtactgtttagagagagagcagaatctat

SEQ ID NO: 692479 - DNA, 33 bp, Homo sapien
atctatacacatccacgcttagttggtgttaca

SEQ ID NO: 692480 - DNA, 33 bp, Homo sapien
atctatacacatccactcttagttggtgttaca

SEQ ID NO: 692481 - DNA, 33 bp, Homo sapien
aaaaccacaggcaaacaacatgaaggaaataac

SEQ ID NO: 692482 - DNA, 33 bp, Homo sapien
aaaaccacaggcaaaccacatgaaggaaataac

SEQ ID NO: 692483 - DNA, 33 bp, Homo sapien
tgtctgcaaacagaaaaattgacctcttctctt

SEQ ID NO: 692484 - DNA, 33 bp, Homo sapien
tgtctgcaaacagaaatattgacctcttctctt

SEQ ID NO: 692485 - DNA, 33 bp, Homo sapien
aacccacagaaaatcacctaatttatcctttcc

SEQ ID NO: 692486 - DNA, 33 bp, Homo sapien
aacccacagaaaatcatctaatttatcctttcc

SEQ ID NO: 692487 - DNA, 33 bp, Homo sapien
gtttacagcagtggcaacctgacaggtaactta

SEQ ID NO: 692488 - DNA, 33 bp, Homo sapien
gtttacagcagtggcagcctgacaggtaactta

SEQ ID NO: 692489 - DNA, 33 bp, Homo sapien
tctcttctaagaacaccagttacttgaggttaa

SEQ ID NO: 692490 - DNA, 33 bp, Homo sapien
tctcttctaagaacacgagttacttgaggttaa

SEQ ID NO: 692491 - DNA, 33 bp, Homo sapien
tcaaattatcagtgacaaaattatttaaatcaa

SEQ ID NO: 692492 - DNA, 33 bp, Homo sapien
tcaaattatcagtgaccaaattatttaaatcaa

SEQ ID NO: 692493 - DNA, 33 bp, Homo sapien
atcattcacatgatgacctaaaaagaaaggact

SEQ ID NO: 692494 - DNA, 33 bp, Homo sapien
atcattcacatgatgatctaaaaagaaaggact

SEQ ID NO: 692495 - DNA, 33 bp, Homo sapien
gaggcaataataaaacaggacctacaggaattg

SEQ ID NO: 692496 - DNA, 33 bp, Homo sapien
gaggcaataataaaacgggacctacaggaattg

SEQ ID NO: 692497 - DNA, 33 bp, Homo sapien
attaatatagaattccgcatacaaactccttcc

SEQ ID NO: 692498 - DNA, 33 bp, Homo sapien
attaatatagaattcctcatacaaactccttcc

SEQ ID NO: 692499 - DNA, 33 bp, Homo sapien
ttaatgtctaacccaacaggtcatgaactttga

SEQ ID NO: 692500 - DNA, 33 bp, Homo sapien
ttaatgtctaacccaataggtcatgaactttga

SEQ ID NO: 692501 - DNA, 33 bp, Homo sapien
catttggcctcatttgcaaccatgacaagggat

SEQ ID NO: 692502 - DNA, 33 bp, Homo sapien
catttggcctcatttgtaaccatgacaagggat

SEQ ID NO: 692503 - DNA, 33 bp, Homo sapien
acatgattgcttgtaaatatttcagcttaactt

SEQ ID NO: 692504 - DNA, 33 bp, Homo sapien
acatgattgcttgtaagtatttcagcttaactt

SEQ ID NO: 692505 - DNA, 33 bp, Homo sapien
ttcttttgggacgtaacatatgatctgtccagc

SEQ ID NO: 692506 - DNA, 33 bp, Homo sapien
ttcttttgggacgtaatatatgatctgtccagc

SEQ ID NO: 692507 - DNA, 33 bp, Homo sapien
caatggacttggaaaacgaagcaggattcaaaa

SEQ ID NO: 692508 - DNA, 33 bp, Homo sapien
caatggacttggaaaaggaagcaggattcaaaa

SEQ ID NO: 692509 - DNA, 33 bp, Homo sapien
ctgatataaggtgctcggaaaagtaaattttat

SEQ ID NO: 692510 - DNA, 33 bp, Homo sapien
ctgatataaggtgctctgaaaagtaaattttat

SEQ ID NO: 692511 - DNA, 33 bp, Homo sapien
actgcagtcttctcctcaataacagtcatatta

SEQ ID NO: 692512 - DNA, 33 bp, Homo sapien
actgcagtcttctccttaataacagtcatatta

SEQ ID NO: 692513 - DNA, 33 bp, Homo sapien
gacagacttgttagataacttgttaaagatcag

SEQ ID NO: 692514 - DNA, 33 bp, Homo sapien
gacagacttgttagatgacttgttaaagatcag

SEQ ID NO: 692515 - DNA, 33 bp, Homo sapien
actggttgacaaaagcaattttaattaccttcc

SEQ ID NO: 692516 - DNA, 33 bp, Homo sapien
actggttgacaaaagctattttaattaccttcc

SEQ ID NO: 692517 - DNA, 33 bp, Homo sapien
cctccagaacataatgccataaagaaaaaaacc

SEQ ID NO: 692518 - DNA, 33 bp, Homo sapien
cctccagaacataatgtcataaagaaaaaaacc

SEQ ID NO: 692519 - DNA, 33 bp, Homo sapien
ctgtgtatctgcggcaaggtaagtaagattagg

SEQ ID NO: 692520 - DNA, 33 bp, Homo sapien
ctgtgtatctgcggcagggtaagtaagattagg

SEQ ID NO: 692521 - DNA, 33 bp, Homo sapien
cccaatgatatggttaagtgcccccttcgaata

SEQ ID NO: 692522 - DNA, 33 bp, Homo sapien
cccaatgatatggttaggtgcccccttcgaata

SEQ ID NO: 692523 - DNA, 33 bp, Homo sapien
tcctgctttagacttaacatgttgtgtacattg

SEQ ID NO: 692524 - DNA, 33 bp, Homo sapien
tcctgctttagacttatcatgttgtgtacattg

SEQ ID NO: 692525 - DNA, 33 bp, Homo sapien
gaagccttcttgtcaccggaaatcaatgcctgt

SEQ ID NO: 692526 - DNA, 33 bp, Homo sapien
gaagccttcttgtcactggaaatcaatgcctgt

SEQ ID NO: 692527 - DNA, 33 bp, Homo sapien
atttcaggacaagtaaaatacattcaaattatg

SEQ ID NO: 692528 - DNA, 33 bp, Homo sapien
atttcaggacaagtaacatacattcaaattatg

SEQ ID NO: 692529 - DNA, 33 bp, Homo sapien
agtgtctattgtgtgacatggagagaaaaggcc

SEQ ID NO: 692530 - DNA, 33 bp, Homo sapien
agtgtctattgtgtgagatggagagaaaaggcc

SEQ ID NO: 692531 - DNA, 33 bp, Homo sapien
ggacagtggatgttatcagaatgaagtgagatg

SEQ ID NO: 692532 - DNA, 33 bp, Homo sapien
ggacagtggatgttattagaatgaagtgagatg

SEQ ID NO: 692533 - DNA, 33 bp, Homo sapien
tctgcccatctacttacgtttccgtgtcccaac

SEQ ID NO: 692534 - DNA, 33 bp, Homo sapien
tctgcccatctacttatgtttccgtgtcccaac

SEQ ID NO: 692535 - DNA, 33 bp, Homo sapien
tagtattcacaaattgaaacccttttcgtactt

SEQ ID NO: 692536 - DNA, 33 bp, Homo sapien
tagtattcacaaattgtaacccttttcgtactt

SEQ ID NO: 692537 - DNA, 33 bp, Homo sapien
aatagtagtactaccaaaatgcctctatcaatg

SEQ ID NO: 692538 - DNA, 33 bp, Homo sapien
aatagtagtactaccacaatgcctctatcaatg

SEQ ID NO: 692539 - DNA, 33 bp, Homo sapien
tatgaagctgcctgtacatttttaagggaattt

SEQ ID NO: 692540 - DNA, 33 bp, Homo sapien
tatgaagctgcctgtagatttttaagggaattt

SEQ ID NO: 692541 - DNA, 33 bp, Homo sapien
gcaggaagtaagggaaacatttaatatgcacac

SEQ ID NO: 692542 - DNA, 33 bp, Homo sapien
gcaggaagtaagggaagcatttaatatgcacac

SEQ ID NO: 692543 - DNA, 33 bp, Homo sapien
ggacttgtgtttgcaacgaagctggggtagaag

SEQ ID NO: 692544 - DNA, 33 bp, Homo sapien
ggacttgtgtttgcaatgaagctggggtagaag

SEQ ID NO: 692545 - DNA, 33 bp, Homo sapien
tgtgttaacttctttacgtatgcaagctgcatt

SEQ ID NO: 692546 - DNA, 33 bp, Homo sapien
tgtgttaacttctttatgtatgcaagctgcatt

SEQ ID NO: 692547 - DNA, 33 bp, Homo sapien
ggtgtggttcctgaaaccttcctctacatccac

SEQ ID NO: 692548 - DNA, 33 bp, Homo sapien
ggtgtggttcctgaaatcttcctctacatccac

SEQ ID NO: 692549 - DNA, 33 bp, Homo sapien
actgactctctgtgccgctacagcaccctggtc

SEQ ID NO: 692550 - DNA, 33 bp, Homo sapien
actgactctctgtgcctctacagcaccctggtc

SEQ ID NO: 692551 - DNA, 33 bp, Homo sapien
aaactttattcagaagcctgtacctacaaaatt

SEQ ID NO: 692552 - DNA, 33 bp, Homo sapien
aaactttattcagaaggctgtacctacaaaatt

SEQ ID NO: 692553 - DNA, 33 bp, Homo sapien
atggaagaacaatttacgatgtaagaaagagaa

SEQ ID NO: 692554 - DNA, 33 bp, Homo sapien
atggaagaacaatttaggatgtaagaaagagaa

SEQ ID NO: 692555 - DNA, 33 bp, Homo sapien
tcatcatttcctaaacaatatagaattacaact

SEQ ID NO: 692556 - DNA, 33 bp, Homo sapien
tcatcatttcctaaactatatagaattacaact

SEQ ID NO: 692557 - DNA, 33 bp, Homo sapien
gtgggtgaggaataaaaggcttcatagtgagta

SEQ ID NO: 692558 - DNA, 33 bp, Homo sapien
gtgggtgaggaataaacggcttcatagtgagta

SEQ ID NO: 692559 - DNA, 33 bp, Homo sapien
aattcaccactatagaacttatccatgtaacca

SEQ ID NO: 692560 - DNA, 33 bp, Homo sapien
aattcaccactatagagcttatccatgtaacca

SEQ ID NO: 692561 - DNA, 33 bp, Homo sapien
attcatccttcctcaaagcttcaggccagttac

SEQ ID NO: 692562 - DNA, 33 bp, Homo sapien
attcatccttcctcaaggcttcaggccagttac

SEQ ID NO: 692563 - DNA, 33 bp, Homo sapien
ttatctcttgagtgtacagtctgctccattcct

SEQ ID NO: 692564 - DNA, 33 bp, Homo sapien
ttatctcttgagtgtatagtctgctccattcct

SEQ ID NO: 692565 - DNA, 33 bp, Homo sapien
atcattcgattctgtcacgtgccaccttctccc

SEQ ID NO: 692566 - DNA, 33 bp, Homo sapien
atcattcgattctgtcgcgtgccaccttctccc

SEQ ID NO: 692567 - DNA, 33 bp, Homo sapien
gcaatgactaagaatccgagtaaaaaggtctgg

SEQ ID NO: 692568 - DNA, 33 bp, Homo sapien
gcaatgactaagaatctgagtaaaaaggtctgg

SEQ ID NO: 692569 - DNA, 33 bp, Homo sapien
tgcaaaatgctgtacaatggcacctactccctc

SEQ ID NO: 692570 - DNA, 33 bp, Homo sapien
tgcaaaatgctgtacagtggcacctactccctc

SEQ ID NO: 692571 - DNA, 33 bp, Homo sapien
caagctcttgctaccacaactcttgcatggaca

SEQ ID NO: 692572 - DNA, 33 bp, Homo sapien
caagctcttgctaccagaactcttgcatggaca

SEQ ID NO: 692573 - DNA, 33 bp, Homo sapien
ggagctgggaaacagacagtgataagtaagaag

SEQ ID NO: 692574 - DNA, 33 bp, Homo sapien
ggagctgggaaacagagagtgataagtaagaag

SEQ ID NO: 692575 - DNA, 33 bp, Homo sapien
tccacatgaccattgaaatcttcttcagatgac

SEQ ID NO: 692576 - DNA, 33 bp, Homo sapien
tccacatgaccattgagatcttcttcagatgac

SEQ ID NO: 692577 - DNA, 33 bp, Homo sapien
cattgtgctttgttctaaaaattcaagggtgac

SEQ ID NO: 692578 - DNA, 33 bp, Homo sapien
cattgtgctttgttctgaaaattcaagggtgac

SEQ ID NO: 692579 - DNA, 33 bp, Homo sapien
acaccacacaagtttacgtgcttagctgtcatg

SEQ ID NO: 692580 - DNA, 33 bp, Homo sapien
acaccacacaagtttatgtgcttagctgtcatg

SEQ ID NO: 692581 - DNA, 33 bp, Homo sapien
gcagtgggtgccaatacggcttaagaggctcct

SEQ ID NO: 692582 - DNA, 33 bp, Homo sapien
gcagtgggtgccaatatggcttaagaggctcct

SEQ ID NO: 692583 - DNA, 33 bp, Homo sapien
caacacctgataatgaaaaaggattgagcagag

SEQ ID NO: 692584 - DNA, 33 bp, Homo sapien
caacacctgataatgagaaaggattgagcagag

SEQ ID NO: 692585 - DNA, 33 bp, Homo sapien
cattacattgaaacaaaacaattggaaagagac

SEQ ID NO: 692586 - DNA, 33 bp, Homo sapien
cattacattgaaacaagacaattggaaagagac

SEQ ID NO: 692587 - DNA, 33 bp, Homo sapien
cctgttaccagagacaggcctttccaacagttt

SEQ ID NO: 692588 - DNA, 33 bp, Homo sapien
cctgttaccagagacatgcctttccaacagttt

SEQ ID NO: 692589 - DNA, 33 bp, Homo sapien
tcttggctatgtgtaacgaataaattgcagtct

SEQ ID NO: 692590 - DNA, 33 bp, Homo sapien
tcttggctatgtgtaatgaataaattgcagtct

SEQ ID NO: 692591 - DNA, 33 bp, Homo sapien
tattctcccactctccaaattctcatttcaaat

SEQ ID NO: 692592 - DNA, 33 bp, Homo sapien
tattctcccactctccgaattctcatttcaaat

SEQ ID NO: 692593 - DNA, 33 bp, Homo sapien
aaatgaataatgaatacgtgaaggaatgaatat

SEQ ID NO: 692594 - DNA, 33 bp, Homo sapien
aaatgaataatgaatatgtgaaggaatgaatat

SEQ ID NO: 692595 - DNA, 33 bp, Homo sapien
cactaagcagttctcaaagataaataacagaca

SEQ ID NO: 692596 - DNA, 33 bp, Homo sapien
cactaagcagttctcagagataaataacagaca

SEQ ID NO: 692597 - DNA, 33 bp, Homo sapien
ctcagagtacaatagcaatgggacttgagaggc

SEQ ID NO: 692598 - DNA, 33 bp, Homo sapien
ctcagagtacaatagcgatgggacttgagaggc

SEQ ID NO: 692599 - DNA, 33 bp, Homo sapien
aaatccacattattgtaaaaacaagttgttggg

SEQ ID NO: 692600 - DNA, 33 bp, Homo sapien
aaatccacattattgttaaaacaagttgttggg

SEQ ID NO: 692601 - DNA, 33 bp, Homo sapien
ttgcctccatctaaataaacaaagcagaactca

SEQ ID NO: 692602 - DNA, 33 bp, Homo sapien
ttgcctccatctaaatgaacaaagcagaactca

SEQ ID NO: 692603 - DNA, 33 bp, Homo sapien
aagccccaatgtttaagcactttccaatcttct

SEQ ID NO: 692604 - DNA, 33 bp, Homo sapien
aagccccaatgtttaatcactttccaatcttct

SEQ ID NO: 692605 - DNA, 33 bp, Homo sapien
tccagtcacgcggtacaagctataggtggatct

SEQ ID NO: 692606 - DNA, 33 bp, Homo sapien
tccagtcacgcggtacgagctataggtggatct

SEQ ID NO: 692607 - DNA, 33 bp, Homo sapien
ttatctactccaagcaaagttgtacaagaacga

SEQ ID NO: 692608 - DNA, 33 bp, Homo sapien
ttatctactccaagcagagttgtacaagaacga

SEQ ID NO: 692609 - DNA, 33 bp, Homo sapien
tgtcgacttaacaactgaaatgtctcttcctta

SEQ ID NO: 692610 - DNA, 33 bp, Homo sapien
tgtcgacttaacaacttaaatgtctcttcctta

SEQ ID NO: 692611 - DNA, 33 bp, Homo sapien
tttctagcaagtttcaagtatacaatacattat

SEQ ID NO: 692612 - DNA, 33 bp, Homo sapien
tttctagcaagtttcaggtatacaatacattat

SEQ ID NO: 692613 - DNA, 33 bp, Homo sapien
gttcttgtgatagtgagaatgaatctcataaga

SEQ ID NO: 692614 - DNA, 33 bp, Homo sapien
gttcttgtgatagtgataatgaatctcataaga

SEQ ID NO: 692615 - DNA, 33 bp, Homo sapien
ttattgacgtagggaacgtgaaatgccaacaaa

SEQ ID NO: 692616 - DNA, 33 bp, Homo sapien
ttattgacgtagggaatgtgaaatgccaacaaa

SEQ ID NO: 692617 - DNA, 33 bp, Homo sapien
taactgctacaatgaaactatataatttcttaa

SEQ ID NO: 692618 - DNA, 33 bp, Homo sapien
taactgctacaatgaacctatataatttcttaa

SEQ ID NO: 692619 - DNA, 33 bp, Homo sapien
ttgtttcttccttgcaactattgtcacctgata

SEQ ID NO: 692620 - DNA, 33 bp, Homo sapien
ttgtttcttccttgcagctattgtcacctgata

SEQ ID NO: 692621 - DNA, 33 bp, Homo sapien
aagtgatttcagtaaacgtatatatcaaactgc

SEQ ID NO: 692622 - DNA, 33 bp, Homo sapien
aagtgatttcagtaaaggtatatatcaaactgc

SEQ ID NO: 692623 - DNA, 33 bp, Homo sapien
ttcctagaggcagaaaagaaacctatttgcata

SEQ ID NO: 692624 - DNA, 33 bp, Homo sapien
ttcctagaggcagaaaggaaacctatttgcata

SEQ ID NO: 692625 - DNA, 33 bp, Homo sapien
taaggtcaagttctcaaacattgataggcactg

SEQ ID NO: 692626 - DNA, 33 bp, Homo sapien
taaggtcaagttctcagacattgataggcactg

SEQ ID NO: 692627 - DNA, 33 bp, Homo sapien
cagctgaagggaagtaacagatatccttgtgaa

SEQ ID NO: 692628 - DNA, 33 bp, Homo sapien
cagctgaagggaagtatcagatatccttgtgaa

SEQ ID NO: 692629 - DNA, 33 bp, Homo sapien
attctaccactctctacgggaccttaaataagt

SEQ ID NO: 692630 - DNA, 33 bp, Homo sapien
attctaccactctctatgggaccttaaataagt

SEQ ID NO: 692631 - DNA, 33 bp, Homo sapien
cctcccttgtctctgaaaaagacatgaaatgtt

SEQ ID NO: 692632 - DNA, 33 bp, Homo sapien
cctcccttgtctctgagaaagacatgaaatgtt

SEQ ID NO: 692633 - DNA, 33 bp, Homo sapien
agttttcctctgaagacactttgataagtagtt

SEQ ID NO: 692634 - DNA, 33 bp, Homo sapien
agttttcctctgaagatactttgataagtagtt

SEQ ID NO: 692635 - DNA, 33 bp, Homo sapien
ttttattagatagaaaagttatgtcaaatcctg

SEQ ID NO: 692636 - DNA, 33 bp, Homo sapien
ttttattagatagaaaggttatgtcaaatcctg

SEQ ID NO: 692637 - DNA, 33 bp, Homo sapien
tttgtaagtcagaagaggtgaaatttcagtggt

SEQ ID NO: 692638 - DNA, 33 bp, Homo sapien
tttgtaagtcagaagatgtgaaatttcagtggt

SEQ ID NO: 692639 - DNA, 33 bp, Homo sapien
atcctaggatcataaacttcatcctaggcagta

SEQ ID NO: 692640 - DNA, 33 bp, Homo sapien
atcctaggatcataaagttcatcctaggcagta

SEQ ID NO: 692641 - DNA, 33 bp, Homo sapien
tacagacgtgaatcaccggccgccgatgcatat

SEQ ID NO: 692642 - DNA, 33 bp, Homo sapien
tacagacgtgaatcacgggccgccgatgcatat

SEQ ID NO: 692643 - DNA, 33 bp, Homo sapien
atattatggatcaataaaaatagaacataatca

SEQ ID NO: 692644 - DNA, 33 bp, Homo sapien
atattatggatcaatacaaatagaacataatca

SEQ ID NO: 692645 - DNA, 33 bp, Homo sapien
cttaaaatgcagtcacagaactaaggagtttct

SEQ ID NO: 692646 - DNA, 33 bp, Homo sapien
cttaaaatgcagtcacggaactaaggagtttct

SEQ ID NO: 692647 - DNA, 33 bp, Homo sapien
tgctaatacgtgtcaacaaaaagcatggataat

SEQ ID NO: 692648 - DNA, 33 bp, Homo sapien
tgctaatacgtgtcaagaaaaagcatggataat

SEQ ID NO: 692649 - DNA, 33 bp, Homo sapien
cgtatttcttttccaaatcttatcaaatttcaa

SEQ ID NO: 692650 - DNA, 33 bp, Homo sapien
cgtatttcttttccaagtcttatcaaatttcaa

SEQ ID NO: 692651 - DNA, 33 bp, Homo sapien
agaaaatagacattgacgcctacctcacatttt

SEQ ID NO: 692652 - DNA, 33 bp, Homo sapien
agaaaatagacattgatgcctacctcacatttt

SEQ ID NO: 692653 - DNA, 33 bp, Homo sapien
tactaacaatcgaatgaaaaaaagctcaacata

SEQ ID NO: 692654 - DNA, 33 bp, Homo sapien
tactaacaatcgaatgcaaaaaagctcaacata

SEQ ID NO: 692655 - DNA, 33 bp, Homo sapien
tcgttgatgattgtaaagactttggtattactt

SEQ ID NO: 692656 - DNA, 33 bp, Homo sapien
tcgttgatgattgtaaggactttggtattactt

SEQ ID NO: 692657 - DNA, 33 bp, Homo sapien
agtaattggatcttagcagcagttaccccatgc

SEQ ID NO: 692658 - DNA, 33 bp, Homo sapien
agtaattggatcttaggagcagttaccccatgc

SEQ ID NO: 692659 - DNA, 33 bp, Homo sapien
aactcagtttctgactaaagactgtgtaattca

SEQ ID NO: 692660 - DNA, 33 bp, Homo sapien
aactcagtttctgactgaagactgtgtaattca

SEQ ID NO: 692661 - DNA, 33 bp, Homo sapien
agtcattaagccagcacactgatctatccatat

SEQ ID NO: 692662 - DNA, 33 bp, Homo sapien
agtcattaagccagcagactgatctatccatat

SEQ ID NO: 692663 - DNA, 33 bp, Homo sapien
atcccattgagtcataaccagaaatttggcaat

SEQ ID NO: 692664 - DNA, 33 bp, Homo sapien
atcccattgagtcatagccagaaatttggcaat

SEQ ID NO: 692665 - DNA, 33 bp, Homo sapien
gcacccataaagtgaccacacggcttccaattg

SEQ ID NO: 692666 - DNA, 33 bp, Homo sapien
gcacccataaagtgactacacggcttccaattg

SEQ ID NO: 692667 - DNA, 33 bp, Homo sapien
gaaaatcgtaccttccccttgcctttatagctt

SEQ ID NO: 692668 - DNA, 33 bp, Homo sapien
gaaaatcgtaccttcctcttgcctttatagctt

SEQ ID NO: 692669 - DNA, 33 bp, Homo sapien
tcatttaatgagtaaacattgaaccgggctata

SEQ ID NO: 692670 - DNA, 33 bp, Homo sapien
tcatttaatgagtaaatattgaaccgggctata

SEQ ID NO: 692671 - DNA, 33 bp, Homo sapien
gcaaaagttggagttacgcacctggaagccaag

SEQ ID NO: 692672 - DNA, 33 bp, Homo sapien
gcaaaagttggagttatgcacctggaagccaag

SEQ ID NO: 692673 - DNA, 33 bp, Homo sapien
tgcgtggagttcacatgactaccttgtgtgtta

SEQ ID NO: 692674 - DNA, 33 bp, Homo sapien
tgcgtggagttcacattactaccttgtgtgtta

SEQ ID NO: 692675 - DNA, 33 bp, Homo sapien
tcaggctctattgaacacctaaaaatgagtagc

SEQ ID NO: 692676 - DNA, 33 bp, Homo sapien
tcaggctctattgaacccctaaaaatgagtagc

SEQ ID NO: 692677 - DNA, 33 bp, Homo sapien
ctcttgaagagaggaaaaaatacctgcaaacac

SEQ ID NO: 692678 - DNA, 33 bp, Homo sapien
ctcttgaagagaggaagaaatacctgcaaacac

SEQ ID NO: 692679 - DNA, 33 bp, Homo sapien
cttggggaagaatagacatgatggcatggacta

SEQ ID NO: 692680 - DNA, 33 bp, Homo sapien
cttggggaagaatagatatgatggcatggacta

SEQ ID NO: 692681 - DNA, 33 bp, Homo sapien
agttttgagctaaaccaatagatttgggttccc

SEQ ID NO: 692682 - DNA, 33 bp, Homo sapien
agttttgagctaaaccgatagatttgggttccc

SEQ ID NO: 692683 - DNA, 33 bp, Homo sapien
gatgtagcatctagaaaccttgctaaattattt

SEQ ID NO: 692684 - DNA, 33 bp, Homo sapien
gatgtagcatctagaatccttgctaaattattt

SEQ ID NO: 692685 - DNA, 33 bp, Homo sapien
ggagcttatccagctacacagttgtcagttttg

SEQ ID NO: 692686 - DNA, 33 bp, Homo sapien
ggagcttatccagctagacagttgtcagttttg

SEQ ID NO: 692687 - DNA, 33 bp, Homo sapien
taagctcccgcctggacaacggaagctctctgt

SEQ ID NO: 692688 - DNA, 33 bp, Homo sapien
taagctcccgcctggataacggaagctctctgt

SEQ ID NO: 692689 - DNA, 33 bp, Homo sapien
tagagttaaaactagacaacgtgtattcttttg

SEQ ID NO: 692690 - DNA, 33 bp, Homo sapien
tagagttaaaactagataacgtgtattcttttg

SEQ ID NO: 692691 - DNA, 33 bp, Homo sapien
agataccaacataatacaacatgaatatcaata

SEQ ID NO: 692692 - DNA, 33 bp, Homo sapien
agataccaacataatagaacatgaatatcaata

SEQ ID NO: 692693 - DNA, 33 bp, Homo sapien
atgaaatttgccatatcaaaccatcatgattat

SEQ ID NO: 692694 - DNA, 33 bp, Homo sapien
atgaaatttgccatattaaaccatcatgattat

SEQ ID NO: 692695 - DNA, 33 bp, Homo sapien
gttgggatacctgtaacgtgtatggatgcctac

SEQ ID NO: 692696 - DNA, 33 bp, Homo sapien
gttgggatacctgtaatgtgtatggatgcctac

SEQ ID NO: 692697 - DNA, 33 bp, Homo sapien
ctgggcacttaagtcaaggagaaattcccttac

SEQ ID NO: 692698 - DNA, 33 bp, Homo sapien
ctgggcacttaagtcatggagaaattcccttac

SEQ ID NO: 692699 - DNA, 33 bp, Homo sapien
aaggttatttttccttcaaagcacttgtcaaat

SEQ ID NO: 692700 - DNA, 33 bp, Homo sapien
aaggttatttttccttgaaagcacttgtcaaat

SEQ ID NO: 692701 - DNA, 33 bp, Homo sapien
ctcaaggtttccagtacaggttgactgcaggac

SEQ ID NO: 692702 - DNA, 33 bp, Homo sapien
ctcaaggtttccagtataggttgactgcaggac

SEQ ID NO: 692703 - DNA, 33 bp, Homo sapien
gttaacttccaagatactaagctctaaggcagg

SEQ ID NO: 692704 - DNA, 33 bp, Homo sapien
gttaacttccaagatattaagctctaaggcagg

SEQ ID NO: 692705 - DNA, 33 bp, Homo sapien
acatctttaaaatgtgaagtagtgatcaagagt

SEQ ID NO: 692706 - DNA, 33 bp, Homo sapien
acatctttaaaatgtggagtagtgatcaagagt

SEQ ID NO: 692707 - DNA, 33 bp, Homo sapien
tgggtaaaccacatgacgctaagtttgagatat

SEQ ID NO: 692708 - DNA, 33 bp, Homo sapien
tgggtaaaccacatgatgctaagtttgagatat

SEQ ID NO: 692709 - DNA, 33 bp, Homo sapien
ggaattctgatgcagacggttagcccctcatac

SEQ ID NO: 692710 - DNA, 33 bp, Homo sapien
ggaattctgatgcagatggttagcccctcatac

SEQ ID NO: 692711 - DNA, 33 bp, Homo sapien
attccacgcagatatggatagtacctaataaaa

SEQ ID NO: 692712 - DNA, 33 bp, Homo sapien
attccacgcagatatgtatagtacctaataaaa

SEQ ID NO: 692713 - DNA, 33 bp, Homo sapien
atttcttcaagttaacaaaaaaatagcttcagg

SEQ ID NO: 692714 - DNA, 33 bp, Homo sapien
atttcttcaagttaaccaaaaaatagcttcagg

SEQ ID NO: 692715 - DNA, 33 bp, Homo sapien
atctagtctaaacaaccgctgagtgtcagaatg

SEQ ID NO: 692716 - DNA, 33 bp, Homo sapien
atctagtctaaacaactgctgagtgtcagaatg

SEQ ID NO: 692717 - DNA, 33 bp, Homo sapien
tcaaggcatgcattcactaatttatttagactc

SEQ ID NO: 692718 - DNA, 33 bp, Homo sapien
tcaaggcatgcattcattaatttatttagactc

SEQ ID NO: 692719 - DNA, 33 bp, Homo sapien
atgtgttcattctttgcacatatgaagcctttg

SEQ ID NO: 692720 - DNA, 33 bp, Homo sapien
atgtgttcattctttgtacatatgaagcctttg

SEQ ID NO: 692721 - DNA, 33 bp, Homo sapien
aagccctaactccaaaaacgtcacatagtgggt

SEQ ID NO: 692722 - DNA, 33 bp, Homo sapien
aagccctaactccaaacacgtcacatagtgggt

SEQ ID NO: 692723 - DNA, 33 bp, Homo sapien
gaaatatgttgcaggacccgaacacttacccaa

SEQ ID NO: 692724 - DNA, 33 bp, Homo sapien
gaaatatgttgcaggatccgaacacttacccaa

SEQ ID NO: 692725 - DNA, 33 bp, Homo sapien
tggtgtttggaaatgacaaagataagctaataa

SEQ ID NO: 692726 - DNA, 33 bp, Homo sapien
tggtgtttggaaatgagaaagataagctaataa

SEQ ID NO: 692727 - DNA, 33 bp, Homo sapien
gtaaggcaacgtaggaagttttttaggcatttc

SEQ ID NO: 692728 - DNA, 33 bp, Homo sapien
gtaaggcaacgtaggacgttttttaggcatttc

SEQ ID NO: 692729 - DNA, 33 bp, Homo sapien
tatctacgaaattgcaatcacctgtaatgccta

SEQ ID NO: 692730 - DNA, 33 bp, Homo sapien
tatctacgaaattgcagtcacctgtaatgccta

SEQ ID NO: 692731 - DNA, 33 bp, Homo sapien
cagatgtgaattagtacagcaggaagaagggga

SEQ ID NO: 692732 - DNA, 33 bp, Homo sapien
cagatgtgaattagtatagcaggaagaagggga

SEQ ID NO: 692733 - DNA, 33 bp, Homo sapien
tgttaatcttgagatacgaaaacagagactaag

SEQ ID NO: 692734 - DNA, 33 bp, Homo sapien
tgttaatcttgagatatgaaaacagagactaag

SEQ ID NO: 692735 - DNA, 33 bp, Homo sapien
taacttcagtttgaatcacagccgtactattga

SEQ ID NO: 692736 - DNA, 33 bp, Homo sapien
taacttcagtttgaatgacagccgtactattga

SEQ ID NO: 692737 - DNA, 33 bp, Homo sapien
atgtaggcttagtgaacagtcttcttgcagcat

SEQ ID NO: 692738 - DNA, 33 bp, Homo sapien
atgtaggcttagtgaatagtcttcttgcagcat

SEQ ID NO: 692739 - DNA, 33 bp, Homo sapien
aacaggcattgtaataatagccataacgtgtaa

SEQ ID NO: 692740 - DNA, 33 bp, Homo sapien
aacaggcattgtaatagtagccataacgtgtaa

SEQ ID NO: 692741 - DNA, 33 bp, Homo sapien
taaaacaggaagtaaactggcagattgtttaag

SEQ ID NO: 692742 - DNA, 33 bp, Homo sapien
taaaacaggaagtaaattggcagattgtttaag

SEQ ID NO: 692743 - DNA, 33 bp, Homo sapien
agcttaaacaggaagacacattctagcaaaacg

SEQ ID NO: 692744 - DNA, 33 bp, Homo sapien
agcttaaacaggaagatacattctagcaaaacg

SEQ ID NO: 692745 - DNA, 33 bp, Homo sapien
aaatagcgtgaaacatcagtctgaataaaataa

SEQ ID NO: 692746 - DNA, 33 bp, Homo sapien
aaatagcgtgaaacattagtctgaataaaataa

SEQ ID NO: 692747 - DNA, 33 bp, Homo sapien
tctgatcagctagtgaatatgcagagtgataac

SEQ ID NO: 692748 - DNA, 33 bp, Homo sapien
tctgatcagctagtgattatgcagagtgataac

SEQ ID NO: 692749 - DNA, 33 bp, Homo sapien
acaaaggcaaattgctcagaattggtcctgaca

SEQ ID NO: 692750 - DNA, 33 bp, Homo sapien
acaaaggcaaattgctgagaattggtcctgaca

SEQ ID NO: 692751 - DNA, 33 bp, Homo sapien
tgtaccaggtaaggtagaagttgaattgaaaca

SEQ ID NO: 692752 - DNA, 33 bp, Homo sapien
tgtaccaggtaaggtataagttgaattgaaaca

SEQ ID NO: 692753 - DNA, 33 bp, Homo sapien
agtcttatgcatgtgagagaaaataattagtgg

SEQ ID NO: 692754 - DNA, 33 bp, Homo sapien
agtcttatgcatgtgatagaaaataattagtgg

SEQ ID NO: 692755 - DNA, 33 bp, Homo sapien
atagaggaacctacatcatcatcattgcagcag

SEQ ID NO: 692756 - DNA, 33 bp, Homo sapien
atagaggaacctacattatcatcattgcagcag

SEQ ID NO: 692757 - DNA, 33 bp, Homo sapien
gtactaaatttggaaccaggagaacatcgtgaa

SEQ ID NO: 692758 - DNA, 33 bp, Homo sapien
gtactaaatttggaactaggagaacatcgtgaa

SEQ ID NO: 692759 - DNA, 33 bp, Homo sapien
aataggtatgatctcaatagtgtactaaatttg

SEQ ID NO: 692760 - DNA, 33 bp, Homo sapien
aataggtatgatctcagtagtgtactaaatttg

SEQ ID NO: 692761 - DNA, 33 bp, Homo sapien
caaacttctgcctgacaattcaggaatttccat

SEQ ID NO: 692762 - DNA, 33 bp, Homo sapien
caaacttctgcctgacgattcaggaatttccat

SEQ ID NO: 692763 - DNA, 33 bp, Homo sapien
tttaccagaatatctcaaatgtttccctaaggc

SEQ ID NO: 692764 - DNA, 33 bp, Homo sapien
tttaccagaatatctccaatgtttccctaaggc

SEQ ID NO: 692765 - DNA, 33 bp, Homo sapien
agaaacaatttcataaccagttctgacatttag

SEQ ID NO: 692766 - DNA, 33 bp, Homo sapien
agaaacaatttcataatcagttctgacatttag

SEQ ID NO: 692767 - DNA, 33 bp, Homo sapien
cctttttgtctatcgaacttctacccatttatc

SEQ ID NO: 692768 - DNA, 33 bp, Homo sapien
cctttttgtctatcgagcttctacccatttatc

SEQ ID NO: 692769 - DNA, 33 bp, Homo sapien
aaacaaagctgagatacaagcacaaaatctctt

SEQ ID NO: 692770 - DNA, 33 bp, Homo sapien
aaacaaagctgagatataagcacaaaatctctt

SEQ ID NO: 692771 - DNA, 33 bp, Homo sapien
atggtatcaagaacaggcagaatttagacctaa

SEQ ID NO: 692772 - DNA, 33 bp, Homo sapien
atggtatcaagaacagtcagaatttagacctaa

SEQ ID NO: 692773 - DNA, 33 bp, Homo sapien
gatgggatagaaatccagagtcctgcaacttag

SEQ ID NO: 692774 - DNA, 33 bp, Homo sapien
gatgggatagaaatccggagtcctgcaacttag

SEQ ID NO: 692775 - DNA, 33 bp, Homo sapien
aaaggtatttaaaagaagtaggccaggtatact

SEQ ID NO: 692776 - DNA, 33 bp, Homo sapien
aaaggtatttaaaagatgtaggccaggtatact

SEQ ID NO: 692777 - DNA, 33 bp, Homo sapien
atagaaaaagttacaacatcaaagttggttact

SEQ ID NO: 692778 - DNA, 33 bp, Homo sapien
atagaaaaagttacaatatcaaagttggttact

SEQ ID NO: 692779 - DNA, 33 bp, Homo sapien
agtcaggaagcttcacaaaatacatttaaatgg

SEQ ID NO: 692780 - DNA, 33 bp, Homo sapien
agtcaggaagcttcacgaaatacatttaaatgg

SEQ ID NO: 692781 - DNA, 33 bp, Homo sapien
tactggaccatgagacgcaagggcagccgttag

SEQ ID NO: 692782 - DNA, 33 bp, Homo sapien
tactggaccatgagactcaagggcagccgttag

SEQ ID NO: 692783 - DNA, 33 bp, Homo sapien
actgttaggctgctaaacttgcataataatagt

SEQ ID NO: 692784 - DNA, 33 bp, Homo sapien
actgttaggctgctaagcttgcataataatagt

SEQ ID NO: 692785 - DNA, 33 bp, Homo sapien
tctagtgattgagaaaatagacaataaatgaaa

SEQ ID NO: 692786 - DNA, 33 bp, Homo sapien
tctagtgattgagaaagtagacaataaatgaaa

SEQ ID NO: 692787 - DNA, 33 bp, Homo sapien
gccattttgggtgataccaaggtgctgtgattg

SEQ ID NO: 692788 - DNA, 33 bp, Homo sapien
gccattttgggtgatatcaaggtgctgtgattg

SEQ ID NO: 692789 - DNA, 33 bp, Homo sapien
acctaaaatcttctgacccagaggtatgctcca

SEQ ID NO: 692790 - DNA, 33 bp, Homo sapien
acctaaaatcttctgatccagaggtatgctcca

SEQ ID NO: 692791 - DNA, 33 bp, Homo sapien
gttaaacttccaatgacgcatgattacattttt

SEQ ID NO: 692792 - DNA, 33 bp, Homo sapien
gttaaacttccaatgatgcatgattacattttt

SEQ ID NO: 692793 - DNA, 33 bp, Homo sapien
gaaaacatgttagaggaatgtttatgaacccca

SEQ ID NO: 692794 - DNA, 33 bp, Homo sapien
gaaaacatgttagaggcatgtttatgaacccca

SEQ ID NO: 692795 - DNA, 33 bp, Homo sapien
ggcaggtagtgcttgccgaatgcatttggccaa

SEQ ID NO: 692796 - DNA, 33 bp, Homo sapien
ggcaggtagtgcttgctgaatgcatttggccaa

SEQ ID NO: 692797 - DNA, 33 bp, Homo sapien
tcagttaacaaaaagacagctcaagatcccaac

SEQ ID NO: 692798 - DNA, 33 bp, Homo sapien
tcagttaacaaaaagagagctcaagatcccaac

SEQ ID NO: 692799 - DNA, 33 bp, Homo sapien
acaactttgtctatagccactatgttccaagca

SEQ ID NO: 692800 - DNA, 33 bp, Homo sapien
acaactttgtctatagtcactatgttccaagca

SEQ ID NO: 692801 - DNA, 33 bp, Homo sapien
gaaaaaaatcgttaataatacatctggatacac

SEQ ID NO: 692802 - DNA, 33 bp, Homo sapien
gaaaaaaatcgttaatgatacatctggatacac

SEQ ID NO: 692803 - DNA, 33 bp, Homo sapien
ttcactacatagacagaaaaaacaattgatttt

SEQ ID NO: 692804 - DNA, 33 bp, Homo sapien
ttcactacatagacaggaaaaacaattgatttt

SEQ ID NO: 692805 - DNA, 33 bp, Homo sapien
gtagttgggagccttacctgagctgtcaccatt

SEQ ID NO: 692806 - DNA, 33 bp, Homo sapien
gtagttgggagccttatctgagctgtcaccatt

SEQ ID NO: 692807 - DNA, 33 bp, Homo sapien
tctcccagtgttaggcaaagaactagttttgat

SEQ ID NO: 692808 - DNA, 33 bp, Homo sapien
tctcccagtgttaggcgaagaactagttttgat

SEQ ID NO: 692809 - DNA, 33 bp, Homo sapien
acatcttgagggattccatctcatgttataaaa

SEQ ID NO: 692810 - DNA, 33 bp, Homo sapien
acatcttgagggattctatctcatgttataaaa

SEQ ID NO: 692811 - DNA, 33 bp, Homo sapien
gtggaatcagacagaaatgtgtttgtatcctga

SEQ ID NO: 692812 - DNA, 33 bp, Homo sapien
gtggaatcagacagaactgtgtttgtatcctga

SEQ ID NO: 692813 - DNA, 33 bp, Homo sapien
tttccaccggtctctaatactaagtcaaccatg

SEQ ID NO: 692814 - DNA, 33 bp, Homo sapien
tttccaccggtctctattactaagtcaaccatg

SEQ ID NO: 692815 - DNA, 33 bp, Homo sapien
attaagagagcagtcaactttttgtctctaaca

SEQ ID NO: 692816 - DNA, 33 bp, Homo sapien
attaagagagcagtcacctttttgtctctaaca

SEQ ID NO: 692817 - DNA, 33 bp, Homo sapien
ggtggaaatgctttatcagcatcaacaaattaa

SEQ ID NO: 692818 - DNA, 33 bp, Homo sapien
ggtggaaatgctttatgagcatcaacaaattaa

SEQ ID NO: 692819 - DNA, 33 bp, Homo sapien
ttctttgggggcattgaaagcactgataatgtt

SEQ ID NO: 692820 - DNA, 33 bp, Homo sapien
ttctttgggggcattggaagcactgataatgtt

SEQ ID NO: 692821 - DNA, 33 bp, Homo sapien
tttgtgtgtatgagacaattttgattagcattt

SEQ ID NO: 692822 - DNA, 33 bp, Homo sapien
tttgtgtgtatgagacgattttgattagcattt

SEQ ID NO: 692823 - DNA, 33 bp, Homo sapien
acagttatacggccaacaaacatacaaaaaaag

SEQ ID NO: 692824 - DNA, 33 bp, Homo sapien
acagttatacggccaagaaacatacaaaaaaag

SEQ ID NO: 692825 - DNA, 33 bp, Homo sapien; identical to SEQ ID NO: 692823

SEQ ID NO: 692826 - DNA, 33 bp, Homo sapien; identical to SEQ ID NO: 692824

SEQ ID NO: 692827 - DNA, 33 bp, Homo sapien
catgaattacagaagaaaaaacacctgggaaat

SEQ ID NO: 692828 - DNA, 33 bp, Homo sapien
catgaattacagaagagaaaacacctgggaaat

SEQ ID NO: 692829 - DNA, 33 bp, Homo sapien
tggtggtagacattgacagcttcttttaggtta

SEQ ID NO: 692830 - DNA, 33 bp, Homo sapien
tggtggtagacattgatagcttcttttaggtta

SEQ ID NO: 692831 - DNA, 33 bp, Homo sapien
ttagttgtaaatattcccaggttgaaaaacatg

SEQ ID NO: 692832 - DNA, 33 bp, Homo sapien
ttagttgtaaatattctcaggttgaaaaacatg

SEQ ID NO: 692833 - DNA, 33 bp, Homo sapien
cacctatgccacatccaagatagcaagaccaag

SEQ ID NO: 692834 - DNA, 33 bp, Homo sapien
cacctatgccacatccgagatagcaagaccaag

SEQ ID NO: 692835 - DNA, 33 bp, Homo sapien
aggacttgtcctcaaaataagggtgaactagaa

SEQ ID NO: 692836 - DNA, 33 bp, Homo sapien
aggacttgtcctcaaactaagggtgaactagaa

SEQ ID NO: 692837 - DNA, 33 bp, Homo sapien
gacaggcaacagaatactaaaaattgagtgaat

SEQ ID NO: 692838 - DNA, 33 bp, Homo sapien
gacaggcaacagaatagtaaaaattgagtgaat

SEQ ID NO: 692839 - DNA, 33 bp, Homo sapien
tgtttttgcaattagccgaacacgtagcccagt

SEQ ID NO: 692840 - DNA, 33 bp, Homo sapien
tgtttttgcaattagctgaacacgtagcccagt

SEQ ID NO: 692841 - DNA, 33 bp, Homo sapien
agccagtgccttcactgacatttcaacatttcc

SEQ ID NO: 692842 - DNA, 33 bp, Homo sapien
agccagtgccttcacttacatttcaacatttcc

SEQ ID NO: 692843 - DNA, 33 bp, Homo sapien; identical to SEQ ID NO: 692841

SEQ ID NO: 692844 - DNA, 33 bp, Homo sapien; identical to SEQ ID NO: 692842

SEQ ID NO: 692845 - DNA, 33 bp, Homo sapien
tgagtataggaagacacaactgggatctcttac

SEQ ID NO: 692846 - DNA, 33 bp, Homo sapien
tgagtataggaagacagaactgggatctcttac

SEQ ID NO: 692847 - DNA, 33 bp, Homo sapien; identical to SEQ ID NO: 692845

SEQ ID NO: 692848 - DNA, 33 bp, Homo sapien; identical to SEQ ID NO: 692846

SEQ ID NO: 692849 - DNA, 33 bp, Homo sapien
tgatctgggaccagtaaatgtttaatccagtga

SEQ ID NO: 692850 - DNA, 33 bp, Homo sapien
tgatctgggaccagtagatgtttaatccagtga

SEQ ID NO: 692851 - DNA, 33 bp, Homo sapien; identical to SEQ ID NO: 692849

SEQ ID NO: 692852 - DNA, 33 bp, Homo sapien; identical to SEQ ID NO: 692850

SEQ ID NO: 692853 - DNA, 33 bp, Homo sapien
tagtggcctaaaatgacggaaggccctaggaaa

SEQ ID NO: 692854 - DNA, 33 bp, Homo sapien
tagtggcctaaaatgatggaaggccctaggaaa

SEQ ID NO: 692855 - DNA, 33 bp, Homo sapien
ttaaaataacatgggagaaatcattgttgcagt

SEQ ID NO: 692856 - DNA, 33 bp, Homo sapien
ttaaaataacatgggataaatcattgttgcagt

SEQ ID NO: 692857 - DNA, 33 bp, Homo sapien
aaactacagatataggccatgtcacataagtca

SEQ ID NO: 692858 - DNA, 33 bp, Homo sapien
aaactacagatataggtcatgtcacataagtca

SEQ ID NO: 692859 - DNA, 33 bp, Homo sapien
gtaaatcaaatcagcaaaacatgaggagctacc

SEQ ID NO: 692860 - DNA, 33 bp, Homo sapien
gtaaatcaaatcagcagaacatgaggagctacc

SEQ ID NO: 692861 - DNA, 33 bp, Homo sapien
aaatgatcattaaatacgtgaggagagttctgt

SEQ ID NO: 692862 - DNA, 33 bp, Homo sapien
aaatgatcattaaatatgtgaggagagttctgt

SEQ ID NO: 692863 - DNA, 33 bp, Homo sapien
acattggttttaaaagcaatgtactgcaaatgc

SEQ ID NO: 692864 - DNA, 33 bp, Homo sapien
acattggttttaaaagtaatgtactgcaaatgc

SEQ ID NO: 692865 - DNA, 33 bp, Homo sapien
cttcaaatggaagcaacggtgggaactgggtgg

SEQ ID NO: 692866 - DNA, 33 bp, Homo sapien
cttcaaatggaagcaatggtgggaactgggtgg

SEQ ID NO: 692867 - DNA, 33 bp, Homo sapien
aatattacagtttctcagaagtccagtcacaac

SEQ ID NO: 692868 - DNA, 33 bp, Homo sapien
aatattacagtttctcggaagtccagtcacaac

SEQ ID NO: 692869 - DNA, 33 bp, Homo sapien
tcattaatcggaagtggatcgtcataaagtcct

SEQ ID NO: 692870 - DNA, 33 bp, Homo sapien
tcattaatcggaagtgtatcgtcataaagtcct

SEQ ID NO: 692871 - DNA, 33 bp, Homo sapien
gttttctctttacttcactagctagaactgttt

SEQ ID NO: 692872 - DNA, 33 bp, Homo sapien
gttttctctttacttcgctagctagaactgttt

SEQ ID NO: 692873 - DNA, 33 bp, Homo sapien
attataatatgaactaacctagacaacttattt

SEQ ID NO: 692874 - DNA, 33 bp, Homo sapien
attataatatgaactagcctagacaacttattt

SEQ ID NO: 692875 - DNA, 33 bp, Homo sapien
cctttccctattctcaacagtagattataatat

SEQ ID NO: 692876 - DNA, 33 bp, Homo sapien
cctttccctattctcagcagtagattataatat

SEQ ID NO: 692877 - DNA, 33 bp, Homo sapien
ctctattatcgtagacaattggctcaaaagctc

SEQ ID NO: 692878 - DNA, 33 bp, Homo sapien
ctctattatcgtagacgattggctcaaaagctc

SEQ ID NO: 692879 - DNA, 33 bp, Homo sapien
ggcgccatctatgaataagaaagtaagctctca

SEQ ID NO: 692880 - DNA, 33 bp, Homo sapien
ggcgccatctatgaatgagaaagtaagctctca

SEQ ID NO: 692881 - DNA, 33 bp, Homo sapien
gaactttggagcttgacaaatacctgggtttga

SEQ ID NO: 692882 - DNA, 33 bp, Homo sapien
gaactttggagcttgataaatacctgggtttga

SEQ ID NO: 692883 - DNA, 33 bp, Homo sapien
tcctagatttggcagaccatcttttctcagact

SEQ ID NO: 692884 - DNA, 33 bp, Homo sapien
tcctagatttggcagagcatcttttctcagact

SEQ ID NO: 692885 - DNA, 33 bp, Homo sapien
gtcacccatcagtgcaaatattgtttggaatat

SEQ ID NO: 692886 - DNA, 33 bp, Homo sapien
gtcacccatcagtgcagatattgtttggaatat

SEQ ID NO: 692887 - DNA, 33 bp, Homo sapien
agattatggtgagacaagtaaggttcctcgggg

SEQ ID NO: 692888 - DNA, 33 bp, Homo sapien
agattatggtgagacacgtaaggttcctcgggg

SEQ ID NO: 692889 - DNA, 33 bp, Homo sapien
aggaggtatgtataaccgaagtgaggaaagtta

SEQ ID NO: 692890 - DNA, 33 bp, Homo sapien
aggaggtatgtataactgaagtgaggaaagtta

SEQ ID NO: 692891 - DNA, 33 bp, Homo sapien
attcacaaaaatatcaaatattgccctcctttt

SEQ ID NO: 692892 - DNA, 33 bp, Homo sapien
attcacaaaaatatcagatattgccctcctttt

SEQ ID NO: 692893 - DNA, 33 bp, Homo sapien
actctcaattatccacactaaggaagggggatc

SEQ ID NO: 692894 - DNA, 33 bp, Homo sapien
actctcaattatccacgctaaggaagggggatc

SEQ ID NO: 692895 - DNA, 33 bp, Homo sapien
aatggagttaaaggaaaaatggaacatacagac

SEQ ID NO: 692896 - DNA, 33 bp, Homo sapien
aatggagttaaaggaagaatggaacatacagac

SEQ ID NO: 692897 - DNA, 33 bp, Homo sapien
aaagatgaaataatgacaggtgaatttgatcat

SEQ ID NO: 692898 - DNA, 33 bp, Homo sapien
aaagatgaaataatgagaggtgaatttgatcat

SEQ ID NO: 692899 - DNA, 33 bp, Homo sapien
agtcgcacatcctccacgaacaggcctactttc

SEQ ID NO: 692900 - DNA, 33 bp, Homo sapien
agtcgcacatcctccaggaacaggcctactttc

SEQ ID NO: 692901 - DNA, 33 bp, Homo sapien
ggagctcagtttagcacagtgacagtcagaagc

SEQ ID NO: 692902 - DNA, 33 bp, Homo sapien
ggagctcagtttagcatagtgacagtcagaagc

SEQ ID NO: 692903 - DNA, 33 bp, Homo sapien
atatgttgaaaactgcactaacacaatgagaga

SEQ ID NO: 692904 - DNA, 33 bp, Homo sapien
atatgttgaaaactgcgctaacacaatgagaga

SEQ ID NO: 692905 - DNA, 33 bp, Homo sapien
agcaaaacataatgacaggggaaaagctagaag

SEQ ID NO: 692906 - DNA, 33 bp, Homo sapien
agcaaaacataatgacgggggaaaagctagaag

SEQ ID NO: 692907 - DNA, 33 bp, Homo sapien
gatcacatagctgataaccgaacagcaaaatgt

SEQ ID NO: 692908 - DNA, 33 bp, Homo sapien
gatcacatagctgatagccgaacagcaaaatgt

SEQ ID NO: 692909 - DNA, 33 bp, Homo sapien
caaaccacatgataaccgtctgttgaaaggaag

SEQ ID NO: 692910 - DNA, 33 bp, Homo sapien
caaaccacatgataactgtctgttgaaaggaag

SEQ ID NO: 692911 - DNA, 33 bp, Homo sapien
aaacatgtttaatttaccagctcattaaactct

SEQ ID NO: 692912 - DNA, 33 bp, Homo sapien
aaacatgtttaatttatcagctcattaaactct

SEQ ID NO: 692913 - DNA, 33 bp, Homo sapien
tgtgtgttaccagttaaaggttattccttcatg

SEQ ID NO: 692914 - DNA, 33 bp, Homo sapien
tgtgtgttaccagttagaggttattccttcatg

SEQ ID NO: 692915 - DNA, 33 bp, Homo sapien
gaagagttaaggtgcgcactccttaggctactt

SEQ ID NO: 692916 - DNA, 33 bp, Homo sapien
gaagagttaaggtgcgtactccttaggctactt

SEQ ID NO: 692917 - DNA, 33 bp, Homo sapien
atccagaaaaagacaacggtggcttgaatctag

SEQ ID NO: 692918 - DNA, 33 bp, Homo sapien
atccagaaaaagacaatggtggcttgaatctag

SEQ ID NO: 692919 - DNA, 33 bp, Homo sapien
cccatacaactgccccaagtgaggagtagagtc

SEQ ID NO: 692920 - DNA, 33 bp, Homo sapien
cccatacaactgccccgagtgaggagtagagtc

SEQ ID NO: 692921 - DNA, 33 bp, Homo sapien
catggaatcacagttaaaaaagtagaggcagtt

SEQ ID NO: 692922 - DNA, 33 bp, Homo sapien
catggaatcacagttagaaaagtagaggcagtt

SEQ ID NO: 692923 - DNA, 33 bp, Homo sapien
tgtagcctgaattaacaaaataatctttacact

SEQ ID NO: 692924 - DNA, 33 bp, Homo sapien
tgtagcctgaattaacgaaataatctttacact

SEQ ID NO: 692925 - DNA, 33 bp, Homo sapien
aagtgaaatatttcggacacagaaacacaaata

SEQ ID NO: 692926 - DNA, 33 bp, Homo sapien
aagtgaaatatttcgggcacagaaacacaaata

SEQ ID NO: 692927 - DNA, 33 bp, Homo sapien
atatcccaggaaatcacagacttgggtgagctg

SEQ ID NO: 692928 - DNA, 33 bp, Homo sapien
atatcccaggaaatcagagacttgggtgagctg

SEQ ID NO: 692929 - DNA, 33 bp, Homo sapien
agttaagtcagagatacgagcgtgtgagatagt

SEQ ID NO: 692930 - DNA, 33 bp, Homo sapien
agttaagtcagagatatgagcgtgtgagatagt

SEQ ID NO: 692931 - DNA, 33 bp, Homo sapien
cttcttagtgcccaaaggaaagtatagtaaaga

SEQ ID NO: 692932 - DNA, 33 bp, Homo sapien
cttcttagtgcccaaatgaaagtatagtaaaga

SEQ ID NO: 692933 - DNA, 33 bp, Homo sapien
actcttgaggttaccactcacaggagaacagag

SEQ ID NO: 692934 - DNA, 33 bp, Homo sapien
actcttgaggttaccattcacaggagaacagag

SEQ ID NO: 692935 - DNA, 33 bp, Homo sapien
gtgatattgcagaaaaataatccatgatgtatc

SEQ ID NO: 692936 - DNA, 33 bp, Homo sapien
gtgatattgcagaaaactaatccatgatgtatc

SEQ ID NO: 692937 - DNA, 33 bp, Homo sapien
agaagtaaccagcttaccatctcacgagcattg

SEQ ID NO: 692938 - DNA, 33 bp, Homo sapien
agaagtaaccagcttatcatctcacgagcattg

SEQ ID NO: 692939 - DNA, 33 bp, Homo sapien
cttaaaatccattatcaatagcaaccagggtac

SEQ ID NO: 692940 - DNA, 33 bp, Homo sapien
cttaaaatccattatccatagcaaccagggtac

SEQ ID NO: 692941 - DNA, 33 bp, Homo sapien
gtgtgatgtgagattactaagtgctagtaaaaa

SEQ ID NO: 692942 - DNA, 33 bp, Homo sapien
gtgtgatgtgagattattaagtgctagtaaaaa

SEQ ID NO: 692943 - DNA, 33 bp, Homo sapien
agctgtccttgaaatacgacttccaatttgtaa

SEQ ID NO: 692944 - DNA, 33 bp, Homo sapien
agctgtccttgaaatatgacttccaatttgtaa

SEQ ID NO: 692945 - DNA, 33 bp, Homo sapien
ttctaccatgacaataaactttctggcagttct

SEQ ID NO: 692946 - DNA, 33 bp, Homo sapien
ttctaccatgacaatatactttctggcagttct

SEQ ID NO: 692947 - DNA, 33 bp, Homo sapien
tccgggggaacctccacgtgatggtgaacacta

SEQ ID NO: 692948 - DNA, 33 bp, Homo sapien
tccgggggaacctccatgtgatggtgaacacta

SEQ ID NO: 692949 - DNA, 33 bp, Homo sapien
gttagctattttgataacgagggcaattatttt

SEQ ID NO: 692950 - DNA, 33 bp, Homo sapien
gttagctattttgatagcgagggcaattatttt

SEQ ID NO: 692951 - DNA, 33 bp, Homo sapien
atagaacattgaagcacctagtggtcaagaaaa

SEQ ID NO: 692952 - DNA, 33 bp, Homo sapien
atagaacattgaagcagctagtggtcaagaaaa

SEQ ID NO: 692953 - DNA, 33 bp, Homo sapien
tcgtcttgggagataaaggaatagagtatgtac

SEQ ID NO: 692954 - DNA, 33 bp, Homo sapien
tcgtcttgggagataagggaatagagtatgtac

SEQ ID NO: 692955 - DNA, 33 bp, Homo sapien
agcttatttcagtaaacctgttcatttcatgtt

SEQ ID NO: 692956 - DNA, 33 bp, Homo sapien
agcttatttcagtaaatctgttcatttcatgtt

SEQ ID NO: 692957 - DNA, 33 bp, Homo sapien
tcctcaagtctaaaccccttatttcatatatga

SEQ ID NO: 692958 - DNA, 33 bp, Homo sapien
tcctcaagtctaaacctcttatttcatatatga

SEQ ID NO: 692959 - DNA, 33 bp, Homo sapien
cagtagatggaagttacgggaaagagctggctg

SEQ ID NO: 692960 - DNA, 33 bp, Homo sapien
cagtagatggaagttatgggaaagagctggctg

SEQ ID NO: 692961 - DNA, 33 bp, Homo sapien
tgcagattgtgatgaaatgggttcctccctatt

SEQ ID NO: 692962 - DNA, 33 bp, Homo sapien
tgcagattgtgatgaagtgggttcctccctatt

SEQ ID NO: 692963 - DNA, 33 bp, Homo sapien
attagcagcctaagccactatatccttctagtg

SEQ ID NO: 692964 - DNA, 33 bp, Homo sapien
attagcagcctaagccgctatatccttctagtg

SEQ ID NO: 692965 - DNA, 33 bp, Homo sapien
gtggagggtggaataaatgttctcagatttacc

SEQ ID NO: 692966 - DNA, 33 bp, Homo sapien
gtggagggtggaataactgttctcagatttacc

SEQ ID NO: 692967 - DNA, 33 bp, Homo sapien
tatgctatcctttctacgtaatttgctcaccag

SEQ ID NO: 692968 - DNA, 33 bp, Homo sapien
tatgctatcctttctatgtaatttgctcaccag

SEQ ID NO: 692969 - DNA, 33 bp, Homo sapien
ccagttcttccacaaacagattgcattattatg

SEQ ID NO: 692970 - DNA, 33 bp, Homo sapien
ccagttcttccacaaagagattgcattattatg

SEQ ID NO: 692971 - DNA, 33 bp, Homo sapien
atttactcaaaggtccacaagtgttgagttaag

SEQ ID NO: 692972 - DNA, 33 bp, Homo sapien
atttactcaaaggtccccaagtgttgagttaag

SEQ ID NO: 692973 - DNA, 33 bp, Homo sapien
tcttaccaactgatcagtaattctctcaattgc

SEQ ID NO: 692974 - DNA, 33 bp, Homo sapien
tcttaccaactgatcattaattctctcaattgc

SEQ ID NO: 692975 - DNA, 33 bp, Homo sapien
tttagaccagagaaacagtagctttgaacatga

SEQ ID NO: 692976 - DNA, 33 bp, Homo sapien
tttagaccagagaaacggtagctttgaacatga

SEQ ID NO: 692977 - DNA, 33 bp, Homo sapien
ccttccgtcattggaacctgtgacatacacagg

SEQ ID NO: 692978 - DNA, 33 bp, Homo sapien
ccttccgtcattggaagctgtgacatacacagg

SEQ ID NO: 692979 - DNA, 33 bp, Homo sapien
tatcttcatatcttggcaatcctcacaatattt

SEQ ID NO: 692980 - DNA, 33 bp, Homo sapien
tatcttcatatcttggtaatcctcacaatattt

SEQ ID NO: 692981 - DNA, 33 bp, Homo sapien
aaggttttacaatgcaacacttcaaaagggaaa

SEQ ID NO: 692982 - DNA, 33 bp, Homo sapien
aaggttttacaatgcatcacttcaaaagggaaa

SEQ ID NO: 692983 - DNA, 33 bp, Homo sapien
acccacaccatcaaaggacacccttgtctctct

SEQ ID NO: 692984 - DNA, 33 bp, Homo sapien
acccacaccatcaaagtacacccttgtctctct

SEQ ID NO: 692985 - DNA, 33 bp, Homo sapien
caagaagcaactgaaaaagctccctcattgaac

SEQ ID NO: 692986 - DNA, 33 bp, Homo sapien
caagaagcaactgaaagagctccctcattgaac

SEQ ID NO: 692987 - DNA, 33 bp, Homo sapien
agttttatagagcctaactgacctgggggaatg

SEQ ID NO: 692988 - DNA, 33 bp, Homo sapien
agttttatagagcctatctgacctgggggaatg

SEQ ID NO: 692989 - DNA, 33 bp, Homo sapien
tataaccttcaacacaatgataataggaggtgt

SEQ ID NO: 692990 - DNA, 33 bp, Homo sapien
tataaccttcaacacagtgataataggaggtgt

SEQ ID NO: 692991 - DNA, 33 bp, Homo sapien
atgacatgtagggatacaatgggatcctagccc

SEQ ID NO: 692992 - DNA, 33 bp, Homo sapien
atgacatgtagggatataatgggatcctagccc

SEQ ID NO: 692993 - DNA, 33 bp, Homo sapien
caccacaaattgaatgacatacacaacagaatt

SEQ ID NO: 692994 - DNA, 33 bp, Homo sapien
caccacaaattgaatggcatacacaacagaatt

SEQ ID NO: 692995 - DNA, 33 bp, Homo sapien
tcataaaagtaggaaacgtatagctggttcttt

SEQ ID NO: 692996 - DNA, 33 bp, Homo sapien
tcataaaagtaggaaatgtatagctggttcttt

SEQ ID NO: 692997 - DNA, 33 bp, Homo sapien
gtctttattagcagaacgagaatgaactaatac

SEQ ID NO: 692998 - DNA, 33 bp, Homo sapien
gtctttattagcagaatgagaatgaactaatac

SEQ ID NO: 692999 - DNA, 33 bp, Homo sapien
tgattgatggactgcacaatcaatcaaggtgga

SEQ ID NO: 693000 - DNA, 33 bp, Homo sapien
tgattgatggactgcagaatcaatcaaggtgga

SEQ ID NO: 693001 - DNA, 33 bp, Homo sapien
aaccagatgtcttggcaatgactactgtgtaaa

SEQ ID NO: 693002 - DNA, 33 bp, Homo sapien
aaccagatgtcttggcgatgactactgtgtaaa

SEQ ID NO: 693003 - DNA, 33 bp, Homo sapien
caaatatttgtagacaaaaattcacagcagctt

SEQ ID NO: 693004 - DNA, 33 bp, Homo sapien
caaatatttgtagacagaaattcacagcagctt

SEQ ID NO: 693005 - DNA, 33 bp, Homo sapien
actgagaacttctaataacatcacacttaaagc

SEQ ID NO: 693006 - DNA, 33 bp, Homo sapien
actgagaacttctaatgacatcacacttaaagc

SEQ ID NO: 693007 - DNA, 33 bp, Homo sapien
ggagatttggaaggaaaatgtggatgaatcact

SEQ ID NO: 693008 - DNA, 33 bp, Homo sapien
ggagatttggaaggaagatgtggatgaatcact

SEQ ID NO: 693009 - DNA, 33 bp, Homo sapien
gggaagaatgattttgcaaacttcataccatcg

SEQ ID NO: 693010 - DNA, 33 bp, Homo sapien
gggaagaatgattttgtaaacttcataccatcg

SEQ ID NO: 693011 - DNA, 33 bp, Homo sapien
atgctaacgtgaatcaaaaatcatattcagact

SEQ ID NO: 693012 - DNA, 33 bp, Homo sapien
atgctaacgtgaatcacaaatcatattcagact

SEQ ID NO: 693013 - DNA, 33 bp, Homo sapien
acccccaaccatgtaggatcctaagtaattagt

SEQ ID NO: 693014 - DNA, 33 bp, Homo sapien
acccccaaccatgtagtatcctaagtaattagt

SEQ ID NO: 693015 - DNA, 33 bp, Homo sapien
gcctgcaaggagctcaaaatctatcagagaaga

SEQ ID NO: 693016 - DNA, 33 bp, Homo sapien
gcctgcaaggagctcagaatctatcagagaaga

SEQ ID NO: 693017 - DNA, 33 bp, Homo sapien
taatttgcccattaaccagtttagagacattca

SEQ ID NO: 693018 - DNA, 33 bp, Homo sapien
taatttgcccattaacgagtttagagacattca

SEQ ID NO: 693019 - DNA, 33 bp, Homo sapien
ggcaaaccaaagagaacgtgaagaaataaacta

SEQ ID NO: 693020 - DNA, 33 bp, Homo sapien
ggcaaaccaaagagaatgtgaagaaataaacta

SEQ ID NO: 693021 - DNA, 33 bp, Homo sapien
atcctgcatttccttaactgtcacttccatgag

SEQ ID NO: 693022 - DNA, 33 bp, Homo sapien
atcctgcatttccttagctgtcacttccatgag

SEQ ID NO: 693023 - DNA, 33 bp, Homo sapien
gatgacataatagaaacaaacagtgcccaggaa

SEQ ID NO: 693024 - DNA, 33 bp, Homo sapien
gatgacataatagaaagaaacagtgcccaggaa

SEQ ID NO: 693025 - DNA, 33 bp, Homo sapien
gaggaaagacgctccacgagcaaaagaattatg

SEQ ID NO: 693026 - DNA, 33 bp, Homo sapien
gaggaaagacgctccatgagcaaaagaattatg

SEQ ID NO: 693027 - DNA, 33 bp, Homo sapien
tttggggacaggtttaccacttattcaacaaac

SEQ ID NO: 693028 - DNA, 33 bp, Homo sapien
tttggggacaggtttatcacttattcaacaaac

SEQ ID NO: 693029 - DNA, 33 bp, Homo sapien
ttctattgtcttaatacattgggaacctcttgt

SEQ ID NO: 693030 - DNA, 33 bp, Homo sapien
ttctattgtcttaatagattgggaacctcttgt

SEQ ID NO: 693031 - DNA, 33 bp, Homo sapien
agcataagtttatacacgtgaaatataattcat

SEQ ID NO: 693032 - DNA, 33 bp, Homo sapien
agcataagtttatacatgtgaaatataattcat

SEQ ID NO: 693033 - DNA, 33 bp, Homo sapien
cctagtagaaaaaagacgtaggattcaaggaac

SEQ ID NO: 693034 - DNA, 33 bp, Homo sapien
cctagtagaaaaaagatgtaggattcaaggaac

SEQ ID NO: 693035 - DNA, 33 bp, Homo sapien
tacaaatatcttattcactaatgttccttgaat

SEQ ID NO: 693036 - DNA, 33 bp, Homo sapien
tacaaatatcttattcgctaatgttccttgaat

SEQ ID NO: 693037 - DNA, 33 bp, Homo sapien
tcggtgaaatcatctagacttttactttcagtt

SEQ ID NO: 693038 - DNA, 33 bp, Homo sapien
tcggtgaaatcatctatacttttactttcagtt

SEQ ID NO: 693039 - DNA, 33 bp, Homo sapien
gtccaatgccctcccacgttcggtgaaatcatc

SEQ ID NO: 693040 - DNA, 33 bp, Homo sapien
gtccaatgccctcccatgttcggtgaaatcatc

SEQ ID NO: 693041 - DNA, 33 bp, Homo sapien
ccctctttcagtcataccatgagaaatcaccaa

SEQ ID NO: 693042 - DNA, 33 bp, Homo sapien
ccctctttcagtcatatcatgagaaatcaccaa

SEQ ID NO: 693043 - DNA, 33 bp, Homo sapien
tgttttctggatttcactgaaaagaataaaggg

SEQ ID NO: 693044 - DNA, 33 bp, Homo sapien
tgttttctggatttcattgaaaagaataaaggg

SEQ ID NO: 693045 - DNA, 33 bp, Homo sapien
gtaattatgattggcactaaaaatgaactacaa

SEQ ID NO: 693046 - DNA, 33 bp, Homo sapien
gtaattatgattggcattaaaaatgaactacaa

SEQ ID NO: 693047 - DNA, 33 bp, Homo sapien
gtgcttgggttcactacagcctaaatgtgaagt

SEQ ID NO: 693048 - DNA, 33 bp, Homo sapien
gtgcttgggttcactagagcctaaatgtgaagt

SEQ ID NO: 693049 - DNA, 33 bp, Homo sapien
aaggattctgttcttaccgtgagcttgtcattt

SEQ ID NO: 693050 - DNA, 33 bp, Homo sapien
aaggattctgttcttatcgtgagcttgtcattt

SEQ ID NO: 693051 - DNA, 33 bp, Homo sapien
tctgtcctcttgataaacctgtgagggggatac

SEQ ID NO: 693052 - DNA, 33 bp, Homo sapien
tctgtcctcttgataaccctgtgagggggatac

SEQ ID NO: 693053 - DNA, 33 bp, Homo sapien
tgcaagcgttttcaaaatgtatctgctttgaga

SEQ ID NO: 693054 - DNA, 33 bp, Homo sapien
tgcaagcgttttcaaactgtatctgctttgaga

SEQ ID NO: 693055 - DNA, 33 bp, Homo sapien
cttattagtgtatcataacaaacagtaaatgtt

SEQ ID NO: 693056 - DNA, 33 bp, Homo sapien
cttattagtgtatcattacaaacagtaaatgtt

SEQ ID NO: 693057 - DNA, 33 bp, Homo sapien
tctggcctttgcagagacataaaacacccaaac

SEQ ID NO: 693058 - DNA, 33 bp, Homo sapien
tctggcctttgcagaggcataaaacacccaaac

SEQ ID NO: 693059 - DNA, 33 bp, Homo sapien
tgcagcaaaggattccgaaaactaactgactta

SEQ ID NO: 693060 - DNA, 33 bp, Homo sapien
tgcagcaaaggattcctaaaactaactgactta

SEQ ID NO: 693061 - DNA, 33 bp, Homo sapien
aataattattagatccgtagcttcttaacatta

SEQ ID NO: 693062 - DNA, 33 bp, Homo sapien
aataattattagatccttagcttcttaacatta

SEQ ID NO: 693063 - DNA, 33 bp, Homo sapien
taggtcattaaggaaaaaagatgaattcagtga

SEQ ID NO: 693064 - DNA, 33 bp, Homo sapien
taggtcattaaggaaagaagatgaattcagtga

SEQ ID NO: 693065 - DNA, 33 bp, Homo sapien
gtataaatttactagaagatgtatggtcatctc

SEQ ID NO: 693066 - DNA, 33 bp, Homo sapien
gtataaatttactagacgatgtatggtcatctc

SEQ ID NO: 693067 - DNA, 33 bp, Homo sapien
cacctgagtttcaagaaattaatggaaaaaccc

SEQ ID NO: 693068 - DNA, 33 bp, Homo sapien
cacctgagtttcaagatattaatggaaaaaccc

SEQ ID NO: 693069 - DNA, 33 bp, Homo sapien
catacatgactgaggacggctagatggggagtt

SEQ ID NO: 693070 - DNA, 33 bp, Homo sapien
catacatgactgaggatggctagatggggagtt

SEQ ID NO: 693071 - DNA, 33 bp, Homo sapien
acactgaggacccaaaggtcaagcacattaact

SEQ ID NO: 693072 - DNA, 33 bp, Homo sapien
acactgaggacccaaatgtcaagcacattaact

SEQ ID NO: 693073 - DNA, 33 bp, Homo sapien
tgctcacaaacttctacgtgcagaatgcagttt

SEQ ID NO: 693074 - DNA, 33 bp, Homo sapien
tgctcacaaacttctatgtgcagaatgcagttt

SEQ ID NO: 693075 - DNA, 33 bp, Homo sapien
catgacatactaaataagcatcagaatgtaagg

SEQ ID NO: 693076 - DNA, 33 bp, Homo sapien
catgacatactaaatacgcatcagaatgtaagg

SEQ ID NO: 693077 - DNA, 33 bp, Homo sapien
ctacgggagtctacaacgtaattcaggcagtaa

SEQ ID NO: 693078 - DNA, 33 bp, Homo sapien
ctacgggagtctacaatgtaattcaggcagtaa

SEQ ID NO: 693079 - DNA, 33 bp, Homo sapien
tgtcaagtctagaagacggaaaagttcagttaa

SEQ ID NO: 693080 - DNA, 33 bp, Homo sapien
tgtcaagtctagaagatggaaaagttcagttaa

SEQ ID NO: 693081 - DNA, 33 bp, Homo sapien
ggtcagtgagctgaaaagctagaaacatctagt

SEQ ID NO: 693082 - DNA, 33 bp, Homo sapien
ggtcagtgagctgaaaggctagaaacatctagt

SEQ ID NO: 693083 - DNA, 33 bp, Homo sapien
taaaacaccttgtaaacgaaggaggtttatgct

SEQ ID NO: 693084 - DNA, 33 bp, Homo sapien
taaaacaccttgtaaatgaaggaggtttatgct

SEQ ID NO: 693085 - DNA, 33 bp, Homo sapien
tattaaatttcacataagacaaactatacaaag

SEQ ID NO: 693086 - DNA, 33 bp, Homo sapien
tattaaatttcacataggacaaactatacaaag

SEQ ID NO: 693087 - DNA, 33 bp, Homo sapien
ccatacattgaattcaaaaaagcaagcaagaaa

SEQ ID NO: 693088 - DNA, 33 bp, Homo sapien
ccatacattgaattcataaaagcaagcaagaaa

SEQ ID NO: 693089 - DNA, 33 bp, Homo sapien
acctttgtgttcaaaaatgaggtttaccatcaa

SEQ ID NO: 693090 - DNA, 33 bp, Homo sapien
acctttgtgttcaaaactgaggtttaccatcaa

SEQ ID NO: 693091 - DNA, 33 bp, Homo sapien
aggacctatctatgcacattattttgtaaacaa

SEQ ID NO: 693092 - DNA, 33 bp, Homo sapien
aggacctatctatgcatattattttgtaaacaa

SEQ ID NO: 693093 - DNA, 33 bp, Homo sapien
gtgaattaggatagcacgtaatgtagtggaatg

SEQ ID NO: 693094 - DNA, 33 bp, Homo sapien
gtgaattaggatagcatgtaatgtagtggaatg

SEQ ID NO: 693095 - DNA, 33 bp, Homo sapien
agaggaatagttcaaaaatacaatggtcaatta

SEQ ID NO: 693096 - DNA, 33 bp, Homo sapien
agaggaatagttcaaagatacaatggtcaatta

SEQ ID NO: 693097 - DNA, 33 bp, Homo sapien
aaaagaagactcacaaaatccaaagtcacaatg

SEQ ID NO: 693098 - DNA, 33 bp, Homo sapien
aaaagaagactcacaagatccaaagtcacaatg

SEQ ID NO: 693099 - DNA, 33 bp, Homo sapien
atacttatactgacccaatggaatagatgctag

SEQ ID NO: 693100 - DNA, 33 bp, Homo sapien
atacttatactgaccctatggaatagatgctag

SEQ ID NO: 693101 - DNA, 33 bp, Homo sapien
ccagaaagatgtttgaacaattttctagtcact

SEQ ID NO: 693102 - DNA, 33 bp, Homo sapien
ccagaaagatgtttgaccaattttctagtcact

SEQ ID NO: 693103 - DNA, 33 bp, Homo sapien
ttatgtaaaaactaacactgactctgaaaactc

SEQ ID NO: 693104 - DNA, 33 bp, Homo sapien
ttatgtaaaaactaacgctgactctgaaaactc

SEQ ID NO: 693105 - DNA, 33 bp, Homo sapien
aaaggcaaaatagatacagcacacatctgctga

SEQ ID NO: 693106 - DNA, 33 bp, Homo sapien
aaaggcaaaatagatagagcacacatctgctga

SEQ ID NO: 693107 - DNA, 33 bp, Homo sapien
gcatctcaaacctaacaatgcatttttctagtc

SEQ ID NO: 693108 - DNA, 33 bp, Homo sapien
gcatctcaaacctaacgatgcatttttctagtc

SEQ ID NO: 693109 - DNA, 33 bp, Homo sapien
ctcacagatttcctcacatatgcctttgtttgg

SEQ ID NO: 693110 - DNA, 33 bp, Homo sapien
ctcacagatttcctcatatatgcctttgtttgg

SEQ ID NO: 693111 - DNA, 33 bp, Homo sapien
aagcacatatggtcgacatttttacattttttt

SEQ ID NO: 693112 - DNA, 33 bp, Homo sapien
aagcacatatggtcgatatttttacattttttt

SEQ ID NO: 693113 - DNA, 33 bp, Homo sapien
ggtttctgtcaaactgcatggttacctatgtta

SEQ ID NO: 693114 - DNA, 33 bp, Homo sapien
ggtttctgtcaaactgtatggttacctatgtta

SEQ ID NO: 693115 - DNA, 33 bp, Homo sapien
tgaacctgaccaccaacgtcggtatttgtgtgg

SEQ ID NO: 693116 - DNA, 33 bp, Homo sapien
tgaacctgaccaccaatgtcggtatttgtgtgg

SEQ ID NO: 693117 - DNA, 33 bp, Homo sapien
ctgtttcctcctacaaactcggaaccatctgag

SEQ ID NO: 693118 - DNA, 33 bp, Homo sapien
ctgtttcctcctacaatctcggaaccatctgag

SEQ ID NO: 693119 - DNA, 33 bp, Homo sapien
aaatcaacactatagcccataaacatcccttga

SEQ ID NO: 693120 - DNA, 33 bp, Homo sapien
aaatcaacactatagctcataaacatcccttga

SEQ ID NO: 693121 - DNA, 33 bp, Homo sapien
gtatctgaactgtcagaaatgacatgagtaatg

SEQ ID NO: 693122 - DNA, 33 bp, Homo sapien
gtatctgaactgtcaggaatgacatgagtaatg

SEQ ID NO: 693123 - DNA, 33 bp, Homo sapien
ctgtcccttattaactaaatgatcttgaaccag

SEQ ID NO: 693124 - DNA, 33 bp, Homo sapien
ctgtcccttattaactgaatgatcttgaaccag

SEQ ID NO: 693125 - DNA, 33 bp, Homo sapien
tggggagagactacacagtcacaataacaacaa

SEQ ID NO: 693126 - DNA, 33 bp, Homo sapien
tggggagagactacacggtcacaataacaacaa

SEQ ID NO: 693127 - DNA, 33 bp, Homo sapien
caacaaatagtgtgaaacaaatggatgtctaca

SEQ ID NO: 693128 - DNA, 33 bp, Homo sapien
caacaaatagtgtgaagcaaatggatgtctaca

SEQ ID NO: 693129 - DNA, 33 bp, Homo sapien
gtctcttaaaaaatcactaaaagctgtgaataa

SEQ ID NO: 693130 - DNA, 33 bp, Homo sapien
gtctcttaaaaaatcattaaaagctgtgaataa

SEQ ID NO: 693131 - DNA, 33 bp, Homo sapien
gaaagatcaaaagaaaatagtctcgctctcatc

SEQ ID NO: 693132 - DNA, 33 bp, Homo sapien
gaaagatcaaaagaaagtagtctcgctctcatc

SEQ ID NO: 693133 - DNA, 33 bp, Homo sapien
ggcgggtttcaggaggcacattgattgatcctg

SEQ ID NO: 693134 - DNA, 33 bp, Homo sapien
ggcgggtttcaggaggtacattgattgatcctg

SEQ ID NO: 693135 - DNA, 33 bp, Homo sapien
gctttttaataaactaagtgcaggcagactgag

SEQ ID NO: 693136 - DNA, 33 bp, Homo sapien
gctttttaataaactaggtgcaggcagactgag

SEQ ID NO: 693137 - DNA, 33 bp, Homo sapien
tggaagtctattgttaaagagggatctgagttt

SEQ ID NO: 693138 - DNA, 33 bp, Homo sapien
tggaagtctattgttagagagggatctgagttt

SEQ ID NO: 693139 - DNA, 33 bp, Homo sapien
aaccaaaggagtatatcaacaatgacctataaa

SEQ ID NO: 693140 - DNA, 33 bp, Homo sapien
aaccaaaggagtatatgaacaatgacctataaa

SEQ ID NO: 693141 - DNA, 33 bp, Homo sapien
tactaggcagaaataacagcaagtacaaaaacc

SEQ ID NO: 693142 - DNA, 33 bp, Homo sapien
tactaggcagaaataatagcaagtacaaaaacc

SEQ ID NO: 693143 - DNA, 33 bp, Homo sapien
tgtagaaatagacatacatatagaattaaagat

SEQ ID NO: 693144 - DNA, 33 bp, Homo sapien
tgtagaaatagacatagatatagaattaaagat

SEQ ID NO: 693145 - DNA, 33 bp, Homo sapien
cctttgcagttggagaagatgagttagaggcaa

SEQ ID NO: 693146 - DNA, 33 bp, Homo sapien
cctttgcagttggagacgatgagttagaggcaa

SEQ ID NO: 693147 - DNA, 33 bp, Homo sapien
acttttagttgcatacaaggcatatcttagtta

SEQ ID NO: 693148 - DNA, 33 bp, Homo sapien
acttttagttgcatacgaggcatatcttagtta

SEQ ID NO: 693149 - DNA, 33 bp, Homo sapien
acatattttgtgggtacgtgaaatattatgata

SEQ ID NO: 693150 - DNA, 33 bp, Homo sapien
acatattttgtgggtatgtgaaatattatgata

SEQ ID NO: 693151 - DNA, 33 bp, Homo sapien
atgactctagcaggaaatatacggtataagact

SEQ ID NO: 693152 - DNA, 33 bp, Homo sapien
atgactctagcaggaagtatacggtataagact

SEQ ID NO: 693153 - DNA, 33 bp, Homo sapien
tgccatcttccctaaacagcaccccctatcagc

SEQ ID NO: 693154 - DNA, 33 bp, Homo sapien
tgccatcttccctaaatagcaccccctatcagc

SEQ ID NO: 693155 - DNA, 33 bp, Homo sapien
accataaagacacatcaagatgaaacttcaaat

SEQ ID NO: 693156 - DNA, 33 bp, Homo sapien
accataaagacacatcgagatgaaacttcaaat

SEQ ID NO: 693157 - DNA, 33 bp, Homo sapien
aggttcacttcaattcaattaagagttctacat

SEQ ID NO: 693158 - DNA, 33 bp, Homo sapien
aggttcacttcaattcgattaagagttctacat

SEQ ID NO: 693159 - DNA, 33 bp, Homo sapien
ccgtcactgaaacaagaatccttactctttcaa

SEQ ID NO: 693160 - DNA, 33 bp, Homo sapien
ccgtcactgaaacaaggatccttactctttcaa

SEQ ID NO: 693161 - DNA, 33 bp, Homo sapien
atatccgcctctatacactagttcaaatacatg

SEQ ID NO: 693162 - DNA, 33 bp, Homo sapien
atatccgcctctatacgctagttcaaatacatg

SEQ ID NO: 693163 - DNA, 33 bp, Homo sapien
ttagaaattactttcaccagatacactaattca

SEQ ID NO: 693164 - DNA, 33 bp, Homo sapien
ttagaaattactttcatcagatacactaattca

SEQ ID NO: 693165 - DNA, 33 bp, Homo sapien
tggttccagagcgtaaactgaatgctagaaaat

SEQ ID NO: 693166 - DNA, 33 bp, Homo sapien
tggttccagagcgtaacctgaatgctagaaaat

SEQ ID NO: 693167 - DNA, 33 bp, Homo sapien
ttgcaatgcccaactaagatatgctcaactaga

SEQ ID NO: 693168 - DNA, 33 bp, Homo sapien
ttgcaatgcccaactacgatatgctcaactaga

SEQ ID NO: 693169 - DNA, 33 bp, Homo sapien
agtccacataactgatgagggataaggaagtac

SEQ ID NO: 693170 - DNA, 33 bp, Homo sapien
agtccacataactgattagggataaggaagtac

SEQ ID NO: 693171 - DNA, 33 bp, Homo sapien
ttactgtactgcacaaatatcttgaagattact

SEQ ID NO: 693172 - DNA, 33 bp, Homo sapien
ttactgtactgcacaagtatcttgaagattact

SEQ ID NO: 693173 - DNA, 33 bp, Homo sapien
atattctacagaaaacaaagtataaagagtttg

SEQ ID NO: 693174 - DNA, 33 bp, Homo sapien
atattctacagaaaacgaagtataaagagtttg

SEQ ID NO: 693175 - DNA, 33 bp, Homo sapien
gagaattgggagagacaaaggtaaagaggcagt

SEQ ID NO: 693176 - DNA, 33 bp, Homo sapien
gagaattgggagagacgaaggtaaagaggcagt

SEQ ID NO: 693177 - DNA, 33 bp, Homo sapien
tatttagtagagaaacaggtaattcattatagt

SEQ ID NO: 693178 - DNA, 33 bp, Homo sapien
tatttagtagagaaacgggtaattcattatagt

SEQ ID NO: 693179 - DNA, 33 bp, Homo sapien
tgttctgctttagagacattctttctggatgtt

SEQ ID NO: 693180 - DNA, 33 bp, Homo sapien
tgttctgctttagagatattctttctggatgtt

SEQ ID NO: 693181 - DNA, 33 bp, Homo sapien
gaaaccaaagaaagtacaaccagggacaaggca

SEQ ID NO: 693182 - DNA, 33 bp, Homo sapien
gaaaccaaagaaagtataaccagggacaaggca

SEQ ID NO: 693183 - DNA, 33 bp, Homo sapien
gacatgaaactcctcaatatgacactagcaagc

SEQ ID NO: 693184 - DNA, 33 bp, Homo sapien
gacatgaaactcctcagtatgacactagcaagc

SEQ ID NO: 693185 - DNA, 33 bp, Homo sapien
catgtaaaacatacacagcaatgttaaaggtat

SEQ ID NO: 693186 - DNA, 33 bp, Homo sapien
catgtaaaacatacaccgcaatgttaaaggtat

SEQ ID NO: 693187 - DNA, 33 bp, Homo sapien
tagaagagcctgcaaaagtgcatctgaggcagt

SEQ ID NO: 693188 - DNA, 33 bp, Homo sapien
tagaagagcctgcaaaggtgcatctgaggcagt

SEQ ID NO: 693189 - DNA, 33 bp, Homo sapien
caggaatagaaccaccacaaagagttcccacta

SEQ ID NO: 693190 - DNA, 33 bp, Homo sapien
caggaatagaaccaccgcaaagagttcccacta

SEQ ID NO: 693191 - DNA, 33 bp, Homo sapien
tggctatagtgtgggagacctgaaggagagcac

SEQ ID NO: 693192 - DNA, 33 bp, Homo sapien
tggctatagtgtgggatacctgaaggagagcac

SEQ ID NO: 693193 - DNA, 33 bp, Homo sapien
actgtgccgctccttgaacccactggacacact

SEQ ID NO: 693194 - DNA, 33 bp, Homo sapien
actgtgccgctccttggacccactggacacact

SEQ ID NO: 693195 - DNA, 33 bp, Homo sapien
acaaatattttaggaacggagactctgagttag

SEQ ID NO: 693196 - DNA, 33 bp, Homo sapien
acaaatattttaggaatggagactctgagttag

SEQ ID NO: 693197 - DNA, 33 bp, Homo sapien
tttggctacatcatcaatcgctggactttttct

SEQ ID NO: 693198 - DNA, 33 bp, Homo sapien
tttggctacatcatcactcgctggactttttct

SEQ ID NO: 693199 - DNA, 33 bp, Homo sapien
aatttagagagcagtcaagaattttgggagtta

SEQ ID NO: 693200 - DNA, 33 bp, Homo sapien
aatttagagagcagtcgagaattttgggagtta

SEQ ID NO: 693201 - DNA, 33 bp, Homo sapien
gaatttattcccaacactcaaaaacattgatcc

SEQ ID NO: 693202 - DNA, 33 bp, Homo sapien
gaatttattcccaacattcaaaaacattgatcc

SEQ ID NO: 693203 - DNA, 33 bp, Homo sapien
gaaaaatttctaaagaggtatatgatgctttat

SEQ ID NO: 693204 - DNA, 33 bp, Homo sapien
gaaaaatttctaaagatgtatatgatgctttat

SEQ ID NO: 693205 - DNA, 33 bp, Homo sapien
caccacgctcggcctaagcttctttttaagaac

SEQ ID NO: 693206 - DNA, 33 bp, Homo sapien
caccacgctcggcctatgcttctttttaagaac

SEQ ID NO: 693207 - DNA, 33 bp, Homo sapien
aaatgtatgttgcttacggtacatcaattctac

SEQ ID NO: 693208 - DNA, 33 bp, Homo sapien
aaatgtatgttgcttatggtacatcaattctac

SEQ ID NO: 693209 - DNA, 33 bp, Homo sapien
cagctggtgagtggaaaaaggcagatctattta

SEQ ID NO: 693210 - DNA, 33 bp, Homo sapien
cagctggtgagtggaagaaggcagatctattta

SEQ ID NO: 693211 - DNA, 33 bp, Homo sapien
cctgccaagaaaggcccagaataagaatggtat

SEQ ID NO: 693212 - DNA, 33 bp, Homo sapien
cctgccaagaaaggcctagaataagaatggtat

SEQ ID NO: 693213 - DNA, 33 bp, Homo sapien
tattttcctttacctcaaattatccagaaaatc

SEQ ID NO: 693214 - DNA, 33 bp, Homo sapien
tattttcctttacctcgaattatccagaaaatc

SEQ ID NO: 693215 - DNA, 33 bp, Homo sapien
tcccttcctcaacactaaaatgacattctaaat

SEQ ID NO: 693216 - DNA, 33 bp, Homo sapien
tcccttcctcaacactgaaatgacattctaaat

SEQ ID NO: 693217 - DNA, 33 bp, Homo sapien
ctgaactaagctgtaccctggtgagtagcattc

SEQ ID NO: 693218 - DNA, 33 bp, Homo sapien
ctgaactaagctgtacgctggtgagtagcattc

SEQ ID NO: 693219 - DNA, 33 bp, Homo sapien
cacagccataaagatcagaccacaaggtgtgtg

SEQ ID NO: 693220 - DNA, 33 bp, Homo sapien
cacagccataaagatcggaccacaaggtgtgtg

SEQ ID NO: 693221 - DNA, 33 bp, Homo sapien
gttgtgcctatattaacggatgccttttctttt

SEQ ID NO: 693222 - DNA, 33 bp, Homo sapien
gttgtgcctatattaatggatgccttttctttt

SEQ ID NO: 693223 - DNA, 33 bp, Homo sapien
aagatctaaggaactccagaaattagcataacc

SEQ ID NO: 693224 - DNA, 33 bp, Homo sapien
aagatctaaggaactctagaaattagcataacc

SEQ ID NO: 693225 - DNA, 33 bp, Homo sapien
gataataacaccttccacatacatttaggacac

SEQ ID NO: 693226 - DNA, 33 bp, Homo sapien
gataataacaccttccgcatacatttaggacac

SEQ ID NO: 693227 - DNA, 33 bp, Homo sapien
tactcacctattctgaacattcctgcatggtgt

SEQ ID NO: 693228 - DNA, 33 bp, Homo sapien
tactcacctattctgagcattcctgcatggtgt

SEQ ID NO: 693229 - DNA, 33 bp, Homo sapien
caggcttcttactggacgataaggaaaatgata

SEQ ID NO: 693230 - DNA, 33 bp, Homo sapien
caggcttcttactggatgataaggaaaatgata

SEQ ID NO: 693231 - DNA, 33 bp, Homo sapien
tttgtgatgatggagcaagaaaaaaagccatta

SEQ ID NO: 693232 - DNA, 33 bp, Homo sapien
tttgtgatgatggagcgagaaaaaaagccatta

SEQ ID NO: 693233 - DNA, 33 bp, Homo sapien
cttatctattgaaactcaggagtgcttggtatc

SEQ ID NO: 693234 - DNA, 33 bp, Homo sapien
cttatctattgaaacttaggagtgcttggtatc

SEQ ID NO: 693235 - DNA, 33 bp, Homo sapien
gaatctcactcataaaaatcacctctgaaaatc

SEQ ID NO: 693236 - DNA, 33 bp, Homo sapien
gaatctcactcataaacatcacctctgaaaatc

SEQ ID NO: 693237 - DNA, 33 bp, Homo sapien
gggtaattgacacacccacatttcttatgaact

SEQ ID NO: 693238 - DNA, 33 bp, Homo sapien
gggtaattgacacacctacatttcttatgaact

SEQ ID NO: 693239 - DNA, 33 bp, Homo sapien
cataggaaacaggaaacgacataggagacagga

SEQ ID NO: 693240 - DNA, 33 bp, Homo sapien
cataggaaacaggaaatgacataggagacagga

SEQ ID NO: 693241 - DNA, 33 bp, Homo sapien
gtcaagctgtttttgacgacgaagcagacaaga

SEQ ID NO: 693242 - DNA, 33 bp, Homo sapien
gtcaagctgtttttgatgacgaagcagacaaga

SEQ ID NO: 693243 - DNA, 33 bp, Homo sapien
caccccgcctcctaaacagaaaatgtattgtaa

SEQ ID NO: 693244 - DNA, 33 bp, Homo sapien
caccccgcctcctaaatagaaaatgtattgtaa

SEQ ID NO: 693245 - DNA, 33 bp, Homo sapien
gcaattcgtaaataaaacaagtgaaaatggaga

SEQ ID NO: 693246 - DNA, 33 bp, Homo sapien
gcaattcgtaaataaagcaagtgaaaatggaga

SEQ ID NO: 693247 - DNA, 33 bp, Homo sapien
tcagaacactggggaaaaaaagcgtattgaatc

SEQ ID NO: 693248 - DNA, 33 bp, Homo sapien
tcagaacactggggaagaaaagcgtattgaatc

SEQ ID NO: 693249 - DNA, 33 bp, Homo sapien
tttaacctgtgtccaaagaaaggtttcttcccc

SEQ ID NO: 693250 - DNA, 33 bp, Homo sapien
tttaacctgtgtccaaggaaaggtttcttcccc

SEQ ID NO: 693251 - DNA, 33 bp, Homo sapien
ctcagtcttaaaaacaaggcataaagaaagcta

SEQ ID NO: 693252 - DNA, 33 bp, Homo sapien
ctcagtcttaaaaacagggcataaagaaagcta

SEQ ID NO: 693253 - DNA, 33 bp, Homo sapien
aagcctttttgaaaaacggaatacttggaaaaa

SEQ ID NO: 693254 - DNA, 33 bp, Homo sapien
aagcctttttgaaaaatggaatacttggaaaaa

SEQ ID NO: 693255 - DNA, 33 bp, Homo sapien
gggtcagaggtgtgtccctttcttgaatctcca

SEQ ID NO: 693256 - DNA, 33 bp, Homo sapien
gggtcagaggtgtgtctctttcttgaatctcca

SEQ ID NO: 693257 - DNA, 33 bp, Homo sapien
tatgtgattaaatttaaagccaacattgagagt

SEQ ID NO: 693258 - DNA, 33 bp, Homo sapien
tatgtgattaaatttagagccaacattgagagt

SEQ ID NO: 693259 - DNA, 33 bp, Homo sapien
atgtaagatagaaacagggtacagaaaataaag

SEQ ID NO: 693260 - DNA, 33 bp, Homo sapien
atgtaagatagaaacatggtacagaaaataaag

SEQ ID NO: 693261 - DNA, 33 bp, Homo sapien
attagggggtgatggtaacaatgaaaggaagga

SEQ ID NO: 693262 - DNA, 33 bp, Homo sapien
attagggggtgatggtgacaatgaaaggaagga

SEQ ID NO: 693263 - DNA, 33 bp, Homo sapien
tacctagaattttgccagaaaccatgataatta

SEQ ID NO: 693264 - DNA, 33 bp, Homo sapien
tacctagaattttgccggaaaccatgataatta

SEQ ID NO: 693265 - DNA, 33 bp, Homo sapien
cttcaggagtagcagcaaccagccctggcaggg

SEQ ID NO: 693266 - DNA, 33 bp, Homo sapien
cttcaggagtagcagcgaccagccctggcaggg

SEQ ID NO: 693267 - DNA, 33 bp, Homo sapien
ccggaatagcaatttgaagcctgtttgtaaagc

SEQ ID NO: 693268 - DNA, 33 bp, Homo sapien
ccggaatagcaatttgcagcctgtttgtaaagc

SEQ ID NO: 693269 - DNA, 33 bp, Homo sapien
gaacatatttaacccaatccacaaatttacgtg

SEQ ID NO: 693270 - DNA, 33 bp, Homo sapien
gaacatatttaacccagtccacaaatttacgtg

SEQ ID NO: 693271 - DNA, 33 bp, Homo sapien
atttcctacttgcctacacctcttacgactgtc

SEQ ID NO: 693272 - DNA, 33 bp, Homo sapien
atttcctacttgcctatacctcttacgactgtc

SEQ ID NO: 693273 - DNA, 33 bp, Homo sapien
gcctgtaacttgacaaatgtactgagtgaggaa

SEQ ID NO: 693274 - DNA, 33 bp, Homo sapien
gcctgtaacttgacaagtgtactgagtgaggaa

SEQ ID NO: 693275 - DNA, 33 bp, Homo sapien
ctatacggcttttgtacgtaacttgcaagatgt

SEQ ID NO: 693276 - DNA, 33 bp, Homo sapien
ctatacggcttttgtatgtaacttgcaagatgt

SEQ ID NO: 693277 - DNA, 33 bp, Homo sapien
gtgtacatctcctgggaacttggaagggttaag

SEQ ID NO: 693278 - DNA, 33 bp, Homo sapien
gtgtacatctcctggggacttggaagggttaag

SEQ ID NO: 693279 - DNA, 33 bp, Homo sapien
taatgataaactgtcaacttccttacattattt

SEQ ID NO: 693280 - DNA, 33 bp, Homo sapien
taatgataaactgtcagcttccttacattattt

SEQ ID NO: 693281 - DNA, 33 bp, Homo sapien
ttggctctgccctcaacgatcaactgtgaaata

SEQ ID NO: 693282 - DNA, 33 bp, Homo sapien
ttggctctgccctcaaggatcaactgtgaaata

SEQ ID NO: 693283 - DNA, 33 bp, Homo sapien
gagaaccacagtcaacagggaggaaggctccag

SEQ ID NO: 693284 - DNA, 33 bp, Homo sapien
gagaaccacagtcaaccgggaggaaggctccag

SEQ ID NO: 693285 - DNA, 33 bp, Homo sapien
aaccactgattataacagagtagcaatgaaagt

SEQ ID NO: 693286 - DNA, 33 bp, Homo sapien
aaccactgattataaccgagtagcaatgaaagt

SEQ ID NO: 693287 - DNA, 33 bp, Homo sapien
atagtttgatgtctgacgcaaaggtagtgattt

SEQ ID NO: 693288 - DNA, 33 bp, Homo sapien
atagtttgatgtctgatgcaaaggtagtgattt

SEQ ID NO: 693289 - DNA, 33 bp, Homo sapien
actcagaataaaaggaaaacttgtaagctagag

SEQ ID NO: 693290 - DNA, 33 bp, Homo sapien
actcagaataaaaggataacttgtaagctagag

SEQ ID NO: 693291 - DNA, 33 bp, Homo sapien
ctggatgccctaatcacgaggttagcatagtac

SEQ ID NO: 693292 - DNA, 33 bp, Homo sapien
ctggatgccctaatcatgaggttagcatagtac

SEQ ID NO: 693293 - DNA, 33 bp, Homo sapien
gtggcattttcaagagcaggttctagaaaattc

SEQ ID NO: 693294 - DNA, 33 bp, Homo sapien
gtggcattttcaagagtaggttctagaaaattc

SEQ ID NO: 693295 - DNA, 33 bp, Homo sapien
aaacagagtctgcaaacctataggagaggttga

SEQ ID NO: 693296 - DNA, 33 bp, Homo sapien
aaacagagtctgcaaatctataggagaggttga

SEQ ID NO: 693297 - DNA, 33 bp, Homo sapien
atgatacagctaggaaaaaaagtacctgtgaac

SEQ ID NO: 693298 - DNA, 33 bp, Homo sapien
atgatacagctaggaagaaaagtacctgtgaac

SEQ ID NO: 693299 - DNA, 33 bp, Homo sapien
gacagctgggcctagacaataggaagttgagta

SEQ ID NO: 693300 - DNA, 33 bp, Homo sapien
gacagctgggcctagagaataggaagttgagta

SEQ ID NO: 693301 - DNA, 33 bp, Homo sapien
agcactaaattacgtacaggtagcggctggcta

SEQ ID NO: 693302 - DNA, 33 bp, Homo sapien
agcactaaattacgtagaggtagcggctggcta

SEQ ID NO: 693303 - DNA, 33 bp, Homo sapien
gagaaaacaggtcacaatgatagtttacccttt

SEQ ID NO: 693304 - DNA, 33 bp, Homo sapien
gagaaaacaggtcacagtgatagtttacccttt

SEQ ID NO: 693305 - DNA, 33 bp, Homo sapien
aggtgaagttgtttgacgacttgaatcgattat

SEQ ID NO: 693306 - DNA, 33 bp, Homo sapien
aggtgaagttgtttgatgacttgaatcgattat

SEQ ID NO: 693307 - DNA, 33 bp, Homo sapien
atgataaaaatgcttcaagttagaacagcacat

SEQ ID NO: 693308 - DNA, 33 bp, Homo sapien
atgataaaaatgcttccagttagaacagcacat

SEQ ID NO: 693309 - DNA, 33 bp, Homo sapien
ggcatctgatgactaacgagggttgtaggcaga

SEQ ID NO: 693310 - DNA, 33 bp, Homo sapien
ggcatctgatgactaatgagggttgtaggcaga

SEQ ID NO: 693311 - DNA, 33 bp, Homo sapien
cgaaagaagaaggtcaaaatctcctaactggag

SEQ ID NO: 693312 - DNA, 33 bp, Homo sapien
cgaaagaagaaggtcacaatctcctaactggag

SEQ ID NO: 693313 - DNA, 33 bp, Homo sapien
ttgttttagctgcatccctgaaatcctcaagaa

SEQ ID NO: 693314 - DNA, 33 bp, Homo sapien
ttgttttagctgcatctctgaaatcctcaagaa

SEQ ID NO: 693315 - DNA, 33 bp, Homo sapien
caaccaggctgactgacaaggactcgctatctc

SEQ ID NO: 693316 - DNA, 33 bp, Homo sapien
caaccaggctgactgagaaggactcgctatctc

SEQ ID NO: 693317 - DNA, 33 bp, Homo sapien
ctgcattgtaaccacaaggtgccagaactggcc

SEQ ID NO: 693318 - DNA, 33 bp, Homo sapien
ctgcattgtaaccacatggtgccagaactggcc

SEQ ID NO: 693319 - DNA, 33 bp, Homo sapien
atgtaaggatgataagaaaagggatgacctagg

SEQ ID NO: 693320 - DNA, 33 bp, Homo sapien
atgtaaggatgataaggaaagggatgacctagg

SEQ ID NO: 693321 - DNA, 33 bp, Homo sapien
agagagtccatattcactccttaagctctctga

SEQ ID NO: 693322 - DNA, 33 bp, Homo sapien
agagagtccatattcattccttaagctctctga

SEQ ID NO: 693323 - DNA, 33 bp, Homo sapien
gaagcttggttcttcaggttttcctctgattca

SEQ ID NO: 693324 - DNA, 33 bp, Homo sapien
gaagcttggttcttcatgttttcctctgattca

SEQ ID NO: 693325 - DNA, 33 bp, Homo sapien
agaaaggcagttgatacgtaacagtacttaata

SEQ ID NO: 693326 - DNA, 33 bp, Homo sapien
agaaaggcagttgatatgtaacagtacttaata

SEQ ID NO: 693327 - DNA, 33 bp, Homo sapien
ccatgtggcagaaataccaagtcaaaggcacag

SEQ ID NO: 693328 - DNA, 33 bp, Homo sapien
ccatgtggcagaaatatcaagtcaaaggcacag

SEQ ID NO: 693329 - DNA, 33 bp, Homo sapien
ctgacaaagcaaaaacaacgtcgagtaggagag

SEQ ID NO: 693330 - DNA, 33 bp, Homo sapien
ctgacaaagcaaaaaccacgtcgagtaggagag

SEQ ID NO: 693331 - DNA, 33 bp, Homo sapien
ctgtagggcaagggagaaaattggtcaggcttt

SEQ ID NO: 693332 - DNA, 33 bp, Homo sapien
ctgtagggcaagggaggaaattggtcaggcttt

SEQ ID NO: 693333 - DNA, 33 bp, Homo sapien
ttatattaaactgccaacttaggtaggacacca

SEQ ID NO: 693334 - DNA, 33 bp, Homo sapien
ttatattaaactgccagcttaggtaggacacca

SEQ ID NO: 693335 - DNA, 33 bp, Homo sapien
gtggcctatatttgaacgttttgatctccctta

SEQ ID NO: 693336 - DNA, 33 bp, Homo sapien
gtggcctatatttgaatgttttgatctccctta

SEQ ID NO: 693337 - DNA, 33 bp, Homo sapien
ttttagtcacagtatcccatttggaattttaat

SEQ ID NO: 693338 - DNA, 33 bp, Homo sapien
ttttagtcacagtatctcatttggaattttaat

SEQ ID NO: 693339 - DNA, 33 bp, Homo sapien
tcctagcaagtgcatacctacgagaataccaag

SEQ ID NO: 693340 - DNA, 33 bp, Homo sapien
tcctagcaagtgcatatctacgagaataccaag

SEQ ID NO: 693341 - DNA, 33 bp, Homo sapien
ccactagcttcgagaccctttattgctgctttt

SEQ ID NO: 693342 - DNA, 33 bp, Homo sapien
ccactagcttcgagactctttattgctgctttt

SEQ ID NO: 693343 - DNA, 33 bp, Homo sapien
agctaattagctcattgaacagattagcagact

SEQ ID NO: 693344 - DNA, 33 bp, Homo sapien
agctaattagctcatttaacagattagcagact

SEQ ID NO: 693345 - DNA, 33 bp, Homo sapien
agagatgagaggaagtcacagaggttgaaggca

SEQ ID NO: 693346 - DNA, 33 bp, Homo sapien
agagatgagaggaagtgacagaggttgaaggca

SEQ ID NO: 693347 - DNA, 33 bp, Homo sapien
gagtccaggctggtcaaatagcttcccagctgg

SEQ ID NO: 693348 - DNA, 33 bp, Homo sapien
gagtccaggctggtcacatagcttcccagctgg

SEQ ID NO: 693349 - DNA, 33 bp, Homo sapien
ctagcatgatacctcacacatagaaacctctca

SEQ ID NO: 693350 - DNA, 33 bp, Homo sapien
ctagcatgatacctcatacatagaaacctctca

SEQ ID NO: 693351 - DNA, 33 bp, Homo sapien
tggtgatattagggaaaccaattgtcaagaagt

SEQ ID NO: 693352 - DNA, 33 bp, Homo sapien
tggtgatattagggaagccaattgtcaagaagt

SEQ ID NO: 693353 - DNA, 33 bp, Homo sapien
gacagttctaggaagaaaaaccatgcctcaggg

SEQ ID NO: 693354 - DNA, 33 bp, Homo sapien
gacagttctaggaagataaaccatgcctcaggg

SEQ ID NO: 693355 - DNA, 33 bp, Homo sapien
taccagaaatgacaagcactttgaagaccttct

SEQ ID NO: 693356 - DNA, 33 bp, Homo sapien
taccagaaatgacaagtactttgaagaccttct

SEQ ID NO: 693357 - DNA, 33 bp, Homo sapien
gagagactacaaagcaacaaggaaagagagaaa

SEQ ID NO: 693358 - DNA, 33 bp, Homo sapien
gagagactacaaagcagcaaggaaagagagaaa

SEQ ID NO: 693359 - DNA, 33 bp, Homo sapien
tctctatcactggaccaatgtgtctgttctctc

SEQ ID NO: 693360 - DNA, 33 bp, Homo sapien
tctctatcactggaccgatgtgtctgttctctc

SEQ ID NO: 693361 - DNA, 33 bp, Homo sapien
agggttgtttgttaaccgtatcagaacctaatc

SEQ ID NO: 693362 - DNA, 33 bp, Homo sapien
agggttgtttgttaactgtatcagaacctaatc

SEQ ID NO: 693363 - DNA, 33 bp, Homo sapien
aaattgctgcccatcacaatttagggactctca

SEQ ID NO: 693364 - DNA, 33 bp, Homo sapien
aaattgctgcccatcagaatttagggactctca

SEQ ID NO: 693365 - DNA, 33 bp, Homo sapien
ttcaactgtcacttgacattatattagctgtta

SEQ ID NO: 693366 - DNA, 33 bp, Homo sapien
ttcaactgtcacttgatattatattagctgtta

SEQ ID NO: 693367 - DNA, 33 bp, Homo sapien
aaccaaaaacaatgcaacttaatgataatatta

SEQ ID NO: 693368 - DNA, 33 bp, Homo sapien
aaccaaaaacaatgcaccttaatgataatatta

SEQ ID NO: 693369 - DNA, 33 bp, Homo sapien
agcctcattatttctccccaggagtagctcaga

SEQ ID NO: 693370 - DNA, 33 bp, Homo sapien
agcctcattatttctctccaggagtagctcaga

SEQ ID NO: 693371 - DNA, 33 bp, Homo sapien
ttggccttcaataaataaatcacaaagtaaaac

SEQ ID NO: 693372 - DNA, 33 bp, Homo sapien
ttggccttcaataaatgaatcacaaagtaaaac

SEQ ID NO: 693373 - DNA, 33 bp, Homo sapien
gtagctaactcaaatgcaattaatgactgtaaa

SEQ ID NO: 693374 - DNA, 33 bp, Homo sapien
gtagctaactcaaatgtaattaatgactgtaaa

SEQ ID NO: 693375 - DNA, 33 bp, Homo sapien
gcctggaaatgccataagtgtacgctggctttc

SEQ ID NO: 693376 - DNA, 33 bp, Homo sapien
gcctggaaatgccatatgtgtacgctggctttc

SEQ ID NO: 693377 - DNA, 33 bp, Homo sapien
ccagaaacaaataataacatggcttggtgactg

SEQ ID NO: 693378 - DNA, 33 bp, Homo sapien
ccagaaacaaataatatcatggcttggtgactg

SEQ ID NO: 693379 - DNA, 33 bp, Homo sapien
aatttggggacccttcaatccttcttctaccag

SEQ ID NO: 693380 - DNA, 33 bp, Homo sapien
aatttggggacccttccatccttcttctaccag

SEQ ID NO: 693381 - DNA, 33 bp, Homo sapien
ttgtccatctgaaagacaaggtgagaatagagg

SEQ ID NO: 693382 - DNA, 33 bp, Homo sapien
ttgtccatctgaaagataaggtgagaatagagg

SEQ ID NO: 693383 - DNA, 33 bp, Homo sapien
taaaaggctaagcaccagctttgatgaccacca

SEQ ID NO: 693384 - DNA, 33 bp, Homo sapien
taaaaggctaagcaccggctttgatgaccacca

SEQ ID NO: 693385 - DNA, 33 bp, Homo sapien
ctgacatgaagttctgaagggattatacttctt

SEQ ID NO: 693386 - DNA, 33 bp, Homo sapien
ctgacatgaagttctggagggattatacttctt

SEQ ID NO: 693387 - DNA, 33 bp, Homo sapien
ttctgtaaaatgaacaacttacttttcccaata

SEQ ID NO: 693388 - DNA, 33 bp, Homo sapien
ttctgtaaaatgaacagcttacttttcccaata

SEQ ID NO: 693389 - DNA, 33 bp, Homo sapien
ggagaaataagctaagaaacaatgggataattt

SEQ ID NO: 693390 - DNA, 33 bp, Homo sapien
ggagaaataagctaagcaacaatgggataattt

SEQ ID NO: 693391 - DNA, 33 bp, Homo sapien
agttggaggaggcagacgtgcaaatgaataatt

SEQ ID NO: 693392 - DNA, 33 bp, Homo sapien
agttggaggaggcagatgtgcaaatgaataatt

SEQ ID NO: 693393 - DNA, 33 bp, Homo sapien
ttatcattgactataccaccaattcaaatagtc

SEQ ID NO: 693394 - DNA, 33 bp, Homo sapien
ttatcattgactatactaccaattcaaatagtc

SEQ ID NO: 693395 - DNA, 33 bp, Homo sapien
ggaaaatgtagaactacgctttattcctcctga

SEQ ID NO: 693396 - DNA, 33 bp, Homo sapien
ggaaaatgtagaactatgctttattcctcctga

SEQ ID NO: 693397 - DNA, 33 bp, Homo sapien
tcaagctttcatcaaccggagccctgacataat

SEQ ID NO: 693398 - DNA, 33 bp, Homo sapien
tcaagctttcatcaacgggagccctgacataat

SEQ ID NO: 693399 - DNA, 33 bp, Homo sapien
cttttcatagaattcacaccttgcttctgctgg

SEQ ID NO: 693400 - DNA, 33 bp, Homo sapien
cttttcatagaattcataccttgcttctgctgg

SEQ ID NO: 693401 - DNA, 33 bp, Homo sapien
catgactggcagagccaaacgagggaggacgac

SEQ ID NO: 693402 - DNA, 33 bp, Homo sapien
catgactggcagagccgaacgagggaggacgac

SEQ ID NO: 693403 - DNA, 33 bp, Homo sapien
tttaaatttgctaagaaaaacagaacacaatgc

SEQ ID NO: 693404 - DNA, 33 bp, Homo sapien
tttaaatttgctaagagaaacagaacacaatgc

SEQ ID NO: 693405 - DNA, 33 bp, Homo sapien
ctaataccaccttctacgactgagctgtagtga

SEQ ID NO: 693406 - DNA, 33 bp, Homo sapien
ctaataccaccttctatgactgagctgtagtga

SEQ ID NO: 693407 - DNA, 33 bp, Homo sapien
gcagtgcctagagccaatctcagtaaatttgat

SEQ ID NO: 693408 - DNA, 33 bp, Homo sapien
gcagtgcctagagccagtctcagtaaatttgat

SEQ ID NO: 693409 - DNA, 33 bp, Homo sapien
ctcaatgtctagaaaaatcttcatgaaataaca

SEQ ID NO: 693410 - DNA, 33 bp, Homo sapien
ctcaatgtctagaaaagtcttcatgaaataaca

SEQ ID NO: 693411 - DNA, 33 bp, Homo sapien
tcagcataagttgtgacctatgaaaatcaatgt

SEQ ID NO: 693412 - DNA, 33 bp, Homo sapien
tcagcataagttgtgagctatgaaaatcaatgt

SEQ ID NO: 693413 - DNA, 33 bp, Homo sapien
ggctgttgctctcaagcctaagcaacctaaatc

SEQ ID NO: 693414 - DNA, 33 bp, Homo sapien
ggctgttgctctcaaggctaagcaacctaaatc

SEQ ID NO: 693415 - DNA, 33 bp, Homo sapien
ctgttaaatgcaattcagaaagacttaacatgt

SEQ ID NO: 693416 - DNA, 33 bp, Homo sapien
ctgttaaatgcaattcggaaagacttaacatgt

SEQ ID NO: 693417 - DNA, 33 bp, Homo sapien
ctaggaagattaaggccgatgaataaaagaaag

SEQ ID NO: 693418 - DNA, 33 bp, Homo sapien
ctaggaagattaaggctgatgaataaaagaaag

SEQ ID NO: 693419 - DNA, 33 bp, Homo sapien
gacatctcattggaagcaatcagaaggaacatc

SEQ ID NO: 693420 - DNA, 33 bp, Homo sapien
gacatctcattggaaggaatcagaaggaacatc

SEQ ID NO: 693421 - DNA, 33 bp, Homo sapien
aaaaaaagactgggaaattcataagaaacagat

SEQ ID NO: 693422 - DNA, 33 bp, Homo sapien
aaaaaaagactgggaagttcataagaaacagat

SEQ ID NO: 693423 - DNA, 33 bp, Homo sapien
caatgccctgttggaagtatttgtatacctggc

SEQ ID NO: 693424 - DNA, 33 bp, Homo sapien
caatgccctgttggaattatttgtatacctggc

SEQ ID NO: 693425 - DNA, 33 bp, Homo sapien
gcaagttagttgtttgaaagtttcttgcaggaa

SEQ ID NO: 693426 - DNA, 33 bp, Homo sapien
gcaagttagttgtttggaagtttcttgcaggaa

SEQ ID NO: 693427 - DNA, 33 bp, Homo sapien
atgtacaccctaaaaaatgtgaagcaggctgaa

SEQ ID NO: 693428 - DNA, 33 bp, Homo sapien
atgtacaccctaaaaagtgtgaagcaggctgaa

SEQ ID NO: 693429 - DNA, 33 bp, Homo sapien
ggttccaaaaaagtcaactgtgtaaaacaaggg

SEQ ID NO: 693430 - DNA, 33 bp, Homo sapien
ggttccaaaaaagtcagctgtgtaaaacaaggg

SEQ ID NO: 693431 - DNA, 33 bp, Homo sapien
aagtttactggagcaaaagtattgagattgggt

SEQ ID NO: 693432 - DNA, 33 bp, Homo sapien
aagtttactggagcaagagtattgagattgggt

SEQ ID NO: 693433 - DNA, 33 bp, Homo sapien
gtgtgggtctgggaagccctcgtgatgccctga

SEQ ID NO: 693434 - DNA, 33 bp, Homo sapien
gtgtgggtctgggaagtcctcgtgatgccctga

SEQ ID NO: 693435 - DNA, 33 bp, Homo sapien
cccctctaacaatcaacgaagcctcaccaaaag

SEQ ID NO: 693436 - DNA, 33 bp, Homo sapien
cccctctaacaatcaatgaagcctcaccaaaag

SEQ ID NO: 693437 - DNA, 33 bp, Homo sapien
tttgttatctggagaactatttgagacggttta

SEQ ID NO: 693438 - DNA, 33 bp, Homo sapien
tttgttatctggagaattatttgagacggttta

SEQ ID NO: 693439 - DNA, 33 bp, Homo sapien
ggcttcgaacagccataagtgcactggaagatg

SEQ ID NO: 693440 - DNA, 33 bp, Homo sapien
ggcttcgaacagccattagtgcactggaagatg

SEQ ID NO: 693441 - DNA, 33 bp, Homo sapien
gcagcttgctctctccagagtccaaatgcagca

SEQ ID NO: 693442 - DNA, 33 bp, Homo sapien
gcagcttgctctctccggagtccaaatgcagca

SEQ ID NO: 693443 - DNA, 33 bp, Homo sapien
tccttgtggaagtttcaagcacattatcaccca

SEQ ID NO: 693444 - DNA, 33 bp, Homo sapien
tccttgtggaagtttcgagcacattatcaccca

SEQ ID NO: 693445 - DNA, 33 bp, Homo sapien
cttttcttgtgccagtaaactctaaaataatgt

SEQ ID NO: 693446 - DNA, 33 bp, Homo sapien
cttttcttgtgccagttaactctaaaataatgt

SEQ ID NO: 693447 - DNA, 33 bp, Homo sapien
caagatgcttctaagccgagttatcaaatcttg

SEQ ID NO: 693448 - DNA, 33 bp, Homo sapien
caagatgcttctaagctgagttatcaaatcttg

SEQ ID NO: 693449 - DNA, 33 bp, Homo sapien
tgtaactcaaggcttaacaactattccaaaggg

SEQ ID NO: 693450 - DNA, 33 bp, Homo sapien
tgtaactcaaggcttagcaactattccaaaggg

SEQ ID NO: 693451 - DNA, 33 bp, Homo sapien
tttaaatttgcccagggattctgaatagagcat

SEQ ID NO: 693452 - DNA, 33 bp, Homo sapien
tttaaatttgcccaggtattctgaatagagcat

SEQ ID NO: 693453 - DNA, 33 bp, Homo sapien
tgaggggagtacatacgcagatcagcctggctc

SEQ ID NO: 693454 - DNA, 33 bp, Homo sapien
tgaggggagtacatactcagatcagcctggctc

SEQ ID NO: 693455 - DNA, 33 bp, Homo sapien
cactggatatagacacacttgagctgaagttgt

SEQ ID NO: 693456 - DNA, 33 bp, Homo sapien
cactggatatagacacgcttgagctgaagttgt

SEQ ID NO: 693457 - DNA, 33 bp, Homo sapien
cagcattctaggtgacagaaagccatcaagtaa

SEQ ID NO: 693458 - DNA, 33 bp, Homo sapien
cagcattctaggtgacggaaagccatcaagtaa

SEQ ID NO: 693459 - DNA, 33 bp, Homo sapien
gtttcctggagccctgaagtgtgaagagccctg

SEQ ID NO: 693460 - DNA, 33 bp, Homo sapien
gtttcctggagccctggagtgtgaagagccctg

SEQ ID NO: 693461 - DNA, 33 bp, Homo sapien
gtgttttaatgtgacagtagccctctcactccc

SEQ ID NO: 693462 - DNA, 33 bp, Homo sapien
gtgttttaatgtgacattagccctctcactccc

SEQ ID NO: 693463 - DNA, 33 bp, Homo sapien
gttttctacgtactgcaagtgaagttttatatc

SEQ ID NO: 693464 - DNA, 33 bp, Homo sapien
gttttctacgtactgcgagtgaagttttatatc

SEQ ID NO: 693465 - DNA, 33 bp, Homo sapien
gtgatgttgtaaaagaactgctaagctacctgg

SEQ ID NO: 693466 - DNA, 33 bp, Homo sapien
gtgatgttgtaaaagatctgctaagctacctgg

SEQ ID NO: 693467 - DNA, 33 bp, Homo sapien
tcctgagacatttggcactaggtctctctgtct

SEQ ID NO: 693468 - DNA, 33 bp, Homo sapien
tcctgagacatttggcgctaggtctctctgtct

SEQ ID NO: 693469 - DNA, 33 bp, Homo sapien
ctattgcgccataataaagtgtgaggaatagca

SEQ ID NO: 693470 - DNA, 33 bp, Homo sapien
ctattgcgccataatagagtgtgaggaatagca

SEQ ID NO: 693471 - DNA, 33 bp, Homo sapien
cacagcccatcatgagaacaataaggccataac

SEQ ID NO: 693472 - DNA, 33 bp, Homo sapien
cacagcccatcatgaggacaataaggccataac

SEQ ID NO: 693473 - DNA, 33 bp, Homo sapien
gtaagtactagcttataaaataccatcatctca

SEQ ID NO: 693474 - DNA, 33 bp, Homo sapien
gtaagtactagcttatgaaataccatcatctca

SEQ ID NO: 693475 - DNA, 33 bp, Homo sapien
gaggaaagagaccacactaaatctctctgcttc

SEQ ID NO: 693476 - DNA, 33 bp, Homo sapien
gaggaaagagaccacagtaaatctctctgcttc

SEQ ID NO: 693477 - DNA, 33 bp, Homo sapien
agactgagaagtatgaagtgaaggagggcagta

SEQ ID NO: 693478 - DNA, 33 bp, Homo sapien
agactgagaagtatgaggtgaaggagggcagta

SEQ ID NO: 693479 - DNA, 33 bp, Homo sapien
catattatgcttgaaacagatataagcaaatac

SEQ ID NO: 693480 - DNA, 33 bp, Homo sapien
catattatgcttgaaagagatataagcaaatac

SEQ ID NO: 693481 - DNA, 33 bp, Homo sapien
atgggagtgcttaaaaatgatgatatcggccag

SEQ ID NO: 693482 - DNA, 33 bp, Homo sapien
atgggagtgcttaaaagtgatgatatcggccag

SEQ ID NO: 693483 - DNA, 33 bp, Homo sapien
cctctctaaaggtcaccggcactgtggactctt

SEQ ID NO: 693484 - DNA, 33 bp, Homo sapien
cctctctaaaggtcactggcactgtggactctt

SEQ ID NO: 693485 - DNA, 33 bp, Homo sapien
cccggagcatcttaaaagcatcacccagtccct

SEQ ID NO: 693486 - DNA, 33 bp, Homo sapien
cccggagcatcttaaaggcatcacccagtccct

SEQ ID NO: 693487 - DNA, 33 bp, Homo sapien
gactacagagatgagtaaaatgattcagtatgg

SEQ ID NO: 693488 - DNA, 33 bp, Homo sapien
gactacagagatgagtgaaatgattcagtatgg

SEQ ID NO: 693489 - DNA, 33 bp, Homo sapien
ttaatcaactacagaccggtaaaacaaatgaca

SEQ ID NO: 693490 - DNA, 33 bp, Homo sapien
ttaatcaactacagactggtaaaacaaatgaca

SEQ ID NO: 693491 - DNA, 33 bp, Homo sapien
tagaacagaaaatcaaaagcaagaacaaaaaca

SEQ ID NO: 693492 - DNA, 33 bp, Homo sapien
tagaacagaaaatcaacagcaagaacaaaaaca

SEQ ID NO: 693493 - DNA, 33 bp, Homo sapien
gcatctcttgatatcccaactttttaacccatt

SEQ ID NO: 693494 - DNA, 33 bp, Homo sapien
gcatctcttgatatccgaactttttaacccatt

SEQ ID NO: 693495 - DNA, 33 bp, Homo sapien
tgtatgtggcattggccatttgctggacaaaat

SEQ ID NO: 693496 - DNA, 33 bp, Homo sapien
tgtatgtggcattggctatttgctggacaaaat

SEQ ID NO: 693497 - DNA, 33 bp, Homo sapien
gagataagacgttaagaataagacaggtactca

SEQ ID NO: 693498 - DNA, 33 bp, Homo sapien
gagataagacgttaaggataagacaggtactca

SEQ ID NO: 693499 - DNA, 33 bp, Homo sapien
tgtcttatacggcaggcaattgtctagacaagg

SEQ ID NO: 693500 - DNA, 33 bp, Homo sapien
tgtcttatacggcagggaattgtctagacaagg

SEQ ID NO: 693501 - DNA, 33 bp, Homo sapien
caaaaatgccttcagcgaccatgttgtccctta

SEQ ID NO: 693502 - DNA, 33 bp, Homo sapien
caaaaatgccttcagctaccatgttgtccctta

SEQ ID NO: 693503 - DNA, 33 bp, Homo sapien
tctttgtcctactcacaccttcctcagaaggaa

SEQ ID NO: 693504 - DNA, 33 bp, Homo sapien
tctttgtcctactcacgccttcctcagaaggaa

SEQ ID NO: 693505 - DNA, 33 bp, Homo sapien
tttaaaatgaagcatcaatataagatgggaact

SEQ ID NO: 693506 - DNA, 33 bp, Homo sapien
tttaaaatgaagcatccatataagatgggaact

SEQ ID NO: 693507 - DNA, 33 bp, Homo sapien
gtttaggtgagtcaaccacatctcttgtgctct

SEQ ID NO: 693508 - DNA, 33 bp, Homo sapien
gtttaggtgagtcaactacatctcttgtgctct

SEQ ID NO: 693509 - DNA, 33 bp, Homo sapien
ggtttgcttaaactccactgtcaccgctttgcc

SEQ ID NO: 693510 - DNA, 33 bp, Homo sapien
ggtttgcttaaactcctctgtcaccgctttgcc

SEQ ID NO: 693511 - DNA, 33 bp, Homo sapien
atcaaatgtacaaaaaggcttctcaagaacatt

SEQ ID NO: 693512 - DNA, 33 bp, Homo sapien
atcaaatgtacaaaaatgcttctcaagaacatt

SEQ ID NO: 693513 - DNA, 33 bp, Homo sapien
acattcctctgctagaactacctctgtttgaac

SEQ ID NO: 693514 - DNA, 33 bp, Homo sapien
acattcctctgctagagctacctctgtttgaac

SEQ ID NO: 693515 - DNA, 33 bp, Homo sapien
ttgctaacacaattcacccattcttttaagcat

SEQ ID NO: 693516 - DNA, 33 bp, Homo sapien
ttgctaacacaattcatccattcttttaagcat

SEQ ID NO: 693517 - DNA, 33 bp, Homo sapien
tactcttcactcaacaaatgccaaatctatcct

SEQ ID NO: 693518 - DNA, 33 bp, Homo sapien
tactcttcactcaacagatgccaaatctatcct

SEQ ID NO: 693519 - DNA, 33 bp, Homo sapien
gataggcaggctttcaagaagagtgggataaca

SEQ ID NO: 693520 - DNA, 33 bp, Homo sapien
gataggcaggctttcaggaagagtgggataaca

SEQ ID NO: 693521 - DNA, 33 bp, Homo sapien
ttgctgcaaggcataactgaggtaacatatgga

SEQ ID NO: 693522 - DNA, 33 bp, Homo sapien
ttgctgcaaggcataattgaggtaacatatgga

SEQ ID NO: 693523 - DNA, 33 bp, Homo sapien
tggatcttttttggtacgcaagacaaaccttgg

SEQ ID NO: 693524 - DNA, 33 bp, Homo sapien
tggatcttttttggtatgcaagacaaaccttgg

SEQ ID NO: 693525 - DNA, 33 bp, Homo sapien
atagattggccagctacatgcccagtgcttaac

SEQ ID NO: 693526 - DNA, 33 bp, Homo sapien
atagattggccagctatatgcccagtgcttaac

SEQ ID NO: 693527 - DNA, 33 bp, Homo sapien
tttctaggagcatttcactgagtctttgtggag

SEQ ID NO: 693528 - DNA, 33 bp, Homo sapien
tttctaggagcatttcgctgagtctttgtggag

SEQ ID NO: 693529 - DNA, 33 bp, Homo sapien
ttttctgttatcttgaataccagggtgcgagtt

SEQ ID NO: 693530 - DNA, 33 bp, Homo sapien
ttttctgttatcttgagtaccagggtgcgagtt

SEQ ID NO: 693531 - DNA, 33 bp, Homo sapien
tcagctgtttatggcaacttgagtcacagacac

SEQ ID NO: 693532 - DNA, 33 bp, Homo sapien
tcagctgtttatggcatcttgagtcacagacac

SEQ ID NO: 693533 - DNA, 33 bp, Homo sapien
gtcagaattttttccccgagcatctgaacatcc

SEQ ID NO: 693534 - DNA, 33 bp, Homo sapien
gtcagaattttttccctgagcatctgaacatcc

SEQ ID NO: 693535 - DNA, 33 bp, Homo sapien
tcttatccaggaataaaaagcgcaacaggaatg

SEQ ID NO: 693536 - DNA, 33 bp, Homo sapien
tcttatccaggaataagaagcgcaacaggaatg

SEQ ID NO: 693537 - DNA, 33 bp, Homo sapien
acccacatttcccaaactcttttccatagaata

SEQ ID NO: 693538 - DNA, 33 bp, Homo sapien
acccacatttcccaaagtcttttccatagaata

SEQ ID NO: 693539 - DNA, 33 bp, Homo sapien
ggtcttctggttgaacaagggaaaaaagtactt

SEQ ID NO: 693540 - DNA, 33 bp, Homo sapien
ggtcttctggttgaacgagggaaaaaagtactt

SEQ ID NO: 693541 - DNA, 33 bp, Homo sapien
ggttatttcggtacaacgtagcccacagagaat

SEQ ID NO: 693542 - DNA, 33 bp, Homo sapien
ggttatttcggtacaatgtagcccacagagaat

SEQ ID NO: 693543 - DNA, 33 bp, Homo sapien
ttaaggttcatcctgaaaaagagacttataaat

SEQ ID NO: 693544 - DNA, 33 bp, Homo sapien
ttaaggttcatcctgacaaagagacttataaat

SEQ ID NO: 693545 - DNA, 33 bp, Homo sapien
gagtgtttctggataaagttaacatttgaatca

SEQ ID NO: 693546 - DNA, 33 bp, Homo sapien
gagtgtttctggataaggttaacatttgaatca

SEQ ID NO: 693547 - DNA, 33 bp, Homo sapien
aaaaatcatgaaaaacagaagggactgagcctg

SEQ ID NO: 693548 - DNA, 33 bp, Homo sapien
aaaaatcatgaaaaacggaagggactgagcctg

SEQ ID NO: 693549 - DNA, 33 bp, Homo sapien
ttctgttctgggagcaaaggttcagctgtgtgg

SEQ ID NO: 693550 - DNA, 33 bp, Homo sapien
ttctgttctgggagcagaggttcagctgtgtgg

SEQ ID NO: 693551 - DNA, 33 bp, Homo sapien
tgtgctgctcaacatccaaaatgataacctttg

SEQ ID NO: 693552 - DNA, 33 bp, Homo sapien
tgtgctgctcaacatctaaaatgataacctttg

SEQ ID NO: 693553 - DNA, 33 bp, Homo sapien
aaaaataagtatgttacacactcaggtagataa

SEQ ID NO: 693554 - DNA, 33 bp, Homo sapien
aaaaataagtatgttagacactcaggtagataa

SEQ ID NO: 693555 - DNA, 33 bp, Homo sapien
ctgaaacataggaacaatggctggagattctgc

SEQ ID NO: 693556 - DNA, 33 bp, Homo sapien
ctgaaacataggaacagtggctggagattctgc

SEQ ID NO: 693557 - DNA, 33 bp, Homo sapien
tgtagagacttgggtaggtattgcaggaccact

SEQ ID NO: 693558 - DNA, 33 bp, Homo sapien
tgtagagacttgggtatgtattgcaggaccact

SEQ ID NO: 693559 - DNA, 33 bp, Homo sapien
tctttacctctgttaccatcacccttaccacca

SEQ ID NO: 693560 - DNA, 33 bp, Homo sapien
tctttacctctgttactatcacccttaccacca

SEQ ID NO: 693561 - DNA, 33 bp, Homo sapien
tggatacacagatacaaccaagaggtacttttc

SEQ ID NO: 693562 - DNA, 33 bp, Homo sapien
tggatacacagatacatccaagaggtacttttc

SEQ ID NO: 693563 - DNA, 33 bp, Homo sapien
tgctcatgtacacaaaacattttcccctatcat

SEQ ID NO: 693564 - DNA, 33 bp, Homo sapien
tgctcatgtacacaaagcattttcccctatcat

SEQ ID NO: 693565 - DNA, 33 bp, Homo sapien
ctgtctatccagtcgaacattgtcttagaaatg

SEQ ID NO: 693566 - DNA, 33 bp, Homo sapien
ctgtctatccagtcgagcattgtcttagaaatg

SEQ ID NO: 693567 - DNA, 33 bp, Homo sapien
agggagtgctttaaaaccacctattaaataaat

SEQ ID NO: 693568 - DNA, 33 bp, Homo sapien
agggagtgctttaaaatcacctattaaataaat

SEQ ID NO: 693569 - DNA, 33 bp, Homo sapien
taaaagtccaagccaacgacaaaagggtgtttt

SEQ ID NO: 693570 - DNA, 33 bp, Homo sapien
taaaagtccaagccaatgacaaaagggtgtttt

SEQ ID NO: 693571 - DNA, 33 bp, Homo sapien
aattaaaacactgaccaaagagaaatacacaaa

SEQ ID NO: 693572 - DNA, 33 bp, Homo sapien
aattaaaacactgaccgaagagaaatacacaaa

SEQ ID NO: 693573 - DNA, 33 bp, Homo sapien
gcctccatttcattgacccaagttggtatttct

SEQ ID NO: 693574 - DNA, 33 bp, Homo sapien
gcctccatttcattgatccaagttggtatttct

SEQ ID NO: 693575 - DNA, 33 bp, Homo sapien
tgctcaaataacactacccctgaggtagagttg

SEQ ID NO: 693576 - DNA, 33 bp, Homo sapien
tgctcaaataacactatccctgaggtagagttg

SEQ ID NO: 693577 - DNA, 33 bp, Homo sapien
agagtgatctccgcaaaatttgagtttgacttg

SEQ ID NO: 693578 - DNA, 33 bp, Homo sapien
agagtgatctccgcaacatttgagtttgacttg

SEQ ID NO: 693579 - DNA, 33 bp, Homo sapien
ctctgaagatgcaacaagtgtccgagagactca

SEQ ID NO: 693580 - DNA, 33 bp, Homo sapien
ctctgaagatgcaacaggtgtccgagagactca

SEQ ID NO: 693581 - DNA, 33 bp, Homo sapien
tcagcaaactcctaccaagaggtcaaatttcac

SEQ ID NO: 693582 - DNA, 33 bp, Homo sapien
tcagcaaactcctacccagaggtcaaatttcac

SEQ ID NO: 693583 - DNA, 33 bp, Homo sapien
ggaaggcttactggaaaaagcagattttattcc

SEQ ID NO: 693584 - DNA, 33 bp, Homo sapien
ggaaggcttactggaagaagcagattttattcc

SEQ ID NO: 693585 - DNA, 33 bp, Homo sapien
ttctagtggaggaaacaggacacaaatatgtat

SEQ ID NO: 693586 - DNA, 33 bp, Homo sapien
ttctagtggaggaaacgggacacaaatatgtat

SEQ ID NO: 693587 - DNA, 33 bp, Homo sapien
agcttattaaggtcaacgtcttcacctgtatac

SEQ ID NO: 693588 - DNA, 33 bp, Homo sapien
agcttattaaggtcaatgtcttcacctgtatac

SEQ ID NO: 693589 - DNA, 33 bp, Homo sapien
ttcttgagtttcagcaataaaaatcgggctgtc

SEQ ID NO: 693590 - DNA, 33 bp, Homo sapien
ttcttgagtttcagcagtaaaaatcgggctgtc

SEQ ID NO: 693591 - DNA, 33 bp, Homo sapien
acaagcctcgctggccgccataatgactgcttt

SEQ ID NO: 693592 - DNA, 33 bp, Homo sapien
acaagcctcgctggcctccataatgactgcttt

SEQ ID NO: 693593 - DNA, 33 bp, Homo sapien
tcatctgttgtttatacctctcattagtttaaa

SEQ ID NO: 693594 - DNA, 33 bp, Homo sapien
tcatctgttgtttatatctctcattagtttaaa

SEQ ID NO: 693595 - DNA, 33 bp, Homo sapien
tgaaaaagaaatgctaggccgagttgtgacatt

SEQ ID NO: 693596 - DNA, 33 bp, Homo sapien
tgaaaaagaaatgctatgccgagttgtgacatt

SEQ ID NO: 693597 - DNA, 33 bp, Homo sapien
tccccttactgctaaaggttttagattagctca

SEQ ID NO: 693598 - DNA, 33 bp, Homo sapien
tccccttactgctaaatgttttagattagctca

SEQ ID NO: 693599 - DNA, 33 bp, Homo sapien
gttatttgaccaaccaaacaaatatataatttg

SEQ ID NO: 693600 - DNA, 33 bp, Homo sapien
gttatttgaccaaccagacaaatatataatttg

SEQ ID NO: 693601 - DNA, 33 bp, Homo sapien
aggctaaccatgtttacgagagaccatttttgg

SEQ ID NO: 693602 - DNA, 33 bp, Homo sapien
aggctaaccatgtttatgagagaccatttttgg

SEQ ID NO: 693603 - DNA, 33 bp, Homo sapien
atgtccactttgtaaactgcttttcatacatac

SEQ ID NO: 693604 - DNA, 33 bp, Homo sapien
atgtccactttgtaaattgcttttcatacatac

SEQ ID NO: 693605 - DNA, 33 bp, Homo sapien
aggggagagaagaataaaaaggccaagatccaa

SEQ ID NO: 693606 - DNA, 33 bp, Homo sapien
aggggagagaagaatataaaggccaagatccaa

SEQ ID NO: 693607 - DNA, 33 bp, Homo sapien
tatcgctagacccttaaatcagggcatcctgac

SEQ ID NO: 693608 - DNA, 33 bp, Homo sapien
tatcgctagacccttatatcagggcatcctgac

SEQ ID NO: 693609 - DNA, 33 bp, Homo sapien
caggcagtgaaacagcacgtcaggatgaaccat

SEQ ID NO: 693610 - DNA, 33 bp, Homo sapien
caggcagtgaaacagcgcgtcaggatgaaccat

SEQ ID NO: 693611 - DNA, 33 bp, Homo sapien
aaattgtgatggaaaccaggcttctcctactct

SEQ ID NO: 693612 - DNA, 33 bp, Homo sapien
aaattgtgatggaaacgaggcttctcctactct

SEQ ID NO: 693613 - DNA, 33 bp, Homo sapien
agctactatccttatactagaacagtttaacaa

SEQ ID NO: 693614 - DNA, 33 bp, Homo sapien
agctactatccttatattagaacagtttaacaa

SEQ ID NO: 693615 - DNA, 33 bp, Homo sapien
gtcctaaaattcttccgcaccgtttagtatcat

SEQ ID NO: 693616 - DNA, 33 bp, Homo sapien
gtcctaaaattcttcctcaccgtttagtatcat

SEQ ID NO: 693617 - DNA, 33 bp, Homo sapien
atacacgagggtaagtaactacatttctaagga

SEQ ID NO: 693618 - DNA, 33 bp, Homo sapien
atacacgagggtaagtgactacatttctaagga

SEQ ID NO: 693619 - DNA, 33 bp, Homo sapien
ctggaaaactgtaaaactggggaatccattagc

SEQ ID NO: 693620 - DNA, 33 bp, Homo sapien
ctggaaaactgtaaaattggggaatccattagc

SEQ ID NO: 693621 - DNA, 33 bp, Homo sapien
gcctttccactgcaagaaatgaaaaccttttta

SEQ ID NO: 693622 - DNA, 33 bp, Homo sapien
gcctttccactgcaaggaatgaaaaccttttta

SEQ ID NO: 693623 - DNA, 33 bp, Homo sapien
cactacacattgtaaaaaagttcctgccaaaat

SEQ ID NO: 693624 - DNA, 33 bp, Homo sapien
cactacacattgtaaagaagttcctgccaaaat

SEQ ID NO: 693625 - DNA, 33 bp, Homo sapien
cttccccagatccctcaaatattagcagtagac

SEQ ID NO: 693626 - DNA, 33 bp, Homo sapien
cttccccagatccctcgaatattagcagtagac

SEQ ID NO: 693627 - DNA, 33 bp, Homo sapien
cctgtaggatcctgaaccacaaccattacaatt

SEQ ID NO: 693628 - DNA, 33 bp, Homo sapien
cctgtaggatcctgaatcacaaccattacaatt

SEQ ID NO: 693629 - DNA, 33 bp, Homo sapien
attggacaacgggcaacgtagagaaggaaaaga

SEQ ID NO: 693630 - DNA, 33 bp, Homo sapien
attggacaacgggcaatgtagagaaggaaaaga

SEQ ID NO: 693631 - DNA, 33 bp, Homo sapien
tataacaaattcttgcaaattgataagaaaaag

SEQ ID NO: 693632 - DNA, 33 bp, Homo sapien
tataacaaattcttgccaattgataagaaaaag

SEQ ID NO: 693633 - DNA, 33 bp, Homo sapien
ccattttacttcttcaataagcctgtattgctt

SEQ ID NO: 693634 - DNA, 33 bp, Homo sapien
ccattttacttcttcattaagcctgtattgctt

SEQ ID NO: 693635 - DNA, 33 bp, Homo sapien
gtcttttgtgctaaaaaccatcttaagcagcac

SEQ ID NO: 693636 - DNA, 33 bp, Homo sapien
gtcttttgtgctaaaagccatcttaagcagcac

SEQ ID NO: 693637 - DNA, 33 bp, Homo sapien
ttagatctgtatccccaccacaatttcatgctg

SEQ ID NO: 693638 - DNA, 33 bp, Homo sapien
ttagatctgtatccccgccacaatttcatgctg

SEQ ID NO: 693639 - DNA, 33 bp, Homo sapien
ggaccgaggatttctcaatttctgggctgccca

SEQ ID NO: 693640 - DNA, 33 bp, Homo sapien
ggaccgaggatttctcgatttctgggctgccca

SEQ ID NO: 693641 - DNA, 33 bp, Homo sapien
gtctgtcttccagaacgaaagatctctcagatc

SEQ ID NO: 693642 - DNA, 33 bp, Homo sapien
gtctgtcttccagaactaaagatctctcagatc

SEQ ID NO: 693643 - DNA, 33 bp, Homo sapien
aggtatttactgaaaccagattgcaactcaacc

SEQ ID NO: 693644 - DNA, 33 bp, Homo sapien
aggtatttactgaaactagattgcaactcaacc

SEQ ID NO: 693645 - DNA, 33 bp, Homo sapien
ggagaaggttctagaaagcagaaatctggagac

SEQ ID NO: 693646 - DNA, 33 bp, Homo sapien
ggagaaggttctagaaggcagaaatctggagac

SEQ ID NO: 693647 - DNA, 33 bp, Homo sapien
tattggcagtatttgcaaacttgtcatcattag

SEQ ID NO: 693648 - DNA, 33 bp, Homo sapien
tattggcagtatttgcgaacttgtcatcattag

SEQ ID NO: 693649 - DNA, 33 bp, Homo sapien
gcctttcaagaccagacgtgagtgttgcagtaa

SEQ ID NO: 693650 - DNA, 33 bp, Homo sapien
gcctttcaagaccagatgtgagtgttgcagtaa

SEQ ID NO: 693651 - DNA, 33 bp, Homo sapien
ttcactttctccggagacgctttcccttgctgg

SEQ ID NO: 693652 - DNA, 33 bp, Homo sapien
ttcactttctccggaggcgctttcccttgctgg

SEQ ID NO: 693653 - DNA, 33 bp, Homo sapien
aaagtgcgctaacagcccagatctgctgttgtc

SEQ ID NO: 693654 - DNA, 33 bp, Homo sapien
aaagtgcgctaacagctcagatctgctgttgtc

SEQ ID NO: 693655 - DNA, 33 bp, Homo sapien
tttcctccaaagggaacggttatagtgaattag

SEQ ID NO: 693656 - DNA, 33 bp, Homo sapien
tttcctccaaagggaatggttatagtgaattag

SEQ ID NO: 693657 - DNA, 33 bp, Homo sapien
tgtggaaaatctcgtgcactaagtcagcctcta

SEQ ID NO: 693658 - DNA, 33 bp, Homo sapien
tgtggaaaatctcgtgtactaagtcagcctcta

SEQ ID NO: 693659 - DNA, 33 bp, Homo sapien
ggtaatgagagcacaacgctgttcctaaaccca

SEQ ID NO: 693660 - DNA, 33 bp, Homo sapien
ggtaatgagagcacaaggctgttcctaaaccca

SEQ ID NO: 693661 - DNA, 33 bp, Homo sapien
tggtacacaccagccaatgaacaaatatgtttt

SEQ ID NO: 693662 - DNA, 33 bp, Homo sapien
tggtacacaccagccagtgaacaaatatgtttt

SEQ ID NO: 693663 - DNA, 33 bp, Homo sapien
caaagatgccatcaagaatcaaggttactctgc

SEQ ID NO: 693664 - DNA, 33 bp, Homo sapien
caaagatgccatcaagtatcaaggttactctgc

SEQ ID NO: 693665 - DNA, 33 bp, Homo sapien
tgtccttacctataaaatggagtgttaaatacc

SEQ ID NO: 693666 - DNA, 33 bp, Homo sapien
tgtccttacctataaagtggagtgttaaatacc

SEQ ID NO: 693667 - DNA, 33 bp, Homo sapien
ttttatttcattgcagacggagaacataatggt

SEQ ID NO: 693668 - DNA, 33 bp, Homo sapien
ttttatttcattgcagtcggagaacataatggt

SEQ ID NO: 693669 - DNA, 33 bp, Homo sapien
cctgtggtccagggacacttcaacaggtaggat

SEQ ID NO: 693670 - DNA, 33 bp, Homo sapien
cctgtggtccagggacgcttcaacaggtaggat

SEQ ID NO: 693671 - DNA, 33 bp, Homo sapien
catttttaaattacccaagttgatctgtgtctg

SEQ ID NO: 693672 - DNA, 33 bp, Homo sapien
catttttaaattaccctagttgatctgtgtctg

SEQ ID NO: 693673 - DNA, 33 bp, Homo sapien
aactccttccttccaacgtgaacctcagatact

SEQ ID NO: 693674 - DNA, 33 bp, Homo sapien
aactccttccttccaatgtgaacctcagatact

SEQ ID NO: 693675 - DNA, 33 bp, Homo sapien
agaaagctttagagaactgggggaggcaataaa

SEQ ID NO: 693676 - DNA, 33 bp, Homo sapien
agaaagctttagagaattgggggaggcaataaa

SEQ ID NO: 693677 - DNA, 33 bp, Homo sapien
ttttattgatgtgacacgattcaaagcctaaac

SEQ ID NO: 693678 - DNA, 33 bp, Homo sapien
ttttattgatgtgacaggattcaaagcctaaac

SEQ ID NO: 693679 - DNA, 33 bp, Homo sapien
acacgttacttgcactcacatttcatagactga

SEQ ID NO: 693680 - DNA, 33 bp, Homo sapien
acacgttacttgcacttacatttcatagactga

SEQ ID NO: 693681 - DNA, 33 bp, Homo sapien
atatgaatcaataaagcagaaaagatggaagtg

SEQ ID NO: 693682 - DNA, 33 bp, Homo sapien
atatgaatcaataaaggagaaaagatggaagtg

SEQ ID NO: 693683 - DNA, 33 bp, Homo sapien
gaaggaattgcatttacagaacactttccaagt

SEQ ID NO: 693684 - DNA, 33 bp, Homo sapien
gaaggaattgcatttatagaacactttccaagt

SEQ ID NO: 693685 - DNA, 33 bp, Homo sapien
gaaagtaaaggagtcacgataaaataggatcaa

SEQ ID NO: 693686 - DNA, 33 bp, Homo sapien
gaaagtaaaggagtcatgataaaataggatcaa

SEQ ID NO: 693687 - DNA, 33 bp, Homo sapien
cctttcctgctttgaaggatgaagccagtactg

SEQ ID NO: 693688 - DNA, 33 bp, Homo sapien
cctttcctgctttgaatgatgaagccagtactg

SEQ ID NO: 693689 - DNA, 33 bp, Homo sapien
ctcccccatgaaaaccgctagtgtagccctgct

SEQ ID NO: 693690 - DNA, 33 bp, Homo sapien
ctcccccatgaaaacctctagtgtagccctgct

SEQ ID NO: 693691 - DNA, 33 bp, Homo sapien
atcacttcggttttcccaaattgtctgaaatca

SEQ ID NO: 693692 - DNA, 33 bp, Homo sapien
atcacttcggttttcctaaattgtctgaaatca

SEQ ID NO: 693693 - DNA, 33 bp, Homo sapien; identical to SEQ ID NO: 693691

SEQ ID NO: 693694 - DNA, 33 bp, Homo sapien; identical to SEQ ID NO: 693692

SEQ ID NO: 693695 - DNA, 33 bp, Homo sapien
caaccttggctgaacactggaatcaccagggta

SEQ ID NO: 693696 - DNA, 33 bp, Homo sapien
caaccttggctgaacagtggaatcaccagggta

SEQ ID NO: 693697 - DNA, 33 bp, Homo sapien
ggcacgtaacctgtctaaacatgagttttctct

SEQ ID NO: 693698 - DNA, 33 bp, Homo sapien
ggcacgtaacctgtctgaacatgagttttctct

SEQ ID NO: 693699 - DNA, 33 bp, Homo sapien
ggtccacctctcggaactggtatgacaatggta

SEQ ID NO: 693700 - DNA, 33 bp, Homo sapien
ggtccacctctcggaattggtatgacaatggta

SEQ ID NO: 693701 - DNA, 33 bp, Homo sapien
tgtaggcactgagcaacgctgatatcgtttcct

SEQ ID NO: 693702 - DNA, 33 bp, Homo sapien
tgtaggcactgagcaatgctgatatcgtttcct

SEQ ID NO: 693703 - DNA, 33 bp, Homo sapien
agagaagaaaaggcaccagaccaaacttggcta

SEQ ID NO: 693704 - DNA, 33 bp, Homo sapien
agagaagaaaaggcactagaccaaacttggcta

SEQ ID NO: 693705 - DNA, 33 bp, Homo sapien
ctggatttctgagcccaggcattgcaaagacct

SEQ ID NO: 693706 - DNA, 33 bp, Homo sapien
ctggatttctgagcccgggcattgcaaagacct

SEQ ID NO: 693707 - DNA, 33 bp, Homo sapien
cactaaatttgggatgcatattgcaaaacaata

SEQ ID NO: 693708 - DNA, 33 bp, Homo sapien
cactaaatttgggatggatattgcaaaacaata

SEQ ID NO: 693709 - DNA, 33 bp, Homo sapien
tgagaccacattgaagaaacatttacatagacc

SEQ ID NO: 693710 - DNA, 33 bp, Homo sapien
tgagaccacattgaaggaacatttacatagacc

SEQ ID NO: 693711 - DNA, 33 bp, Homo sapien
gaccatgagacataaactgaaattgtctgggaa

SEQ ID NO: 693712 - DNA, 33 bp, Homo sapien
gaccatgagacataaattgaaattgtctgggaa

SEQ ID NO: 693713 - DNA, 33 bp, Homo sapien
tgaggtcagaagcctgaacactgacaatgatgg

SEQ ID NO: 693714 - DNA, 33 bp, Homo sapien
tgaggtcagaagcctgcacactgacaatgatgg

SEQ ID NO: 693715 - DNA, 33 bp, Homo sapien
ttggatcaacccaagactatctgccaggaatgc

SEQ ID NO: 693716 - DNA, 33 bp, Homo sapien
ttggatcaacccaagagtatctgccaggaatgc

SEQ ID NO: 693717 - DNA, 33 bp, Homo sapien
aacagatacctgatagaaaagaaaagcagggat

SEQ ID NO: 693718 - DNA, 33 bp, Homo sapien
aacagatacctgataggaaagaaaagcagggat

SEQ ID NO: 693719 - DNA, 33 bp, Homo sapien
tggaggtagaggaacactgagagaggcagaggc

SEQ ID NO: 693720 - DNA, 33 bp, Homo sapien
tggaggtagaggaacattgagagaggcagaggc

SEQ ID NO: 693721 - DNA, 33 bp, Homo sapien
ggttagtatctccactaaaatagaaagataaaa

SEQ ID NO: 693722 - DNA, 33 bp, Homo sapien
ggttagtatctccactgaaatagaaagataaaa

SEQ ID NO: 693723 - DNA, 33 bp, Homo sapien
accacaggaattaaaaactcagtgcctttggag

SEQ ID NO: 693724 - DNA, 33 bp, Homo sapien
accacaggaattaaaatctcagtgcctttggag

SEQ ID NO: 693725 - DNA, 33 bp, Homo sapien
ctatgcataggctgaaactatcatctccttttt

SEQ ID NO: 693726 - DNA, 33 bp, Homo sapien
ctatgcataggctgaatctatcatctccttttt

SEQ ID NO: 693727 - DNA, 33 bp, Homo sapien
aaagaagtactctcccaactctgaaagccagct

SEQ ID NO: 693728 - DNA, 33 bp, Homo sapien
aaagaagtactctccccactctgaaagccagct

SEQ ID NO: 693729 - DNA, 33 bp, Homo sapien
attactcgcccagtgaaaacacagtggctggca

SEQ ID NO: 693730 - DNA, 33 bp, Homo sapien
attactcgcccagtgacaacacagtggctggca

SEQ ID NO: 693731 - DNA, 33 bp, Homo sapien
caaggtttaggcaccacactgcacatctctcat

SEQ ID NO: 693732 - DNA, 33 bp, Homo sapien
caaggtttaggcaccatactgcacatctctcat

SEQ ID NO: 693733 - DNA, 33 bp, Homo sapien
atcctgtgtccccgtgcaatagctgccttgttg

SEQ ID NO: 693734 - DNA, 33 bp, Homo sapien
atcctgtgtccccgtgtaatagctgccttgttg

SEQ ID NO: 693735 - DNA, 33 bp, Homo sapien
agtgagaataatgctcaagtttgcacagtttaa

SEQ ID NO: 693736 - DNA, 33 bp, Homo sapien
agtgagaataatgctcgagtttgcacagtttaa

SEQ ID NO: 693737 - DNA, 33 bp, Homo sapien
tctcattccttaatgcagacacctagtgttcct

SEQ ID NO: 693738 - DNA, 33 bp, Homo sapien
tctcattccttaatgcggacacctagtgttcct

SEQ ID NO: 693739 - DNA, 33 bp, Homo sapien
gaaatctaagtcccaacgaaatgtagtttttcc

SEQ ID NO: 693740 - DNA, 33 bp, Homo sapien
gaaatctaagtcccaatgaaatgtagtttttcc

SEQ ID NO: 693741 - DNA, 33 bp, Homo sapien
caaaggaagatgaatcaccttttcgggccagtg

SEQ ID NO: 693742 - DNA, 33 bp, Homo sapien
caaaggaagatgaatcgccttttcgggccagtg

SEQ ID NO: 693743 - DNA, 33 bp, Homo sapien
ttgttgctttaaatcactcataatagtgcatgg

SEQ ID NO: 693744 - DNA, 33 bp, Homo sapien
ttgttgctttaaatcattcataatagtgcatgg

SEQ ID NO: 693745 - DNA, 33 bp, Homo sapien
tccagagagcgagcacagtagtgcagttcctgt

SEQ ID NO: 693746 - DNA, 33 bp, Homo sapien
tccagagagcgagcacggtagtgcagttcctgt

SEQ ID NO: 693747 - DNA, 33 bp, Homo sapien
acataagtgacctcccagaatacatttagacag

SEQ ID NO: 693748 - DNA, 33 bp, Homo sapien
acataagtgacctcccggaatacatttagacag

SEQ ID NO: 693749 - DNA, 33 bp, Homo sapien
tctcttcctgagggtgaagttttacagccgtct

SEQ ID NO: 693750 - DNA, 33 bp, Homo sapien
tctcttcctgagggtgcagttttacagccgtct

SEQ ID NO: 693751 - DNA, 33 bp, Homo sapien
gttgtgttcagaacaagggtacccaatagcagg

SEQ ID NO: 693752 - DNA, 33 bp, Homo sapien
gttgtgttcagaacaatggtacccaatagcagg

SEQ ID NO: 693753 - DNA, 33 bp, Homo sapien
gcagaagatgcaggacacttagatgtgcagatg

SEQ ID NO: 693754 - DNA, 33 bp, Homo sapien
gcagaagatgcaggacgcttagatgtgcagatg

SEQ ID NO: 693755 - DNA, 33 bp, Homo sapien
atatgcttcactgagcacttaatttagaattgc

SEQ ID NO: 693756 - DNA, 33 bp, Homo sapien
atatgcttcactgagcgcttaatttagaattgc

SEQ ID NO: 693757 - DNA, 33 bp, Homo sapien
gttacaattcttacacagtagctgtcaatttgc

SEQ ID NO: 693758 - DNA, 33 bp, Homo sapien
gttacaattcttacacggtagctgtcaatttgc

SEQ ID NO: 693759 - DNA, 33 bp, Homo sapien
tgaataaaacattagacactgctgaactagact

SEQ ID NO: 693760 - DNA, 33 bp, Homo sapien
tgaataaaacattagagactgctgaactagact

SEQ ID NO: 693761 - DNA, 33 bp, Homo sapien
ttatgcatatgtttatcactttgaggggtcaac

SEQ ID NO: 693762 - DNA, 33 bp, Homo sapien
ttatgcatatgtttatgactttgaggggtcaac

SEQ ID NO: 693763 - DNA, 33 bp, Homo sapien
aagacctgacgagaaactgaagtcacatggcag

SEQ ID NO: 693764 - DNA, 33 bp, Homo sapien
aagacctgacgagaaattgaagtcacatggcag

SEQ ID NO: 693765 - DNA, 33 bp, Homo sapien
acacatctcaatatcaagtccactatgaacagg

SEQ ID NO: 693766 - DNA, 33 bp, Homo sapien
acacatctcaatatcatgtccactatgaacagg

SEQ ID NO: 693767 - DNA, 33 bp, Homo sapien
tgtttacccattaataagtcagaattccctccc

SEQ ID NO: 693768 - DNA, 33 bp, Homo sapien
tgtttacccattaatacgtcagaattccctccc

SEQ ID NO: 693769 - DNA, 33 bp, Homo sapien
cagatccctgagcttgaaacttgcattgtagca

SEQ ID NO: 693770 - DNA, 33 bp, Homo sapien
cagatccctgagcttggaacttgcattgtagca

SEQ ID NO: 693771 - DNA, 33 bp, Homo sapien
ttgtgtgagaaggatcagagaagaacttgatga

SEQ ID NO: 693772 - DNA, 33 bp, Homo sapien
ttgtgtgagaaggatcggagaagaacttgatga

SEQ ID NO: 693773 - DNA, 33 bp, Homo sapien
catgactgtatatgcacgtctcatcaaaacaac

SEQ ID NO: 693774 - DNA, 33 bp, Homo sapien
catgactgtatatgcatgtctcatcaaaacaac

SEQ ID NO: 693775 - DNA, 33 bp, Homo sapien
tggactggagcccttaacccgtgctttctcctg

SEQ ID NO: 693776 - DNA, 33 bp, Homo sapien
tggactggagcccttaccccgtgctttctcctg

SEQ ID NO: 693777 - DNA, 33 bp, Homo sapien
caacaatggtggaagcacaggttgctatagggt

SEQ ID NO: 693778 - DNA, 33 bp, Homo sapien
caacaatggtggaagcgcaggttgctatagggt

SEQ ID NO: 693779 - DNA, 33 bp, Homo sapien
ctgtcattaagcaatgcatgggtatagctaata

SEQ ID NO: 693780 - DNA, 33 bp, Homo sapien
ctgtcattaagcaatgtatgggtatagctaata

SEQ ID NO: 693781 - DNA, 33 bp, Homo sapien
taatcttccatgtttccatgccctaatttctaa

SEQ ID NO: 693782 - DNA, 33 bp, Homo sapien
taatcttccatgtttctatgccctaatttctaa

SEQ ID NO: 693783 - DNA, 33 bp, Homo sapien
ttttaactttaaacaccgagcaatgtaaattca

SEQ ID NO: 693784 - DNA, 33 bp, Homo sapien
ttttaactttaaacactgagcaatgtaaattca

SEQ ID NO: 693785 - DNA, 33 bp, Homo sapien
aggttggagcaaattaaaaagcaaattggaact

SEQ ID NO: 693786 - DNA, 33 bp, Homo sapien
aggttggagcaaattagaaagcaaattggaact

SEQ ID NO: 693787 - DNA, 33 bp, Homo sapien
tcccggccagcttcccagctcaagttgcaatgg

SEQ ID NO: 693788 - DNA, 33 bp, Homo sapien
tcccggccagcttcccggctcaagttgcaatgg

SEQ ID NO: 693789 - DNA, 33 bp, Homo sapien
ccagctctcttagggccatgactggtctggagg

SEQ ID NO: 693790 - DNA, 33 bp, Homo sapien
ccagctctcttagggctatgactggtctggagg

SEQ ID NO: 693791 - DNA, 33 bp, Homo sapien
gtatacagaaggagcaggagttccacttagggc

SEQ ID NO: 693792 - DNA, 33 bp, Homo sapien
gtatacagaaggagcatgagttccacttagggc

SEQ ID NO: 693793 - DNA, 33 bp, Homo sapien
tctttctttaggactcaatcctggctgtgcagc

SEQ ID NO: 693794 - DNA, 33 bp, Homo sapien
tctttctttaggactcgatcctggctgtgcagc

SEQ ID NO: 693795 - DNA, 33 bp, Homo sapien
cattcattctggaaccaaacaatggcacaatag

SEQ ID NO: 693796 - DNA, 33 bp, Homo sapien
cattcattctggaaccgaacaatggcacaatag

SEQ ID NO: 693797 - DNA, 33 bp, Homo sapien
agttaacagggcattcaaggtctgcctaaccaa

SEQ ID NO: 693798 - DNA, 33 bp, Homo sapien
agttaacagggcattcgaggtctgcctaaccaa

SEQ ID NO: 693799 - DNA, 33 bp, Homo sapien
gaagacatcactgcacagctaatctggactaca

SEQ ID NO: 693800 - DNA, 33 bp, Homo sapien
gaagacatcactgcacggctaatctggactaca

SEQ ID NO: 693801 - DNA, 33 bp, Homo sapien
taaatagggccaaaaactctgagggagatggtt

SEQ ID NO: 693802 - DNA, 33 bp, Homo sapien
taaatagggccaaaaattctgagggagatggtt

SEQ ID NO: 693803 - DNA, 33 bp, Homo sapien
ggtccatctgcctttcaagcctccttgtctgca

SEQ ID NO: 693804 - DNA, 33 bp, Homo sapien
ggtccatctgcctttcgagcctccttgtctgca

SEQ ID NO: 693805 - DNA, 33 bp, Homo sapien
gcttcaggacgttggaaaagcatgaaaaagaat

SEQ ID NO: 693806 - DNA, 33 bp, Homo sapien
gcttcaggacgttggagaagcatgaaaaagaat

SEQ ID NO: 693807 - DNA, 33 bp, Homo sapien
tgtttcaaaggggtacacaagaaaaccagacaa

SEQ ID NO: 693808 - DNA, 33 bp, Homo sapien
tgtttcaaaggggtacgcaagaaaaccagacaa

SEQ ID NO: 693809 - DNA, 33 bp, Homo sapien
gcttcaaacctgcatcggagggcagtatccgag

SEQ ID NO: 693810 - DNA, 33 bp, Homo sapien
gcttcaaacctgcatctgagggcagtatccgag

SEQ ID NO: 693811 - DNA, 33 bp, Homo sapien
aaaggctcactagaaacattcaaagagagattt

SEQ ID NO: 693812 - DNA, 33 bp, Homo sapien
aaaggctcactagaaagattcaaagagagattt

SEQ ID NO: 693813 - DNA, 33 bp, Homo sapien
ctggaaaatctgcaagcatatgacttcaatgca

SEQ ID NO: 693814 - DNA, 33 bp, Homo sapien
ctggaaaatctgcaagtatatgacttcaatgca

SEQ ID NO: 693815 - DNA, 33 bp, Homo sapien
ccaccagcatgcagcacctgcctggaaaatctg

SEQ ID NO: 693816 - DNA, 33 bp, Homo sapien
ccaccagcatgcagcatctgcctggaaaatctg

SEQ ID NO: 693817 - DNA, 33 bp, Homo sapien
ctgcctgggctctgagactatccaagatatcct

SEQ ID NO: 693818 - DNA, 33 bp, Homo sapien
ctgcctgggctctgaggctatccaagatatcct

SEQ ID NO: 693819 - DNA, 33 bp, Homo sapien
ggattttgcctatggaccagagtttgctaaccc

SEQ ID NO: 693820 - DNA, 33 bp, Homo sapien
ggattttgcctatggatcagagtttgctaaccc

SEQ ID NO: 693821 - DNA, 33 bp, Homo sapien
ctagaccttcccattccgaatcttccaatcttg

SEQ ID NO: 693822 - DNA, 33 bp, Homo sapien
ctagaccttcccattctgaatcttccaatcttg

SEQ ID NO: 693823 - DNA, 33 bp, Homo sapien
ggaaaatgataccggacggaaatatgggtcttc

SEQ ID NO: 693824 - DNA, 33 bp, Homo sapien
ggaaaatgataccggatggaaatatgggtcttc

SEQ ID NO: 693825 - DNA, 33 bp, Homo sapien
ctttccctggcctttcccctatgaacagtcaac

SEQ ID NO: 693826 - DNA, 33 bp, Homo sapien
ctttccctggcctttcgcctatgaacagtcaac

SEQ ID NO: 693827 - DNA, 33 bp, Homo sapien
ggctggctactgggggaacgtgtagtacctcca

SEQ ID NO: 693828 - DNA, 33 bp, Homo sapien
ggctggctactggggggacgtgtagtacctcca

SEQ ID NO: 693829 - DNA, 33 bp, Homo sapien
tgcacactcctctagcagccagatgttctccac

SEQ ID NO: 693830 - DNA, 33 bp, Homo sapien
tgcacactcctctagcggccagatgttctccac

SEQ ID NO: 693831 - DNA, 33 bp, Homo sapien
aattaacatcgacgcactgacgtgacattcagt

SEQ ID NO: 693832 - DNA, 33 bp, Homo sapien
aattaacatcgacgcattgacgtgacattcagt

SEQ ID NO: 693833 - DNA, 33 bp, Homo sapien
cgatgtgaacgtcaggaaaaaatcctttctttt

SEQ ID NO: 693834 - DNA, 33 bp, Homo sapien
cgatgtgaacgtcaggtaaaaatcctttctttt

SEQ ID NO: 693835 - DNA, 33 bp, Homo sapien
gactcaagctggtgaacccgcgattgcgtacta

SEQ ID NO: 693836 - DNA, 33 bp, Homo sapien
gactcaagctggtgaatccgcgattgcgtacta

SEQ ID NO: 693837 - DNA, 33 bp, Homo sapien
tggaggaaacatgccaagttgattaagctgatg

SEQ ID NO: 693838 - DNA, 33 bp, Homo sapien
tggaggaaacatgccaggttgattaagctgatg

SEQ ID NO: 693839 - DNA, 33 bp, Homo sapien
agtcatttcctacgacaagagcaaatggccaag

SEQ ID NO: 693840 - DNA, 33 bp, Homo sapien
agtcatttcctacgacgagagcaaatggccaag

SEQ ID NO: 693841 - DNA, 33 bp, Homo sapien
atgtgactggcctatacagtgatctgtaagttt

SEQ ID NO: 693842 - DNA, 33 bp, Homo sapien
atgtgactggcctatatagtgatctgtaagttt

SEQ ID NO: 693843 - DNA, 33 bp, Homo sapien
tgaagagtcctgagaacaaatgagttaaggtat

SEQ ID NO: 693844 - DNA, 33 bp, Homo sapien
tgaagagtcctgagaataaatgagttaaggtat

SEQ ID NO: 693845 - DNA, 33 bp, Homo sapien
cttctttttaatttcaatacaactgtttactca

SEQ ID NO: 693846 - DNA, 33 bp, Homo sapien
cttctttttaatttcagtacaactgtttactca

SEQ ID NO: 693847 - DNA, 33 bp, Homo sapien
tttgtcagaaaaaaaaacatttgtgccaattag

SEQ ID NO: 693848 - DNA, 33 bp, Homo sapien
tttgtcagaaaaaaaatcatttgtgccaattag

SEQ ID NO: 693849 - DNA, 33 bp, Homo sapien
accacaggcgtcaaccaaacagtatgaatgcct

SEQ ID NO: 693850 - DNA, 33 bp, Homo sapien
accacaggcgtcaacccaacagtatgaatgcct

SEQ ID NO: 693851 - DNA, 33 bp, Homo sapien
ccttcatttgtccaacaaaaccagatgggtctt

SEQ ID NO: 693852 - DNA, 33 bp, Homo sapien
ccttcatttgtccaactaaaccagatgggtctt

SEQ ID NO: 693853 - DNA, 33 bp, Homo sapien
tggtggttaccttccaactaaacagagagtgag

SEQ ID NO: 693854 - DNA, 33 bp, Homo sapien
tggtggttaccttccatctaaacagagagtgag

SEQ ID NO: 693855 - DNA, 33 bp, Homo sapien
ccctatttaccaaaaaaagctaaatatgtatac

SEQ ID NO: 693856 - DNA, 33 bp, Homo sapien
ccctatttaccaaaaagagctaaatatgtatac

SEQ ID NO: 693857 - DNA, 33 bp, Homo sapien
ataataacttggtttcaatctcagtagctttac

SEQ ID NO: 693858 - DNA, 33 bp, Homo sapien
ataataacttggtttcgatctcagtagctttac

SEQ ID NO: 693859 - DNA, 33 bp, Homo sapien
agagggtagaatgaccaggaagattaacaacat

SEQ ID NO: 693860 - DNA, 33 bp, Homo sapien
agagggtagaatgaccgggaagattaacaacat

SEQ ID NO: 693861 - DNA, 33 bp, Homo sapien
gttcaacagcttcctggagtggaatacaataat

SEQ ID NO: 693862 - DNA, 33 bp, Homo sapien
gttcaacagcttcctgtagtggaatacaataat

SEQ ID NO: 693863 - DNA, 33 bp, Homo sapien
tagatatcctccttagaacaacagaaaactatc

SEQ ID NO: 693864 - DNA, 33 bp, Homo sapien
tagatatcctccttagtacaacagaaaactatc

SEQ ID NO: 693865 - DNA, 33 bp, Homo sapien
aagactttcatttctaccatgattttgaatttg

SEQ ID NO: 693866 - DNA, 33 bp, Homo sapien
aagactttcatttctagcatgattttgaatttg

SEQ ID NO: 693867 - DNA, 33 bp, Homo sapien
ttgatgaggaagaagaaaattggataagatggg

SEQ ID NO: 693868 - DNA, 33 bp, Homo sapien
ttgatgaggaagaagacaattggataagatggg

SEQ ID NO: 693869 - DNA, 33 bp, Homo sapien
ggctcagagctctgaaattaaaaagcactgaaa

SEQ ID NO: 693870 - DNA, 33 bp, Homo sapien
ggctcagagctctgaagttaaaaagcactgaaa

SEQ ID NO: 693871 - DNA, 33 bp, Homo sapien
attagctctcacaaaaaaggaccaagaaaaatc

SEQ ID NO: 693872 - DNA, 33 bp, Homo sapien
attagctctcacaaaagaggaccaagaaaaatc

SEQ ID NO: 693873 - DNA, 33 bp, Homo sapien
agtttaaggagatttacgtgcaggcgcctcgtt

SEQ ID NO: 693874 - DNA, 33 bp, Homo sapien
agtttaaggagatttatgtgcaggcgcctcgtt

SEQ ID NO: 693875 - DNA, 33 bp, Homo sapien
gtaaatgccactctgaaaaccacccagtgtcag

SEQ ID NO: 693876 - DNA, 33 bp, Homo sapien
gtaaatgccactctgacaaccacccagtgtcag

SEQ ID NO: 693877 - DNA, 33 bp, Homo sapien
caggctcaatgccagcaaccgagagacagctcc

SEQ ID NO: 693878 - DNA, 33 bp, Homo sapien
caggctcaatgccagctaccgagagacagctcc

SEQ ID NO: 693879 - DNA, 33 bp, Homo sapien
tccacaacttgcatgaacgtagggaatgcagag

SEQ ID NO: 693880 - DNA, 33 bp, Homo sapien
tccacaacttgcatgagcgtagggaatgcagag

SEQ ID NO: 693881 - DNA, 33 bp, Homo sapien
ccacttagcctagcacaaagtgagtgctcaata

SEQ ID NO: 693882 - DNA, 33 bp, Homo sapien
ccacttagcctagcacgaagtgagtgctcaata

SEQ ID NO: 693883 - DNA, 33 bp, Homo sapien
aggactcagtcaatacacctttacataaagaga

SEQ ID NO: 693884 - DNA, 33 bp, Homo sapien
aggactcagtcaatactcctttacataaagaga

SEQ ID NO: 693885 - DNA, 33 bp, Homo sapien
tgtgttttgctgtttgaattcatatgtgtaaaa

SEQ ID NO: 693886 - DNA, 33 bp, Homo sapien
tgtgttttgctgtttgcattcatatgtgtaaaa

SEQ ID NO: 693887 - DNA, 33 bp, Homo sapien
gtggtcacctagatagaaaggggcataattcag

SEQ ID NO: 693888 - DNA, 33 bp, Homo sapien
gtggtcacctagataggaaggggcataattcag

SEQ ID NO: 693889 - DNA, 33 bp, Homo sapien
aaagtacagtggctagaatgtatcacaccctca

SEQ ID NO: 693890 - DNA, 33 bp, Homo sapien
aaagtacagtggctaggatgtatcacaccctca

SEQ ID NO: 693891 - DNA, 33 bp, Homo sapien
ctgagaacctaatcacagaaaatttgcagaaat

SEQ ID NO: 693892 - DNA, 33 bp, Homo sapien
ctgagaacctaatcacggaaaatttgcagaaat

SEQ ID NO: 693893 - DNA, 33 bp, Homo sapien
ctccatgaaaactcaaaagatttgattcaagtc

SEQ ID NO: 693894 - DNA, 33 bp, Homo sapien
ctccatgaaaactcaacagatttgattcaagtc

SEQ ID NO: 693895 - DNA, 33 bp, Homo sapien
atgtgctgctcttttgaagtgggcagccttgcc

SEQ ID NO: 693896 - DNA, 33 bp, Homo sapien
atgtgctgctcttttggagtgggcagccttgcc

SEQ ID NO: 693897 - DNA, 33 bp, Homo sapien
tacaaagaaaaagctacgtgcacagatggaagg

SEQ ID NO: 693898 - DNA, 33 bp, Homo sapien
tacaaagaaaaagctatgtgcacagatggaagg

SEQ ID NO: 693899 - DNA, 33 bp, Homo sapien
gaatttaagaagccaaacttcaaactatgacag

SEQ ID NO: 693900 - DNA, 33 bp, Homo sapien
gaatttaagaagccaaccttcaaactatgacag

SEQ ID NO: 693901 - DNA, 33 bp, Homo sapien
ctatcaagaatgctaactattacagcaaacaag

SEQ ID NO: 693902 - DNA, 33 bp, Homo sapien
ctatcaagaatgctaattattacagcaaacaag

SEQ ID NO: 693903 - DNA, 33 bp, Homo sapien
atctgtggaacagaaaaagtgattcctgatgtg

SEQ ID NO: 693904 - DNA, 33 bp, Homo sapien
atctgtggaacagaaacagtgattcctgatgtg

SEQ ID NO: 693905 - DNA, 33 bp, Homo sapien
caatttgaggtttgagaaaacatattcctatga

SEQ ID NO: 693906 - DNA, 33 bp, Homo sapien
caatttgaggtttgaggaaacatattcctatga

SEQ ID NO: 693907 - DNA, 33 bp, Homo sapien
ttcaccagttttgaagacacctacaatatagac

SEQ ID NO: 693908 - DNA, 33 bp, Homo sapien
ttcaccagttttgaaggcacctacaatatagac

SEQ ID NO: 693909 - DNA, 33 bp, Homo sapien
gtgaagtttaaatgaaatgacataaagtgatta

SEQ ID NO: 693910 - DNA, 33 bp, Homo sapien
gtgaagtttaaatgaagtgacataaagtgatta

SEQ ID NO: 693911 - DNA, 33 bp, Homo sapien
acctagagcctctcccaagaacacattctgaaa

SEQ ID NO: 693912 - DNA, 33 bp, Homo sapien
acctagagcctctcccgagaacacattctgaaa

SEQ ID NO: 693913 - DNA, 33 bp, Homo sapien
caaaaggagacagagaagtaacccagagattag

SEQ ID NO: 693914 - DNA, 33 bp, Homo sapien
caaaaggagacagagaggtaacccagagattag

SEQ ID NO: 693915 - DNA, 33 bp, Homo sapien
tgttgatgaatcgataacttgattttcaaaaca

SEQ ID NO: 693916 - DNA, 33 bp, Homo sapien
tgttgatgaatcgataccttgattttcaaaaca

SEQ ID NO: 693917 - DNA, 33 bp, Homo sapien
tcctccaactcaagtgcaaactccatgaggacg

SEQ ID NO: 693918 - DNA, 33 bp, Homo sapien
tcctccaactcaagtgtaaactccatgaggacg

SEQ ID NO: 693919 - DNA, 33 bp, Homo sapien
ggtaacatcgtcaacaagtttgaatttcaaaaa

SEQ ID NO: 693920 - DNA, 33 bp, Homo sapien
ggtaacatcgtcaacaggtttgaatttcaaaaa

SEQ ID NO: 693921 - DNA, 33 bp, Homo sapien
tctgattctaaagtcacagtctggcctgaggct

SEQ ID NO: 693922 - DNA, 33 bp, Homo sapien
tctgattctaaagtcatagtctggcctgaggct

SEQ ID NO: 693923 - DNA, 33 bp, Homo sapien
tctatttgcatctgtagagtccctggatgcttt

SEQ ID NO: 693924 - DNA, 33 bp, Homo sapien
tctatttgcatctgtatagtccctggatgcttt

SEQ ID NO: 693925 - DNA, 33 bp, Homo sapien
ctaattttgaaaaaaaacaagcgataatagggg

SEQ ID NO: 693926 - DNA, 33 bp, Homo sapien
ctaattttgaaaaaaaccaagcgataatagggg

SEQ ID NO: 693927 - DNA, 33 bp, Homo sapien
catgaaggttaattgcaagcttttactaaacgg

SEQ ID NO: 693928 - DNA, 33 bp, Homo sapien
catgaaggttaattgccagcttttactaaacgg

SEQ ID NO: 693929 - DNA, 33 bp, Homo sapien
tgtgaatgcccatggaaattccatattttactg

SEQ ID NO: 693930 - DNA, 33 bp, Homo sapien
tgtgaatgcccatggagattccatattttactg

SEQ ID NO: 693931 - DNA, 33 bp, Homo sapien
gtaggatagagtgctacgtgtgtgtctgcacag

SEQ ID NO: 693932 - DNA, 33 bp, Homo sapien
gtaggatagagtgctatgtgtgtgtctgcacag

SEQ ID NO: 693933 - DNA, 33 bp, Homo sapien
ggaggactcataatcacgacggaaggtgaaagg

SEQ ID NO: 693934 - DNA, 33 bp, Homo sapien
ggaggactcataatcatgacggaaggtgaaagg

SEQ ID NO: 693935 - DNA, 33 bp, Homo sapien
ggctggaaccagtagacgctagaaactgatgtg

SEQ ID NO: 693936 - DNA, 33 bp, Homo sapien
ggctggaaccagtagatgctagaaactgatgtg

SEQ ID NO: 693937 - DNA, 33 bp, Homo sapien
ctggaattaggtttctcaagcctcataattatc

SEQ ID NO: 693938 - DNA, 33 bp, Homo sapien
ctggaattaggtttctgaagcctcataattatc

SEQ ID NO: 693939 - DNA, 33 bp, Homo sapien
gctccagcggccttgacgcccccaacagttcaa

SEQ ID NO: 693940 - DNA, 33 bp, Homo sapien
gctccagcggccttgatgcccccaacagttcaa

SEQ ID NO: 693941 - DNA, 33 bp, Homo sapien
tgtttagatatcagcaatagtcagacatgctga

SEQ ID NO: 693942 - DNA, 33 bp, Homo sapien
tgtttagatatcagcagtagtcagacatgctga

SEQ ID NO: 693943 - DNA, 33 bp, Homo sapien
tcccctgagatctgaccggcctatggcttgttt

SEQ ID NO: 693944 - DNA, 33 bp, Homo sapien
tcccctgagatctgactggcctatggcttgttt

SEQ ID NO: 693945 - DNA, 33 bp, Homo sapien
gccatcacattcactcccttcttatgttgaaaa

SEQ ID NO: 693946 - DNA, 33 bp, Homo sapien
gccatcacattcactctcttcttatgttgaaaa

SEQ ID NO: 693947 - DNA, 33 bp, Homo sapien
aggactattggaagaaccaaaagagataatagg

SEQ ID NO: 693948 - DNA, 33 bp, Homo sapien
aggactattggaagaatcaaaagagataatagg

SEQ ID NO: 693949 - DNA, 33 bp, Homo sapien
taggacaagttgatcaccttattcccaggactc

SEQ ID NO: 693950 - DNA, 33 bp, Homo sapien
taggacaagttgatcatcttattcccaggactc

SEQ ID NO: 693951 - DNA, 33 bp, Homo sapien
actgctctggccaaagaaacctaagcagaattc

SEQ ID NO: 693952 - DNA, 33 bp, Homo sapien
actgctctggccaaaggaacctaagcagaattc

SEQ ID NO: 693953 - DNA, 33 bp, Homo sapien
tatgaacatgtcagaaagcaatcgaggcgacta

SEQ ID NO: 693954 - DNA, 33 bp, Homo sapien
tatgaacatgtcagaaggcaatcgaggcgacta

SEQ ID NO: 693955 - DNA, 33 bp, Homo sapien
cctggttcttgtgtaacctcgctgtgggagaac

SEQ ID NO: 693956 - DNA, 33 bp, Homo sapien
cctggttcttgtgtaatctcgctgtgggagaac

SEQ ID NO: 693957 - DNA, 33 bp, Homo sapien
gctgtttggacttccactaaattggggcaattt

SEQ ID NO: 693958 - DNA, 33 bp, Homo sapien
gctgtttggacttccagtaaattggggcaattt

SEQ ID NO: 693959 - DNA, 33 bp, Homo sapien
gagcttagcttgcaaaatccttcatgattggca

SEQ ID NO: 693960 - DNA, 33 bp, Homo sapien
gagcttagcttgcaaagtccttcatgattggca

SEQ ID NO: 693961 - DNA, 33 bp, Homo sapien
atatttgctaaggtcccgcaaaatgtaggagac

SEQ ID NO: 693962 - DNA, 33 bp, Homo sapien
atatttgctaaggtcctgcaaaatgtaggagac

SEQ ID NO: 693963 - DNA, 33 bp, Homo sapien
taccccttcacaaaatcaaaatgtgtctccaca

SEQ ID NO: 693964 - DNA, 33 bp, Homo sapien
taccccttcacaaaatgaaaatgtgtctccaca

SEQ ID NO: 693965 - DNA, 33 bp, Homo sapien
tcttctcctcacaagacctttaaaaagtgttga

SEQ ID NO: 693966 - DNA, 33 bp, Homo sapien
tcttctcctcacaagatctttaaaaagtgttga

SEQ ID NO: 693967 - DNA, 33 bp, Homo sapien
acatctgtctgcttcaatatttacctactctcg

SEQ ID NO: 693968 - DNA, 33 bp, Homo sapien
acatctgtctgcttcagtatttacctactctcg

SEQ ID NO: 693969 - DNA, 33 bp, Homo sapien
cttcttaaccactataaaaggctcctaacaggt

SEQ ID NO: 693970 - DNA, 33 bp, Homo sapien
cttcttaaccactatagaaggctcctaacaggt

SEQ ID NO: 693971 - DNA, 33 bp, Homo sapien
ttaatgctatttctccacaaggtcaatctattc

SEQ ID NO: 693972 - DNA, 33 bp, Homo sapien
ttaatgctatttctccgcaaggtcaatctattc

SEQ ID NO: 693973 - DNA, 33 bp, Homo sapien
agagggaggaaagatacgtagagaaagcttcct

SEQ ID NO: 693974 - DNA, 33 bp, Homo sapien
agagggaggaaagatatgtagagaaagcttcct

SEQ ID NO: 693975 - DNA, 33 bp, Homo sapien
aaaaattttaattaccaggcagaagtgctatct

SEQ ID NO: 693976 - DNA, 33 bp, Homo sapien
aaaaattttaattaccgggcagaagtgctatct

SEQ ID NO: 693977 - DNA, 33 bp, Homo sapien
tcctcttctttcaacaaatgttagcgttttgaa

SEQ ID NO: 693978 - DNA, 33 bp, Homo sapien
tcctcttctttcaacatatgttagcgttttgaa

SEQ ID NO: 693979 - DNA, 33 bp, Homo sapien
cttgaagttcagttgaaaaaatcaaagtcacct

SEQ ID NO: 693980 - DNA, 33 bp, Homo sapien
cttgaagttcagttgagaaaatcaaagtcacct

SEQ ID NO: 693981 - DNA, 33 bp, Homo sapien
tatacaattagcaccactcaactgtaaagtttt

SEQ ID NO: 693982 - DNA, 33 bp, Homo sapien
tatacaattagcaccattcaactgtaaagtttt

SEQ ID NO: 693983 - DNA, 33 bp, Homo sapien
cctctgctcttattcacgcttttctaaaaactg

SEQ ID NO: 693984 - DNA, 33 bp, Homo sapien
cctctgctcttattcatgcttttctaaaaactg

SEQ ID NO: 693985 - DNA, 33 bp, Homo sapien
gaaaaaaaaaatcctaactttgccattgattag

SEQ ID NO: 693986 - DNA, 33 bp, Homo sapien
gaaaaaaaaaatcctagctttgccattgattag

SEQ ID NO: 693987 - DNA, 33 bp, Homo sapien
ttttattggtgggggcaaagtaaatttatttca

SEQ ID NO: 693988 - DNA, 33 bp, Homo sapien
ttttattggtgggggcgaagtaaatttatttca

SEQ ID NO: 693989 - DNA, 33 bp, Homo sapien
tagccaattactaaataacagtgtcaatccctt

SEQ ID NO: 693990 - DNA, 33 bp, Homo sapien
tagccaattactaaatgacagtgtcaatccctt

SEQ ID NO: 693991 - DNA, 33 bp, Homo sapien
ataagccagaagaaccaaaaaaccatgcttagt

SEQ ID NO: 693992 - DNA, 33 bp, Homo sapien
ataagccagaagaacccaaaaaccatgcttagt

SEQ ID NO: 693993 - DNA, 33 bp, Homo sapien
ctctacaggatgtaaaattcccccacaagagac

SEQ ID NO: 693994 - DNA, 33 bp, Homo sapien
ctctacaggatgtaaatttcccccacaagagac

SEQ ID NO: 693995 - DNA, 33 bp, Homo sapien
ttttccagcaaactaactgaacccaaaaggagg

SEQ ID NO: 693996 - DNA, 33 bp, Homo sapien
ttttccagcaaactaattgaacccaaaaggagg

SEQ ID NO: 693997 - DNA, 33 bp, Homo sapien
ccaataataccaactccgagattagaagttaaa

SEQ ID NO: 693998 - DNA, 33 bp, Homo sapien
ccaataataccaactctgagattagaagttaaa

SEQ ID NO: 693999 - DNA, 33 bp, Homo sapien
gcctcacattgaaagacctacctgaacaaaact

SEQ ID NO: 694000 - DNA, 33 bp, Homo sapien
gcctcacattgaaagagctacctgaacaaaact

SEQ ID NO: 694001 - DNA, 33 bp, Homo sapien
gagtgctcctggcagacgggaccaaaggctctg

SEQ ID NO: 694002 - DNA, 33 bp, Homo sapien
gagtgctcctggcagatgggaccaaaggctctg

SEQ ID NO: 694003 - DNA, 33 bp, Homo sapien
aatgtattattgtatcaacatctcggttttaaa

SEQ ID NO: 694004 - DNA, 33 bp, Homo sapien
aatgtattattgtatcgacatctcggttttaaa

SEQ ID NO: 694005 - DNA, 33 bp, Homo sapien
ttgcctgcatcaagcacctgaggtacatcttgt

SEQ ID NO: 694006 - DNA, 33 bp, Homo sapien
ttgcctgcatcaagcatctgaggtacatcttgt

SEQ ID NO: 694007 - DNA, 33 bp, Homo sapien
tatttcccatctcacaataagtccacatcatta

SEQ ID NO: 694008 - DNA, 33 bp, Homo sapien
tatttcccatctcacagtaagtccacatcatta

SEQ ID NO: 694009 - DNA, 33 bp, Homo sapien
tggttttctgggatataagagagaggaaatagc

SEQ ID NO: 694010 - DNA, 33 bp, Homo sapien
tggttttctgggatatgagagagaggaaatagc

SEQ ID NO: 694011 - DNA, 33 bp, Homo sapien
aaaacatcttcaaaaggcacattttaattacta

SEQ ID NO: 694012 - DNA, 33 bp, Homo sapien
aaaacatcttcaaaagtcacattttaattacta

SEQ ID NO: 694013 - DNA, 33 bp, Homo sapien
aataccaacaagatcacgtggcaatagcagctt

SEQ ID NO: 694014 - DNA, 33 bp, Homo sapien
aataccaacaagatcatgtggcaatagcagctt

SEQ ID NO: 694015 - DNA, 33 bp, Homo sapien
agagtctgtgtgttcacggcacttttggatctt

SEQ ID NO: 694016 - DNA, 33 bp, Homo sapien
agagtctgtgtgttcatggcacttttggatctt

SEQ ID NO: 694017 - DNA, 33 bp, Homo sapien
gatcaaaaagctgttaaaattacttcagcctag

SEQ ID NO: 694018 - DNA, 33 bp, Homo sapien
gatcaaaaagctgttataattacttcagcctag

SEQ ID NO: 694019 - DNA, 33 bp, Homo sapien
tttggggcagcaagacaaaaggcagcaagaaga

SEQ ID NO: 694020 - DNA, 33 bp, Homo sapien
tttggggcagcaagacgaaaggcagcaagaaga

SEQ ID NO: 694021 - DNA, 33 bp, Homo sapien
agattcagccatgcctcaagttttcagttacac

SEQ ID NO: 694022 - DNA, 33 bp, Homo sapien
agattcagccatgcctgaagttttcagttacac

SEQ ID NO: 694023 - DNA, 33 bp, Homo sapien
cctgggctgagtcacacgtctagtggttggctc

SEQ ID NO: 694024 - DNA, 33 bp, Homo sapien
cctgggctgagtcacatgtctagtggttggctc

SEQ ID NO: 694025 - DNA, 33 bp, Homo sapien
gaggttgcctcacagaatcagcattatttaaaa

SEQ ID NO: 694026 - DNA, 33 bp, Homo sapien
gaggttgcctcacagattcagcattatttaaaa

SEQ ID NO: 694027 - DNA, 33 bp, Homo sapien
gagaaagaggaaatacagactcagtaactctgg

SEQ ID NO: 694028 - DNA, 33 bp, Homo sapien
gagaaagaggaaatacggactcagtaactctgg

SEQ ID NO: 694029 - DNA, 33 bp, Homo sapien
aaaaagtgttctggacaacttgaaaaaggggac

SEQ ID NO: 694030 - DNA, 33 bp, Homo sapien
aaaaagtgttctggactacttgaaaaaggggac

SEQ ID NO: 694031 - DNA, 33 bp, Homo sapien
taactgctgacaggcacgaggtttccttttgag

SEQ ID NO: 694032 - DNA, 33 bp, Homo sapien
taactgctgacaggcatgaggtttccttttgag

SEQ ID NO: 694033 - DNA, 33 bp, Homo sapien
atgtgaacataatatactactcaaacaacttag

SEQ ID NO: 694034 - DNA, 33 bp, Homo sapien
atgtgaacataatatattactcaaacaacttag

SEQ ID NO: 694035 - DNA, 33 bp, Homo sapien
aaatttggtatatccgcatagtagaatattatt

SEQ ID NO: 694036 - DNA, 33 bp, Homo sapien
aaatttggtatatccgtatagtagaatattatt

SEQ ID NO: 694037 - DNA, 33 bp, Homo sapien
tctatattatatggaaaactgagaaatcagcaa

SEQ ID NO: 694038 - DNA, 33 bp, Homo sapien
tctatattatatggaagactgagaaatcagcaa

SEQ ID NO: 694039 - DNA, 33 bp, Homo sapien
tctgctctctcttgtacgtacttaatatgggac

SEQ ID NO: 694040 - DNA, 33 bp, Homo sapien
tctgctctctcttgtatgtacttaatatgggac

SEQ ID NO: 694041 - DNA, 33 bp, Homo sapien
tcagcctgttaggacactatgtttttcaagatt

SEQ ID NO: 694042 - DNA, 33 bp, Homo sapien
tcagcctgttaggacagtatgtttttcaagatt

SEQ ID NO: 694043 - DNA, 33 bp, Homo sapien
aattaggttatgcaaaatcaagcaatcaaccac

SEQ ID NO: 694044 - DNA, 33 bp, Homo sapien
aattaggttatgcaaagtcaagcaatcaaccac

SEQ ID NO: 694045 - DNA, 33 bp, Homo sapien
aaaataaccaaaatataaggtagaaagtggtta

SEQ ID NO: 694046 - DNA, 33 bp, Homo sapien
aaaataaccaaaatatgaggtagaaagtggtta

SEQ ID NO: 694047 - DNA, 33 bp, Homo sapien
tagtatccagtggtatcaagcagttaaaccagg

SEQ ID NO: 694048 - DNA, 33 bp, Homo sapien
tagtatccagtggtatgaagcagttaaaccagg

SEQ ID NO: 694049 - DNA, 33 bp, Homo sapien
taccatttgacccatacgatgcagaatggattt

SEQ ID NO: 694050 - DNA, 33 bp, Homo sapien
taccatttgacccatatgatgcagaatggattt

SEQ ID NO: 694051 - DNA, 33 bp, Homo sapien
gtgaccagtcatgaataagcaataatattttga

SEQ ID NO: 694052 - DNA, 33 bp, Homo sapien
gtgaccagtcatgaatgagcaataatattttga

SEQ ID NO: 694053 - DNA, 33 bp, Homo sapien
aacctcaatttgccaaccagtaattttaaagtt

SEQ ID NO: 694054 - DNA, 33 bp, Homo sapien
aacctcaatttgccaatcagtaattttaaagtt

SEQ ID NO: 694055 - DNA, 33 bp, Homo sapien
ggccctaaactcataactatctatgactccctt

SEQ ID NO: 694056 - DNA, 33 bp, Homo sapien
ggccctaaactcataattatctatgactccctt

SEQ ID NO: 694057 - DNA, 33 bp, Homo sapien
ctgatgtggcttaagaacgtaggccctgtgcca

SEQ ID NO: 694058 - DNA, 33 bp, Homo sapien
ctgatgtggcttaagagcgtaggccctgtgcca

SEQ ID NO: 694059 - DNA, 33 bp, Homo sapien
atggacagcattaaaactagcctcatgagctag

SEQ ID NO: 694060 - DNA, 33 bp, Homo sapien
atggacagcattaaaattagcctcatgagctag

SEQ ID NO: 694061 - DNA, 33 bp, Homo sapien
agatcgacttagcaaacgagttgtagaaagtgg

SEQ ID NO: 694062 - DNA, 33 bp, Homo sapien
agatcgacttagcaaatgagttgtagaaagtgg

SEQ ID NO: 694063 - DNA, 33 bp, Homo sapien
acaatctcacttactacaaacttagactcacca

SEQ ID NO: 694064 - DNA, 33 bp, Homo sapien
acaatctcacttactataaacttagactcacca

SEQ ID NO: 694065 - DNA, 33 bp, Homo sapien
ggatcagactcagttacggtggtaatataggta

SEQ ID NO: 694066 - DNA, 33 bp, Homo sapien
ggatcagactcagttatggtggtaatataggta

SEQ ID NO: 694067 - DNA, 33 bp, Homo sapien
attataggaaaccgtacgacataaactgcaggg

SEQ ID NO: 694068 - DNA, 33 bp, Homo sapien
attataggaaaccgtatgacataaactgcaggg

SEQ ID NO: 694069 - DNA, 33 bp, Homo sapien
tgaatctacttggctccagtgactttccccttc

SEQ ID NO: 694070 - DNA, 33 bp, Homo sapien
tgaatctacttggctctagtgactttccccttc

SEQ ID NO: 694071 - DNA, 33 bp, Homo sapien
gggatgtgaggatgcccatgtggagctaactag

SEQ ID NO: 694072 - DNA, 33 bp, Homo sapien
gggatgtgaggatgcctatgtggagctaactag

SEQ ID NO: 694073 - DNA, 33 bp, Homo sapien
gacacagggttttcaacgagaccctgagaggcc

SEQ ID NO: 694074 - DNA, 33 bp, Homo sapien
gacacagggttttcaatgagaccctgagaggcc

SEQ ID NO: 694075 - DNA, 33 bp, Homo sapien
acaggagacacagtcccaaaatagtgtcagcag

SEQ ID NO: 694076 - DNA, 33 bp, Homo sapien
acaggagacacagtccgaaaatagtgtcagcag

SEQ ID NO: 694077 - DNA, 33 bp, Homo sapien
gaacttcctataagtacacttatccgcactgta

SEQ ID NO: 694078 - DNA, 33 bp, Homo sapien
gaacttcctataagtagacttatccgcactgta

SEQ ID NO: 694079 - DNA, 33 bp, Homo sapien
aacagtttttttcaaaatgattgcgccatttac

SEQ ID NO: 694080 - DNA, 33 bp, Homo sapien
aacagtttttttcaaagtgattgcgccatttac

SEQ ID NO: 694081 - DNA, 33 bp, Homo sapien
agaactttgggattcaccattttactgaaaact

SEQ ID NO: 694082 - DNA, 33 bp, Homo sapien
agaactttgggattcatcattttactgaaaact

SEQ ID NO: 694083 - DNA, 33 bp, Homo sapien
aaaaaaaaccaccttagcatccgagtagtgttg

SEQ ID NO: 694084 - DNA, 33 bp, Homo sapien
aaaaaaaaccaccttatcatccgagtagtgttg

SEQ ID NO: 694085 - DNA, 33 bp, Homo sapien
aagatggcagagccaactggaaaccagatcacg

SEQ ID NO: 694086 - DNA, 33 bp, Homo sapien
aagatggcagagccaattggaaaccagatcacg

SEQ ID NO: 694087 - DNA, 33 bp, Homo sapien
gttgtggggagtactaaccaggtattttgtaga

SEQ ID NO: 694088 - DNA, 33 bp, Homo sapien
gttgtggggagtactagccaggtattttgtaga

SEQ ID NO: 694089 - DNA, 33 bp, Homo sapien
caaatcgtaactgagggcattctacaaaatacc

SEQ ID NO: 694090 - DNA, 33 bp, Homo sapien
caaatcgtaactgaggtcattctacaaaatacc

SEQ ID NO: 694091 - DNA, 33 bp, Homo sapien
atacacagggcaccaaatcttactgaaaaaaaa

SEQ ID NO: 694092 - DNA, 33 bp, Homo sapien
atacacagggcaccaagtcttactgaaaaaaaa

SEQ ID NO: 694093 - DNA, 33 bp, Homo sapien
ctctgcattcaacaacacagcttagagcaggta

SEQ ID NO: 694094 - DNA, 33 bp, Homo sapien
ctctgcattcaacaacccagcttagagcaggta

SEQ ID NO: 694095 - DNA, 33 bp, Homo sapien
atgaggagcatggggaatatacctgctctaagc

SEQ ID NO: 694096 - DNA, 33 bp, Homo sapien
atgaggagcatggggattatacctgctctaagc

SEQ ID NO: 694097 - DNA, 33 bp, Homo sapien
taccactacctagaaacgtgtcttgtcaaggat

SEQ ID NO: 694098 - DNA, 33 bp, Homo sapien
taccactacctagaaatgtgtcttgtcaaggat

SEQ ID NO: 694099 - DNA, 33 bp, Homo sapien
ttgctcttggttggaccctaaatcacattagga

SEQ ID NO: 694100 - DNA, 33 bp, Homo sapien
ttgctcttggttggactctaaatcacattagga

SEQ ID NO: 694101 - DNA, 33 bp, Homo sapien
tcctccaaataccatcacattggggtttaggag

SEQ ID NO: 694102 - DNA, 33 bp, Homo sapien
tcctccaaataccatcgcattggggtttaggag

SEQ ID NO: 694103 - DNA, 33 bp, Homo sapien
ctctgatacctgctagcccagggcacaacagga

SEQ ID NO: 694104 - DNA, 33 bp, Homo sapien
ctctgatacctgctagtccagggcacaacagga

SEQ ID NO: 694105 - DNA, 33 bp, Homo sapien
ttttgaccaaaagtcaatccttcttctaggcca

SEQ ID NO: 694106 - DNA, 33 bp, Homo sapien
ttttgaccaaaagtcagtccttcttctaggcca

SEQ ID NO: 694107 - DNA, 33 bp, Homo sapien
gtgatcattcagcaaaagttggtgcctcagggc

SEQ ID NO: 694108 - DNA, 33 bp, Homo sapien
gtgatcattcagcaaaggttggtgcctcagggc

SEQ ID NO: 694109 - DNA, 33 bp, Homo sapien
caggaagccccaaaaaataaacacagagtttga

SEQ ID NO: 694110 - DNA, 33 bp, Homo sapien
caggaagccccaaaaagtaaacacagagtttga

SEQ ID NO: 694111 - DNA, 33 bp, Homo sapien
gagacaaagatagcagaccagactatttttgag

SEQ ID NO: 694112 - DNA, 33 bp, Homo sapien
gagacaaagatagcaggccagactatttttgag

SEQ ID NO: 694113 - DNA, 33 bp, Homo sapien
agtagaaaggtcctgaagtgaagatggagaatg

SEQ ID NO: 694114 - DNA, 33 bp, Homo sapien
agtagaaaggtcctgaggtgaagatggagaatg

SEQ ID NO: 694115 - DNA, 33 bp, Homo sapien
aaagagatcaagattacagaggttctgttatgt

SEQ ID NO: 694116 - DNA, 33 bp, Homo sapien
aaagagatcaagattatagaggttctgttatgt

SEQ ID NO: 694117 - DNA, 33 bp, Homo sapien
acaagcagagaagccaagaggtttgtgtagaaa

SEQ ID NO: 694118 - DNA, 33 bp, Homo sapien
acaagcagagaagccaggaggtttgtgtagaaa

SEQ ID NO: 694119 - DNA, 33 bp, Homo sapien
agacaaatttgcctaaggaataaatgagtgatt

SEQ ID NO: 694120 - DNA, 33 bp, Homo sapien
agacaaatttgcctaatgaataaatgagtgatt

SEQ ID NO: 694121 - DNA, 33 bp, Homo sapien
ccaccctggtaccttcactcagatttattatgt

SEQ ID NO: 694122 - DNA, 33 bp, Homo sapien
ccaccctggtaccttcgctcagatttattatgt

SEQ ID NO: 694123 - DNA, 33 bp, Homo sapien
tttgcgccatgtcgtccactacgttgctcttgg

SEQ ID NO: 694124 - DNA, 33 bp, Homo sapien
tttgcgccatgtcgtctactacgttgctcttgg

SEQ ID NO: 694125 - DNA, 33 bp, Homo sapien
caacacgctggtactgaacaacacgtgcgagga

SEQ ID NO: 694126 - DNA, 33 bp, Homo sapien
caacacgctggtactgcacaacacgtgcgagga

SEQ ID NO: 694127 - DNA, 33 bp, Homo sapien
ctcaagtcaggagccaactgaagtgtgtgagat

SEQ ID NO: 694128 - DNA, 33 bp, Homo sapien
ctcaagtcaggagccagctgaagtgtgtgagat

SEQ ID NO: 694129 - DNA, 33 bp, Homo sapien
agaccttcattaaccacagtatccacaggtcca

SEQ ID NO: 694130 - DNA, 33 bp, Homo sapien
agaccttcattaaccatagtatccacaggtcca

SEQ ID NO: 694131 - DNA, 33 bp, Homo sapien
ggattcacttatatatcaccttgtaccacaggc

SEQ ID NO: 694132 - DNA, 33 bp, Homo sapien
ggattcacttatatattaccttgtaccacaggc

SEQ ID NO: 694133 - DNA, 33 bp, Homo sapien
ttccttgcgaatgaaactgaatctgtgaaggtg

SEQ ID NO: 694134 - DNA, 33 bp, Homo sapien
ttccttgcgaatgaaattgaatctgtgaaggtg

SEQ ID NO: 694135 - DNA, 33 bp, Homo sapien
gatagaagtttctaacagcaaaagcattttctg

SEQ ID NO: 694136 - DNA, 33 bp, Homo sapien
gatagaagtttctaacggcaaaagcattttctg

SEQ ID NO: 694137 - DNA, 33 bp, Homo sapien
taacttgccacagtaaaatttgcatttcttagg

SEQ ID NO: 694138 - DNA, 33 bp, Homo sapien
taacttgccacagtaagatttgcatttcttagg

SEQ ID NO: 694139 - DNA, 33 bp, Homo sapien
ggaggctggggcttgacatcacttaaacctggg

SEQ ID NO: 694140 - DNA, 33 bp, Homo sapien
ggaggctggggcttgagatcacttaaacctggg

SEQ ID NO: 694141 - DNA, 33 bp, Homo sapien
tatgccattcagacatcaaggacaagggttttc

SEQ ID NO: 694142 - DNA, 33 bp, Homo sapien
tatgccattcagacattaaggacaagggttttc

SEQ ID NO: 694143 - DNA, 33 bp, Homo sapien
acgattctatgttagccatgaaaggtcatctag

SEQ ID NO: 694144 - DNA, 33 bp, Homo sapien
acgattctatgttagctatgaaaggtcatctag

SEQ ID NO: 694145 - DNA, 33 bp, Homo sapien
gatgggatcgattttaagactgggcagcagcca

SEQ ID NO: 694146 - DNA, 33 bp, Homo sapien
gatgggatcgattttaggactgggcagcagcca

SEQ ID NO: 694147 - DNA, 33 bp, Homo sapien
tcttcccaagttcagccacaacatggataatgg

SEQ ID NO: 694148 - DNA, 33 bp, Homo sapien
tcttcccaagttcagctacaacatggataatgg

SEQ ID NO: 694149 - DNA, 33 bp, Homo sapien
gccacatctaaccccactccaggtcgattgaat

SEQ ID NO: 694150 - DNA, 33 bp, Homo sapien
gccacatctaaccccattccaggtcgattgaat

SEQ ID NO: 694151 - DNA, 33 bp, Homo sapien
tgtatgtggcaaccctaaatgaagttgaagatt

SEQ ID NO: 694152 - DNA, 33 bp, Homo sapien
tgtatgtggcaaccctcaatgaagttgaagatt

SEQ ID NO: 694153 - DNA, 33 bp, Homo sapien
acgtccagataccctcacgccagataccctggt

SEQ ID NO: 694154 - DNA, 33 bp, Homo sapien
acgtccagataccctcgcgccagataccctggt

SEQ ID NO: 694155 - DNA, 33 bp, Homo sapien
agagaagtgcatacgccgaagaggcattgtgga

SEQ ID NO: 694156 - DNA, 33 bp, Homo sapien
agagaagtgcatacgctgaagaggcattgtgga

SEQ ID NO: 694157 - DNA, 33 bp, Homo sapien
gacataattttgcaacagcgatttcatgagcag

SEQ ID NO: 694158 - DNA, 33 bp, Homo sapien
gacataattttgcaacggcgatttcatgagcag

SEQ ID NO: 694159 - DNA, 33 bp, Homo sapien
agactcctctctgggcaatagttgatgtagaag

SEQ ID NO: 694160 - DNA, 33 bp, Homo sapien
agactcctctctgggcgatagttgatgtagaag

SEQ ID NO: 694161 - DNA, 33 bp, Homo sapien
ccaaaaagccttcatcaaaagagtctcttggag

SEQ ID NO: 694162 - DNA, 33 bp, Homo sapien
ccaaaaagccttcatcgaaagagtctcttggag

SEQ ID NO: 694163 - DNA, 33 bp, Homo sapien
aatatatgaatgaataacacaatacttattaaa

SEQ ID NO: 694164 - DNA, 33 bp, Homo sapien
aatatatgaatgaatagcacaatacttattaaa

SEQ ID NO: 694165 - DNA, 33 bp, Homo sapien
taaatggataaaggcaagaatgagcaatgcgca

SEQ ID NO: 694166 - DNA, 33 bp, Homo sapien
taaatggataaaggcaggaatgagcaatgcgca

SEQ ID NO: 694167 - DNA, 33 bp, Homo sapien
agtctatatgaagacaccaatgtgacgaaatct

SEQ ID NO: 694168 - DNA, 33 bp, Homo sapien
agtctatatgaagacatcaatgtgacgaaatct

SEQ ID NO: 694169 - DNA, 33 bp, Homo sapien
gtagtcactggcagaacaaaccaaaccaagaac

SEQ ID NO: 694170 - DNA, 33 bp, Homo sapien
gtagtcactggcagaagaaaccaaaccaagaac

SEQ ID NO: 694171 - DNA, 33 bp, Homo sapien
ctctccaagagaagcaaggaagtgaccttaagg

SEQ ID NO: 694172 - DNA, 33 bp, Homo sapien
ctctccaagagaagcagggaagtgaccttaagg

SEQ ID NO: 694173 - DNA, 33 bp, Homo sapien
tggtgagtatgtgatccaaccctagccatacct

SEQ ID NO: 694174 - DNA, 33 bp, Homo sapien
tggtgagtatgtgatctaaccctagccatacct

SEQ ID NO: 694175 - DNA, 33 bp, Homo sapien
catgggttgagctgaccgaaagtggaagtttaa

SEQ ID NO: 694176 - DNA, 33 bp, Homo sapien
catgggttgagctgacggaaagtggaagtttaa

SEQ ID NO: 694177 - DNA, 33 bp, Homo sapien
ggatgtctaatcctgcacctagctgggttggtc

SEQ ID NO: 694178 - DNA, 33 bp, Homo sapien
ggatgtctaatcctgcgcctagctgggttggtc

SEQ ID NO: 694179 - DNA, 33 bp, Homo sapien
ctggcctgaagctaataattaaataaggcaccc

SEQ ID NO: 694180 - DNA, 33 bp, Homo sapien
ctggcctgaagctaatgattaaataaggcaccc

SEQ ID NO: 694181 - DNA, 33 bp, Homo sapien
tctcaacccaaagctaagttttatagaagagga

SEQ ID NO: 694182 - DNA, 33 bp, Homo sapien
tctcaacccaaagctatgttttatagaagagga

SEQ ID NO: 694183 - DNA, 33 bp, Homo sapien
ttgggcctggaagccaatctgtctcttttgggt

SEQ ID NO: 694184 - DNA, 33 bp, Homo sapien
ttgggcctggaagccagtctgtctcttttgggt

SEQ ID NO: 694185 - DNA, 33 bp, Homo sapien
ccattaatgcaatctcagaagctgatgactaac

SEQ ID NO: 694186 - DNA, 33 bp, Homo sapien
ccattaatgcaatctcggaagctgatgactaac

SEQ ID NO: 694187 - DNA, 33 bp, Homo sapien
gtcctttgtttgaagcactgatcaacttgtcct

SEQ ID NO: 694188 - DNA, 33 bp, Homo sapien
gtcctttgtttgaagcgctgatcaacttgtcct

SEQ ID NO: 694189 - DNA, 33 bp, Homo sapien
ctacgataaactgatcgaaaatcacgtattggc

SEQ ID NO: 694190 - DNA, 33 bp, Homo sapien
ctacgataaactgatctaaaatcacgtattggc

SEQ ID NO: 694191 - DNA, 33 bp, Homo sapien
gctgtttactgctctgcaagctatcagatggcc

SEQ ID NO: 694192 - DNA, 33 bp, Homo sapien
gctgtttactgctctgtaagctatcagatggcc

SEQ ID NO: 694193 - DNA, 33 bp, Homo sapien
tcagcccccatacctaaggctatcttgcactta

SEQ ID NO: 694194 - DNA, 33 bp, Homo sapien
tcagcccccatacctatggctatcttgcactta

SEQ ID NO: 694195 - DNA, 33 bp, Homo sapien
aaggtctccttggccaataagagtctgttcagt

SEQ ID NO: 694196 - DNA, 33 bp, Homo sapien
aaggtctccttggccagtaagagtctgttcagt

SEQ ID NO: 694197 - DNA, 33 bp, Homo sapien
tttgccttcaaagacactcaggttgtggctgac

SEQ ID NO: 694198 - DNA, 33 bp, Homo sapien
tttgccttcaaagacattcaggttgtggctgac

SEQ ID NO: 694199 - DNA, 33 bp, Homo sapien
gtcatttggagtctcaataaagtatccaacaaa

SEQ ID NO: 694200 - DNA, 33 bp, Homo sapien
gtcatttggagtctcagtaaagtatccaacaaa

SEQ ID NO: 694201 - DNA, 33 bp, Homo sapien
agggatgagactttgaatagactgggaggcagg

SEQ ID NO: 694202 - DNA, 33 bp, Homo sapien
agggatgagactttgagtagactgggaggcagg

SEQ ID NO: 694203 - DNA, 33 bp, Homo sapien
ctcctggcttgccagactctctaggtgtggttg

SEQ ID NO: 694204 - DNA, 33 bp, Homo sapien
ctcctggcttgccagagtctctaggtgtggttg

SEQ ID NO: 694205 - DNA, 33 bp, Homo sapien
atcaaagtgggtttcaagatcatctaatccaag

SEQ ID NO: 694206 - DNA, 33 bp, Homo sapien
atcaaagtgggtttcacgatcatctaatccaag

SEQ ID NO: 694207 - DNA, 33 bp, Homo sapien
tctttgtctctgctcacctggaatgtgtgctaa

SEQ ID NO: 694208 - DNA, 33 bp, Homo sapien
tctttgtctctgctcatctggaatgtgtgctaa

SEQ ID NO: 694209 - DNA, 33 bp, Homo sapien
cgtatgagaaaagaaacgtttgacaccactagc

SEQ ID NO: 694210 - DNA, 33 bp, Homo sapien
cgtatgagaaaagaaatgtttgacaccactagc

SEQ ID NO: 694211 - DNA, 33 bp, Homo sapien
atatccacatcatttaagcaataaagcagccaa

SEQ ID NO: 694212 - DNA, 33 bp, Homo sapien
atatccacatcatttaggcaataaagcagccaa

SEQ ID NO: 694213 - DNA, 33 bp, Homo sapien
ggcttaaagcatctcaccaccttgtctctggcg

SEQ ID NO: 694214 - DNA, 33 bp, Homo sapien
ggcttaaagcatctcatcaccttgtctctggcg

SEQ ID NO: 694215 - DNA, 33 bp, Homo sapien
ggaaacaaatgggaaaagggcaccacagagtta

SEQ ID NO: 694216 - DNA, 33 bp, Homo sapien
ggaaacaaatgggaaacgggcaccacagagtta

SEQ ID NO: 694217 - DNA, 33 bp, Homo sapien
cgtgtttcgttcttgacggcaggtacccagagc

SEQ ID NO: 694218 - DNA, 33 bp, Homo sapien
cgtgtttcgttcttgatggcaggtacccagagc

SEQ ID NO: 694219 - DNA, 33 bp, Homo sapien
aaatgacttgaagatacgctgtcagtaaatgtt

SEQ ID NO: 694220 - DNA, 33 bp, Homo sapien
aaatgacttgaagatatgctgtcagtaaatgtt

SEQ ID NO: 694221 - DNA, 33 bp, Homo sapien
ctacaatctcatgaacactttgtcaatttcttc

SEQ ID NO: 694222 - DNA, 33 bp, Homo sapien
ctacaatctcatgaacgctttgtcaatttcttc

SEQ ID NO: 694223 - DNA, 33 bp, Homo sapien
tccgggactcaggaaaacatgctgtcattcagg

SEQ ID NO: 694224 - DNA, 33 bp, Homo sapien
tccgggactcaggaaagcatgctgtcattcagg

SEQ ID NO: 694225 - DNA, 33 bp, Homo sapien
tgatggtcttcaccaaattagctctatcgtccc

SEQ ID NO: 694226 - DNA, 33 bp, Homo sapien
tgatggtcttcaccaagttagctctatcgtccc

SEQ ID NO: 694227 - DNA, 33 bp, Homo sapien
ctattcagtgcctacaataagaattccaagcat

SEQ ID NO: 694228 - DNA, 33 bp, Homo sapien
ctattcagtgcctacagtaagaattccaagcat

SEQ ID NO: 694229 - DNA, 33 bp, Homo sapien
ttggggtcttctggtgacaaattagaacagcac

SEQ ID NO: 694230 - DNA, 33 bp, Homo sapien
ttggggtcttctggtgccaaattagaacagcac

SEQ ID NO: 694231 - DNA, 33 bp, Homo sapien
cacgtctttgagacacaccctaacacttactct

SEQ ID NO: 694232 - DNA, 33 bp, Homo sapien
cacgtctttgagacacgccctaacacttactct

SEQ ID NO: 694233 - DNA, 33 bp, Homo sapien
acagtaccaagaaatcaccacagtcattatttc

SEQ ID NO: 694234 - DNA, 33 bp, Homo sapien
acagtaccaagaaatcgccacagtcattatttc

SEQ ID NO: 694235 - DNA, 33 bp, Homo sapien
aagttttagggtgcatcagagtcgtgaggaagg

SEQ ID NO: 694236 - DNA, 33 bp, Homo sapien
aagttttagggtgcattagagtcgtgaggaagg

SEQ ID NO: 694237 - DNA, 33 bp, Homo sapien
aatagaaggcaagaggccaacaccatggcttgg

SEQ ID NO: 694238 - DNA, 33 bp, Homo sapien
aatagaaggcaagaggtcaacaccatggcttgg

SEQ ID NO: 694239 - DNA, 33 bp, Homo sapien
agtaacttatgttccaaaatcctgcagaaacct

SEQ ID NO: 694240 - DNA, 33 bp, Homo sapien
agtaacttatgttccacaatcctgcagaaacct

SEQ ID NO: 694241 - DNA, 33 bp, Homo sapien
aggatctgggacaaagccaccaaatcttttgtt

SEQ ID NO: 694242 - DNA, 33 bp, Homo sapien
aggatctgggacaaaggcaccaaatcttttgtt

SEQ ID NO: 694243 - DNA, 33 bp, Homo sapien
gctggagagacgcaaaagtaagagctgattctg

SEQ ID NO: 694244 - DNA, 33 bp, Homo sapien
gctggagagacgcaaaggtaagagctgattctg

SEQ ID NO: 694245 - DNA, 33 bp, Homo sapien
accagtaatgcataaacaccacactacgcagaa

SEQ ID NO: 694246 - DNA, 33 bp, Homo sapien
accagtaatgcataaataccacactacgcagaa

SEQ ID NO: 694247 - DNA, 33 bp, Homo sapien
gaaccattcagaaataaatccattataggtctg

SEQ ID NO: 694248 - DNA, 33 bp, Homo sapien
gaaccattcagaaatagatccattataggtctg

SEQ ID NO: 694249 - DNA, 33 bp, Homo sapien
aacattaattttgctagccttcactttctaaaa

SEQ ID NO: 694250 - DNA, 33 bp, Homo sapien
aacattaattttgctatccttcactttctaaaa

SEQ ID NO: 694251 - DNA, 33 bp, Homo sapien
cctctaaagtactgcgcagaattctaaagtgtc

SEQ ID NO: 694252 - DNA, 33 bp, Homo sapien
cctctaaagtactgcgtagaattctaaagtgtc

SEQ ID NO: 694253 - DNA, 33 bp, Homo sapien
acatcaggtttctagaaaagtactcagtgtaat

SEQ ID NO: 694254 - DNA, 33 bp, Homo sapien
acatcaggtttctagacaagtactcagtgtaat

SEQ ID NO: 694255 - DNA, 33 bp, Homo sapien
acatgagttaaaattacggggtgcagagcatag

SEQ ID NO: 694256 - DNA, 33 bp, Homo sapien
acatgagttaaaattatggggtgcagagcatag

SEQ ID NO: 694257 - DNA, 33 bp, Homo sapien
catttgttactgctatgactgcaatgaagtcgg

SEQ ID NO: 694258 - DNA, 33 bp, Homo sapien
catttgttactgctattactgcaatgaagtcgg

SEQ ID NO: 694259 - DNA, 33 bp, Homo sapien
cagcaatgctgaataaactaagccggttgcaag

SEQ ID NO: 694260 - DNA, 33 bp, Homo sapien
cagcaatgctgaataagctaagccggttgcaag

SEQ ID NO: 694261 - DNA, 33 bp, Homo sapien
ggtagctagaaacaaacaaaactgtgctcagcc

SEQ ID NO: 694262 - DNA, 33 bp, Homo sapien
ggtagctagaaacaaagaaaactgtgctcagcc

SEQ ID NO: 694263 - DNA, 33 bp, Homo sapien
tccatgaagtcccacccaaggctaagcaacaag

SEQ ID NO: 694264 - DNA, 33 bp, Homo sapien
tccatgaagtcccaccgaaggctaagcaacaag

SEQ ID NO: 694265 - DNA, 33 bp, Homo sapien
tgtgatcgtgttaggcaattctagagactagag

SEQ ID NO: 694266 - DNA, 33 bp, Homo sapien
tgtgatcgtgttaggcgattctagagactagag

SEQ ID NO: 694267 - DNA, 33 bp, Homo sapien
ctgtaccattgaacaaatcctccttcccctctc

SEQ ID NO: 694268 - DNA, 33 bp, Homo sapien
ctgtaccattgaacaactcctccttcccctctc

SEQ ID NO: 694269 - DNA, 33 bp, Homo sapien
ttctccactggctgcacgtggggaaaataggaa

SEQ ID NO: 694270 - DNA, 33 bp, Homo sapien
ttctccactggctgcatgtggggaaaataggaa

SEQ ID NO: 694271 - DNA, 33 bp, Homo sapien
ccttcaggccgagtccaaaaacaggaaaagatg

SEQ ID NO: 694272 - DNA, 33 bp, Homo sapien
ccttcaggccgagtccgaaaacaggaaaagatg

SEQ ID NO: 694273 - DNA, 33 bp, Homo sapien
ctttgcactcacattccaatactgcctcagcca

SEQ ID NO: 694274 - DNA, 33 bp, Homo sapien
ctttgcactcacattctaatactgcctcagcca

SEQ ID NO: 694275 - DNA, 33 bp, Homo sapien
aactcctgagctcagacgattcacgcaccttgg

SEQ ID NO: 694276 - DNA, 33 bp, Homo sapien
aactcctgagctcagatgattcacgcaccttgg

SEQ ID NO: 694277 - DNA, 33 bp, Homo sapien
taaagtcagttctcagacggttaacgagggcca

SEQ ID NO: 694278 - DNA, 33 bp, Homo sapien
taaagtcagttctcaggcggttaacgagggcca

SEQ ID NO: 694279 - DNA, 33 bp, Homo sapien
atatgaaggcgtaggacattgctttataaacac

SEQ ID NO: 694280 - DNA, 33 bp, Homo sapien
atatgaaggcgtaggatattgctttataaacac

SEQ ID NO: 694281 - DNA, 33 bp, Homo sapien
ggattataggcattgacggattcttaatacaga

SEQ ID NO: 694282 - DNA, 33 bp, Homo sapien
ggattataggcattgatggattcttaatacaga

SEQ ID NO: 694283 - DNA, 33 bp, Homo sapien
agacacagccaccaccaggaattgtttggtcct

SEQ ID NO: 694284 - DNA, 33 bp, Homo sapien
agacacagccaccaccgggaattgtttggtcct

SEQ ID NO: 694285 - DNA, 33 bp, Homo sapien
tgccgttttatgttagacactagagaaggagag

SEQ ID NO: 694286 - DNA, 33 bp, Homo sapien
tgccgttttatgttaggcactagagaaggagag

SEQ ID NO: 694287 - DNA, 33 bp, Homo sapien
tgtcagtcctctggcacgtaggaccaaatcctg

SEQ ID NO: 694288 - DNA, 33 bp, Homo sapien
tgtcagtcctctggcatgtaggaccaaatcctg

SEQ ID NO: 694289 - DNA, 33 bp, Homo sapien
gtacctcacactgaccggcaagatgccctctag

SEQ ID NO: 694290 - DNA, 33 bp, Homo sapien
gtacctcacactgacctgcaagatgccctctag

SEQ ID NO: 694291 - DNA, 33 bp, Homo sapien
aagagcagggtgtctacagcggcagaggtctgg

SEQ ID NO: 694292 - DNA, 33 bp, Homo sapien
aagagcagggtgtctagagcggcagaggtctgg

SEQ ID NO: 694293 - DNA, 33 bp, Homo sapien
gtagttccctaggatacaaggaagagcagagga

SEQ ID NO: 694294 - DNA, 33 bp, Homo sapien
gtagttccctaggatataaggaagagcagagga

SEQ ID NO: 694295 - DNA, 33 bp, Homo sapien
actgcttatcatcttaaatagcagaggagctga

SEQ ID NO: 694296 - DNA, 33 bp, Homo sapien
actgcttatcatcttacatagcagaggagctga

SEQ ID NO: 694297 - DNA, 33 bp, Homo sapien
cataatagaggacatcaaatactactttgtacc

SEQ ID NO: 694298 - DNA, 33 bp, Homo sapien
cataatagaggacatcgaatactactttgtacc

SEQ ID NO: 694299 - DNA, 33 bp, Homo sapien
gttttttaagatctgcccatgttactgtgtatg

SEQ ID NO: 694300 - DNA, 33 bp, Homo sapien
gttttttaagatctgctcatgttactgtgtatg

SEQ ID NO: 694301 - DNA, 33 bp, Homo sapien
ttcaattacaaaatgcaatcagttacaatgaca

SEQ ID NO: 694302 - DNA, 33 bp, Homo sapien
ttcaattacaaaatgccatcagttacaatgaca

SEQ ID NO: 694303 - DNA, 33 bp, Homo sapien
ctgcctcccagatgcaacctataccaccaggct

SEQ ID NO: 694304 - DNA, 33 bp, Homo sapien
ctgcctcccagatgcaccctataccaccaggct

SEQ ID NO: 694305 - DNA, 33 bp, Homo sapien
gatttttttgcttcaactgaaactaaaatagta

SEQ ID NO: 694306 - DNA, 33 bp, Homo sapien
gatttttttgcttcaagtgaaactaaaatagta

SEQ ID NO: 694307 - DNA, 33 bp, Homo sapien
tggaagttgcagagaaagagagtaaataaaaaa

SEQ ID NO: 694308 - DNA, 33 bp, Homo sapien
tggaagttgcagagaaggagagtaaataaaaaa

SEQ ID NO: 694309 - DNA, 33 bp, Homo sapien
cctgtgcctgagccaacgattgtggtgcagaga

SEQ ID NO: 694310 - DNA, 33 bp, Homo sapien
cctgtgcctgagccaatgattgtggtgcagaga

SEQ ID NO: 694311 - DNA, 33 bp, Homo sapien
gcttttgattgatataaatgggatcacttagag

SEQ ID NO: 694312 - DNA, 33 bp, Homo sapien
gcttttgattgatatagatgggatcacttagag

SEQ ID NO: 694313 - DNA, 33 bp, Homo sapien
gcagaaataacttagcagagatcatcccttcct

SEQ ID NO: 694314 - DNA, 33 bp, Homo sapien
gcagaaataacttagcggagatcatcccttcct

SEQ ID NO: 694315 - DNA, 33 bp, Homo sapien
agcccacagttgaggtcaatacttccagtccac

SEQ ID NO: 694316 - DNA, 33 bp, Homo sapien
agcccacagttgaggttaatacttccagtccac

SEQ ID NO: 694317 - DNA, 33 bp, Homo sapien
gctgcagtcacttagcccccaccagaaggccca

SEQ ID NO: 694318 - DNA, 33 bp, Homo sapien
gctgcagtcacttagctcccaccagaaggccca

SEQ ID NO: 694319 - DNA, 33 bp, Homo sapien
ctttatgggcagcttcacaggggaaacaagaaa

SEQ ID NO: 694320 - DNA, 33 bp, Homo sapien
ctttatgggcagcttcgcaggggaaacaagaaa

SEQ ID NO: 694321 - DNA, 33 bp, Homo sapien
tggggggaacaatggaaactgtacggccactgt

SEQ ID NO: 694322 - DNA, 33 bp, Homo sapien
tggggggaacaatggagactgtacggccactgt

SEQ ID NO: 694323 - DNA, 33 bp, Homo sapien
gtcattggtgatacgacgtagccaccataccaa

SEQ ID NO: 694324 - DNA, 33 bp, Homo sapien
gtcattggtgatacgatgtagccaccataccaa

SEQ ID NO: 694325 - DNA, 33 bp, Homo sapien
gttctaagcaataagaagaaatcaagagaatgc

SEQ ID NO: 694326 - DNA, 33 bp, Homo sapien
gttctaagcaataagatgaaatcaagagaatgc

SEQ ID NO: 694327 - DNA, 33 bp, Homo sapien
gagaatgaaaagaagacggcaaagagggagccc

SEQ ID NO: 694328 - DNA, 33 bp, Homo sapien
gagaatgaaaagaagatggcaaagagggagccc

SEQ ID NO: 694329 - DNA, 33 bp, Homo sapien
ctctgatgaaggctgaacgtaagcctatgtaac

SEQ ID NO: 694330 - DNA, 33 bp, Homo sapien
ctctgatgaaggctgagcgtaagcctatgtaac

SEQ ID NO: 694331 - DNA, 33 bp, Homo sapien
aagtgattgtgattcaatgaaataaggaccata

SEQ ID NO: 694332 - DNA, 33 bp, Homo sapien
aagtgattgtgattcagtgaaataaggaccata

SEQ ID NO: 694333 - DNA, 33 bp, Homo sapien
aaaatgctaagatggaagtttgttctgagattg

SEQ ID NO: 694334 - DNA, 33 bp, Homo sapien
aaaatgctaagatggaggtttgttctgagattg

SEQ ID NO: 694335 - DNA, 33 bp, Homo sapien
tcttttctgaaaatacacaaattcgtttacttc

SEQ ID NO: 694336 - DNA, 33 bp, Homo sapien
tcttttctgaaaatacgcaaattcgtttacttc

SEQ ID NO: 694337 - DNA, 33 bp, Homo sapien
tgagaagaggcagagaactgtattttcacaaag

SEQ ID NO: 694338 - DNA, 33 bp, Homo sapien
tgagaagaggcagagagctgtattttcacaaag

SEQ ID NO: 694339 - DNA, 33 bp, Homo sapien
ttactcttatgtcaaccatgatctaaaatgatt

SEQ ID NO: 694340 - DNA, 33 bp, Homo sapien
ttactcttatgtcaactatgatctaaaatgatt

SEQ ID NO: 694341 - DNA, 33 bp, Homo sapien
ggcagtagggtgagctcagacatgacagccgag

SEQ ID NO: 694342 - DNA, 33 bp, Homo sapien
ggcagtagggtgagcttagacatgacagccgag

SEQ ID NO: 694343 - DNA, 33 bp, Homo sapien
attttgagggaggatacgtggtcctagtgtgtg

SEQ ID NO: 694344 - DNA, 33 bp, Homo sapien
attttgagggaggatatgtggtcctagtgtgtg

SEQ ID NO: 694345 - DNA, 33 bp, Homo sapien
gttgtcaaagataacacagccctagtcacatgg

SEQ ID NO: 694346 - DNA, 33 bp, Homo sapien
gttgtcaaagataacatagccctagtcacatgg

SEQ ID NO: 694347 - DNA, 33 bp, Homo sapien
aaaccaacttctaggccacttaggtgtcttgac

SEQ ID NO: 694348 - DNA, 33 bp, Homo sapien
aaaccaacttctaggctacttaggtgtcttgac

SEQ ID NO: 694349 - DNA, 33 bp, Homo sapien
aggtggtatctatctacgtacccacttcttacc

SEQ ID NO: 694350 - DNA, 33 bp, Homo sapien
aggtggtatctatctatgtacccacttcttacc

SEQ ID NO: 694351 - DNA, 33 bp, Homo sapien
caaacagaaccgaaaaatggctcgaatagagag

SEQ ID NO: 694352 - DNA, 33 bp, Homo sapien
caaacagaaccgaaaagtggctcgaatagagag

SEQ ID NO: 694353 - DNA, 33 bp, Homo sapien
aaaacacatcatgtacaacttaataccaaacag

SEQ ID NO: 694354 - DNA, 33 bp, Homo sapien
aaaacacatcatgtacgacttaataccaaacag

SEQ ID NO: 694355 - DNA, 33 bp, Homo sapien
tccagataatctgtgaatataaaattgtttaaa

SEQ ID NO: 694356 - DNA, 33 bp, Homo sapien
tccagataatctgtgagtataaaattgtttaaa

SEQ ID NO: 694357 - DNA, 33 bp, Homo sapien
tataggggttaatgaaaggcaccctaagactct

SEQ ID NO: 694358 - DNA, 33 bp, Homo sapien
tataggggttaatgaagggcaccctaagactct

SEQ ID NO: 694359 - DNA, 33 bp, Homo sapien
ttgaattatttcaataccagactaaacttgacc

SEQ ID NO: 694360 - DNA, 33 bp, Homo sapien
ttgaattatttcaatagcagactaaacttgacc

SEQ ID NO: 694361 - DNA, 33 bp, Homo sapien
ctaggaacttattcccaatattttgttaagtca

SEQ ID NO: 694362 - DNA, 33 bp, Homo sapien
ctaggaacttattcccgatattttgttaagtca

SEQ ID NO: 694363 - DNA, 33 bp, Homo sapien
ggaatttatcagagggcattagtgacttaacaa

SEQ ID NO: 694364 - DNA, 33 bp, Homo sapien
ggaatttatcagagggtattagtgacttaacaa

SEQ ID NO: 694365 - DNA, 33 bp, Homo sapien
ggcagtggcatccacaatggcaggaggtctgtt

SEQ ID NO: 694366 - DNA, 33 bp, Homo sapien
ggcagtggcatccacagtggcaggaggtctgtt

SEQ ID NO: 694367 - DNA, 33 bp, Homo sapien
acgttgatagcccttcacttaaaaaatcaactc

SEQ ID NO: 694368 - DNA, 33 bp, Homo sapien
acgttgatagcccttcgcttaaaaaatcaactc

SEQ ID NO: 694369 - DNA, 33 bp, Homo sapien
gcaggaatttgtgtaccctgttttgtggtcatg

SEQ ID NO: 694370 - DNA, 33 bp, Homo sapien
gcaggaatttgtgtactctgttttgtggtcatg

SEQ ID NO: 694371 - DNA, 33 bp, Homo sapien
atatttgctgtttggacagtatgaaaggccatg

SEQ ID NO: 694372 - DNA, 33 bp, Homo sapien
atatttgctgtttggatagtatgaaaggccatg

SEQ ID NO: 694373 - DNA, 33 bp, Homo sapien
cagctgtgaggaggaaaggatgctcattacttg

SEQ ID NO: 694374 - DNA, 33 bp, Homo sapien
cagctgtgaggaggaagggatgctcattacttg

SEQ ID NO: 694375 - DNA, 33 bp, Homo sapien
tctgttcttacgctaccaataaagacatacctg

SEQ ID NO: 694376 - DNA, 33 bp, Homo sapien
tctgttcttacgctactaataaagacatacctg

SEQ ID NO: 694377 - DNA, 33 bp, Homo sapien
ggcagggccaattccaatcaatatgcattcctg

SEQ ID NO: 694378 - DNA, 33 bp, Homo sapien
ggcagggccaattccagtcaatatgcattcctg

SEQ ID NO: 694379 - DNA, 33 bp, Homo sapien
ccatagaaggtctggcactgtcatagctatctg

SEQ ID NO: 694380 - DNA, 33 bp, Homo sapien
ccatagaaggtctggcgctgtcatagctatctg

SEQ ID NO: 694381 - DNA, 33 bp, Homo sapien
gatccacccatgtcaccgagaggaacagaaaac

SEQ ID NO: 694382 - DNA, 33 bp, Homo sapien
gatccacccatgtcactgagaggaacagaaaac

SEQ ID NO: 694383 - DNA, 33 bp, Homo sapien
caactgcaagagcaaactgattatttactgtgg

SEQ ID NO: 694384 - DNA, 33 bp, Homo sapien
caactgcaagagcaaattgattatttactgtgg

SEQ ID NO: 694385 - DNA, 33 bp, Homo sapien
gtctgtaggttgaccccaacagttcacttaact

SEQ ID NO: 694386 - DNA, 33 bp, Homo sapien
gtctgtaggttgacccgaacagttcacttaact

SEQ ID NO: 694387 - DNA, 33 bp, Homo sapien
ctctttttcttcgcaaataagtttttcctcttc

SEQ ID NO: 694388 - DNA, 33 bp, Homo sapien
ctctttttcttcgcaagtaagtttttcctcttc

SEQ ID NO: 694389 - DNA, 33 bp, Homo sapien
aacactgcagaaaaacagcctaagttataatat

SEQ ID NO: 694390 - DNA, 33 bp, Homo sapien
aacactgcagaaaaacggcctaagttataatat

SEQ ID NO: 694391 - DNA, 33 bp, Homo sapien
tgatttgcagacctggaaatgaaagagaattct

SEQ ID NO: 694392 - DNA, 33 bp, Homo sapien
tgatttgcagacctggcaatgaaagagaattct

SEQ ID NO: 694393 - DNA, 33 bp, Homo sapien
ctggagggtgacaggccacatggggcagaaatg

SEQ ID NO: 694394 - DNA, 33 bp, Homo sapien
ctggagggtgacaggctacatggggcagaaatg

SEQ ID NO: 694395 - DNA, 33 bp, Homo sapien
gtacccagaatcataccacagaatcagcctaac

SEQ ID NO: 694396 - DNA, 33 bp, Homo sapien
gtacccagaatcatactacagaatcagcctaac

SEQ ID NO: 694397 - DNA, 33 bp, Homo sapien
caagtgtctggaggaaaagcggcagggagacca

SEQ ID NO: 694398 - DNA, 33 bp, Homo sapien
caagtgtctggaggaagagcggcagggagacca

SEQ ID NO: 694399 - DNA, 33 bp, Homo sapien
aggaacatcaaggcagccactaaacatgaaaga

SEQ ID NO: 694400 - DNA, 33 bp, Homo sapien
aggaacatcaaggcagtcactaaacatgaaaga

SEQ ID NO: 694401 - DNA, 33 bp, Homo sapien
caaccaacgtgatcagaatcacctaccaacaga

SEQ ID NO: 694402 - DNA, 33 bp, Homo sapien
caaccaacgtgatcagtatcacctaccaacaga

SEQ ID NO: 694403 - DNA, 33 bp, Homo sapien
tttaattgatcacaaccgcatccaagtactttt

SEQ ID NO: 694404 - DNA, 33 bp, Homo sapien
tttaattgatcacaactgcatccaagtactttt

SEQ ID NO: 694405 - DNA, 33 bp, Homo sapien
tgagattggatgtccaaatttctgtactattta

SEQ ID NO: 694406 - DNA, 33 bp, Homo sapien
tgagattggatgtccagatttctgtactattta

SEQ ID NO: 694407 - DNA, 33 bp, Homo sapien
ggtcttagaacttgaacgatgtccaatagaaga

SEQ ID NO: 694408 - DNA, 33 bp, Homo sapien
ggtcttagaacttgaatgatgtccaatagaaga

SEQ ID NO: 694409 - DNA, 33 bp, Homo sapien
tggatggatagattgaaaatggccacaatttat

SEQ ID NO: 694410 - DNA, 33 bp, Homo sapien
tggatggatagattgacaatggccacaatttat

SEQ ID NO: 694411 - DNA, 33 bp, Homo sapien
tgaggaaaacgcattaccctgaccgtggtgttg

SEQ ID NO: 694412 - DNA, 33 bp, Homo sapien
tgaggaaaacgcattatcctgaccgtggtgttg

SEQ ID NO: 694413 - DNA, 33 bp, Homo sapien
atcaagttatgagaaacagcattcttaccctgt

SEQ ID NO: 694414 - DNA, 33 bp, Homo sapien
atcaagttatgagaaatagcattcttaccctgt

SEQ ID NO: 694415 - DNA, 33 bp, Homo sapien
gtagacattaaatctgaaagacataacctaaaa

SEQ ID NO: 694416 - DNA, 33 bp, Homo sapien
gtagacattaaatctggaagacataacctaaaa

SEQ ID NO: 694417 - DNA, 33 bp, Homo sapien
cttacagtataaacctaaaaagacagctatgaa

SEQ ID NO: 694418 - DNA, 33 bp, Homo sapien
cttacagtataaacctgaaaagacagctatgaa

SEQ ID NO: 694419 - DNA, 33 bp, Homo sapien
gatgctgctatgaccactcacttacaagttttg

SEQ ID NO: 694420 - DNA, 33 bp, Homo sapien
gatgctgctatgaccattcacttacaagttttg

SEQ ID NO: 694421 - DNA, 33 bp, Homo sapien
tgcactcaaaaaatgccgaatctagcagaggaa

SEQ ID NO: 694422 - DNA, 33 bp, Homo sapien
tgcactcaaaaaatgctgaatctagcagaggaa

SEQ ID NO: 694423 - DNA, 33 bp, Homo sapien
cctcatggtttttctagatccacttctgggagc

SEQ ID NO: 694424 - DNA, 33 bp, Homo sapien
cctcatggtttttctatatccacttctgggagc

SEQ ID NO: 694425 - DNA, 33 bp, Homo sapien
ttgaattaacagaccacgatttgcacaattttc

SEQ ID NO: 694426 - DNA, 33 bp, Homo sapien
ttgaattaacagaccatgatttgcacaattttc

SEQ ID NO: 694427 - DNA, 33 bp, Homo sapien
aggtctgtgtctcttgcaggagctctggagaga

SEQ ID NO: 694428 - DNA, 33 bp, Homo sapien
aggtctgtgtctcttggaggagctctggagaga

SEQ ID NO: 694429 - DNA, 33 bp, Homo sapien
tcatgggttcattgaactggtgtttgttgttgc

SEQ ID NO: 694430 - DNA, 33 bp, Homo sapien
tcatgggttcattgaattggtgtttgttgttgc

SEQ ID NO: 694431 - DNA, 33 bp, Homo sapien
taacttccaaaacacaaatagcctaaaagcttg

SEQ ID NO: 694432 - DNA, 33 bp, Homo sapien
taacttccaaaacacagatagcctaaaagcttg

SEQ ID NO: 694433 - DNA, 33 bp, Homo sapien
caaatgtagagttgaactgaattttgatatttg

SEQ ID NO: 694434 - DNA, 33 bp, Homo sapien
caaatgtagagttgaattgaattttgatatttg

SEQ ID NO: 694435 - DNA, 33 bp, Homo sapien
tgtgaaagccttgaaagaagtgtcataaaggaa

SEQ ID NO: 694436 - DNA, 33 bp, Homo sapien
tgtgaaagccttgaaataagtgtcataaaggaa

SEQ ID NO: 694437 - DNA, 33 bp, Homo sapien
gttagtacacagcctaggcaacaaaaaataaaa

SEQ ID NO: 694438 - DNA, 33 bp, Homo sapien
gttagtacacagcctatgcaacaaaaaataaaa

SEQ ID NO: 694439 - DNA, 33 bp, Homo sapien
ttgtggcctaggtaagcctgccaagacaggctg

SEQ ID NO: 694440 - DNA, 33 bp, Homo sapien
ttgtggcctaggtaagtctgccaagacaggctg

SEQ ID NO: 694441 - DNA, 33 bp, Homo sapien
ttaaccggattcattaataacggcatcaggaag

SEQ ID NO: 694442 - DNA, 33 bp, Homo sapien
ttaaccggattcattactaacggcatcaggaag

SEQ ID NO: 694443 - DNA, 33 bp, Homo sapien
tggtggtgatggttaactacattcacaacatca

SEQ ID NO: 694444 - DNA, 33 bp, Homo sapien
tggtggtgatggttaagtacattcacaacatca

SEQ ID NO: 694445 - DNA, 33 bp, Homo sapien
tttttaagctgcaatccatcgttaaacatggtg

SEQ ID NO: 694446 - DNA, 33 bp, Homo sapien
tttttaagctgcaatctatcgttaaacatggtg

SEQ ID NO: 694447 - DNA, 33 bp, Homo sapien
ggaagtctcagagttacatgtctccaggcttca

SEQ ID NO: 694448 - DNA, 33 bp, Homo sapien
ggaagtctcagagttatatgtctccaggcttca

SEQ ID NO: 694449 - DNA, 33 bp, Homo sapien
taatcgtaaatcgacaatatgtggtctaatgaa

SEQ ID NO: 694450 - DNA, 33 bp, Homo sapien
taatcgtaaatcgacagtatgtggtctaatgaa

SEQ ID NO: 694451 - DNA, 33 bp, Homo sapien
gaaaatatttgtcaaactgttaaatgataagaa

SEQ ID NO: 694452 - DNA, 33 bp, Homo sapien
gaaaatatttgtcaaagtgttaaatgataagaa

SEQ ID NO: 694453 - DNA, 33 bp, Homo sapien
tttgtcttggttcttccaggagcaacgggagct

SEQ ID NO: 694454 - DNA, 33 bp, Homo sapien
tttgtcttggttcttctaggagcaacgggagct

SEQ ID NO: 694455 - DNA, 33 bp, Homo sapien
ccaataatggctatcacagtgaaggtctacatt

SEQ ID NO: 694456 - DNA, 33 bp, Homo sapien
ccaataatggctatcatagtgaaggtctacatt

SEQ ID NO: 694457 - DNA, 33 bp, Homo sapien
aagaaggcgctacttaaagggtctccaaggagt

SEQ ID NO: 694458 - DNA, 33 bp, Homo sapien
aagaaggcgctacttacagggtctccaaggagt

SEQ ID NO: 694459 - DNA, 33 bp, Homo sapien
aacagcctcactgtcactcttggtttggttcag

SEQ ID NO: 694460 - DNA, 33 bp, Homo sapien
aacagcctcactgtcattcttggtttggttcag

SEQ ID NO: 694461 - DNA, 33 bp, Homo sapien
agagttttcgctatgcccattttgagatccctg

SEQ ID NO: 694462 - DNA, 33 bp, Homo sapien
agagttttcgctatgctcattttgagatccctg

SEQ ID NO: 694463 - DNA, 33 bp, Homo sapien
tacagttgcatatgaacattttagcttttagac

SEQ ID NO: 694464 - DNA, 33 bp, Homo sapien
tacagttgcatatgaatattttagcttttagac

SEQ ID NO: 694465 - DNA, 33 bp, Homo sapien
catgtgatttgaacaccggccaagtgtgtgcaa

SEQ ID NO: 694466 - DNA, 33 bp, Homo sapien
catgtgatttgaacacgggccaagtgtgtgcaa

SEQ ID NO: 694467 - DNA, 33 bp, Homo sapien
agacgactttgtaggcacaagagcccaggcaaa

SEQ ID NO: 694468 - DNA, 33 bp, Homo sapien
agacgactttgtaggcgcaagagcccaggcaaa

SEQ ID NO: 694469 - DNA, 33 bp, Homo sapien
tagttctccttgtagacagctcaccttcttggt

SEQ ID NO: 694470 - DNA, 33 bp, Homo sapien
tagttctccttgtagatagctcaccttcttggt

SEQ ID NO: 694471 - DNA, 33 bp, Homo sapien
aatgtgaaaatattcaacatcaaaatcagggaa

SEQ ID NO: 694472 - DNA, 33 bp, Homo sapien
aatgtgaaaatattcagcatcaaaatcagggaa

SEQ ID NO: 694473 - DNA, 33 bp, Homo sapien
gagtacactaatctcaaacttcaccattacaca

SEQ ID NO: 694474 - DNA, 33 bp, Homo sapien
gagtacactaatctcagacttcaccattacaca

SEQ ID NO: 694475 - DNA, 33 bp, Homo sapien
ggagcctctttatactaaatcctctcttctcca

SEQ ID NO: 694476 - DNA, 33 bp, Homo sapien
ggagcctctttatactcaatcctctcttctcca

SEQ ID NO: 694477 - DNA, 33 bp, Homo sapien
aatgcatagaattatgaacctaaaacaatttaa

SEQ ID NO: 694478 - DNA, 33 bp, Homo sapien
aatgcatagaattatgcacctaaaacaatttaa

SEQ ID NO: 694479 - DNA, 33 bp, Homo sapien
ctagggcgctggaggacagagaattcttaggct

SEQ ID NO: 694480 - DNA, 33 bp, Homo sapien
ctagggcgctggaggagagagaattcttaggct

SEQ ID NO: 694481 - DNA, 33 bp, Homo sapien
ccaccagacggcaagacccaggaggatggaaac

SEQ ID NO: 694482 - DNA, 33 bp, Homo sapien
ccaccagacggcaagatccaggaggatggaaac

SEQ ID NO: 694483 - DNA, 33 bp, Homo sapien
ccccatcagacgcccacgctggactaatcggct

SEQ ID NO: 694484 - DNA, 33 bp, Homo sapien
ccccatcagacgcccatgctggactaatcggct

SEQ ID NO: 694485 - DNA, 33 bp, Homo sapien
tggcaggtgtctgaagaacagcagatggattgg

SEQ ID NO: 694486 - DNA, 33 bp, Homo sapien
tggcaggtgtctgaagcacagcagatggattgg

SEQ ID NO: 694487 - DNA, 33 bp, Homo sapien
gttcttcctgtctccccgcttaggtccaaagct

SEQ ID NO: 694488 - DNA, 33 bp, Homo sapien
gttcttcctgtctccctgcttaggtccaaagct

SEQ ID NO: 694489 - DNA, 33 bp, Homo sapien
agacttcaagagatcaagaagcctgcccagagt

SEQ ID NO: 694490 - DNA, 33 bp, Homo sapien
agacttcaagagatcacgaagcctgcccagagt

SEQ ID NO: 694491 - DNA, 33 bp, Homo sapien
gggcccgacttgcttgcagccacactgtaagtt

SEQ ID NO: 694492 - DNA, 33 bp, Homo sapien
gggcccgacttgcttggagccacactgtaagtt

SEQ ID NO: 694493 - DNA, 33 bp, Homo sapien
cacttatcactgctaaggagtgaactggatact

SEQ ID NO: 694494 - DNA, 33 bp, Homo sapien
cacttatcactgctaatgagtgaactggatact

SEQ ID NO: 694495 - DNA, 33 bp, Homo sapien
acataagctctctgaacgtcaggttccttatct

SEQ ID NO: 694496 - DNA, 33 bp, Homo sapien
acataagctctctgaatgtcaggttccttatct

SEQ ID NO: 694497 - DNA, 33 bp, Homo sapien
gggctcaataaatgataataacaagcaaaaaat

SEQ ID NO: 694498 - DNA, 33 bp, Homo sapien
gggctcaataaatgattataacaagcaaaaaat

SEQ ID NO: 694499 - DNA, 33 bp, Homo sapien
gtatttagaggaaaaggctgaatggataatcac

SEQ ID NO: 694500 - DNA, 33 bp, Homo sapien
gtatttagaggaaaagtctgaatggataatcac

SEQ ID NO: 694501 - DNA, 33 bp, Homo sapien
aagtctcactgtaacaatctccagagtcggttg

SEQ ID NO: 694502 - DNA, 33 bp, Homo sapien
aagtctcactgtaacagtctccagagtcggttg

SEQ ID NO: 694503 - DNA, 33 bp, Homo sapien
ctggtgctgtggaagacaggccattctgaagcc

SEQ ID NO: 694504 - DNA, 33 bp, Homo sapien
ctggtgctgtggaagagaggccattctgaagcc

SEQ ID NO: 694505 - DNA, 33 bp, Homo sapien
gactggggtataggaaatagaacaaccagtagg

SEQ ID NO: 694506 - DNA, 33 bp, Homo sapien
gactggggtataggaagtagaacaaccagtagg

SEQ ID NO: 694507 - DNA, 33 bp, Homo sapien
cctccctcttcatatcaccaaactttctcagcc

SEQ ID NO: 694508 - DNA, 33 bp, Homo sapien
cctccctcttcatatcgccaaactttctcagcc

SEQ ID NO: 694509 - DNA, 33 bp, Homo sapien
tacgtacatttggaacaataaaggcattaaggt

SEQ ID NO: 694510 - DNA, 33 bp, Homo sapien
tacgtacatttggaacgataaaggcattaaggt

SEQ ID NO: 694511 - DNA, 33 bp, Homo sapien
agcagcttgaatggaccaagataacatggttag

SEQ ID NO: 694512 - DNA, 33 bp, Homo sapien
agcagcttgaatggactaagataacatggttag

SEQ ID NO: 694513 - DNA, 33 bp, Homo sapien
aacaatttacaatttcgaatcaagcagccaatc

SEQ ID NO: 694514 - DNA, 33 bp, Homo sapien
aacaatttacaatttctaatcaagcagccaatc

SEQ ID NO: 694515 - DNA, 33 bp, Homo sapien
atgttacaatggcctacagtactgtatttagta

SEQ ID NO: 694516 - DNA, 33 bp, Homo sapien
atgttacaatggcctatagtactgtatttagta

SEQ ID NO: 694517 - DNA, 33 bp, Homo sapien
cttagcagttctttcccaatcttcatgagatca

SEQ ID NO: 694518 - DNA, 33 bp, Homo sapien
cttagcagttctttcctaatcttcatgagatca

SEQ ID NO: 694519 - DNA, 33 bp, Homo sapien
atcaaagaattcctaagaatactgactgagaaa

SEQ ID NO: 694520 - DNA, 33 bp, Homo sapien
atcaaagaattcctaataatactgactgagaaa

SEQ ID NO: 694521 - DNA, 33 bp, Homo sapien
aattgttagttttgtaacagagagcaattattt

SEQ ID NO: 694522 - DNA, 33 bp, Homo sapien
aattgttagttttgtatcagagagcaattattt

SEQ ID NO: 694523 - DNA, 33 bp, Homo sapien
tgctaggccttcaagaaaactggaagaacaaga

SEQ ID NO: 694524 - DNA, 33 bp, Homo sapien
tgctaggccttcaagagaactggaagaacaaga

SEQ ID NO: 694525 - DNA, 33 bp, Homo sapien
tcctttaatatcacagcccatgaagaatagatt

SEQ ID NO: 694526 - DNA, 33 bp, Homo sapien
tcctttaatatcacaggccatgaagaatagatt

SEQ ID NO: 694527 - DNA, 33 bp, Homo sapien
ggatttacaggaggaccaaaattcccccatctg

SEQ ID NO: 694528 - DNA, 33 bp, Homo sapien
ggatttacaggaggacgaaaattcccccatctg

SEQ ID NO: 694529 - DNA, 33 bp, Homo sapien
acatccccgtttattccactccttatcagaact

SEQ ID NO: 694530 - DNA, 33 bp, Homo sapien
acatccccgtttattctactccttatcagaact

SEQ ID NO: 694531 - DNA, 33 bp, Homo sapien
caattaaatcaaatccaaatctctggggatgga

SEQ ID NO: 694532 - DNA, 33 bp, Homo sapien
caattaaatcaaatccgaatctctggggatgga

SEQ ID NO: 694533 - DNA, 33 bp, Homo sapien
caaaaatggctcagagaaaccacagaccaaaat

SEQ ID NO: 694534 - DNA, 33 bp, Homo sapien
caaaaatggctcagaggaaccacagaccaaaat

SEQ ID NO: 694535 - DNA, 33 bp, Homo sapien
tgtagaatgcccctcaacctgggtttgtttgat

SEQ ID NO: 694536 - DNA, 33 bp, Homo sapien
tgtagaatgcccctcatcctgggtttgtttgat

SEQ ID NO: 694537 - DNA, 33 bp, Homo sapien
ttgaaaacaatgttaacggtagattttgtttta

SEQ ID NO: 694538 - DNA, 33 bp, Homo sapien
ttgaaaacaatgttaatggtagattttgtttta

SEQ ID NO: 694539 - DNA, 33 bp, Homo sapien
ttcaaccgcatctcaacgttaaccatttaaacg

SEQ ID NO: 694540 - DNA, 33 bp, Homo sapien
ttcaaccgcatctcaatgttaaccatttaaacg

SEQ ID NO: 694541 - DNA, 33 bp, Homo sapien
cagcagcttcctttccgccctaacacctaccca

SEQ ID NO: 694542 - DNA, 33 bp, Homo sapien
cagcagcttcctttcctccctaacacctaccca

SEQ ID NO: 694543 - DNA, 33 bp, Homo sapien
actaagaaggaacacaaggagcctcaatatgat

SEQ ID NO: 694544 - DNA, 33 bp, Homo sapien
actaagaaggaacacagggagcctcaatatgat

SEQ ID NO: 694545 - DNA, 33 bp, Homo sapien
gggtcagcctgttaccacctgtgatccaagtcc

SEQ ID NO: 694546 - DNA, 33 bp, Homo sapien
gggtcagcctgttaccccctgtgatccaagtcc

SEQ ID NO: 694547 - DNA, 33 bp, Homo sapien
ccattaataaaagttacctgacagcaaaggaaa

SEQ ID NO: 694548 - DNA, 33 bp, Homo sapien
ccattaataaaagttagctgacagcaaaggaaa

SEQ ID NO: 694549 - DNA, 33 bp, Homo sapien
attggtagactgattaaagactgctctcccaaa

SEQ ID NO: 694550 - DNA, 33 bp, Homo sapien
attggtagactgattatagactgctctcccaaa

SEQ ID NO: 694551 - DNA, 33 bp, Homo sapien
tctgaatagaatgaaaaggtgaggaaaagaaga

SEQ ID NO: 694552 - DNA, 33 bp, Homo sapien
tctgaatagaatgaaacggtgaggaaaagaaga

SEQ ID NO: 694553 - DNA, 33 bp, Homo sapien
tcagactaagccatacaactggctctcctgggt

SEQ ID NO: 694554 - DNA, 33 bp, Homo sapien
tcagactaagccatacgactggctctcctgggt

SEQ ID NO: 694555 - DNA, 33 bp, Homo sapien
gcttgtcaactacagactatgggttttagcttt

SEQ ID NO: 694556 - DNA, 33 bp, Homo sapien
gcttgtcaactacagattatgggttttagcttt

SEQ ID NO: 694557 - DNA, 33 bp, Homo sapien
ttcaatcaagccaacaactaaaattaaccatca

SEQ ID NO: 694558 - DNA, 33 bp, Homo sapien
ttcaatcaagccaacacctaaaattaaccatca

SEQ ID NO: 694559 - DNA, 33 bp, Homo sapien
attggatagaggccagaaattcagaggaaaagc

SEQ ID NO: 694560 - DNA, 33 bp, Homo sapien
attggatagaggccaggaattcagaggaaaagc

SEQ ID NO: 694561 - DNA, 33 bp, Homo sapien
agtaactccatctttgcaattcagtaaaataca

SEQ ID NO: 694562 - DNA, 33 bp, Homo sapien
agtaactccatctttgtaattcagtaaaataca

SEQ ID NO: 694563 - DNA, 33 bp, Homo sapien
cctggatttacatataatagttgaagccataag

SEQ ID NO: 694564 - DNA, 33 bp, Homo sapien
cctggatttacatatagtagttgaagccataag

SEQ ID NO: 694565 - DNA, 33 bp, Homo sapien
gaactggttcgttataaagatgattgcctgtaa

SEQ ID NO: 694566 - DNA, 33 bp, Homo sapien
gaactggttcgttatacagatgattgcctgtaa

SEQ ID NO: 694567 - DNA, 33 bp, Homo sapien
taagtagttatgctgaaagattgcccttgatga

SEQ ID NO: 694568 - DNA, 33 bp, Homo sapien
taagtagttatgctgagagattgcccttgatga

SEQ ID NO: 694569 - DNA, 33 bp, Homo sapien
tcagaaggagttttcaccaaaggtcctgtattt

SEQ ID NO: 694570 - DNA, 33 bp, Homo sapien
tcagaaggagttttcagcaaaggtcctgtattt

SEQ ID NO: 694571 - DNA, 33 bp, Homo sapien
aagaatcaggtttgatcagactacattaaggga

SEQ ID NO: 694572 - DNA, 33 bp, Homo sapien
aagaatcaggtttgattagactacattaaggga

SEQ ID NO: 694573 - DNA, 33 bp, Homo sapien
tattaatgtatcctaaataaagaggactctatt

SEQ ID NO: 694574 - DNA, 33 bp, Homo sapien
tattaatgtatcctaattaaagaggactctatt

SEQ ID NO: 694575 - DNA, 33 bp, Homo sapien
tctggccaaattgagcaaagataaagaaggagg

SEQ ID NO: 694576 - DNA, 33 bp, Homo sapien
tctggccaaattgagcgaagataaagaaggagg

SEQ ID NO: 694577 - DNA, 33 bp, Homo sapien
tagaaaatttttcctgcatgaatcagttaaata

SEQ ID NO: 694578 - DNA, 33 bp, Homo sapien
tagaaaatttttcctgtatgaatcagttaaata

SEQ ID NO: 694579 - DNA, 33 bp, Homo sapien
tcagtggtgagagttacattagctcatttcatt

SEQ ID NO: 694580 - DNA, 33 bp, Homo sapien
tcagtggtgagagttatattagctcatttcatt

SEQ ID NO: 694581 - DNA, 33 bp, Homo sapien
aggcaatcttacaaaaccaatgcacccaaagca

SEQ ID NO: 694582 - DNA, 33 bp, Homo sapien
aggcaatcttacaaaatcaatgcacccaaagca

SEQ ID NO: 694583 - DNA, 33 bp, Homo sapien
gcttcctagagatatcagagttaaaggtttagc

SEQ ID NO: 694584 - DNA, 33 bp, Homo sapien
gcttcctagagatatcggagttaaaggtttagc

SEQ ID NO: 694585 - DNA, 33 bp, Homo sapien
aatgtagagttgaggacccactccatgaatcct

SEQ ID NO: 694586 - DNA, 33 bp, Homo sapien
aatgtagagttgaggagccactccatgaatcct

SEQ ID NO: 694587 - DNA, 33 bp, Homo sapien
ctctgcctcgacttaacccaggtgcaaagtctg

SEQ ID NO: 694588 - DNA, 33 bp, Homo sapien
ctctgcctcgacttaatccaggtgcaaagtctg

SEQ ID NO: 694589 - DNA, 33 bp, Homo sapien
ctactacactgtgataagtgacagaaagggggc

SEQ ID NO: 694590 - DNA, 33 bp, Homo sapien
ctactacactgtgatacgtgacagaaagggggc

SEQ ID NO: 694591 - DNA, 33 bp, Homo sapien
attgggttataaacaaatgactggttctaactc

SEQ ID NO: 694592 - DNA, 33 bp, Homo sapien
attgggttataaacaagtgactggttctaactc

SEQ ID NO: 694593 - DNA, 33 bp, Homo sapien
agttaagtcttttaccaagggctgtgtggtcgc

SEQ ID NO: 694594 - DNA, 33 bp, Homo sapien
agttaagtcttttaccgagggctgtgtggtcgc

SEQ ID NO: 694595 - DNA, 33 bp, Homo sapien
atccccttttacaacacgccatgatctggaccc

SEQ ID NO: 694596 - DNA, 33 bp, Homo sapien
atccccttttacaacatgccatgatctggaccc

SEQ ID NO: 694597 - DNA, 33 bp, Homo sapien
acttgacaagtactcaaattataagcatcttcc

SEQ ID NO: 694598 - DNA, 33 bp, Homo sapien
acttgacaagtactcagattataagcatcttcc

SEQ ID NO: 694599 - DNA, 33 bp, Homo sapien
acattctagtctgtgccaaaggccatgcctgga

SEQ ID NO: 694600 - DNA, 33 bp, Homo sapien
acattctagtctgtgctaaaggccatgcctgga

SEQ ID NO: 694601 - DNA, 33 bp, Homo sapien
tcttacgttcttgccacctgcaataggaaggca

SEQ ID NO: 694602 - DNA, 33 bp, Homo sapien
tcttacgttcttgccatctgcaataggaaggca

SEQ ID NO: 694603 - DNA, 33 bp, Homo sapien
ccacccagatatttgccatataggacaagctca

SEQ ID NO: 694604 - DNA, 33 bp, Homo sapien
ccacccagatatttgctatataggacaagctca

SEQ ID NO: 694605 - DNA, 33 bp, Homo sapien
cacactgccctcctgaacattgcattctggttg

SEQ ID NO: 694606 - DNA, 33 bp, Homo sapien
cacactgccctcctgagcattgcattctggttg

SEQ ID NO: 694607 - DNA, 33 bp, Homo sapien
aggattcagctgtccaagtcaactcaaataatc

SEQ ID NO: 694608 - DNA, 33 bp, Homo sapien
aggattcagctgtccacgtcaactcaaataatc

SEQ ID NO: 694609 - DNA, 33 bp, Homo sapien
caaaaatgagcagaaagtagagagaattccaat

SEQ ID NO: 694610 - DNA, 33 bp, Homo sapien
caaaaatgagcagaaattagagagaattccaat

SEQ ID NO: 694611 - DNA, 33 bp, Homo sapien
caggcagtgtcagccacgagaaaggtgtctcca

SEQ ID NO: 694612 - DNA, 33 bp, Homo sapien
caggcagtgtcagccatgagaaaggtgtctcca

SEQ ID NO: 694613 - DNA, 33 bp, Homo sapien
ccacaagaagctagaaaagccaaggaaggattc

SEQ ID NO: 694614 - DNA, 33 bp, Homo sapien
ccacaagaagctagaagagccaaggaaggattc

SEQ ID NO: 694615 - DNA, 33 bp, Homo sapien
aacctctgtctgtggccatgaatagataatcct

SEQ ID NO: 694616 - DNA, 33 bp, Homo sapien
aacctctgtctgtggctatgaatagataatcct

SEQ ID NO: 694617 - DNA, 33 bp, Homo sapien
gccatgagacagaaaccaagaaatcatcctggg

SEQ ID NO: 694618 - DNA, 33 bp, Homo sapien
gccatgagacagaaacgaagaaatcatcctggg

SEQ ID NO: 694619 - DNA, 33 bp, Homo sapien
ggttatgtgaattgtacgtattagtttcaattc

SEQ ID NO: 694620 - DNA, 33 bp, Homo sapien
ggttatgtgaattgtatgtattagtttcaattc

SEQ ID NO: 694621 - DNA, 33 bp, Homo sapien
attttcagtgtgagccagacaatgggctggtgt

SEQ ID NO: 694622 - DNA, 33 bp, Homo sapien
attttcagtgtgagccggacaatgggctggtgt

SEQ ID NO: 694623 - DNA, 33 bp, Homo sapien
taaggacacttttacacggatctcctgagaaaa

SEQ ID NO: 694624 - DNA, 33 bp, Homo sapien
taaggacacttttacatggatctcctgagaaaa

SEQ ID NO: 694625 - DNA, 33 bp, Homo sapien
caggaagtcaacccaacgaggctggaggccaca

SEQ ID NO: 694626 - DNA, 33 bp, Homo sapien
caggaagtcaacccaatgaggctggaggccaca

SEQ ID NO: 694627 - DNA, 33 bp, Homo sapien
tccactccagcttttacatttcctctagatcca

SEQ ID NO: 694628 - DNA, 33 bp, Homo sapien
tccactccagcttttatatttcctctagatcca

SEQ ID NO: 694629 - DNA, 33 bp, Homo sapien
gcacaagaagaaactgacagctgcataggaaga

SEQ ID NO: 694630 - DNA, 33 bp, Homo sapien
gcacaagaagaaactggcagctgcataggaaga

SEQ ID NO: 694631 - DNA, 33 bp, Homo sapien
ctggtcactaggccaaaaagggaaaaagagcaa

SEQ ID NO: 694632 - DNA, 33 bp, Homo sapien
ctggtcactaggccaagaagggaaaaagagcaa

SEQ ID NO: 694633 - DNA, 33 bp, Homo sapien
tattgtttctcagaccagatagtctcagtttac

SEQ ID NO: 694634 - DNA, 33 bp, Homo sapien
tattgtttctcagaccggatagtctcagtttac

SEQ ID NO: 694635 - DNA, 33 bp, Homo sapien
atagcccaaatttaaacgatccagattaatcta

SEQ ID NO: 694636 - DNA, 33 bp, Homo sapien
atagcccaaatttaaatgatccagattaatcta

SEQ ID NO: 694637 - DNA, 33 bp, Homo sapien
tgctagcagtcaaacaaaatttctacctaatat

SEQ ID NO: 694638 - DNA, 33 bp, Homo sapien
tgctagcagtcaaacagaatttctacctaatat

SEQ ID NO: 694639 - DNA, 33 bp, Homo sapien
aatttctggtcaaggcacagcctcagtctgaac

SEQ ID NO: 694640 - DNA, 33 bp, Homo sapien
aatttctggtcaaggcgcagcctcagtctgaac

SEQ ID NO: 694641 - DNA, 33 bp, Homo sapien
gttatttgtaggtagacgccagaaagctgatat

SEQ ID NO: 694642 - DNA, 33 bp, Homo sapien
gttatttgtaggtagaggccagaaagctgatat

SEQ ID NO: 694643 - DNA, 33 bp, Homo sapien
aatgtaatctctttataaacctatctcggattt

SEQ ID NO: 694644 - DNA, 33 bp, Homo sapien
aatgtaatctctttatcaacctatctcggattt

SEQ ID NO: 694645 - DNA, 33 bp, Homo sapien
ttcactttattccaccaggccctacaagctgaa

SEQ ID NO: 694646 - DNA, 33 bp, Homo sapien
ttcactttattccaccgggccctacaagctgaa

SEQ ID NO: 694647 - DNA, 33 bp, Homo sapien
tagacactgtgcaaaacgttgcctcggctcgaa

SEQ ID NO: 694648 - DNA, 33 bp, Homo sapien
tagacactgtgcaaaaggttgcctcggctcgaa

SEQ ID NO: 694649 - DNA, 33 bp, Homo sapien
acaaggaagggctaaacgatttacctgaatttg

SEQ ID NO: 694650 - DNA, 33 bp, Homo sapien
acaaggaagggctaaaggatttacctgaatttg

SEQ ID NO: 694651 - DNA, 33 bp, Homo sapien
tatggatatgaaaaggccatagtgtagacaata

SEQ ID NO: 694652 - DNA, 33 bp, Homo sapien
tatggatatgaaaagggcatagtgtagacaata

SEQ ID NO: 694653 - DNA, 33 bp, Homo sapien
atcctcaatcaagaaaagtagcacctcggagct

SEQ ID NO: 694654 - DNA, 33 bp, Homo sapien
atcctcaatcaagaaaggtagcacctcggagct

SEQ ID NO: 694655 - DNA, 33 bp, Homo sapien
cacttgccaatgaatccagttgttatggactga

SEQ ID NO: 694656 - DNA, 33 bp, Homo sapien
cacttgccaatgaatctagttgttatggactga

SEQ ID NO: 694657 - DNA, 33 bp, Homo sapien
gtctctagcatcactacctaaggctaacatctc

SEQ ID NO: 694658 - DNA, 33 bp, Homo sapien
gtctctagcatcactatctaaggctaacatctc

SEQ ID NO: 694659 - DNA, 33 bp, Homo sapien
gatggccaaggatttacctatttgtataaatta

SEQ ID NO: 694660 - DNA, 33 bp, Homo sapien
gatggccaaggatttatctatttgtataaatta

SEQ ID NO: 694661 - DNA, 33 bp, Homo sapien
accaatattcctgtacactcagcattgttccag

SEQ ID NO: 694662 - DNA, 33 bp, Homo sapien
accaatattcctgtacgctcagcattgttccag

SEQ ID NO: 694663 - DNA, 33 bp, Homo sapien
cagcatgaattttttacgtgtcagatatactcc

SEQ ID NO: 694664 - DNA, 33 bp, Homo sapien
cagcatgaattttttatgtgtcagatatactcc

SEQ ID NO: 694665 - DNA, 33 bp, Homo sapien
tgccttaaagcgataactccaaaaagttagaga

SEQ ID NO: 694666 - DNA, 33 bp, Homo sapien
tgccttaaagcgataattccaaaaagttagaga

SEQ ID NO: 694667 - DNA, 33 bp, Homo sapien
tccttaggtagtacaacggcttgtggtcttcca

SEQ ID NO: 694668 - DNA, 33 bp, Homo sapien
tccttaggtagtacaatggcttgtggtcttcca

SEQ ID NO: 694669 - DNA, 33 bp, Homo sapien
atagtactatatcttacggaagtgttggtggca

SEQ ID NO: 694670 - DNA, 33 bp, Homo sapien
atagtactatatcttatggaagtgttggtggca

SEQ ID NO: 694671 - DNA, 33 bp, Homo sapien
tgacccaaccagaccaatgaaaacttgccctgg

SEQ ID NO: 694672 - DNA, 33 bp, Homo sapien
tgacccaaccagaccagtgaaaacttgccctgg

SEQ ID NO: 694673 - DNA, 33 bp, Homo sapien
atttgctattattttacggtatctgcaggtttt

SEQ ID NO: 694674 - DNA, 33 bp, Homo sapien
atttgctattattttatggtatctgcaggtttt

SEQ ID NO: 694675 - DNA, 33 bp, Homo sapien
ctaacgggtgtgccaaactgtgctgagttaagt

SEQ ID NO: 694676 - DNA, 33 bp, Homo sapien
ctaacgggtgtgccaagctgtgctgagttaagt

SEQ ID NO: 694677 - DNA, 33 bp, Homo sapien
tgctacagagtaagacactatgcttattagcat

SEQ ID NO: 694678 - DNA, 33 bp, Homo sapien
tgctacagagtaagaccctatgcttattagcat

SEQ ID NO: 694679 - DNA, 33 bp, Homo sapien
gatctctgagaacccaatcttctcaacaagttg

SEQ ID NO: 694680 - DNA, 33 bp, Homo sapien
gatctctgagaacccagtcttctcaacaagttg

SEQ ID NO: 694681 - DNA, 33 bp, Homo sapien
tttaaaagtgagttcaagacttctgcctaagaa

SEQ ID NO: 694682 - DNA, 33 bp, Homo sapien
tttaaaagtgagttcaggacttctgcctaagaa

SEQ ID NO: 694683 - DNA, 33 bp, Homo sapien
tctatggcatacactcacagctacctacccaat

SEQ ID NO: 694684 - DNA, 33 bp, Homo sapien
tctatggcatacactcgcagctacctacccaat

SEQ ID NO: 694685 - DNA, 33 bp, Homo sapien
tcaatatacaaagcaggcatattttgggatggc

SEQ ID NO: 694686 - DNA, 33 bp, Homo sapien
tcaatatacaaagcagtcatattttgggatggc

SEQ ID NO: 694687 - DNA, 33 bp, Homo sapien
tgaaagccagcttccacgttgagagatgtccaa

SEQ ID NO: 694688 - DNA, 33 bp, Homo sapien
tgaaagccagcttccatgttgagagatgtccaa

SEQ ID NO: 694689 - DNA, 33 bp, Homo sapien
ttactcctgatgataaactaagagatttacaag

SEQ ID NO: 694690 - DNA, 33 bp, Homo sapien
ttactcctgatgataagctaagagatttacaag

SEQ ID NO: 694691 - DNA, 33 bp, Homo sapien
atcatgaatgataaacaacgtggctcaagaaca

SEQ ID NO: 694692 - DNA, 33 bp, Homo sapien
atcatgaatgataaacgacgtggctcaagaaca

SEQ ID NO: 694693 - DNA, 33 bp, Homo sapien
atgtccactaaccttaacagaaaggcataattc

SEQ ID NO: 694694 - DNA, 33 bp, Homo sapien
atgtccactaaccttagcagaaaggcataattc

SEQ ID NO: 694695 - DNA, 33 bp, Homo sapien
tcaattgttacagcaaagggctctaaggaattt

SEQ ID NO: 694696 - DNA, 33 bp, Homo sapien
tcaattgttacagcaaggggctctaaggaattt

SEQ ID NO: 694697 - DNA, 33 bp, Homo sapien
ttggataatgcaaagacagatgtttaagtccaa

SEQ ID NO: 694698 - DNA, 33 bp, Homo sapien
ttggataatgcaaagatagatgtttaagtccaa

SEQ ID NO: 694699 - DNA, 33 bp, Homo sapien
tctgtatctgtttatacgctctgtttttcttgt

SEQ ID NO: 694700 - DNA, 33 bp, Homo sapien
tctgtatctgtttatatgctctgtttttcttgt

SEQ ID NO: 694701 - DNA, 33 bp, Homo sapien
agagaagggagtttaacgtgggttaagagaggt

SEQ ID NO: 694702 - DNA, 33 bp, Homo sapien
agagaagggagtttaatgtgggttaagagaggt

SEQ ID NO: 694703 - DNA, 33 bp, Homo sapien
atgttagtgactggaacagatgagcatctcctt

SEQ ID NO: 694704 - DNA, 33 bp, Homo sapien
atgttagtgactggaatagatgagcatctcctt

SEQ ID NO: 694705 - DNA, 33 bp, Homo sapien
aattgcttgtacgaacaatgaacaaggacatct

SEQ ID NO: 694706 - DNA, 33 bp, Homo sapien
aattgcttgtacgaacgatgaacaaggacatct

SEQ ID NO: 694707 - DNA, 33 bp, Homo sapien
tgatttgcacaaggtccctgtaggttagtacaa

SEQ ID NO: 694708 - DNA, 33 bp, Homo sapien
tgatttgcacaaggtctctgtaggttagtacaa

SEQ ID NO: 694709 - DNA, 33 bp, Homo sapien
ttagtacaagtctcacagtaaagaaatgttcat

SEQ ID NO: 694710 - DNA, 33 bp, Homo sapien
ttagtacaagtctcacggtaaagaaatgttcat

SEQ ID NO: 694711 - DNA, 33 bp, Homo sapien
agtggtagaggtttccacagtccaatggtgcat

SEQ ID NO: 694712 - DNA, 33 bp, Homo sapien
agtggtagaggtttccgcagtccaatggtgcat

SEQ ID NO: 694713 - DNA, 33 bp, Homo sapien
tgacacagtttaacaacgctaatctgctgcatg

SEQ ID NO: 694714 - DNA, 33 bp, Homo sapien
tgacacagtttaacaatgctaatctgctgcatg

SEQ ID NO: 694715 - DNA, 33 bp, Homo sapien
ggccaatttgtccagaaaagtatgagataaaca

SEQ ID NO: 694716 - DNA, 33 bp, Homo sapien
ggccaatttgtccagagaagtatgagataaaca

SEQ ID NO: 694717 - DNA, 33 bp, Homo sapien
tgacccctgcacttccagagttcacaatgagtt

SEQ ID NO: 694718 - DNA, 33 bp, Homo sapien
tgacccctgcacttccggagttcacaatgagtt

SEQ ID NO: 694719 - DNA, 33 bp, Homo sapien
atgttcgtgtggatacaaaccacatgcacatga

SEQ ID NO: 694720 - DNA, 33 bp, Homo sapien
atgttcgtgtggataccaaccacatgcacatga

SEQ ID NO: 694721 - DNA, 33 bp, Homo sapien
attcacatggataccaactatatgcatgtgaag

SEQ ID NO: 694722 - DNA, 33 bp, Homo sapien
attcacatggataccagctatatgcatgtgaag

SEQ ID NO: 694723 - DNA, 33 bp, Homo sapien
tgggctgaagatacgacagttgttaggatctga

SEQ ID NO: 694724 - DNA, 33 bp, Homo sapien
tgggctgaagatacgatagttgttaggatctga

SEQ ID NO: 694725 - DNA, 33 bp, Homo sapien
gatgcctaatacacaacggtgatacagaagaga

SEQ ID NO: 694726 - DNA, 33 bp, Homo sapien
gatgcctaatacacaatggtgatacagaagaga

SEQ ID NO: 694727 - DNA, 33 bp, Homo sapien
aagtctcaggccacgagccgtgtttttagcttt

SEQ ID NO: 694728 - DNA, 33 bp, Homo sapien
aagtctcaggccacgatccgtgtttttagcttt

SEQ ID NO: 694729 - DNA, 33 bp, Homo sapien
atatactccattactccgacacttcctttctcc

SEQ ID NO: 694730 - DNA, 33 bp, Homo sapien
atatactccattactctgacacttcctttctcc

SEQ ID NO: 694731 - DNA, 33 bp, Homo sapien
tggagcccagctcgtacgtcttgataagacccc

SEQ ID NO: 694732 - DNA, 33 bp, Homo sapien
tggagcccagctcgtatgtcttgataagacccc

SEQ ID NO: 694733 - DNA, 33 bp, Homo sapien
gcattcaattcagttcaaaagcattcaccctcc

SEQ ID NO: 694734 - DNA, 33 bp, Homo sapien
gcattcaattcagttcgaaagcattcaccctcc

SEQ ID NO: 694735 - DNA, 33 bp, Homo sapien
tgcttctcattgtacagtatcaagaaccagaat

SEQ ID NO: 694736 - DNA, 33 bp, Homo sapien
tgcttctcattgtacattatcaagaaccagaat

SEQ ID NO: 694737 - DNA, 33 bp, Homo sapien
attacatgaacggcacactgtaaacaccatatc

SEQ ID NO: 694738 - DNA, 33 bp, Homo sapien
attacatgaacggcacgctgtaaacaccatatc

SEQ ID NO: 694739 - DNA, 33 bp, Homo sapien
accaggatatgtgagcacataggaaagggctga

SEQ ID NO: 694740 - DNA, 33 bp, Homo sapien
accaggatatgtgagcgcataggaaagggctga

SEQ ID NO: 694741 - DNA, 33 bp, Homo sapien
ttatacaacttctcccaaaccctctctcctgca

SEQ ID NO: 694742 - DNA, 33 bp, Homo sapien
ttatacaacttctccctaaccctctctcctgca

SEQ ID NO: 694743 - DNA, 33 bp, Homo sapien
aagagagttatcctacaaataaaccgccttctc

SEQ ID NO: 694744 - DNA, 33 bp, Homo sapien
aagagagttatcctaccaataaaccgccttctc

SEQ ID NO: 694745 - DNA, 33 bp, Homo sapien
gctttggaaaattgtaaagctaccaagattttg

SEQ ID NO: 694746 - DNA, 33 bp, Homo sapien
gctttggaaaattgtagagctaccaagattttg

SEQ ID NO: 694747 - DNA, 33 bp, Homo sapien
acaaatcactttccaaagtattcgtgtccactg

SEQ ID NO: 694748 - DNA, 33 bp, Homo sapien
acaaatcactttccaaggtattcgtgtccactg

SEQ ID NO: 694749 - DNA, 33 bp, Homo sapien
agtgagtgatgaagacaagttttgaactcagtt

SEQ ID NO: 694750 - DNA, 33 bp, Homo sapien
agtgagtgatgaagacgagttttgaactcagtt

SEQ ID NO: 694751 - DNA, 33 bp, Homo sapien
tcctcagctagtaggaaatgctgcaatgagcca

SEQ ID NO: 694752 - DNA, 33 bp, Homo sapien
tcctcagctagtaggagatgctgcaatgagcca

SEQ ID NO: 694753 - DNA, 33 bp, Homo sapien
ttctaagggcactaacaccactgatgatggctc

SEQ ID NO: 694754 - DNA, 33 bp, Homo sapien
ttctaagggcactaaccccactgatgatggctc

SEQ ID NO: 694755 - DNA, 33 bp, Homo sapien
ttacaaactgtttcaagcaaaggcaaaatgcac

SEQ ID NO: 694756 - DNA, 33 bp, Homo sapien
ttacaaactgtttcaatcaaaggcaaaatgcac

SEQ ID NO: 694757 - DNA, 33 bp, Homo sapien
gtatgatatctgaggacacagtcaacagtccct

SEQ ID NO: 694758 - DNA, 33 bp, Homo sapien
gtatgatatctgaggatacagtcaacagtccct

SEQ ID NO: 694759 - DNA, 33 bp, Homo sapien
tctttgggcatttacactacttttgcaggattc

SEQ ID NO: 694760 - DNA, 33 bp, Homo sapien
tctttgggcatttacattacttttgcaggattc

SEQ ID NO: 694761 - DNA, 33 bp, Homo sapien
ataagtatgttccatgaaacttgggatagactt

SEQ ID NO: 694762 - DNA, 33 bp, Homo sapien
ataagtatgttccatgcaacttgggatagactt

SEQ ID NO: 694763 - DNA, 33 bp, Homo sapien
ttagctcacggctcctaacattttataaatcct

SEQ ID NO: 694764 - DNA, 33 bp, Homo sapien
ttagctcacggctcctgacattttataaatcct

SEQ ID NO: 694765 - DNA, 33 bp, Homo sapien
tgtagcgaagaaaagcacatttaagagccatgg

SEQ ID NO: 694766 - DNA, 33 bp, Homo sapien
tgtagcgaagaaaagctcatttaagagccatgg

SEQ ID NO: 694767 - DNA, 33 bp, Homo sapien
tctagaaactccaggaagtgaagtcgttgtgct

SEQ ID NO: 694768 - DNA, 33 bp, Homo sapien
tctagaaactccaggaggtgaagtcgttgtgct

SEQ ID NO: 694769 - DNA, 33 bp, Homo sapien
ccagcagctaatcaacagtgggaacatagcata

SEQ ID NO: 694770 - DNA, 33 bp, Homo sapien
ccagcagctaatcaacggtgggaacatagcata

SEQ ID NO: 694771 - DNA, 33 bp, Homo sapien
gaaccggaatattataccccaactagtatatct

SEQ ID NO: 694772 - DNA, 33 bp, Homo sapien
gaaccggaatattatatcccaactagtatatct

SEQ ID NO: 694773 - DNA, 33 bp, Homo sapien
tcttgggatttcaacaacagctaatgtggttat

SEQ ID NO: 694774 - DNA, 33 bp, Homo sapien
tcttgggatttcaacagcagctaatgtggttat

SEQ ID NO: 694775 - DNA, 33 bp, Homo sapien
agctggattcttgaaacatgaaaaaccatggct

SEQ ID NO: 694776 - DNA, 33 bp, Homo sapien
agctggattcttgaaatatgaaaaaccatggct

SEQ ID NO: 694777 - DNA, 33 bp, Homo sapien
catgtacctttaaactaacatctataaccaact

SEQ ID NO: 694778 - DNA, 33 bp, Homo sapien
catgtacctttaaactcacatctataaccaact

SEQ ID NO: 694779 - DNA, 33 bp, Homo sapien
aataacactaaaagaacagagaaatctcatgtt

SEQ ID NO: 694780 - DNA, 33 bp, Homo sapien
aataacactaaaagaagagagaaatctcatgtt

SEQ ID NO: 694781 - DNA, 33 bp, Homo sapien
tttatcacagtatacccatgaaagataagtttg

SEQ ID NO: 694782 - DNA, 33 bp, Homo sapien
tttatcacagtataccgatgaaagataagtttg

SEQ ID NO: 694783 - DNA, 33 bp, Homo sapien
tcaatggagaagtaaacctgcttagaagggtca

SEQ ID NO: 694784 - DNA, 33 bp, Homo sapien
tcaatggagaagtaaatctgcttagaagggtca

SEQ ID NO: 694785 - DNA, 33 bp, Homo sapien
aagttaggaaatctcaccttttgtcttgtttct

SEQ ID NO: 694786 - DNA, 33 bp, Homo sapien
aagttaggaaatctcagcttttgtcttgtttct

SEQ ID NO: 694787 - DNA, 33 bp, Homo sapien
ttttactgtagatctacggtctattaatggtct

SEQ ID NO: 694788 - DNA, 33 bp, Homo sapien
ttttactgtagatctatggtctattaatggtct

SEQ ID NO: 694789 - DNA, 33 bp, Homo sapien
gccttgtagactttgaactggttgacctggagt

SEQ ID NO: 694790 - DNA, 33 bp, Homo sapien
gccttgtagactttgatctggttgacctggagt

SEQ ID NO: 694791 - DNA, 33 bp, Homo sapien
gttcttcactgcctcaagagactaagggtggaa

SEQ ID NO: 694792 - DNA, 33 bp, Homo sapien
gttcttcactgcctcaggagactaagggtggaa

SEQ ID NO: 694793 - DNA, 33 bp, Homo sapien
atgttaataggcaacacataatggcagccaaca

SEQ ID NO: 694794 - DNA, 33 bp, Homo sapien
atgttaataggcaacatataatggcagccaaca

SEQ ID NO: 694795 - DNA, 33 bp, Homo sapien
ggaaaggcagtggtgacagattttcagatttgt

SEQ ID NO: 694796 - DNA, 33 bp, Homo sapien
ggaaaggcagtggtgagagattttcagatttgt

SEQ ID NO: 694797 - DNA, 33 bp, Homo sapien
ttcagatttgtaacgacatgaattttcattcag

SEQ ID NO: 694798 - DNA, 33 bp, Homo sapien
ttcagatttgtaacgatatgaattttcattcag

SEQ ID NO: 694799 - DNA, 33 bp, Homo sapien
atggataaaatgtcacggcttaatgattaaagc

SEQ ID NO: 694800 - DNA, 33 bp, Homo sapien
atggataaaatgtcactgcttaatgattaaagc

SEQ ID NO: 694801 - DNA, 33 bp, Homo sapien
aattagaagcctttgcaatggaagccagatttc

SEQ ID NO: 694802 - DNA, 33 bp, Homo sapien
aattagaagcctttgcgatggaagccagatttc

SEQ ID NO: 694803 - DNA, 33 bp, Homo sapien
acttctccgtcttacacccagcctaaaatctga

SEQ ID NO: 694804 - DNA, 33 bp, Homo sapien
acttctccgtcttacatccagcctaaaatctga

SEQ ID NO: 694805 - DNA, 33 bp, Homo sapien
cacgcgtggtagccatcagttttaacgacagca

SEQ ID NO: 694806 - DNA, 33 bp, Homo sapien
cacgcgtggtagccattagttttaacgacagca

SEQ ID NO: 694807 - DNA, 33 bp, Homo sapien
aaccaaaggaatgagacggtagatcacaatcat

SEQ ID NO: 694808 - DNA, 33 bp, Homo sapien
aaccaaaggaatgagatggtagatcacaatcat

SEQ ID NO: 694809 - DNA, 33 bp, Homo sapien
tgccagccactttaagcagaacaacagaagtct

SEQ ID NO: 694810 - DNA, 33 bp, Homo sapien
tgccagccactttaagtagaacaacagaagtct

SEQ ID NO: 694811 - DNA, 33 bp, Homo sapien
tactatgtgtaacctcaagttcggaaggtctga

SEQ ID NO: 694812 - DNA, 33 bp, Homo sapien
tactatgtgtaacctcgagttcggaaggtctga

SEQ ID NO: 694813 - DNA, 33 bp, Homo sapien
tgaggggttgaaactaaaggaagttgagctccc

SEQ ID NO: 694814 - DNA, 33 bp, Homo sapien
tgaggggttgaaactacaggaagttgagctccc

SEQ ID NO: 694815 - DNA, 33 bp, Homo sapien
tccagtccaggagctaaagaaggaatcgtgatt

SEQ ID NO: 694816 - DNA, 33 bp, Homo sapien
tccagtccaggagctacagaaggaatcgtgatt

SEQ ID NO: 694817 - DNA, 33 bp, Homo sapien
ctggtcagtgtccaatcatctagccaaatgcca

SEQ ID NO: 694818 - DNA, 33 bp, Homo sapien
ctggtcagtgtccaatgatctagccaaatgcca

SEQ ID NO: 694819 - DNA, 33 bp, Homo sapien
gttctttctgtgaagcaatttataattattctg

SEQ ID NO: 694820 - DNA, 33 bp, Homo sapien
gttctttctgtgaagccatttataattattctg

SEQ ID NO: 694821 - DNA, 33 bp, Homo sapien
tagctcacagtttatacatgggttgtggaagtt

SEQ ID NO: 694822 - DNA, 33 bp, Homo sapien
tagctcacagtttatatatgggttgtggaagtt

SEQ ID NO: 694823 - DNA, 33 bp, Homo sapien
ctagctccattttcataagtgttctccctgggt

SEQ ID NO: 694824 - DNA, 33 bp, Homo sapien
ctagctccattttcatgagtgttctccctgggt

SEQ ID NO: 694825 - DNA, 33 bp, Homo sapien
tttgagccatttaacccctctgtgactcaggtt

SEQ ID NO: 694826 - DNA, 33 bp, Homo sapien
tttgagccatttaaccgctctgtgactcaggtt

SEQ ID NO: 694827 - DNA, 33 bp, Homo sapien
ggcttagacatttacaaaatctagcaatgtaac

SEQ ID NO: 694828 - DNA, 33 bp, Homo sapien
ggcttagacatttacagaatctagcaatgtaac

SEQ ID NO: 694829 - DNA, 33 bp, Homo sapien
ccctttgcatacacaaaattattgttactttct

SEQ ID NO: 694830 - DNA, 33 bp, Homo sapien
ccctttgcatacacaacattattgttactttct

SEQ ID NO: 694831 - DNA, 33 bp, Homo sapien
tcagtacatttgttgaataatgttgtcgcactt

SEQ ID NO: 694832 - DNA, 33 bp, Homo sapien
tcagtacatttgttgattaatgttgtcgcactt

SEQ ID NO: 694833 - DNA, 33 bp, Homo sapien
aaatggacttggatcacgattttaagggaaaca

SEQ ID NO: 694834 - DNA, 33 bp, Homo sapien
aaatggacttggatcaggattttaagggaaaca

SEQ ID NO: 694835 - DNA, 33 bp, Homo sapien
acacgtttgtggatgagaggtgagctgggtatt

SEQ ID NO: 694836 - DNA, 33 bp, Homo sapien
acacgtttgtggatgataggtgagctgggtatt

SEQ ID NO: 694837 - DNA, 33 bp, Homo sapien
agtgacacctttctccaaacctttccatgcttg

SEQ ID NO: 694838 - DNA, 33 bp, Homo sapien
agtgacacctttctcccaacctttccatgcttg

SEQ ID NO: 694839 - DNA, 33 bp, Homo sapien
tatccatgatgtaaataaagtcaaaatgttttc

SEQ ID NO: 694840 - DNA, 33 bp, Homo sapien
tatccatgatgtaaatgaagtcaaaatgttttc

SEQ ID NO: 694841 - DNA, 33 bp, Homo sapien
atttagttattttaaaacctattcacatagtat

SEQ ID NO: 694842 - DNA, 33 bp, Homo sapien
atttagttattttaaagcctattcacatagtat

SEQ ID NO: 694843 - DNA, 33 bp, Homo sapien
cactggtgaatgtgtgcatttctcttggccata

SEQ ID NO: 694844 - DNA, 33 bp, Homo sapien
cactggtgaatgtgtgtatttctcttggccata

SEQ ID NO: 694845 - DNA, 33 bp, Homo sapien
tctcacctgtactaaaacagctgaatatcacca

SEQ ID NO: 694846 - DNA, 33 bp, Homo sapien
tctcacctgtactaaatcagctgaatatcacca

SEQ ID NO: 694847 - DNA, 33 bp, Homo sapien
tttctagacaactggaatatcaatatgagtttt

SEQ ID NO: 694848 - DNA, 33 bp, Homo sapien
tttctagacaactggagtatcaatatgagtttt

SEQ ID NO: 694849 - DNA, 33 bp, Homo sapien
ttcccagtgtcctgaactgtcagaaataaaagt

SEQ ID NO: 694850 - DNA, 33 bp, Homo sapien
ttcccagtgtcctgaattgtcagaaataaaagt

SEQ ID NO: 694851 - DNA, 33 bp, Homo sapien
ataaaatattctggacaaatagtgattaaaaga

SEQ ID NO: 694852 - DNA, 33 bp, Homo sapien
ataaaatattctggaccaatagtgattaaaaga

SEQ ID NO: 694853 - DNA, 33 bp, Homo sapien
ttctggatatgaggaacatagccgtgtacaaat

SEQ ID NO: 694854 - DNA, 33 bp, Homo sapien
ttctggatatgaggaatatagccgtgtacaaat

SEQ ID NO: 694855 - DNA, 33 bp, Homo sapien
atgggacgagaatgaaagtgtggagaccagtgt

SEQ ID NO: 694856 - DNA, 33 bp, Homo sapien
atgggacgagaatgaaggtgtggagaccagtgt

SEQ ID NO: 694857 - DNA, 33 bp, Homo sapien
tggttcacatctctccccacatttccaacttac

SEQ ID NO: 694858 - DNA, 33 bp, Homo sapien
tggttcacatctctccgcacatttccaacttac

SEQ ID NO: 694859 - DNA, 33 bp, Homo sapien
ctactagaagcagctacggtgcgtggttttcat

SEQ ID NO: 694860 - DNA, 33 bp, Homo sapien
ctactagaagcagctatggtgcgtggttttcat

SEQ ID NO: 694861 - DNA, 33 bp, Homo sapien
acagcaccttcaattaaatttttgaaaagtatt

SEQ ID NO: 694862 - DNA, 33 bp, Homo sapien
acagcaccttcaattacatttttgaaaagtatt

SEQ ID NO: 694863 - DNA, 33 bp, Homo sapien
tccatttcacttctaactctctttggtttccaa

SEQ ID NO: 694864 - DNA, 33 bp, Homo sapien
tccatttcacttctaagtctctttggtttccaa

SEQ ID NO: 694865 - DNA, 33 bp, Homo sapien
gacttttcagggaaaacgcaaaataaaatagca

SEQ ID NO: 694866 - DNA, 33 bp, Homo sapien
gacttttcagggaaaatgcaaaataaaatagca

SEQ ID NO: 694867 - DNA, 33 bp, Homo sapien
aactgttacaggcatcaaataaaaatgtattct

SEQ ID NO: 694868 - DNA, 33 bp, Homo sapien
aactgttacaggcatctaataaaaatgtattct

SEQ ID NO: 694869 - DNA, 33 bp, Homo sapien
agtttctgcccatataataactgttacaggcat

SEQ ID NO: 694870 - DNA, 33 bp, Homo sapien
agtttctgcccatatagtaactgttacaggcat

SEQ ID NO: 694871 - DNA, 33 bp, Homo sapien
aaagtggtcaatcagacgatgaatgtgttcggg

SEQ ID NO: 694872 - DNA, 33 bp, Homo sapien
aaagtggtcaatcagatgatgaatgtgttcggg

SEQ ID NO: 694873 - DNA, 33 bp, Homo sapien
tcactgtgacatacctcagagagaatattgacc

SEQ ID NO: 694874 - DNA, 33 bp, Homo sapien
tcactgtgacataccttagagagaatattgacc

SEQ ID NO: 694875 - DNA, 33 bp, Homo sapien
gattgagttgcttagacagtgaaggcccttcta

SEQ ID NO: 694876 - DNA, 33 bp, Homo sapien
gattgagttgcttagatagtgaaggcccttcta

SEQ ID NO: 694877 - DNA, 33 bp, Homo sapien
ttcctctattgatgcccacaaatgagagtgata

SEQ ID NO: 694878 - DNA, 33 bp, Homo sapien
ttcctctattgatgcctacaaatgagagtgata

SEQ ID NO: 694879 - DNA, 33 bp, Homo sapien
aagtctcagaaacttgaatcactaattccagtg

SEQ ID NO: 694880 - DNA, 33 bp, Homo sapien
aagtctcagaaacttgcatcactaattccagtg

SEQ ID NO: 694881 - DNA, 33 bp, Homo sapien
aaactgctgcattctacgagcaagagcttgaaa

SEQ ID NO: 694882 - DNA, 33 bp, Homo sapien
aaactgctgcattctatgagcaagagcttgaaa

SEQ ID NO: 694883 - DNA, 33 bp, Homo sapien
ttaatgggtgtaggtacgttaatctcatttaca

SEQ ID NO: 694884 - DNA, 33 bp, Homo sapien
ttaatgggtgtaggtatgttaatctcatttaca

SEQ ID NO: 694885 - DNA, 33 bp, Homo sapien
ttacaaagtcgcaatacagccaatggttcttgc

SEQ ID NO: 694886 - DNA, 33 bp, Homo sapien
ttacaaagtcgcaatatagccaatggttcttgc

SEQ ID NO: 694887 - DNA, 33 bp, Homo sapien
ataatatttcttgagacagaattcatagcactc

SEQ ID NO: 694888 - DNA, 33 bp, Homo sapien
ataatatttcttgagagagaattcatagcactc

SEQ ID NO: 694889 - DNA, 33 bp, Homo sapien
gcaacttctctccatcacttcattctgtagagc

SEQ ID NO: 694890 - DNA, 33 bp, Homo sapien
gcaacttctctccatcgcttcattctgtagagc

SEQ ID NO: 694891 - DNA, 33 bp, Homo sapien
acttgtataaatccaaccggtgatattgatttt

SEQ ID NO: 694892 - DNA, 33 bp, Homo sapien
acttgtataaatccaatcggtgatattgatttt

SEQ ID NO: 694893 - DNA, 33 bp, Homo sapien
catgtgtctatgattacgaggaagaagagaatt

SEQ ID NO: 694894 - DNA, 33 bp, Homo sapien
catgtgtctatgattatgaggaagaagagaatt

SEQ ID NO: 694895 - DNA, 33 bp, Homo sapien
gagactattgttagccaaaataagggtgttgct

SEQ ID NO: 694896 - DNA, 33 bp, Homo sapien
gagactattgttagcccaaataagggtgttgct

SEQ ID NO: 694897 - DNA, 33 bp, Homo sapien
gacacatgcacttatacgttcattaccgtggta

SEQ ID NO: 694898 - DNA, 33 bp, Homo sapien
gacacatgcacttatatgttcattaccgtggta

SEQ ID NO: 694899 - DNA, 33 bp, Homo sapien
cagcagtatgggtgcagctggaagccatgattc

SEQ ID NO: 694900 - DNA, 33 bp, Homo sapien
cagcagtatgggtgcatctggaagccatgattc

SEQ ID NO: 694901 - DNA, 33 bp, Homo sapien
gcccatgaatacccaaagtttatcttccactta

SEQ ID NO: 694902 - DNA, 33 bp, Homo sapien
gcccatgaatacccaatgtttatcttccactta

SEQ ID NO: 694903 - DNA, 33 bp, Homo sapien
accaatcttgcataaaattgcctagaattatat

SEQ ID NO: 694904 - DNA, 33 bp, Homo sapien
accaatcttgcataaagttgcctagaattatat

SEQ ID NO: 694905 - DNA, 33 bp, Homo sapien
tccctaaggatccaaagtggacacagataactc

SEQ ID NO: 694906 - DNA, 33 bp, Homo sapien
tccctaaggatccaaattggacacagataactc

SEQ ID NO: 694907 - DNA, 33 bp, Homo sapien
tattggcactttaatgaaagccgtggtgagtaa

SEQ ID NO: 694908 - DNA, 33 bp, Homo sapien
tattggcactttaatggaagccgtggtgagtaa

SEQ ID NO: 694909 - DNA, 33 bp, Homo sapien
ctgttcaatttttccaggttctttggacatcat

SEQ ID NO: 694910 - DNA, 33 bp, Homo sapien
ctgttcaatttttccatgttctttggacatcat

SEQ ID NO: 694911 - DNA, 33 bp, Homo sapien
tattcaagtgttataacggcactcaatgtttcc

SEQ ID NO: 694912 - DNA, 33 bp, Homo sapien
tattcaagtgttataatggcactcaatgtttcc

SEQ ID NO: 694913 - DNA, 33 bp, Homo sapien
cttgcattctgtcttcaaccctttttatttaca

SEQ ID NO: 694914 - DNA, 33 bp, Homo sapien
cttgcattctgtcttcgaccctttttatttaca

SEQ ID NO: 694915 - DNA, 33 bp, Homo sapien
tattgaatctagaccacagacatattttgtttg

SEQ ID NO: 694916 - DNA, 33 bp, Homo sapien
tattgaatctagaccatagacatattttgtttg

SEQ ID NO: 694917 - DNA, 33 bp, Homo sapien
caggcactcctgttgaagccttcgtcatatttc

SEQ ID NO: 694918 - DNA, 33 bp, Homo sapien
caggcactcctgttgaggccttcgtcatatttc

SEQ ID NO: 694919 - DNA, 33 bp, Homo sapien
cataaacctctcataccaggcttgatgatttgc

SEQ ID NO: 694920 - DNA, 33 bp, Homo sapien
cataaacctctcatactaggcttgatgatttgc

SEQ ID NO: 694921 - DNA, 33 bp, Homo sapien
ttctgaaaatagttccaaatctgagatatttat

SEQ ID NO: 694922 - DNA, 33 bp, Homo sapien
ttctgaaaatagttccgaatctgagatatttat

SEQ ID NO: 694923 - DNA, 33 bp, Homo sapien
gttggaatgagcactcaaatattccctctgttg

SEQ ID NO: 694924 - DNA, 33 bp, Homo sapien
gttggaatgagcactcgaatattccctctgttg

SEQ ID NO: 694925 - DNA, 33 bp, Homo sapien
gagatcagctatttgaacctcctgaaaatggtt

SEQ ID NO: 694926 - DNA, 33 bp, Homo sapien
gagatcagctatttgagcctcctgaaaatggtt

SEQ ID NO: 694927 - DNA, 33 bp, Homo sapien
cagagtcagagcatcacatataaactgcagggc

SEQ ID NO: 694928 - DNA, 33 bp, Homo sapien
cagagtcagagcatcagatataaactgcagggc

SEQ ID NO: 694929 - DNA, 33 bp, Homo sapien
tcacattcaatccctccgaactggtccttgtct

SEQ ID NO: 694930 - DNA, 33 bp, Homo sapien
tcacattcaatccctctgaactggtccttgtct

SEQ ID NO: 694931 - DNA, 33 bp, Homo sapien
tcattgagtttccttgcaatccacgtattgaat

SEQ ID NO: 694932 - DNA, 33 bp, Homo sapien
tcattgagtttccttgtaatccacgtattgaat

SEQ ID NO: 694933 - DNA, 33 bp, Homo sapien
acaaggaccaagtatacacccacccagtcatgc

SEQ ID NO: 694934 - DNA, 33 bp, Homo sapien
acaaggaccaagtatatacccacccagtcatgc

SEQ ID NO: 694935 - DNA, 33 bp, Homo sapien
tttcagataactgataaagacacatttgtcatt

SEQ ID NO: 694936 - DNA, 33 bp, Homo sapien
tttcagataactgatacagacacatttgtcatt

SEQ ID NO: 694937 - DNA, 33 bp, Homo sapien
atcttaaaggaacagacgatagaaaataaatat

SEQ ID NO: 694938 - DNA, 33 bp, Homo sapien
atcttaaaggaacagatgatagaaaataaatat

SEQ ID NO: 694939 - DNA, 33 bp, Homo sapien
atgatcttgggactctcaaaaaactctggccta

SEQ ID NO: 694940 - DNA, 33 bp, Homo sapien
atgatcttgggactcttaaaaaactctggccta

SEQ ID NO: 694941 - DNA, 33 bp, Homo sapien
cagaagagtcaggaagcagagatgcaagtagct

SEQ ID NO: 694942 - DNA, 33 bp, Homo sapien
cagaagagtcaggaaggagagatgcaagtagct

SEQ ID NO: 694943 - DNA, 33 bp, Homo sapien
agccttgaattgaagacattatacaaagtgaaa

SEQ ID NO: 694944 - DNA, 33 bp, Homo sapien
agccttgaattgaagatattatacaaagtgaaa

SEQ ID NO: 694945 - DNA, 33 bp, Homo sapien
tgaatgtacttaatgacattcaactatccactt

SEQ ID NO: 694946 - DNA, 33 bp, Homo sapien
tgaatgtacttaatgatattcaactatccactt

SEQ ID NO: 694947 - DNA, 33 bp, Homo sapien
aggagcttataatctaatagaggccaccaaatg

SEQ ID NO: 694948 - DNA, 33 bp, Homo sapien
aggagcttataatctagtagaggccaccaaatg

SEQ ID NO: 694949 - DNA, 33 bp, Homo sapien
tgacttacatcaagaacggtagacccctttctc

SEQ ID NO: 694950 - DNA, 33 bp, Homo sapien
tgacttacatcaagaatggtagacccctttctc

SEQ ID NO: 694951 - DNA, 33 bp, Homo sapien
cttctgatacctggaagaagcaatgaaaataaa

SEQ ID NO: 694952 - DNA, 33 bp, Homo sapien
cttctgatacctggaataagcaatgaaaataaa

SEQ ID NO: 694953 - DNA, 33 bp, Homo sapien
gataacagagtcattccccaattctcttgaaaa

SEQ ID NO: 694954 - DNA, 33 bp, Homo sapien
gataacagagtcattctccaattctcttgaaaa

SEQ ID NO: 694955 - DNA, 33 bp, Homo sapien
tacccgcacatgaaaacgaaggccacacagccc

SEQ ID NO: 694956 - DNA, 33 bp, Homo sapien
tacccgcacatgaaaatgaaggccacacagccc

SEQ ID NO: 694957 - DNA, 33 bp, Homo sapien
aggtgaggtagcaagcactgatgtagaagctga

SEQ ID NO: 694958 - DNA, 33 bp, Homo sapien
aggtgaggtagcaagcgctgatgtagaagctga

SEQ ID NO: 694959 - DNA, 33 bp, Homo sapien
ggactcagtgcttgcccactggctacttacaga

SEQ ID NO: 694960 - DNA, 33 bp, Homo sapien
ggactcagtgcttgcctactggctacttacaga

SEQ ID NO: 694961 - DNA, 33 bp, Homo sapien
gctatgtggtttttaccgagaaattgatgtgac

SEQ ID NO: 694962 - DNA, 33 bp, Homo sapien
gctatgtggtttttactgagaaattgatgtgac

SEQ ID NO: 694963 - DNA, 33 bp, Homo sapien
tgactatgatgtgaacaaaaagtaaacttgtgt

SEQ ID NO: 694964 - DNA, 33 bp, Homo sapien
tgactatgatgtgaacgaaaagtaaacttgtgt

SEQ ID NO: 694965 - DNA, 33 bp, Homo sapien
cccaagtcttcaacaacattagaatggatacat

SEQ ID NO: 694966 - DNA, 33 bp, Homo sapien
cccaagtcttcaacaatattagaatggatacat

SEQ ID NO: 694967 - DNA, 33 bp, Homo sapien
catgaaggagaaagacaatgagtaccagttgca

SEQ ID NO: 694968 - DNA, 33 bp, Homo sapien
catgaaggagaaagacgatgagtaccagttgca

SEQ ID NO: 694969 - DNA, 33 bp, Homo sapien
gctctggagttttacactggattgaaggaggct

SEQ ID NO: 694970 - DNA, 33 bp, Homo sapien
gctctggagttttacattggattgaaggaggct

SEQ ID NO: 694971 - DNA, 33 bp, Homo sapien
cattcgtagtataagaagtttgtgtgtcagaga

SEQ ID NO: 694972 - DNA, 33 bp, Homo sapien
cattcgtagtataagaggtttgtgtgtcagaga

SEQ ID NO: 694973 - DNA, 33 bp, Homo sapien
gaatcaaagaaaaggcaaaaacagacattttgt

SEQ ID NO: 694974 - DNA, 33 bp, Homo sapien
gaatcaaagaaaaggcgaaaacagacattttgt

SEQ ID NO: 694975 - DNA, 33 bp, Homo sapien
tactttgtataatcaaagacatagtttacacac

SEQ ID NO: 694976 - DNA, 33 bp, Homo sapien
tactttgtataatcaatgacatagtttacacac

SEQ ID NO: 694977 - DNA, 33 bp, Homo sapien
gagcacttgaaatgtcacttttgaaattttaat

SEQ ID NO: 694978 - DNA, 33 bp, Homo sapien
gagcacttgaaatgtcgcttttgaaattttaat

SEQ ID NO: 694979 - DNA, 33 bp, Homo sapien
aataggaaagtagccaatgcacattactgaagg

SEQ ID NO: 694980 - DNA, 33 bp, Homo sapien
aataggaaagtagccagtgcacattactgaagg

SEQ ID NO: 694981 - DNA, 33 bp, Homo sapien
agctgaggcttttagacgtagattaggttggtg

SEQ ID NO: 694982 - DNA, 33 bp, Homo sapien
agctgaggcttttagatgtagattaggttggtg

SEQ ID NO: 694983 - DNA, 33 bp, Homo sapien
atgtagaacactgaacccagcaaaaagagaatg

SEQ ID NO: 694984 - DNA, 33 bp, Homo sapien
atgtagaacactgaactcagcaaaaagagaatg

SEQ ID NO: 694985 - DNA, 33 bp, Homo sapien
ctattggctggagcaacggtttttactggacca

SEQ ID NO: 694986 - DNA, 33 bp, Homo sapien
ctattggctggagcaatggtttttactggacca

SEQ ID NO: 694987 - DNA, 33 bp, Homo sapien
actttcagaataaataccaagctcctttatgaa

SEQ ID NO: 694988 - DNA, 33 bp, Homo sapien
actttcagaataaatatcaagctcctttatgaa

SEQ ID NO: 694989 - DNA, 33 bp, Homo sapien
acagagaaacttaccaatgagagtacccaacta

SEQ ID NO: 694990 - DNA, 33 bp, Homo sapien
acagagaaacttaccagtgagagtacccaacta

SEQ ID NO: 694991 - DNA, 33 bp, Homo sapien
aactagaaggtctgtaacaggaaggacacggct

SEQ ID NO: 694992 - DNA, 33 bp, Homo sapien
aactagaaggtctgtagcaggaaggacacggct

SEQ ID NO: 694993 - DNA, 33 bp, Homo sapien
actgatgttttctttcacttcgcttgtattttt

SEQ ID NO: 694994 - DNA, 33 bp, Homo sapien
actgatgttttctttcgcttcgcttgtattttt

SEQ ID NO: 694995 - DNA, 33 bp, Homo sapien
atgtgacataatttagcacactgttgcttcaaa

SEQ ID NO: 694996 - DNA, 33 bp, Homo sapien
atgtgacataatttagtacactgttgcttcaaa

SEQ ID NO: 694997 - DNA, 33 bp, Homo sapien
tagattattaaagcgaccaaaaaagagccattc

SEQ ID NO: 694998 - DNA, 33 bp, Homo sapien
tagattattaaagcgatcaaaaaagagccattc

SEQ ID NO: 694999 - DNA, 33 bp, Homo sapien
gttcagagatcaggaaagtggagaaagtttgat

SEQ ID NO: 695000 - DNA, 33 bp, Homo sapien
gttcagagatcaggaaggtggagaaagtttgat

SEQ ID NO: 695001 - DNA, 33 bp, Homo sapien
agtaatacagtcattcaaggcagaaagccttga

SEQ ID NO: 695002 - DNA, 33 bp, Homo sapien
agtaatacagtcattcgaggcagaaagccttga

SEQ ID NO: 695003 - DNA, 33 bp, Homo sapien
cttttttctgtgttccaatgtgaacttgttcaa

SEQ ID NO: 695004 - DNA, 33 bp, Homo sapien
cttttttctgtgttccgatgtgaacttgttcaa

SEQ ID NO: 695005 - DNA, 33 bp, Homo sapien
gtagtatgcaaagagacggaatagagtaagagt

SEQ ID NO: 695006 - DNA, 33 bp, Homo sapien
gtagtatgcaaagagatggaatagagtaagagt

SEQ ID NO: 695007 - DNA, 33 bp, Homo sapien
atgctgtctatccaaggaactatctttacctaa

SEQ ID NO: 695008 - DNA, 33 bp, Homo sapien
atgctgtctatccaagtaactatctttacctaa

SEQ ID NO: 695009 - DNA, 33 bp, Homo sapien
tcagtcattattcttcacagttcctcccatgct

SEQ ID NO: 695010 - DNA, 33 bp, Homo sapien
tcagtcattattcttcgcagttcctcccatgct

SEQ ID NO: 695011 - DNA, 33 bp, Homo sapien
atgaaccagtggttagacaagtttattgaatac

SEQ ID NO: 695012 - DNA, 33 bp, Homo sapien
atgaaccagtggttaggcaagtttattgaatac

SEQ ID NO: 695013 - DNA, 33 bp, Homo sapien
agatttgtatgttaacaatctcgttcaagatgc

SEQ ID NO: 695014 - DNA, 33 bp, Homo sapien
agatttgtatgttaacgatctcgttcaagatgc

SEQ ID NO: 695015 - DNA, 33 bp, Homo sapien
tgaattatgtcaaggaagtcttttcaaatactt

SEQ ID NO: 695016 - DNA, 33 bp, Homo sapien
tgaattatgtcaaggatgtcttttcaaatactt

SEQ ID NO: 695017 - DNA, 33 bp, Homo sapien
ggctgccacttttaacccaggatggtctgataa

SEQ ID NO: 695018 - DNA, 33 bp, Homo sapien
ggctgccacttttaactcaggatggtctgataa

SEQ ID NO: 695019 - DNA, 33 bp, Homo sapien
agaatatttgaccaatgacaactaatacttctt

SEQ ID NO: 695020 - DNA, 33 bp, Homo sapien
agaatatttgaccaattacaactaatacttctt

SEQ ID NO: 695021 - DNA, 33 bp, Homo sapien
caatggatttgcctaaccttcacaataagtgct

SEQ ID NO: 695022 - DNA, 33 bp, Homo sapien
caatggatttgcctaagcttcacaataagtgct

SEQ ID NO: 695023 - DNA, 33 bp, Homo sapien
ctaactcctaattctacggcctacctatctgaa

SEQ ID NO: 695024 - DNA, 33 bp, Homo sapien
ctaactcctaattctatggcctacctatctgaa

SEQ ID NO: 695025 - DNA, 33 bp, Homo sapien
cactatgttcttctagccgttctcttgatggaa

SEQ ID NO: 695026 - DNA, 33 bp, Homo sapien
cactatgttcttctagtcgttctcttgatggaa

SEQ ID NO: 695027 - DNA, 33 bp, Homo sapien
tgagataacattttgtaaagaagaaattccacc

SEQ ID NO: 695028 - DNA, 33 bp, Homo sapien
tgagataacattttgtgaagaagaaattccacc

SEQ ID NO: 695029 - DNA, 33 bp, Homo sapien
aactcttctgagataagtacggtattaccttgg

SEQ ID NO: 695030 - DNA, 33 bp, Homo sapien
aactcttctgagataattacggtattaccttgg

SEQ ID NO: 695031 - DNA, 33 bp, Homo sapien
taacatggatggataaataaatcaatacgtgat

SEQ ID NO: 695032 - DNA, 33 bp, Homo sapien
taacatggatggataagtaaatcaatacgtgat

SEQ ID NO: 695033 - DNA, 33 bp, Homo sapien
ctcttcagaccttcaaagaattatatgaggccc

SEQ ID NO: 695034 - DNA, 33 bp, Homo sapien
ctcttcagaccttcaatgaattatatgaggccc

SEQ ID NO: 695035 - DNA, 33 bp, Homo sapien
aatcccaagaacttcagggtgaattggcaatct

SEQ ID NO: 695036 - DNA, 33 bp, Homo sapien
aatcccaagaacttcatggtgaattggcaatct

SEQ ID NO: 695037 - DNA, 33 bp, Homo sapien
agaaacacacacacgaaccaagagcccaggagg

SEQ ID NO: 695038 - DNA, 33 bp, Homo sapien
agaaacacacacacgatccaagagcccaggagg

SEQ ID NO: 695039 - DNA, 33 bp, Homo sapien
gattaaaaactttgacaaaatgttctatatggt

SEQ ID NO: 695040 - DNA, 33 bp, Homo sapien
gattaaaaactttgactaaatgttctatatggt

SEQ ID NO: 695041 - DNA, 33 bp, Homo sapien
agaaaccacaaaatagaacagtgaatatttgag

SEQ ID NO: 695042 - DNA, 33 bp, Homo sapien
agaaaccacaaaataggacagtgaatatttgag

SEQ ID NO: 695043 - DNA, 33 bp, Homo sapien
aatacaactttcaattaaaaatgctcataagtt

SEQ ID NO: 695044 - DNA, 33 bp, Homo sapien
aatacaactttcaatttaaaatgctcataagtt

SEQ ID NO: 695045 - DNA, 33 bp, Homo sapien
tcttctcttcctactcccaatttctgcagttac

SEQ ID NO: 695046 - DNA, 33 bp, Homo sapien
tcttctcttcctactctcaatttctgcagttac

SEQ ID NO: 695047 - DNA, 33 bp, Homo sapien
ttcagagatgcacaaaagaagagaggaggcagc

SEQ ID NO: 695048 - DNA, 33 bp, Homo sapien
ttcagagatgcacaaaggaagagaggaggcagc

SEQ ID NO: 695049 - DNA, 33 bp, Homo sapien
aggccccagccaaacccatctgtggtcacgtgc

SEQ ID NO: 695050 - DNA, 33 bp, Homo sapien
aggccccagccaaacctatctgtggtcacgtgc

SEQ ID NO: 695051 - DNA, 33 bp, Homo sapien
acaacatttggcagcacgtggttaggctatcaa

SEQ ID NO: 695052 - DNA, 33 bp, Homo sapien
acaacatttggcagcatgtggttaggctatcaa

SEQ ID NO: 695053 - DNA, 33 bp, Homo sapien
gctgccaaatgttgtcacaagagggctactgat

SEQ ID NO: 695054 - DNA, 33 bp, Homo sapien
gctgccaaatgttgtcgcaagagggctactgat

SEQ ID NO: 695055 - DNA, 33 bp, Homo sapien
atatgtctgtcccataccagagtgcattctggg

SEQ ID NO: 695056 - DNA, 33 bp, Homo sapien
atatgtctgtcccatagcagagtgcattctggg

SEQ ID NO: 695057 - DNA, 33 bp, Homo sapien
ggcctcagggaacttacggtcgtgatggaaagc

SEQ ID NO: 695058 - DNA, 33 bp, Homo sapien
ggcctcagggaacttatggtcgtgatggaaagc

SEQ ID NO: 695059 - DNA, 33 bp, Homo sapien
aatttgtattgaaacaaaaaaagccagaatagc

SEQ ID NO: 695060 - DNA, 33 bp, Homo sapien
aatttgtattgaaacagaaaaagccagaatagc

SEQ ID NO: 695061 - DNA, 33 bp, Homo sapien
tctaaaatttgaaccaactcttaaatgatggct

SEQ ID NO: 695062 - DNA, 33 bp, Homo sapien
tctaaaatttgaaccagctcttaaatgatggct

SEQ ID NO: 695063 - DNA, 33 bp, Homo sapien
ctacttggcaaaataaagtaactaatctaatga

SEQ ID NO: 695064 - DNA, 33 bp, Homo sapien
ctacttggcaaaataaggtaactaatctaatga

SEQ ID NO: 695065 - DNA, 33 bp, Homo sapien
tagattatctgaaagtcaaaccaaggaaacaga

SEQ ID NO: 695066 - DNA, 33 bp, Homo sapien
tagattatctgaaagttaaaccaaggaaacaga

SEQ ID NO: 695067 - DNA, 33 bp, Homo sapien
tcaggtcaacaccttacactggtttatgtatca

SEQ ID NO: 695068 - DNA, 33 bp, Homo sapien
tcaggtcaacaccttatactggtttatgtatca

SEQ ID NO: 695069 - DNA, 33 bp, Homo sapien
taataatacaattagggacatctggcatgagtg

SEQ ID NO: 695070 - DNA, 33 bp, Homo sapien
taataatacaattaggtacatctggcatgagtg

SEQ ID NO: 695071 - DNA, 33 bp, Homo sapien
gtgttacacgaattggaaaggttagggagcact

SEQ ID NO: 695072 - DNA, 33 bp, Homo sapien
gtgttacacgaattgggaaggttagggagcact

SEQ ID NO: 695073 - DNA, 33 bp, Homo sapien
aatctcttagtgattaccaaatgcctactgaat

SEQ ID NO: 695074 - DNA, 33 bp, Homo sapien
aatctcttagtgattagcaaatgcctactgaat

SEQ ID NO: 695075 - DNA, 33 bp, Homo sapien
ataatgatactattacacacatcacagtctccc

SEQ ID NO: 695076 - DNA, 33 bp, Homo sapien
ataatgatactattacgcacatcacagtctccc

SEQ ID NO: 695077 - DNA, 33 bp, Homo sapien
gttttccttgatccaacagttttcaaataaagt

SEQ ID NO: 695078 - DNA, 33 bp, Homo sapien
gttttccttgatccaagagttttcaaataaagt

SEQ ID NO: 695079 - DNA, 33 bp, Homo sapien
cttgctattttgccaactatcgagttattacca

SEQ ID NO: 695080 - DNA, 33 bp, Homo sapien
cttgctattttgccaattatcgagttattacca

SEQ ID NO: 695081 - DNA, 33 bp, Homo sapien
aagacatacaaatgccaagagatatttccccaa

SEQ ID NO: 695082 - DNA, 33 bp, Homo sapien
aagacatacaaatgccgagagatatttccccaa

SEQ ID NO: 695083 - DNA, 33 bp, Homo sapien
tatcacaaattgaacactaagtccatatatgca

SEQ ID NO: 695084 - DNA, 33 bp, Homo sapien
tatcacaaattgaacattaagtccatatatgca

SEQ ID NO: 695085 - DNA, 33 bp, Homo sapien
acaaagctgaaacctgaacattatgaaagataa

SEQ ID NO: 695086 - DNA, 33 bp, Homo sapien
acaaagctgaaacctgtacattatgaaagataa

SEQ ID NO: 695087 - DNA, 33 bp, Homo sapien
aatgtaatgcatcttcaattaataccaaatcac

SEQ ID NO: 695088 - DNA, 33 bp, Homo sapien
aatgtaatgcatcttctattaataccaaatcac

SEQ ID NO: 695089 - DNA, 33 bp, Homo sapien
tttcatttttcacataagcctaaacatttttct

SEQ ID NO: 695090 - DNA, 33 bp, Homo sapien
tttcatttttcacatacgcctaaacatttttct

SEQ ID NO: 695091 - DNA, 33 bp, Homo sapien
gtgtcttatttatcaacgtatttcagtctaact

SEQ ID NO: 695092 - DNA, 33 bp, Homo sapien
gtgtcttatttatcaatgtatttcagtctaact

SEQ ID NO: 695093 - DNA, 33 bp, Homo sapien
ggctttcctttcaccaacttcagaggacaatgg

SEQ ID NO: 695094 - DNA, 33 bp, Homo sapien
ggctttcctttcaccagcttcagaggacaatgg

SEQ ID NO: 695095 - DNA, 33 bp, Homo sapien
gggaaggaagaagctcagaaaagacatgagaac

SEQ ID NO: 695096 - DNA, 33 bp, Homo sapien
gggaaggaagaagctcggaaaagacatgagaac

SEQ ID NO: 695097 - DNA, 33 bp, Homo sapien
aggaattgtgaataaagtgtagacatcagttaa

SEQ ID NO: 695098 - DNA, 33 bp, Homo sapien
aggaattgtgaataaattgtagacatcagttaa

SEQ ID NO: 695099 - DNA, 33 bp, Homo sapien
atgtcctgtgattatgcatgataccttactttc

SEQ ID NO: 695100 - DNA, 33 bp, Homo sapien
atgtcctgtgattatgtatgataccttactttc

SEQ ID NO: 695101 - DNA, 33 bp, Homo sapien
gagcactctccatgccaaatgtctgcttcttga

SEQ ID NO: 695102 - DNA, 33 bp, Homo sapien
gagcactctccatgcccaatgtctgcttcttga

SEQ ID NO: 695103 - DNA, 33 bp, Homo sapien
caatatgcctattaacagtggagtggataaaga

SEQ ID NO: 695104 - DNA, 33 bp, Homo sapien
caatatgcctattaacggtggagtggataaaga

SEQ ID NO: 695105 - DNA, 33 bp, Homo sapien
ggacctggaggtcaaaacatttgaatggtggga

SEQ ID NO: 695106 - DNA, 33 bp, Homo sapien
ggacctggaggtcaaaccatttgaatggtggga

SEQ ID NO: 695107 - DNA, 33 bp, Homo sapien
ctaagcaaaatgtacacaactggaggaatcaca

SEQ ID NO: 695108 - DNA, 33 bp, Homo sapien
ctaagcaaaatgtacagaactggaggaatcaca

SEQ ID NO: 695109 - DNA, 33 bp, Homo sapien
gtaatttcacatggctcagaggagaaaaactgg

SEQ ID NO: 695110 - DNA, 33 bp, Homo sapien
gtaatttcacatggctgagaggagaaaaactgg

SEQ ID NO: 695111 - DNA, 33 bp, Homo sapien
catttttcattccaagacctgtggatcagatgc

SEQ ID NO: 695112 - DNA, 33 bp, Homo sapien
catttttcattccaaggcctgtggatcagatgc

SEQ ID NO: 695113 - DNA, 33 bp, Homo sapien
agtaaattagtgattaccagagaccagggaagg

SEQ ID NO: 695114 - DNA, 33 bp, Homo sapien
agtaaattagtgattatcagagaccagggaagg

SEQ ID NO: 695115 - DNA, 33 bp, Homo sapien
tcaatagttttccaagaaggatgctacaacaga

SEQ ID NO: 695116 - DNA, 33 bp, Homo sapien
tcaatagttttccaagcaggatgctacaacaga

SEQ ID NO: 695117 - DNA, 33 bp, Homo sapien
ctgtcttcatcgctcccggaacaaaagtacttc

SEQ ID NO: 695118 - DNA, 33 bp, Homo sapien
ctgtcttcatcgctcctggaacaaaagtacttc

SEQ ID NO: 695119 - DNA, 33 bp, Homo sapien
tgaccttgtaagaaacaaaaagtagatattatt

SEQ ID NO: 695120 - DNA, 33 bp, Homo sapien
tgaccttgtaagaaacgaaaagtagatattatt

SEQ ID NO: 695121 - DNA, 33 bp, Homo sapien
tacaattagtaactaaagccacgttgatttttc

SEQ ID NO: 695122 - DNA, 33 bp, Homo sapien
tacaattagtaactaaggccacgttgatttttc

SEQ ID NO: 695123 - DNA, 33 bp, Homo sapien
gaagtgttagtgatgacggacagaaatagacaa

SEQ ID NO: 695124 - DNA, 33 bp, Homo sapien
gaagtgttagtgatgatggacagaaatagacaa

SEQ ID NO: 695125 - DNA, 33 bp, Homo sapien
aagtctgtgctgttggaatatggttcttgttca

SEQ ID NO: 695126 - DNA, 33 bp, Homo sapien
aagtctgtgctgttgggatatggttcttgttca

SEQ ID NO: 695127 - DNA, 33 bp, Homo sapien
ctacctcttatcggataaaattactgaaatatt

SEQ ID NO: 695128 - DNA, 33 bp, Homo sapien
ctacctcttatcggattaaattactgaaatatt

SEQ ID NO: 695129 - DNA, 33 bp, Homo sapien
gagcaaaatatcagaaaagaacgctacctctta

SEQ ID NO: 695130 - DNA, 33 bp, Homo sapien
gagcaaaatatcagaagagaacgctacctctta

SEQ ID NO: 695131 - DNA, 33 bp, Homo sapien
aaagttcattaaagctaaacaaaagtgacatat

SEQ ID NO: 695132 - DNA, 33 bp, Homo sapien
aaagttcattaaagctgaacaaaagtgacatat

SEQ ID NO: 695133 - DNA, 33 bp, Homo sapien
tcagatcctactttgccaactttctcattcaag

SEQ ID NO: 695134 - DNA, 33 bp, Homo sapien
tcagatcctactttgctaactttctcattcaag

SEQ ID NO: 695135 - DNA, 33 bp, Homo sapien
aggctaaatgttaaatcaaattcatgcaggtat

SEQ ID NO: 695136 - DNA, 33 bp, Homo sapien
aggctaaatgttaaatgaaattcatgcaggtat

SEQ ID NO: 695137 - DNA, 33 bp, Homo sapien
acttatcccttgtcacagcattaaatatgtgtt

SEQ ID NO: 695138 - DNA, 33 bp, Homo sapien
acttatcccttgtcacggcattaaatatgtgtt

SEQ ID NO: 695139 - DNA, 33 bp, Homo sapien
cccagtctcagaaataacttcagcgtgtcaatg

SEQ ID NO: 695140 - DNA, 33 bp, Homo sapien
cccagtctcagaaataccttcagcgtgtcaatg

SEQ ID NO: 695141 - DNA, 33 bp, Homo sapien
cctttagcactttgaaatggttgcagtcaagtc

SEQ ID NO: 695142 - DNA, 33 bp, Homo sapien
cctttagcactttgaattggttgcagtcaagtc

SEQ ID NO: 695143 - DNA, 33 bp, Homo sapien
ttttttccattaacaacagaacatttcaattca

SEQ ID NO: 695144 - DNA, 33 bp, Homo sapien
ttttttccattaacaagagaacatttcaattca

SEQ ID NO: 695145 - DNA, 33 bp, Homo sapien
aagcgctatttcccaacagaattaatccacttt

SEQ ID NO: 695146 - DNA, 33 bp, Homo sapien
aagcgctatttcccaagagaattaatccacttt

SEQ ID NO: 695147 - DNA, 33 bp, Homo sapien
aggtctgaattggtcaaaatctaagtttgtagt

SEQ ID NO: 695148 - DNA, 33 bp, Homo sapien
aggtctgaattggtcagaatctaagtttgtagt

SEQ ID NO: 695149 - DNA, 33 bp, Homo sapien
acattcgaagagtctacgcctatggcttaaggc

SEQ ID NO: 695150 - DNA, 33 bp, Homo sapien
acattcgaagagtctatgcctatggcttaaggc

SEQ ID NO: 695151 - DNA, 33 bp, Homo sapien
aaaaaggaagaattcaaggtgaaacagctacat

SEQ ID NO: 695152 - DNA, 33 bp, Homo sapien
aaaaaggaagaattcatggtgaaacagctacat

SEQ ID NO: 695153 - DNA, 33 bp, Homo sapien
ggtggtacatttcttccatttgcctctcccaat

SEQ ID NO: 695154 - DNA, 33 bp, Homo sapien
ggtggtacatttcttctatttgcctctcccaat

SEQ ID NO: 695155 - DNA, 33 bp, Homo sapien
tggttatttctattacaggaggtatacactgag

SEQ ID NO: 695156 - DNA, 33 bp, Homo sapien
tggttatttctattacgggaggtatacactgag

SEQ ID NO: 695157 - DNA, 33 bp, Homo sapien
ttgtgctcttcttacacatccacatgagtactc

SEQ ID NO: 695158 - DNA, 33 bp, Homo sapien
ttgtgctcttcttacagatccacatgagtactc

SEQ ID NO: 695159 - DNA, 33 bp, Homo sapien
tttctccacaaaactcaaagaagatgtcaaatc

SEQ ID NO: 695160 - DNA, 33 bp, Homo sapien
tttctccacaaaactcgaagaagatgtcaaatc

SEQ ID NO: 695161 - DNA, 33 bp, Homo sapien
agcaacaggtgtaggtaaatttgatgatcaagt

SEQ ID NO: 695162 - DNA, 33 bp, Homo sapien
agcaacaggtgtaggtcaatttgatgatcaagt

SEQ ID NO: 695163 - DNA, 33 bp, Homo sapien
gcatgatctaactgtcaagccagtaatgatttt

SEQ ID NO: 695164 - DNA, 33 bp, Homo sapien
gcatgatctaactgtcgagccagtaatgatttt

SEQ ID NO: 695165 - DNA, 33 bp, Homo sapien
aaataatcacagcatacctttatcaagtctcca

SEQ ID NO: 695166 - DNA, 33 bp, Homo sapien
aaataatcacagcatatctttatcaagtctcca

SEQ ID NO: 695167 - DNA, 33 bp, Homo sapien
tcagaatcacatgagcaagtctttaaaataaat

SEQ ID NO: 695168 - DNA, 33 bp, Homo sapien
tcagaatcacatgagcgagtctttaaaataaat

SEQ ID NO: 695169 - DNA, 33 bp, Homo sapien
taaaactgccagggagacagtaataaacacacc

SEQ ID NO: 695170 - DNA, 33 bp, Homo sapien
taaaactgccagggagtcagtaataaacacacc

SEQ ID NO: 695171 - DNA, 33 bp, Homo sapien
gaatctcagttgggcgacatgacttaaagagtt

SEQ ID NO: 695172 - DNA, 33 bp, Homo sapien
gaatctcagttgggcggcatgacttaaagagtt

SEQ ID NO: 695173 - DNA, 33 bp, Homo sapien
tggagaagagaaacaaaaggaagtttgtctgac

SEQ ID NO: 695174 - DNA, 33 bp, Homo sapien
tggagaagagaaacaagaggaagtttgtctgac

SEQ ID NO: 695175 - DNA, 33 bp, Homo sapien
atctccagggttggaaaagtgacatgttttgtc

SEQ ID NO: 695176 - DNA, 33 bp, Homo sapien
atctccagggttggaagagtgacatgttttgtc

SEQ ID NO: 695177 - DNA, 33 bp, Homo sapien
acacatgacaacaaaactgtattgttacacttt

SEQ ID NO: 695178 - DNA, 33 bp, Homo sapien
acacatgacaacaaaagtgtattgttacacttt

SEQ ID NO: 695179 - DNA, 33 bp, Homo sapien
caacaacaaatcccaagaaactgccagatttgt

SEQ ID NO: 695180 - DNA, 33 bp, Homo sapien
caacaacaaatcccaataaactgccagatttgt

SEQ ID NO: 695181 - DNA, 33 bp, Homo sapien
ggtatcaataaatctgcaatttccaatgtaatc

SEQ ID NO: 695182 - DNA, 33 bp, Homo sapien
ggtatcaataaatctgtaatttccaatgtaatc

SEQ ID NO: 695183 - DNA, 33 bp, Homo sapien
catggcaacccttaagccatcttcaaattcatt

SEQ ID NO: 695184 - DNA, 33 bp, Homo sapien
catggcaacccttaaggcatcttcaaattcatt

SEQ ID NO: 695185 - DNA, 33 bp, Homo sapien
aataaaaactataaaaccactatgctgacaact

SEQ ID NO: 695186 - DNA, 33 bp, Homo sapien
aataaaaactataaaatcactatgctgacaact

SEQ ID NO: 695187 - DNA, 33 bp, Homo sapien
agtcaaaggacttagcgccaatcctctctgtaa

SEQ ID NO: 695188 - DNA, 33 bp, Homo sapien
agtcaaaggacttagctccaatcctctctgtaa

SEQ ID NO: 695189 - DNA, 33 bp, Homo sapien
ttttattggtagccagcacttagttttgagttc

SEQ ID NO: 695190 - DNA, 33 bp, Homo sapien
ttttattggtagccaggacttagttttgagttc

SEQ ID NO: 695191 - DNA, 33 bp, Homo sapien
ttagaagtgttcctcaatcttggtgctattgtc

SEQ ID NO: 695192 - DNA, 33 bp, Homo sapien
ttagaagtgttcctcagtcttggtgctattgtc

SEQ ID NO: 695193 - DNA, 33 bp, Homo sapien
tacacataagcattgaatatgacaattgtcaac

SEQ ID NO: 695194 - DNA, 33 bp, Homo sapien
tacacataagcattgagtatgacaattgtcaac

SEQ ID NO: 695195 - DNA, 33 bp, Homo sapien
tgattattttacacaaaagtctgaagtttaaca

SEQ ID NO: 695196 - DNA, 33 bp, Homo sapien
tgattattttacacaagagtctgaagtttaaca

SEQ ID NO: 695197 - DNA, 33 bp, Homo sapien
caagttcagaagcaaaagattagtatgcccatg

SEQ ID NO: 695198 - DNA, 33 bp, Homo sapien
caagttcagaagcaaaggattagtatgcccatg

SEQ ID NO: 695199 - DNA, 33 bp, Homo sapien
cttccttttagtgtgacagaaaatcatcaaatt

SEQ ID NO: 695200 - DNA, 33 bp, Homo sapien
cttccttttagtgtgatagaaaatcatcaaatt

SEQ ID NO: 695201 - DNA, 33 bp, Homo sapien
ttgatatcaggaaacactgtgcacccagctaat

SEQ ID NO: 695202 - DNA, 33 bp, Homo sapien
ttgatatcaggaaacattgtgcacccagctaat

SEQ ID NO: 695203 - DNA, 33 bp, Homo sapien
agattcttgctcctcacaattgccacattgtat

SEQ ID NO: 695204 - DNA, 33 bp, Homo sapien
agattcttgctcctcagaattgccacattgtat

SEQ ID NO: 695205 - DNA, 33 bp, Homo sapien
acttcccagtcttctccctagattcttgctcct

SEQ ID NO: 695206 - DNA, 33 bp, Homo sapien
acttcccagtcttctcgctagattcttgctcct

SEQ ID NO: 695207 - DNA, 33 bp, Homo sapien
cattagttcagagtgacggggctaactatagaa

SEQ ID NO: 695208 - DNA, 33 bp, Homo sapien
cattagttcagagtgatggggctaactatagaa

SEQ ID NO: 695209 - DNA, 33 bp, Homo sapien
agaaaaggataagctacgaaaaccatatagaag

SEQ ID NO: 695210 - DNA, 33 bp, Homo sapien
agaaaaggataagctatgaaaaccatatagaag

SEQ ID NO: 695211 - DNA, 33 bp, Homo sapien
aaggttggatgtgaccaacaataacccaactca

SEQ ID NO: 695212 - DNA, 33 bp, Homo sapien
aaggttggatgtgaccgacaataacccaactca

SEQ ID NO: 695213 - DNA, 33 bp, Homo sapien
catgcttctgtttctcaagtgtgaaaaatctgt

SEQ ID NO: 695214 - DNA, 33 bp, Homo sapien
catgcttctgtttctcgagtgtgaaaaatctgt

SEQ ID NO: 695215 - DNA, 33 bp, Homo sapien
atccaaacatcttacaatatagcaaacaatcat

SEQ ID NO: 695216 - DNA, 33 bp, Homo sapien
atccaaacatcttacagtatagcaaacaatcat

SEQ ID NO: 695217 - DNA, 33 bp, Homo sapien
gaaatatttcccagaactgagcaacctctgaag

SEQ ID NO: 695218 - DNA, 33 bp, Homo sapien
gaaatatttcccagaattgagcaacctctgaag

SEQ ID NO: 695219 - DNA, 33 bp, Homo sapien
aataaaacaagaactacgtggtttgctatattt

SEQ ID NO: 695220 - DNA, 33 bp, Homo sapien
aataaaacaagaactatgtggtttgctatattt

SEQ ID NO: 695221 - DNA, 33 bp, Homo sapien
tgtctccataggaacactgtataccaggtctag

SEQ ID NO: 695222 - DNA, 33 bp, Homo sapien
tgtctccataggaacattgtataccaggtctag

SEQ ID NO: 695223 - DNA, 33 bp, Homo sapien
agcaaagataatttccaagagagaacattttat

SEQ ID NO: 695224 - DNA, 33 bp, Homo sapien
agcaaagataatttccgagagagaacattttat

SEQ ID NO: 695225 - DNA, 33 bp, Homo sapien
tatagaccaatcaaaaaaagacagtgcagaaat

SEQ ID NO: 695226 - DNA, 33 bp, Homo sapien
tatagaccaatcaaaacaagacagtgcagaaat

SEQ ID NO: 695227 - DNA, 33 bp, Homo sapien
aaacttgctggtttcacggctcagagggcatca

SEQ ID NO: 695228 - DNA, 33 bp, Homo sapien
aaacttgctggtttcatggctcagagggcatca

SEQ ID NO: 695229 - DNA, 33 bp, Homo sapien
accattagtcagccaaacaaaagatactctggg

SEQ ID NO: 695230 - DNA, 33 bp, Homo sapien
accattagtcagccaaccaaaagatactctggg

SEQ ID NO: 695231 - DNA, 33 bp, Homo sapien
gtgtaataatcagaaacgtacttgactttactg

SEQ ID NO: 695232 - DNA, 33 bp, Homo sapien
gtgtaataatcagaaaggtacttgactttactg

SEQ ID NO: 695233 - DNA, 33 bp, Homo sapien
aactccctcttccttccaaagttttgcaccatc

SEQ ID NO: 695234 - DNA, 33 bp, Homo sapien
aactccctcttccttctaaagttttgcaccatc

SEQ ID NO: 695235 - DNA, 33 bp, Homo sapien
agcttccacatagcaaaataaattaccaaggca

SEQ ID NO: 695236 - DNA, 33 bp, Homo sapien
agcttccacatagcaagataaattaccaaggca

SEQ ID NO: 695237 - DNA, 33 bp, Homo sapien
gcttataacctgctaaaccccatgctaaaggat

SEQ ID NO: 695238 - DNA, 33 bp, Homo sapien
gcttataacctgctaacccccatgctaaaggat

SEQ ID NO: 695239 - DNA, 33 bp, Homo sapien
gaagaatatctagcagcatagtaaaagtgaaag

SEQ ID NO: 695240 - DNA, 33 bp, Homo sapien
gaagaatatctagcagtatagtaaaagtgaaag

SEQ ID NO: 695241 - DNA, 33 bp, Homo sapien
tggcaataatcaaaaaatagtaggtgttggcat

SEQ ID NO: 695242 - DNA, 33 bp, Homo sapien
tggcaataatcaaaaagtagtaggtgttggcat

SEQ ID NO: 695243 - DNA, 33 bp, Homo sapien
aacagaggctgagaagaaatggaaaccaatatt

SEQ ID NO: 695244 - DNA, 33 bp, Homo sapien
aacagaggctgagaagcaatggaaaccaatatt

SEQ ID NO: 695245 - DNA, 33 bp, Homo sapien
atcaagaggttatcatcagacctaagagttggc

SEQ ID NO: 695246 - DNA, 33 bp, Homo sapien
atcaagaggttatcattagacctaagagttggc

SEQ ID NO: 695247 - DNA, 33 bp, Homo sapien
tgtcagtgatatatgacggcaataaaagtttta

SEQ ID NO: 695248 - DNA, 33 bp, Homo sapien
tgtcagtgatatatgatggcaataaaagtttta

SEQ ID NO: 695249 - DNA, 33 bp, Homo sapien
atattcagtccatagcactccacatagagtagg

SEQ ID NO: 695250 - DNA, 33 bp, Homo sapien
atattcagtccatagcgctccacatagagtagg

SEQ ID NO: 695251 - DNA, 33 bp, Homo sapien
taaagacttaaatgtaacacttgaaactgtaag

SEQ ID NO: 695252 - DNA, 33 bp, Homo sapien
taaagacttaaatgtagcacttgaaactgtaag

SEQ ID NO: 695253 - DNA, 33 bp, Homo sapien
ttaagggtttattgttcaaagctgttgagtttt

SEQ ID NO: 695254 - DNA, 33 bp, Homo sapien
ttaagggtttattgtttaaagctgttgagtttt

SEQ ID NO: 695255 - DNA, 33 bp, Homo sapien
gcattttggtcaaaaccaatgaacatgtctcta

SEQ ID NO: 695256 - DNA, 33 bp, Homo sapien
gcattttggtcaaaactaatgaacatgtctcta

SEQ ID NO: 695257 - DNA, 33 bp, Homo sapien
ggtctcggatggagataaagaacttgctggaaa

SEQ ID NO: 695258 - DNA, 33 bp, Homo sapien
ggtctcggatggagatgaagaacttgctggaaa

SEQ ID NO: 695259 - DNA, 33 bp, Homo sapien
gctgccctgtgaagcccggagacatagcgccct

SEQ ID NO: 695260 - DNA, 33 bp, Homo sapien
gctgccctgtgaagcctggagacatagcgccct

SEQ ID NO: 695261 - DNA, 33 bp, Homo sapien
attataactgtgtgtacgctacaatcttggcgt

SEQ ID NO: 695262 - DNA, 33 bp, Homo sapien
attataactgtgtgtatgctacaatcttggcgt

SEQ ID NO: 695263 - DNA, 33 bp, Homo sapien
cagctagatccctatacagaaggtgattacatc

SEQ ID NO: 695264 - DNA, 33 bp, Homo sapien
cagctagatccctatatagaaggtgattacatc

SEQ ID NO: 695265 - DNA, 33 bp, Homo sapien
taaagtaggcttatgcaccaaagatttattttc

SEQ ID NO: 695266 - DNA, 33 bp, Homo sapien
taaagtaggcttatgcgccaaagatttattttc

SEQ ID NO: 695267 - DNA, 33 bp, Homo sapien
agttctcagctattgacatctttcttttacctt

SEQ ID NO: 695268 - DNA, 33 bp, Homo sapien
agttctcagctattgagatctttcttttacctt

SEQ ID NO: 695269 - DNA, 33 bp, Homo sapien
aagagagaataaatgacctaagactataagtaa

SEQ ID NO: 695270 - DNA, 33 bp, Homo sapien
aagagagaataaatgagctaagactataagtaa

SEQ ID NO: 695271 - DNA, 33 bp, Homo sapien
tcttactgatgccatcacttttcaactagctaa

SEQ ID NO: 695272 - DNA, 33 bp, Homo sapien
tcttactgatgccatcgcttttcaactagctaa

SEQ ID NO: 695273 - DNA, 33 bp, Homo sapien
tgtgatggacctaaaaccaagatgcacagttct

SEQ ID NO: 695274 - DNA, 33 bp, Homo sapien
tgtgatggacctaaaatcaagatgcacagttct

SEQ ID NO: 695275 - DNA, 33 bp, Homo sapien
atacatatatgatctcgctattgtgcttccagt

SEQ ID NO: 695276 - DNA, 33 bp, Homo sapien
atacatatatgatctctctattgtgcttccagt

SEQ ID NO: 695277 - DNA, 33 bp, Homo sapien
ccctgagatcccgttaaacggacttgctttctg

SEQ ID NO: 695278 - DNA, 33 bp, Homo sapien
ccctgagatcccgttagacggacttgctttctg

SEQ ID NO: 695279 - DNA, 33 bp, Homo sapien
gggcattcatagcagacagagggagtttgcaga

SEQ ID NO: 695280 - DNA, 33 bp, Homo sapien
gggcattcatagcagagagagggagtttgcaga

SEQ ID NO: 695281 - DNA, 33 bp, Homo sapien
ctcctgagaactctaacagaacaacatggagga

SEQ ID NO: 695282 - DNA, 33 bp, Homo sapien
ctcctgagaactctaagagaacaacatggagga

SEQ ID NO: 695283 - DNA, 33 bp, Homo sapien
gtgaaagagctatgacagaagttgctggaaagc

SEQ ID NO: 695284 - DNA, 33 bp, Homo sapien
gtgaaagagctatgacggaagttgctggaaagc

SEQ ID NO: 695285 - DNA, 33 bp, Homo sapien
tgtctaattgtaagagcacttttgcagacaaag

SEQ ID NO: 695286 - DNA, 33 bp, Homo sapien
tgtctaattgtaagagtacttttgcagacaaag

SEQ ID NO: 695287 - DNA, 33 bp, Homo sapien
caaggaagctcattgacatacacaagaagtttg

SEQ ID NO: 695288 - DNA, 33 bp, Homo sapien
caaggaagctcattgatatacacaagaagtttg

SEQ ID NO: 695289 - DNA, 33 bp, Homo sapien
gcaaggaaggattctcacttagagccttcagag

SEQ ID NO: 695290 - DNA, 33 bp, Homo sapien
gcaaggaaggattctcgcttagagccttcagag

SEQ ID NO: 695291 - DNA, 33 bp, Homo sapien
tgtttcatcaatgccaggtaaatctttctcttt

SEQ ID NO: 695292 - DNA, 33 bp, Homo sapien
tgtttcatcaatgccatgtaaatctttctcttt

SEQ ID NO: 695293 - DNA, 33 bp, Homo sapien
aattgctataagttaactaatttagagggctct

SEQ ID NO: 695294 - DNA, 33 bp, Homo sapien
aattgctataagttaattaatttagagggctct

SEQ ID NO: 695295 - DNA, 33 bp, Homo sapien
ataggataagccagtcaaattatttaatagctt

SEQ ID NO: 695296 - DNA, 33 bp, Homo sapien
ataggataagccagtcgaattatttaatagctt

SEQ ID NO: 695297 - DNA, 33 bp, Homo sapien
atatagctctagcagcaagttaagtatgttgtc

SEQ ID NO: 695298 - DNA, 33 bp, Homo sapien
atatagctctagcagccagttaagtatgttgtc

SEQ ID NO: 695299 - DNA, 33 bp, Homo sapien
tatgattatgcctttacagtgatggaaactgag

SEQ ID NO: 695300 - DNA, 33 bp, Homo sapien
tatgattatgcctttatagtgatggaaactgag

SEQ ID NO: 695301 - DNA, 33 bp, Homo sapien
ttcttctaaaagcttcaatactgcttaatgaaa

SEQ ID NO: 695302 - DNA, 33 bp, Homo sapien
ttcttctaaaagcttcgatactgcttaatgaaa

SEQ ID NO: 695303 - DNA, 33 bp, Homo sapien
ctaaatgtggtcaatcaacatagttctccattt

SEQ ID NO: 695304 - DNA, 33 bp, Homo sapien
ctaaatgtggtcaatcgacatagttctccattt

SEQ ID NO: 695305 - DNA, 33 bp, Homo sapien
agaatggacatataaccatgaataatacagaca

SEQ ID NO: 695306 - DNA, 33 bp, Homo sapien
agaatggacatataacgatgaataatacagaca

SEQ ID NO: 695307 - DNA, 33 bp, Homo sapien
ctgaaggaaactgaaaagacctcagaagtgagg

SEQ ID NO: 695308 - DNA, 33 bp, Homo sapien
ctgaaggaaactgaaaggacctcagaagtgagg

SEQ ID NO: 695309 - DNA, 33 bp, Homo sapien
attaacaattgataacactggggaaggaatgca

SEQ ID NO: 695310 - DNA, 33 bp, Homo sapien
attaacaattgataaccctggggaaggaatgca

SEQ ID NO: 695311 - DNA, 33 bp, Homo sapien
gggcataccactcaaggataaaagtaagagatg

SEQ ID NO: 695312 - DNA, 33 bp, Homo sapien
gggcataccactcaagtataaaagtaagagatg

SEQ ID NO: 695313 - DNA, 33 bp, Homo sapien
agaattatggctttcaaaagtgataggaatacc

SEQ ID NO: 695314 - DNA, 33 bp, Homo sapien
agaattatggctttcagaagtgataggaatacc

SEQ ID NO: 695315 - DNA, 33 bp, Homo sapien
gaggatgtggagcataagtattctcatttattg

SEQ ID NO: 695316 - DNA, 33 bp, Homo sapien
gaggatgtggagcataggtattctcatttattg

SEQ ID NO: 695317 - DNA, 33 bp, Homo sapien
tgatctacaaccagcactcaaggggggagagga

SEQ ID NO: 695318 - DNA, 33 bp, Homo sapien
tgatctacaaccagcattcaaggggggagagga

SEQ ID NO: 695319 - DNA, 33 bp, Homo sapien
gttatttaataccagtaaaacatcactatattg

SEQ ID NO: 695320 - DNA, 33 bp, Homo sapien
gttatttaataccagttaaacatcactatattg

SEQ ID NO: 695321 - DNA, 33 bp, Homo sapien
ctacattctataccaccctcaaatattgccata

SEQ ID NO: 695322 - DNA, 33 bp, Homo sapien
ctacattctataccacgctcaaatattgccata

SEQ ID NO: 695323 - DNA, 33 bp, Homo sapien
gtttctctacaatctactaaagtctatactgat

SEQ ID NO: 695324 - DNA, 33 bp, Homo sapien
gtttctctacaatctattaaagtctatactgat

SEQ ID NO: 695325 - DNA, 33 bp, Homo sapien
gtaaatgaggaagaaacggaaatagaagataat

SEQ ID NO: 695326 - DNA, 33 bp, Homo sapien
gtaaatgaggaagaaatggaaatagaagataat

SEQ ID NO: 695327 - DNA, 33 bp, Homo sapien
tggtagatactggagcacaactgtatgcatctt

SEQ ID NO: 695328 - DNA, 33 bp, Homo sapien
tggtagatactggagcgcaactgtatgcatctt

SEQ ID NO: 695329 - DNA, 33 bp, Homo sapien
tcatgtgaaaaacataaccaaccaacattgggc

SEQ ID NO: 695330 - DNA, 33 bp, Homo sapien
tcatgtgaaaaacatagccaaccaacattgggc

SEQ ID NO: 695331 - DNA, 33 bp, Homo sapien
aattcattaagacattcaaaactgttcacattg

SEQ ID NO: 695332 - DNA, 33 bp, Homo sapien
aattcattaagacatttaaaactgttcacattg

SEQ ID NO: 695333 - DNA, 33 bp, Homo sapien
gattccagctccatcactatcacattttagttc

SEQ ID NO: 695334 - DNA, 33 bp, Homo sapien
gattccagctccatcattatcacattttagttc

SEQ ID NO: 695335 - DNA, 33 bp, Homo sapien
cctggttccacttttcaaatgcagcaaatgtag

SEQ ID NO: 695336 - DNA, 33 bp, Homo sapien
cctggttccacttttcgaatgcagcaaatgtag

SEQ ID NO: 695337 - DNA, 33 bp, Homo sapien
aggactgacactaggtaaagcatatagaacact

SEQ ID NO: 695338 - DNA, 33 bp, Homo sapien
aggactgacactaggtcaagcatatagaacact

SEQ ID NO: 695339 - DNA, 33 bp, Homo sapien
tctgtgttgtttcgatcactttaagtaaagctt

SEQ ID NO: 695340 - DNA, 33 bp, Homo sapien
tctgtgttgtttcgattactttaagtaaagctt

SEQ ID NO: 695341 - DNA, 33 bp, Homo sapien
aatgtccaaaattcaactggtaagtcatctatt

SEQ ID NO: 695342 - DNA, 33 bp, Homo sapien
aatgtccaaaattcaagtggtaagtcatctatt

SEQ ID NO: 695343 - DNA, 33 bp, Homo sapien
atttctttgtgcataggcctaatctttgcagtg

SEQ ID NO: 695344 - DNA, 33 bp, Homo sapien
atttctttgtgcatagtcctaatctttgcagtg

SEQ ID NO: 695345 - DNA, 33 bp, Homo sapien
tctatcctgttccctcaatttctttgtgcatag

SEQ ID NO: 695346 - DNA, 33 bp, Homo sapien
tctatcctgttccctcgatttctttgtgcatag

SEQ ID NO: 695347 - DNA, 33 bp, Homo sapien
atcacttgtcttttgaaattttgcaatcagata

SEQ ID NO: 695348 - DNA, 33 bp, Homo sapien
atcacttgtcttttgacattttgcaatcagata

SEQ ID NO: 695349 - DNA, 33 bp, Homo sapien
ttattgtgtcactgcaaagagttccataattaa

SEQ ID NO: 695350 - DNA, 33 bp, Homo sapien
ttattgtgtcactgcagagagttccataattaa

SEQ ID NO: 695351 - DNA, 33 bp, Homo sapien
ctggcaaagaattgcaacaaataataagaactc

SEQ ID NO: 695352 - DNA, 33 bp, Homo sapien
ctggcaaagaattgcagcaaataataagaactc

SEQ ID NO: 695353 - DNA, 33 bp, Homo sapien
tgctgttcttgtaacacagatatggacttttac

SEQ ID NO: 695354 - DNA, 33 bp, Homo sapien
tgctgttcttgtaacatagatatggacttttac

SEQ ID NO: 695355 - DNA, 33 bp, Homo sapien
tctaatcttaaatcaacgtggctttctaattat

SEQ ID NO: 695356 - DNA, 33 bp, Homo sapien
tctaatcttaaatcaatgtggctttctaattat

SEQ ID NO: 695357 - DNA, 33 bp, Homo sapien
ctcattccatatgtccagatggctagttgtcca

SEQ ID NO: 695358 - DNA, 33 bp, Homo sapien
ctcattccatatgtccggatggctagttgtcca

SEQ ID NO: 695359 - DNA, 33 bp, Homo sapien
ctaggcactaggtaacaatcttaggaatattta

SEQ ID NO: 695360 - DNA, 33 bp, Homo sapien
ctaggcactaggtaacgatcttaggaatattta

SEQ ID NO: 695361 - DNA, 33 bp, Homo sapien
ctttcttttgttcagacttgccttcccaggaaa

SEQ ID NO: 695362 - DNA, 33 bp, Homo sapien
ctttcttttgttcagatttgccttcccaggaaa

SEQ ID NO: 695363 - DNA, 33 bp, Homo sapien
catcctgcttagctacaaccaaagtaaacctga

SEQ ID NO: 695364 - DNA, 33 bp, Homo sapien
catcctgcttagctaccaccaaagtaaacctga

SEQ ID NO: 695365 - DNA, 33 bp, Homo sapien
gaatgataataaaaccagcccaactggagtatt

SEQ ID NO: 695366 - DNA, 33 bp, Homo sapien
gaatgataataaaacctgcccaactggagtatt

SEQ ID NO: 695367 - DNA, 33 bp, Homo sapien
acttagagcttattgacgtaatgaaaaagtaat

SEQ ID NO: 695368 - DNA, 33 bp, Homo sapien
acttagagcttattgatgtaatgaaaaagtaat

SEQ ID NO: 695369 - DNA, 33 bp, Homo sapien
aatgatctattgctgcaagtgaggtgttgaagt

SEQ ID NO: 695370 - DNA, 33 bp, Homo sapien
aatgatctattgctgccagtgaggtgttgaagt

SEQ ID NO: 695371 - DNA, 33 bp, Homo sapien
aaacctaccaactataaaagcactggactagag

SEQ ID NO: 695372 - DNA, 33 bp, Homo sapien
aaacctaccaactatagaagcactggactagag

SEQ ID NO: 695373 - DNA, 33 bp, Homo sapien
acagagtggcagcaacagaaactcatttctcag

SEQ ID NO: 695374 - DNA, 33 bp, Homo sapien
acagagtggcagcaacggaaactcatttctcag

SEQ ID NO: 695375 - DNA, 33 bp, Homo sapien
cattctcactgtgtccggaaagtgtaatataaa

SEQ ID NO: 695376 - DNA, 33 bp, Homo sapien
cattctcactgtgtcctgaaagtgtaatataaa

SEQ ID NO: 695377 - DNA, 33 bp, Homo sapien
agaaaaaggataacaacttaaacactgcttgag

SEQ ID NO: 695378 - DNA, 33 bp, Homo sapien
agaaaaaggataacaatttaaacactgcttgag

SEQ ID NO: 695379 - DNA, 33 bp, Homo sapien
aaagggaagcttgaagactaaaggcaaggtgat

SEQ ID NO: 695380 - DNA, 33 bp, Homo sapien
aaagggaagcttgaaggctaaaggcaaggtgat

SEQ ID NO: 695381 - DNA, 33 bp, Homo sapien
aactaaatgtctatcaaagttagctaggcccaa

SEQ ID NO: 695382 - DNA, 33 bp, Homo sapien
aactaaatgtctatcacagttagctaggcccaa

SEQ ID NO: 695383 - DNA, 33 bp, Homo sapien
gtgacctctggaataacagccaacaattgttta

SEQ ID NO: 695384 - DNA, 33 bp, Homo sapien
gtgacctctggaataatagccaacaattgttta

SEQ ID NO: 695385 - DNA, 33 bp, Homo sapien
ttcccactctcttgaacgcaatatggttttaga

SEQ ID NO: 695386 - DNA, 33 bp, Homo sapien
ttcccactctcttgaatgcaatatggttttaga

SEQ ID NO: 695387 - DNA, 33 bp, Homo sapien
caaagacttatgtggcaaaatggattatatgag

SEQ ID NO: 695388 - DNA, 33 bp, Homo sapien
caaagacttatgtggcgaaatggattatatgag

SEQ ID NO: 695389 - DNA, 33 bp, Homo sapien
atgaggtaagaaaaaaatgttgaaagaagtgaa

SEQ ID NO: 695390 - DNA, 33 bp, Homo sapien
atgaggtaagaaaaaagtgttgaaagaagtgaa

SEQ ID NO: 695391 - DNA, 33 bp, Homo sapien
ctgaaattcatttatcggactgagaagcttctt

SEQ ID NO: 695392 - DNA, 33 bp, Homo sapien
ctgaaattcatttatctgactgagaagcttctt

SEQ ID NO: 695393 - DNA, 33 bp, Homo sapien
ggacattgcctttggaaagtaggctgtgaatta

SEQ ID NO: 695394 - DNA, 33 bp, Homo sapien
ggacattgcctttggagagtaggctgtgaatta

SEQ ID NO: 695395 - DNA, 33 bp, Homo sapien
ctattatgtaagtcacaattcagggctctttac

SEQ ID NO: 695396 - DNA, 33 bp, Homo sapien
ctattatgtaagtcacgattcagggctctttac

SEQ ID NO: 695397 - DNA, 33 bp, Homo sapien
ctttcctgcctataaactacaggaattactgag

SEQ ID NO: 695398 - DNA, 33 bp, Homo sapien
ctttcctgcctataaagtacaggaattactgag

SEQ ID NO: 695399 - DNA, 33 bp, Homo sapien
aaattaacagttccaaaatcacacttagttacc

SEQ ID NO: 695400 - DNA, 33 bp, Homo sapien
aaattaacagttccaatatcacacttagttacc

SEQ ID NO: 695401 - DNA, 33 bp, Homo sapien
gatcacaaatgaccccaccctgtctaggacctc

SEQ ID NO: 695402 - DNA, 33 bp, Homo sapien
gatcacaaatgaccccgccctgtctaggacctc

SEQ ID NO: 695403 - DNA, 33 bp, Homo sapien
tttctcccacttgtcacgttaaagtaatgatca

SEQ ID NO: 695404 - DNA, 33 bp, Homo sapien
tttctcccacttgtcatgttaaagtaatgatca

SEQ ID NO: 695405 - DNA, 33 bp, Homo sapien
tttggtgtggcatccactatagtctgtttaatg

SEQ ID NO: 695406 - DNA, 33 bp, Homo sapien
tttggtgtggcatccagtatagtctgtttaatg

SEQ ID NO: 695407 - DNA, 33 bp, Homo sapien
ggttaatctgcaagacaaatatacttgaatgca

SEQ ID NO: 695408 - DNA, 33 bp, Homo sapien
ggttaatctgcaagacgaatatacttgaatgca

SEQ ID NO: 695409 - DNA, 33 bp, Homo sapien
ccacttccttctgctaacaactttttatttatt

SEQ ID NO: 695410 - DNA, 33 bp, Homo sapien
ccacttccttctgctaccaactttttatttatt

SEQ ID NO: 695411 - DNA, 33 bp, Homo sapien
cagaattggaaatttaaaagcaatctatttgcc

SEQ ID NO: 695412 - DNA, 33 bp, Homo sapien
cagaattggaaatttacaagcaatctatttgcc

SEQ ID NO: 695413 - DNA, 33 bp, Homo sapien
attaccatgaagtctacgtatccaagagagaca

SEQ ID NO: 695414 - DNA, 33 bp, Homo sapien
attaccatgaagtctaggtatccaagagagaca

SEQ ID NO: 695415 - DNA, 33 bp, Homo sapien
cgctgtgagctatgtacaaaattatgattcagt

SEQ ID NO: 695416 - DNA, 33 bp, Homo sapien
cgctgtgagctatgtataaaattatgattcagt

SEQ ID NO: 695417 - DNA, 33 bp, Homo sapien
atgatcaaggaagtaacagacagcttaaaaatg

SEQ ID NO: 695418 - DNA, 33 bp, Homo sapien
atgatcaaggaagtaagagacagcttaaaaatg

SEQ ID NO: 695419 - DNA, 33 bp, Homo sapien
attggctaagcaacggaatattttatgtatgta

SEQ ID NO: 695420 - DNA, 33 bp, Homo sapien
attggctaagcaacgggatattttatgtatgta

SEQ ID NO: 695421 - DNA, 33 bp, Homo sapien
ccctggaagattgagacagatttaaagaaatta

SEQ ID NO: 695422 - DNA, 33 bp, Homo sapien
ccctggaagattgagagagatttaaagaaatta

SEQ ID NO: 695423 - DNA, 33 bp, Homo sapien
atgatgctcatactttaaaaagcctgaagaatt

SEQ ID NO: 695424 - DNA, 33 bp, Homo sapien
atgatgctcatacttttaaaagcctgaagaatt

SEQ ID NO: 695425 - DNA, 33 bp, Homo sapien
ttatgcttttctccataacaggaataactttgc

SEQ ID NO: 695426 - DNA, 33 bp, Homo sapien
ttatgcttttctccatgacaggaataactttgc

SEQ ID NO: 695427 - DNA, 33 bp, Homo sapien
ttgagattttggtggaaagacgtgagaccagca

SEQ ID NO: 695428 - DNA, 33 bp, Homo sapien
ttgagattttggtggagagacgtgagaccagca

SEQ ID NO: 695429 - DNA, 33 bp, Homo sapien
ttttcaaattgttaacagtctagaaaagtggac

SEQ ID NO: 695430 - DNA, 33 bp, Homo sapien
ttttcaaattgttaactgtctagaaaagtggac

SEQ ID NO: 695431 - DNA, 33 bp, Homo sapien
aaatttagacctggaacgacagctttgagggcc

SEQ ID NO: 695432 - DNA, 33 bp, Homo sapien
aaatttagacctggaatgacagctttgagggcc

SEQ ID NO: 695433 - DNA, 33 bp, Homo sapien
ctattgctacatacagacacctaaaatcacaca

SEQ ID NO: 695434 - DNA, 33 bp, Homo sapien
ctattgctacatacagtcacctaaaatcacaca

SEQ ID NO: 695435 - DNA, 33 bp, Homo sapien
cagttatgcggaagaacgacctagttattgggc

SEQ ID NO: 695436 - DNA, 33 bp, Homo sapien
cagttatgcggaagaatgacctagttattgggc

SEQ ID NO: 695437 - DNA, 33 bp, Homo sapien
agattctgaaataccacgtgacaaatagtagag

SEQ ID NO: 695438 - DNA, 33 bp, Homo sapien
agattctgaaataccaggtgacaaatagtagag

SEQ ID NO: 695439 - DNA, 33 bp, Homo sapien
tatgacttttgcatcacgaaattggctaataac

SEQ ID NO: 695440 - DNA, 33 bp, Homo sapien
tatgacttttgcatcatgaaattggctaataac

SEQ ID NO: 695441 - DNA, 33 bp, Homo sapien
ccattcaaagaaattacgcctcattgttatgga

SEQ ID NO: 695442 - DNA, 33 bp, Homo sapien
ccattcaaagaaattatgcctcattgttatgga

SEQ ID NO: 695443 - DNA, 33 bp, Homo sapien
ttaccaatgaatactaccttctaccaattaaaa

SEQ ID NO: 695444 - DNA, 33 bp, Homo sapien
ttaccaatgaatactatcttctaccaattaaaa

SEQ ID NO: 695445 - DNA, 33 bp, Homo sapien
ccttgactgaaacaaaattacatttggagaacc

SEQ ID NO: 695446 - DNA, 33 bp, Homo sapien
ccttgactgaaacaaagttacatttggagaacc

SEQ ID NO: 695447 - DNA, 33 bp, Homo sapien
agcatgcttggaattcaaggaacacaaagactg

SEQ ID NO: 695448 - DNA, 33 bp, Homo sapien
agcatgcttggaattcgaggaacacaaagactg

SEQ ID NO: 695449 - DNA, 33 bp, Homo sapien
tcttccacttcatataaagaactgccttaaatc

SEQ ID NO: 695450 - DNA, 33 bp, Homo sapien
tcttccacttcatatagagaactgccttaaatc

SEQ ID NO: 695451 - DNA, 33 bp, Homo sapien
tagttacagagactaaagtaagcatgtacacat

SEQ ID NO: 695452 - DNA, 33 bp, Homo sapien
tagttacagagactaacgtaagcatgtacacat

SEQ ID NO: 695453 - DNA, 33 bp, Homo sapien
atggctaaataaaagcagcagacatgtgaatga

SEQ ID NO: 695454 - DNA, 33 bp, Homo sapien
atggctaaataaaagcggcagacatgtgaatga

SEQ ID NO: 695455 - DNA, 33 bp, Homo sapien
gtggcatgtggatactaaatactcatgttagac

SEQ ID NO: 695456 - DNA, 33 bp, Homo sapien
gtggcatgtggatactcaatactcatgttagac

SEQ ID NO: 695457 - DNA, 33 bp, Homo sapien
atttgaaaatacctcaaggctcactcttcgtgt

SEQ ID NO: 695458 - DNA, 33 bp, Homo sapien
atttgaaaatacctcagggctcactcttcgtgt

SEQ ID NO: 695459 - DNA, 33 bp, Homo sapien
ctctgcaaaggtgtcaaaatgcacttcaataac

SEQ ID NO: 695460 - DNA, 33 bp, Homo sapien
ctctgcaaaggtgtcacaatgcacttcaataac

SEQ ID NO: 695461 - DNA, 33 bp, Homo sapien
aaactcgagccattggaaaagtaagtctgttta

SEQ ID NO: 695462 - DNA, 33 bp, Homo sapien
aaactcgagccattgggaaagtaagtctgttta

SEQ ID NO: 695463 - DNA, 33 bp, Homo sapien
ttgtattaccaaaagcacattttagattaatct

SEQ ID NO: 695464 - DNA, 33 bp, Homo sapien
ttgtattaccaaaagcgcattttagattaatct

SEQ ID NO: 695465 - DNA, 33 bp, Homo sapien
tagctcatatcaaacaccttacataagtcacca

SEQ ID NO: 695466 - DNA, 33 bp, Homo sapien
tagctcatatcaaacagcttacataagtcacca

SEQ ID NO: 695467 - DNA, 33 bp, Homo sapien
cccattgaaatgatgtaaaggcagacacaaata

SEQ ID NO: 695468 - DNA, 33 bp, Homo sapien
cccattgaaatgatgtgaaggcagacacaaata

SEQ ID NO: 695469 - DNA, 33 bp, Homo sapien
agatcttaatggtagcacttaaataaaatatgc

SEQ ID NO: 695470 - DNA, 33 bp, Homo sapien
agatcttaatggtagcgcttaaataaaatatgc

SEQ ID NO: 695471 - DNA, 33 bp, Homo sapien
tgctttggctgccacactcaaaaaaagataatt

SEQ ID NO: 695472 - DNA, 33 bp, Homo sapien
tgctttggctgccacattcaaaaaaagataatt

SEQ ID NO: 695473 - DNA, 33 bp, Homo sapien
ttctaagcaacagtacagctattccagataaaa

SEQ ID NO: 695474 - DNA, 33 bp, Homo sapien
ttctaagcaacagtacggctattccagataaaa

SEQ ID NO: 695475 - DNA, 33 bp, Homo sapien
tttagtctcagctatacaagataagccagtagt

SEQ ID NO: 695476 - DNA, 33 bp, Homo sapien
tttagtctcagctatagaagataagccagtagt

SEQ ID NO: 695477 - DNA, 33 bp, Homo sapien
ttgcattttgtctttcccttgtcgattcagaga

SEQ ID NO: 695478 - DNA, 33 bp, Homo sapien
ttgcattttgtctttctcttgtcgattcagaga

SEQ ID NO: 695479 - DNA, 33 bp, Homo sapien
aagtaacagataggttcaaagagtctctaaagt

SEQ ID NO: 695480 - DNA, 33 bp, Homo sapien
aagtaacagataggtttaaagagtctctaaagt

SEQ ID NO: 695481 - DNA, 33 bp, Homo sapien
tcctgattttttattaagcctctgtataatcaa

SEQ ID NO: 695482 - DNA, 33 bp, Homo sapien
tcctgattttttattatgcctctgtataatcaa

SEQ ID NO: 695483 - DNA, 33 bp, Homo sapien
atttttttttctgtccacaaccattttcatgcc

SEQ ID NO: 695484 - DNA, 33 bp, Homo sapien
atttttttttctgtcctcaaccattttcatgcc

SEQ ID NO: 695485 - DNA, 33 bp, Homo sapien
atcttgcaatgtaaagcacaggcttccacttat

SEQ ID NO: 695486 - DNA, 33 bp, Homo sapien
atcttgcaatgtaaaggacaggcttccacttat

SEQ ID NO: 695487 - DNA, 33 bp, Homo sapien
atagaaaattaatatacccactgtggtaagcat

SEQ ID NO: 695488 - DNA, 33 bp, Homo sapien
atagaaaattaatatatccactgtggtaagcat

SEQ ID NO: 695489 - DNA, 33 bp, Homo sapien
tgctatatgaatgctcagaacacttgaaaaggc

SEQ ID NO: 695490 - DNA, 33 bp, Homo sapien
tgctatatgaatgctcggaacacttgaaaaggc

SEQ ID NO: 695491 - DNA, 33 bp, Homo sapien
gtatcagtacatacataacctgaaatcaatcaa

SEQ ID NO: 695492 - DNA, 33 bp, Homo sapien
gtatcagtacatacatgacctgaaatcaatcaa

SEQ ID NO: 695493 - DNA, 33 bp, Homo sapien
aataacatacaatatacggcagtaaggcaagaa

SEQ ID NO: 695494 - DNA, 33 bp, Homo sapien
aataacatacaatatatggcagtaaggcaagaa

SEQ ID NO: 695495 - DNA, 33 bp, Homo sapien
aaggaggcagaaaaaaatgttggaattaaacaa

SEQ ID NO: 695496 - DNA, 33 bp, Homo sapien
aaggaggcagaaaaaagtgttggaattaaacaa

SEQ ID NO: 695497 - DNA, 33 bp, Homo sapien
actatattttctgctaccactgaggaagagggt

SEQ ID NO: 695498 - DNA, 33 bp, Homo sapien
actatattttctgctatcactgaggaagagggt

SEQ ID NO: 695499 - DNA, 33 bp, Homo sapien
gattccatgactcagcaaagaagacagagatat

SEQ ID NO: 695500 - DNA, 33 bp, Homo sapien
gattccatgactcagcgaagaagacagagatat

SEQ ID NO: 695501 - DNA, 33 bp, Homo sapien
aggatttggatgctaaactttaacttatgatat

SEQ ID NO: 695502 - DNA, 33 bp, Homo sapien
aggatttggatgctaagctttaacttatgatat

SEQ ID NO: 695503 - DNA, 33 bp, Homo sapien
atagatgaaaaaaggaagaaagagcaggcaaga

SEQ ID NO: 695504 - DNA, 33 bp, Homo sapien
atagatgaaaaaaggaggaaagagcaggcaaga

SEQ ID NO: 695505 - DNA, 33 bp, Homo sapien
ggtaaatgcttgttaaatgaatacaattatttt

SEQ ID NO: 695506 - DNA, 33 bp, Homo sapien
ggtaaatgcttgttaagtgaatacaattatttt

SEQ ID NO: 695507 - DNA, 33 bp, Homo sapien
gctatttaaggtgataaaagaaagttcttatac

SEQ ID NO: 695508 - DNA, 33 bp, Homo sapien
gctatttaaggtgatagaagaaagttcttatac

SEQ ID NO: 695509 - DNA, 33 bp, Homo sapien
ggcttttaccaccttgcattccaccctcctaaa

SEQ ID NO: 695510 - DNA, 33 bp, Homo sapien
ggcttttaccaccttgtattccaccctcctaaa

SEQ ID NO: 695511 - DNA, 33 bp, Homo sapien
cctcatgtataggtacaaaaagcaaacaaaaaa

SEQ ID NO: 695512 - DNA, 33 bp, Homo sapien
cctcatgtataggtacgaaaagcaaacaaaaaa

SEQ ID NO: 695513 - DNA, 33 bp, Homo sapien
aaaatgtggaaatgccagacataatattttatc

SEQ ID NO: 695514 - DNA, 33 bp, Homo sapien
aaaatgtggaaatgcctgacataatattttatc

SEQ ID NO: 695515 - DNA, 33 bp, Homo sapien
attacttcaaaaaaaaacagacataggaatctt

SEQ ID NO: 695516 - DNA, 33 bp, Homo sapien
attacttcaaaaaaaaccagacataggaatctt

SEQ ID NO: 695517 - DNA, 33 bp, Homo sapien
gattttcagtcttgataaaagcctacagcatac

SEQ ID NO: 695518 - DNA, 33 bp, Homo sapien
gattttcagtcttgatgaaagcctacagcatac

SEQ ID NO: 695519 - DNA, 33 bp, Homo sapien
agcttagttgcttttgcattaatgtaaccagtg

SEQ ID NO: 695520 - DNA, 33 bp, Homo sapien
agcttagttgcttttgtattaatgtaaccagtg

SEQ ID NO: 695521 - DNA, 33 bp, Homo sapien
cccacttgtgaatgcaccaacttaccttagctc

SEQ ID NO: 695522 - DNA, 33 bp, Homo sapien
cccacttgtgaatgcatcaacttaccttagctc

SEQ ID NO: 695523 - DNA, 33 bp, Homo sapien
aatcaataggccatacacattcttgcatatatg

SEQ ID NO: 695524 - DNA, 33 bp, Homo sapien
aatcaataggccatacgcattcttgcatatatg

SEQ ID NO: 695525 - DNA, 33 bp, Homo sapien
aatgacataggacgttaaaatgtcttgatttca

SEQ ID NO: 695526 - DNA, 33 bp, Homo sapien
aatgacataggacgtttaaatgtcttgatttca

SEQ ID NO: 695527 - DNA, 33 bp, Homo sapien
tcactttaaaaacaaaggttgtgatcaaataag

SEQ ID NO: 695528 - DNA, 33 bp, Homo sapien
tcactttaaaaacaaatgttgtgatcaaataag

SEQ ID NO: 695529 - DNA, 33 bp, Homo sapien
gaagtcctgagttaaacagtacctccagctact

SEQ ID NO: 695530 - DNA, 33 bp, Homo sapien
gaagtcctgagttaaatagtacctccagctact

SEQ ID NO: 695531 - DNA, 33 bp, Homo sapien
tcacatgatattataaaggaggtaaactgctac

SEQ ID NO: 695532 - DNA, 33 bp, Homo sapien
tcacatgatattataatggaggtaaactgctac

SEQ ID NO: 695533 - DNA, 33 bp, Homo sapien
tgtcattgacgtttaacatttttgacaaaaatt

SEQ ID NO: 695534 - DNA, 33 bp, Homo sapien
tgtcattgacgtttaatatttttgacaaaaatt

SEQ ID NO: 695535 - DNA, 33 bp, Homo sapien
acaaaatgccaacttcaaagaaagcatgtatga

SEQ ID NO: 695536 - DNA, 33 bp, Homo sapien
acaaaatgccaacttccaagaaagcatgtatga

SEQ ID NO: 695537 - DNA, 33 bp, Homo sapien
ggtcagaagtctgacaagaatctcattgagcta

SEQ ID NO: 695538 - DNA, 33 bp, Homo sapien
ggtcagaagtctgacatgaatctcattgagcta

SEQ ID NO: 695539 - DNA, 33 bp, Homo sapien
gaccatctccttttgaaaatcctgaatcagtac

SEQ ID NO: 695540 - DNA, 33 bp, Homo sapien
gaccatctccttttgagaatcctgaatcagtac

SEQ ID NO: 695541 - DNA, 33 bp, Homo sapien
tttttctatagctgtacaatgagtgttttaagc

SEQ ID NO: 695542 - DNA, 33 bp, Homo sapien
tttttctatagctgtataatgagtgttttaagc

SEQ ID NO: 695543 - DNA, 33 bp, Homo sapien
agagatagagatgaaaatgatagagatagagac

SEQ ID NO: 695544 - DNA, 33 bp, Homo sapien
agagatagagatgaaagtgatagagatagagac

SEQ ID NO: 695545 - DNA, 33 bp, Homo sapien
agtgcagtggcagggaatatcagtgaagactag

SEQ ID NO: 695546 - DNA, 33 bp, Homo sapien
agtgcagtggcagggattatcagtgaagactag

SEQ ID NO: 695547 - DNA, 33 bp, Homo sapien
caaaaagtatgggtaaacatcaagaacattcac

SEQ ID NO: 695548 - DNA, 33 bp, Homo sapien
caaaaagtatgggtaagcatcaagaacattcac

SEQ ID NO: 695549 - DNA, 33 bp, Homo sapien
atgttcaggaaagaagaaaatggatgacaacta

SEQ ID NO: 695550 - DNA, 33 bp, Homo sapien
atgttcaggaaagaaggaaatggatgacaacta

SEQ ID NO: 695551 - DNA, 33 bp, Homo sapien
gaatatgtttgacaacaatattttcataaaaac

SEQ ID NO: 695552 - DNA, 33 bp, Homo sapien
gaatatgtttgacaaccatattttcataaaaac

SEQ ID NO: 695553 - DNA, 33 bp, Homo sapien
actcccattactcacaaataattgaaatagtag

SEQ ID NO: 695554 - DNA, 33 bp, Homo sapien
actcccattactcacagataattgaaatagtag

SEQ ID NO: 695555 - DNA, 33 bp, Homo sapien
ttttcttgccatataaacttcatactaccaaaa

SEQ ID NO: 695556 - DNA, 33 bp, Homo sapien
ttttcttgccatataatcttcatactaccaaaa

SEQ ID NO: 695557 - DNA, 33 bp, Homo sapien
caattactgcacttgacacaaaatctgtgtgga

SEQ ID NO: 695558 - DNA, 33 bp, Homo sapien
caattactgcacttgatacaaaatctgtgtgga

SEQ ID NO: 695559 - DNA, 33 bp, Homo sapien
cagagatttgaagctacatctgaattacttcaa

SEQ ID NO: 695560 - DNA, 33 bp, Homo sapien
cagagatttgaagctatatctgaattacttcaa

SEQ ID NO: 695561 - DNA, 33 bp, Homo sapien
tgattcctgaaactagaattatactaagtgaaa

SEQ ID NO: 695562 - DNA, 33 bp, Homo sapien
tgattcctgaaactaggattatactaagtgaaa

SEQ ID NO: 695563 - DNA, 33 bp, Homo sapien
gaggtgccctatggaacagtgagaatagtggcg

SEQ ID NO: 695564 - DNA, 33 bp, Homo sapien
gaggtgccctatggaatagtgagaatagtggcg

SEQ ID NO: 695565 - DNA, 33 bp, Homo sapien
acataggccaaacttacgtcctgaaaccctgat

SEQ ID NO: 695566 - DNA, 33 bp, Homo sapien
acataggccaaacttatgtcctgaaaccctgat

SEQ ID NO: 695567 - DNA, 33 bp, Homo sapien
tcagcttaggtctcttcaaacgtgtgcaatcat

SEQ ID NO: 695568 - DNA, 33 bp, Homo sapien
tcagcttaggtctctttaaacgtgtgcaatcat

SEQ ID NO: 695569 - DNA, 33 bp, Homo sapien
caaatgtgtatctaccaggctaaaaagctagga

SEQ ID NO: 695570 - DNA, 33 bp, Homo sapien
caaatgtgtatctacccggctaaaaagctagga

SEQ ID NO: 695571 - DNA, 33 bp, Homo sapien
ttcaacactgtaaaaaatgcccttaaaatgtgt

SEQ ID NO: 695572 - DNA, 33 bp, Homo sapien
ttcaacactgtaaaaattgcccttaaaatgtgt

SEQ ID NO: 695573 - DNA, 33 bp, Homo sapien
gctcttgctatcaaacacaatactattatacat

SEQ ID NO: 695574 - DNA, 33 bp, Homo sapien
gctcttgctatcaaacgcaatactattatacat

SEQ ID NO: 695575 - DNA, 33 bp, Homo sapien
agataaaatttcggcacaatagagatagatacc

SEQ ID NO: 695576 - DNA, 33 bp, Homo sapien
agataaaatttcggcataatagagatagatacc

SEQ ID NO: 695577 - DNA, 33 bp, Homo sapien
caatgagcgtcagttaacattgaagtgtaaggt

SEQ ID NO: 695578 - DNA, 33 bp, Homo sapien
caatgagcgtcagttaccattgaagtgtaaggt

SEQ ID NO: 695579 - DNA, 33 bp, Homo sapien
tacttgttttaaaaaaattcagagctcagtaaa

SEQ ID NO: 695580 - DNA, 33 bp, Homo sapien
tacttgttttaaaaaatttcagagctcagtaaa

SEQ ID NO: 695581 - DNA, 33 bp, Homo sapien
tagatggtttatgttacagttgcttattgtctg

SEQ ID NO: 695582 - DNA, 33 bp, Homo sapien
tagatggtttatgttagagttgcttattgtctg

SEQ ID NO: 695583 - DNA, 33 bp, Homo sapien
ggatgttccatactaactcctgggagaaacaat

SEQ ID NO: 695584 - DNA, 33 bp, Homo sapien
ggatgttccatactaattcctgggagaaacaat

SEQ ID NO: 695585 - DNA, 33 bp, Homo sapien
gaagcacctttggaagcagatgatgagaaagaa

SEQ ID NO: 695586 - DNA, 33 bp, Homo sapien
gaagcacctttggaaggagatgatgagaaagaa

SEQ ID NO: 695587 - DNA, 33 bp, Homo sapien
catttggtttgtgtcaatgaaacctcctctgtc

SEQ ID NO: 695588 - DNA, 33 bp, Homo sapien
catttggtttgtgtcagtgaaacctcctctgtc

SEQ ID NO: 695589 - DNA, 33 bp, Homo sapien
aatggcatttggcatcaaaaatttccagatgac

SEQ ID NO: 695590 - DNA, 33 bp, Homo sapien
aatggcatttggcatccaaaatttccagatgac

SEQ ID NO: 695591 - DNA, 33 bp, Homo sapien
ttcttacacagcgatgacaagagaaagtgaggg

SEQ ID NO: 695592 - DNA, 33 bp, Homo sapien
ttcttacacagcgatggcaagagaaagtgaggg

SEQ ID NO: 695593 - DNA, 33 bp, Homo sapien
aaaatgccaagatccacattgtgtgcagttgtt

SEQ ID NO: 695594 - DNA, 33 bp, Homo sapien
aaaatgccaagatccagattgtgtgcagttgtt

SEQ ID NO: 695595 - DNA, 33 bp, Homo sapien
atatagaaaagcacaaatatatgtaggccgagc

SEQ ID NO: 695596 - DNA, 33 bp, Homo sapien
atatagaaaagcacaagtatatgtaggccgagc

SEQ ID NO: 695597 - DNA, 33 bp, Homo sapien
tggcttctaggtttcaaaagaggtagcgccatc

SEQ ID NO: 695598 - DNA, 33 bp, Homo sapien
tggcttctaggtttcacaagaggtagcgccatc

SEQ ID NO: 695599 - DNA, 33 bp, Homo sapien
tttatagctaaggcaacgaagagtctatataca

SEQ ID NO: 695600 - DNA, 33 bp, Homo sapien
tttatagctaaggcaatgaagagtctatataca

SEQ ID NO: 695601 - DNA, 33 bp, Homo sapien
gttgtgaagggaaaaccgaagtcacaaacttgc

SEQ ID NO: 695602 - DNA, 33 bp, Homo sapien
gttgtgaagggaaaactgaagtcacaaacttgc

SEQ ID NO: 695603 - DNA, 33 bp, Homo sapien
ttggaaacctagatagcccataaaatgcacttg

SEQ ID NO: 695604 - DNA, 33 bp, Homo sapien
ttggaaacctagatagtccataaaatgcacttg

SEQ ID NO: 695605 - DNA, 33 bp, Homo sapien
tctgctgtgtctcaaactctggctttgtatttt

SEQ ID NO: 695606 - DNA, 33 bp, Homo sapien
tctgctgtgtctcaaattctggctttgtatttt

SEQ ID NO: 695607 - DNA, 33 bp, Homo sapien
ttaacattctagaggaagtatctgagtctgtat

SEQ ID NO: 695608 - DNA, 33 bp, Homo sapien
ttaacattctagaggaggtatctgagtctgtat

SEQ ID NO: 695609 - DNA, 33 bp, Homo sapien
ggtcttcgggaattcaccgcatgggcatctcat

SEQ ID NO: 695610 - DNA, 33 bp, Homo sapien
ggtcttcgggaattcatcgcatgggcatctcat

SEQ ID NO: 695611 - DNA, 33 bp, Homo sapien
tcctcagatcctagaacagtaactggcactgga

SEQ ID NO: 695612 - DNA, 33 bp, Homo sapien
tcctcagatcctagaagagtaactggcactgga

SEQ ID NO: 695613 - DNA, 33 bp, Homo sapien
tagacaatgcaaaagaagtaggacagccttgat

SEQ ID NO: 695614 - DNA, 33 bp, Homo sapien
tagacaatgcaaaagaggtaggacagccttgat

SEQ ID NO: 695615 - DNA, 33 bp, Homo sapien
aaccatatcacataccaccaacaattccatgaa

SEQ ID NO: 695616 - DNA, 33 bp, Homo sapien
aaccatatcacataccgccaacaattccatgaa

SEQ ID NO: 695617 - DNA, 33 bp, Homo sapien
ctttctgaaattctccagcattcacttaaaata

SEQ ID NO: 695618 - DNA, 33 bp, Homo sapien
ctttctgaaattctccggcattcacttaaaata

SEQ ID NO: 695619 - DNA, 33 bp, Homo sapien
accgttcaacctcagaacactggaagcaaccca

SEQ ID NO: 695620 - DNA, 33 bp, Homo sapien
accgttcaacctcagagcactggaagcaaccca

SEQ ID NO: 695621 - DNA, 33 bp, Homo sapien
atgtgtccagctttcaaaatcagttttccagca

SEQ ID NO: 695622 - DNA, 33 bp, Homo sapien
atgtgtccagctttcagaatcagttttccagca

SEQ ID NO: 695623 - DNA, 33 bp, Homo sapien
atagattattgctaaacgcctggtgtgaaattg

SEQ ID NO: 695624 - DNA, 33 bp, Homo sapien
atagattattgctaaatgcctggtgtgaaattg

SEQ ID NO: 695625 - DNA, 33 bp, Homo sapien
ctttagaccctggtaaagagtgagaaacccatt

SEQ ID NO: 695626 - DNA, 33 bp, Homo sapien
ctttagaccctggtaaggagtgagaaacccatt

SEQ ID NO: 695627 - DNA, 33 bp, Homo sapien
ctagatactgtagaaagaaagcaaaatcattga

SEQ ID NO: 695628 - DNA, 33 bp, Homo sapien
ctagatactgtagaaataaagcaaaatcattga

SEQ ID NO: 695629 - DNA, 33 bp, Homo sapien
ctctgtaattgtcccaccaaaggctaatatggt

SEQ ID NO: 695630 - DNA, 33 bp, Homo sapien
ctctgtaattgtcccatcaaaggctaatatggt

SEQ ID NO: 695631 - DNA, 33 bp, Homo sapien
ttcttttctaactgaaatgtggatcaaaaaata

SEQ ID NO: 695632 - DNA, 33 bp, Homo sapien
ttcttttctaactgaagtgtggatcaaaaaata

SEQ ID NO: 695633 - DNA, 33 bp, Homo sapien
gagcgatgtaaataaaaatagatcaactgttgc

SEQ ID NO: 695634 - DNA, 33 bp, Homo sapien
gagcgatgtaaataaagatagatcaactgttgc

SEQ ID NO: 695635 - DNA, 33 bp, Homo sapien
aaatattgattttggaacttccagcctgtaaaa

SEQ ID NO: 695636 - DNA, 33 bp, Homo sapien
aaatattgattttggaccttccagcctgtaaaa

SEQ ID NO: 695637 - DNA, 33 bp, Homo sapien
tggaaactattttgtcaagtggagttcgcctca

SEQ ID NO: 695638 - DNA, 33 bp, Homo sapien
tggaaactattttgtcgagtggagttcgcctca

SEQ ID NO: 695639 - DNA, 33 bp, Homo sapien
atttaaaggatctcataagtacagagacaatta

SEQ ID NO: 695640 - DNA, 33 bp, Homo sapien
atttaaaggatctcatgagtacagagacaatta

SEQ ID NO: 695641 - DNA, 33 bp, Homo sapien
gagatatctaaatgataaggtgtttctgagaga

SEQ ID NO: 695642 - DNA, 33 bp, Homo sapien
gagatatctaaatgatcaggtgtttctgagaga

SEQ ID NO: 695643 - DNA, 33 bp, Homo sapien
cattttcactaaacaacttgctgcttgtgaatt

SEQ ID NO: 695644 - DNA, 33 bp, Homo sapien
cattttcactaaacaatttgctgcttgtgaatt

SEQ ID NO: 695645 - DNA, 33 bp, Homo sapien
acaacacagttaaaaagagggcaaacaatatca

SEQ ID NO: 695646 - DNA, 33 bp, Homo sapien
acaacacagttaaaaatagggcaaacaatatca

SEQ ID NO: 695647 - DNA, 33 bp, Homo sapien
ctgagtttcaagcacaaagctggatggccattt

SEQ ID NO: 695648 - DNA, 33 bp, Homo sapien
ctgagtttcaagcacacagctggatggccattt

SEQ ID NO: 695649 - DNA, 33 bp, Homo sapien
gagatctgccatacaaattagtgtcaacagcta

SEQ ID NO: 695650 - DNA, 33 bp, Homo sapien
gagatctgccatacaagttagtgtcaacagcta

SEQ ID NO: 695651 - DNA, 33 bp, Homo sapien
atgccagccttgaaaactattttgaacatcatt

SEQ ID NO: 695652 - DNA, 33 bp, Homo sapien
atgccagccttgaaaagtattttgaacatcatt

SEQ ID NO: 695653 - DNA, 33 bp, Homo sapien
tagaacccctttcaaacgctgttctggagagac

SEQ ID NO: 695654 - DNA, 33 bp, Homo sapien
tagaacccctttcaaatgctgttctggagagac

SEQ ID NO: 695655 - DNA, 33 bp, Homo sapien
gagctgaagagatactcagtacatatttgcaga

SEQ ID NO: 695656 - DNA, 33 bp, Homo sapien
gagctgaagagatacttagtacatatttgcaga

SEQ ID NO: 695657 - DNA, 33 bp, Homo sapien
ttattaaatcagttggcaaaagcaaatttattt

SEQ ID NO: 695658 - DNA, 33 bp, Homo sapien
ttattaaatcagttgggaaaagcaaatttattt

SEQ ID NO: 695659 - DNA, 33 bp, Homo sapien
catgaaaactctgtaactgtggattaggagtga

SEQ ID NO: 695660 - DNA, 33 bp, Homo sapien
catgaaaactctgtaattgtggattaggagtga

SEQ ID NO: 695661 - DNA, 33 bp, Homo sapien
cgtaattcctccattccctgcaggaactcaaga

SEQ ID NO: 695662 - DNA, 33 bp, Homo sapien
cgtaattcctccattctctgcaggaactcaaga

SEQ ID NO: 695663 - DNA, 33 bp, Homo sapien
atctagtacacaaaaaacctcactttatactag

SEQ ID NO: 695664 - DNA, 33 bp, Homo sapien
atctagtacacaaaaagcctcactttatactag

SEQ ID NO: 695665 - DNA, 33 bp, Homo sapien
aatgaaggaaatattccatgatctgagttgtcc

SEQ ID NO: 695666 - DNA, 33 bp, Homo sapien
aatgaaggaaatattctatgatctgagttgtcc

SEQ ID NO: 695667 - DNA, 33 bp, Homo sapien
ctctgcttctttgtgaactagaaaatcttaaaa

SEQ ID NO: 695668 - DNA, 33 bp, Homo sapien
ctctgcttctttgtgagctagaaaatcttaaaa

SEQ ID NO: 695669 - DNA, 33 bp, Homo sapien
aagcaacagtatcagacattgtcaggtgagaag

SEQ ID NO: 695670 - DNA, 33 bp, Homo sapien
aagcaacagtatcagatattgtcaggtgagaag

SEQ ID NO: 695671 - DNA, 33 bp, Homo sapien
tattgttcacaggtcaaatgtactattatttcc

SEQ ID NO: 695672 - DNA, 33 bp, Homo sapien
tattgttcacaggtcagatgtactattatttcc

SEQ ID NO: 695673 - DNA, 33 bp, Homo sapien
tttttgtaaaattgtgcataatgctctttaatg

SEQ ID NO: 695674 - DNA, 33 bp, Homo sapien
tttttgtaaaattgtgtataatgctctttaatg

SEQ ID NO: 695675 - DNA, 33 bp, Homo sapien
gtaagtttgcaagataaatacccaggagagaca

SEQ ID NO: 695676 - DNA, 33 bp, Homo sapien
gtaagtttgcaagatagatacccaggagagaca

SEQ ID NO: 695677 - DNA, 33 bp, Homo sapien
tttagtgctttctcaacggtgctaggatcaaat

SEQ ID NO: 695678 - DNA, 33 bp, Homo sapien
tttagtgctttctcaatggtgctaggatcaaat

SEQ ID NO: 695679 - DNA, 33 bp, Homo sapien
aacatggacattggaaagatggaataaatgaat

SEQ ID NO: 695680 - DNA, 33 bp, Homo sapien
aacatggacattggaaggatggaataaatgaat

SEQ ID NO: 695681 - DNA, 33 bp, Homo sapien
caaatggattcatagacacaggttttgataaaa

SEQ ID NO: 695682 - DNA, 33 bp, Homo sapien
caaatggattcatagatacaggttttgataaaa

SEQ ID NO: 695683 - DNA, 33 bp, Homo sapien
tgacaatcaggattacacaataaaataccatct

SEQ ID NO: 695684 - DNA, 33 bp, Homo sapien
tgacaatcaggattacgcaataaaataccatct

SEQ ID NO: 695685 - DNA, 33 bp, Homo sapien
caaattccactataacaaactttaagaaccagt

SEQ ID NO: 695686 - DNA, 33 bp, Homo sapien
caaattccactataacgaactttaagaaccagt

SEQ ID NO: 695687 - DNA, 33 bp, Homo sapien
gagttaaatacatccagcctgatcatcaggtgc

SEQ ID NO: 695688 - DNA, 33 bp, Homo sapien
gagttaaatacatccatcctgatcatcaggtgc

SEQ ID NO: 695689 - DNA, 33 bp, Homo sapien
agtgaatctcaacctcactcgtaattaacattt

SEQ ID NO: 695690 - DNA, 33 bp, Homo sapien
agtgaatctcaacctctctcgtaattaacattt

SEQ ID NO: 695691 - DNA, 33 bp, Homo sapien
tcctccatggctgctcactcaggctgacattga

SEQ ID NO: 695692 - DNA, 33 bp, Homo sapien
tcctccatggctgctcgctcaggctgacattga

SEQ ID NO: 695693 - DNA, 33 bp, Homo sapien
ccaagcatacttgaagaagtcctctcccactca

SEQ ID NO: 695694 - DNA, 33 bp, Homo sapien
ccaagcatacttgaaggagtcctctcccactca

SEQ ID NO: 695695 - DNA, 33 bp, Homo sapien
ggaaaatcatctaagcaatgaagccagctgctt

SEQ ID NO: 695696 - DNA, 33 bp, Homo sapien
ggaaaatcatctaagccatgaagccagctgctt

SEQ ID NO: 695697 - DNA, 33 bp, Homo sapien
cctgctggaaatgtcaaggtcactaagtatacc

SEQ ID NO: 695698 - DNA, 33 bp, Homo sapien
cctgctggaaatgtcagggtcactaagtatacc

SEQ ID NO: 695699 - DNA, 33 bp, Homo sapien
ctgattaaagtgcaaagatagagcgaatagaaa

SEQ ID NO: 695700 - DNA, 33 bp, Homo sapien
ctgattaaagtgcaaatatagagcgaatagaaa

SEQ ID NO: 695701 - DNA, 33 bp, Homo sapien
gcaattacagtttccaatatttcagaatggcat

SEQ ID NO: 695702 - DNA, 33 bp, Homo sapien
gcaattacagtttccagtatttcagaatggcat

SEQ ID NO: 695703 - DNA, 33 bp, Homo sapien
ttattggccaacttgagggctgcagtattatac

SEQ ID NO: 695704 - DNA, 33 bp, Homo sapien
ttattggccaacttgatggctgcagtattatac

SEQ ID NO: 695705 - DNA, 33 bp, Homo sapien
ccacaccatagcaggaaacatagtgaccagatg

SEQ ID NO: 695706 - DNA, 33 bp, Homo sapien
ccacaccatagcaggagacatagtgaccagatg

SEQ ID NO: 695707 - DNA, 33 bp, Homo sapien
catcagcttcatacataataacttaagtaatag

SEQ ID NO: 695708 - DNA, 33 bp, Homo sapien
catcagcttcatacattataacttaagtaatag

SEQ ID NO: 695709 - DNA, 33 bp, Homo sapien
tcattctgggttctaccggttcttaagtggact

SEQ ID NO: 695710 - DNA, 33 bp, Homo sapien
tcattctgggttctactggttcttaagtggact

SEQ ID NO: 695711 - DNA, 33 bp, Homo sapien
taaacacttcaaaaaacgtgcgagtcatcacca

SEQ ID NO: 695712 - DNA, 33 bp, Homo sapien
taaacacttcaaaaaatgtgcgagtcatcacca

SEQ ID NO: 695713 - DNA, 33 bp, Homo sapien
agaaactattctatgacgtgttggcagaagctc

SEQ ID NO: 695714 - DNA, 33 bp, Homo sapien
agaaactattctatgatgtgttggcagaagctc

SEQ ID NO: 695715 - DNA, 33 bp, Homo sapien
tacctaagttcatggacgacaatcaccaaattt

SEQ ID NO: 695716 - DNA, 33 bp, Homo sapien
tacctaagttcatggaggacaatcaccaaattt

SEQ ID NO: 695717 - DNA, 33 bp, Homo sapien
gtatctttggtacttaacacatcatactaaaaa

SEQ ID NO: 695718 - DNA, 33 bp, Homo sapien
gtatctttggtacttatcacatcatactaaaaa

SEQ ID NO: 695719 - DNA, 33 bp, Homo sapien
cctcccgagctcatagcattgctgtattaaatg

SEQ ID NO: 695720 - DNA, 33 bp, Homo sapien
cctcccgagctcataggattgctgtattaaatg

SEQ ID NO: 695721 - DNA, 33 bp, Homo sapien
tatacctaccttcctccagttggctctacacac

SEQ ID NO: 695722 - DNA, 33 bp, Homo sapien
tatacctaccttcctctagttggctctacacac

SEQ ID NO: 695723 - DNA, 33 bp, Homo sapien
gagacagtttaacaaacgcctgaccatgacctg

SEQ ID NO: 695724 - DNA, 33 bp, Homo sapien
gagacagtttaacaaatgcctgaccatgacctg

SEQ ID NO: 695725 - DNA, 33 bp, Homo sapien
tatattttaagcggacagtagactataaagtgt

SEQ ID NO: 695726 - DNA, 33 bp, Homo sapien
tatattttaagcggactgtagactataaagtgt

SEQ ID NO: 695727 - DNA, 33 bp, Homo sapien
aacagagagagtaaagaagaatgccccaaagtt

SEQ ID NO: 695728 - DNA, 33 bp, Homo sapien
aacagagagagtaaaggagaatgccccaaagtt

SEQ ID NO: 695729 - DNA, 33 bp, Homo sapien
tcactttcatgagccacgtccagaactcagtct

SEQ ID NO: 695730 - DNA, 33 bp, Homo sapien
tcactttcatgagccatgtccagaactcagtct

SEQ ID NO: 695731 - DNA, 33 bp, Homo sapien
taaggatttcctgaaacgtccattgaacatttc

SEQ ID NO: 695732 - DNA, 33 bp, Homo sapien
taaggatttcctgaaaggtccattgaacatttc

SEQ ID NO: 695733 - DNA, 33 bp, Homo sapien
gatgactgaataatgccgaaaacctaatgacca

SEQ ID NO: 695734 - DNA, 33 bp, Homo sapien
gatgactgaataatgctgaaaacctaatgacca

SEQ ID NO: 695735 - DNA, 33 bp, Homo sapien
atattttttcattaacactctagacttgttaaa

SEQ ID NO: 695736 - DNA, 33 bp, Homo sapien
atattttttcattaactctctagacttgttaaa

SEQ ID NO: 695737 - DNA, 33 bp, Homo sapien
aaacctggcaaggacaagggaatctcatcacgc

SEQ ID NO: 695738 - DNA, 33 bp, Homo sapien
aaacctggcaaggacaggggaatctcatcacgc

SEQ ID NO: 695739 - DNA, 33 bp, Homo sapien
tttttggtctgcacaccgaatttagggatttca

SEQ ID NO: 695740 - DNA, 33 bp, Homo sapien
tttttggtctgcacactgaatttagggatttca

SEQ ID NO: 695741 - DNA, 33 bp, Homo sapien
tagcctaggagcaaataagctatgccatatacc

SEQ ID NO: 695742 - DNA, 33 bp, Homo sapien
tagcctaggagcaaatgagctatgccatatacc

SEQ ID NO: 695743 - DNA, 33 bp, Homo sapien
tatagatattacagtaacagtattccatagtct

SEQ ID NO: 695744 - DNA, 33 bp, Homo sapien
tatagatattacagtagcagtattccatagtct

SEQ ID NO: 695745 - DNA, 33 bp, Homo sapien
ctctgttttcctatgaagttcgagtcatagcaa

SEQ ID NO: 695746 - DNA, 33 bp, Homo sapien
ctctgttttcctatgatgttcgagtcatagcaa

SEQ ID NO: 695747 - DNA, 33 bp, Homo sapien
gtattagacatgggaacgaatgcctttctacca

SEQ ID NO: 695748 - DNA, 33 bp, Homo sapien
gtattagacatgggaatgaatgcctttctacca

SEQ ID NO: 695749 - DNA, 33 bp, Homo sapien
aagacagcatctcctgcagaattagatgtcaaa

SEQ ID NO: 695750 - DNA, 33 bp, Homo sapien
aagacagcatctcctgtagaattagatgtcaaa

SEQ ID NO: 695751 - DNA, 33 bp, Homo sapien
ctcaaacaccatagagaaattacctgccttcca

SEQ ID NO: 695752 - DNA, 33 bp, Homo sapien
ctcaaacaccatagaggaattacctgccttcca

SEQ ID NO: 695753 - DNA, 33 bp, Homo sapien; identical to SEQ ID NO: 695751

SEQ ID NO: 695754 - DNA, 33 bp, Homo sapien; identical to SEQ ID NO: 695752

SEQ ID NO: 695755 - DNA, 33 bp, Homo sapien
ccctggcccactggagaaaaaataattcaagta

SEQ ID NO: 695756 - DNA, 33 bp, Homo sapien
ccctggcccactggaggaaaaataattcaagta

SEQ ID NO: 695757 - DNA, 33 bp, Homo sapien
catgtaggtctcagtgaaaaacaaaatccatta

SEQ ID NO: 695758 - DNA, 33 bp, Homo sapien
catgtaggtctcagtggaaaacaaaatccatta

SEQ ID NO: 695759 - DNA, 33 bp, Homo sapien
accatggtccaagtacacatccagagttcaagc

SEQ ID NO: 695760 - DNA, 33 bp, Homo sapien
accatggtccaagtacgcatccagagttcaagc

SEQ ID NO: 695761 - DNA, 33 bp, Homo sapien
ttctgggcaatgtaccaaaaggtatatgagctt

SEQ ID NO: 695762 - DNA, 33 bp, Homo sapien
ttctgggcaatgtacccaaaggtatatgagctt

SEQ ID NO: 695763 - DNA, 33 bp, Homo sapien
ctactaatctattaacgattgggatcataaaca

SEQ ID NO: 695764 - DNA, 33 bp, Homo sapien
ctactaatctattaactattgggatcataaaca

SEQ ID NO: 695765 - DNA, 33 bp, Homo sapien
accatggaaatagcccaagttctctccaaagtt

SEQ ID NO: 695766 - DNA, 33 bp, Homo sapien
accatggaaatagccccagttctctccaaagtt

SEQ ID NO: 695767 - DNA, 33 bp, Homo sapien
ttttattttcgactcaatgacagatgaaaacaa

SEQ ID NO: 695768 - DNA, 33 bp, Homo sapien
ttttattttcgactcagtgacagatgaaaacaa

SEQ ID NO: 695769 - DNA, 33 bp, Homo sapien
ggccccgcttccaacactggtgaacacatttca

SEQ ID NO: 695770 - DNA, 33 bp, Homo sapien
ggccccgcttccaacattggtgaacacatttca

SEQ ID NO: 695771 - DNA, 33 bp, Homo sapien
ctgccaaggtgctcaacagtgaagaaaactaca

SEQ ID NO: 695772 - DNA, 33 bp, Homo sapien
ctgccaaggtgctcaagagtgaagaaaactaca

SEQ ID NO: 695773 - DNA, 33 bp, Homo sapien
ggagcagcatctccccactgtgtcatatttttc

SEQ ID NO: 695774 - DNA, 33 bp, Homo sapien
ggagcagcatctcccctctgtgtcatatttttc

SEQ ID NO: 695775 - DNA, 33 bp, Homo sapien
tgctaattgaactaagacatttgtggataaagt

SEQ ID NO: 695776 - DNA, 33 bp, Homo sapien
tgctaattgaactaagccatttgtggataaagt

SEQ ID NO: 695777 - DNA, 33 bp, Homo sapien
gagtaccatgcattatcaaattctcacaaatgt

SEQ ID NO: 695778 - DNA, 33 bp, Homo sapien
gagtaccatgcattattaaattctcacaaatgt

SEQ ID NO: 695779 - DNA, 33 bp, Homo sapien
aggagaagataaatacaacacatttgccatata

SEQ ID NO: 695780 - DNA, 33 bp, Homo sapien
aggagaagataaatacgacacatttgccatata

SEQ ID NO: 695781 - DNA, 33 bp, Homo sapien
ttgcttgtgctctttcaattttggttttcacaa

SEQ ID NO: 695782 - DNA, 33 bp, Homo sapien
ttgcttgtgctctttccattttggttttcacaa

SEQ ID NO: 695783 - DNA, 33 bp, Homo sapien
ggatagggcatcacccagcagagttgtgaggcc

SEQ ID NO: 695784 - DNA, 33 bp, Homo sapien
ggatagggcatcacccggcagagttgtgaggcc

SEQ ID NO: 695785 - DNA, 33 bp, Homo sapien
atgcccaaatagctggaacaacattatttcagg

SEQ ID NO: 695786 - DNA, 33 bp, Homo sapien
atgcccaaatagctggcacaacattatttcagg

SEQ ID NO: 695787 - DNA, 33 bp, Homo sapien
ctaaacatggcacagaaattacattaaagaaat

SEQ ID NO: 695788 - DNA, 33 bp, Homo sapien
ctaaacatggcacagatattacattaaagaaat

SEQ ID NO: 695789 - DNA, 33 bp, Homo sapien
ggccatcgaaaccacactatgacccaaaagtag

SEQ ID NO: 695790 - DNA, 33 bp, Homo sapien
ggccatcgaaaccacattatgacccaaaagtag

SEQ ID NO: 695791 - DNA, 33 bp, Homo sapien
aactgacagttaactcaagtcagcagatgataa

SEQ ID NO: 695792 - DNA, 33 bp, Homo sapien
aactgacagttaactcgagtcagcagatgataa

SEQ ID NO: 695793 - DNA, 33 bp, Homo sapien
actcttaaccaagaagacctcaacaagaaggtg

SEQ ID NO: 695794 - DNA, 33 bp, Homo sapien
actcttaaccaagaaggcctcaacaagaaggtg

SEQ ID NO: 695795 - DNA, 33 bp, Homo sapien
tgttcaataagacatacggacaaaggggaggca

SEQ ID NO: 695796 - DNA, 33 bp, Homo sapien
tgttcaataagacatatggacaaaggggaggca

SEQ ID NO: 695797 - DNA, 33 bp, Homo sapien
agatttcatagttgacaaaatggatggcctgac

SEQ ID NO: 695798 - DNA, 33 bp, Homo sapien
agatttcatagttgacgaaatggatggcctgac

SEQ ID NO: 695799 - DNA, 33 bp, Homo sapien
ctatttgcaagccacacctaaacattgtctgta

SEQ ID NO: 695800 - DNA, 33 bp, Homo sapien
ctatttgcaagccacatctaaacattgtctgta

SEQ ID NO: 695801 - DNA, 33 bp, Homo sapien
attgtgaattaatttacagttccatactgttcc

SEQ ID NO: 695802 - DNA, 33 bp, Homo sapien
attgtgaattaatttatagttccatactgttcc

SEQ ID NO: 695803 - DNA, 33 bp, Homo sapien
taattttgacttccacagacaatgtataagtat

SEQ ID NO: 695804 - DNA, 33 bp, Homo sapien
taattttgacttccaccgacaatgtataagtat

SEQ ID NO: 695805 - DNA, 33 bp, Homo sapien
catatgcaatgatgccaatagatgcaaaacaaa

SEQ ID NO: 695806 - DNA, 33 bp, Homo sapien
catatgcaatgatgccgatagatgcaaaacaaa

SEQ ID NO: 695807 - DNA, 33 bp, Homo sapien
tatgtccatagatgcaacctacgatagttctag

SEQ ID NO: 695808 - DNA, 33 bp, Homo sapien
tatgtccatagatgcaccctacgatagttctag

SEQ ID NO: 695809 - DNA, 33 bp, Homo sapien
aatacccaggaagaagaaatttgtccctttttg

SEQ ID NO: 695810 - DNA, 33 bp, Homo sapien
aatacccaggaagaaggaatttgtccctttttg

SEQ ID NO: 695811 - DNA, 33 bp, Homo sapien
ggaatcgataattctacgacaacacattgttaa

SEQ ID NO: 695812 - DNA, 33 bp, Homo sapien
ggaatcgataattctaggacaacacattgttaa

SEQ ID NO: 695813 - DNA, 33 bp, Homo sapien
ataactatattttcccacgatctgataattaac

SEQ ID NO: 695814 - DNA, 33 bp, Homo sapien
ataactatattttcccgcgatctgataattaac

SEQ ID NO: 695815 - DNA, 33 bp, Homo sapien
gcatataactgccagaaagcaacgagtttagtg

SEQ ID NO: 695816 - DNA, 33 bp, Homo sapien
gcatataactgccagacagcaacgagtttagtg

SEQ ID NO: 695817 - DNA, 33 bp, Homo sapien
taggaaatggaggaaccgtatcttaaagaatta

SEQ ID NO: 695818 - DNA, 33 bp, Homo sapien
taggaaatggaggaactgtatcttaaagaatta

SEQ ID NO: 695819 - DNA, 33 bp, Homo sapien
ggaaatgatattatgaacttgtaaagactctca

SEQ ID NO: 695820 - DNA, 33 bp, Homo sapien
ggaaatgatattatgaccttgtaaagactctca

SEQ ID NO: 695821 - DNA, 33 bp, Homo sapien
gcccggcctgctctcaatatttttaaaccttct

SEQ ID NO: 695822 - DNA, 33 bp, Homo sapien
gcccggcctgctctcagtatttttaaaccttct

SEQ ID NO: 695823 - DNA, 33 bp, Homo sapien
agcagctatattttgacaaggacatatgtgcta

SEQ ID NO: 695824 - DNA, 33 bp, Homo sapien
agcagctatattttgataaggacatatgtgcta

SEQ ID NO: 695825 - DNA, 33 bp, Homo sapien
tgcaaaatgtaaaggacctctcctcgtccttgt

SEQ ID NO: 695826 - DNA, 33 bp, Homo sapien
tgcaaaatgtaaaggatctctcctcgtccttgt

SEQ ID NO: 695827 - DNA, 33 bp, Homo sapien
ttacctaatgaatttaaacagtgtgggtaatta

SEQ ID NO: 695828 - DNA, 33 bp, Homo sapien
ttacctaatgaatttacacagtgtgggtaatta

SEQ ID NO: 695829 - DNA, 33 bp, Homo sapien
cgtacatcacggtaagaaaaacagacaagaaag

SEQ ID NO: 695830 - DNA, 33 bp, Homo sapien
cgtacatcacggtaaggaaaacagacaagaaag

SEQ ID NO: 695831 - DNA, 33 bp, Homo sapien
ggtagaggttatgtatcacatgatgttgaactg

SEQ ID NO: 695832 - DNA, 33 bp, Homo sapien
ggtagaggttatgtatgacatgatgttgaactg

SEQ ID NO: 695833 - DNA, 33 bp, Homo sapien
agatgactagtgatcccaaaatgatgacacaaa

SEQ ID NO: 695834 - DNA, 33 bp, Homo sapien
agatgactagtgatcctaaaatgatgacacaaa

SEQ ID NO: 695835 - DNA, 33 bp, Homo sapien
aatattttcttagtcaactgatgtatggatgat

SEQ ID NO: 695836 - DNA, 33 bp, Homo sapien
aatattttcttagtcacctgatgtatggatgat

SEQ ID NO: 695837 - DNA, 33 bp, Homo sapien
taacatttatcaccaactctgtataattacact

SEQ ID NO: 695838 - DNA, 33 bp, Homo sapien
taacatttatcaccaattctgtataattacact

SEQ ID NO: 695839 - DNA, 33 bp, Homo sapien
gatatcagagtaatgacggtgaggtgcaatgag

SEQ ID NO: 695840 - DNA, 33 bp, Homo sapien
gatatcagagtaatgatggtgaggtgcaatgag

SEQ ID NO: 695841 - DNA, 33 bp, Homo sapien
ctagaacagatgttaccaaaaatggaaacgtgg

SEQ ID NO: 695842 - DNA, 33 bp, Homo sapien
ctagaacagatgttactaaaaatggaaacgtgg

SEQ ID NO: 695843 - DNA, 33 bp, Homo sapien
tgatactccacagcaaacagagaagagctattg

SEQ ID NO: 695844 - DNA, 33 bp, Homo sapien
tgatactccacagcaagcagagaagagctattg

SEQ ID NO: 695845 - DNA, 33 bp, Homo sapien
gtgtcagctgagttaacgccaatctagagaacc

SEQ ID NO: 695846 - DNA, 33 bp, Homo sapien
gtgtcagctgagttaatgccaatctagagaacc

SEQ ID NO: 695847 - DNA, 33 bp, Homo sapien
ctgagatacaatgtgcgctcaataaaaaaatct

SEQ ID NO: 695848 - DNA, 33 bp, Homo sapien
ctgagatacaatgtgctctcaataaaaaaatct

SEQ ID NO: 695849 - DNA, 33 bp, Homo sapien
tttttgtaggttgacactatctatttccaagct

SEQ ID NO: 695850 - DNA, 33 bp, Homo sapien
tttttgtaggttgacagtatctatttccaagct

SEQ ID NO: 695851 - DNA, 33 bp, Homo sapien
ctcaagttcatttatcactcaattttgtagaat

SEQ ID NO: 695852 - DNA, 33 bp, Homo sapien
ctcaagttcatttatcgctcaattttgtagaat

SEQ ID NO: 695853 - DNA, 33 bp, Homo sapien
tcattaacctccagtaccatgcaactgccttat

SEQ ID NO: 695854 - DNA, 33 bp, Homo sapien
tcattaacctccagtatcatgcaactgccttat

SEQ ID NO: 695855 - DNA, 33 bp, Homo sapien
acatcaagcacagaagcaaaggtaatcctcata

SEQ ID NO: 695856 - DNA, 33 bp, Homo sapien
acatcaagcacagaagtaaaggtaatcctcata

SEQ ID NO: 695857 - DNA, 33 bp, Homo sapien
ggaaggagagaggtagaatgaacagcctgtaaa

SEQ ID NO: 695858 - DNA, 33 bp, Homo sapien
ggaaggagagaggtaggatgaacagcctgtaaa

SEQ ID NO: 695859 - DNA, 33 bp, Homo sapien
gtaaactgagcagcaaaagttctgtgtcaattc

SEQ ID NO: 695860 - DNA, 33 bp, Homo sapien
gtaaactgagcagcaacagttctgtgtcaattc

SEQ ID NO: 695861 - DNA, 33 bp, Homo sapien
tcataattatccaggaatcccacgtgaaaagtc

SEQ ID NO: 695862 - DNA, 33 bp, Homo sapien
tcataattatccaggattcccacgtgaaaagtc

SEQ ID NO: 695863 - DNA, 33 bp, Homo sapien
atctttgtctatcactgacctacaaactgagct

SEQ ID NO: 695864 - DNA, 33 bp, Homo sapien
atctttgtctatcacttacctacaaactgagct

SEQ ID NO: 695865 - DNA, 33 bp, Homo sapien
attgttaagctagacaaacctaaactggaaata

SEQ ID NO: 695866 - DNA, 33 bp, Homo sapien
attgttaagctagacatacctaaactggaaata

SEQ ID NO: 695867 - DNA, 33 bp, Homo sapien
aattgtatgatggatgccaatgtgcacatgcaa

SEQ ID NO: 695868 - DNA, 33 bp, Homo sapien
aattgtatgatggatgtcaatgtgcacatgcaa

SEQ ID NO: 695869 - DNA, 33 bp, Homo sapien
tttacatgtgcagttagctttgcccctaatctt

SEQ ID NO: 695870 - DNA, 33 bp, Homo sapien
tttacatgtgcagttatctttgcccctaatctt

SEQ ID NO: 695871 - DNA, 33 bp, Homo sapien
aaggaagtgaaagacacaatgaaaactacaatc

SEQ ID NO: 695872 - DNA, 33 bp, Homo sapien
aaggaagtgaaagacataatgaaaactacaatc

SEQ ID NO: 695873 - DNA, 33 bp, Homo sapien
tactaatattgccttccaatctatgaacataaa

SEQ ID NO: 695874 - DNA, 33 bp, Homo sapien
tactaatattgccttctaatctatgaacataaa

SEQ ID NO: 695875 - DNA, 33 bp, Homo sapien
acttaaaacctaatgacggttgatatatgcagc

SEQ ID NO: 695876 - DNA, 33 bp, Homo sapien
acttaaaacctaatgatggttgatatatgcagc

SEQ ID NO: 695877 - DNA, 33 bp, Homo sapien
tgacagcaagagctataaatttctcatatgatg

SEQ ID NO: 695878 - DNA, 33 bp, Homo sapien
tgacagcaagagctatcaatttctcatatgatg

SEQ ID NO: 695879 - DNA, 33 bp, Homo sapien
tttctttagattcttgcaagcttttatgagcat

SEQ ID NO: 695880 - DNA, 33 bp, Homo sapien
tttctttagattcttgtaagcttttatgagcat

SEQ ID NO: 695881 - DNA, 33 bp, Homo sapien
aagcatacactaatgaccacttcttaaagagag

SEQ ID NO: 695882 - DNA, 33 bp, Homo sapien
aagcatacactaatgagcacttcttaaagagag

SEQ ID NO: 695883 - DNA, 33 bp, Homo sapien
taatcttcaggatgaccggtagaaagcagcgag

SEQ ID NO: 695884 - DNA, 33 bp, Homo sapien
taatcttcaggatgactggtagaaagcagcgag

SEQ ID NO: 695885 - DNA, 33 bp, Homo sapien
atctgtacttaatttaccactcactaattgttt

SEQ ID NO: 695886 - DNA, 33 bp, Homo sapien
atctgtacttaatttatcactcactaattgttt

SEQ ID NO: 695887 - DNA, 33 bp, Homo sapien
agagaagagaggacagactatgctaaatactct

SEQ ID NO: 695888 - DNA, 33 bp, Homo sapien
agagaagagaggacagtctatgctaaatactct

SEQ ID NO: 695889 - DNA, 33 bp, Homo sapien
gataaactaaaagatgaaagacattctaatgat

SEQ ID NO: 695890 - DNA, 33 bp, Homo sapien
gataaactaaaagatggaagacattctaatgat

SEQ ID NO: 695891 - DNA, 33 bp, Homo sapien
tagagtaaaaaggcagccgatacatcaatgaaa

SEQ ID NO: 695892 - DNA, 33 bp, Homo sapien
tagagtaaaaaggcagtcgatacatcaatgaaa

SEQ ID NO: 695893 - DNA, 33 bp, Homo sapien
gcagtagccattgaacagataatttaagtgcct

SEQ ID NO: 695894 - DNA, 33 bp, Homo sapien
gcagtagccattgaacggataatttaagtgcct

SEQ ID NO: 695895 - DNA, 33 bp, Homo sapien
atacgaaggaatataaacagtggtcactgcagc

SEQ ID NO: 695896 - DNA, 33 bp, Homo sapien
atacgaaggaatataagcagtggtcactgcagc

SEQ ID NO: 695897 - DNA, 33 bp, Homo sapien
gttgtaaccgatggaacgattgaaagtgacaac

SEQ ID NO: 695898 - DNA, 33 bp, Homo sapien
gttgtaaccgatggaaggattgaaagtgacaac

SEQ ID NO: 695899 - DNA, 33 bp, Homo sapien
tagatcacacaaataaacaactttacatagcaa

SEQ ID NO: 695900 - DNA, 33 bp, Homo sapien
tagatcacacaaataagcaactttacatagcaa

SEQ ID NO: 695901 - DNA, 33 bp, Homo sapien
atcaagttatttagagcaacgatcattgctgat

SEQ ID NO: 695902 - DNA, 33 bp, Homo sapien
atcaagttatttagaggaacgatcattgctgat

SEQ ID NO: 695903 - DNA, 33 bp, Homo sapien
tgtgtgcttgaccagaaaaagctattaatccct

SEQ ID NO: 695904 - DNA, 33 bp, Homo sapien
tgtgtgcttgaccagagaaagctattaatccct

SEQ ID NO: 695905 - DNA, 33 bp, Homo sapien
ttgctggataaaccaaatgtggaacatccatat

SEQ ID NO: 695906 - DNA, 33 bp, Homo sapien
ttgctggataaaccaagtgtggaacatccatat

SEQ ID NO: 695907 - DNA, 33 bp, Homo sapien
aggatttccttttataaccatctttcaaaggtg

SEQ ID NO: 695908 - DNA, 33 bp, Homo sapien
aggatttccttttatagccatctttcaaaggtg

SEQ ID NO: 695909 - DNA, 33 bp, Homo sapien
cttatgggctattccaatgatttagctgaatgg

SEQ ID NO: 695910 - DNA, 33 bp, Homo sapien
cttatgggctattccagtgatttagctgaatgg

SEQ ID NO: 695911 - DNA, 33 bp, Homo sapien
gtctcacaaacattcaaactctccaactgaaaa

SEQ ID NO: 695912 - DNA, 33 bp, Homo sapien
gtctcacaaacattcagactctccaactgaaaa

SEQ ID NO: 695913 - DNA, 33 bp, Homo sapien
taagacaaaagacgaaaaagagacactcaaata

SEQ ID NO: 695914 - DNA, 33 bp, Homo sapien
taagacaaaagacgaataagagacactcaaata

SEQ ID NO: 695915 - DNA, 33 bp, Homo sapien
tttctgcttagaaataacttccaacagttacac

SEQ ID NO: 695916 - DNA, 33 bp, Homo sapien
tttctgcttagaaatatcttccaacagttacac

SEQ ID NO: 695917 - DNA, 33 bp, Homo sapien
ctgcccaaatcccatgacagattataatctcca

SEQ ID NO: 695918 - DNA, 33 bp, Homo sapien
ctgcccaaatcccatgtcagattataatctcca

SEQ ID NO: 695919 - DNA, 33 bp, Homo sapien
tttatagggaactactgaataatgagagattct

SEQ ID NO: 695920 - DNA, 33 bp, Homo sapien
tttatagggaactacttaataatgagagattct

SEQ ID NO: 695921 - DNA, 33 bp, Homo sapien
ccactgtgctccagaggctccttgtttatgata

SEQ ID NO: 695922 - DNA, 33 bp, Homo sapien
ccactgtgctccagagtctccttgtttatgata

SEQ ID NO: 695923 - DNA, 33 bp, Homo sapien
taacaagttaccaaaaacttagcagcttaatac

SEQ ID NO: 695924 - DNA, 33 bp, Homo sapien
taacaagttaccaaaaccttagcagcttaatac

SEQ ID NO: 695925 - DNA, 33 bp, Homo sapien
tgtctaaaaacactgcagagacttccagtcaag

SEQ ID NO: 695926 - DNA, 33 bp, Homo sapien
tgtctaaaaacactgctgagacttccagtcaag

SEQ ID NO: 695927 - DNA, 33 bp, Homo sapien
aaatgttataatccacaaatgatttcaagtttt

SEQ ID NO: 695928 - DNA, 33 bp, Homo sapien
aaatgttataatccaccaatgatttcaagtttt

SEQ ID NO: 695929 - DNA, 33 bp, Homo sapien
atctcagtttctatccaaagtagtttatcccac

SEQ ID NO: 695930 - DNA, 33 bp, Homo sapien
atctcagtttctatcccaagtagtttatcccac

SEQ ID NO: 695931 - DNA, 33 bp, Homo sapien
cccttcctccctagaaatcattcttcttcagtg

SEQ ID NO: 695932 - DNA, 33 bp, Homo sapien
cccttcctccctagaagtcattcttcttcagtg

SEQ ID NO: 695933 - DNA, 33 bp, Homo sapien
tgtttatttgttaagcagcaactatttgtgtgg

SEQ ID NO: 695934 - DNA, 33 bp, Homo sapien
tgtttatttgttaagcggcaactatttgtgtgg

SEQ ID NO: 695935 - DNA, 33 bp, Homo sapien
gaatggactccagaaacgctggaaaagcaatga

SEQ ID NO: 695936 - DNA, 33 bp, Homo sapien
gaatggactccagaaatgctggaaaagcaatga

SEQ ID NO: 695937 - DNA, 33 bp, Homo sapien
ataacaggagactttcaatattttctggtcaat

SEQ ID NO: 695938 - DNA, 33 bp, Homo sapien
ataacaggagactttcgatattttctggtcaat

SEQ ID NO: 695939 - DNA, 33 bp, Homo sapien
gttacatagactctacaaaaagtagcctatatg

SEQ ID NO: 695940 - DNA, 33 bp, Homo sapien
gttacatagactctacgaaaagtagcctatatg

SEQ ID NO: 695941 - DNA, 33 bp, Homo sapien
tagaatgtgtagtagcacaatgatttccatggt

SEQ ID NO: 695942 - DNA, 33 bp, Homo sapien
tagaatgtgtagtagcgcaatgatttccatggt

SEQ ID NO: 695943 - DNA, 33 bp, Homo sapien
gtatcatttttctaaacgtttttggcaactgct

SEQ ID NO: 695944 - DNA, 33 bp, Homo sapien
gtatcatttttctaaaggtttttggcaactgct

SEQ ID NO: 695945 - DNA, 33 bp, Homo sapien
ttttcaaataaacaaccatgtcactgaatttga

SEQ ID NO: 695946 - DNA, 33 bp, Homo sapien
ttttcaaataaacaacgatgtcactgaatttga

SEQ ID NO: 695947 - DNA, 33 bp, Homo sapien
tagagtaaaatagcacaacacttctatcagagg

SEQ ID NO: 695948 - DNA, 33 bp, Homo sapien
tagagtaaaatagcacgacacttctatcagagg

SEQ ID NO: 695949 - DNA, 33 bp, Homo sapien
gtatattcaaaacaaacgtgatctgataaaatt

SEQ ID NO: 695950 - DNA, 33 bp, Homo sapien
gtatattcaaaacaaatgtgatctgataaaatt

SEQ ID NO: 695951 - DNA, 33 bp, Homo sapien
aatgttataagcaataggccttcagctgaaaca

SEQ ID NO: 695952 - DNA, 33 bp, Homo sapien
aatgttataagcaatatgccttcagctgaaaca

SEQ ID NO: 695953 - DNA, 33 bp, Homo sapien
atgatgaattggaaaacatggaaagatgcagat

SEQ ID NO: 695954 - DNA, 33 bp, Homo sapien
atgatgaattggaaaatatggaaagatgcagat

SEQ ID NO: 695955 - DNA, 33 bp, Homo sapien
aaaacgattcgtggacaagttgaaatttgatat

SEQ ID NO: 695956 - DNA, 33 bp, Homo sapien
aaaacgattcgtggacgagttgaaatttgatat

SEQ ID NO: 695957 - DNA, 33 bp, Homo sapien
ctagatttagaaacaccagcacattagtttccc

SEQ ID NO: 695958 - DNA, 33 bp, Homo sapien
ctagatttagaaacacgagcacattagtttccc

SEQ ID NO: 695959 - DNA, 33 bp, Homo sapien
agactctaaactttatgaatgcagtcaccttgc

SEQ ID NO: 695960 - DNA, 33 bp, Homo sapien
agactctaaactttattaatgcagtcaccttgc

SEQ ID NO: 695961 - DNA, 33 bp, Homo sapien
aatggggagagaataaagaatgaggtatgaacg

SEQ ID NO: 695962 - DNA, 33 bp, Homo sapien
aatggggagagaataaggaatgaggtatgaacg

SEQ ID NO: 695963 - DNA, 33 bp, Homo sapien
ttttgaatctccctggaatgtgaagaaatggac

SEQ ID NO: 695964 - DNA, 33 bp, Homo sapien
ttttgaatctccctgggatgtgaagaaatggac

SEQ ID NO: 695965 - DNA, 33 bp, Homo sapien
gagaaagcagagtggaaaaagcaaaacttgggt

SEQ ID NO: 695966 - DNA, 33 bp, Homo sapien
gagaaagcagagtggagaaagcaaaacttgggt

SEQ ID NO: 695967 - DNA, 33 bp, Homo sapien
gtcagtgtgttttgtacgggtttctatgtgttt

SEQ ID NO: 695968 - DNA, 33 bp, Homo sapien
gtcagtgtgttttgtatgggtttctatgtgttt

SEQ ID NO: 695969 - DNA, 33 bp, Homo sapien
ttgccatatgttgaaacggcccttttgcaaatg

SEQ ID NO: 695970 - DNA, 33 bp, Homo sapien
ttgccatatgttgaaatggcccttttgcaaatg

SEQ ID NO: 695971 - DNA, 33 bp, Homo sapien
tatcctgactaataataagttccagagcataga

SEQ ID NO: 695972 - DNA, 33 bp, Homo sapien
tatcctgactaataatgagttccagagcataga

SEQ ID NO: 695973 - DNA, 33 bp, Homo sapien
tgaaaggcaaataagaatcagtcacctgaagaa

SEQ ID NO: 695974 - DNA, 33 bp, Homo sapien
tgaaaggcaaataagagtcagtcacctgaagaa

SEQ ID NO: 695975 - DNA, 33 bp, Homo sapien
gtccttttgagcaaagcctgtggccctccctac

SEQ ID NO: 695976 - DNA, 33 bp, Homo sapien
gtccttttgagcaaagtctgtggccctccctac

SEQ ID NO: 695977 - DNA, 33 bp, Homo sapien
gaaataaatgtttgtaccttaagccacgcagtc

SEQ ID NO: 695978 - DNA, 33 bp, Homo sapien
gaaataaatgtttgtagcttaagccacgcagtc

SEQ ID NO: 695979 - DNA, 33 bp, Homo sapien
actggctcagaatcagaaagtgcaaaagttttt

SEQ ID NO: 695980 - DNA, 33 bp, Homo sapien
actggctcagaatcaggaagtgcaaaagttttt

SEQ ID NO: 695981 - DNA, 33 bp, Homo sapien
caaatgaccaataggaagatgggttagtgacat

SEQ ID NO: 695982 - DNA, 33 bp, Homo sapien
caaatgaccaataggaggatgggttagtgacat

SEQ ID NO: 695983 - DNA, 33 bp, Homo sapien
cttgccctccacaagcagaacagtttcagatca

SEQ ID NO: 695984 - DNA, 33 bp, Homo sapien
cttgccctccacaagcggaacagtttcagatca

SEQ ID NO: 695985 - DNA, 33 bp, Homo sapien
tgaggtggaagaatcacaagataatctgtgcta

SEQ ID NO: 695986 - DNA, 33 bp, Homo sapien
tgaggtggaagaatcagaagataatctgtgcta

SEQ ID NO: 695987 - DNA, 33 bp, Homo sapien
tatatgagatgatgaacgtccacagtttctgat

SEQ ID NO: 695988 - DNA, 33 bp, Homo sapien
tatatgagatgatgaatgtccacagtttctgat

SEQ ID NO: 695989 - DNA, 33 bp, Homo sapien
ggggagaggttgctaaaatattataggatttct

SEQ ID NO: 695990 - DNA, 33 bp, Homo sapien
ggggagaggttgctaacatattataggatttct

SEQ ID NO: 695991 - DNA, 33 bp, Homo sapien
gttgagtctgaccaataatggaacctctatttt

SEQ ID NO: 695992 - DNA, 33 bp, Homo sapien
gttgagtctgaccaatcatggaacctctatttt

SEQ ID NO: 695993 - DNA, 33 bp, Homo sapien
caaccatttctctaacccctttcgctaaatttg

SEQ ID NO: 695994 - DNA, 33 bp, Homo sapien
caaccatttctctaactcctttcgctaaatttg

SEQ ID NO: 695995 - DNA, 33 bp, Homo sapien
ctgaccgtaagtgacccctgaagcagtttggtt

SEQ ID NO: 695996 - DNA, 33 bp, Homo sapien
ctgaccgtaagtgacctctgaagcagtttggtt

SEQ ID NO: 695997 - DNA, 33 bp, Homo sapien
caaaacaatcctggtcaacttttctcctgtcac

SEQ ID NO: 695998 - DNA, 33 bp, Homo sapien
caaaacaatcctggtcgacttttctcctgtcac

SEQ ID NO: 695999 - DNA, 33 bp, Homo sapien
cccaacctgactacaactggagaagcgtgtgta

SEQ ID NO: 696000 - DNA, 33 bp, Homo sapien
cccaacctgactacaattggagaagcgtgtgta

SEQ ID NO: 696001 - DNA, 33 bp, Homo sapien
atccatttctgaagatcaggtcccatgtattcc

SEQ ID NO: 696002 - DNA, 33 bp, Homo sapien
atccatttctgaagattaggtcccatgtattcc

SEQ ID NO: 696003 - DNA, 33 bp, Homo sapien
atttttcaaagttgtcacttcctagcaaatctg

SEQ ID NO: 696004 - DNA, 33 bp, Homo sapien
atttttcaaagttgtctcttcctagcaaatctg

SEQ ID NO: 696005 - DNA, 33 bp, Homo sapien
atcatcttaatttaaacggctcaattgcattaa

SEQ ID NO: 696006 - DNA, 33 bp, Homo sapien
atcatcttaatttaaatggctcaattgcattaa

SEQ ID NO: 696007 - DNA, 33 bp, Homo sapien
aggggaatatgtcatcaaagtcattgagaatgg

SEQ ID NO: 696008 - DNA, 33 bp, Homo sapien
aggggaatatgtcatccaagtcattgagaatgg

SEQ ID NO: 696009 - DNA, 33 bp, Homo sapien
gatctgagggcaaaaaaaatgttccaagcagaa

SEQ ID NO: 696010 - DNA, 33 bp, Homo sapien
gatctgagggcaaaaacaatgttccaagcagaa

SEQ ID NO: 696011 - DNA, 33 bp, Homo sapien
gaaataattaagatcaaagcctctctctgggcc

SEQ ID NO: 696012 - DNA, 33 bp, Homo sapien
gaaataattaagatcagagcctctctctgggcc

SEQ ID NO: 696013 - DNA, 33 bp, Homo sapien
gtgctaatggaacatacgagagagaattctaat

SEQ ID NO: 696014 - DNA, 33 bp, Homo sapien
gtgctaatggaacatatgagagagaattctaat

SEQ ID NO: 696015 - DNA, 33 bp, Homo sapien
gcagagggggagagaccgaaatgagttttagag

SEQ ID NO: 696016 - DNA, 33 bp, Homo sapien
gcagagggggagagactgaaatgagttttagag

SEQ ID NO: 696017 - DNA, 33 bp, Homo sapien
agggtacaggagccacaactcatagtggataaa

SEQ ID NO: 696018 - DNA, 33 bp, Homo sapien
agggtacaggagccacgactcatagtggataaa

SEQ ID NO: 696019 - DNA, 33 bp, Homo sapien
tgccttgtaagggtgcactaaatatgttaatag

SEQ ID NO: 696020 - DNA, 33 bp, Homo sapien
tgccttgtaagggtgctctaaatatgttaatag

SEQ ID NO: 696021 - DNA, 33 bp, Homo sapien
agagaaccatgctctcagaaccatagtaaccag

SEQ ID NO: 696022 - DNA, 33 bp, Homo sapien
agagaaccatgctctcggaaccatagtaaccag

SEQ ID NO: 696023 - DNA, 33 bp, Homo sapien
taaaaattaacgtgcacgaaaccagagcagatt

SEQ ID NO: 696024 - DNA, 33 bp, Homo sapien
taaaaattaacgtgcatgaaaccagagcagatt

SEQ ID NO: 696025 - DNA, 33 bp, Homo sapien
gagccagacacggaagaaaagcaaaaggagcgt

SEQ ID NO: 696026 - DNA, 33 bp, Homo sapien
gagccagacacggaaggaaagcaaaaggagcgt

SEQ ID NO: 696027 - DNA, 33 bp, Homo sapien
aagctaactaaaagcaaagaagtaaccacaatg

SEQ ID NO: 696028 - DNA, 33 bp, Homo sapien
aagctaactaaaagcagagaagtaaccacaatg

SEQ ID NO: 696029 - DNA, 33 bp, Homo sapien
tttcagcttctagacactggctgtattccttgg

SEQ ID NO: 696030 - DNA, 33 bp, Homo sapien
tttcagcttctagacattggctgtattccttgg

SEQ ID NO: 696031 - DNA, 33 bp, Homo sapien
ttggttctctctatgcacatcctggaagtggaa

SEQ ID NO: 696032 - DNA, 33 bp, Homo sapien
ttggttctctctatgcgcatcctggaagtggaa

SEQ ID NO: 696033 - DNA, 33 bp, Homo sapien
atcttgatgaaaaggtaaattgcaatctcagcc

SEQ ID NO: 696034 - DNA, 33 bp, Homo sapien
atcttgatgaaaaggtgaattgcaatctcagcc

SEQ ID NO: 696035 - DNA, 33 bp, Homo sapien
agctacagggtgtaaacctgcatctgtcttctg

SEQ ID NO: 696036 - DNA, 33 bp, Homo sapien
agctacagggtgtaaatctgcatctgtcttctg

SEQ ID NO: 696037 - DNA, 33 bp, Homo sapien
tacagctgaaattcaaatggtatgtcagattgc

SEQ ID NO: 696038 - DNA, 33 bp, Homo sapien
tacagctgaaattcaagtggtatgtcagattgc

SEQ ID NO: 696039 - DNA, 33 bp, Homo sapien
cagggcagccacttcccgaatacaagtctacca

SEQ ID NO: 696040 - DNA, 33 bp, Homo sapien
cagggcagccacttcctgaatacaagtctacca

SEQ ID NO: 696041 - DNA, 33 bp, Homo sapien
aggtaattcgagagaaagaaatgttatcttctc

SEQ ID NO: 696042 - DNA, 33 bp, Homo sapien
aggtaattcgagagaaggaaatgttatcttctc

SEQ ID NO: 696043 - DNA, 33 bp, Homo sapien
ttcagatgtttttatacgaccatgtgactacca

SEQ ID NO: 696044 - DNA, 33 bp, Homo sapien
ttcagatgtttttatatgaccatgtgactacca

SEQ ID NO: 696045 - DNA, 33 bp, Homo sapien
ctgagcagtgtggctacaggaacatatgatgta

SEQ ID NO: 696046 - DNA, 33 bp, Homo sapien
ctgagcagtgtggctataggaacatatgatgta

SEQ ID NO: 696047 - DNA, 33 bp, Homo sapien
tcctaccctacattagaaatacatcatatgttc

SEQ ID NO: 696048 - DNA, 33 bp, Homo sapien
tcctaccctacattaggaatacatcatatgttc

SEQ ID NO: 696049 - DNA, 33 bp, Homo sapien
agtggcagaggaaataagttcacctgtgtagta

SEQ ID NO: 696050 - DNA, 33 bp, Homo sapien
agtggcagaggaaatacgttcacctgtgtagta

SEQ ID NO: 696051 - DNA, 33 bp, Homo sapien
tcacaaaatatgcataataatcaaacatcttag

SEQ ID NO: 696052 - DNA, 33 bp, Homo sapien
tcacaaaatatgcatactaatcaaacatcttag

SEQ ID NO: 696053 - DNA, 33 bp, Homo sapien
tgagagttttaattaacgaatccaaatgtctca

SEQ ID NO: 696054 - DNA, 33 bp, Homo sapien
tgagagttttaattaatgaatccaaatgtctca

SEQ ID NO: 696055 - DNA, 33 bp, Homo sapien
gtggccaaatttcgaaactcatttaacttgtta

SEQ ID NO: 696056 - DNA, 33 bp, Homo sapien
gtggccaaatttcgaacctcatttaacttgtta

SEQ ID NO: 696057 - DNA, 33 bp, Homo sapien
actctgtaatcagccaagtagcctgctcttgtc

SEQ ID NO: 696058 - DNA, 33 bp, Homo sapien
actctgtaatcagccaggtagcctgctcttgtc

SEQ ID NO: 696059 - DNA, 33 bp, Homo sapien
aaaacaagaaatttcaaagaagaacctataagc

SEQ ID NO: 696060 - DNA, 33 bp, Homo sapien
aaaacaagaaatttcagagaagaacctataagc

SEQ ID NO: 696061 - DNA, 33 bp, Homo sapien
ggaatcttaaagcgtcaaataaaccaggaatag

SEQ ID NO: 696062 - DNA, 33 bp, Homo sapien
ggaatcttaaagcgtctaataaaccaggaatag

SEQ ID NO: 696063 - DNA, 33 bp, Homo sapien
ttcctttagtggtaaactgatacaactgttttc

SEQ ID NO: 696064 - DNA, 33 bp, Homo sapien
ttcctttagtggtaaattgatacaactgttttc

SEQ ID NO: 696065 - DNA, 33 bp, Homo sapien
taggccggaatgcagaacctagacttactggtt

SEQ ID NO: 696066 - DNA, 33 bp, Homo sapien
taggccggaatgcagagcctagacttactggtt

SEQ ID NO: 696067 - DNA, 33 bp, Homo sapien
aacttacggaatttcaaagaaaaagctatttca

SEQ ID NO: 696068 - DNA, 33 bp, Homo sapien
aacttacggaatttcagagaaaaagctatttca

SEQ ID NO: 696069 - DNA, 33 bp, Homo sapien
atatattatcaggaaccctttgaaaagtcaatg

SEQ ID NO: 696070 - DNA, 33 bp, Homo sapien
atatattatcaggaactctttgaaaagtcaatg

SEQ ID NO: 696071 - DNA, 33 bp, Homo sapien
agaagctacattctataacattggctcagcgta

SEQ ID NO: 696072 - DNA, 33 bp, Homo sapien
agaagctacattctatcacattggctcagcgta

SEQ ID NO: 696073 - DNA, 33 bp, Homo sapien
aaagtctgtacttacaaaagtgatctataatta

SEQ ID NO: 696074 - DNA, 33 bp, Homo sapien
aaagtctgtacttacacaagtgatctataatta

SEQ ID NO: 696075 - DNA, 33 bp, Homo sapien
ttgattttttccctacaagagcacatgttgtct

SEQ ID NO: 696076 - DNA, 33 bp, Homo sapien
ttgattttttccctaccagagcacatgttgtct

SEQ ID NO: 696077 - DNA, 33 bp, Homo sapien
tttgtgacagtgttaggatatttgaatgtccat

SEQ ID NO: 696078 - DNA, 33 bp, Homo sapien
tttgtgacagtgttagtatatttgaatgtccat

SEQ ID NO: 696079 - DNA, 33 bp, Homo sapien
gaactaatgaatgaatcatacacaccaaaaata

SEQ ID NO: 696080 - DNA, 33 bp, Homo sapien
gaactaatgaatgaatgatacacaccaaaaata

SEQ ID NO: 696081 - DNA, 33 bp, Homo sapien
gcatatatctagaggagagtggtataaataaga

SEQ ID NO: 696082 - DNA, 33 bp, Homo sapien
gcatatatctagaggatagtggtataaataaga

SEQ ID NO: 696083 - DNA, 33 bp, Homo sapien
aagatgtgtaagatcacgtagagttgctggtgg

SEQ ID NO: 696084 - DNA, 33 bp, Homo sapien
aagatgtgtaagatcatgtagagttgctggtgg

SEQ ID NO: 696085 - DNA, 33 bp, Homo sapien
aaaccagaaaggatgtaaagtactccagcaagc

SEQ ID NO: 696086 - DNA, 33 bp, Homo sapien
aaaccagaaaggatgtcaagtactccagcaagc

SEQ ID NO: 696087 - DNA, 33 bp, Homo sapien
ttcaaacttcagactacatagggacaaggaaaa

SEQ ID NO: 696088 - DNA, 33 bp, Homo sapien
ttcaaacttcagactagatagggacaaggaaaa

SEQ ID NO: 696089 - DNA, 33 bp, Homo sapien
tcttgattacctaaaaaatggtaacagccattg

SEQ ID NO: 696090 - DNA, 33 bp, Homo sapien
tcttgattacctaaaagatggtaacagccattg

SEQ ID NO: 696091 - DNA, 33 bp, Homo sapien
ttcacattttggtaaccatattgcttgagagac

SEQ ID NO: 696092 - DNA, 33 bp, Homo sapien
ttcacattttggtaactatattgcttgagagac

SEQ ID NO: 696093 - DNA, 33 bp, Homo sapien
gccaattacaaaatacactttgggctacatata

SEQ ID NO: 696094 - DNA, 33 bp, Homo sapien
gccaattacaaaatacgctttgggctacatata

SEQ ID NO: 696095 - DNA, 33 bp, Homo sapien
tttcctgtgagggaaccgaagtagacaaacttt

SEQ ID NO: 696096 - DNA, 33 bp, Homo sapien
tttcctgtgagggaactgaagtagacaaacttt

SEQ ID NO: 696097 - DNA, 33 bp, Homo sapien
acaggtttatcttcaccggataggtctatttta

SEQ ID NO: 696098 - DNA, 33 bp, Homo sapien
acaggtttatcttcacgggataggtctatttta

SEQ ID NO: 696099 - DNA, 33 bp, Homo sapien
atcttggaattttccccgagattttatgtcctg

SEQ ID NO: 696100 - DNA, 33 bp, Homo sapien
atcttggaattttccctgagattttatgtcctg

SEQ ID NO: 696101 - DNA, 33 bp, Homo sapien
gcagacttcagtgccagacattaagtgctaaga

SEQ ID NO: 696102 - DNA, 33 bp, Homo sapien
gcagacttcagtgccatacattaagtgctaaga

SEQ ID NO: 696103 - DNA, 33 bp, Homo sapien
ctttccagaaatgatacctaccttaggtctgtg

SEQ ID NO: 696104 - DNA, 33 bp, Homo sapien
ctttccagaaatgatatctaccttaggtctgtg

SEQ ID NO: 696105 - DNA, 33 bp, Homo sapien
gcgaaatgtattaaacactcgtccaactattta

SEQ ID NO: 696106 - DNA, 33 bp, Homo sapien
gcgaaatgtattaaactctcgtccaactattta

SEQ ID NO: 696107 - DNA, 33 bp, Homo sapien
atcttatagtaaatgtaaagtattgctgtaaac

SEQ ID NO: 696108 - DNA, 33 bp, Homo sapien
atcttatagtaaatgtgaagtattgctgtaaac

SEQ ID NO: 696109 - DNA, 33 bp, Homo sapien
aacacctattaatctgcaaccagtcactcaaca

SEQ ID NO: 696110 - DNA, 33 bp, Homo sapien
aacacctattaatctgtaaccagtcactcaaca

SEQ ID NO: 696111 - DNA, 33 bp, Homo sapien
gtttttatttactactcacaaaaaggtactatg

SEQ ID NO: 696112 - DNA, 33 bp, Homo sapien
gtttttatttactactgacaaaaaggtactatg

SEQ ID NO: 696113 - DNA, 33 bp, Homo sapien
ctgaactccgttcatgcattaaccttcaaatcc

SEQ ID NO: 696114 - DNA, 33 bp, Homo sapien
ctgaactccgttcatggattaaccttcaaatcc

SEQ ID NO: 696115 - DNA, 33 bp, Homo sapien
acttctgtttatatgaaatgaaatgagcaacag

SEQ ID NO: 696116 - DNA, 33 bp, Homo sapien
acttctgtttatatgagatgaaatgagcaacag

SEQ ID NO: 696117 - DNA, 33 bp, Homo sapien
tatcctgctctaccaccggattactttaaatgg

SEQ ID NO: 696118 - DNA, 33 bp, Homo sapien
tatcctgctctaccactggattactttaaatgg

SEQ ID NO: 696119 - DNA, 33 bp, Homo sapien
atactaatatgataacagggtaggcctagaagg

SEQ ID NO: 696120 - DNA, 33 bp, Homo sapien
atactaatatgataacggggtaggcctagaagg

SEQ ID NO: 696121 - DNA, 33 bp, Homo sapien
gtcatttactagagaaactaccacttcagggtc

SEQ ID NO: 696122 - DNA, 33 bp, Homo sapien
gtcatttactagagaagctaccacttcagggtc

SEQ ID NO: 696123 - DNA, 33 bp, Homo sapien
atgaagagcttagttaagtgtttatcatcaaaa

SEQ ID NO: 696124 - DNA, 33 bp, Homo sapien
atgaagagcttagttatgtgtttatcatcaaaa

SEQ ID NO: 696125 - DNA, 33 bp, Homo sapien
tctagatcacaaaagaaataaccgattgatatc

SEQ ID NO: 696126 - DNA, 33 bp, Homo sapien
tctagatcacaaaagagataaccgattgatatc

SEQ ID NO: 696127 - DNA, 33 bp, Homo sapien
tttagaaaagtttagaaaagggccagtctcctc

SEQ ID NO: 696128 - DNA, 33 bp, Homo sapien
tttagaaaagtttagagaagggccagtctcctc

SEQ ID NO: 696129 - DNA, 33 bp, Homo sapien
ttatcagagaggacctcaattccctgacatcct

SEQ ID NO: 696130 - DNA, 33 bp, Homo sapien
ttatcagagaggaccttaattccctgacatcct

SEQ ID NO: 696131 - DNA, 33 bp, Homo sapien
ttttgtgcctaccacacatcaagcacttttcta

SEQ ID NO: 696132 - DNA, 33 bp, Homo sapien
ttttgtgcctaccacatatcaagcacttttcta

SEQ ID NO: 696133 - DNA, 33 bp, Homo sapien
tgttattttgtcaacacgttacttcagtggttt

SEQ ID NO: 696134 - DNA, 33 bp, Homo sapien
tgttattttgtcaacatgttacttcagtggttt

SEQ ID NO: 696135 - DNA, 33 bp, Homo sapien
cttacatgaaatctgacgaaagattggatttca

SEQ ID NO: 696136 - DNA, 33 bp, Homo sapien
cttacatgaaatctgatgaaagattggatttca

SEQ ID NO: 696137 - DNA, 33 bp, Homo sapien
atatttgaaaacaatcgaccgtatgtatgaagc

SEQ ID NO: 696138 - DNA, 33 bp, Homo sapien
atatttgaaaacaatctaccgtatgtatgaagc

SEQ ID NO: 696139 - DNA, 33 bp, Homo sapien
tgcaatatttcctctcactccttatgtctactc

SEQ ID NO: 696140 - DNA, 33 bp, Homo sapien
tgcaatatttcctctcgctccttatgtctactc

SEQ ID NO: 696141 - DNA, 33 bp, Homo sapien
attttggcagaataagcatgggcttacgttgca

SEQ ID NO: 696142 - DNA, 33 bp, Homo sapien
attttggcagaataagtatgggcttacgttgca

SEQ ID NO: 696143 - DNA, 33 bp, Homo sapien
cagttgccttctgctgaaaaagtctgatcgtgt

SEQ ID NO: 696144 - DNA, 33 bp, Homo sapien
cagttgccttctgctgcaaaagtctgatcgtgt

SEQ ID NO: 696145 - DNA, 33 bp, Homo sapien
gtgtggctaaaattaccgacagcatagtgagca

SEQ ID NO: 696146 - DNA, 33 bp, Homo sapien
gtgtggctaaaattactgacagcatagtgagca

SEQ ID NO: 696147 - DNA, 33 bp, Homo sapien
gtaggaactagaattacctatgacaaccaggga

SEQ ID NO: 696148 - DNA, 33 bp, Homo sapien
gtaggaactagaattagctatgacaaccaggga

SEQ ID NO: 696149 - DNA, 33 bp, Homo sapien
tgtgggcaaggccaatcatggtgaattatttct

SEQ ID NO: 696150 - DNA, 33 bp, Homo sapien
tgtgggcaaggccaatgatggtgaattatttct

SEQ ID NO: 696151 - DNA, 33 bp, Homo sapien
ctgcctggcgtaaacaatacctctgtcatttac

SEQ ID NO: 696152 - DNA, 33 bp, Homo sapien
ctgcctggcgtaaacactacctctgtcatttac

SEQ ID NO: 696153 - DNA, 33 bp, Homo sapien
ataggaaatactcaaaactttatattgagcact

SEQ ID NO: 696154 - DNA, 33 bp, Homo sapien
ataggaaatactcaaagctttatattgagcact

SEQ ID NO: 696155 - DNA, 33 bp, Homo sapien
gcagcgctgagtccaaactctaaaaatggtgaa

SEQ ID NO: 696156 - DNA, 33 bp, Homo sapien
gcagcgctgagtccaagctctaaaaatggtgaa

SEQ ID NO: 696157 - DNA, 33 bp, Homo sapien
aaataactgttctctaccaggttattgttgtat

SEQ ID NO: 696158 - DNA, 33 bp, Homo sapien
aaataactgttctctatcaggttattgttgtat

SEQ ID NO: 696159 - DNA, 33 bp, Homo sapien
aatacagtcaatatgaactccatttaaaagatg

SEQ ID NO: 696160 - DNA, 33 bp, Homo sapien
aatacagtcaatatgacctccatttaaaagatg

SEQ ID NO: 696161 - DNA, 33 bp, Homo sapien
ttgcccattgcatttcacattagcactgctctg

SEQ ID NO: 696162 - DNA, 33 bp, Homo sapien
ttgcccattgcatttcgcattagcactgctctg

SEQ ID NO: 696163 - DNA, 33 bp, Homo sapien
tatctagcactgggaacagattgaattctcgag

SEQ ID NO: 696164 - DNA, 33 bp, Homo sapien
tatctagcactgggaagagattgaattctcgag

SEQ ID NO: 696165 - DNA, 33 bp, Homo sapien
attcttgaatggttgacctcattgaagaatggg

SEQ ID NO: 696166 - DNA, 33 bp, Homo sapien
attcttgaatggttgatctcattgaagaatggg

SEQ ID NO: 696167 - DNA, 33 bp, Homo sapien
taaccctcagagaatgacagcctaatacataaa

SEQ ID NO: 696168 - DNA, 33 bp, Homo sapien
taaccctcagagaatggcagcctaatacataaa

SEQ ID NO: 696169 - DNA, 33 bp, Homo sapien
tgccatgacaaaaaaaatggaagaatatggaca

SEQ ID NO: 696170 - DNA, 33 bp, Homo sapien
tgccatgacaaaaaaattggaagaatatggaca

SEQ ID NO: 696171 - DNA, 33 bp, Homo sapien
aatgtgtgtgaatagaaaagtggcttgagttta

SEQ ID NO: 696172 - DNA, 33 bp, Homo sapien
aatgtgtgtgaatagacaagtggcttgagttta

SEQ ID NO: 696173 - DNA, 33 bp, Homo sapien
tcccttaacagctctaacatgcctttgggaaga

SEQ ID NO: 696174 - DNA, 33 bp, Homo sapien
tcccttaacagctctagcatgcctttgggaaga

SEQ ID NO: 696175 - DNA, 33 bp, Homo sapien
ttcctcctcaagacaacatcacctctcctcagg

SEQ ID NO: 696176 - DNA, 33 bp, Homo sapien
ttcctcctcaagacaatatcacctctcctcagg

SEQ ID NO: 696177 - DNA, 33 bp, Homo sapien
cgaaaatctagttcataaatcataagccagcat

SEQ ID NO: 696178 - DNA, 33 bp, Homo sapien
cgaaaatctagttcatgaatcataagccagcat

SEQ ID NO: 696179 - DNA, 33 bp, Homo sapien
agaaatacagttgtcacgtgtctcaagaaaagt

SEQ ID NO: 696180 - DNA, 33 bp, Homo sapien
agaaatacagttgtcatgtgtctcaagaaaagt

SEQ ID NO: 696181 - DNA, 33 bp, Homo sapien
tggtgatgtaccacacggattccctaacacagt

SEQ ID NO: 696182 - DNA, 33 bp, Homo sapien
tggtgatgtaccacactgattccctaacacagt

SEQ ID NO: 696183 - DNA, 33 bp, Homo sapien
gctgattaactttgcaacgtgccaggatcaaaa

SEQ ID NO: 696184 - DNA, 33 bp, Homo sapien
gctgattaactttgcaccgtgccaggatcaaaa

SEQ ID NO: 696185 - DNA, 33 bp, Homo sapien
tgtcatgaacttatcaataggtttttttgtttt

SEQ ID NO: 696186 - DNA, 33 bp, Homo sapien
tgtcatgaacttatcagtaggtttttttgtttt

SEQ ID NO: 696187 - DNA, 33 bp, Homo sapien
gattccatcacaagtacagattgactagctgtt

SEQ ID NO: 696188 - DNA, 33 bp, Homo sapien
gattccatcacaagtagagattgactagctgtt

SEQ ID NO: 696189 - DNA, 33 bp, Homo sapien
acatatgatgagtttaaagagtagttgatagaa

SEQ ID NO: 696190 - DNA, 33 bp, Homo sapien
acatatgatgagtttacagagtagttgatagaa

SEQ ID NO: 696191 - DNA, 33 bp, Homo sapien
taccccatcgtctcaaccttgatgagccacagg

SEQ ID NO: 696192 - DNA, 33 bp, Homo sapien
taccccatcgtctcaatcttgatgagccacagg

SEQ ID NO: 696193 - DNA, 33 bp, Homo sapien
atttttataatccaagccattaaagagacaagt

SEQ ID NO: 696194 - DNA, 33 bp, Homo sapien
atttttataatccaaggcattaaagagacaagt

SEQ ID NO: 696195 - DNA, 33 bp, Homo sapien
agtgagtggttctctcgctacataaatggaaaa

SEQ ID NO: 696196 - DNA, 33 bp, Homo sapien
agtgagtggttctctctctacataaatggaaaa

SEQ ID NO: 696197 - DNA, 33 bp, Homo sapien
ctcacttgagtatgtaaaactgcaccacaattt

SEQ ID NO: 696198 - DNA, 33 bp, Homo sapien
ctcacttgagtatgtagaactgcaccacaattt

SEQ ID NO: 696199 - DNA, 33 bp, Homo sapien
tactaattaaaattcaagctacaaattgtggtg

SEQ ID NO: 696200 - DNA, 33 bp, Homo sapien
tactaattaaaattcacgctacaaattgtggtg

SEQ ID NO: 696201 - DNA, 33 bp, Homo sapien
tatcctgctctagcaacctgtgtaagcctgctt

SEQ ID NO: 696202 - DNA, 33 bp, Homo sapien
tatcctgctctagcaatctgtgtaagcctgctt

SEQ ID NO: 696203 - DNA, 33 bp, Homo sapien
aaatattgaaaaatacaagtggctatggtgtat

SEQ ID NO: 696204 - DNA, 33 bp, Homo sapien
aaatattgaaaaatacgagtggctatggtgtat

SEQ ID NO: 696205 - DNA, 33 bp, Homo sapien
gatatgggctgacctaagtgagaaggcaagttg

SEQ ID NO: 696206 - DNA, 33 bp, Homo sapien
gatatgggctgacctacgtgagaaggcaagttg

SEQ ID NO: 696207 - DNA, 33 bp, Homo sapien
tgcctattaatcttccaaatggaaatgttctgt

SEQ ID NO: 696208 - DNA, 33 bp, Homo sapien
tgcctattaatcttcccaatggaaatgttctgt

SEQ ID NO: 696209 - DNA, 33 bp, Homo sapien
atttaagagaagttgcaaatgtcagaatggcag

SEQ ID NO: 696210 - DNA, 33 bp, Homo sapien
atttaagagaagttgcgaatgtcagaatggcag

SEQ ID NO: 696211 - DNA, 33 bp, Homo sapien
cctttagtttaatggaaagttatgacatattaa

SEQ ID NO: 696212 - DNA, 33 bp, Homo sapien
cctttagtttaatggacagttatgacatattaa

SEQ ID NO: 696213 - DNA, 33 bp, Homo sapien
tttcttcaagtgttacagaaaatgaactggggc

SEQ ID NO: 696214 - DNA, 33 bp, Homo sapien
tttcttcaagtgttacggaaaatgaactggggc

SEQ ID NO: 696215 - DNA, 33 bp, Homo sapien
tgttgactgtaggctacgaagtattactaaaga

SEQ ID NO: 696216 - DNA, 33 bp, Homo sapien
tgttgactgtaggctatgaagtattactaaaga

SEQ ID NO: 696217 - DNA, 33 bp, Homo sapien
caaagtgtggataagcgctgatacttaaaaaat

SEQ ID NO: 696218 - DNA, 33 bp, Homo sapien
caaagtgtggataagctctgatacttaaaaaat

SEQ ID NO: 696219 - DNA, 33 bp, Homo sapien
tatatatatttggggccacaaacatgaaaagaa

SEQ ID NO: 696220 - DNA, 33 bp, Homo sapien
tatatatatttggggctacaaacatgaaaagaa

SEQ ID NO: 696221 - DNA, 33 bp, Homo sapien
atttggcactactttcaagtttaattgcaataa

SEQ ID NO: 696222 - DNA, 33 bp, Homo sapien
atttggcactactttcgagtttaattgcaataa

SEQ ID NO: 696223 - DNA, 33 bp, Homo sapien
tcaaatggctccaaaaatcttaacagtgaaaac

SEQ ID NO: 696224 - DNA, 33 bp, Homo sapien
tcaaatggctccaaaagtcttaacagtgaaaac

SEQ ID NO: 696225 - DNA, 33 bp, Homo sapien; identical to SEQ ID NO: 696223

SEQ ID NO: 696226 - DNA, 33 bp, Homo sapien; identical to SEQ ID NO: 696224

SEQ ID NO: 696227 - DNA, 33 bp, Homo sapien
gaatgtgtgtataagaaagggaatgagagaaaa

SEQ ID NO: 696228 - DNA, 33 bp, Homo sapien
gaatgtgtgtataagagagggaatgagagaaaa

SEQ ID NO: 696229 - DNA, 33 bp, Homo sapien
tgagcttaaatctgaacgcaagcctattgattc

SEQ ID NO: 696230 - DNA, 33 bp, Homo sapien
tgagcttaaatctgaatgcaagcctattgattc

SEQ ID NO: 696231 - DNA, 33 bp, Homo sapien
atgtgaatgatgtgtgcataaatgtattattta

SEQ ID NO: 696232 - DNA, 33 bp, Homo sapien
atgtgaatgatgtgtggataaatgtattattta

SEQ ID NO: 696233 - DNA, 33 bp, Homo sapien
agttgttttttaagaaatcagcaaaattgacaa

SEQ ID NO: 696234 - DNA, 33 bp, Homo sapien
agttgttttttaagaactcagcaaaattgacaa

SEQ ID NO: 696235 - DNA, 33 bp, Homo sapien
gccccacttatttctccagatgtactacttact

SEQ ID NO: 696236 - DNA, 33 bp, Homo sapien
gccccacttatttctctagatgtactacttact

SEQ ID NO: 696237 - DNA, 33 bp, Homo sapien
catgataattggccacccctgtcttatcaaatt

SEQ ID NO: 696238 - DNA, 33 bp, Homo sapien
catgataattggccactcctgtcttatcaaatt

SEQ ID NO: 696239 - DNA, 33 bp, Homo sapien
aagaaaaactatggtacgctgctgttagctgtt

SEQ ID NO: 696240 - DNA, 33 bp, Homo sapien
aagaaaaactatggtatgctgctgttagctgtt

SEQ ID NO: 696241 - DNA, 33 bp, Homo sapien
tattactgatgtttggcacaagaaatgtatcct

SEQ ID NO: 696242 - DNA, 33 bp, Homo sapien
tattactgatgtttgggacaagaaatgtatcct

SEQ ID NO: 696243 - DNA, 33 bp, Homo sapien
tcataaccattactgacgaacatctttagtagt

SEQ ID NO: 696244 - DNA, 33 bp, Homo sapien
tcataaccattactgatgaacatctttagtagt

SEQ ID NO: 696245 - DNA, 33 bp, Homo sapien
atggtaatagccactcccctactaaatgtacaa

SEQ ID NO: 696246 - DNA, 33 bp, Homo sapien
atggtaatagccactctcctactaaatgtacaa

SEQ ID NO: 696247 - DNA, 33 bp, Homo sapien
taccatatttttactgcagctttcctatgttta

SEQ ID NO: 696248 - DNA, 33 bp, Homo sapien
taccatatttttactgtagctttcctatgttta

SEQ ID NO: 696249 - DNA, 33 bp, Homo sapien
tgtttgtcgtcaatacaagaaaagctctaattc

SEQ ID NO: 696250 - DNA, 33 bp, Homo sapien
tgtttgtcgtcaatacgagaaaagctctaattc

SEQ ID NO: 696251 - DNA, 33 bp, Homo sapien
gaaacttggctttgagaactttctggtgagtct

SEQ ID NO: 696252 - DNA, 33 bp, Homo sapien
gaaacttggctttgaggactttctggtgagtct

SEQ ID NO: 696253 - DNA, 33 bp, Homo sapien
gtgaattgaccatagaaggcagataaggggtag

SEQ ID NO: 696254 - DNA, 33 bp, Homo sapien
gtgaattgaccatagagggcagataaggggtag

SEQ ID NO: 696255 - DNA, 33 bp, Homo sapien
acaggtcaatgaaccccgcttatgggactatag

SEQ ID NO: 696256 - DNA, 33 bp, Homo sapien
acaggtcaatgaaccctgcttatgggactatag

SEQ ID NO: 696257 - DNA, 33 bp, Homo sapien
acaaatgatctcgttaactgggtagtgagcata

SEQ ID NO: 696258 - DNA, 33 bp, Homo sapien
acaaatgatctcgttacctgggtagtgagcata

SEQ ID NO: 696259 - DNA, 33 bp, Homo sapien
tttgatttattattccacatgaagatgtctgtt

SEQ ID NO: 696260 - DNA, 33 bp, Homo sapien
tttgatttattattccgcatgaagatgtctgtt

SEQ ID NO: 696261 - DNA, 33 bp, Homo sapien
tcttggttcttaaatcaagcagctgtcatttta

SEQ ID NO: 696262 - DNA, 33 bp, Homo sapien
tcttggttcttaaatccagcagctgtcatttta

SEQ ID NO: 696263 - DNA, 33 bp, Homo sapien
ccttatggcataagatcaacaagttctctgacc

SEQ ID NO: 696264 - DNA, 33 bp, Homo sapien
ccttatggcataagatgaacaagttctctgacc

SEQ ID NO: 696265 - DNA, 33 bp, Homo sapien
ggaaaacagttgattacctaagtacattcaaaa

SEQ ID NO: 696266 - DNA, 33 bp, Homo sapien
ggaaaacagttgattatctaagtacattcaaaa

SEQ ID NO: 696267 - DNA, 33 bp, Homo sapien
gagagccactggtctacagagaacaaaggagct

SEQ ID NO: 696268 - DNA, 33 bp, Homo sapien
gagagccactggtctagagagaacaaaggagct

SEQ ID NO: 696269 - DNA, 33 bp, Homo sapien
aaatttgactcagaaaaaaaagcacgaagacaa

SEQ ID NO: 696270 - DNA, 33 bp, Homo sapien
aaatttgactcagaaagaaaagcacgaagacaa

SEQ ID NO: 696271 - DNA, 33 bp, Homo sapien
tatggattttagagtcaaatatatgtgagttaa

SEQ ID NO: 696272 - DNA, 33 bp, Homo sapien
tatggattttagagtccaatatatgtgagttaa

SEQ ID NO: 696273 - DNA, 33 bp, Homo sapien
atatccaggttacaaaagtgacaagttcaaaaa

SEQ ID NO: 696274 - DNA, 33 bp, Homo sapien
atatccaggttacaaacgtgacaagttcaaaaa

SEQ ID NO: 696275 - DNA, 33 bp, Homo sapien
agtgaggttcttaaaggcttcctagatgctcta

SEQ ID NO: 696276 - DNA, 33 bp, Homo sapien
agtgaggttcttaaagtcttcctagatgctcta

SEQ ID NO: 696277 - DNA, 33 bp, Homo sapien
tgagaccttttatgtacgaaaacattgcttaac

SEQ ID NO: 696278 - DNA, 33 bp, Homo sapien
tgagaccttttatgtaggaaaacattgcttaac

SEQ ID NO: 696279 - DNA, 33 bp, Homo sapien
tagtagttgtaatccactcatctgtgttgctct

SEQ ID NO: 696280 - DNA, 33 bp, Homo sapien
tagtagttgtaatccagtcatctgtgttgctct

SEQ ID NO: 696281 - DNA, 33 bp, Homo sapien
cagtaattaagaagcaatgctccatgacttggt

SEQ ID NO: 696282 - DNA, 33 bp, Homo sapien
cagtaattaagaagcagtgctccatgacttggt

SEQ ID NO: 696283 - DNA, 33 bp, Homo sapien
gtttttgagtgacgccacatccacctcatccag

SEQ ID NO: 696284 - DNA, 33 bp, Homo sapien
gtttttgagtgacgccgcatccacctcatccag

SEQ ID NO: 696285 - DNA, 33 bp, Homo sapien
cccaaggtctaagtccccagaaattgttacagc

SEQ ID NO: 696286 - DNA, 33 bp, Homo sapien
cccaaggtctaagtcctcagaaattgttacagc

SEQ ID NO: 696287 - DNA, 33 bp, Homo sapien
gcatagccatcacaagacatcggtgcattcaaa

SEQ ID NO: 696288 - DNA, 33 bp, Homo sapien
gcatagccatcacaagccatcggtgcattcaaa

SEQ ID NO: 696289 - DNA, 33 bp, Homo sapien
gtaagatgctctggaaagaacacttgcccagta

SEQ ID NO: 696290 - DNA, 33 bp, Homo sapien
gtaagatgctctggaaggaacacttgcccagta

SEQ ID NO: 696291 - DNA, 33 bp, Homo sapien
aaatggcagaggtagccaatccttcattcagta

SEQ ID NO: 696292 - DNA, 33 bp, Homo sapien
aaatggcagaggtagctaatccttcattcagta

SEQ ID NO: 696293 - DNA, 33 bp, Homo sapien
tcgttccacaactataagcgaagaacaaatgtt

SEQ ID NO: 696294 - DNA, 33 bp, Homo sapien
tcgttccacaactatacgcgaagaacaaatgtt

SEQ ID NO: 696295 - DNA, 33 bp, Homo sapien
catggctagaagcccacgttagtatgtctggca

SEQ ID NO: 696296 - DNA, 33 bp, Homo sapien
catggctagaagcccatgttagtatgtctggca

SEQ ID NO: 696297 - DNA, 33 bp, Homo sapien
aaccaaatctatgttgcattcaaactctcaagt

SEQ ID NO: 696298 - DNA, 33 bp, Homo sapien
aaccaaatctatgttgtattcaaactctcaagt

SEQ ID NO: 696299 - DNA, 33 bp, Homo sapien
tttggttttattgcgacagtaaagaaagaagtt

SEQ ID NO: 696300 - DNA, 33 bp, Homo sapien
tttggttttattgcgatagtaaagaaagaagtt

SEQ ID NO: 696301 - DNA, 33 bp, Homo sapien
agcttggatgttcttacaggtctttggatctgt

SEQ ID NO: 696302 - DNA, 33 bp, Homo sapien
agcttggatgttcttataggtctttggatctgt

SEQ ID NO: 696303 - DNA, 33 bp, Homo sapien
caatttgaacttaaggcatggacaataaggaaa

SEQ ID NO: 696304 - DNA, 33 bp, Homo sapien
caatttgaacttaaggtatggacaataaggaaa

SEQ ID NO: 696305 - DNA, 33 bp, Homo sapien
tggttaaagaatcacccgagatactttggaact

SEQ ID NO: 696306 - DNA, 33 bp, Homo sapien
tggttaaagaatcacctgagatactttggaact

SEQ ID NO: 696307 - DNA, 33 bp, Homo sapien
tgtagaacaaggtcccggcctttgagagattag

SEQ ID NO: 696308 - DNA, 33 bp, Homo sapien
tgtagaacaaggtccctgcctttgagagattag

SEQ ID NO: 696309 - DNA, 33 bp, Homo sapien
agcagggaactcgcacagtaaagaggagcagct

SEQ ID NO: 696310 - DNA, 33 bp, Homo sapien
agcagggaactcgcacggtaaagaggagcagct

SEQ ID NO: 696311 - DNA, 33 bp, Homo sapien
ttcagcttacaaacaaactgctttcagctctag

SEQ ID NO: 696312 - DNA, 33 bp, Homo sapien
ttcagcttacaaacaatctgctttcagctctag

SEQ ID NO: 696313 - DNA, 33 bp, Homo sapien
atgggatgtttggaaacaggcatacaatgtgta

SEQ ID NO: 696314 - DNA, 33 bp, Homo sapien
atgggatgtttggaaagaggcatacaatgtgta

SEQ ID NO: 696315 - DNA, 33 bp, Homo sapien
tacaacaaacacaaaaaaagttggagaagtgag

SEQ ID NO: 696316 - DNA, 33 bp, Homo sapien
tacaacaaacacaaaagaagttggagaagtgag

SEQ ID NO: 696317 - DNA, 33 bp, Homo sapien
ttctgcattccagacaagtatagccttggtagt

SEQ ID NO: 696318 - DNA, 33 bp, Homo sapien
ttctgcattccagacaggtatagccttggtagt

SEQ ID NO: 696319 - DNA, 33 bp, Homo sapien
tggcagactgaacaaacgattaaactaatgaat

SEQ ID NO: 696320 - DNA, 33 bp, Homo sapien
tggcagactgaacaaatgattaaactaatgaat

SEQ ID NO: 696321 - DNA, 33 bp, Homo sapien
attcttcactctgtaaataaaacactcacacat

SEQ ID NO: 696322 - DNA, 33 bp, Homo sapien
attcttcactctgtaagtaaaacactcacacat

SEQ ID NO: 696323 - DNA, 33 bp, Homo sapien
gagaaacatctaatgacgaaactggagatataa

SEQ ID NO: 696324 - DNA, 33 bp, Homo sapien
gagaaacatctaatgatgaaactggagatataa

SEQ ID NO: 696325 - DNA, 33 bp, Homo sapien
aaagaatagtccttaaaacctgtacaattatgt

SEQ ID NO: 696326 - DNA, 33 bp, Homo sapien
aaagaatagtccttaacacctgtacaattatgt

SEQ ID NO: 696327 - DNA, 33 bp, Homo sapien
agctctctgaggacaacattgatattatgtcca

SEQ ID NO: 696328 - DNA, 33 bp, Homo sapien
agctctctgaggacaagattgatattatgtcca

SEQ ID NO: 696329 - DNA, 33 bp, Homo sapien
aaatttacaaatcaggaaatatctatgtctata

SEQ ID NO: 696330 - DNA, 33 bp, Homo sapien
aaatttacaaatcaggtaatatctatgtctata

SEQ ID NO: 696331 - DNA, 33 bp, Homo sapien
aagtgaaaatagctaacgcaaatattgaaattt

SEQ ID NO: 696332 - DNA, 33 bp, Homo sapien
aagtgaaaatagctaatgcaaatattgaaattt

SEQ ID NO: 696333 - DNA, 33 bp, Homo sapien
aaacctgagatccacagctgaaagtcaatgaat

SEQ ID NO: 696334 - DNA, 33 bp, Homo sapien
aaacctgagatccacatctgaaagtcaatgaat

SEQ ID NO: 696335 - DNA, 33 bp, Homo sapien
tatggtacatggtatccagcagtggtaatagta

SEQ ID NO: 696336 - DNA, 33 bp, Homo sapien
tatggtacatggtatctagcagtggtaatagta

SEQ ID NO: 696337 - DNA, 33 bp, Homo sapien
gtcccactctctgataataatcctgtcataatt

SEQ ID NO: 696338 - DNA, 33 bp, Homo sapien
gtcccactctctgatactaatcctgtcataatt

SEQ ID NO: 696339 - DNA, 33 bp, Homo sapien
aaaagtcttttaagtagctaaatctcatccttc

SEQ ID NO: 696340 - DNA, 33 bp, Homo sapien
aaaagtcttttaagtatctaaatctcatccttc

SEQ ID NO: 696341 - DNA, 33 bp, Homo sapien
aaatcatgattgcaaccatttattttgccagcc

SEQ ID NO: 696342 - DNA, 33 bp, Homo sapien
aaatcatgattgcaactatttattttgccagcc

SEQ ID NO: 696343 - DNA, 33 bp, Homo sapien
aaaagtgatagtagaaatgttaggacctgagta

SEQ ID NO: 696344 - DNA, 33 bp, Homo sapien
aaaagtgatagtagaagtgttaggacctgagta

SEQ ID NO: 696345 - DNA, 33 bp, Homo sapien
tcttcaggaattggaaaagatgcacaaaagatc

SEQ ID NO: 696346 - DNA, 33 bp, Homo sapien
tcttcaggaattggaagagatgcacaaaagatc

SEQ ID NO: 696347 - DNA, 33 bp, Homo sapien
tttaaatggagtcataacttctgatcttttgtg

SEQ ID NO: 696348 - DNA, 33 bp, Homo sapien
tttaaatggagtcatagcttctgatcttttgtg

SEQ ID NO: 696349 - DNA, 33 bp, Homo sapien
ttagcagtactccttacaaaagtggtgtataga

SEQ ID NO: 696350 - DNA, 33 bp, Homo sapien
ttagcagtactccttataaaagtggtgtataga

SEQ ID NO: 696351 - DNA, 33 bp, Homo sapien
tgcagaaaattatgaccagtgctcttgtcacat

SEQ ID NO: 696352 - DNA, 33 bp, Homo sapien
tgcagaaaattatgacgagtgctcttgtcacat

SEQ ID NO: 696353 - DNA, 33 bp, Homo sapien
gggtaaagactgataaacttgcagatagtttca

SEQ ID NO: 696354 - DNA, 33 bp, Homo sapien
gggtaaagactgataaccttgcagatagtttca

SEQ ID NO: 696355 - DNA, 33 bp, Homo sapien
tgtcatgcctaatcaacaatgctgactgctttg

SEQ ID NO: 696356 - DNA, 33 bp, Homo sapien
tgtcatgcctaatcaagaatgctgactgctttg

SEQ ID NO: 696357 - DNA, 33 bp, Homo sapien
cttaaagtacattagaagattttgacaaacaaa

SEQ ID NO: 696358 - DNA, 33 bp, Homo sapien
cttaaagtacattagaggattttgacaaacaaa

SEQ ID NO: 696359 - DNA, 33 bp, Homo sapien
aagaggtatgggattacgtaaagcaaacaaatc

SEQ ID NO: 696360 - DNA, 33 bp, Homo sapien
aagaggtatgggattatgtaaagcaaacaaatc

SEQ ID NO: 696361 - DNA, 33 bp, Homo sapien
ataagatttattttagaaggtttgcttgtacag

SEQ ID NO: 696362 - DNA, 33 bp, Homo sapien
ataagatttattttagtaggtttgcttgtacag

SEQ ID NO: 696363 - DNA, 33 bp, Homo sapien
ctagcatagagtatgagaactcagatatttgtg

SEQ ID NO: 696364 - DNA, 33 bp, Homo sapien
ctagcatagagtatgataactcagatatttgtg

SEQ ID NO: 696365 - DNA, 33 bp, Homo sapien
atgactacttgtaaaacgccatagaaactatcc

SEQ ID NO: 696366 - DNA, 33 bp, Homo sapien
atgactacttgtaaaatgccatagaaactatcc

SEQ ID NO: 696367 - DNA, 33 bp, Homo sapien
tcatgaatacagtaacgactctaggaatctgat

SEQ ID NO: 696368 - DNA, 33 bp, Homo sapien
tcatgaatacagtaactactctaggaatctgat

SEQ ID NO: 696369 - DNA, 33 bp, Homo sapien
tcaaacattgtatggaccaaattaaaatattag

SEQ ID NO: 696370 - DNA, 33 bp, Homo sapien
tcaaacattgtatggatcaaattaaaatattag

SEQ ID NO: 696371 - DNA, 33 bp, Homo sapien
aagcaaaatcccatcaaaagcaattctggttca

SEQ ID NO: 696372 - DNA, 33 bp, Homo sapien
aagcaaaatcccatcagaagcaattctggttca

SEQ ID NO: 696373 - DNA, 33 bp, Homo sapien
caaagtgtggatttaaatgttctttcttcagct

SEQ ID NO: 696374 - DNA, 33 bp, Homo sapien
caaagtgtggatttaagtgttctttcttcagct

SEQ ID NO: 696375 - DNA, 33 bp, Homo sapien
tctgtttactcaccaaactcagtgatgtcatat

SEQ ID NO: 696376 - DNA, 33 bp, Homo sapien
tctgtttactcaccaacctcagtgatgtcatat

SEQ ID NO: 696377 - DNA, 33 bp, Homo sapien
gtttgtttcctttttcaatgcctcccagtattg

SEQ ID NO: 696378 - DNA, 33 bp, Homo sapien
gtttgtttcctttttcgatgcctcccagtattg

SEQ ID NO: 696379 - DNA, 33 bp, Homo sapien
gtatagcctttgaagaccctgtttctgtgcaat

SEQ ID NO: 696380 - DNA, 33 bp, Homo sapien
gtatagcctttgaagatcctgtttctgtgcaat

SEQ ID NO: 696381 - DNA, 33 bp, Homo sapien
gaatacattacactcagaattgactaatttcta

SEQ ID NO: 696382 - DNA, 33 bp, Homo sapien
gaatacattacactcataattgactaatttcta

SEQ ID NO: 696383 - DNA, 33 bp, Homo sapien
aaaaatatgaagaaaacggattgtagtaataga

SEQ ID NO: 696384 - DNA, 33 bp, Homo sapien
aaaaatatgaagaaaatggattgtagtaataga

SEQ ID NO: 696385 - DNA, 33 bp, Homo sapien
ccaagtctatccacacaatttttccattagttc

SEQ ID NO: 696386 - DNA, 33 bp, Homo sapien
ccaagtctatccacaccatttttccattagttc

SEQ ID NO: 696387 - DNA, 33 bp, Homo sapien
ggggaagacaatttacagcagaagggaaggtat

SEQ ID NO: 696388 - DNA, 33 bp, Homo sapien
ggggaagacaatttaccgcagaagggaaggtat

SEQ ID NO: 696389 - DNA, 33 bp, Homo sapien
cagcttgtaaagagaaagatcagctttaaagag

SEQ ID NO: 696390 - DNA, 33 bp, Homo sapien
cagcttgtaaagagaaggatcagctttaaagag

SEQ ID NO: 696391 - DNA, 33 bp, Homo sapien
agttcaaccaatgttaccagtatgaagaactct

SEQ ID NO: 696392 - DNA, 33 bp, Homo sapien
agttcaaccaatgttatcagtatgaagaactct

SEQ ID NO: 696393 - DNA, 33 bp, Homo sapien
gtgcagcagagttaacacctgaggaaccaacct

SEQ ID NO: 696394 - DNA, 33 bp, Homo sapien
gtgcagcagagttaacgcctgaggaaccaacct

SEQ ID NO: 696395 - DNA, 33 bp, Homo sapien
atgataaaagagcaaaactaaccttgtaggaat

SEQ ID NO: 696396 - DNA, 33 bp, Homo sapien
atgataaaagagcaaacctaaccttgtaggaat

SEQ ID NO: 696397 - DNA, 33 bp, Homo sapien
tgacagcctttggatacgaatatttgaccatgc

SEQ ID NO: 696398 - DNA, 33 bp, Homo sapien
tgacagcctttggatatgaatatttgaccatgc

SEQ ID NO: 696399 - DNA, 33 bp, Homo sapien
acttacattgcagatcaaggtatagtaaatatt

SEQ ID NO: 696400 - DNA, 33 bp, Homo sapien
acttacattgcagatcgaggtatagtaaatatt

SEQ ID NO: 696401 - DNA, 33 bp, Homo sapien
ggagagaaataccacactcagaatttgttgaat

SEQ ID NO: 696402 - DNA, 33 bp, Homo sapien
ggagagaaataccacattcagaatttgttgaat

SEQ ID NO: 696403 - DNA, 33 bp, Homo sapien
ggtatttttgagaagacgacgtgctttactgta

SEQ ID NO: 696404 - DNA, 33 bp, Homo sapien
ggtatttttgagaagatgacgtgctttactgta

SEQ ID NO: 696405 - DNA, 33 bp, Homo sapien
agttgacaaagtgtgccgaaacaaataatatgg

SEQ ID NO: 696406 - DNA, 33 bp, Homo sapien
agttgacaaagtgtgctgaaacaaataatatgg

SEQ ID NO: 696407 - DNA, 33 bp, Homo sapien
gttttacatgagcatacgttttcacttatctgt

SEQ ID NO: 696408 - DNA, 33 bp, Homo sapien
gttttacatgagcataggttttcacttatctgt

SEQ ID NO: 696409 - DNA, 33 bp, Homo sapien
gccagaaagagtgagaagaaactggaacacaga

SEQ ID NO: 696410 - DNA, 33 bp, Homo sapien
gccagaaagagtgagacgaaactggaacacaga

SEQ ID NO: 696411 - DNA, 33 bp, Homo sapien
gcacacgtggcactaaataaaccatgataagga

SEQ ID NO: 696412 - DNA, 33 bp, Homo sapien
gcacacgtggcactaactaaaccatgataagga

SEQ ID NO: 696413 - DNA, 33 bp, Homo sapien
ctctatcctactaaaaacctcatgctagtagcc

SEQ ID NO: 696414 - DNA, 33 bp, Homo sapien
ctctatcctactaaaagcctcatgctagtagcc

SEQ ID NO: 696415 - DNA, 33 bp, Homo sapien
agactcatttacataaggggggtttgcttgggg

SEQ ID NO: 696416 - DNA, 33 bp, Homo sapien
agactcatttacataatgggggtttgcttgggg

SEQ ID NO: 696417 - DNA, 33 bp, Homo sapien
atacctatactaatcacgctgcggattgcattc

SEQ ID NO: 696418 - DNA, 33 bp, Homo sapien
atacctatactaatcatgctgcggattgcattc

SEQ ID NO: 696419 - DNA, 33 bp, Homo sapien
aaactaaccgatacaacaaaccagtgacaattg

SEQ ID NO: 696420 - DNA, 33 bp, Homo sapien
aaactaaccgatacaagaaaccagtgacaattg

SEQ ID NO: 696421 - DNA, 33 bp, Homo sapien
ctgaagataatagcaaagcttggttaatggatc

SEQ ID NO: 696422 - DNA, 33 bp, Homo sapien
ctgaagataatagcaatgcttggttaatggatc

SEQ ID NO: 696423 - DNA, 33 bp, Homo sapien
agtattaccttgcacactgatactgtttatatc

SEQ ID NO: 696424 - DNA, 33 bp, Homo sapien
agtattaccttgcacattgatactgtttatatc

SEQ ID NO: 696425 - DNA, 33 bp, Homo sapien
tatgcaaacacagctcaatgtttcattctgtgg

SEQ ID NO: 696426 - DNA, 33 bp, Homo sapien
tatgcaaacacagctccatgtttcattctgtgg

SEQ ID NO: 696427 - DNA, 33 bp, Homo sapien
gaatagcagctgattcaaaatatgcagaaacct

SEQ ID NO: 696428 - DNA, 33 bp, Homo sapien
gaatagcagctgattccaaatatgcagaaacct

SEQ ID NO: 696429 - DNA, 33 bp, Homo sapien
ctactgttgactagaaagtttttcaataagaaa

SEQ ID NO: 696430 - DNA, 33 bp, Homo sapien
ctactgttgactagaaggtttttcaataagaaa

SEQ ID NO: 696431 - DNA, 33 bp, Homo sapien
ctcttgtcctgcaaccgctctggcttaactccc

SEQ ID NO: 696432 - DNA, 33 bp, Homo sapien
ctcttgtcctgcaacctctctggcttaactccc

SEQ ID NO: 696433 - DNA, 33 bp, Homo sapien
gtacgttgccatattaacacataattctattac

SEQ ID NO: 696434 - DNA, 33 bp, Homo sapien
gtacgttgccatattaccacataattctattac

SEQ ID NO: 696435 - DNA, 33 bp, Homo sapien
gtgttcaacaggaataataaactcaaagtagga

SEQ ID NO: 696436 - DNA, 33 bp, Homo sapien
gtgttcaacaggaatactaaactcaaagtagga

SEQ ID NO: 696437 - DNA, 33 bp, Homo sapien
tacaaagaaagagaaaagtatggactattcaaa

SEQ ID NO: 696438 - DNA, 33 bp, Homo sapien
tacaaagaaagagaaacgtatggactattcaaa

SEQ ID NO: 696439 - DNA, 33 bp, Homo sapien
ttaatatcagaactgaaaaattatggggaagaa

SEQ ID NO: 696440 - DNA, 33 bp, Homo sapien
ttaatatcagaactgagaaattatggggaagaa

SEQ ID NO: 696441 - DNA, 33 bp, Homo sapien
atggggaagaatgtaaagagacaggcgtagtaa

SEQ ID NO: 696442 - DNA, 33 bp, Homo sapien
atggggaagaatgtaaggagacaggcgtagtaa

SEQ ID NO: 696443 - DNA, 33 bp, Homo sapien
aggtcagatggtttcaaaatcatttcacaatac

SEQ ID NO: 696444 - DNA, 33 bp, Homo sapien
aggtcagatggtttcacaatcatttcacaatac

SEQ ID NO: 696445 - DNA, 33 bp, Homo sapien
tgatccacagcagagaacattataaatctaggt

SEQ ID NO: 696446 - DNA, 33 bp, Homo sapien
tgatccacagcagagagcattataaatctaggt

SEQ ID NO: 696447 - DNA, 33 bp, Homo sapien
tcgtaccaaagatctcaaaaaagagacacgaaa

SEQ ID NO: 696448 - DNA, 33 bp, Homo sapien
tcgtaccaaagatctcgaaaaagagacacgaaa

SEQ ID NO: 696449 - DNA, 33 bp, Homo sapien
aaagagttgttacccaaagattaggaagctgcc

SEQ ID NO: 696450 - DNA, 33 bp, Homo sapien
aaagagttgttacccagagattaggaagctgcc

SEQ ID NO: 696451 - DNA, 33 bp, Homo sapien
caggcaacgggagcagacacttttgaacctgag

SEQ ID NO: 696452 - DNA, 33 bp, Homo sapien
caggcaacgggagcaggcacttttgaacctgag

SEQ ID NO: 696453 - DNA, 33 bp, Homo sapien
actctcttggatccccaagccaatatgtaagaa

SEQ ID NO: 696454 - DNA, 33 bp, Homo sapien
actctcttggatccccgagccaatatgtaagaa

SEQ ID NO: 696455 - DNA, 33 bp, Homo sapien
cctcaaacatatgagcaatccaatcccagaatt

SEQ ID NO: 696456 - DNA, 33 bp, Homo sapien
cctcaaacatatgagcgatccaatcccagaatt

SEQ ID NO: 696457 - DNA, 33 bp, Homo sapien
tccagggtataaagtcaaggaggataaactgta

SEQ ID NO: 696458 - DNA, 33 bp, Homo sapien
tccagggtataaagtccaggaggataaactgta

SEQ ID NO: 696459 - DNA, 33 bp, Homo sapien
ttagaaggtgagtagacgaaggtgagtagatag

SEQ ID NO: 696460 - DNA, 33 bp, Homo sapien
ttagaaggtgagtagatgaaggtgagtagatag

SEQ ID NO: 696461 - DNA, 33 bp, Homo sapien
gttcctctttggctgcaaccctgttttcttcac

SEQ ID NO: 696462 - DNA, 33 bp, Homo sapien
gttcctctttggctgcgaccctgttttcttcac

SEQ ID NO: 696463 - DNA, 33 bp, Homo sapien
aaaatgtacaggattacggagttacaataattc

SEQ ID NO: 696464 - DNA, 33 bp, Homo sapien
aaaatgtacaggattatggagttacaataattc

SEQ ID NO: 696465 - DNA, 33 bp, Homo sapien
atattctgttctaatcgcctgatggtctttgta

SEQ ID NO: 696466 - DNA, 33 bp, Homo sapien
atattctgttctaatctcctgatggtctttgta

SEQ ID NO: 696467 - DNA, 33 bp, Homo sapien
actctatcacagtagccgcgaaggagatgagtt

SEQ ID NO: 696468 - DNA, 33 bp, Homo sapien
actctatcacagtagcggcgaaggagatgagtt

SEQ ID NO: 696469 - DNA, 33 bp, Homo sapien
ttatagatgaagaagaaaattttggattcaggt

SEQ ID NO: 696470 - DNA, 33 bp, Homo sapien
ttatagatgaagaagagaattttggattcaggt

SEQ ID NO: 696471 - DNA, 33 bp, Homo sapien
aattatgaaccctgcaaaattattaatcacaca

SEQ ID NO: 696472 - DNA, 33 bp, Homo sapien
aattatgaaccctgcacaattattaatcacaca

SEQ ID NO: 696473 - DNA, 33 bp, Homo sapien
attttttaagccttcaaatttacattgatctac

SEQ ID NO: 696474 - DNA, 33 bp, Homo sapien
attttttaagccttcacatttacattgatctac

SEQ ID NO: 696475 - DNA, 33 bp, Homo sapien
attcttttattttttcaattctggttctctgat

SEQ ID NO: 696476 - DNA, 33 bp, Homo sapien
attcttttattttttcgattctggttctctgat

SEQ ID NO: 696477 - DNA, 33 bp, Homo sapien
gagcagaaaatccaaaagaatgaaattttatgg

SEQ ID NO: 696478 - DNA, 33 bp, Homo sapien
gagcagaaaatccaaaggaatgaaattttatgg

SEQ ID NO: 696479 - DNA, 33 bp, Homo sapien
caagcctgctggcttaccataaagattttggat

SEQ ID NO: 696480 - DNA, 33 bp, Homo sapien
caagcctgctggcttagcataaagattttggat

SEQ ID NO: 696481 - DNA, 33 bp, Homo sapien
tgtcttgctcgggagaggtcattattttgctct

SEQ ID NO: 696482 - DNA, 33 bp, Homo sapien
tgtcttgctcgggagatgtcattattttgctct

SEQ ID NO: 696483 - DNA, 33 bp, Homo sapien
cttaggtaagagcccaagaaaaattttagttcc

SEQ ID NO: 696484 - DNA, 33 bp, Homo sapien
cttaggtaagagcccatgaaaaattttagttcc

SEQ ID NO: 696485 - DNA, 33 bp, Homo sapien
cttacctaagttctcacgttctaaatagaattt

SEQ ID NO: 696486 - DNA, 33 bp, Homo sapien
cttacctaagttctcatgttctaaatagaattt

SEQ ID NO: 696487 - DNA, 33 bp, Homo sapien
acttagttatagacacaatacataaaggaaatt

SEQ ID NO: 696488 - DNA, 33 bp, Homo sapien
acttagttatagacacgatacataaaggaaatt

SEQ ID NO: 696489 - DNA, 33 bp, Homo sapien
tcaggaatgacttgtaataaataaatgttggtt

SEQ ID NO: 696490 - DNA, 33 bp, Homo sapien
tcaggaatgacttgtagtaaataaatgttggtt

SEQ ID NO: 696491 - DNA, 33 bp, Homo sapien
gcacgagcattggaaccgaacagctgcttcagc

SEQ ID NO: 696492 - DNA, 33 bp, Homo sapien
gcacgagcattggaactgaacagctgcttcagc

SEQ ID NO: 696493 - DNA, 33 bp, Homo sapien
gataagctgtgaaagtaacagagatctctctaa

SEQ ID NO: 696494 - DNA, 33 bp, Homo sapien
gataagctgtgaaagttacagagatctctctaa

SEQ ID NO: 696495 - DNA, 33 bp, Homo sapien
aatacacaggatgttacagagcagtttacttct

SEQ ID NO: 696496 - DNA, 33 bp, Homo sapien
aatacacaggatgttatagagcagtttacttct

SEQ ID NO: 696497 - DNA, 33 bp, Homo sapien
gatacaatgctttcaacaactctgggcatatta

SEQ ID NO: 696498 - DNA, 33 bp, Homo sapien
gatacaatgctttcaagaactctgggcatatta

SEQ ID NO: 696499 - DNA, 33 bp, Homo sapien
cataaagctcatactacaaatgaggttaaaaac

SEQ ID NO: 696500 - DNA, 33 bp, Homo sapien
cataaagctcatactagaaatgaggttaaaaac

SEQ ID NO: 696501 - DNA, 33 bp, Homo sapien
gagatgagatcagtctcaaatctatctctctga

SEQ ID NO: 696502 - DNA, 33 bp, Homo sapien
gagatgagatcagtctgaaatctatctctctga

SEQ ID NO: 696503 - DNA, 33 bp, Homo sapien
cggcatatggagaaaaatgtccaaaagccacta

SEQ ID NO: 696504 - DNA, 33 bp, Homo sapien
cggcatatggagaaaagtgtccaaaagccacta

SEQ ID NO: 696505 - DNA, 33 bp, Homo sapien
agaagtgaaatttcaaacatggtgaacatgcat

SEQ ID NO: 696506 - DNA, 33 bp, Homo sapien
agaagtgaaatttcaagcatggtgaacatgcat

SEQ ID NO: 696507 - DNA, 33 bp, Homo sapien
catttttatggtcagcactatttttgtactgtt

SEQ ID NO: 696508 - DNA, 33 bp, Homo sapien
catttttatggtcagcgctatttttgtactgtt

SEQ ID NO: 696509 - DNA, 33 bp, Homo sapien
ttgaggctgacagtaccagttcatggtgggcag

SEQ ID NO: 696510 - DNA, 33 bp, Homo sapien
ttgaggctgacagtactagttcatggtgggcag

SEQ ID NO: 696511 - DNA, 33 bp, Homo sapien
attttggtggcctatacggagagtacttaggga

SEQ ID NO: 696512 - DNA, 33 bp, Homo sapien
attttggtggcctatatggagagtacttaggga

SEQ ID NO: 696513 - DNA, 33 bp, Homo sapien
aatgcaagatttttccccgtgagtgcaacaggt

SEQ ID NO: 696514 - DNA, 33 bp, Homo sapien
aatgcaagatttttcctcgtgagtgcaacaggt

SEQ ID NO: 696515 - DNA, 33 bp, Homo sapien
gaacacaaaggaaaaacggatgaacctcaagga

SEQ ID NO: 696516 - DNA, 33 bp, Homo sapien
gaacacaaaggaaaaagggatgaacctcaagga

SEQ ID NO: 696517 - DNA, 33 bp, Homo sapien
ttcctacaaaaaatgaaataattgagtgtctac

SEQ ID NO: 696518 - DNA, 33 bp, Homo sapien
ttcctacaaaaaatgagataattgagtgtctac

SEQ ID NO: 696519 - DNA, 33 bp, Homo sapien
gaccagtaatgactacacatttcaaagaaagat

SEQ ID NO: 696520 - DNA, 33 bp, Homo sapien
gaccagtaatgactacgcatttcaaagaaagat

SEQ ID NO: 696521 - DNA, 33 bp, Homo sapien
aggacactttattgctcaatctccttaagacca

SEQ ID NO: 696522 - DNA, 33 bp, Homo sapien
aggacactttattgcttaatctccttaagacca

SEQ ID NO: 696523 - DNA, 33 bp, Homo sapien
atgaagatcccagcacaatcaaactgggcaatt

SEQ ID NO: 696524 - DNA, 33 bp, Homo sapien
atgaagatcccagcacgatcaaactgggcaatt

SEQ ID NO: 696525 - DNA, 33 bp, Homo sapien
tatttatctcttgtgaactgattacacagaaac

SEQ ID NO: 696526 - DNA, 33 bp, Homo sapien
tatttatctcttgtgagctgattacacagaaac

SEQ ID NO: 696527 - DNA, 33 bp, Homo sapien
agattacacttcttgacatttaacttgcaaatt

SEQ ID NO: 696528 - DNA, 33 bp, Homo sapien
agattacacttcttgatatttaacttgcaaatt

SEQ ID NO: 696529 - DNA, 33 bp, Homo sapien
ctgtattctattctcccgatgtgaatttagttc

SEQ ID NO: 696530 - DNA, 33 bp, Homo sapien
ctgtattctattctcctgatgtgaatttagttc

SEQ ID NO: 696531 - DNA, 33 bp, Homo sapien
taaattcatctgcctacgaggagctgaccattg

SEQ ID NO: 696532 - DNA, 33 bp, Homo sapien
taaattcatctgcctatgaggagctgaccattg

SEQ ID NO: 696533 - DNA, 33 bp, Homo sapien
gggccagctagtacccaagatctgtttccattc

SEQ ID NO: 696534 - DNA, 33 bp, Homo sapien
gggccagctagtacccgagatctgtttccattc

SEQ ID NO: 696535 - DNA, 33 bp, Homo sapien
ctgttgattctactaacagtgtctcccactatt

SEQ ID NO: 696536 - DNA, 33 bp, Homo sapien
ctgttgattctactaagagtgtctcccactatt

SEQ ID NO: 696537 - DNA, 33 bp, Homo sapien
gatgatgttataataacgtttaccctttctgat

SEQ ID NO: 696538 - DNA, 33 bp, Homo sapien
gatgatgttataataatgtttaccctttctgat

SEQ ID NO: 696539 - DNA, 33 bp, Homo sapien
atagtatcccggaatacctaggactctatatca

SEQ ID NO: 696540 - DNA, 33 bp, Homo sapien
atagtatcccggaatagctaggactctatatca

SEQ ID NO: 696541 - DNA, 33 bp, Homo sapien
tcaggagatcagccagaaaaatattgtagctgc

SEQ ID NO: 696542 - DNA, 33 bp, Homo sapien
tcaggagatcagccaggaaaatattgtagctgc

SEQ ID NO: 696543 - DNA, 33 bp, Homo sapien
tgtaacctttgcaggcaattagaagatacttca

SEQ ID NO: 696544 - DNA, 33 bp, Homo sapien
tgtaacctttgcaggccattagaagatacttca

SEQ ID NO: 696545 - DNA, 33 bp, Homo sapien
taaaaatccagcaaagcatttcaggtcttgaga

SEQ ID NO: 696546 - DNA, 33 bp, Homo sapien
taaaaatccagcaaagtatttcaggtcttgaga

SEQ ID NO: 696547 - DNA, 33 bp, Homo sapien
gtaaccaaccaagtggaatgaacatagacaatt

SEQ ID NO: 696548 - DNA, 33 bp, Homo sapien
gtaaccaaccaagtgggatgaacatagacaatt

SEQ ID NO: 696549 - DNA, 33 bp, Homo sapien
tatttctattgataacacagtttgaagtttagg

SEQ ID NO: 696550 - DNA, 33 bp, Homo sapien
tatttctattgataacccagtttgaagtttagg

SEQ ID NO: 696551 - DNA, 33 bp, Homo sapien
tggctgactctatccaactttggttatacttct

SEQ ID NO: 696552 - DNA, 33 bp, Homo sapien
tggctgactctatccacctttggttatacttct

SEQ ID NO: 696553 - DNA, 33 bp, Homo sapien
atgggctccataagtaccatcctttttgttggt

SEQ ID NO: 696554 - DNA, 33 bp, Homo sapien
atgggctccataagtatcatcctttttgttggt

SEQ ID NO: 696555 - DNA, 33 bp, Homo sapien
agtgtatggccaaatgcatgtatattcaagagc

SEQ ID NO: 696556 - DNA, 33 bp, Homo sapien
agtgtatggccaaatgtatgtatattcaagagc

SEQ ID NO: 696557 - DNA, 33 bp, Homo sapien
aatactgttttattaactcttgtctgattgtct

SEQ ID NO: 696558 - DNA, 33 bp, Homo sapien
aatactgttttattaattcttgtctgattgtct

SEQ ID NO: 696559 - DNA, 33 bp, Homo sapien
gttgtactcacatatcaccttacaacagaaatg

SEQ ID NO: 696560 - DNA, 33 bp, Homo sapien
gttgtactcacatatccccttacaacagaaatg

SEQ ID NO: 696561 - DNA, 33 bp, Homo sapien
ctttattcaccagcaaataatcagtaaaaagtg

SEQ ID NO: 696562 - DNA, 33 bp, Homo sapien
ctttattcaccagcaagtaatcagtaaaaagtg

SEQ ID NO: 696563 - DNA, 33 bp, Homo sapien
acttgcagtgcaaagacaatggtggagtggaaa

SEQ ID NO: 696564 - DNA, 33 bp, Homo sapien
acttgcagtgcaaagataatggtggagtggaaa

SEQ ID NO: 696565 - DNA, 33 bp, Homo sapien
ttgttagaaataataaggctcatgtttattcag

SEQ ID NO: 696566 - DNA, 33 bp, Homo sapien
ttgttagaaataataatgctcatgtttattcag

SEQ ID NO: 696567 - DNA, 33 bp, Homo sapien
aatagccatgttgttacggagctaaagacaggg

SEQ ID NO: 696568 - DNA, 33 bp, Homo sapien
aatagccatgttgttatggagctaaagacaggg

SEQ ID NO: 696569 - DNA, 33 bp, Homo sapien
gattctcaacttcctgaaggtaagaagtgcctg

SEQ ID NO: 696570 - DNA, 33 bp, Homo sapien
gattctcaacttcctggaggtaagaagtgcctg

SEQ ID NO: 696571 - DNA, 33 bp, Homo sapien
tggcagatattgatagacatcaggccaatatta

SEQ ID NO: 696572 - DNA, 33 bp, Homo sapien
tggcagatattgatagtcatcaggccaatatta

SEQ ID NO: 696573 - DNA, 33 bp, Homo sapien
gaagccactggttgaccccatcttgaataacag

SEQ ID NO: 696574 - DNA, 33 bp, Homo sapien
gaagccactggttgacgccatcttgaataacag

SEQ ID NO: 696575 - DNA, 33 bp, Homo sapien
agtagcacagaccaaactaaggtagtaagagtg

SEQ ID NO: 696576 - DNA, 33 bp, Homo sapien
agtagcacagaccaaagtaaggtagtaagagtg

SEQ ID NO: 696577 - DNA, 33 bp, Homo sapien
aggtagtaagagtgtactaatacttttccatat

SEQ ID NO: 696578 - DNA, 33 bp, Homo sapien
aggtagtaagagtgtagtaatacttttccatat

SEQ ID NO: 696579 - DNA, 33 bp, Homo sapien
aacagagccttcaacaatagtagttggaaactt

SEQ ID NO: 696580 - DNA, 33 bp, Homo sapien
aacagagccttcaacagtagtagttggaaactt

SEQ ID NO: 696581 - DNA, 33 bp, Homo sapien
cataggctgctgtacaataagtggtaaatcacc

SEQ ID NO: 696582 - DNA, 33 bp, Homo sapien
cataggctgctgtacagtaagtggtaaatcacc

SEQ ID NO: 696583 - DNA, 33 bp, Homo sapien
gttcactgtgttgataactgcaaaattcactgt

SEQ ID NO: 696584 - DNA, 33 bp, Homo sapien
gttcactgtgttgatagctgcaaaattcactgt

SEQ ID NO: 696585 - DNA, 33 bp, Homo sapien
agagagattagtagagaaacaacataaataaca

SEQ ID NO: 696586 - DNA, 33 bp, Homo sapien
agagagattagtagagtaacaacataaataaca

SEQ ID NO: 696587 - DNA, 33 bp, Homo sapien
ctagccaagcatactgcaaaatgaatataatgc

SEQ ID NO: 696588 - DNA, 33 bp, Homo sapien
ctagccaagcatactgtaaaatgaatataatgc

SEQ ID NO: 696589 - DNA, 33 bp, Homo sapien
ttgaggacatcttgaacaggagatatgctcaaa

SEQ ID NO: 696590 - DNA, 33 bp, Homo sapien
ttgaggacatcttgaagaggagatatgctcaaa

SEQ ID NO: 696591 - DNA, 33 bp, Homo sapien
taagacacatccaggactagaggatcttaaaca

SEQ ID NO: 696592 - DNA, 33 bp, Homo sapien
taagacacatccaggattagaggatcttaaaca

SEQ ID NO: 696593 - DNA, 33 bp, Homo sapien
tgaagtgaattgattgcattttagtcaactgtt

SEQ ID NO: 696594 - DNA, 33 bp, Homo sapien
tgaagtgaattgattgtattttagtcaactgtt

SEQ ID NO: 696595 - DNA, 33 bp, Homo sapien
tttttcataaataggcaaaaaaagttgcataaa

SEQ ID NO: 696596 - DNA, 33 bp, Homo sapien
tttttcataaataggcgaaaaaagttgcataaa

SEQ ID NO: 696597 - DNA, 33 bp, Homo sapien
aaaacaaaaatgtcaacgctccagggagagaaa

SEQ ID NO: 696598 - DNA, 33 bp, Homo sapien
aaaacaaaaatgtcaatgctccagggagagaaa

SEQ ID NO: 696599 - DNA, 33 bp, Homo sapien
ttttgtaacatggcaaacctttaaatactttgt

SEQ ID NO: 696600 - DNA, 33 bp, Homo sapien
ttttgtaacatggcaagcctttaaatactttgt

SEQ ID NO: 696601 - DNA, 33 bp, Homo sapien
ctgacatttgcaagcacgagttttactgaagag

SEQ ID NO: 696602 - DNA, 33 bp, Homo sapien
ctgacatttgcaagcaggagttttactgaagag

SEQ ID NO: 696603 - DNA, 33 bp, Homo sapien
gtagtttgtaaagaacaagtcactggatgcagg

SEQ ID NO: 696604 - DNA, 33 bp, Homo sapien
gtagtttgtaaagaactagtcactggatgcagg

SEQ ID NO: 696605 - DNA, 33 bp, Homo sapien
aattttctcctcaaagacagcctgcatccagtg

SEQ ID NO: 696606 - DNA, 33 bp, Homo sapien
aattttctcctcaaaggcagcctgcatccagtg

SEQ ID NO: 696607 - DNA, 33 bp, Homo sapien
ctgcagtgtactgcccaaatcccccttcaggaa

SEQ ID NO: 696608 - DNA, 33 bp, Homo sapien
ctgcagtgtactgcccgaatcccccttcaggaa

SEQ ID NO: 696609 - DNA, 33 bp, Homo sapien
ttgaggatctataaagaacagacaaatgacaag

SEQ ID NO: 696610 - DNA, 33 bp, Homo sapien
ttgaggatctataaagtacagacaaatgacaag

SEQ ID NO: 696611 - DNA, 33 bp, Homo sapien
tatattatgactgacaaataggagacattttcc

SEQ ID NO: 696612 - DNA, 33 bp, Homo sapien
tatattatgactgacagataggagacattttcc

SEQ ID NO: 696613 - DNA, 33 bp, Homo sapien
tgtgccttggctgataactcctttttggaatgg

SEQ ID NO: 696614 - DNA, 33 bp, Homo sapien
tgtgccttggctgatagctcctttttggaatgg

SEQ ID NO: 696615 - DNA, 33 bp, Homo sapien
aaaatctgtaggcattcaacgccagcctctgaa

SEQ ID NO: 696616 - DNA, 33 bp, Homo sapien
aaaatctgtaggcattgaacgccagcctctgaa

SEQ ID NO: 696617 - DNA, 33 bp, Homo sapien
atccataattataaccactaggaaggcactttt

SEQ ID NO: 696618 - DNA, 33 bp, Homo sapien
atccataattataaccgctaggaaggcactttt

SEQ ID NO: 696619 - DNA, 33 bp, Homo sapien
acaaggaggagaattacaaactaagcagtagat

SEQ ID NO: 696620 - DNA, 33 bp, Homo sapien
acaaggaggagaattataaactaagcagtagat

SEQ ID NO: 696621 - DNA, 33 bp, Homo sapien
cacaaaattgccacacaaccttggacaacttac

SEQ ID NO: 696622 - DNA, 33 bp, Homo sapien
cacaaaattgccacacgaccttggacaacttac

SEQ ID NO: 696623 - DNA, 33 bp, Homo sapien
atgtgtgcatagtttaaatttcctaccagcccc

SEQ ID NO: 696624 - DNA, 33 bp, Homo sapien
atgtgtgcatagtttacatttcctaccagcccc

SEQ ID NO: 696625 - DNA, 33 bp, Homo sapien
tataattcaaagtcacgcacatcccaatacata

SEQ ID NO: 696626 - DNA, 33 bp, Homo sapien
tataattcaaagtcactcacatcccaatacata

SEQ ID NO: 696627 - DNA, 33 bp, Homo sapien
aattacctcaacttcaactattcaaaggaaaac

SEQ ID NO: 696628 - DNA, 33 bp, Homo sapien
aattacctcaacttcacctattcaaaggaaaac

SEQ ID NO: 696629 - DNA, 33 bp, Homo sapien
tcatcatgtgcaacccaaggatgttttggtcaa

SEQ ID NO: 696630 - DNA, 33 bp, Homo sapien
tcatcatgtgcaacccgaggatgttttggtcaa

SEQ ID NO: 696631 - DNA, 33 bp, Homo sapien
aatatataaagctcaaagctcaatatcagggta

SEQ ID NO: 696632 - DNA, 33 bp, Homo sapien
aatatataaagctcaatgctcaatatcagggta

SEQ ID NO: 696633 - DNA, 33 bp, Homo sapien
tttcaactctctcaaacgtaaagatagataaga

SEQ ID NO: 696634 - DNA, 33 bp, Homo sapien
tttcaactctctcaaatgtaaagatagataaga

SEQ ID NO: 696635 - DNA, 33 bp, Homo sapien
cttggctttatctatacaatggtagcatctgac

SEQ ID NO: 696636 - DNA, 33 bp, Homo sapien
cttggctttatctatataatggtagcatctgac

SEQ ID NO: 696637 - DNA, 33 bp, Homo sapien
agggagaacacttctcaagagccttatccaatg

SEQ ID NO: 696638 - DNA, 33 bp, Homo sapien
agggagaacacttctccagagccttatccaatg

SEQ ID NO: 696639 - DNA, 33 bp, Homo sapien
gatgatatttttgctacattgggctaaataaat

SEQ ID NO: 696640 - DNA, 33 bp, Homo sapien
gatgatatttttgctatattgggctaaataaat

SEQ ID NO: 696641 - DNA, 33 bp, Homo sapien
tagacagtaagtgtaacgaacagctatgtctta

SEQ ID NO: 696642 - DNA, 33 bp, Homo sapien
tagacagtaagtgtaatgaacagctatgtctta

SEQ ID NO: 696643 - DNA, 33 bp, Homo sapien
atctttgaattggtagaaaaaggattcacagag

SEQ ID NO: 696644 - DNA, 33 bp, Homo sapien
atctttgaattggtaggaaaaggattcacagag

SEQ ID NO: 696645 - DNA, 33 bp, Homo sapien
ggtgatcagatcataacagcagagtccttgtga

SEQ ID NO: 696646 - DNA, 33 bp, Homo sapien
ggtgatcagatcataagagcagagtccttgtga

SEQ ID NO: 696647 - DNA, 33 bp, Homo sapien
ctgttcagaatatagtcacaaaagtctttacta

SEQ ID NO: 696648 - DNA, 33 bp, Homo sapien
ctgttcagaatatagttacaaaagtctttacta

SEQ ID NO: 696649 - DNA, 33 bp, Homo sapien
agtcaggaaagagataagaaattggaaaagaat

SEQ ID NO: 696650 - DNA, 33 bp, Homo sapien
agtcaggaaagagataggaaattggaaaagaat

SEQ ID NO: 696651 - DNA, 33 bp, Homo sapien
ctctttccatggcaataagctgattacccaaaa

SEQ ID NO: 696652 - DNA, 33 bp, Homo sapien
ctctttccatggcaatgagctgattacccaaaa

SEQ ID NO: 696653 - DNA, 33 bp, Homo sapien
ttgataggcatatacaacggtagacaagcggag

SEQ ID NO: 696654 - DNA, 33 bp, Homo sapien
ttgataggcatatacagcggtagacaagcggag

SEQ ID NO: 696655 - DNA, 33 bp, Homo sapien
aggtgttactaaagtacattaccagctacaaaa

SEQ ID NO: 696656 - DNA, 33 bp, Homo sapien
aggtgttactaaagtagattaccagctacaaaa

SEQ ID NO: 696657 - DNA, 33 bp, Homo sapien
cgtattggacacaggacaatcgtactcagttgt

SEQ ID NO: 696658 - DNA, 33 bp, Homo sapien
cgtattggacacaggagaatcgtactcagttgt

SEQ ID NO: 696659 - DNA, 33 bp, Homo sapien
ctataagctcaaatccaggaatccagatccagc

SEQ ID NO: 696660 - DNA, 33 bp, Homo sapien
ctataagctcaaatccgggaatccagatccagc

SEQ ID NO: 696661 - DNA, 33 bp, Homo sapien
ataatctcattagtaactaactcctgttgtact

SEQ ID NO: 696662 - DNA, 33 bp, Homo sapien
ataatctcattagtaattaactcctgttgtact

SEQ ID NO: 696663 - DNA, 33 bp, Homo sapien
actttctctgaaacaaatggagtttttctctct

SEQ ID NO: 696664 - DNA, 33 bp, Homo sapien
actttctctgaaacaagtggagtttttctctct

SEQ ID NO: 696665 - DNA, 33 bp, Homo sapien
tactaagaattgcaaaagtatgtgccaatagtg

SEQ ID NO: 696666 - DNA, 33 bp, Homo sapien
tactaagaattgcaaaggtatgtgccaatagtg

SEQ ID NO: 696667 - DNA, 33 bp, Homo sapien
aggtatgagatgcttaaccaagattttatgatt

SEQ ID NO: 696668 - DNA, 33 bp, Homo sapien
aggtatgagatgcttagccaagattttatgatt

SEQ ID NO: 696669 - DNA, 33 bp, Homo sapien
agtcattgactgtttacgattatggctaagcat

SEQ ID NO: 696670 - DNA, 33 bp, Homo sapien
agtcattgactgtttatgattatggctaagcat

SEQ ID NO: 696671 - DNA, 33 bp, Homo sapien
ttgtgtatgcaatgtcccaggtctatttaaata

SEQ ID NO: 696672 - DNA, 33 bp, Homo sapien
ttgtgtatgcaatgtctcaggtctatttaaata

SEQ ID NO: 696673 - DNA, 33 bp, Homo sapien
gtcaaattttattctcactacccctctatcaat

SEQ ID NO: 696674 - DNA, 33 bp, Homo sapien
gtcaaattttattctcgctacccctctatcaat

SEQ ID NO: 696675 - DNA, 33 bp, Homo sapien
atgtattttcaataagacaatgttaagctagaa

SEQ ID NO: 696676 - DNA, 33 bp, Homo sapien
atgtattttcaataaggcaatgttaagctagaa

SEQ ID NO: 696677 - DNA, 33 bp, Homo sapien
gcaacaaaaatgtagaaagaatagcatataggc

SEQ ID NO: 696678 - DNA, 33 bp, Homo sapien
gcaacaaaaatgtagagagaatagcatataggc

SEQ ID NO: 696679 - DNA, 33 bp, Homo sapien
tattttagcatgtatcaagataacagctgtgtt

SEQ ID NO: 696680 - DNA, 33 bp, Homo sapien
tattttagcatgtatcgagataacagctgtgtt

SEQ ID NO: 696681 - DNA, 33 bp, Homo sapien
tttctttattaattcaatctttacctactcata

SEQ ID NO: 696682 - DNA, 33 bp, Homo sapien
tttctttattaattcagtctttacctactcata

SEQ ID NO: 696683 - DNA, 33 bp, Homo sapien
tctagtccaggtcaacacagataatttttgctg

SEQ ID NO: 696684 - DNA, 33 bp, Homo sapien
tctagtccaggtcaacccagataatttttgctg

SEQ ID NO: 696685 - DNA, 33 bp, Homo sapien
agaggtacaattttgaccatttttatcactcta

SEQ ID NO: 696686 - DNA, 33 bp, Homo sapien
agaggtacaattttgagcatttttatcactcta

SEQ ID NO: 696687 - DNA, 33 bp, Homo sapien
tagcagcaaaacatcacctatctataccaaagt

SEQ ID NO: 696688 - DNA, 33 bp, Homo sapien
tagcagcaaaacatcatctatctataccaaagt

SEQ ID NO: 696689 - DNA, 33 bp, Homo sapien
ttagcctttttaacccaggcaataacataatca

SEQ ID NO: 696690 - DNA, 33 bp, Homo sapien
ttagcctttttaacccgggcaataacataatca

SEQ ID NO: 696691 - DNA, 33 bp, Homo sapien
gcaattgcttggcatacgtccttggagaagtat

SEQ ID NO: 696692 - DNA, 33 bp, Homo sapien
gcaattgcttggcatatgtccttggagaagtat

SEQ ID NO: 696693 - DNA, 33 bp, Homo sapien
actgaacgagggatcacctggctaagagatacc

SEQ ID NO: 696694 - DNA, 33 bp, Homo sapien
actgaacgagggatcagctggctaagagatacc

SEQ ID NO: 696695 - DNA, 33 bp, Homo sapien
ttttgggaacttgcccacatctctgggatttga

SEQ ID NO: 696696 - DNA, 33 bp, Homo sapien
ttttgggaacttgcccgcatctctgggatttga

SEQ ID NO: 696697 - DNA, 33 bp, Homo sapien; identical to SEQ ID NO: 696695

SEQ ID NO: 696698 - DNA, 33 bp, Homo sapien; identical to SEQ ID NO: 696696

SEQ ID NO: 696699 - DNA, 33 bp, Homo sapien
tgtgctccaggacaaaattctttattatggcct

SEQ ID NO: 696700 - DNA, 33 bp, Homo sapien
tgtgctccaggacaaagttctttattatggcct

SEQ ID NO: 696701 - DNA, 33 bp, Homo sapien
attcatgttgaagtctaaaactccaatctgaag

SEQ ID NO: 696702 - DNA, 33 bp, Homo sapien
attcatgttgaagtctgaaactccaatctgaag

SEQ ID NO: 696703 - DNA, 33 bp, Homo sapien
gtaagaaaaatgctacaattgccagtaacagag

SEQ ID NO: 696704 - DNA, 33 bp, Homo sapien
gtaagaaaaatgctacgattgccagtaacagag

SEQ ID NO: 696705 - DNA, 33 bp, Homo sapien
tgacctgagagctttaaatagtttcttttcatt

SEQ ID NO: 696706 - DNA, 33 bp, Homo sapien
tgacctgagagctttacatagtttcttttcatt

SEQ ID NO: 696707 - DNA, 33 bp, Homo sapien
aacacaccataataaaaatgaattcgagtctta

SEQ ID NO: 696708 - DNA, 33 bp, Homo sapien
aacacaccataataaagatgaattcgagtctta

SEQ ID NO: 696709 - DNA, 33 bp, Homo sapien
tgtggagatgcaggaacactgggtcccaggaac

SEQ ID NO: 696710 - DNA, 33 bp, Homo sapien
tgtggagatgcaggaatactgggtcccaggaac

SEQ ID NO: 696711 - DNA, 33 bp, Homo sapien
ttaacaatgatctcacagaattccaaaagagtg

SEQ ID NO: 696712 - DNA, 33 bp, Homo sapien
ttaacaatgatctcacggaattccaaaagagtg

SEQ ID NO: 696713 - DNA, 33 bp, Homo sapien
gctttttatacagcaagattaggacttgaaact

SEQ ID NO: 696714 - DNA, 33 bp, Homo sapien
gctttttatacagcaatattaggacttgaaact

SEQ ID NO: 696715 - DNA, 33 bp, Homo sapien
acccttctctggcaaaacactttaaagctgctg

SEQ ID NO: 696716 - DNA, 33 bp, Homo sapien
acccttctctggcaaagcactttaaagctgctg

SEQ ID NO: 696717 - DNA, 33 bp, Homo sapien
tctgatagcacgtttcaagttaacccttggccc

SEQ ID NO: 696718 - DNA, 33 bp, Homo sapien
tctgatagcacgtttcgagttaacccttggccc

SEQ ID NO: 696719 - DNA, 33 bp, Homo sapien
tataaaggatctgaagaactactaactcttcaa

SEQ ID NO: 696720 - DNA, 33 bp, Homo sapien
tataaaggatctgaaggactactaactcttcaa

SEQ ID NO: 696721 - DNA, 33 bp, Homo sapien
ttaccccactccagaaaggcaaacaatatgaga

SEQ ID NO: 696722 - DNA, 33 bp, Homo sapien
ttaccccactccagaagggcaaacaatatgaga

SEQ ID NO: 696723 - DNA, 33 bp, Homo sapien
tgttcccgaactgtgaagcttttgagttttcaa

SEQ ID NO: 696724 - DNA, 33 bp, Homo sapien
tgttcccgaactgtgaggcttttgagttttcaa

SEQ ID NO: 696725 - DNA, 33 bp, Homo sapien
gttaaaggaatctacaactttagtgactagttg

SEQ ID NO: 696726 - DNA, 33 bp, Homo sapien
gttaaaggaatctacacctttagtgactagttg

SEQ ID NO: 696727 - DNA, 33 bp, Homo sapien
aagtttctgtttagcacagcacaaattttgcag

SEQ ID NO: 696728 - DNA, 33 bp, Homo sapien
aagtttctgtttagcagagcacaaattttgcag

SEQ ID NO: 696729 - DNA, 33 bp, Homo sapien
atttaatctatactgcacctctactaagtggaa

SEQ ID NO: 696730 - DNA, 33 bp, Homo sapien
atttaatctatactgcgcctctactaagtggaa

SEQ ID NO: 696731 - DNA, 33 bp, Homo sapien
cttcattgattcagaactcaggtggaagaaagt

SEQ ID NO: 696732 - DNA, 33 bp, Homo sapien
cttcattgattcagaattcaggtggaagaaagt

SEQ ID NO: 696733 - DNA, 33 bp, Homo sapien
tctttgttgaaccacaatgcaatcttgatgatt

SEQ ID NO: 696734 - DNA, 33 bp, Homo sapien
tctttgttgaaccacattgcaatcttgatgatt

SEQ ID NO: 696735 - DNA, 33 bp, Homo sapien
tcataggtaatgcgaaaataatacagactgagt

SEQ ID NO: 696736 - DNA, 33 bp, Homo sapien
tcataggtaatgcgaagataatacagactgagt

SEQ ID NO: 696737 - DNA, 33 bp, Homo sapien
cagctttgtgtcaaatcagctacattcctcttt

SEQ ID NO: 696738 - DNA, 33 bp, Homo sapien
cagctttgtgtcaaattagctacattcctcttt

SEQ ID NO: 696739 - DNA, 33 bp, Homo sapien
cacaaatacgatcgatcaggaagacctctttca

SEQ ID NO: 696740 - DNA, 33 bp, Homo sapien
cacaaatacgatcgattaggaagacctctttca

SEQ ID NO: 696741 - DNA, 33 bp, Homo sapien
gcttatatggttaacagtaattcaacctacatg

SEQ ID NO: 696742 - DNA, 33 bp, Homo sapien
gcttatatggttaacattaattcaacctacatg

SEQ ID NO: 696743 - DNA, 33 bp, Homo sapien
ttgcacctgtgtctaacaaagactctgagggga

SEQ ID NO: 696744 - DNA, 33 bp, Homo sapien
ttgcacctgtgtctaagaaagactctgagggga

SEQ ID NO: 696745 - DNA, 33 bp, Homo sapien
gtgcctgccctggacaatgaaggctgttctaaa

SEQ ID NO: 696746 - DNA, 33 bp, Homo sapien
gtgcctgccctggacagtgaaggctgttctaaa

SEQ ID NO: 696747 - DNA, 33 bp, Homo sapien
ggcaaagtattcaataggtttcgtgctatttta

SEQ ID NO: 696748 - DNA, 33 bp, Homo sapien
ggcaaagtattcaatatgtttcgtgctatttta

SEQ ID NO: 696749 - DNA, 33 bp, Homo sapien
aagaattgtttacgaaaaaaggcctacaaagag

SEQ ID NO: 696750 - DNA, 33 bp, Homo sapien
aagaattgtttacgaagaaaggcctacaaagag

SEQ ID NO: 696751 - DNA, 33 bp, Homo sapien
aaaaactggctaggtaacttccctgataaatga

SEQ ID NO: 696752 - DNA, 33 bp, Homo sapien
aaaaactggctaggtatcttccctgataaatga

SEQ ID NO: 696753 - DNA, 33 bp, Homo sapien
tcaagtagtttcaaaacaggaggtgaatgactt

SEQ ID NO: 696754 - DNA, 33 bp, Homo sapien
tcaagtagtttcaaaataggaggtgaatgactt

SEQ ID NO: 696755 - DNA, 33 bp, Homo sapien
ggaggtgaatgacttacgcttgctctccaggta

SEQ ID NO: 696756 - DNA, 33 bp, Homo sapien
ggaggtgaatgacttatgcttgctctccaggta

SEQ ID NO: 696757 - DNA, 33 bp, Homo sapien
aatgctgtgaaagggccaaggtgtaaatcacac

SEQ ID NO: 696758 - DNA, 33 bp, Homo sapien
aatgctgtgaaagggctaaggtgtaaatcacac

SEQ ID NO: 696759 - DNA, 33 bp, Homo sapien
tttaaccaagtacctacgaaatgttgtaaatag

SEQ ID NO: 696760 - DNA, 33 bp, Homo sapien
tttaaccaagtacctatgaaatgttgtaaatag

SEQ ID NO: 696761 - DNA, 33 bp, Homo sapien
ctttaacagacacaaacgggtaggtgagaaaca

SEQ ID NO: 696762 - DNA, 33 bp, Homo sapien
ctttaacagacacaaatgggtaggtgagaaaca

SEQ ID NO: 696763 - DNA, 33 bp, Homo sapien
ttataatgaaaagaaacttattagctcacagtt

SEQ ID NO: 696764 - DNA, 33 bp, Homo sapien
ttataatgaaaagaaatttattagctcacagtt

SEQ ID NO: 696765 - DNA, 33 bp, Homo sapien
tattatacaatgactacaagagcattccaacta

SEQ ID NO: 696766 - DNA, 33 bp, Homo sapien
tattatacaatgactagaagagcattccaacta

SEQ ID NO: 696767 - DNA, 33 bp, Homo sapien
taatatttaccaagacacattagatttttagga

SEQ ID NO: 696768 - DNA, 33 bp, Homo sapien
taatatttaccaagacgcattagatttttagga

SEQ ID NO: 696769 - DNA, 33 bp, Homo sapien
gtaactggcaatcctgcaaccatacactccaaa

SEQ ID NO: 696770 - DNA, 33 bp, Homo sapien
gtaactggcaatcctgtaaccatacactccaaa

SEQ ID NO: 696771 - DNA, 33 bp, Homo sapien
tggaatatcaatccaaagagaggtcatcctata

SEQ ID NO: 696772 - DNA, 33 bp, Homo sapien
tggaatatcaatccaaggagaggtcatcctata

SEQ ID NO: 696773 - DNA, 33 bp, Homo sapien
gagcgacaaaatgtagaaggcatcataaaatat

SEQ ID NO: 696774 - DNA, 33 bp, Homo sapien
gagcgacaaaatgtaggaggcatcataaaatat

SEQ ID NO: 696775 - DNA, 33 bp, Homo sapien
tttaatttggcacctcgattcctcatgatatta

SEQ ID NO: 696776 - DNA, 33 bp, Homo sapien
tttaatttggcacctctattcctcatgatatta

SEQ ID NO: 696777 - DNA, 33 bp, Homo sapien
ctcctaggtcaatgcaatagtgaaatctggggt

SEQ ID NO: 696778 - DNA, 33 bp, Homo sapien
ctcctaggtcaatgcagtagtgaaatctggggt

SEQ ID NO: 696779 - DNA, 33 bp, Homo sapien
aaatgaaataactgtacaatcaaggtgctttct

SEQ ID NO: 696780 - DNA, 33 bp, Homo sapien
aaatgaaataactgtagaatcaaggtgctttct

SEQ ID NO: 696781 - DNA, 33 bp, Homo sapien
actcttggtgcatataaaaagaaccctacaata

SEQ ID NO: 696782 - DNA, 33 bp, Homo sapien
actcttggtgcatatataaagaaccctacaata

SEQ ID NO: 696783 - DNA, 33 bp, Homo sapien
tattcaggctgcagataaactctctctgtattc

SEQ ID NO: 696784 - DNA, 33 bp, Homo sapien
tattcaggctgcagatgaactctctctgtattc

SEQ ID NO: 696785 - DNA, 33 bp, Homo sapien
tggcacctttgacttgcaaattctcaggaacct

SEQ ID NO: 696786 - DNA, 33 bp, Homo sapien
tggcacctttgacttgtaaattctcaggaacct

SEQ ID NO: 696787 - DNA, 33 bp, Homo sapien
gctgagatttctagcacggtttaactttgaaca

SEQ ID NO: 696788 - DNA, 33 bp, Homo sapien
gctgagatttctagcatggtttaactttgaaca

SEQ ID NO: 696789 - DNA, 33 bp, Homo sapien
gtatcatacactgttaacctcaagttgatgtct

SEQ ID NO: 696790 - DNA, 33 bp, Homo sapien
gtatcatacactgttaccctcaagttgatgtct

SEQ ID NO: 696791 - DNA, 33 bp, Homo sapien
atcttcctaaggcccaaagactatatgatgtgg

SEQ ID NO: 696792 - DNA, 33 bp, Homo sapien
atcttcctaaggcccagagactatatgatgtgg

SEQ ID NO: 696793 - DNA, 33 bp, Homo sapien
tatttttccatgacccaatttctgaaattatgt

SEQ ID NO: 696794 - DNA, 33 bp, Homo sapien
tatttttccatgacccgatttctgaaattatgt

SEQ ID NO: 696795 - DNA, 33 bp, Homo sapien
cattttctcaaaattaaggagctagatgtccaa

SEQ ID NO: 696796 - DNA, 33 bp, Homo sapien
cattttctcaaaattatggagctagatgtccaa

SEQ ID NO: 696797 - DNA, 33 bp, Homo sapien
gcttgtcagtatccaaatcaggaacttaaaatt

SEQ ID NO: 696798 - DNA, 33 bp, Homo sapien
gcttgtcagtatccaagtcaggaacttaaaatt

SEQ ID NO: 696799 - DNA, 33 bp, Homo sapien
cagttctggtgtaggccctctgtgcagatgacc

SEQ ID NO: 696800 - DNA, 33 bp, Homo sapien
cagttctggtgtaggctctctgtgcagatgacc

SEQ ID NO: 696801 - DNA, 33 bp, Homo sapien
agaaggaaatacttcaaggtgtttggagatgag

SEQ ID NO: 696802 - DNA, 33 bp, Homo sapien
agaaggaaatacttcagggtgtttggagatgag

SEQ ID NO: 696803 - DNA, 33 bp, Homo sapien
agcattcaattgaaacaagttataaagacctat

SEQ ID NO: 696804 - DNA, 33 bp, Homo sapien
agcattcaattgaaacgagttataaagacctat

SEQ ID NO: 696805 - DNA, 33 bp, Homo sapien
caattagccatctctccgagacaggataaattt

SEQ ID NO: 696806 - DNA, 33 bp, Homo sapien
caattagccatctctctgagacaggataaattt

SEQ ID NO: 696807 - DNA, 33 bp, Homo sapien
tttgccaaggttaaatcagtgtttttgtcgcat

SEQ ID NO: 696808 - DNA, 33 bp, Homo sapien
tttgccaaggttaaattagtgtttttgtcgcat

SEQ ID NO: 696809 - DNA, 33 bp, Homo sapien
atattgaggtgaagaaaagctaagtaactcttc

SEQ ID NO: 696810 - DNA, 33 bp, Homo sapien
atattgaggtgaagaatagctaagtaactcttc

SEQ ID NO: 696811 - DNA, 33 bp, Homo sapien
gcacaccaatctaaaagataaatcacctctttg

SEQ ID NO: 696812 - DNA, 33 bp, Homo sapien
gcacaccaatctaaaatataaatcacctctttg

SEQ ID NO: 696813 - DNA, 33 bp, Homo sapien
ggatgtgaggcatggaataaacataaatcattt

SEQ ID NO: 696814 - DNA, 33 bp, Homo sapien
ggatgtgaggcatggagtaaacataaatcattt

SEQ ID NO: 696815 - DNA, 33 bp, Homo sapien
gcattggataaacataactttccaaatgggaca

SEQ ID NO: 696816 - DNA, 33 bp, Homo sapien
gcattggataaacatacctttccaaatgggaca

SEQ ID NO: 696817 - DNA, 33 bp, Homo sapien
atcagcagtgtgaaatgagactagtacacctag

SEQ ID NO: 696818 - DNA, 33 bp, Homo sapien
atcagcagtgtgaaattagactagtacacctag

SEQ ID NO: 696819 - DNA, 33 bp, Homo sapien
aatgcctgtagattgaactgggcatggagccaa

SEQ ID NO: 696820 - DNA, 33 bp, Homo sapien
aatgcctgtagattgacctgggcatggagccaa

SEQ ID NO: 696821 - DNA, 33 bp, Homo sapien
tagactgcagcccttacgactacaagacaagca

SEQ ID NO: 696822 - DNA, 33 bp, Homo sapien
tagactgcagcccttatgactacaagacaagca

SEQ ID NO: 696823 - DNA, 33 bp, Homo sapien
ggtcttgactttacaacagagcaatttaacaat

SEQ ID NO: 696824 - DNA, 33 bp, Homo sapien
ggtcttgactttacaatagagcaatttaacaat

SEQ ID NO: 696825 - DNA, 33 bp, Homo sapien
atactgtattccaggaggtttcactaatttacc

SEQ ID NO: 696826 - DNA, 33 bp, Homo sapien
atactgtattccaggatgtttcactaatttacc

SEQ ID NO: 696827 - DNA, 33 bp, Homo sapien
ttctgcttttgatccacgtttcactaaagagtt

SEQ ID NO: 696828 - DNA, 33 bp, Homo sapien
ttctgcttttgatccatgtttcactaaagagtt

SEQ ID NO: 696829 - DNA, 33 bp, Homo sapien
agagcaagtaacaagaagaaggtagaaaagaag

SEQ ID NO: 696830 - DNA, 33 bp, Homo sapien
agagcaagtaacaagacgaaggtagaaaagaag

SEQ ID NO: 696831 - DNA, 33 bp, Homo sapien
tttatattttttgcaaaatctccaagaatttct

SEQ ID NO: 696832 - DNA, 33 bp, Homo sapien
tttatattttttgcaatatctccaagaatttct

SEQ ID NO: 696833 - DNA, 33 bp, Homo sapien
tctttctgagttatcaacaccatttcaattatt

SEQ ID NO: 696834 - DNA, 33 bp, Homo sapien
tctttctgagttatcaccaccatttcaattatt

SEQ ID NO: 696835 - DNA, 33 bp, Homo sapien
acagtagtaaaaataaattaggctacacttagg

SEQ ID NO: 696836 - DNA, 33 bp, Homo sapien
acagtagtaaaaataagttaggctacacttagg

SEQ ID NO: 696837 - DNA, 33 bp, Homo sapien
tttggcaaggattaacaactaacggagaaaatg

SEQ ID NO: 696838 - DNA, 33 bp, Homo sapien
tttggcaaggattaacgactaacggagaaaatg

SEQ ID NO: 696839 - DNA, 33 bp, Homo sapien
aaaggcgttaatatccgctttgccaagtaatta

SEQ ID NO: 696840 - DNA, 33 bp, Homo sapien
aaaggcgttaatatcctctttgccaagtaatta

SEQ ID NO: 696841 - DNA, 33 bp, Homo sapien
atattgtctttgatgacgtgcctactcagacat

SEQ ID NO: 696842 - DNA, 33 bp, Homo sapien
atattgtctttgatgaggtgcctactcagacat

SEQ ID NO: 696843 - DNA, 33 bp, Homo sapien
aactattcatttctccaaattcctgtaaaattt

SEQ ID NO: 696844 - DNA, 33 bp, Homo sapien
aactattcatttctccgaattcctgtaaaattt

SEQ ID NO: 696845 - DNA, 33 bp, Homo sapien
attttgttacagcatcgctagcaaattaagaag

SEQ ID NO: 696846 - DNA, 33 bp, Homo sapien
attttgttacagcatctctagcaaattaagaag

SEQ ID NO: 696847 - DNA, 33 bp, Homo sapien
ttttctggatgtagcagaggggaaaagccatgt

SEQ ID NO: 696848 - DNA, 33 bp, Homo sapien
ttttctggatgtagcataggggaaaagccatgt

SEQ ID NO: 696849 - DNA, 33 bp, Homo sapien
cttcaccttgtattacacttccctaggttgttt

SEQ ID NO: 696850 - DNA, 33 bp, Homo sapien
cttcaccttgtattacgcttccctaggttgttt

SEQ ID NO: 696851 - DNA, 33 bp, Homo sapien
tctcttcctactttcaaacagtctctctctcca

SEQ ID NO: 696852 - DNA, 33 bp, Homo sapien
tctcttcctactttcacacagtctctctctcca

SEQ ID NO: 696853 - DNA, 33 bp, Homo sapien
ttgactctatactctaccatttttaactgtggg

SEQ ID NO: 696854 - DNA, 33 bp, Homo sapien
ttgactctatactctatcatttttaactgtggg

SEQ ID NO: 696855 - DNA, 33 bp, Homo sapien
aaatgtgccaggggagaataattttgtactctc

SEQ ID NO: 696856 - DNA, 33 bp, Homo sapien
aaatgtgccaggggaggataattttgtactctc

SEQ ID NO: 696857 - DNA, 33 bp, Homo sapien
ggaatagtggcttgaaaaaattccatcttgaat

SEQ ID NO: 696858 - DNA, 33 bp, Homo sapien
ggaatagtggcttgaataaattccatcttgaat

SEQ ID NO: 696859 - DNA, 33 bp, Homo sapien
atacagtatcttccacacatgtgacattacaga

SEQ ID NO: 696860 - DNA, 33 bp, Homo sapien
atacagtatcttccacgcatgtgacattacaga

SEQ ID NO: 696861 - DNA, 33 bp, Homo sapien
tatgcaattttaaaaaagcaattatgcattatt

SEQ ID NO: 696862 - DNA, 33 bp, Homo sapien
tatgcaattttaaaaaggcaattatgcattatt

SEQ ID NO: 696863 - DNA, 33 bp, Homo sapien
gtgcaaagtgaacttacgaatatgctgagtttc

SEQ ID NO: 696864 - DNA, 33 bp, Homo sapien
gtgcaaagtgaacttatgaatatgctgagtttc

SEQ ID NO: 696865 - DNA, 33 bp, Homo sapien
cgttaacaggatatgaactaatttgagatcaac

SEQ ID NO: 696866 - DNA, 33 bp, Homo sapien
cgttaacaggatatgagctaatttgagatcaac

SEQ ID NO: 696867 - DNA, 33 bp, Homo sapien
ttctgccttcaatgtgaacttcaaatcacaata

SEQ ID NO: 696868 - DNA, 33 bp, Homo sapien
ttctgccttcaatgtgtacttcaaatcacaata

SEQ ID NO: 696869 - DNA, 33 bp, Homo sapien
cagcatgagtagctccaagaaagaagtgagcct

SEQ ID NO: 696870 - DNA, 33 bp, Homo sapien
cagcatgagtagctccgagaaagaagtgagcct

SEQ ID NO: 696871 - DNA, 33 bp, Homo sapien
tagctgaattcttagcaatcacttggttgcaga

SEQ ID NO: 696872 - DNA, 33 bp, Homo sapien
tagctgaattcttagcgatcacttggttgcaga

SEQ ID NO: 696873 - DNA, 33 bp, Homo sapien
ggccttttccaggaagccttcatcgattttcaa

SEQ ID NO: 696874 - DNA, 33 bp, Homo sapien
ggccttttccaggaaggcttcatcgattttcaa

SEQ ID NO: 696875 - DNA, 33 bp, Homo sapien
attttatcatttaaaccctttggaatatgagat

SEQ ID NO: 696876 - DNA, 33 bp, Homo sapien
attttatcatttaaactctttggaatatgagat

SEQ ID NO: 696877 - DNA, 33 bp, Homo sapien
gtttctggtactatcagtaggagagattttaac

SEQ ID NO: 696878 - DNA, 33 bp, Homo sapien
gtttctggtactatcattaggagagattttaac

SEQ ID NO: 696879 - DNA, 33 bp, Homo sapien
atttcctgtaagagtaagagtgaaggtggggga

SEQ ID NO: 696880 - DNA, 33 bp, Homo sapien
atttcctgtaagagtaggagtgaaggtggggga

SEQ ID NO: 696881 - DNA, 33 bp, Homo sapien
agaggtaaaacacctgaattatattttggaaag

SEQ ID NO: 696882 - DNA, 33 bp, Homo sapien
agaggtaaaacacctggattatattttggaaag

SEQ ID NO: 696883 - DNA, 33 bp, Homo sapien
agcccctggtcagttggactctctaatgcatga

SEQ ID NO: 696884 - DNA, 33 bp, Homo sapien
agcccctggtcagttgtactctctaatgcatga

SEQ ID NO: 696885 - DNA, 33 bp, Homo sapien
gtgaccaaagaacccaactagagattaagatac

SEQ ID NO: 696886 - DNA, 33 bp, Homo sapien
gtgaccaaagaacccacctagagattaagatac

SEQ ID NO: 696887 - DNA, 33 bp, Homo sapien
ctcttggtcgccatgaggtaatgtctattctac

SEQ ID NO: 696888 - DNA, 33 bp, Homo sapien
ctcttggtcgccatgatgtaatgtctattctac

SEQ ID NO: 696889 - DNA, 33 bp, Homo sapien
taaagaacctgatcaaatcaaaatgctgataga

SEQ ID NO: 696890 - DNA, 33 bp, Homo sapien
taaagaacctgatcaagtcaaaatgctgataga

SEQ ID NO: 696891 - DNA, 33 bp, Homo sapien
cccgcttttaacaacacattcaggaacccaagc

SEQ ID NO: 696892 - DNA, 33 bp, Homo sapien
cccgcttttaacaacatattcaggaacccaagc

SEQ ID NO: 696893 - DNA, 33 bp, Homo sapien
caaaccttgatacaaacggtatagaggccaggg

SEQ ID NO: 696894 - DNA, 33 bp, Homo sapien
caaaccttgatacaaatggtatagaggccaggg

SEQ ID NO: 696895 - DNA, 33 bp, Homo sapien
caaatctctccaaaaaattgcccaatgtatgta

SEQ ID NO: 696896 - DNA, 33 bp, Homo sapien
caaatctctccaaaaagttgcccaatgtatgta

SEQ ID NO: 696897 - DNA, 33 bp, Homo sapien
ctcatagaaaaggccccaaaaagctaccacacc

SEQ ID NO: 696898 - DNA, 33 bp, Homo sapien
ctcatagaaaaggcccgaaaaagctaccacacc

SEQ ID NO: 696899 - DNA, 33 bp, Homo sapien
aaatgtaaccaaccataaacacacaatatttct

SEQ ID NO: 696900 - DNA, 33 bp, Homo sapien
aaatgtaaccaaccatgaacacacaatatttct

SEQ ID NO: 696901 - DNA, 33 bp, Homo sapien
tggtttttgttacatacaggcatgaagttttct

SEQ ID NO: 696902 - DNA, 33 bp, Homo sapien
tggtttttgttacatataggcatgaagttttct

SEQ ID NO: 696903 - DNA, 33 bp, Homo sapien
gtatgtttgtgtataactgaaattagcttagtg

SEQ ID NO: 696904 - DNA, 33 bp, Homo sapien
gtatgtttgtgtataattgaaattagcttagtg

SEQ ID NO: 696905 - DNA, 33 bp, Homo sapien
atattgctgaattttgcaatatctataattgga

SEQ ID NO: 696906 - DNA, 33 bp, Homo sapien
atattgctgaattttggaatatctataattgga

SEQ ID NO: 696907 - DNA, 33 bp, Homo sapien
cacctaatgtaggtgacgggcttttgggtgcag

SEQ ID NO: 696908 - DNA, 33 bp, Homo sapien
cacctaatgtaggtgatgggcttttgggtgcag

SEQ ID NO: 696909 - DNA, 33 bp, Homo sapien
gtggcacatataaaccacggaatactatgcagt

SEQ ID NO: 696910 - DNA, 33 bp, Homo sapien
gtggcacatataaaccgcggaatactatgcagt

SEQ ID NO: 696911 - DNA, 33 bp, Homo sapien
ttcattctgtactctaaagggttagtcacactt

SEQ ID NO: 696912 - DNA, 33 bp, Homo sapien
ttcattctgtactctacagggttagtcacactt

SEQ ID NO: 696913 - DNA, 33 bp, Homo sapien
ttaaatgcattagggcagcaacaatatagtttt

SEQ ID NO: 696914 - DNA, 33 bp, Homo sapien
ttaaatgcattagggcggcaacaatatagtttt

SEQ ID NO: 696915 - DNA, 33 bp, Homo sapien
ccagctgcactaggtaacaacagtggcaaattt

SEQ ID NO: 696916 - DNA, 33 bp, Homo sapien
ccagctgcactaggtagcaacagtggcaaattt

SEQ ID NO: 696917 - DNA, 33 bp, Homo sapien
aagttaatttaatacactctctgatctattttc

SEQ ID NO: 696918 - DNA, 33 bp, Homo sapien
aagttaatttaatacagtctctgatctattttc

SEQ ID NO: 696919 - DNA, 33 bp, Homo sapien
acagtcctttcatctgaaacaatattgcaagaa

SEQ ID NO: 696920 - DNA, 33 bp, Homo sapien
acagtcctttcatctggaacaatattgcaagaa

SEQ ID NO: 696921 - DNA, 33 bp, Homo sapien
tctataagttaaaaccaatcatcttactttggt

SEQ ID NO: 696922 - DNA, 33 bp, Homo sapien
tctataagttaaaaccgatcatcttactttggt

SEQ ID NO: 696923 - DNA, 33 bp, Homo sapien
actaggaaagctataaatagccaaaagtgtctg

SEQ ID NO: 696924 - DNA, 33 bp, Homo sapien
actaggaaagctataagtagccaaaagtgtctg

SEQ ID NO: 696925 - DNA, 33 bp, Homo sapien
atcttatgcttctaaccatgttgctagccatat

SEQ ID NO: 696926 - DNA, 33 bp, Homo sapien
atcttatgcttctaactatgttgctagccatat

SEQ ID NO: 696927 - DNA, 33 bp, Homo sapien; identical to SEQ ID NO: 696925

SEQ ID NO: 696928 - DNA, 33 bp, Homo sapien; identical to SEQ ID NO: 696926

SEQ ID NO: 696929 - DNA, 33 bp, Homo sapien
tgacatggcactcagagatgtccgtagttgggg

SEQ ID NO: 696930 - DNA, 33 bp, Homo sapien
tgacatggcactcagatatgtccgtagttgggg

SEQ ID NO: 696931 - DNA, 33 bp, Homo sapien
atgtgttagcatttataaaacattcaagggtag

SEQ ID NO: 696932 - DNA, 33 bp, Homo sapien
atgtgttagcatttattaaacattcaagggtag

SEQ ID NO: 696933 - DNA, 33 bp, Homo sapien
tacaactggattactaaattacttcaactccaa

SEQ ID NO: 696934 - DNA, 33 bp, Homo sapien
tacaactggattactacattacttcaactccaa

SEQ ID NO: 696935 - DNA, 33 bp, Homo sapien
tgaattttcaatgcctcaattcttagttcaatt

SEQ ID NO: 696936 - DNA, 33 bp, Homo sapien
tgaattttcaatgcctgaattcttagttcaatt

SEQ ID NO: 696937 - DNA, 33 bp, Homo sapien
cctcactccataacaactattgattcagtcaga

SEQ ID NO: 696938 - DNA, 33 bp, Homo sapien
cctcactccataacaagtattgattcagtcaga

SEQ ID NO: 696939 - DNA, 33 bp, Homo sapien
atgctacaaacaaccactaaacttcagtaaaac

SEQ ID NO: 696940 - DNA, 33 bp, Homo sapien
atgctacaaacaaccattaaacttcagtaaaac

SEQ ID NO: 696941 - DNA, 33 bp, Homo sapien
accatttactaactcaagaattaagccgtgatg

SEQ ID NO: 696942 - DNA, 33 bp, Homo sapien
accatttactaactcaggaattaagccgtgatg

SEQ ID NO: 696943 - DNA, 33 bp, Homo sapien
tgatgcagatcctgaaacaggttgatattttta

SEQ ID NO: 696944 - DNA, 33 bp, Homo sapien
tgatgcagatcctgaaccaggttgatattttta

SEQ ID NO: 696945 - DNA, 33 bp, Homo sapien
tatctagagcttattacggtggtgttttaggtg

SEQ ID NO: 696946 - DNA, 33 bp, Homo sapien
tatctagagcttattatggtggtgttttaggtg

SEQ ID NO: 696947 - DNA, 33 bp, Homo sapien
aagatgtttcatatgaccatgtcttctacctta

SEQ ID NO: 696948 - DNA, 33 bp, Homo sapien
aagatgtttcatatgatcatgtcttctacctta

SEQ ID NO: 696949 - DNA, 33 bp, Homo sapien
agcagtagaaagattacaccacaaggaaaagtt

SEQ ID NO: 696950 - DNA, 33 bp, Homo sapien
agcagtagaaagattataccacaaggaaaagtt

SEQ ID NO: 696951 - DNA, 33 bp, Homo sapien
caatttgagagaaaaagtcataaagtttaaaga

SEQ ID NO: 696952 - DNA, 33 bp, Homo sapien
caatttgagagaaaaattcataaagtttaaaga

SEQ ID NO: 696953 - DNA, 33 bp, Homo sapien
gtttcatgtatttggactatttctcccaattat

SEQ ID NO: 696954 - DNA, 33 bp, Homo sapien
gtttcatgtatttggattatttctcccaattat

SEQ ID NO: 696955 - DNA, 33 bp, Homo sapien
aagagatgagaaaatgcaggaaatgaatattgg

SEQ ID NO: 696956 - DNA, 33 bp, Homo sapien
aagagatgagaaaatggaggaaatgaatattgg

SEQ ID NO: 696957 - DNA, 33 bp, Homo sapien
ttggtgtggacttagactaacagcaattataca

SEQ ID NO: 696958 - DNA, 33 bp, Homo sapien
ttggtgtggacttagagtaacagcaattataca

SEQ ID NO: 696959 - DNA, 33 bp, Homo sapien
aagtgttaataatgacaaagctgagagccatac

SEQ ID NO: 696960 - DNA, 33 bp, Homo sapien
aagtgttaataatgacgaagctgagagccatac

SEQ ID NO: 696961 - DNA, 33 bp, Homo sapien
tatgttcatggtaaagcaagaaatatgaaaagt

SEQ ID NO: 696962 - DNA, 33 bp, Homo sapien
tatgttcatggtaaagtaagaaatatgaaaagt

SEQ ID NO: 696963 - DNA, 33 bp, Homo sapien
caatggactttgtgaacgaagatgtcaattagc

SEQ ID NO: 696964 - DNA, 33 bp, Homo sapien
caatggactttgtgaatgaagatgtcaattagc

SEQ ID NO: 696965 - DNA, 33 bp, Homo sapien
tggggtacgtcttcaacctctgaggtttcaagc

SEQ ID NO: 696966 - DNA, 33 bp, Homo sapien
tggggtacgtcttcaagctctgaggtttcaagc

SEQ ID NO: 696967 - DNA, 33 bp, Homo sapien
tatgtgaacataagcacaaacccaaaggtcatt

SEQ ID NO: 696968 - DNA, 33 bp, Homo sapien
tatgtgaacataagcataaacccaaaggtcatt

SEQ ID NO: 696969 - DNA, 33 bp, Homo sapien
ggaaatagccaacagaagacttgggtgagaccc

SEQ ID NO: 696970 - DNA, 33 bp, Homo sapien
ggaaatagccaacagaggacttgggtgagaccc

SEQ ID NO: 696971 - DNA, 33 bp, Homo sapien
tacaaacaagtaaaaaattccatgcttatggat

SEQ ID NO: 696972 - DNA, 33 bp, Homo sapien
tacaaacaagtaaaaagttccatgcttatggat

SEQ ID NO: 696973 - DNA, 33 bp, Homo sapien
agtatttgcacaatagcatcaaaacttcacata

SEQ ID NO: 696974 - DNA, 33 bp, Homo sapien
agtatttgcacaataggatcaaaacttcacata

SEQ ID NO: 696975 - DNA, 33 bp, Homo sapien
caacactcaatatataagtgcatttatttgtgt

SEQ ID NO: 696976 - DNA, 33 bp, Homo sapien
caacactcaatatatatgtgcatttatttgtgt

SEQ ID NO: 696977 - DNA, 33 bp, Homo sapien
taagtagtgactctagaatctgtcctgaaattt

SEQ ID NO: 696978 - DNA, 33 bp, Homo sapien
taagtagtgactctaggatctgtcctgaaattt

SEQ ID NO: 696979 - DNA, 33 bp, Homo sapien
atgttatctgtcttcaaccatgtaattgataca

SEQ ID NO: 696980 - DNA, 33 bp, Homo sapien
atgttatctgtcttcatccatgtaattgataca

SEQ ID NO: 696981 - DNA, 33 bp, Homo sapien
agacaagattccattcactctgagcagatttcc

SEQ ID NO: 696982 - DNA, 33 bp, Homo sapien
agacaagattccattcgctctgagcagatttcc

SEQ ID NO: 696983 - DNA, 33 bp, Homo sapien
aatgggccttagcagacaggttggcgtaatggt

SEQ ID NO: 696984 - DNA, 33 bp, Homo sapien
aatgggccttagcagagaggttggcgtaatggt

SEQ ID NO: 696985 - DNA, 33 bp, Homo sapien
tattcagaaaccatcaacattgaagcaaaatcc

SEQ ID NO: 696986 - DNA, 33 bp, Homo sapien
tattcagaaaccatcatcattgaagcaaaatcc

SEQ ID NO: 696987 - DNA, 33 bp, Homo sapien
gcaataacattatgcccgaaaaagtatatacat

SEQ ID NO: 696988 - DNA, 33 bp, Homo sapien
gcaataacattatgcctgaaaaagtatatacat

SEQ ID NO: 696989 - DNA, 33 bp, Homo sapien
agattcaaacaagtaggcagtaaaaaagtcaca

SEQ ID NO: 696990 - DNA, 33 bp, Homo sapien
agattcaaacaagtagtcagtaaaaaagtcaca

SEQ ID NO: 696991 - DNA, 33 bp, Homo sapien
ttcctagctcactggacctttttaattgagaac

SEQ ID NO: 696992 - DNA, 33 bp, Homo sapien
ttcctagctcactggatctttttaattgagaac

SEQ ID NO: 696993 - DNA, 33 bp, Homo sapien
tagatataattgtggacatgcaaagagcgcacc

SEQ ID NO: 696994 - DNA, 33 bp, Homo sapien
tagatataattgtggatatgcaaagagcgcacc

SEQ ID NO: 696995 - DNA, 33 bp, Homo sapien
aaatttttattggataacagtgcgatgttttat

SEQ ID NO: 696996 - DNA, 33 bp, Homo sapien
aaatttttattggatagcagtgcgatgttttat

SEQ ID NO: 696997 - DNA, 33 bp, Homo sapien
tgaccttggccacaataattaccttttatgttt

SEQ ID NO: 696998 - DNA, 33 bp, Homo sapien
tgaccttggccacaatgattaccttttatgttt

SEQ ID NO: 696999 - DNA, 33 bp, Homo sapien
ccaaataatcaagcaacaataattccttttcag

SEQ ID NO: 697000 - DNA, 33 bp, Homo sapien
ccaaataatcaagcaagaataattccttttcag

SEQ ID NO: 697001 - DNA, 33 bp, Homo sapien
ttaagttttggagttacgtttatgataatcatt

SEQ ID NO: 697002 - DNA, 33 bp, Homo sapien
ttaagttttggagttatgtttatgataatcatt

SEQ ID NO: 697003 - DNA, 33 bp, Homo sapien
gttcagattactcaacaaaataagaacaagttt

SEQ ID NO: 697004 - DNA, 33 bp, Homo sapien
gttcagattactcaacgaaataagaacaagttt

SEQ ID NO: 697005 - DNA, 33 bp, Homo sapien
gcaatgcaaactaaaccgccaagtaaaatatct

SEQ ID NO: 697006 - DNA, 33 bp, Homo sapien
gcaatgcaaactaaactgccaagtaaaatatct

SEQ ID NO: 697007 - DNA, 33 bp, Homo sapien
ttcttgttgagagtgacagaaggaagggacaag

SEQ ID NO: 697008 - DNA, 33 bp, Homo sapien
ttcttgttgagagtgagagaaggaagggacaag

SEQ ID NO: 697009 - DNA, 33 bp, Homo sapien
gaacatattttgatgccatatgattcagataca

SEQ ID NO: 697010 - DNA, 33 bp, Homo sapien
gaacatattttgatgctatatgattcagataca

SEQ ID NO: 697011 - DNA, 33 bp, Homo sapien
gataaaaggactcataatacttgatctgtcttt

SEQ ID NO: 697012 - DNA, 33 bp, Homo sapien
gataaaaggactcatagtacttgatctgtcttt

SEQ ID NO: 697013 - DNA, 33 bp, Homo sapien
cattaagttcagctcaggcttactgctttccat

SEQ ID NO: 697014 - DNA, 33 bp, Homo sapien
cattaagttcagctcatgcttactgctttccat

SEQ ID NO: 697015 - DNA, 33 bp, Homo sapien
catacgaaacacgcaaaaaatactagagtcatt

SEQ ID NO: 697016 - DNA, 33 bp, Homo sapien
catacgaaacacgcaacaaatactagagtcatt

SEQ ID NO: 697017 - DNA, 33 bp, Homo sapien
gtgttaagttttcatgcaatatcttgtactgtt

SEQ ID NO: 697018 - DNA, 33 bp, Homo sapien
gtgttaagttttcatggaatatcttgtactgtt

SEQ ID NO: 697019 - DNA, 33 bp, Homo sapien
acaggagaatgacatcaatatcctgataactca

SEQ ID NO: 697020 - DNA, 33 bp, Homo sapien
acaggagaatgacatcgatatcctgataactca

SEQ ID NO: 697021 - DNA, 33 bp, Homo sapien
catgtttatggtctaccgctaagtgaataaaaa

SEQ ID NO: 697022 - DNA, 33 bp, Homo sapien
catgtttatggtctactgctaagtgaataaaaa

SEQ ID NO: 697023 - DNA, 33 bp, Homo sapien
gatacaaattttaatcacctcaattccatgata

SEQ ID NO: 697024 - DNA, 33 bp, Homo sapien
gatacaaattttaatcgcctcaattccatgata

SEQ ID NO: 697025 - DNA, 33 bp, Homo sapien
gccaattgagcttataggttgagaagaagaagt

SEQ ID NO: 697026 - DNA, 33 bp, Homo sapien
gccaattgagcttatatgttgagaagaagaagt

SEQ ID NO: 697027 - DNA, 33 bp, Homo sapien
agtaggcttcctagcaatatgattcaatcagcc

SEQ ID NO: 697028 - DNA, 33 bp, Homo sapien
agtaggcttcctagcattatgattcaatcagcc

SEQ ID NO: 697029 - DNA, 33 bp, Homo sapien
tgtggtgaaatgaaaccgttcaaaagacacttt

SEQ ID NO: 697030 - DNA, 33 bp, Homo sapien
tgtggtgaaatgaaactgttcaaaagacacttt

SEQ ID NO: 697031 - DNA, 33 bp, Homo sapien
tatgtatagtagagcaataagcctatacaacaa

SEQ ID NO: 697032 - DNA, 33 bp, Homo sapien
tatgtatagtagagcagtaagcctatacaacaa

SEQ ID NO: 697033 - DNA, 33 bp, Homo sapien
tcaagtgaccgcaagccctaatttcaccaaata

SEQ ID NO: 697034 - DNA, 33 bp, Homo sapien
tcaagtgaccgcaagctctaatttcaccaaata

SEQ ID NO: 697035 - DNA, 33 bp, Homo sapien
agtcttcccatatcaaaacccttaactttaatc

SEQ ID NO: 697036 - DNA, 33 bp, Homo sapien
agtcttcccatatcaagacccttaactttaatc

SEQ ID NO: 697037 - DNA, 33 bp, Homo sapien
ctgctcagaatctactaaaacatatcctgtaaa

SEQ ID NO: 697038 - DNA, 33 bp, Homo sapien
ctgctcagaatctactgaaacatatcctgtaaa

SEQ ID NO: 697039 - DNA, 33 bp, Homo sapien
tgctgaatccacactactaaaaattcaatacac

SEQ ID NO: 697040 - DNA, 33 bp, Homo sapien
tgctgaatccacactattaaaaattcaatacac

SEQ ID NO: 697041 - DNA, 33 bp, Homo sapien
ttattcatcattaaacagttctgattgcattat

SEQ ID NO: 697042 - DNA, 33 bp, Homo sapien
ttattcatcattaaacggttctgattgcattat

SEQ ID NO: 697043 - DNA, 33 bp, Homo sapien
aatatatgagactcaagttctacatctactaaa

SEQ ID NO: 697044 - DNA, 33 bp, Homo sapien
aatatatgagactcaatttctacatctactaaa

SEQ ID NO: 697045 - DNA, 33 bp, Homo sapien
atcatccactacaaagacacacttaggtaccta

SEQ ID NO: 697046 - DNA, 33 bp, Homo sapien
atcatccactacaaaggcacacttaggtaccta

SEQ ID NO: 697047 - DNA, 33 bp, Homo sapien
ttataatacaggttagaaaagtaagcatcgttg

SEQ ID NO: 697048 - DNA, 33 bp, Homo sapien
ttataatacaggttaggaaagtaagcatcgttg

SEQ ID NO: 697049 - DNA, 33 bp, Homo sapien
atttgttataggatgacaatactgatgaaggag

SEQ ID NO: 697050 - DNA, 33 bp, Homo sapien
atttgttataggatgataatactgatgaaggag

SEQ ID NO: 697051 - DNA, 33 bp, Homo sapien
tacatatgctttttgcactaatggttaaatagt

SEQ ID NO: 697052 - DNA, 33 bp, Homo sapien
tacatatgctttttgctctaatggttaaatagt

SEQ ID NO: 697053 - DNA, 33 bp, Homo sapien
gaagatgacaaaaacaatgacctcaatccagca

SEQ ID NO: 697054 - DNA, 33 bp, Homo sapien
gaagatgacaaaaacagtgacctcaatccagca

SEQ ID NO: 697055 - DNA, 33 bp, Homo sapien
ttcttatagctaatatcactcataggaaaaaca

SEQ ID NO: 697056 - DNA, 33 bp, Homo sapien
ttcttatagctaatatgactcataggaaaaaca

SEQ ID NO: 697057 - DNA, 33 bp, Homo sapien
acttggtacagtggtcaacaaaaccttgaaatg

SEQ ID NO: 697058 - DNA, 33 bp, Homo sapien
acttggtacagtggtcgacaaaaccttgaaatg

SEQ ID NO: 697059 - DNA, 33 bp, Homo sapien; identical to SEQ ID NO: 697057

SEQ ID NO: 697060 - DNA, 33 bp, Homo sapien; identical to SEQ ID NO: 697058

SEQ ID NO: 697061 - DNA, 33 bp, Homo sapien
tcttgcactctgaccaccttcaggtacttgtat

SEQ ID NO: 697062 - DNA, 33 bp, Homo sapien
tcttgcactctgaccatcttcaggtacttgtat

SEQ ID NO: 697063 - DNA, 33 bp, Homo sapien
cagtatttagcagctacctgatttcttcttcga

SEQ ID NO: 697064 - DNA, 33 bp, Homo sapien
cagtatttagcagctatctgatttcttcttcga

SEQ ID NO: 697065 - DNA, 33 bp, Homo sapien
aatccatgacgcttgtaagtggagctatttttc

SEQ ID NO: 697066 - DNA, 33 bp, Homo sapien
aatccatgacgcttgtgagtggagctatttttc

SEQ ID NO: 697067 - DNA, 33 bp, Homo sapien
gtggctgtattttgaaaaggtaggtgaacaagg

SEQ ID NO: 697068 - DNA, 33 bp, Homo sapien
gtggctgtattttgaataggtaggtgaacaagg

SEQ ID NO: 697069 - DNA, 33 bp, Homo sapien
cttctccacacttctagaatgtacacttctgag

SEQ ID NO: 697070 - DNA, 33 bp, Homo sapien
cttctccacacttctataatgtacacttctgag

SEQ ID NO: 697071 - DNA, 33 bp, Homo sapien
aagaaagcctgcaacaaagttaaatacttaagc

SEQ ID NO: 697072 - DNA, 33 bp, Homo sapien
aagaaagcctgcaacagagttaaatacttaagc

SEQ ID NO: 697073 - DNA, 33 bp, Homo sapien
gttgaacctgaggttaagacttgtgcaaatgca

SEQ ID NO: 697074 - DNA, 33 bp, Homo sapien
gttgaacctgaggttacgacttgtgcaaatgca

SEQ ID NO: 697075 - DNA, 33 bp, Homo sapien
atttctttgaagatgaaaaaaattatgtgcagg

SEQ ID NO: 697076 - DNA, 33 bp, Homo sapien
atttctttgaagatgacaaaaattatgtgcagg

SEQ ID NO: 697077 - DNA, 33 bp, Homo sapien
tggtcagtggtgattaacatttttcatgtgtct

SEQ ID NO: 697078 - DNA, 33 bp, Homo sapien
tggtcagtggtgattagcatttttcatgtgtct

SEQ ID NO: 697079 - DNA, 33 bp, Homo sapien
tgatgtattcaaattacatagtgcagatgagtc

SEQ ID NO: 697080 - DNA, 33 bp, Homo sapien
tgatgtattcaaattatatagtgcagatgagtc

SEQ ID NO: 697081 - DNA, 33 bp, Homo sapien
ttcatatactgaacaaccttgtactctggacag

SEQ ID NO: 697082 - DNA, 33 bp, Homo sapien
ttcatatactgaacaatcttgtactctggacag

SEQ ID NO: 697083 - DNA, 33 bp, Homo sapien
caacgtgcctggcccagcaattatttatgtaac

SEQ ID NO: 697084 - DNA, 33 bp, Homo sapien
caacgtgcctggcccatcaattatttatgtaac

SEQ ID NO: 697085 - DNA, 33 bp, Homo sapien
ctgactattatccctaggaatcaagaaatggaa

SEQ ID NO: 697086 - DNA, 33 bp, Homo sapien
ctgactattatccctatgaatcaagaaatggaa

SEQ ID NO: 697087 - DNA, 33 bp, Homo sapien
attaataacttgtacaccagcatattttattca

SEQ ID NO: 697088 - DNA, 33 bp, Homo sapien
attaataacttgtacagcagcatattttattca

SEQ ID NO: 697089 - DNA, 33 bp, Homo sapien
ctgtctagctagagaaatgtaaacacaccaatc

SEQ ID NO: 697090 - DNA, 33 bp, Homo sapien
ctgtctagctagagaattgtaaacacaccaatc

SEQ ID NO: 697091 - DNA, 33 bp, Homo sapien
cgcagaaatacaaaaccgatcccttctgaggta

SEQ ID NO: 697092 - DNA, 33 bp, Homo sapien
cgcagaaatacaaaactgatcccttctgaggta

SEQ ID NO: 697093 - DNA, 33 bp, Homo sapien
atgggttgcaaagacacagccttaactgactct

SEQ ID NO: 697094 - DNA, 33 bp, Homo sapien
atgggttgcaaagacatagccttaactgactct

SEQ ID NO: 697095 - DNA, 33 bp, Homo sapien
tggaaagataaaagtgcaatatagtcttcatca

SEQ ID NO: 697096 - DNA, 33 bp, Homo sapien
tggaaagataaaagtggaatatagtcttcatca

SEQ ID NO: 697097 - DNA, 33 bp, Homo sapien
ctctttctaattctacagcaagaaatctcggca

SEQ ID NO: 697098 - DNA, 33 bp, Homo sapien
ctctttctaattctacggcaagaaatctcggca

SEQ ID NO: 697099 - DNA, 33 bp, Homo sapien
atttggaaagaaccgtcaagccttgaggacaag

SEQ ID NO: 697100 - DNA, 33 bp, Homo sapien
atttggaaagaaccgttaagccttgaggacaag

SEQ ID NO: 697101 - DNA, 33 bp, Homo sapien
gcacttaaggaatgtaaattgcagctgaagaaa

SEQ ID NO: 697102 - DNA, 33 bp, Homo sapien
gcacttaaggaatgtagattgcagctgaagaaa

SEQ ID NO: 697103 - DNA, 33 bp, Homo sapien
tatagtgagtgtttagaagtatctcgttgtttc

SEQ ID NO: 697104 - DNA, 33 bp, Homo sapien
tatagtgagtgtttagtagtatctcgttgtttc

SEQ ID NO: 697105 - DNA, 33 bp, Homo sapien
tgttttctgtaccagacataagctccagattcc

SEQ ID NO: 697106 - DNA, 33 bp, Homo sapien
tgttttctgtaccagatataagctccagattcc

SEQ ID NO: 697107 - DNA, 33 bp, Homo sapien
atctaaccctcttacccgattcttttcttgttg

SEQ ID NO: 697108 - DNA, 33 bp, Homo sapien
atctaaccctcttacctgattcttttcttgttg

SEQ ID NO: 697109 - DNA, 33 bp, Homo sapien
tcttttcatagtgcaaagtgaaattgataaata

SEQ ID NO: 697110 - DNA, 33 bp, Homo sapien
tcttttcatagtgcaatgtgaaattgataaata

SEQ ID NO: 697111 - DNA, 33 bp, Homo sapien
aaattatcttccaaacaagtttatgagtggcaa

SEQ ID NO: 697112 - DNA, 33 bp, Homo sapien
aaattatcttccaaaccagtttatgagtggcaa

SEQ ID NO: 697113 - DNA, 33 bp, Homo sapien
ggtttatttttccataaccttctgagtgacaca

SEQ ID NO: 697114 - DNA, 33 bp, Homo sapien
ggtttatttttccatacccttctgagtgacaca

SEQ ID NO: 697115 - DNA, 33 bp, Homo sapien
agaaattcatatgcacgagagtgaaaacaggaa

SEQ ID NO: 697116 - DNA, 33 bp, Homo sapien
agaaattcatatgcactagagtgaaaacaggaa

SEQ ID NO: 697117 - DNA, 33 bp, Homo sapien
agaatgcctaccgcaaactatgatcacaactgt

SEQ ID NO: 697118 - DNA, 33 bp, Homo sapien
agaatgcctaccgcaatctatgatcacaactgt

SEQ ID NO: 697119 - DNA, 33 bp, Homo sapien
gatatatgaaaaggtgcatatacagatggaggt

SEQ ID NO: 697120 - DNA, 33 bp, Homo sapien
gatatatgaaaaggtggatatacagatggaggt

SEQ ID NO: 697121 - DNA, 33 bp, Homo sapien
agttctagaagttagaagtctgaaatcaagatg

SEQ ID NO: 697122 - DNA, 33 bp, Homo sapien
agttctagaagttagaggtctgaaatcaagatg

SEQ ID NO: 697123 - DNA, 33 bp, Homo sapien
tgatagatattttaaaaagctcaattgtggtaa

SEQ ID NO: 697124 - DNA, 33 bp, Homo sapien
tgatagatattttaaagagctcaattgtggtaa

SEQ ID NO: 697125 - DNA, 33 bp, Homo sapien
tctggcagaagctcaaattaagacactggaaca

SEQ ID NO: 697126 - DNA, 33 bp, Homo sapien
tctggcagaagctcaagttaagacactggaaca

SEQ ID NO: 697127 - DNA, 33 bp, Homo sapien
atataaagttcagctacgcacttactactacag

SEQ ID NO: 697128 - DNA, 33 bp, Homo sapien
atataaagttcagctatgcacttactactacag

SEQ ID NO: 697129 - DNA, 33 bp, Homo sapien
agtgtattggacctgacgtagtgtacataaagt

SEQ ID NO: 697130 - DNA, 33 bp, Homo sapien
agtgtattggacctgatgtagtgtacataaagt

SEQ ID NO: 697131 - DNA, 33 bp, Homo sapien
cagctacaagggtcataaaggtagctgaatgaa

SEQ ID NO: 697132 - DNA, 33 bp, Homo sapien
cagctacaagggtcatgaaggtagctgaatgaa

SEQ ID NO: 697133 - DNA, 33 bp, Homo sapien
tagtctaaaatataaacgggagtcttgtcaaat

SEQ ID NO: 697134 - DNA, 33 bp, Homo sapien
tagtctaaaatataaatgggagtcttgtcaaat

SEQ ID NO: 697135 - DNA, 33 bp, Homo sapien
atagtagtggatgatccgaaacttcgcttctat

SEQ ID NO: 697136 - DNA, 33 bp, Homo sapien
atagtagtggatgatctgaaacttcgcttctat

SEQ ID NO: 697137 - DNA, 33 bp, Homo sapien
tagaaatgtatgaaaacagacagatgttttaaa

SEQ ID NO: 697138 - DNA, 33 bp, Homo sapien
tagaaatgtatgaaaatagacagatgttttaaa

SEQ ID NO: 697139 - DNA, 33 bp, Homo sapien
atcctagcgaaatatacccttgggataaaaaca

SEQ ID NO: 697140 - DNA, 33 bp, Homo sapien
atcctagcgaaatatagccttgggataaaaaca

SEQ ID NO: 697141 - DNA, 33 bp, Homo sapien
atccctagttccataacgttgcctttgggtcat

SEQ ID NO: 697142 - DNA, 33 bp, Homo sapien
atccctagttccataatgttgcctttgggtcat

SEQ ID NO: 697143 - DNA, 33 bp, Homo sapien
ttgcctgccagaacaagtctcaacacactttaa

SEQ ID NO: 697144 - DNA, 33 bp, Homo sapien
ttgcctgccagaacaattctcaacacactttaa

SEQ ID NO: 697145 - DNA, 33 bp, Homo sapien
atccattgcttactcacctccaactatactagc

SEQ ID NO: 697146 - DNA, 33 bp, Homo sapien
atccattgcttactcatctccaactatactagc

SEQ ID NO: 697147 - DNA, 33 bp, Homo sapien
gatagagcaggtttcaagataaagagcaaaaat

SEQ ID NO: 697148 - DNA, 33 bp, Homo sapien
gatagagcaggtttcaggataaagagcaaaaat

SEQ ID NO: 697149 - DNA, 33 bp, Homo sapien
gatcctataccttgaaatcatatataatctgtc

SEQ ID NO: 697150 - DNA, 33 bp, Homo sapien
gatcctataccttgaagtcatatataatctgtc

SEQ ID NO: 697151 - DNA, 33 bp, Homo sapien
aagggatttgttctcacggcagaatcacgttag

SEQ ID NO: 697152 - DNA, 33 bp, Homo sapien
aagggatttgttctcatggcagaatcacgttag

SEQ ID NO: 697153 - DNA, 33 bp, Homo sapien
atattggtggtgatggacaagaatatgttagtc

SEQ ID NO: 697154 - DNA, 33 bp, Homo sapien
atattggtggtgatgggcaagaatatgttagtc

SEQ ID NO: 697155 - DNA, 33 bp, Homo sapien
gccttgagccctagaccgtacctctgatagaac

SEQ ID NO: 697156 - DNA, 33 bp, Homo sapien
gccttgagccctagactgtacctctgatagaac

SEQ ID NO: 697157 - DNA, 33 bp, Homo sapien
cagttccatttgaagacgtgaaataactaattt

SEQ ID NO: 697158 - DNA, 33 bp, Homo sapien
cagttccatttgaagatgtgaaataactaattt

SEQ ID NO: 697159 - DNA, 33 bp, Homo sapien
agtggattggcacaacaacttttgaattcattg

SEQ ID NO: 697160 - DNA, 33 bp, Homo sapien
agtggattggcacaacgacttttgaattcattg

SEQ ID NO: 697161 - DNA, 33 bp, Homo sapien
aagtcagttaacaaaaatcttctctattcattt

SEQ ID NO: 697162 - DNA, 33 bp, Homo sapien
aagtcagttaacaaaagtcttctctattcattt

SEQ ID NO: 697163 - DNA, 33 bp, Homo sapien
ttttttcttggaaacacactttgcaacccaaat

SEQ ID NO: 697164 - DNA, 33 bp, Homo sapien
ttttttcttggaaacatactttgcaacccaaat

SEQ ID NO: 697165 - DNA, 33 bp, Homo sapien
gtgtaaactatctgaaagttattacggttagag

SEQ ID NO: 697166 - DNA, 33 bp, Homo sapien
gtgtaaactatctgaatgttattacggttagag

SEQ ID NO: 697167 - DNA, 33 bp, Homo sapien
taaaaagaaaccacaacggcttattccaacatt

SEQ ID NO: 697168 - DNA, 33 bp, Homo sapien
taaaaagaaaccacaatggcttattccaacatt

SEQ ID NO: 697169 - DNA, 33 bp, Homo sapien
ttgagttgctgttgaacaggcataaagtttctg

SEQ ID NO: 697170 - DNA, 33 bp, Homo sapien
ttgagttgctgttgaataggcataaagtttctg

SEQ ID NO: 697171 - DNA, 33 bp, Homo sapien
ttatgccatagttccaacatctttaaaattggc

SEQ ID NO: 697172 - DNA, 33 bp, Homo sapien
ttatgccatagttccagcatctttaaaattggc

SEQ ID NO: 697173 - DNA, 33 bp, Homo sapien
attaggggctggcgaactaagacttgctggcaa

SEQ ID NO: 697174 - DNA, 33 bp, Homo sapien
attaggggctggcgaattaagacttgctggcaa

SEQ ID NO: 697175 - DNA, 33 bp, Homo sapien
ttctgttgcttaataacacattttgggattttt

SEQ ID NO: 697176 - DNA, 33 bp, Homo sapien
ttctgttgcttaataatacattttgggattttt

SEQ ID NO: 697177 - DNA, 33 bp, Homo sapien
gttttagcaattcaagaaacactctagttcaat

SEQ ID NO: 697178 - DNA, 33 bp, Homo sapien
gttttagcaattcaagtaacactctagttcaat

SEQ ID NO: 697179 - DNA, 33 bp, Homo sapien
tcaggtcatgaatgtacgaggtactattaccag

SEQ ID NO: 697180 - DNA, 33 bp, Homo sapien
tcaggtcatgaatgtatgaggtactattaccag

SEQ ID NO: 697181 - DNA, 33 bp, Homo sapien
tttctctgcgtactaaagatatagcctttaaga

SEQ ID NO: 697182 - DNA, 33 bp, Homo sapien
tttctctgcgtactaaggatatagcctttaaga

SEQ ID NO: 697183 - DNA, 33 bp, Homo sapien
gtggaggctgtggtagccatcgggattcttcct

SEQ ID NO: 697184 - DNA, 33 bp, Homo sapien
gtggaggctgtggtagtcatcgggattcttcct

SEQ ID NO: 697185 - DNA, 33 bp, Homo sapien
tttaagatttgatgaacaccctgctggattttg

SEQ ID NO: 697186 - DNA, 33 bp, Homo sapien
tttaagatttgatgaataccctgctggattttg

SEQ ID NO: 697187 - DNA, 33 bp, Homo sapien
cagatggcagtctcgagattcaggaaggaagaa

SEQ ID NO: 697188 - DNA, 33 bp, Homo sapien
cagatggcagtctcgatattcaggaaggaagaa

SEQ ID NO: 697189 - DNA, 33 bp, Homo sapien
tatcctatggccaagactccagtcatgaagggg

SEQ ID NO: 697190 - DNA, 33 bp, Homo sapien
tatcctatggccaagattccagtcatgaagggg

SEQ ID NO: 697191 - DNA, 33 bp, Homo sapien
actagacaggcttccaaaaggacttgaatcact

SEQ ID NO: 697192 - DNA, 33 bp, Homo sapien
actagacaggcttccacaaggacttgaatcact

SEQ ID NO: 697193 - DNA, 33 bp, Homo sapien
gaagagatcttcagaacgaaaagaccaaatgta

SEQ ID NO: 697194 - DNA, 33 bp, Homo sapien
gaagagatcttcagaaggaaaagaccaaatgta

SEQ ID NO: 697195 - DNA, 33 bp, Homo sapien
tggagcagagaccagaagtattattacttgcat

SEQ ID NO: 697196 - DNA, 33 bp, Homo sapien
tggagcagagaccagaggtattattacttgcat

SEQ ID NO: 697197 - DNA, 33 bp, Homo sapien
catattattactcttacgtacacttcgctacac

SEQ ID NO: 697198 - DNA, 33 bp, Homo sapien
catattattactcttatgtacacttcgctacac

SEQ ID NO: 697199 - DNA, 33 bp, Homo sapien
gaacatggtttctcaacacctgaccaaaataca

SEQ ID NO: 697200 - DNA, 33 bp, Homo sapien
gaacatggtttctcaatacctgaccaaaataca

SEQ ID NO: 697201 - DNA, 33 bp, Homo sapien
ttagacccattaatcaacctcagcaactcagct

SEQ ID NO: 697202 - DNA, 33 bp, Homo sapien
ttagacccattaatcatcctcagcaactcagct

SEQ ID NO: 697203 - DNA, 33 bp, Homo sapien
acaatagaatctctagaaaaggaaatgagtaat

SEQ ID NO: 697204 - DNA, 33 bp, Homo sapien
acaatagaatctctagcaaaggaaatgagtaat

SEQ ID NO: 697205 - DNA, 33 bp, Homo sapien
taatctttgccagtaacttaatccagtaaaaga

SEQ ID NO: 697206 - DNA, 33 bp, Homo sapien
taatctttgccagtaatttaatccagtaaaaga

SEQ ID NO: 697207 - DNA, 33 bp, Homo sapien
tggtcttctgcaatgaataagagcttggaactt

SEQ ID NO: 697208 - DNA, 33 bp, Homo sapien
tggtcttctgcaatgagtaagagcttggaactt

SEQ ID NO: 697209 - DNA, 33 bp, Homo sapien
ccacctattcctggaaatctagaaggaacacat

SEQ ID NO: 697210 - DNA, 33 bp, Homo sapien
ccacctattcctggaagtctagaaggaacacat

SEQ ID NO: 697211 - DNA, 33 bp, Homo sapien
catggccaaaacagtaagagaacgaaaatataa

SEQ ID NO: 697212 - DNA, 33 bp, Homo sapien
catggccaaaacagtatgagaacgaaaatataa

SEQ ID NO: 697213 - DNA, 33 bp, Homo sapien
acaaattgatttcatacgtgctacttatcttaa

SEQ ID NO: 697214 - DNA, 33 bp, Homo sapien
acaaattgatttcatatgtgctacttatcttaa

SEQ ID NO: 697215 - DNA, 33 bp, Homo sapien
tctgtgaatgtaatagccaattgtttgaaatat

SEQ ID NO: 697216 - DNA, 33 bp, Homo sapien
tctgtgaatgtaatagtcaattgtttgaaatat

SEQ ID NO: 697217 - DNA, 33 bp, Homo sapien
aacaattgttctagtccaacacacacacacaaa

SEQ ID NO: 697218 - DNA, 33 bp, Homo sapien
aacaattgttctagtctaacacacacacacaaa

SEQ ID NO: 697219 - DNA, 33 bp, Homo sapien
ttcactgagtaagagacgaatacacaacaaatt

SEQ ID NO: 697220 - DNA, 33 bp, Homo sapien
ttcactgagtaagagatgaatacacaacaaatt

SEQ ID NO: 697221 - DNA, 33 bp, Homo sapien
cccgcactctcttgctgacacacttactcctgc

SEQ ID NO: 697222 - DNA, 33 bp, Homo sapien
cccgcactctcttgcttacacacttactcctgc

SEQ ID NO: 697223 - DNA, 33 bp, Homo sapien
tatttcacttattttcacgatcatttgttcaga

SEQ ID NO: 697224 - DNA, 33 bp, Homo sapien
tatttcacttattttcgcgatcatttgttcaga

SEQ ID NO: 697225 - DNA, 33 bp, Homo sapien
atattcaagatgaaagcatcatatgtaacctaa

SEQ ID NO: 697226 - DNA, 33 bp, Homo sapien
atattcaagatgaaagtatcatatgtaacctaa

SEQ ID NO: 697227 - DNA, 33 bp, Homo sapien
agtgttatcacaaaagacaaaacaaagcaatga

SEQ ID NO: 697228 - DNA, 33 bp, Homo sapien
agtgttatcacaaaaggcaaaacaaagcaatga

SEQ ID NO: 697229 - DNA, 33 bp, Homo sapien
aggttcagagacaaagccgccaatcattaatca

SEQ ID NO: 697230 - DNA, 33 bp, Homo sapien
aggttcagagacaaagtcgccaatcattaatca

SEQ ID NO: 697231 - DNA, 33 bp, Homo sapien
cattttttgtttcttaaataagcctcaaagcaa

SEQ ID NO: 697232 - DNA, 33 bp, Homo sapien
cattttttgtttcttacataagcctcaaagcaa

SEQ ID NO: 697233 - DNA, 33 bp, Homo sapien
gaattgtgactgaacacggggaggaatgaacat

SEQ ID NO: 697234 - DNA, 33 bp, Homo sapien
gaattgtgactgaacatggggaggaatgaacat

SEQ ID NO: 697235 - DNA, 33 bp, Homo sapien
gacccttgtatctgaccggtttcagtacttctc

SEQ ID NO: 697236 - DNA, 33 bp, Homo sapien
gacccttgtatctgactggtttcagtacttctc

SEQ ID NO: 697237 - DNA, 33 bp, Homo sapien
tcttacaagctgaagacgctcaaattgcttagt

SEQ ID NO: 697238 - DNA, 33 bp, Homo sapien
tcttacaagctgaagatgctcaaattgcttagt

SEQ ID NO: 697239 - DNA, 33 bp, Homo sapien
cttctgtaaggggaaaataagctgattgttgtc

SEQ ID NO: 697240 - DNA, 33 bp, Homo sapien
cttctgtaaggggaaagtaagctgattgttgtc

SEQ ID NO: 697241 - DNA, 33 bp, Homo sapien
ttgacagaaagcaaacaagaataattgtctacc

SEQ ID NO: 697242 - DNA, 33 bp, Homo sapien
ttgacagaaagcaaacgagaataattgtctacc

SEQ ID NO: 697243 - DNA, 33 bp, Homo sapien
catgtatggtttcattaaatctatatgacttta

SEQ ID NO: 697244 - DNA, 33 bp, Homo sapien
catgtatggtttcattcaatctatatgacttta

SEQ ID NO: 697245 - DNA, 33 bp, Homo sapien
caaattgtggaaaacacctcaatattaagcttt

SEQ ID NO: 697246 - DNA, 33 bp, Homo sapien
caaattgtggaaaacatctcaatattaagcttt

SEQ ID NO: 697247 - DNA, 33 bp, Homo sapien
acgatgacaattgtgcacttagaattataagca

SEQ ID NO: 697248 - DNA, 33 bp, Homo sapien
acgatgacaattgtgcgcttagaattataagca

SEQ ID NO: 697249 - DNA, 33 bp, Homo sapien
aaaagacatccagaataagtgattccaagtgaa

SEQ ID NO: 697250 - DNA, 33 bp, Homo sapien
aaaagacatccagaatgagtgattccaagtgaa

SEQ ID NO: 697251 - DNA, 33 bp, Homo sapien
gaatcagtctatcaataagttaagagagcacat

SEQ ID NO: 697252 - DNA, 33 bp, Homo sapien
gaatcagtctatcaatcagttaagagagcacat

SEQ ID NO: 697253 - DNA, 33 bp, Homo sapien
ttaacaatcttgatagccaagtcttaaggaaag

SEQ ID NO: 697254 - DNA, 33 bp, Homo sapien
ttaacaatcttgatagtcaagtcttaaggaaag

SEQ ID NO: 697255 - DNA, 33 bp, Homo sapien
ttcaaaagtctgcaagccattcaacacatcaga

SEQ ID NO: 697256 - DNA, 33 bp, Homo sapien
ttcaaaagtctgcaagtcattcaacacatcaga

SEQ ID NO: 697257 - DNA, 33 bp, Homo sapien
tttccaaatttaggtcacattattcaatcttct

SEQ ID NO: 697258 - DNA, 33 bp, Homo sapien
tttccaaatttaggtcgcattattcaatcttct

SEQ ID NO: 697259 - DNA, 33 bp, Homo sapien
atattggttaaagatagatgttgctgtatataa

SEQ ID NO: 697260 - DNA, 33 bp, Homo sapien
atattggttaaagatatatgttgctgtatataa

SEQ ID NO: 697261 - DNA, 33 bp, Homo sapien
aactttgttgagaaaactgtaaagtaataaaag

SEQ ID NO: 697262 - DNA, 33 bp, Homo sapien
aactttgttgagaaaattgtaaagtaataaaag

SEQ ID NO: 697263 - DNA, 33 bp, Homo sapien
tggaaatgttcccaaaattcagaggaaagtgtt

SEQ ID NO: 697264 - DNA, 33 bp, Homo sapien
tggaaatgttcccaaagttcagaggaaagtgtt

SEQ ID NO: 697265 - DNA, 33 bp, Homo sapien
ctcaattggaaaaataacactccatcttacact

SEQ ID NO: 697266 - DNA, 33 bp, Homo sapien
ctcaattggaaaaatagcactccatcttacact

SEQ ID NO: 697267 - DNA, 33 bp, Homo sapien
gcactggtatcgaccaaaaattcaatgtcctta

SEQ ID NO: 697268 - DNA, 33 bp, Homo sapien
gcactggtatcgaccagaaattcaatgtcctta

SEQ ID NO: 697269 - DNA, 33 bp, Homo sapien; identical to SEQ ID NO: 697267

SEQ ID NO: 697270 - DNA, 33 bp, Homo sapien; identical to SEQ ID NO: 697268

SEQ ID NO: 697271 - DNA, 33 bp, Homo sapien
tgctccagtatatggacgaccttctgctgggac

SEQ ID NO: 697272 - DNA, 33 bp, Homo sapien
tgctccagtatatggatgaccttctgctgggac

SEQ ID NO: 697273 - DNA, 33 bp, Homo sapien
cttagcataggctctaagtccacatatccagta

SEQ ID NO: 697274 - DNA, 33 bp, Homo sapien
cttagcataggctctatgtccacatatccagta

SEQ ID NO: 697275 - DNA, 33 bp, Homo sapien
tactttctcattgtacagataagtttacaagat

SEQ ID NO: 697276 - DNA, 33 bp, Homo sapien
tactttctcattgtacggataagtttacaagat

SEQ ID NO: 697277 - DNA, 33 bp, Homo sapien
aggcatggctcacctggattctcaaagattatt

SEQ ID NO: 697278 - DNA, 33 bp, Homo sapien
aggcatggctcacctgtattctcaaagattatt

SEQ ID NO: 697279 - DNA, 33 bp, Homo sapien
ttgcaaaatttgatccagaatttacagttatgt

SEQ ID NO: 697280 - DNA, 33 bp, Homo sapien
ttgcaaaatttgatccggaatttacagttatgt

SEQ ID NO: 697281 - DNA, 33 bp, Homo sapien
gatggtagacatgataagaagtaaggcaagagt

SEQ ID NO: 697282 - DNA, 33 bp, Homo sapien
gatggtagacatgatacgaagtaaggcaagagt

SEQ ID NO: 697283 - DNA, 33 bp, Homo sapien; identical to SEQ ID NO: 697281

SEQ ID NO: 697284 - DNA, 33 bp, Homo sapien; identical to SEQ ID NO: 697282

SEQ ID NO: 697285 - DNA, 33 bp, Homo sapien
gagctaatagaggagcaaggataaacaaggtat

SEQ ID NO: 697286 - DNA, 33 bp, Homo sapien
gagctaatagaggagcgaggataaacaaggtat

SEQ ID NO: 697287 - DNA, 33 bp, Homo sapien
tttctggtctaatacaaacagatgggatagaga

SEQ ID NO: 697288 - DNA, 33 bp, Homo sapien
tttctggtctaatacacacagatgggatagaga

SEQ ID NO: 697289 - DNA, 33 bp, Homo sapien
caagtgtctcgatttacagtaagcattgatatc

SEQ ID NO: 697290 - DNA, 33 bp, Homo sapien
caagtgtctcgatttatagtaagcattgatatc

SEQ ID NO: 697291 - DNA, 33 bp, Homo sapien
ccccacagcttaccaaagttagtgataagttct

SEQ ID NO: 697292 - DNA, 33 bp, Homo sapien
ccccacagcttaccaacgttagtgataagttct

SEQ ID NO: 697293 - DNA, 33 bp, Homo sapien
tcattggctttcaaaagtgtacaatccttagaa

SEQ ID NO: 697294 - DNA, 33 bp, Homo sapien
tcattggctttcaaaattgtacaatccttagaa

SEQ ID NO: 697295 - DNA, 33 bp, Homo sapien
aatagtctttcttccaatctgttcaatgtacat

SEQ ID NO: 697296 - DNA, 33 bp, Homo sapien
aatagtctttcttccagtctgttcaatgtacat

SEQ ID NO: 697297 - DNA, 33 bp, Homo sapien
catgttagtggccctacgtttctgagcgatctg

SEQ ID NO: 697298 - DNA, 33 bp, Homo sapien
catgttagtggccctatgtttctgagcgatctg

SEQ ID NO: 697299 - DNA, 33 bp, Homo sapien
cttggtggactaagcccgacaaagccatagtgg

SEQ ID NO: 697300 - DNA, 33 bp, Homo sapien
cttggtggactaagcctgacaaagccatagtgg

SEQ ID NO: 697301 - DNA, 33 bp, Homo sapien
ttgccattctaaaggcagaaaataggccaaaaa

SEQ ID NO: 697302 - DNA, 33 bp, Homo sapien
ttgccattctaaaggcggaaaataggccaaaaa

SEQ ID NO: 697303 - DNA, 33 bp, Homo sapien
ttgtttcctggtagaacttacgaggacttcact

SEQ ID NO: 697304 - DNA, 33 bp, Homo sapien
ttgtttcctggtagaatttacgaggacttcact

SEQ ID NO: 697305 - DNA, 33 bp, Homo sapien
cgtagctttggatctacggaatcaagtttcaaa

SEQ ID NO: 697306 - DNA, 33 bp, Homo sapien
cgtagctttggatctatggaatcaagtttcaaa

SEQ ID NO: 697307 - DNA, 33 bp, Homo sapien
caccacttccttaagcagatctccctggcaact

SEQ ID NO: 697308 - DNA, 33 bp, Homo sapien
caccacttccttaagcggatctccctggcaact

SEQ ID NO: 697309 - DNA, 33 bp, Homo sapien
ctgctgctggcatatgaaaatgagaatggatcc

SEQ ID NO: 697310 - DNA, 33 bp, Homo sapien
ctgctgctggcatatgcaaatgagaatggatcc

SEQ ID NO: 697311 - DNA, 33 bp, Homo sapien
ttcaccagcaaaaaacaatgaataaacaaattt

SEQ ID NO: 697312 - DNA, 33 bp, Homo sapien
ttcaccagcaaaaaacgatgaataaacaaattt

SEQ ID NO: 697313 - DNA, 33 bp, Homo sapien
tgcctccttggctctactagacatttccctatt

SEQ ID NO: 697314 - DNA, 33 bp, Homo sapien
tgcctccttggctctattagacatttccctatt

SEQ ID NO: 697315 - DNA, 33 bp, Homo sapien
gaatttcagataccacagcattttagtaggaca

SEQ ID NO: 697316 - DNA, 33 bp, Homo sapien
gaatttcagataccacggcattttagtaggaca

SEQ ID NO: 697317 - DNA, 33 bp, Homo sapien
taatctctatgttgaaagtgaatagagtagaat

SEQ ID NO: 697318 - DNA, 33 bp, Homo sapien
taatctctatgttgaaggtgaatagagtagaat

SEQ ID NO: 697319 - DNA, 33 bp, Homo sapien
aattcactaatgcagcaagtgtttaccaaaatc

SEQ ID NO: 697320 - DNA, 33 bp, Homo sapien
aattcactaatgcagctagtgtttaccaaaatc

SEQ ID NO: 697321 - DNA, 33 bp, Homo sapien
gaaccatgaattttagcatcgtgaaaatcataa

SEQ ID NO: 697322 - DNA, 33 bp, Homo sapien
gaaccatgaattttagtatcgtgaaaatcataa

SEQ ID NO: 697323 - DNA, 33 bp, Homo sapien
caaataatgcaaataaagctgctgctgtttata

SEQ ID NO: 697324 - DNA, 33 bp, Homo sapien
caaataatgcaaataatgctgctgctgtttata

SEQ ID NO: 697325 - DNA, 33 bp, Homo sapien
cctgggtgctgccaacagagcttcagactttaa

SEQ ID NO: 697326 - DNA, 33 bp, Homo sapien
cctgggtgctgccaacggagcttcagactttaa

SEQ ID NO: 697327 - DNA, 33 bp, Homo sapien
agctaattaatgaagaactgtctcagtaataag

SEQ ID NO: 697328 - DNA, 33 bp, Homo sapien
agctaattaatgaagatctgtctcagtaataag

SEQ ID NO: 697329 - DNA, 33 bp, Homo sapien
attgtgaccacgctaagttaaagcatatacagc

SEQ ID NO: 697330 - DNA, 33 bp, Homo sapien
attgtgaccacgctaatttaaagcatatacagc

SEQ ID NO: 697331 - DNA, 33 bp, Homo sapien
tgagtcaacaacatgaacttctactcaccaaaa

SEQ ID NO: 697332 - DNA, 33 bp, Homo sapien
tgagtcaacaacatgatcttctactcaccaaaa

SEQ ID NO: 697333 - DNA, 33 bp, Homo sapien
gacaaggaggtctatgaaaaaggtgtgtgtgta

SEQ ID NO: 697334 - DNA, 33 bp, Homo sapien
gacaaggaggtctatgtaaaaggtgtgtgtgta

SEQ ID NO: 697335 - DNA, 33 bp, Homo sapien
tatacttagcactcccaaaagggtaatggagac

SEQ ID NO: 697336 - DNA, 33 bp, Homo sapien
tatacttagcactcccgaaagggtaatggagac

SEQ ID NO: 697337 - DNA, 33 bp, Homo sapien
caagctcctgggtcagacaactagctccatata

SEQ ID NO: 697338 - DNA, 33 bp, Homo sapien
caagctcctgggtcaggcaactagctccatata

SEQ ID NO: 697339 - DNA, 33 bp, Homo sapien
taaaattctctgtactaagggtttttaactgat

SEQ ID NO: 697340 - DNA, 33 bp, Homo sapien
taaaattctctgtactgagggtttttaactgat

SEQ ID NO: 697341 - DNA, 33 bp, Homo sapien
tttctggctctgttaacgagaataatctaagat

SEQ ID NO: 697342 - DNA, 33 bp, Homo sapien
tttctggctctgttaatgagaataatctaagat

SEQ ID NO: 697343 - DNA, 33 bp, Homo sapien
cttggttacaattgacaaattagcctgtgactg

SEQ ID NO: 697344 - DNA, 33 bp, Homo sapien
cttggttacaattgacgaattagcctgtgactg

SEQ ID NO: 697345 - DNA, 33 bp, Homo sapien
atttttgtttttaacaactttctcagtatctac

SEQ ID NO: 697346 - DNA, 33 bp, Homo sapien
atttttgtttttaacagctttctcagtatctac

SEQ ID NO: 697347 - DNA, 33 bp, Homo sapien
tctccaacagaggaaaatgaggcttacaggaaa

SEQ ID NO: 697348 - DNA, 33 bp, Homo sapien
tctccaacagaggaaagtgaggcttacaggaaa

SEQ ID NO: 697349 - DNA, 33 bp, Homo sapien
cacttctctagttgctcaaaacctgaataccca

SEQ ID NO: 697350 - DNA, 33 bp, Homo sapien
cacttctctagttgctgaaaacctgaataccca

SEQ ID NO: 697351 - DNA, 33 bp, Homo sapien
atatgaaaatatgcagaattataaagtgaataa

SEQ ID NO: 697352 - DNA, 33 bp, Homo sapien
atatgaaaatatgcaggattataaagtgaataa

SEQ ID NO: 697353 - DNA, 33 bp, Homo sapien
ttaccatgctgtttcacaggttaatacatatca

SEQ ID NO: 697354 - DNA, 33 bp, Homo sapien
ttaccatgctgtttcagaggttaatacatatca

SEQ ID NO: 697355 - DNA, 33 bp, Homo sapien
tttctacctcagtacaacttctaggattccagt

SEQ ID NO: 697356 - DNA, 33 bp, Homo sapien
tttctacctcagtacagcttctaggattccagt

SEQ ID NO: 697357 - DNA, 33 bp, Homo sapien
aaatattgtagcatcaaaaatcccaacatttat

SEQ ID NO: 697358 - DNA, 33 bp, Homo sapien
aaatattgtagcatcagaaatcccaacatttat

SEQ ID NO: 697359 - DNA, 33 bp, Homo sapien
cttccatccttggatacatagtaaggcctttag

SEQ ID NO: 697360 - DNA, 33 bp, Homo sapien
cttccatccttggatatatagtaaggcctttag

SEQ ID NO: 697361 - DNA, 33 bp, Homo sapien
ccaaaatgctactttacccttgattatttgttc

SEQ ID NO: 697362 - DNA, 33 bp, Homo sapien
ccaaaatgctactttatccttgattatttgttc

SEQ ID NO: 697363 - DNA, 33 bp, Homo sapien
gtcagagtaggctatacatatcattggctgaac

SEQ ID NO: 697364 - DNA, 33 bp, Homo sapien
gtcagagtaggctatatatatcattggctgaac

SEQ ID NO: 697365 - DNA, 33 bp, Homo sapien
gaaattgttcttacaaatgttagtgaacttgta

SEQ ID NO: 697366 - DNA, 33 bp, Homo sapien
gaaattgttcttacaagtgttagtgaacttgta

SEQ ID NO: 697367 - DNA, 33 bp, Homo sapien
gtttatatgatcactcagaacctaaatgcaaat

SEQ ID NO: 697368 - DNA, 33 bp, Homo sapien
gtttatatgatcactctgaacctaaatgcaaat

SEQ ID NO: 697369 - DNA, 33 bp, Homo sapien
actaagtcaccttaaacggtaaattagcagaca

SEQ ID NO: 697370 - DNA, 33 bp, Homo sapien
actaagtcaccttaaatggtaaattagcagaca

SEQ ID NO: 697371 - DNA, 33 bp, Homo sapien
tgtaatttctgacttcaatgttttaaatagaga

SEQ ID NO: 697372 - DNA, 33 bp, Homo sapien
tgtaatttctgacttcgatgttttaaatagaga

SEQ ID NO: 697373 - DNA, 33 bp, Homo sapien
aagcaagtctattagcaccatttttctaacagc

SEQ ID NO: 697374 - DNA, 33 bp, Homo sapien
aagcaagtctattagcgccatttttctaacagc

SEQ ID NO: 697375 - DNA, 33 bp, Homo sapien
ctttgtaattatgataatagagaagcacaaatg

SEQ ID NO: 697376 - DNA, 33 bp, Homo sapien
ctttgtaattatgatactagagaagcacaaatg

SEQ ID NO: 697377 - DNA, 33 bp, Homo sapien
tatagttagcatcaacaaaaactaataaaattg

SEQ ID NO: 697378 - DNA, 33 bp, Homo sapien
tatagttagcatcaacgaaaactaataaaattg

SEQ ID NO: 697379 - DNA, 33 bp, Homo sapien
atattacttcatctaaaatttgattagtcatta

SEQ ID NO: 697380 - DNA, 33 bp, Homo sapien
atattacttcatctaagatttgattagtcatta

SEQ ID NO: 697381 - DNA, 33 bp, Homo sapien
tttgttcaacaaaaacacaactacaaacattag

SEQ ID NO: 697382 - DNA, 33 bp, Homo sapien
tttgttcaacaaaaacgcaactacaaacattag

SEQ ID NO: 697383 - DNA, 33 bp, Homo sapien
taaaatggaagaggaactggttgtgaagatcct

SEQ ID NO: 697384 - DNA, 33 bp, Homo sapien
taaaatggaagaggaagtggttgtgaagatcct

SEQ ID NO: 697385 - DNA, 33 bp, Homo sapien
agatgacaaaagcatcaaaggagtctacaattt

SEQ ID NO: 697386 - DNA, 33 bp, Homo sapien
agatgacaaaagcatcgaaggagtctacaattt

SEQ ID NO: 697387 - DNA, 33 bp, Homo sapien
aaggtatctttttcacgacattcaataaagttt

SEQ ID NO: 697388 - DNA, 33 bp, Homo sapien
aaggtatctttttcactacattcaataaagttt

SEQ ID NO: 697389 - DNA, 33 bp, Homo sapien
acttatgcacatttctaaatttctcccagattt

SEQ ID NO: 697390 - DNA, 33 bp, Homo sapien
acttatgcacatttctgaatttctcccagattt

SEQ ID NO: 697391 - DNA, 33 bp, Homo sapien
ttctggggactccaaccaatttcctttctgaac

SEQ ID NO: 697392 - DNA, 33 bp, Homo sapien
ttctggggactccaactaatttcctttctgaac

SEQ ID NO: 697393 - DNA, 33 bp, Homo sapien
attgtgatccatctcaaacttctgactttgatg

SEQ ID NO: 697394 - DNA, 33 bp, Homo sapien
attgtgatccatctcagacttctgactttgatg

SEQ ID NO: 697395 - DNA, 33 bp, Homo sapien
gggtaatcttgctgtccgaaggataatcttgct

SEQ ID NO: 697396 - DNA, 33 bp, Homo sapien
gggtaatcttgctgtcggaaggataatcttgct

SEQ ID NO: 697397 - DNA, 33 bp, Homo sapien
agaacacagatggaaaacagttaatatagctat

SEQ ID NO: 697398 - DNA, 33 bp, Homo sapien
agaacacagatggaaaccagttaatatagctat

SEQ ID NO: 697399 - DNA, 33 bp, Homo sapien
acctataaccacccaccgaagttaggctcctac

SEQ ID NO: 697400 - DNA, 33 bp, Homo sapien
acctataaccacccactgaagttaggctcctac

SEQ ID NO: 697401 - DNA, 33 bp, Homo sapien
tagatttcagtgggtgcatgcaaacactgggat

SEQ ID NO: 697402 - DNA, 33 bp, Homo sapien
tagatttcagtgggtgtatgcaaacactgggat

SEQ ID NO: 697403 - DNA, 33 bp, Homo sapien
atgcgtaagttgtagccaactcaaagctttgtt

SEQ ID NO: 697404 - DNA, 33 bp, Homo sapien
atgcgtaagttgtagctaactcaaagctttgtt

SEQ ID NO: 697405 - DNA, 33 bp, Homo sapien
acaagggcttccttaacctctaaactatgttga

SEQ ID NO: 697406 - DNA, 33 bp, Homo sapien
acaagggcttccttaatctctaaactatgttga

SEQ ID NO: 697407 - DNA, 33 bp, Homo sapien
tgaactacagtttcaaagatcagcaatgatgag

SEQ ID NO: 697408 - DNA, 33 bp, Homo sapien
tgaactacagtttcaaggatcagcaatgatgag

SEQ ID NO: 697409 - DNA, 33 bp, Homo sapien
aatttgaccattgttaacatcagatttaaaatt

SEQ ID NO: 697410 - DNA, 33 bp, Homo sapien
aatttgaccattgttatcatcagatttaaaatt

SEQ ID NO: 697411 - DNA, 33 bp, Homo sapien
tttagagaggtgtttacagccctggtattgaca

SEQ ID NO: 697412 - DNA, 33 bp, Homo sapien
tttagagaggtgtttagagccctggtattgaca

SEQ ID NO: 697413 - DNA, 33 bp, Homo sapien
gtctgtgaattaaaaagttgctttgcttaactt

SEQ ID NO: 697414 - DNA, 33 bp, Homo sapien
gtctgtgaattaaaaatttgctttgcttaactt

SEQ ID NO: 697415 - DNA, 33 bp, Homo sapien
ggaaagaaactatcaaaaaatctaagatacagt

SEQ ID NO: 697416 - DNA, 33 bp, Homo sapien
ggaaagaaactatcaacaaatctaagatacagt

SEQ ID NO: 697417 - DNA, 33 bp, Homo sapien
aacatcttccgaaagacattcctacactctttc

SEQ ID NO: 697418 - DNA, 33 bp, Homo sapien
aacatcttccgaaagatattcctacactctttc

SEQ ID NO: 697419 - DNA, 33 bp, Homo sapien
ccaactctaaaagactaagaacatctactcttt

SEQ ID NO: 697420 - DNA, 33 bp, Homo sapien
ccaactctaaaagactgagaacatctactcttt

SEQ ID NO: 697421 - DNA, 33 bp, Homo sapien
gcacagcattacctgaaagcaaaaatataatat

SEQ ID NO: 697422 - DNA, 33 bp, Homo sapien
gcacagcattacctgacagcaaaaatataatat

SEQ ID NO: 697423 - DNA, 33 bp, Homo sapien
agaagaacactacgcacctataacaaagaatga

SEQ ID NO: 697424 - DNA, 33 bp, Homo sapien
agaagaacactacgcagctataacaaagaatga

SEQ ID NO: 697425 - DNA, 33 bp, Homo sapien
aaccattacaactataacacaatggtatttgtg

SEQ ID NO: 697426 - DNA, 33 bp, Homo sapien
aaccattacaactatagcacaatggtatttgtg

SEQ ID NO: 697427 - DNA, 33 bp, Homo sapien
atggtgcctgtatgtacgattaaactttgttag

SEQ ID NO: 697428 - DNA, 33 bp, Homo sapien
atggtgcctgtatgtatgattaaactttgttag

SEQ ID NO: 697429 - DNA, 33 bp, Homo sapien
gttagcaaattcaaccaaatatccctttagaca

SEQ ID NO: 697430 - DNA, 33 bp, Homo sapien
gttagcaaattcaacccaatatccctttagaca

SEQ ID NO: 697431 - DNA, 33 bp, Homo sapien
agaaagaaaacatttcacacatatgttcctact

SEQ ID NO: 697432 - DNA, 33 bp, Homo sapien
agaaagaaaacatttcgcacatatgttcctact

SEQ ID NO: 697433 - DNA, 33 bp, Homo sapien
ctttcacacttaaactaaaacattggcttgctc

SEQ ID NO: 697434 - DNA, 33 bp, Homo sapien
ctttcacacttaaactgaaacattggcttgctc

SEQ ID NO: 697435 - DNA, 33 bp, Homo sapien
taattggttcttaggacggaaatataatggagt

SEQ ID NO: 697436 - DNA, 33 bp, Homo sapien
taattggttcttaggatggaaatataatggagt

SEQ ID NO: 697437 - DNA, 33 bp, Homo sapien
cttaaacaccttctatcactttgttattgttct

SEQ ID NO: 697438 - DNA, 33 bp, Homo sapien
cttaaacaccttctatgactttgttattgttct

SEQ ID NO: 697439 - DNA, 33 bp, Homo sapien
atgtttatagctatgacaaaatgagactgatga

SEQ ID NO: 697440 - DNA, 33 bp, Homo sapien
atgtttatagctatgataaaatgagactgatga

SEQ ID NO: 697441 - DNA, 33 bp, Homo sapien
cacaggcacacctggacgggttgcaacagtgtc

SEQ ID NO: 697442 - DNA, 33 bp, Homo sapien
cacaggcacacctggatgggttgcaacagtgtc

SEQ ID NO: 697443 - DNA, 33 bp, Homo sapien
gccatgttgcaggtaacgagaaggagtgaagag

SEQ ID NO: 697444 - DNA, 33 bp, Homo sapien
gccatgttgcaggtaatgagaaggagtgaagag

SEQ ID NO: 697445 - DNA, 33 bp, Homo sapien
aaaagcaaaaatgagcaaagtggatcttattaa

SEQ ID NO: 697446 - DNA, 33 bp, Homo sapien
aaaagcaaaaatgagccaagtggatcttattaa

SEQ ID NO: 697447 - DNA, 33 bp, Homo sapien
ggagatcaggatattgacaacagagaccaagga

SEQ ID NO: 697448 - DNA, 33 bp, Homo sapien
ggagatcaggatattgtcaacagagaccaagga

SEQ ID NO: 697449 - DNA, 33 bp, Homo sapien
atcttaatgctatctccataatggtctcaagca

SEQ ID NO: 697450 - DNA, 33 bp, Homo sapien
atcttaatgctatctctataatggtctcaagca

SEQ ID NO: 697451 - DNA, 33 bp, Homo sapien
tgtatgccaggatatacgtaataatgtgttcat

SEQ ID NO: 697452 - DNA, 33 bp, Homo sapien
tgtatgccaggatatatgtaataatgtgttcat

SEQ ID NO: 697453 - DNA, 33 bp, Homo sapien
aatagtgcctatagctaaaagtaccgtattgca

SEQ ID NO: 697454 - DNA, 33 bp, Homo sapien
aatagtgcctatagctgaaagtaccgtattgca

SEQ ID NO: 697455 - DNA, 33 bp, Homo sapien
gcaagttggtaagagacaggataataggacata

SEQ ID NO: 697456 - DNA, 33 bp, Homo sapien
gcaagttggtaagagataggataataggacata

SEQ ID NO: 697457 - DNA, 33 bp, Homo sapien
cctcatgatcaaagaacggactagtttagagaa

SEQ ID NO: 697458 - DNA, 33 bp, Homo sapien
cctcatgatcaaagaatggactagtttagagaa

SEQ ID NO: 697459 - DNA, 33 bp, Homo sapien
tattagctgtcactaaacatctcaattcctctg

SEQ ID NO: 697460 - DNA, 33 bp, Homo sapien
tattagctgtcactaagcatctcaattcctctg

SEQ ID NO: 697461 - DNA, 33 bp, Homo sapien
tgcggtcagggagaaaaagaaacaccaggcagg

SEQ ID NO: 697462 - DNA, 33 bp, Homo sapien
tgcggtcagggagaaagagaaacaccaggcagg

SEQ ID NO: 697463 - DNA, 33 bp, Homo sapien
gacaaggctgccaagaacacacaatagggaaag

SEQ ID NO: 697464 - DNA, 33 bp, Homo sapien
gacaaggctgccaagagcacacaatagggaaag

SEQ ID NO: 697465 - DNA, 33 bp, Homo sapien
gatgtgtttgcatttacaagtatctatgtatat

SEQ ID NO: 697466 - DNA, 33 bp, Homo sapien
gatgtgtttgcatttataagtatctatgtatat

SEQ ID NO: 697467 - DNA, 33 bp, Homo sapien
tcataatggaatacaaatcaacgtatatcataa

SEQ ID NO: 697468 - DNA, 33 bp, Homo sapien
tcataatggaatacaagtcaacgtatatcataa

SEQ ID NO: 697469 - DNA, 33 bp, Homo sapien
aaagtttctaatgtacacagtggatcaactgca

SEQ ID NO: 697470 - DNA, 33 bp, Homo sapien
aaagtttctaatgtactcagtggatcaactgca

SEQ ID NO: 697471 - DNA, 33 bp, Homo sapien
ttaggaacattttaacagaattacagagccagt

SEQ ID NO: 697472 - DNA, 33 bp, Homo sapien
ttaggaacattttaacggaattacagagccagt

SEQ ID NO: 697473 - DNA, 33 bp, Homo sapien
tcttatgttgtccaaaatgtaaacgatcactct

SEQ ID NO: 697474 - DNA, 33 bp, Homo sapien
tcttatgttgtccaaattgtaaacgatcactct

SEQ ID NO: 697475 - DNA, 33 bp, Homo sapien
catgcattgtacatgcacaatattccaggaatt

SEQ ID NO: 697476 - DNA, 33 bp, Homo sapien
catgcattgtacatgcgcaatattccaggaatt

SEQ ID NO: 697477 - DNA, 33 bp, Homo sapien
gctcagttgctccttccatcatgtaaagataca

SEQ ID NO: 697478 - DNA, 33 bp, Homo sapien
gctcagttgctccttctatcatgtaaagataca

SEQ ID NO: 697479 - DNA, 33 bp, Homo sapien
attcaagatcatggtaccagtagatttggtgtc

SEQ ID NO: 697480 - DNA, 33 bp, Homo sapien
attcaagatcatggtatcagtagatttggtgtc

SEQ ID NO: 697481 - DNA, 33 bp, Homo sapien
tttgagcatttgaaggcaagtcagaataaagat

SEQ ID NO: 697482 - DNA, 33 bp, Homo sapien
tttgagcatttgaaggtaagtcagaataaagat

SEQ ID NO: 697483 - DNA, 33 bp, Homo sapien
tggcaatattcaacaaacgaatgcaagattaac

SEQ ID NO: 697484 - DNA, 33 bp, Homo sapien
tggcaatattcaacaaccgaatgcaagattaac

SEQ ID NO: 697485 - DNA, 33 bp, Homo sapien
gcccttttccgctcccgcctttcagcaggttct

SEQ ID NO: 697486 - DNA, 33 bp, Homo sapien
gcccttttccgctccctcctttcagcaggttct

SEQ ID NO: 697487 - DNA, 33 bp, Homo sapien
ccagcttatttcagcaatagtgtttaatagcta

SEQ ID NO: 697488 - DNA, 33 bp, Homo sapien
ccagcttatttcagcagtagtgtttaatagcta

SEQ ID NO: 697489 - DNA, 33 bp, Homo sapien
gcatgattgatcacaaaataaaccacacaaaat

SEQ ID NO: 697490 - DNA, 33 bp, Homo sapien
gcatgattgatcacaagataaaccacacaaaat

SEQ ID NO: 697491 - DNA, 33 bp, Homo sapien
atgaatcgataggacactatgctttggtaagtg

SEQ ID NO: 697492 - DNA, 33 bp, Homo sapien
atgaatcgataggacattatgctttggtaagtg

SEQ ID NO: 697493 - DNA, 33 bp, Homo sapien
ctatcctaagacccataatgattttagaactgt

SEQ ID NO: 697494 - DNA, 33 bp, Homo sapien
ctatcctaagacccatcatgattttagaactgt

SEQ ID NO: 697495 - DNA, 33 bp, Homo sapien
ttgactgcactgaaaaatgggatggagactctt

SEQ ID NO: 697496 - DNA, 33 bp, Homo sapien
ttgactgcactgaaaagtgggatggagactctt

SEQ ID NO: 697497 - DNA, 33 bp, Homo sapien
tgtattgcagtttgaacgctctctcagtttctc

SEQ ID NO: 697498 - DNA, 33 bp, Homo sapien
tgtattgcagtttgaatgctctctcagtttctc

SEQ ID NO: 697499 - DNA, 33 bp, Homo sapien
ctaccaatgagggatgcagtatttagcatatgt

SEQ ID NO: 697500 - DNA, 33 bp, Homo sapien
ctaccaatgagggatgtagtatttagcatatgt

SEQ ID NO: 697501 - DNA, 33 bp, Homo sapien
gctgggaaggaaaacccattgagtgacagaatc

SEQ ID NO: 697502 - DNA, 33 bp, Homo sapien
gctgggaaggaaaacctattgagtgacagaatc

SEQ ID NO: 697503 - DNA, 33 bp, Homo sapien
tgtagaaatatggtacagcatacatatgtttca

SEQ ID NO: 697504 - DNA, 33 bp, Homo sapien
tgtagaaatatggtacggcatacatatgtttca

SEQ ID NO: 697505 - DNA, 33 bp, Homo sapien
gggaccgtttcttctaagagctatgcttgaatc

SEQ ID NO: 697506 - DNA, 33 bp, Homo sapien
gggaccgtttcttctatgagctatgcttgaatc

SEQ ID NO: 697507 - DNA, 33 bp, Homo sapien
gcttcagagagggcctaaagaagtactgataga

SEQ ID NO: 697508 - DNA, 33 bp, Homo sapien
gcttcagagagggcctgaagaagtactgataga

SEQ ID NO: 697509 - DNA, 33 bp, Homo sapien
ctgtaaaagaaaccgacagaaaagctcaatcag

SEQ ID NO: 697510 - DNA, 33 bp, Homo sapien
ctgtaaaagaaaccgatagaaaagctcaatcag

SEQ ID NO: 697511 - DNA, 33 bp, Homo sapien
tgtcctttgaaggaacacagatggagctggagg

SEQ ID NO: 697512 - DNA, 33 bp, Homo sapien
tgtcctttgaaggaacgcagatggagctggagg

SEQ ID NO: 697513 - DNA, 33 bp, Homo sapien
tctatgacctattcaacttcatttttgtgtaca

SEQ ID NO: 697514 - DNA, 33 bp, Homo sapien
tctatgacctattcaagttcatttttgtgtaca

SEQ ID NO: 697515 - DNA, 33 bp, Homo sapien
tgtctaaagcagacaactggtccaagtctagtc

SEQ ID NO: 697516 - DNA, 33 bp, Homo sapien
tgtctaaagcagacaagtggtccaagtctagtc

SEQ ID NO: 697517 - DNA, 33 bp, Homo sapien
aagactgggataattaggtaacatccaagtaaa

SEQ ID NO: 697518 - DNA, 33 bp, Homo sapien
aagactgggataattatgtaacatccaagtaaa

SEQ ID NO: 697519 - DNA, 33 bp, Homo sapien
ggttatagcagttagacgattgaatacaaaatt

SEQ ID NO: 697520 - DNA, 33 bp, Homo sapien
ggttatagcagttagatgattgaatacaaaatt

SEQ ID NO: 697521 - DNA, 33 bp, Homo sapien
ggcttaaccagtgcaaaaggactttaggactcc

SEQ ID NO: 697522 - DNA, 33 bp, Homo sapien
ggcttaaccagtgcaataggactttaggactcc

SEQ ID NO: 697523 - DNA, 33 bp, Homo sapien
gctcaacaccaggagacaataaaacaaagcagc

SEQ ID NO: 697524 - DNA, 33 bp, Homo sapien
gctcaacaccaggagataataaaacaaagcagc

SEQ ID NO: 697525 - DNA, 33 bp, Homo sapien
aaataagtagagaaaacgcctctaatcagccat

SEQ ID NO: 697526 - DNA, 33 bp, Homo sapien
aaataagtagagaaaatgcctctaatcagccat

SEQ ID NO: 697527 - DNA, 33 bp, Homo sapien
agctaggaagtcagaacccatggagaaatctgc

SEQ ID NO: 697528 - DNA, 33 bp, Homo sapien
agctaggaagtcagaatccatggagaaatctgc

SEQ ID NO: 697529 - DNA, 33 bp, Homo sapien
cagtgaaattgacacacggactactaatacaat

SEQ ID NO: 697530 - DNA, 33 bp, Homo sapien
cagtgaaattgacacatggactactaatacaat

SEQ ID NO: 697531 - DNA, 33 bp, Homo sapien
agtgtggttgataaaaaagaacaaaccctttaa

SEQ ID NO: 697532 - DNA, 33 bp, Homo sapien
agtgtggttgataaaagagaacaaaccctttaa

SEQ ID NO: 697533 - DNA, 33 bp, Homo sapien
tctgaaatcagtgtcagcagagttttttttttc

SEQ ID NO: 697534 - DNA, 33 bp, Homo sapien
tctgaaatcagtgtcatcagagttttttttttc

SEQ ID NO: 697535 - DNA, 33 bp, Homo sapien
ttaattgttattaatcacttcaggttttagatt

SEQ ID NO: 697536 - DNA, 33 bp, Homo sapien
ttaattgttattaatctcttcaggttttagatt

SEQ ID NO: 697537 - DNA, 33 bp, Homo sapien
attcgttcagtcttataaggttgtatttgtgta

SEQ ID NO: 697538 - DNA, 33 bp, Homo sapien
attcgttcagtcttatcaggttgtatttgtgta

SEQ ID NO: 697539 - DNA, 33 bp, Homo sapien
tctgcttttcaatccaagtgctgaatctttgta

SEQ ID NO: 697540 - DNA, 33 bp, Homo sapien
tctgcttttcaatccacgtgctgaatctttgta

SEQ ID NO: 697541 - DNA, 33 bp, Homo sapien
tctctgccactcttcccatgttcctccatgtca

SEQ ID NO: 697542 - DNA, 33 bp, Homo sapien
tctctgccactcttcctatgttcctccatgtca

SEQ ID NO: 697543 - DNA, 33 bp, Homo sapien
aaataacaaacagaaacggagactctaactaca

SEQ ID NO: 697544 - DNA, 33 bp, Homo sapien
aaataacaaacagaaatggagactctaactaca

SEQ ID NO: 697545 - DNA, 33 bp, Homo sapien
cttctaattcaatcagatatccttagaaccaat

SEQ ID NO: 697546 - DNA, 33 bp, Homo sapien
cttctaattcaatcaggtatccttagaaccaat

SEQ ID NO: 697547 - DNA, 33 bp, Homo sapien
atcttcacagttatcaataaacaggtacttagc

SEQ ID NO: 697548 - DNA, 33 bp, Homo sapien
atcttcacagttatcagtaaacaggtacttagc

SEQ ID NO: 697549 - DNA, 33 bp, Homo sapien
atgatcagtaacagcccacagacatttattggg

SEQ ID NO: 697550 - DNA, 33 bp, Homo sapien
atgatcagtaacagccgacagacatttattggg

SEQ ID NO: 697551 - DNA, 33 bp, Homo sapien
gattgccaattctagacaactgctggtgaattt

SEQ ID NO: 697552 - DNA, 33 bp, Homo sapien
gattgccaattctagagaactgctggtgaattt

SEQ ID NO: 697553 - DNA, 33 bp, Homo sapien
ttttataagaagcatcaaaggacagtaaaagaa

SEQ ID NO: 697554 - DNA, 33 bp, Homo sapien
ttttataagaagcatcgaaggacagtaaaagaa

SEQ ID NO: 697555 - DNA, 33 bp, Homo sapien
cttggaattcatagagaagctaagctggccatc

SEQ ID NO: 697556 - DNA, 33 bp, Homo sapien
cttggaattcatagaggagctaagctggccatc

SEQ ID NO: 697557 - DNA, 33 bp, Homo sapien
taaagtttgtaactaacgcctacaacgacaaca

SEQ ID NO: 697558 - DNA, 33 bp, Homo sapien
taaagtttgtaactaatgcctacaacgacaaca

SEQ ID NO: 697559 - DNA, 33 bp, Homo sapien
attaaaaatgaattacaaacacagttactttaa

SEQ ID NO: 697560 - DNA, 33 bp, Homo sapien
attaaaaatgaattacgaacacagttactttaa

SEQ ID NO: 697561 - DNA, 33 bp, Homo sapien
gcaaacagtttgtatgaaaagtaaagacatggc

SEQ ID NO: 697562 - DNA, 33 bp, Homo sapien
gcaaacagtttgtatggaaagtaaagacatggc

SEQ ID NO: 697563 - DNA, 33 bp, Homo sapien
ctttttcaaggatgtgcataaccagatcagcag

SEQ ID NO: 697564 - DNA, 33 bp, Homo sapien
ctttttcaaggatgtggataaccagatcagcag

SEQ ID NO: 697565 - DNA, 33 bp, Homo sapien
acaggattgatgtccacaatgcttcatacaagt

SEQ ID NO: 697566 - DNA, 33 bp, Homo sapien
acaggattgatgtccataatgcttcatacaagt

SEQ ID NO: 697567 - DNA, 33 bp, Homo sapien
atcacattattttctccctttgaaggcagaaaa

SEQ ID NO: 697568 - DNA, 33 bp, Homo sapien
atcacattattttctctctttgaaggcagaaaa

SEQ ID NO: 697569 - DNA, 33 bp, Homo sapien
ttcatttttctatgaacgcaaggtatcagaatg

SEQ ID NO: 697570 - DNA, 33 bp, Homo sapien
ttcatttttctatgaatgcaaggtatcagaatg

SEQ ID NO: 697571 - DNA, 33 bp, Homo sapien
gatgagagttcctgaaaaaaatgattgtcaggg

SEQ ID NO: 697572 - DNA, 33 bp, Homo sapien
gatgagagttcctgaagaaaatgattgtcaggg

SEQ ID NO: 697573 - DNA, 33 bp, Homo sapien
agagccttggacataactgggacagtgaggaaa

SEQ ID NO: 697574 - DNA, 33 bp, Homo sapien
agagccttggacataattgggacagtgaggaaa

SEQ ID NO: 697575 - DNA, 33 bp, Homo sapien
ttttattgggttatgaccaggaatgttttgata

SEQ ID NO: 697576 - DNA, 33 bp, Homo sapien
ttttattgggttatgatcaggaatgttttgata

SEQ ID NO: 697577 - DNA, 33 bp, Homo sapien
ctattacatcagacataatagctgcataaaaag

SEQ ID NO: 697578 - DNA, 33 bp, Homo sapien
ctattacatcagacatcatagctgcataaaaag

SEQ ID NO: 697579 - DNA, 33 bp, Homo sapien
gctgtcccaggatttcaatggtaatggaccttg

SEQ ID NO: 697580 - DNA, 33 bp, Homo sapien
gctgtcccaggatttcgatggtaatggaccttg

SEQ ID NO: 697581 - DNA, 33 bp, Homo sapien
taatataaccttgaagaagcattgagctattat

SEQ ID NO: 697582 - DNA, 33 bp, Homo sapien
taatataaccttgaagcagcattgagctattat

SEQ ID NO: 697583 - DNA, 33 bp, Homo sapien
gtaatatgccaaaaaaatgttgaatctgactcc

SEQ ID NO: 697584 - DNA, 33 bp, Homo sapien
gtaatatgccaaaaaagtgttgaatctgactcc

SEQ ID NO: 697585 - DNA, 33 bp, Homo sapien
ttaattccctcagcaaagttttcagatggatat

SEQ ID NO: 697586 - DNA, 33 bp, Homo sapien
ttaattccctcagcaatgttttcagatggatat

SEQ ID NO: 697587 - DNA, 33 bp, Homo sapien
aacagacaggtagcaaaaggagatgtcattgta

SEQ ID NO: 697588 - DNA, 33 bp, Homo sapien
aacagacaggtagcaataggagatgtcattgta

SEQ ID NO: 697589 - DNA, 33 bp, Homo sapien
tttacatgaaacctaccaactttaaataagcat

SEQ ID NO: 697590 - DNA, 33 bp, Homo sapien
tttacatgaaacctactaactttaaataagcat

SEQ ID NO: 697591 - DNA, 33 bp, Homo sapien
agtttgcctctgctcaaggaaaatggaactatc

SEQ ID NO: 697592 - DNA, 33 bp, Homo sapien
agtttgcctctgctcatggaaaatggaactatc

SEQ ID NO: 697593 - DNA, 33 bp, Homo sapien
gaaaagtgcagtgtaaatgttagtttctagagc

SEQ ID NO: 697594 - DNA, 33 bp, Homo sapien
gaaaagtgcagtgtaagtgttagtttctagagc

SEQ ID NO: 697595 - DNA, 33 bp, Homo sapien
ggattatatttctccaatgcaaaactctgtcca

SEQ ID NO: 697596 - DNA, 33 bp, Homo sapien
ggattatatttctccagtgcaaaactctgtcca

SEQ ID NO: 697597 - DNA, 33 bp, Homo sapien
acactagctttatgagacatacagattggaagt

SEQ ID NO: 697598 - DNA, 33 bp, Homo sapien
acactagctttatgagtcatacagattggaagt

SEQ ID NO: 697599 - DNA, 33 bp, Homo sapien
gccaagaatctgtgagaatgcaaaactctagaa

SEQ ID NO: 697600 - DNA, 33 bp, Homo sapien
gccaagaatctgtgaggatgcaaaactctagaa

SEQ ID NO: 697601 - DNA, 33 bp, Homo sapien
gataggaaacattaaccattgtgaccacaaatc

SEQ ID NO: 697602 - DNA, 33 bp, Homo sapien
gataggaaacattaactattgtgaccacaaatc

SEQ ID NO: 697603 - DNA, 33 bp, Homo sapien
tctcctgcccttgcaaataaatgatggcttctc

SEQ ID NO: 697604 - DNA, 33 bp, Homo sapien
tctcctgcccttgcaactaaatgatggcttctc

SEQ ID NO: 697605 - DNA, 33 bp, Homo sapien
attggaatccaagtaacaagcagagaaaatcac

SEQ ID NO: 697606 - DNA, 33 bp, Homo sapien
attggaatccaagtaataagcagagaaaatcac

SEQ ID NO: 697607 - DNA, 33 bp, Homo sapien
ttcatctcacctactccagaaaacatcttgggt

SEQ ID NO: 697608 - DNA, 33 bp, Homo sapien
ttcatctcacctactctagaaaacatcttgggt

SEQ ID NO: 697609 - DNA, 33 bp, Homo sapien
ccatagattaggaagaagtacagatttccatat

SEQ ID NO: 697610 - DNA, 33 bp, Homo sapien
ccatagattaggaagaggtacagatttccatat

SEQ ID NO: 697611 - DNA, 33 bp, Homo sapien
tttctgaaaaactttccataagtccttgtatat

SEQ ID NO: 697612 - DNA, 33 bp, Homo sapien
tttctgaaaaactttctataagtccttgtatat

SEQ ID NO: 697613 - DNA, 33 bp, Homo sapien
gagatttgtggaacctgaaacttgagagggatg

SEQ ID NO: 697614 - DNA, 33 bp, Homo sapien
gagatttgtggaaccttaaacttgagagggatg

SEQ ID NO: 697615 - DNA, 33 bp, Homo sapien
aagtaaaatttcccataaggtgctgaaatccaa

SEQ ID NO: 697616 - DNA, 33 bp, Homo sapien
aagtaaaatttcccatgaggtgctgaaatccaa

SEQ ID NO: 697617 - DNA, 33 bp, Homo sapien
ctgtaaccttgttgtacaccttttcctgtgtat

SEQ ID NO: 697618 - DNA, 33 bp, Homo sapien
ctgtaaccttgttgtataccttttcctgtgtat

SEQ ID NO: 697619 - DNA, 33 bp, Homo sapien
attcaaattatgtcacaaagggaatctactaaa

SEQ ID NO: 697620 - DNA, 33 bp, Homo sapien
attcaaattatgtcacgaagggaatctactaaa

SEQ ID NO: 697621 - DNA, 33 bp, Homo sapien
atgagttttaattttacgaaggctggtcagaat

SEQ ID NO: 697622 - DNA, 33 bp, Homo sapien
atgagttttaattttatgaaggctggtcagaat

SEQ ID NO: 697623 - DNA, 33 bp, Homo sapien
tcttcaaggtttgggaaagaatggaacatgatc

SEQ ID NO: 697624 - DNA, 33 bp, Homo sapien
tcttcaaggtttgggagagaatggaacatgatc

SEQ ID NO: 697625 - DNA, 33 bp, Homo sapien
tttctctaaggctccaatcttagcctcctctcc

SEQ ID NO: 697626 - DNA, 33 bp, Homo sapien
tttctctaaggctccagtcttagcctcctctcc

SEQ ID NO: 697627 - DNA, 33 bp, Homo sapien
attttcacaggaaagcagagagaaagataacag

SEQ ID NO: 697628 - DNA, 33 bp, Homo sapien
attttcacaggaaagcggagagaaagataacag

SEQ ID NO: 697629 - DNA, 33 bp, Homo sapien
tattaacaacattaacgggactaagaagaacaa

SEQ ID NO: 697630 - DNA, 33 bp, Homo sapien
tattaacaacattaactggactaagaagaacaa

SEQ ID NO: 697631 - DNA, 33 bp, Homo sapien
aaaaaaaatggtagacaatgaactgtactaagg

SEQ ID NO: 697632 - DNA, 33 bp, Homo sapien
aaaaaaaatggtagacgatgaactgtactaagg

SEQ ID NO: 697633 - DNA, 33 bp, Homo sapien
aacacattttaaatccaaggcaccaaagagatg

SEQ ID NO: 697634 - DNA, 33 bp, Homo sapien
aacacattttaaatccgaggcaccaaagagatg

SEQ ID NO: 697635 - DNA, 33 bp, Homo sapien
ggcaccaaagagatgaaaattaatcagtccaag

SEQ ID NO: 697636 - DNA, 33 bp, Homo sapien
ggcaccaaagagatgagaattaatcagtccaag

SEQ ID NO: 697637 - DNA, 33 bp, Homo sapien
aatacaaaagccaggtaacattaatagaagcct

SEQ ID NO: 697638 - DNA, 33 bp, Homo sapien
aatacaaaagccaggtcacattaatagaagcct

SEQ ID NO: 697639 - DNA, 33 bp, Homo sapien
tctgattaccaaagaaagcagataacagggagg

SEQ ID NO: 697640 - DNA, 33 bp, Homo sapien
tctgattaccaaagaaggcagataacagggagg

SEQ ID NO: 697641 - DNA, 33 bp, Homo sapien
aaagctagaacagaggcccgggacagatctttc

SEQ ID NO: 697642 - DNA, 33 bp, Homo sapien
aaagctagaacagaggtccgggacagatctttc

SEQ ID NO: 697643 - DNA, 33 bp, Homo sapien
tgactgagaatgtaaacggacttcacaccatac

SEQ ID NO: 697644 - DNA, 33 bp, Homo sapien
tgactgagaatgtaaatggacttcacaccatac

SEQ ID NO: 697645 - DNA, 33 bp, Homo sapien
ttagtactcccttaagaatctctttctaggcac

SEQ ID NO: 697646 - DNA, 33 bp, Homo sapien
ttagtactcccttaaggatctctttctaggcac

SEQ ID NO: 697647 - DNA, 33 bp, Homo sapien
ttggtctatactgttaacaatgcttccaatggc

SEQ ID NO: 697648 - DNA, 33 bp, Homo sapien
ttggtctatactgttatcaatgcttccaatggc

SEQ ID NO: 697649 - DNA, 33 bp, Homo sapien
atataattctctaccacacaaaatatgcccttg

SEQ ID NO: 697650 - DNA, 33 bp, Homo sapien
atataattctctaccagacaaaatatgcccttg

SEQ ID NO: 697651 - DNA, 33 bp, Homo sapien
ggagtgtttggagttacaagaagagagcaaggg

SEQ ID NO: 697652 - DNA, 33 bp, Homo sapien
ggagtgtttggagttataagaagagagcaaggg

SEQ ID NO: 697653 - DNA, 33 bp, Homo sapien
ggtaataaggatagtaacgaataggtagttttt

SEQ ID NO: 697654 - DNA, 33 bp, Homo sapien
ggtaataaggatagtagcgaataggtagttttt

SEQ ID NO: 697655 - DNA, 33 bp, Homo sapien
cttcctatgtattccaagtgaccattttgttct

SEQ ID NO: 697656 - DNA, 33 bp, Homo sapien
cttcctatgtattccacgtgaccattttgttct

SEQ ID NO: 697657 - DNA, 33 bp, Homo sapien
attactgctttgtatacagtccttttatgccct

SEQ ID NO: 697658 - DNA, 33 bp, Homo sapien
attactgctttgtatatagtccttttatgccct

SEQ ID NO: 697659 - DNA, 33 bp, Homo sapien
tatcaagtctcaatcacataattgacatggaaa

SEQ ID NO: 697660 - DNA, 33 bp, Homo sapien
tatcaagtctcaatcatataattgacatggaaa

SEQ ID NO: 697661 - DNA, 33 bp, Homo sapien
ctttgcatacttgtaagagctgatccgatagtg

SEQ ID NO: 697662 - DNA, 33 bp, Homo sapien
ctttgcatacttgtaatagctgatccgatagtg

SEQ ID NO: 697663 - DNA, 33 bp, Homo sapien
ttatggcaaatgtataaaattgtataatataaa

SEQ ID NO: 697664 - DNA, 33 bp, Homo sapien
ttatggcaaatgtatagaattgtataatataaa

SEQ ID NO: 697665 - DNA, 33 bp, Homo sapien
ttgctaattctatacaacggtctagtcctacta

SEQ ID NO: 697666 - DNA, 33 bp, Homo sapien
ttgctaattctatacagcggtctagtcctacta

SEQ ID NO: 697667 - DNA, 33 bp, Homo sapien
gtgttatgtgttcttcccaagccattgcattcc

SEQ ID NO: 697668 - DNA, 33 bp, Homo sapien
gtgttatgtgttcttctcaagccattgcattcc

SEQ ID NO: 697669 - DNA, 33 bp, Homo sapien
cattaacttgataaggaactattctaaagctga

SEQ ID NO: 697670 - DNA, 33 bp, Homo sapien
cattaacttgataaggtactattctaaagctga

SEQ ID NO: 697671 - DNA, 33 bp, Homo sapien
gggagagacatttatactagcagcaactattta

SEQ ID NO: 697672 - DNA, 33 bp, Homo sapien
gggagagacatttatattagcagcaactattta

SEQ ID NO: 697673 - DNA, 33 bp, Homo sapien
gaaagaaaagagagaactatggatacagggtgt

SEQ ID NO: 697674 - DNA, 33 bp, Homo sapien
gaaagaaaagagagaattatggatacagggtgt

SEQ ID NO: 697675 - DNA, 33 bp, Homo sapien
cacttgctcccatcagaaaatatactaacctat

SEQ ID NO: 697676 - DNA, 33 bp, Homo sapien
cacttgctcccatcagcaaatatactaacctat

SEQ ID NO: 697677 - DNA, 33 bp, Homo sapien
ctgttcttgatgagaaatatgttctaacttatt

SEQ ID NO: 697678 - DNA, 33 bp, Homo sapien
ctgttcttgatgagaagtatgttctaacttatt

SEQ ID NO: 697679 - DNA, 33 bp, Homo sapien
aagggtacatcaggtaaaaaagactttgcactt

SEQ ID NO: 697680 - DNA, 33 bp, Homo sapien
aagggtacatcaggtagaaaagactttgcactt

SEQ ID NO: 697681 - DNA, 33 bp, Homo sapien
ttcgtaatgaaataaaacctgtagctgagtctt

SEQ ID NO: 697682 - DNA, 33 bp, Homo sapien
ttcgtaatgaaataaatcctgtagctgagtctt

SEQ ID NO: 697683 - DNA, 33 bp, Homo sapien
attccacctcaacttgaattaagattaaaacac

SEQ ID NO: 697684 - DNA, 33 bp, Homo sapien
attccacctcaacttgcattaagattaaaacac

SEQ ID NO: 697685 - DNA, 33 bp, Homo sapien
ggggtggacaaatgaacatgagacaaatgtata

SEQ ID NO: 697686 - DNA, 33 bp, Homo sapien
ggggtggacaaatgaatatgagacaaatgtata

SEQ ID NO: 697687 - DNA, 33 bp, Homo sapien
taaccgccagtggtccaatttgaaaaggaaggc

SEQ ID NO: 697688 - DNA, 33 bp, Homo sapien
taaccgccagtggtccgatttgaaaaggaaggc

SEQ ID NO: 697689 - DNA, 33 bp, Homo sapien
acagtgaattgtggaaaaggaaataaacttttt

SEQ ID NO: 697690 - DNA, 33 bp, Homo sapien
acagtgaattgtggaagaggaaataaacttttt

SEQ ID NO: 697691 - DNA, 33 bp, Homo sapien
attcatctgaacataactgacacttgagaggtc

SEQ ID NO: 697692 - DNA, 33 bp, Homo sapien
attcatctgaacataattgacacttgagaggtc

SEQ ID NO: 697693 - DNA, 33 bp, Homo sapien
acagcaagcgctagagcagtggtccagaaaatg

SEQ ID NO: 697694 - DNA, 33 bp, Homo sapien
acagcaagcgctagaggagtggtccagaaaatg

SEQ ID NO: 697695 - DNA, 33 bp, Homo sapien
cacactatgagactgccgagttgaatcaggaaa

SEQ ID NO: 697696 - DNA, 33 bp, Homo sapien
cacactatgagactgctgagttgaatcaggaaa

SEQ ID NO: 697697 - DNA, 33 bp, Homo sapien
ttaaatcagtcacttcccacactatgagactgc

SEQ ID NO: 697698 - DNA, 33 bp, Homo sapien
ttaaatcagtcacttcgcacactatgagactgc

SEQ ID NO: 697699 - DNA, 33 bp, Homo sapien
ctctttacagttccaacaaaatggtaagcttca

SEQ ID NO: 697700 - DNA, 33 bp, Homo sapien
ctctttacagttccaataaaatggtaagcttca

SEQ ID NO: 697701 - DNA, 33 bp, Homo sapien
gctctaggcttagaaactgagtatgaaggcaaa

SEQ ID NO: 697702 - DNA, 33 bp, Homo sapien
gctctaggcttagaaattgagtatgaaggcaaa

SEQ ID NO: 697703 - DNA, 33 bp, Homo sapien
ataacacctgacagaaagttttttcagccctta

SEQ ID NO: 697704 - DNA, 33 bp, Homo sapien
ataacacctgacagaacgttttttcagccctta

SEQ ID NO: 697705 - DNA, 33 bp, Homo sapien
atcatcagatcattaccatgaaagctggattgt

SEQ ID NO: 697706 - DNA, 33 bp, Homo sapien
atcatcagatcattactatgaaagctggattgt

SEQ ID NO: 697707 - DNA, 33 bp, Homo sapien
gaaggacacactcataactccatctagaagatg

SEQ ID NO: 697708 - DNA, 33 bp, Homo sapien
gaaggacacactcatatctccatctagaagatg

SEQ ID NO: 697709 - DNA, 33 bp, Homo sapien
cattcacacaacagcaaaggtattatgtctagg

SEQ ID NO: 697710 - DNA, 33 bp, Homo sapien
cattcacacaacagcagaggtattatgtctagg

SEQ ID NO: 697711 - DNA, 33 bp, Homo sapien
atggctattgctttcaggtacaggctaaatcag

SEQ ID NO: 697712 - DNA, 33 bp, Homo sapien
atggctattgctttcatgtacaggctaaatcag

SEQ ID NO: 697713 - DNA, 33 bp, Homo sapien
tgttgttgttgtttaacacgcagggtctcagcc

SEQ ID NO: 697714 - DNA, 33 bp, Homo sapien
tgttgttgttgtttaagacgcagggtctcagcc

SEQ ID NO: 697715 - DNA, 33 bp, Homo sapien
acaataattcaaaccccaaaagcatcccttgcc

SEQ ID NO: 697716 - DNA, 33 bp, Homo sapien
acaataattcaaaccctaaaagcatcccttgcc

SEQ ID NO: 697717 - DNA, 33 bp, Homo sapien
atcacctgtgacttctaacggatatttctggtt

SEQ ID NO: 697718 - DNA, 33 bp, Homo sapien
atcacctgtgacttctgacggatatttctggtt

SEQ ID NO: 697719 - DNA, 33 bp, Homo sapien
gctctaaagcttcataagaatggaattacacag

SEQ ID NO: 697720 - DNA, 33 bp, Homo sapien
gctctaaagcttcataggaatggaattacacag

SEQ ID NO: 697721 - DNA, 33 bp, Homo sapien
taaaagaaaagcacagaatctaagtcccaataa

SEQ ID NO: 697722 - DNA, 33 bp, Homo sapien
taaaagaaaagcacaggatctaagtcccaataa

SEQ ID NO: 697723 - DNA, 33 bp, Homo sapien
aaactgtaagatttaaagcttgatgtgtttgtg

SEQ ID NO: 697724 - DNA, 33 bp, Homo sapien
aaactgtaagatttaatgcttgatgtgtttgtg

SEQ ID NO: 697725 - DNA, 33 bp, Homo sapien
aaattaatagtattcggcacccactacaaacag

SEQ ID NO: 697726 - DNA, 33 bp, Homo sapien
aaattaatagtattcgtcacccactacaaacag

SEQ ID NO: 697727 - DNA, 33 bp, Homo sapien
agttctagcattaaaaaaaaacaagctggcaaa

SEQ ID NO: 697728 - DNA, 33 bp, Homo sapien
agttctagcattaaaacaaaacaagctggcaaa

SEQ ID NO: 697729 - DNA, 33 bp, Homo sapien
acttggtgggtttgaaagaaagaggaagagtca

SEQ ID NO: 697730 - DNA, 33 bp, Homo sapien
acttggtgggtttgaaggaaagaggaagagtca

SEQ ID NO: 697731 - DNA, 33 bp, Homo sapien
agcttccaagataccaatctctctttgtgttct

SEQ ID NO: 697732 - DNA, 33 bp, Homo sapien
agcttccaagataccagtctctctttgtgttct

SEQ ID NO: 697733 - DNA, 33 bp, Homo sapien
taaaggaatgaaaaaaaacctatgcacactaca

SEQ ID NO: 697734 - DNA, 33 bp, Homo sapien
taaaggaatgaaaaaagacctatgcacactaca

SEQ ID NO: 697735 - DNA, 33 bp, Homo sapien
agtattaaagtgaggaaaatcaaatgttttaac

SEQ ID NO: 697736 - DNA, 33 bp, Homo sapien
agtattaaagtgaggagaatcaaatgttttaac

SEQ ID NO: 697737 - DNA, 33 bp, Homo sapien
ctggactcatagccacaacttgggcatctgtag

SEQ ID NO: 697738 - DNA, 33 bp, Homo sapien
ctggactcatagccacgacttgggcatctgtag

SEQ ID NO: 697739 - DNA, 33 bp, Homo sapien
ggaacataggctaagaaggcattgtcttgtata

SEQ ID NO: 697740 - DNA, 33 bp, Homo sapien
ggaacataggctaagatggcattgtcttgtata

SEQ ID NO: 697741 - DNA, 33 bp, Homo sapien
tgaagctgtttttatgaaagcagttgaaacttt

SEQ ID NO: 697742 - DNA, 33 bp, Homo sapien
tgaagctgtttttatgtaagcagttgaaacttt

SEQ ID NO: 697743 - DNA, 33 bp, Homo sapien
taacttttcagtgttacggattagctattgatg

SEQ ID NO: 697744 - DNA, 33 bp, Homo sapien
taacttttcagtgttagggattagctattgatg

SEQ ID NO: 697745 - DNA, 33 bp, Homo sapien
taaattatttcaagagaagttccaccatccttg

SEQ ID NO: 697746 - DNA, 33 bp, Homo sapien
taaattatttcaagagcagttccaccatccttg

SEQ ID NO: 697747 - DNA, 33 bp, Homo sapien
tttgtaaattctctcaacagggctaggaggtaa

SEQ ID NO: 697748 - DNA, 33 bp, Homo sapien
tttgtaaattctctcagcagggctaggaggtaa

SEQ ID NO: 697749 - DNA, 33 bp, Homo sapien
ctagttctggtctataaaagtgtatactgtgtc

SEQ ID NO: 697750 - DNA, 33 bp, Homo sapien
ctagttctggtctatagaagtgtatactgtgtc

SEQ ID NO: 697751 - DNA, 33 bp, Homo sapien
gaaatgatatcattagaagcatgttgttttcag

SEQ ID NO: 697752 - DNA, 33 bp, Homo sapien
gaaatgatatcattaggagcatgttgttttcag

SEQ ID NO: 697753 - DNA, 33 bp, Homo sapien
aaagaatgaacctgtaataataaaatctgaagc

SEQ ID NO: 697754 - DNA, 33 bp, Homo sapien
aaagaatgaacctgtactaataaaatctgaagc

SEQ ID NO: 697755 - DNA, 33 bp, Homo sapien
agacattgctgcaagaagggaactaaatgtcat

SEQ ID NO: 697756 - DNA, 33 bp, Homo sapien
agacattgctgcaagaggggaactaaatgtcat

SEQ ID NO: 697757 - DNA, 33 bp, Homo sapien
actcttcttgccccaggacacgtccattcagtg

SEQ ID NO: 697758 - DNA, 33 bp, Homo sapien
actcttcttgccccagtacacgtccattcagtg

SEQ ID NO: 697759 - DNA, 33 bp, Homo sapien
tcaatctattcaaagcactggaaatttagtcag

SEQ ID NO: 697760 - DNA, 33 bp, Homo sapien
tcaatctattcaaagcgctggaaatttagtcag

SEQ ID NO: 697761 - DNA, 33 bp, Homo sapien
tttttccacagataaactagcatgacattttaa

SEQ ID NO: 697762 - DNA, 33 bp, Homo sapien
tttttccacagataaagtagcatgacattttaa

SEQ ID NO: 697763 - DNA, 33 bp, Homo sapien
tggtactagatggtacaaatagttgttcagaga

SEQ ID NO: 697764 - DNA, 33 bp, Homo sapien
tggtactagatggtactaatagttgttcagaga

SEQ ID NO: 697765 - DNA, 33 bp, Homo sapien
accatatttcatgacaaccacttgcttgtttcc

SEQ ID NO: 697766 - DNA, 33 bp, Homo sapien
accatatttcatgacatccacttgcttgtttcc

SEQ ID NO: 697767 - DNA, 33 bp, Homo sapien
tcctgtgcctatttaactcttagcataattctt

SEQ ID NO: 697768 - DNA, 33 bp, Homo sapien
tcctgtgcctatttaattcttagcataattctt

SEQ ID NO: 697769 - DNA, 33 bp, Homo sapien
tctagatttgccaaaccctctaaaggtacaaag

SEQ ID NO: 697770 - DNA, 33 bp, Homo sapien
tctagatttgccaaactctctaaaggtacaaag

SEQ ID NO: 697771 - DNA, 33 bp, Homo sapien
ttcagaagtggcaaagcattcaaaatcaagatg

SEQ ID NO: 697772 - DNA, 33 bp, Homo sapien
ttcagaagtggcaaagtattcaaaatcaagatg

SEQ ID NO: 697773 - DNA, 33 bp, Homo sapien
ctttgccacttctgaacagtttagtgtttttct

SEQ ID NO: 697774 - DNA, 33 bp, Homo sapien
ctttgccacttctgaatagtttagtgtttttct

SEQ ID NO: 697775 - DNA, 33 bp, Homo sapien
ccaaggagaaagcaaagtttatataactcagat

SEQ ID NO: 697776 - DNA, 33 bp, Homo sapien
ccaaggagaaagcaaattttatataactcagat

SEQ ID NO: 697777 - DNA, 33 bp, Homo sapien
gtttagagttgagcaccgaagttccactcctta

SEQ ID NO: 697778 - DNA, 33 bp, Homo sapien
gtttagagttgagcactgaagttccactcctta

SEQ ID NO: 697779 - DNA, 33 bp, Homo sapien
actaaacgcctcgtgaaagagtggtagacaggg

SEQ ID NO: 697780 - DNA, 33 bp, Homo sapien
actaaacgcctcgtgagagagtggtagacaggg

SEQ ID NO: 697781 - DNA, 33 bp, Homo sapien
cacacaatctgcacagaaaggtttttatgtatc

SEQ ID NO: 697782 - DNA, 33 bp, Homo sapien
cacacaatctgcacagcaaggtttttatgtatc

SEQ ID NO: 697783 - DNA, 33 bp, Homo sapien
aagtctattgagtaaaaggaagcctgataatgg

SEQ ID NO: 697784 - DNA, 33 bp, Homo sapien
aagtctattgagtaaagggaagcctgataatgg

SEQ ID NO: 697785 - DNA, 33 bp, Homo sapien
tttggtactctgtggacggttgattaatttctt

SEQ ID NO: 697786 - DNA, 33 bp, Homo sapien
tttggtactctgtggatggttgattaatttctt

SEQ ID NO: 697787 - DNA, 33 bp, Homo sapien
gaagcactataatgatcacaaagcaaatattcc

SEQ ID NO: 697788 - DNA, 33 bp, Homo sapien
gaagcactataatgatgacaaagcaaatattcc

SEQ ID NO: 697789 - DNA, 33 bp, Homo sapien
gtgatcttgcagaagaactcaaattcaagtggg

SEQ ID NO: 697790 - DNA, 33 bp, Homo sapien
gtgatcttgcagaagagctcaaattcaagtggg

SEQ ID NO: 697791 - DNA, 33 bp, Homo sapien
gattatgttttgcaaccatgactgtcttgagtt

SEQ ID NO: 697792 - DNA, 33 bp, Homo sapien
gattatgttttgcaactatgactgtcttgagtt

SEQ ID NO: 697793 - DNA, 33 bp, Homo sapien
gtattgatagacacacccatacctttgcatacc

SEQ ID NO: 697794 - DNA, 33 bp, Homo sapien
gtattgatagacacactcatacctttgcatacc

SEQ ID NO: 697795 - DNA, 33 bp, Homo sapien
gcatttatgttggtaaaatatttaaactgacca

SEQ ID NO: 697796 - DNA, 33 bp, Homo sapien
gcatttatgttggtaatatatttaaactgacca

SEQ ID NO: 697797 - DNA, 33 bp, Homo sapien
gtgactccacacatagaaaaaaaatgagatttt

SEQ ID NO: 697798 - DNA, 33 bp, Homo sapien
gtgactccacacataggaaaaaaatgagatttt

SEQ ID NO: 697799 - DNA, 33 bp, Homo sapien
ttacacttaaggaactaaccatagagtctttta

SEQ ID NO: 697800 - DNA, 33 bp, Homo sapien
ttacacttaaggaacttaccatagagtctttta

SEQ ID NO: 697801 - DNA, 33 bp, Homo sapien
ttaatcttataagaaacttgtgttcaaaagtgt

SEQ ID NO: 697802 - DNA, 33 bp, Homo sapien
ttaatcttataagaaatttgtgttcaaaagtgt

SEQ ID NO: 697803 - DNA, 33 bp, Homo sapien
atttggaggttatttcaaggttgcttcaaaata

SEQ ID NO: 697804 - DNA, 33 bp, Homo sapien
atttggaggttatttcgaggttgcttcaaaata

SEQ ID NO: 697805 - DNA, 33 bp, Homo sapien
tttacattgaccctaacccatgtttcagcacaa

SEQ ID NO: 697806 - DNA, 33 bp, Homo sapien
tttacattgaccctaatccatgtttcagcacaa

SEQ ID NO: 697807 - DNA, 33 bp, Homo sapien
atcttacacctgctaggagagtctagagatctt

SEQ ID NO: 697808 - DNA, 33 bp, Homo sapien
atcttacacctgctagtagagtctagagatctt

SEQ ID NO: 697809 - DNA, 33 bp, Homo sapien
agtgcctcaccgcccccctatatcctgtgtttg

SEQ ID NO: 697810 - DNA, 33 bp, Homo sapien
agtgcctcaccgcccctctatatcctgtgtttg

SEQ ID NO: 697811 - DNA, 33 bp, Homo sapien
tctctttttggggacaaattcatcctttctcag

SEQ ID NO: 697812 - DNA, 33 bp, Homo sapien
tctctttttggggacagattcatcctttctcag

SEQ ID NO: 697813 - DNA, 33 bp, Homo sapien
tggtgatgttagaaaaaactgattatcatggct

SEQ ID NO: 697814 - DNA, 33 bp, Homo sapien
tggtgatgttagaaaagactgattatcatggct

SEQ ID NO: 697815 - DNA, 33 bp, Homo sapien
aacaggctacaaaatgaaacagaatttttgaag

SEQ ID NO: 697816 - DNA, 33 bp, Homo sapien
aacaggctacaaaatggaacagaatttttgaag

SEQ ID NO: 697817 - DNA, 33 bp, Homo sapien
aaatgtgttaaaagaacgtcatattttgtcttt

SEQ ID NO: 697818 - DNA, 33 bp, Homo sapien
aaatgtgttaaaagaatgtcatattttgtcttt

SEQ ID NO: 697819 - DNA, 33 bp, Homo sapien
agcctagccaagctgacgtattaaaagatgatc

SEQ ID NO: 697820 - DNA, 33 bp, Homo sapien
agcctagccaagctgatgtattaaaagatgatc

SEQ ID NO: 697821 - DNA, 33 bp, Homo sapien
gactcaccatattctaacaagagttactccaga

SEQ ID NO: 697822 - DNA, 33 bp, Homo sapien
gactcaccatattctagcaagagttactccaga

SEQ ID NO: 697823 - DNA, 33 bp, Homo sapien
tcttgcttcttcctagcattctattgaagccat

SEQ ID NO: 697824 - DNA, 33 bp, Homo sapien
tcttgcttcttcctagtattctattgaagccat

SEQ ID NO: 697825 - DNA, 33 bp, Homo sapien
acaccaatcaaacgtacatttcatcttttcaca

SEQ ID NO: 697826 - DNA, 33 bp, Homo sapien
acaccaatcaaacgtatatttcatcttttcaca

SEQ ID NO: 697827 - DNA, 33 bp, Homo sapien
cacagaagtaagcccactgactgaaacagaatg

SEQ ID NO: 697828 - DNA, 33 bp, Homo sapien
cacagaagtaagcccagtgactgaaacagaatg

SEQ ID NO: 697829 - DNA, 33 bp, Homo sapien
agagaatggagctacacagtcccaaattgtagc

SEQ ID NO: 697830 - DNA, 33 bp, Homo sapien
agagaatggagctacatagtcccaaattgtagc

SEQ ID NO: 697831 - DNA, 33 bp, Homo sapien
ctaccaataccgcaagaacatagcctccacctc

SEQ ID NO: 697832 - DNA, 33 bp, Homo sapien
ctaccaataccgcaaggacatagcctccacctc

SEQ ID NO: 697833 - DNA, 33 bp, Homo sapien
catatcagtgatactcagaaaaggtcttaaaaa

SEQ ID NO: 697834 - DNA, 33 bp, Homo sapien
catatcagtgatactccgaaaaggtcttaaaaa

SEQ ID NO: 697835 - DNA, 33 bp, Homo sapien
aacaattctttcatcaactgttaagcttacgtt

SEQ ID NO: 697836 - DNA, 33 bp, Homo sapien
aacaattctttcatcatctgttaagcttacgtt

SEQ ID NO: 697837 - DNA, 33 bp, Homo sapien
atgttaagcagaattacggttgacgctcaaata

SEQ ID NO: 697838 - DNA, 33 bp, Homo sapien
atgttaagcagaattatggttgacgctcaaata

SEQ ID NO: 697839 - DNA, 33 bp, Homo sapien
cggaatcctcctaactaactcaagatcaaatca

SEQ ID NO: 697840 - DNA, 33 bp, Homo sapien
cggaatcctcctaactcactcaagatcaaatca

SEQ ID NO: 697841 - DNA, 33 bp, Homo sapien
tataagatgacagtgacgtgtgaataataagat

SEQ ID NO: 697842 - DNA, 33 bp, Homo sapien
tataagatgacagtgatgtgtgaataataagat

SEQ ID NO: 697843 - DNA, 33 bp, Homo sapien
tcttgtgtggttgaatcactatggtctctactg

SEQ ID NO: 697844 - DNA, 33 bp, Homo sapien
tcttgtgtggttgaatgactatggtctctactg

SEQ ID NO: 697845 - DNA, 33 bp, Homo sapien
tctggtagatgtccaaatggaagctggatattc

SEQ ID NO: 697846 - DNA, 33 bp, Homo sapien
tctggtagatgtccaagtggaagctggatattc

SEQ ID NO: 697847 - DNA, 33 bp, Homo sapien
ttatcttgctaaagaactaacaatcataaaaga

SEQ ID NO: 697848 - DNA, 33 bp, Homo sapien
ttatcttgctaaagaagtaacaatcataaaaga

SEQ ID NO: 697849 - DNA, 33 bp, Homo sapien
actctcttgcaatccaagtttggaaagtgtgat

SEQ ID NO: 697850 - DNA, 33 bp, Homo sapien
actctcttgcaatccaggtttggaaagtgtgat

SEQ ID NO: 697851 - DNA, 33 bp, Homo sapien
aaaaagaagatggacccgaatgctgggatgtta

SEQ ID NO: 697852 - DNA, 33 bp, Homo sapien
aaaaagaagatggacctgaatgctgggatgtta

SEQ ID NO: 697853 - DNA, 33 bp, Homo sapien
aaaattaaccatcacaaggacattgcaaaataa

SEQ ID NO: 697854 - DNA, 33 bp, Homo sapien
aaaattaaccatcacagggacattgcaaaataa

SEQ ID NO: 697855 - DNA, 33 bp, Homo sapien
gtacctaacatagaaaaaggcatgaatattctt

SEQ ID NO: 697856 - DNA, 33 bp, Homo sapien
gtacctaacatagaaagaggcatgaatattctt

SEQ ID NO: 697857 - DNA, 33 bp, Homo sapien
gtatacacctggagaacagactatgccatgtga

SEQ ID NO: 697858 - DNA, 33 bp, Homo sapien
gtatacacctggagaatagactatgccatgtga

SEQ ID NO: 697859 - DNA, 33 bp, Homo sapien
tggttgtgcagcaggaggtatctacacgaagag

SEQ ID NO: 697860 - DNA, 33 bp, Homo sapien
tggttgtgcagcaggatgtatctacacgaagag

SEQ ID NO: 697861 - DNA, 33 bp, Homo sapien
agagaggacaaatacacgattcctagtcctcat

SEQ ID NO: 697862 - DNA, 33 bp, Homo sapien
agagaggacaaatacaggattcctagtcctcat

SEQ ID NO: 697863 - DNA, 33 bp, Homo sapien
gtgaagttgtgtataacagtcttctacaggctc

SEQ ID NO: 697864 - DNA, 33 bp, Homo sapien
gtgaagttgtgtataatagtcttctacaggctc

SEQ ID NO: 697865 - DNA, 33 bp, Homo sapien
ctctttttttaactgaagcaagaacatttaaca

SEQ ID NO: 697866 - DNA, 33 bp, Homo sapien
ctctttttttaactgaggcaagaacatttaaca

SEQ ID NO: 697867 - DNA, 33 bp, Homo sapien
gcagctccaactcagacagagcactgtgcagag

SEQ ID NO: 697868 - DNA, 33 bp, Homo sapien
gcagctccaactcagatagagcactgtgcagag

SEQ ID NO: 697869 - DNA, 33 bp, Homo sapien
gcttttgatttacagcaagagaggtgggattgt

SEQ ID NO: 697870 - DNA, 33 bp, Homo sapien
gcttttgatttacagcgagagaggtgggattgt

SEQ ID NO: 697871 - DNA, 33 bp, Homo sapien
attttaattatttaggaaggcaccacgaaccac

SEQ ID NO: 697872 - DNA, 33 bp, Homo sapien
attttaattatttagggaggcaccacgaaccac

SEQ ID NO: 697873 - DNA, 33 bp, Homo sapien
ggtggctggctgaatagagaatcataccacgta

SEQ ID NO: 697874 - DNA, 33 bp, Homo sapien
ggtggctggctgaatatagaatcataccacgta

SEQ ID NO: 697875 - DNA, 33 bp, Homo sapien
tagaagttgtccttcaacaaaaagagactgagt

SEQ ID NO: 697876 - DNA, 33 bp, Homo sapien
tagaagttgtccttcaccaaaaagagactgagt

SEQ ID NO: 697877 - DNA, 33 bp, Homo sapien
agttggggtcaggaagccttcccagaaagtgat

SEQ ID NO: 697878 - DNA, 33 bp, Homo sapien
agttggggtcaggaagtcttcccagaaagtgat

SEQ ID NO: 697879 - DNA, 33 bp, Homo sapien
tggtgcatttaacatgaaagtgcaaagagagaa

SEQ ID NO: 697880 - DNA, 33 bp, Homo sapien
tggtgcatttaacatgtaagtgcaaagagagaa

SEQ ID NO: 697881 - DNA, 33 bp, Homo sapien
aactgagaatatctccagacatcgtcaaatgtt

SEQ ID NO: 697882 - DNA, 33 bp, Homo sapien
aactgagaatatctccggacatcgtcaaatgtt

SEQ ID NO: 697883 - DNA, 33 bp, Homo sapien
gcatctctgtcttttaactactagatgacagta

SEQ ID NO: 697884 - DNA, 33 bp, Homo sapien
gcatctctgtcttttacctactagatgacagta

SEQ ID NO: 697885 - DNA, 33 bp, Homo sapien
acagactgtaacagaaacaaaaccaatctcccc

SEQ ID NO: 697886 - DNA, 33 bp, Homo sapien
acagactgtaacagaaccaaaaccaatctcccc

SEQ ID NO: 697887 - DNA, 33 bp, Homo sapien
taactatgactaaaaaatgccaaagtacagctt

SEQ ID NO: 697888 - DNA, 33 bp, Homo sapien
taactatgactaaaaagtgccaaagtacagctt

SEQ ID NO: 697889 - DNA, 33 bp, Homo sapien
cctaaagatttgaagcagaaaaatttgggggtg

SEQ ID NO: 697890 - DNA, 33 bp, Homo sapien
cctaaagatttgaagcggaaaaatttgggggtg

SEQ ID NO: 697891 - DNA, 33 bp, Homo sapien
accaagaaatcatatccgagttgatcttacaat

SEQ ID NO: 697892 - DNA, 33 bp, Homo sapien
accaagaaatcatatctgagttgatcttacaat

SEQ ID NO: 697893 - DNA, 33 bp, Homo sapien
agtcaaatttcttgccaactttgaattattaag

SEQ ID NO: 697894 - DNA, 33 bp, Homo sapien
agtcaaatttcttgccgactttgaattattaag

SEQ ID NO: 697895 - DNA, 33 bp, Homo sapien
tttttacctagatgacaatgttttatatgaaag

SEQ ID NO: 697896 - DNA, 33 bp, Homo sapien
tttttacctagatgaccatgttttatatgaaag

SEQ ID NO: 697897 - DNA, 33 bp, Homo sapien
gtcacaacatttttggcaagataattgcacggt

SEQ ID NO: 697898 - DNA, 33 bp, Homo sapien
gtcacaacatttttggtaagataattgcacggt

SEQ ID NO: 697899 - DNA, 33 bp, Homo sapien
atcacaagtttccacaataggctgtctgcaagc

SEQ ID NO: 697900 - DNA, 33 bp, Homo sapien
atcacaagtttccacagtaggctgtctgcaagc

SEQ ID NO: 697901 - DNA, 33 bp, Homo sapien
ccaagaccacaggcaacaaaaataaaaataagc

SEQ ID NO: 697902 - DNA, 33 bp, Homo sapien
ccaagaccacaggcaagaaaaataaaaataagc

SEQ ID NO: 697903 - DNA, 33 bp, Homo sapien
taggaatgcttttctaccttgttggcaaatatg

SEQ ID NO: 697904 - DNA, 33 bp, Homo sapien
taggaatgcttttctatcttgttggcaaatatg

SEQ ID NO: 697905 - DNA, 33 bp, Homo sapien
gctattatagcatgaaaacagtgatagttgaca

SEQ ID NO: 697906 - DNA, 33 bp, Homo sapien
gctattatagcatgaagacagtgatagttgaca

SEQ ID NO: 697907 - DNA, 33 bp, Homo sapien
catattttaatgaagcaactctgttttatcttt

SEQ ID NO: 697908 - DNA, 33 bp, Homo sapien
catattttaatgaagcgactctgttttatcttt

SEQ ID NO: 697909 - DNA, 33 bp, Homo sapien
tcagaaagtcaggccaacagtttgaatctatca

SEQ ID NO: 697910 - DNA, 33 bp, Homo sapien
tcagaaagtcaggccagcagtttgaatctatca

SEQ ID NO: 697911 - DNA, 33 bp, Homo sapien
ttatacatatagctccccaatctatcacttacc

SEQ ID NO: 697912 - DNA, 33 bp, Homo sapien
ttatacatatagctcctcaatctatcacttacc

SEQ ID NO: 697913 - DNA, 33 bp, Homo sapien
atcctttgcaaagtaccgtaagaataagcgatg

SEQ ID NO: 697914 - DNA, 33 bp, Homo sapien
atcctttgcaaagtactgtaagaataagcgatg

SEQ ID NO: 697915 - DNA, 33 bp, Homo sapien
acacatcttgccacgaaaaccagttgctatttc

SEQ ID NO: 697916 - DNA, 33 bp, Homo sapien
acacatcttgccacgataaccagttgctatttc

SEQ ID NO: 697917 - DNA, 33 bp, Homo sapien
catgacttgtagcaaactcacctgacaattacc

SEQ ID NO: 697918 - DNA, 33 bp, Homo sapien
catgacttgtagcaaattcacctgacaattacc

SEQ ID NO: 697919 - DNA, 33 bp, Homo sapien
gccatgaacctgaaaaacatagattataaccat

SEQ ID NO: 697920 - DNA, 33 bp, Homo sapien
gccatgaacctgaaaagcatagattataaccat

SEQ ID NO: 697921 - DNA, 33 bp, Homo sapien
ggtcaaaattcccagaacaaggcactgacatat

SEQ ID NO: 697922 - DNA, 33 bp, Homo sapien
ggtcaaaattcccagagcaaggcactgacatat

SEQ ID NO: 697923 - DNA, 33 bp, Homo sapien
caaaatagggtattgactaagtaaggaataggc

SEQ ID NO: 697924 - DNA, 33 bp, Homo sapien
caaaatagggtattgagtaagtaaggaataggc

SEQ ID NO: 697925 - DNA, 33 bp, Homo sapien
ccactccttagatacaacgatctttttgaaatg

SEQ ID NO: 697926 - DNA, 33 bp, Homo sapien
ccactccttagatacagcgatctttttgaaatg

SEQ ID NO: 697927 - DNA, 33 bp, Homo sapien
caaaaccattttttccagctaggcctttgggct

SEQ ID NO: 697928 - DNA, 33 bp, Homo sapien
caaaaccattttttcctgctaggcctttgggct

SEQ ID NO: 697929 - DNA, 33 bp, Homo sapien
tgccctcgggcatatgaaactcactgtgaatcg

SEQ ID NO: 697930 - DNA, 33 bp, Homo sapien
tgccctcgggcatatggaactcactgtgaatcg

SEQ ID NO: 697931 - DNA, 33 bp, Homo sapien
gctttctaggaaatataaaggagatgtgaggag

SEQ ID NO: 697932 - DNA, 33 bp, Homo sapien
gctttctaggaaatatgaaggagatgtgaggag

SEQ ID NO: 697933 - DNA, 33 bp, Homo sapien
gtgtaatggggagagagaaaggacaaaaagaga

SEQ ID NO: 697934 - DNA, 33 bp, Homo sapien
gtgtaatggggagagataaaggacaaaaagaga

SEQ ID NO: 697935 - DNA, 33 bp, Homo sapien
agaaatcaagtatgtaactcattcttagatctt

SEQ ID NO: 697936 - DNA, 33 bp, Homo sapien
agaaatcaagtatgtacctcattcttagatctt

SEQ ID NO: 697937 - DNA, 33 bp, Homo sapien
taaagcagtctttccacaaatctcaaagtaata

SEQ ID NO: 697938 - DNA, 33 bp, Homo sapien
taaagcagtctttccataaatctcaaagtaata

SEQ ID NO: 697939 - DNA, 33 bp, Homo sapien
ttgtcttaccttactaatagctcaacaatgcat

SEQ ID NO: 697940 - DNA, 33 bp, Homo sapien
ttgtcttaccttactagtagctcaacaatgcat

SEQ ID NO: 697941 - DNA, 33 bp, Homo sapien
ctctagttagtggaaagattttttagtgtctcc

SEQ ID NO: 697942 - DNA, 33 bp, Homo sapien
ctctagttagtggaaatattttttagtgtctcc

SEQ ID NO: 697943 - DNA, 33 bp, Homo sapien
tccatggcagttgtacaaaatgtaccataacat

SEQ ID NO: 697944 - DNA, 33 bp, Homo sapien
tccatggcagttgtaccaaatgtaccataacat

SEQ ID NO: 697945 - DNA, 33 bp, Homo sapien
tagctcatggaggcaaagtatgcaaaagtaacc

SEQ ID NO: 697946 - DNA, 33 bp, Homo sapien
tagctcatggaggcaaggtatgcaaaagtaacc

SEQ ID NO: 697947 - DNA, 33 bp, Homo sapien
ttcttgatcacatgctaaacaccaagtggatta

SEQ ID NO: 697948 - DNA, 33 bp, Homo sapien
ttcttgatcacatgctgaacaccaagtggatta

SEQ ID NO: 697949 - DNA, 33 bp, Homo sapien
tactgtgaggtaggtacaatgctaagaattgta

SEQ ID NO: 697950 - DNA, 33 bp, Homo sapien
tactgtgaggtaggtataatgctaagaattgta

SEQ ID NO: 697951 - DNA, 33 bp, Homo sapien
attgtatggaataaaacgacctgagctgtcatc

SEQ ID NO: 697952 - DNA, 33 bp, Homo sapien
attgtatggaataaaaggacctgagctgtcatc

SEQ ID NO: 697953 - DNA, 33 bp, Homo sapien
acttaacaaaagccgacgtaattatgccctatt

SEQ ID NO: 697954 - DNA, 33 bp, Homo sapien
acttaacaaaagccgatgtaattatgccctatt

SEQ ID NO: 697955 - DNA, 33 bp, Homo sapien
tagtatgtggatgatacaggtaaaaactccctg

SEQ ID NO: 697956 - DNA, 33 bp, Homo sapien
tagtatgtggatgatataggtaaaaactccctg

SEQ ID NO: 697957 - DNA, 33 bp, Homo sapien
aagggtgcgcatatgaaccaagcaaggtcagac

SEQ ID NO: 697958 - DNA, 33 bp, Homo sapien
aagggtgcgcatatgagccaagcaaggtcagac

SEQ ID NO: 697959 - DNA, 33 bp, Homo sapien
tgagtcaaatctgagtcacctttgtattcctcc

SEQ ID NO: 697960 - DNA, 33 bp, Homo sapien
tgagtcaaatctgagttacctttgtattcctcc

SEQ ID NO: 697961 - DNA, 33 bp, Homo sapien
aagaaagaagtaaagcaaaagcagagaagattg

SEQ ID NO: 697962 - DNA, 33 bp, Homo sapien
aagaaagaagtaaagcgaaagcagagaagattg

SEQ ID NO: 697963 - DNA, 33 bp, Homo sapien
gagagcctttataaaacgccagtgagtttatct

SEQ ID NO: 697964 - DNA, 33 bp, Homo sapien
gagagcctttataaaatgccagtgagtttatct

SEQ ID NO: 697965 - DNA, 33 bp, Homo sapien
aatctccaaatcagcaatcaacactccattact

SEQ ID NO: 697966 - DNA, 33 bp, Homo sapien
aatctccaaatcagcagtcaacactccattact

SEQ ID NO: 697967 - DNA, 33 bp, Homo sapien
ttgcagtgtctttggccatggaagcttggataa

SEQ ID NO: 697968 - DNA, 33 bp, Homo sapien
ttgcagtgtctttggctatggaagcttggataa

SEQ ID NO: 697969 - DNA, 33 bp, Homo sapien
ctggagaagtggtgcacaacagagttagagagt

SEQ ID NO: 697970 - DNA, 33 bp, Homo sapien
ctggagaagtggtgcataacagagttagagagt

SEQ ID NO: 697971 - DNA, 33 bp, Homo sapien
aacctgctttcaccacaatgacaatttgtctct

SEQ ID NO: 697972 - DNA, 33 bp, Homo sapien
aacctgctttcaccacgatgacaatttgtctct

SEQ ID NO: 697973 - DNA, 33 bp, Homo sapien
tacagctggaagaatacaccttaactgatgaca

SEQ ID NO: 697974 - DNA, 33 bp, Homo sapien
tacagctggaagaatagaccttaactgatgaca

SEQ ID NO: 697975 - DNA, 33 bp, Homo sapien
ctggttctgtcatgcaactacagtactaagatt

SEQ ID NO: 697976 - DNA, 33 bp, Homo sapien
ctggttctgtcatgcatctacagtactaagatt

SEQ ID NO: 697977 - DNA, 33 bp, Homo sapien
gttgcaattgaaaagcaaagtcttttgtgtctg

SEQ ID NO: 697978 - DNA, 33 bp, Homo sapien
gttgcaattgaaaagcgaagtcttttgtgtctg

SEQ ID NO: 697979 - DNA, 33 bp, Homo sapien
acagagcataagacaaggcctagaaacacaaag

SEQ ID NO: 697980 - DNA, 33 bp, Homo sapien
acagagcataagacaatgcctagaaacacaaag

SEQ ID NO: 697981 - DNA, 33 bp, Homo sapien
gggactgcttctagaaggtgagctataccaagg

SEQ ID NO: 697982 - DNA, 33 bp, Homo sapien
gggactgcttctagaatgtgagctataccaagg

SEQ ID NO: 697983 - DNA, 33 bp, Homo sapien
aagaacaaagctatataaattgtgaatcaaaaa

SEQ ID NO: 697984 - DNA, 33 bp, Homo sapien
aagaacaaagctatatgaattgtgaatcaaaaa

SEQ ID NO: 697985 - DNA, 33 bp, Homo sapien
aatagcagaggtagtaaagggtaggataaaaat

SEQ ID NO: 697986 - DNA, 33 bp, Homo sapien
aatagcagaggtagtagagggtaggataaaaat

SEQ ID NO: 697987 - DNA, 33 bp, Homo sapien
attgttttgtaatcagaaatctatgacacatat

SEQ ID NO: 697988 - DNA, 33 bp, Homo sapien
attgttttgtaatcaggaatctatgacacatat

SEQ ID NO: 697989 - DNA, 33 bp, Homo sapien
agaaatgcctgtttgagctgaatagctgtaaca

SEQ ID NO: 697990 - DNA, 33 bp, Homo sapien
agaaatgcctgtttgatctgaatagctgtaaca

SEQ ID NO: 697991 - DNA, 33 bp, Homo sapien
tgatgctccaggtagagagccactgagactcta

SEQ ID NO: 697992 - DNA, 33 bp, Homo sapien
tgatgctccaggtagatagccactgagactcta

SEQ ID NO: 697993 - DNA, 33 bp, Homo sapien
tgagtgaatgatcaccacaaatatcaacatgga

SEQ ID NO: 697994 - DNA, 33 bp, Homo sapien
tgagtgaatgatcaccgcaaatatcaacatgga

SEQ ID NO: 697995 - DNA, 33 bp, Homo sapien
aggcgagaaggctaagcaggtgccacaagatac

SEQ ID NO: 697996 - DNA, 33 bp, Homo sapien
aggcgagaaggctaagtaggtgccacaagatac

SEQ ID NO: 697997 - DNA, 33 bp, Homo sapien
gaagctctggttaacaggatcttcaaagtcagt

SEQ ID NO: 697998 - DNA, 33 bp, Homo sapien
gaagctctggttaacatgatcttcaaagtcagt

SEQ ID NO: 697999 - DNA, 33 bp, Homo sapien
ctgcatcagcttgtgaacttcataaggacgctg

SEQ ID NO: 698000 - DNA, 33 bp, Homo sapien
ctgcatcagcttgtgagcttcataaggacgctg

SEQ ID NO: 698001 - DNA, 33 bp, Homo sapien
gcttatgggaatgatcaaaaagagagagaaaaa

SEQ ID NO: 698002 - DNA, 33 bp, Homo sapien
gcttatgggaatgatcgaaaagagagagaaaaa

SEQ ID NO: 698003 - DNA, 33 bp, Homo sapien
cacatctgtccctttacctgcatatatccatat

SEQ ID NO: 698004 - DNA, 33 bp, Homo sapien
cacatctgtccctttatctgcatatatccatat

SEQ ID NO: 698005 - DNA, 33 bp, Homo sapien
tttttccttccagagaagatcggtagttgtgcc

SEQ ID NO: 698006 - DNA, 33 bp, Homo sapien
tttttccttccagagaggatcggtagttgtgcc

SEQ ID NO: 698007 - DNA, 33 bp, Homo sapien
gcacatattggttctacgaattgagactttttt

SEQ ID NO: 698008 - DNA, 33 bp, Homo sapien
gcacatattggttctatgaattgagactttttt

SEQ ID NO: 698009 - DNA, 33 bp, Homo sapien
ggaggcactgttaccaatgaagttgggctccta

SEQ ID NO: 698010 - DNA, 33 bp, Homo sapien
ggaggcactgttaccactgaagttgggctccta

SEQ ID NO: 698011 - DNA, 33 bp, Homo sapien
ctctgaagattcactgaaaactcagctcacaaa

SEQ ID NO: 698012 - DNA, 33 bp, Homo sapien
ctctgaagattcactggaaactcagctcacaaa

SEQ ID NO: 698013 - DNA, 33 bp, Homo sapien
gataaggaagaatagccagtggatggtgggctt

SEQ ID NO: 698014 - DNA, 33 bp, Homo sapien
gataaggaagaatagctagtggatggtgggctt

SEQ ID NO: 698015 - DNA, 33 bp, Homo sapien
gtgttcttcaagggaaagttctaaacacaccat

SEQ ID NO: 698016 - DNA, 33 bp, Homo sapien
gtgttcttcaagggaatgttctaaacacaccat

SEQ ID NO: 698017 - DNA, 33 bp, Homo sapien
tacaacaccaagaatgaactctgatataaacta

SEQ ID NO: 698018 - DNA, 33 bp, Homo sapien
tacaacaccaagaatggactctgatataaacta

SEQ ID NO: 698019 - DNA, 33 bp, Homo sapien
ttcataatgaaagataaccttcttctgtcatat

SEQ ID NO: 698020 - DNA, 33 bp, Homo sapien
ttcataatgaaagatagccttcttctgtcatat

SEQ ID NO: 698021 - DNA, 33 bp, Homo sapien
aattttggttcacagacctgagaaatcaatctt

SEQ ID NO: 698022 - DNA, 33 bp, Homo sapien
aattttggttcacagagctgagaaatcaatctt

SEQ ID NO: 698023 - DNA, 33 bp, Homo sapien
agcccccaccatttgacagacctgagcctacct

SEQ ID NO: 698024 - DNA, 33 bp, Homo sapien
agcccccaccatttgatagacctgagcctacct

SEQ ID NO: 698025 - DNA, 33 bp, Homo sapien
aagctttttggaattgcagtagatgaaacatct

SEQ ID NO: 698026 - DNA, 33 bp, Homo sapien
aagctttttggaattgtagtagatgaaacatct

SEQ ID NO: 698027 - DNA, 33 bp, Homo sapien
ctgacagtgatgagcccggaacgaataccgaat

SEQ ID NO: 698028 - DNA, 33 bp, Homo sapien
ctgacagtgatgagcctggaacgaataccgaat

SEQ ID NO: 698029 - DNA, 33 bp, Homo sapien
gttctgtgtcactaaacccaacggccatttttt

SEQ ID NO: 698030 - DNA, 33 bp, Homo sapien
gttctgtgtcactaaatccaacggccatttttt

SEQ ID NO: 698031 - DNA, 33 bp, Homo sapien
atcttgctaaaaaaaaatctaaatcacaccaat

SEQ ID NO: 698032 - DNA, 33 bp, Homo sapien
atcttgctaaaaaaaagtctaaatcacaccaat

SEQ ID NO: 698033 - DNA, 33 bp, Homo sapien
tctagtaagaacaacaggaacaaatgtcaaagt

SEQ ID NO: 698034 - DNA, 33 bp, Homo sapien
tctagtaagaacaacatgaacaaatgtcaaagt

SEQ ID NO: 698035 - DNA, 33 bp, Homo sapien
atgaagttctgcacagaaatgagaataaatgca

SEQ ID NO: 698036 - DNA, 33 bp, Homo sapien
atgaagttctgcacagcaatgagaataaatgca

SEQ ID NO: 698037 - DNA, 33 bp, Homo sapien
aaagatttacacttgcactcagtttgtaattcc

SEQ ID NO: 698038 - DNA, 33 bp, Homo sapien
aaagatttacacttgcgctcagtttgtaattcc

SEQ ID NO: 698039 - DNA, 33 bp, Homo sapien
cattgcttcagggtcacgttttgaaaatactgt

SEQ ID NO: 698040 - DNA, 33 bp, Homo sapien
cattgcttcagggtcatgttttgaaaatactgt

SEQ ID NO: 698041 - DNA, 33 bp, Homo sapien
taaagtgattacctggaaagatacgaaatcttc

SEQ ID NO: 698042 - DNA, 33 bp, Homo sapien
taaagtgattacctgggaagatacgaaatcttc

SEQ ID NO: 698043 - DNA, 33 bp, Homo sapien
tcagattttgaagagacagtatttgcaccccta

SEQ ID NO: 698044 - DNA, 33 bp, Homo sapien
tcagattttgaagagatagtatttgcaccccta

SEQ ID NO: 698045 - DNA, 33 bp, Homo sapien
cataaaaaaagtcacacataccccataaatttg

SEQ ID NO: 698046 - DNA, 33 bp, Homo sapien
cataaaaaaagtcacatataccccataaatttg

SEQ ID NO: 698047 - DNA, 33 bp, Homo sapien
acaccttaaaaacttaataactcctgcttgaga

SEQ ID NO: 698048 - DNA, 33 bp, Homo sapien
acaccttaaaaacttagtaactcctgcttgaga

SEQ ID NO: 698049 - DNA, 33 bp, Homo sapien
aggctggtgatgtgccactttttggaaggtagc

SEQ ID NO: 698050 - DNA, 33 bp, Homo sapien
aggctggtgatgtgcccctttttggaaggtagc

SEQ ID NO: 698051 - DNA, 33 bp, Homo sapien
agacaaactaatagcaaaatcaggtaattatag

SEQ ID NO: 698052 - DNA, 33 bp, Homo sapien
agacaaactaatagcacaatcaggtaattatag

SEQ ID NO: 698053 - DNA, 33 bp, Homo sapien
aagaactaactggcaaagactatcagattttag

SEQ ID NO: 698054 - DNA, 33 bp, Homo sapien
aagaactaactggcaacgactatcagattttag

SEQ ID NO: 698055 - DNA, 33 bp, Homo sapien
atgccatagatgaaaaatttaggagagcatcag

SEQ ID NO: 698056 - DNA, 33 bp, Homo sapien
atgccatagatgaaaactttaggagagcatcag

SEQ ID NO: 698057 - DNA, 33 bp, Homo sapien
gtcaaggaaggtcagagaatgcatgagaaagaa

SEQ ID NO: 698058 - DNA, 33 bp, Homo sapien
gtcaaggaaggtcagataatgcatgagaaagaa

SEQ ID NO: 698059 - DNA, 33 bp, Homo sapien
agtctgcctacttccagatttttatgtgtgaga

SEQ ID NO: 698060 - DNA, 33 bp, Homo sapien
agtctgcctacttccatatttttatgtgtgaga

SEQ ID NO: 698061 - DNA, 33 bp, Homo sapien
tgtgcttcttgaaagacggagctctagacgtgt

SEQ ID NO: 698062 - DNA, 33 bp, Homo sapien
tgtgcttcttgaaagatggagctctagacgtgt

SEQ ID NO: 698063 - DNA, 33 bp, Homo sapien
ttgagttagtttaagacgtgatcccaaagctca

SEQ ID NO: 698064 - DNA, 33 bp, Homo sapien
ttgagttagtttaagatgtgatcccaaagctca

SEQ ID NO: 698065 - DNA, 33 bp, Homo sapien
tttttgtgagtttaaaataggaaattctcagtc

SEQ ID NO: 698066 - DNA, 33 bp, Homo sapien
tttttgtgagtttaaagtaggaaattctcagtc

SEQ ID NO: 698067 - DNA, 33 bp, Homo sapien
gcttgggttcatggtaagtgtgaaatgtccatt

SEQ ID NO: 698068 - DNA, 33 bp, Homo sapien
gcttgggttcatggtatgtgtgaaatgtccatt

SEQ ID NO: 698069 - DNA, 33 bp, Homo sapien
ttggaaacatatgtaacggtcatttgatagtaa

SEQ ID NO: 698070 - DNA, 33 bp, Homo sapien
ttggaaacatatgtaatggtcatttgatagtaa

SEQ ID NO: 698071 - DNA, 33 bp, Homo sapien
tgtaccactaacaaaccccacttccctctcaat

SEQ ID NO: 698072 - DNA, 33 bp, Homo sapien
tgtaccactaacaaactccacttccctctcaat

SEQ ID NO: 698073 - DNA, 33 bp, Homo sapien
tatctacaagttttcaaatagctatagattctc

SEQ ID NO: 698074 - DNA, 33 bp, Homo sapien
tatctacaagttttcagatagctatagattctc

SEQ ID NO: 698075 - DNA, 33 bp, Homo sapien
gactctgattgccaaacaataggatatccagtc

SEQ ID NO: 698076 - DNA, 33 bp, Homo sapien
gactctgattgccaaataataggatatccagtc

SEQ ID NO: 698077 - DNA, 33 bp, Homo sapien
ttcaagtctagtcttaagcacactgaagtttga

SEQ ID NO: 698078 - DNA, 33 bp, Homo sapien
ttcaagtctagtcttatgcacactgaagtttga

SEQ ID NO: 698079 - DNA, 33 bp, Homo sapien
ggtcaggaaaagatcaataatccagctaaagca

SEQ ID NO: 698080 - DNA, 33 bp, Homo sapien
ggtcaggaaaagatcagtaatccagctaaagca

SEQ ID NO: 698081 - DNA, 33 bp, Homo sapien
cagttcccttcctgcaagctttaggcattacag

SEQ ID NO: 698082 - DNA, 33 bp, Homo sapien
cagttcccttcctgcaggctttaggcattacag

SEQ ID NO: 698083 - DNA, 33 bp, Homo sapien
cctgacagacccacagaattggacagagtggca

SEQ ID NO: 698084 - DNA, 33 bp, Homo sapien
cctgacagacccacaggattggacagagtggca

SEQ ID NO: 698085 - DNA, 33 bp, Homo sapien
ggcttctcccaccatcagaggaaactttcaatc

SEQ ID NO: 698086 - DNA, 33 bp, Homo sapien
ggcttctcccaccatcggaggaaactttcaatc

SEQ ID NO: 698087 - DNA, 33 bp, Homo sapien
tcattgtgatggttgcacaatgatgactttcat

SEQ ID NO: 698088 - DNA, 33 bp, Homo sapien
tcattgtgatggttgcgcaatgatgactttcat

SEQ ID NO: 698089 - DNA, 33 bp, Homo sapien
gttacttttgcactaacgtaatactagcaatat

SEQ ID NO: 698090 - DNA, 33 bp, Homo sapien
gttacttttgcactaatgtaatactagcaatat

SEQ ID NO: 698091 - DNA, 33 bp, Homo sapien
tactcttgacaaatgaaagtgcacattgattgc

SEQ ID NO: 698092 - DNA, 33 bp, Homo sapien
tactcttgacaaatgacagtgcacattgattgc

SEQ ID NO: 698093 - DNA, 33 bp, Homo sapien
ttccaaagtagtagagaatatggctaggactgg

SEQ ID NO: 698094 - DNA, 33 bp, Homo sapien
ttccaaagtagtagagtatatggctaggactgg

SEQ ID NO: 698095 - DNA, 33 bp, Homo sapien
agtttgtgccttgtatcaccatttcttatcttt

SEQ ID NO: 698096 - DNA, 33 bp, Homo sapien
agtttgtgccttgtattaccatttcttatcttt

SEQ ID NO: 698097 - DNA, 33 bp, Homo sapien
ttgctttctacatgaagcaacaaggtcatatcc

SEQ ID NO: 698098 - DNA, 33 bp, Homo sapien
ttgctttctacatgaatcaacaaggtcatatcc

SEQ ID NO: 698099 - DNA, 33 bp, Homo sapien
caatgttcatgttggcaaccattatgctatatt

SEQ ID NO: 698100 - DNA, 33 bp, Homo sapien
caatgttcatgttggcgaccattatgctatatt

SEQ ID NO: 698101 - DNA, 33 bp, Homo sapien
aatctctctcagtccaggttctgaaaggacagt

SEQ ID NO: 698102 - DNA, 33 bp, Homo sapien
aatctctctcagtccatgttctgaaaggacagt

SEQ ID NO: 698103 - DNA, 33 bp, Homo sapien
aaacttggtaacctggaaaataaggacttgaag

SEQ ID NO: 698104 - DNA, 33 bp, Homo sapien
aaacttggtaacctgggaaataaggacttgaag

SEQ ID NO: 698105 - DNA, 33 bp, Homo sapien
ctattggttaagttgccaatggatgcataaatc

SEQ ID NO: 698106 - DNA, 33 bp, Homo sapien
ctattggttaagttgctaatggatgcataaatc

SEQ ID NO: 698107 - DNA, 33 bp, Homo sapien
tgtattcaaacgatgaagttttgaatcccagat

SEQ ID NO: 698108 - DNA, 33 bp, Homo sapien
tgtattcaaacgatgaggttttgaatcccagat

SEQ ID NO: 698109 - DNA, 33 bp, Homo sapien
cagtactcatccaaaactgacctcctgatcatc

SEQ ID NO: 698110 - DNA, 33 bp, Homo sapien
cagtactcatccaaaattgacctcctgatcatc

SEQ ID NO: 698111 - DNA, 33 bp, Homo sapien
tcctgttccaatctgacaccctgataccaggga

SEQ ID NO: 698112 - DNA, 33 bp, Homo sapien
tcctgttccaatctgataccctgataccaggga

SEQ ID NO: 698113 - DNA, 33 bp, Homo sapien
agtatttggcacattaaagatacctggaaaaaa

SEQ ID NO: 698114 - DNA, 33 bp, Homo sapien
agtatttggcacattagagatacctggaaaaaa

SEQ ID NO: 698115 - DNA, 33 bp, Homo sapien
catttaatattcacaagaatctgtcaggtacat

SEQ ID NO: 698116 - DNA, 33 bp, Homo sapien
catttaatattcacaataatctgtcaggtacat

SEQ ID NO: 698117 - DNA, 33 bp, Homo sapien
tgtgatgatttatctacatactgtttgttgaag

SEQ ID NO: 698118 - DNA, 33 bp, Homo sapien
tgtgatgatttatctagatactgtttgttgaag

SEQ ID NO: 698119 - DNA, 33 bp, Homo sapien
atgtaagaactacaaaagtaatggcatagatga

SEQ ID NO: 698120 - DNA, 33 bp, Homo sapien
atgtaagaactacaaaggtaatggcatagatga

SEQ ID NO: 698121 - DNA, 33 bp, Homo sapien
cctagccatgcataacgacaggaaaaatgacag

SEQ ID NO: 698122 - DNA, 33 bp, Homo sapien
cctagccatgcataactacaggaaaaatgacag

SEQ ID NO: 698123 - DNA, 33 bp, Homo sapien
attgggtcaggtggacaaaaaggcaatagtaga

SEQ ID NO: 698124 - DNA, 33 bp, Homo sapien
attgggtcaggtggacgaaaaggcaatagtaga

SEQ ID NO: 698125 - DNA, 33 bp, Homo sapien
ttgattttgctggttcacatcctaaagagaagt

SEQ ID NO: 698126 - DNA, 33 bp, Homo sapien
ttgattttgctggttcgcatcctaaagagaagt

SEQ ID NO: 698127 - DNA, 33 bp, Homo sapien
acatattccattaagtaaaagcctctcatttta

SEQ ID NO: 698128 - DNA, 33 bp, Homo sapien
acatattccattaagtgaaagcctctcatttta

SEQ ID NO: 698129 - DNA, 33 bp, Homo sapien
aaacctgattgatttaagtgaagctcagaaaca

SEQ ID NO: 698130 - DNA, 33 bp, Homo sapien
aaacctgattgatttaggtgaagctcagaaaca

SEQ ID NO: 698131 - DNA, 33 bp, Homo sapien
tttcacgcattcccaacccagtggacactcaac

SEQ ID NO: 698132 - DNA, 33 bp, Homo sapien
tttcacgcattcccaatccagtggacactcaac

SEQ ID NO: 698133 - DNA, 33 bp, Homo sapien
tgatggggacactgaaatcatctgtatgaacaa

SEQ ID NO: 698134 - DNA, 33 bp, Homo sapien
tgatggggacactgaagtcatctgtatgaacaa

SEQ ID NO: 698135 - DNA, 33 bp, Homo sapien
gaataatgtaccagagaatgcttttaaaaatcc

SEQ ID NO: 698136 - DNA, 33 bp, Homo sapien
gaataatgtaccagaggatgcttttaaaaatcc

SEQ ID NO: 698137 - DNA, 33 bp, Homo sapien
cagatcagtaggtgaagccctgagcatcttaca

SEQ ID NO: 698138 - DNA, 33 bp, Homo sapien
cagatcagtaggtgaatccctgagcatcttaca

SEQ ID NO: 698139 - DNA, 33 bp, Homo sapien
gtctgcaaattaccatcaaagtgacatgaatat

SEQ ID NO: 698140 - DNA, 33 bp, Homo sapien
gtctgcaaattaccatgaaagtgacatgaatat

SEQ ID NO: 698141 - DNA, 33 bp, Homo sapien
ccctctactgagaaacagccactattaatattt

SEQ ID NO: 698142 - DNA, 33 bp, Homo sapien
ccctctactgagaaacggccactattaatattt

SEQ ID NO: 698143 - DNA, 33 bp, Homo sapien
agtttgaaagtggctacaattttgtaaaacatt

SEQ ID NO: 698144 - DNA, 33 bp, Homo sapien
agtttgaaagtggctataattttgtaaaacatt

SEQ ID NO: 698145 - DNA, 33 bp, Homo sapien
tttattaggcaattgacaaaaaggacttatttc

SEQ ID NO: 698146 - DNA, 33 bp, Homo sapien
tttattaggcaattgagaaaaaggacttatttc

SEQ ID NO: 698147 - DNA, 33 bp, Homo sapien
tcttatcagcttaacaacctcagtggaaaaagg

SEQ ID NO: 698148 - DNA, 33 bp, Homo sapien
tcttatcagcttaacatcctcagtggaaaaagg

SEQ ID NO: 698149 - DNA, 33 bp, Homo sapien
ggatttaagatcattacaccatgctaagtttaa

SEQ ID NO: 698150 - DNA, 33 bp, Homo sapien
ggatttaagatcattataccatgctaagtttaa

SEQ ID NO: 698151 - DNA, 33 bp, Homo sapien
aatttccaaatgcttcagaaaactgttcaaatc

SEQ ID NO: 698152 - DNA, 33 bp, Homo sapien
aatttccaaatgcttcggaaaactgttcaaatc

SEQ ID NO: 698153 - DNA, 33 bp, Homo sapien
gcagtggtatcttgtagactaccaggacaggaa

SEQ ID NO: 698154 - DNA, 33 bp, Homo sapien
gcagtggtatcttgtatactaccaggacaggaa

SEQ ID NO: 698155 - DNA, 33 bp, Homo sapien
ggcaaaacattgactcacagaaattaatgtgat

SEQ ID NO: 698156 - DNA, 33 bp, Homo sapien
ggcaaaacattgactcgcagaaattaatgtgat

SEQ ID NO: 698157 - DNA, 33 bp, Homo sapien
aaatttcctgaaccaccagaatcctggcaactt

SEQ ID NO: 698158 - DNA, 33 bp, Homo sapien
aaatttcctgaaccactagaatcctggcaactt

SEQ ID NO: 698159 - DNA, 33 bp, Homo sapien
gacaaaagactacaaaaacatggttgtgaaact

SEQ ID NO: 698160 - DNA, 33 bp, Homo sapien
gacaaaagactacaaacacatggttgtgaaact

SEQ ID NO: 698161 - DNA, 33 bp, Homo sapien
catggtggatgtcaatcacagttcctgatccat

SEQ ID NO: 698162 - DNA, 33 bp, Homo sapien
catggtggatgtcaattacagttcctgatccat

SEQ ID NO: 698163 - DNA, 33 bp, Homo sapien
tcaattctcacaaaaactaatatccccatatga

SEQ ID NO: 698164 - DNA, 33 bp, Homo sapien
tcaattctcacaaaaagtaatatccccatatga

SEQ ID NO: 698165 - DNA, 33 bp, Homo sapien
tttcagatcatcataccaggctttatgtaagtc

SEQ ID NO: 698166 - DNA, 33 bp, Homo sapien
tttcagatcatcatacgaggctttatgtaagtc

SEQ ID NO: 698167 - DNA, 33 bp, Homo sapien
cccataagagccaacccgatgaatatatttgtt

SEQ ID NO: 698168 - DNA, 33 bp, Homo sapien
cccataagagccaacctgatgaatatatttgtt

SEQ ID NO: 698169 - DNA, 33 bp, Homo sapien
acatcttctgaaatgactagtgacagtgcctga

SEQ ID NO: 698170 - DNA, 33 bp, Homo sapien
acatcttctgaaatgattagtgacagtgcctga

SEQ ID NO: 698171 - DNA, 33 bp, Homo sapien
tgtgttagttttgttaccaggcatacaaacatg

SEQ ID NO: 698172 - DNA, 33 bp, Homo sapien
tgtgttagttttgttatcaggcatacaaacatg

SEQ ID NO: 698173 - DNA, 33 bp, Homo sapien
taataatttcaagacaagtatataatcctcctc

SEQ ID NO: 698174 - DNA, 33 bp, Homo sapien
taataatttcaagacaggtatataatcctcctc

SEQ ID NO: 698175 - DNA, 33 bp, Homo sapien
ctgtgatagactcatgaatatttgctgccctcc

SEQ ID NO: 698176 - DNA, 33 bp, Homo sapien
ctgtgatagactcatgcatatttgctgccctcc

SEQ ID NO: 698177 - DNA, 33 bp, Homo sapien
tgatgttgcaagtcatcacaaacaaaaaggaga

SEQ ID NO: 698178 - DNA, 33 bp, Homo sapien
tgatgttgcaagtcattacaaacaaaaaggaga

SEQ ID NO: 698179 - DNA, 33 bp, Homo sapien
atggtgattaatagtgcatcaatgagggaataa

SEQ ID NO: 698180 - DNA, 33 bp, Homo sapien
atggtgattaatagtgtatcaatgagggaataa

SEQ ID NO: 698181 - DNA, 33 bp, Homo sapien
gggctgagaggcaagaaaaccagtagtgaagtt

SEQ ID NO: 698182 - DNA, 33 bp, Homo sapien
gggctgagaggcaagacaaccagtagtgaagtt

SEQ ID NO: 698183 - DNA, 33 bp, Homo sapien
aatcagccttcaatgaatagttcaatgagtaga

SEQ ID NO: 698184 - DNA, 33 bp, Homo sapien
aatcagccttcaatgagtagttcaatgagtaga

SEQ ID NO: 698185 - DNA, 33 bp, Homo sapien
gactattctgaataacacctacctatccgcctg

SEQ ID NO: 698186 - DNA, 33 bp, Homo sapien
gactattctgaataacgcctacctatccgcctg

SEQ ID NO: 698187 - DNA, 33 bp, Homo sapien
accaatgtgatgtcaaaaatgcagagttgggaa

SEQ ID NO: 698188 - DNA, 33 bp, Homo sapien
accaatgtgatgtcaacaatgcagagttgggaa

SEQ ID NO: 698189 - DNA, 33 bp, Homo sapien
attgtaagtcatctaaacattttatggtagaaa

SEQ ID NO: 698190 - DNA, 33 bp, Homo sapien
attgtaagtcatctaatcattttatggtagaaa

SEQ ID NO: 698191 - DNA, 33 bp, Homo sapien
atctggcctcaaattaataaacatttgctttct

SEQ ID NO: 698192 - DNA, 33 bp, Homo sapien
atctggcctcaaattattaaacatttgctttct

SEQ ID NO: 698193 - DNA, 33 bp, Homo sapien
cttaatccatatatgacacctccatttcactcc

SEQ ID NO: 698194 - DNA, 33 bp, Homo sapien
cttaatccatatatgagacctccatttcactcc

SEQ ID NO: 698195 - DNA, 33 bp, Homo sapien
tcatctagttgtactcaattaaatcatgaaagg

SEQ ID NO: 698196 - DNA, 33 bp, Homo sapien
tcatctagttgtactcgattaaatcatgaaagg

SEQ ID NO: 698197 - DNA, 33 bp, Homo sapien
tgtaagcacctggagaagtaaaatttgatttat

SEQ ID NO: 698198 - DNA, 33 bp, Homo sapien
tgtaagcacctggagaggtaaaatttgatttat

SEQ ID NO: 698199 - DNA, 33 bp, Homo sapien
gaaaacttaacttagaaaatggatctgccaatg

SEQ ID NO: 698200 - DNA, 33 bp, Homo sapien
gaaaacttaacttagagaatggatctgccaatg

SEQ ID NO: 698201 - DNA, 33 bp, Homo sapien
attataatgatgatacaacaaacttaggtgaaa

SEQ ID NO: 698202 - DNA, 33 bp, Homo sapien
attataatgatgatacgacaaacttaggtgaaa

SEQ ID NO: 698203 - DNA, 33 bp, Homo sapien
gttaaagttgaaggaaaccaactacagagaaca

SEQ ID NO: 698204 - DNA, 33 bp, Homo sapien
gttaaagttgaaggaacccaactacagagaaca

SEQ ID NO: 698205 - DNA, 33 bp, Homo sapien
ggccattcttggatgaacaaaggtaaggaagta

SEQ ID NO: 698206 - DNA, 33 bp, Homo sapien
ggccattcttggatgagcaaaggtaaggaagta

SEQ ID NO: 698207 - DNA, 33 bp, Homo sapien
gtcagtgggctacaaccgggctgacataccctg

SEQ ID NO: 698208 - DNA, 33 bp, Homo sapien
gtcagtgggctacaacggggctgacataccctg

SEQ ID NO: 698209 - DNA, 33 bp, Homo sapien
ttataggaaaaggcaaagtgaaatttgtcagtg

SEQ ID NO: 698210 - DNA, 33 bp, Homo sapien
ttataggaaaaggcaacgtgaaatttgtcagtg

SEQ ID NO: 698211 - DNA, 33 bp, Homo sapien
ggggtgacaaaggtggccattggttgataacaa

SEQ ID NO: 698212 - DNA, 33 bp, Homo sapien
ggggtgacaaaggtggtcattggttgataacaa

SEQ ID NO: 698213 - DNA, 33 bp, Homo sapien
ttgcagttgtgttaacagtcatggtggatcctc

SEQ ID NO: 698214 - DNA, 33 bp, Homo sapien
ttgcagttgtgttaacggtcatggtggatcctc

SEQ ID NO: 698215 - DNA, 33 bp, Homo sapien
gaactcctgcaatactcacccttgattcacaca

SEQ ID NO: 698216 - DNA, 33 bp, Homo sapien
gaactcctgcaatacttacccttgattcacaca

SEQ ID NO: 698217 - DNA, 33 bp, Homo sapien
ggaagagaagacaggaaatacaagttaggaaca

SEQ ID NO: 698218 - DNA, 33 bp, Homo sapien
ggaagagaagacaggagatacaagttaggaaca

SEQ ID NO: 698219 - DNA, 33 bp, Homo sapien
tcaaatgatagcggaacgatcttcccatactta

SEQ ID NO: 698220 - DNA, 33 bp, Homo sapien
tcaaatgatagcggaatgatcttcccatactta

SEQ ID NO: 698221 - DNA, 33 bp, Homo sapien
ttgtattttagaagccacaagtttaaagaaaaa

SEQ ID NO: 698222 - DNA, 33 bp, Homo sapien
ttgtattttagaagccgcaagtttaaagaaaaa

SEQ ID NO: 698223 - DNA, 33 bp, Homo sapien
atttcctagtttcttcaaataaaagctttagca

SEQ ID NO: 698224 - DNA, 33 bp, Homo sapien
atttcctagtttcttcgaataaaagctttagca

SEQ ID NO: 698225 - DNA, 33 bp, Homo sapien
accccctccacacctcaagttggtttacataac

SEQ ID NO: 698226 - DNA, 33 bp, Homo sapien
accccctccacacctcgagttggtttacataac

SEQ ID NO: 698227 - DNA, 33 bp, Homo sapien
catctgctcacttctaacccttgggacatgacc

SEQ ID NO: 698228 - DNA, 33 bp, Homo sapien
catctgctcacttctatcccttgggacatgacc

SEQ ID NO: 698229 - DNA, 33 bp, Homo sapien
acttctggtttatacagtagctctgtgaccatg

SEQ ID NO: 698230 - DNA, 33 bp, Homo sapien
acttctggtttatacattagctctgtgaccatg

SEQ ID NO: 698231 - DNA, 33 bp, Homo sapien
caaggaatacaacaaaatttgtgaggaatagct

SEQ ID NO: 698232 - DNA, 33 bp, Homo sapien
caaggaatacaacaaagtttgtgaggaatagct

SEQ ID NO: 698233 - DNA, 33 bp, Homo sapien
taattgcagcaggaaaatgtaatggcccacaag

SEQ ID NO: 698234 - DNA, 33 bp, Homo sapien
taattgcagcaggaaagtgtaatggcccacaag

SEQ ID NO: 698235 - DNA, 33 bp, Homo sapien
tggttacattctgggagagaattcaggcttcag

SEQ ID NO: 698236 - DNA, 33 bp, Homo sapien
tggttacattctgggatagaattcaggcttcag

SEQ ID NO: 698237 - DNA, 33 bp, Homo sapien
aaaaatggaaatggaacgtagataacaaagagg

SEQ ID NO: 698238 - DNA, 33 bp, Homo sapien
aaaaatggaaatggaatgtagataacaaagagg

SEQ ID NO: 698239 - DNA, 33 bp, Homo sapien
aacaaagagggatgcaataaaaggtgaagtctg

SEQ ID NO: 698240 - DNA, 33 bp, Homo sapien
aacaaagagggatgcagtaaaaggtgaagtctg

SEQ ID NO: 698241 - DNA, 33 bp, Homo sapien
cagtcaaactcagaaactaatttaaaaagtcag

SEQ ID NO: 698242 - DNA, 33 bp, Homo sapien
cagtcaaactcagaaagtaatttaaaaagtcag

SEQ ID NO: 698243 - DNA, 33 bp, Homo sapien
tccttaactctacaccgctcagaactgcttctt

SEQ ID NO: 698244 - DNA, 33 bp, Homo sapien
tccttaactctacacctctcagaactgcttctt

SEQ ID NO: 698245 - DNA, 33 bp, Homo sapien
gtggatgacattttcaaaaaatagatttaatca

SEQ ID NO: 698246 - DNA, 33 bp, Homo sapien
gtggatgacattttcagaaaatagatttaatca

SEQ ID NO: 698247 - DNA, 33 bp, Homo sapien
ctgtgtttctttcagacgtgatctttattttgg

SEQ ID NO: 698248 - DNA, 33 bp, Homo sapien
ctgtgtttctttcagatgtgatctttattttgg

SEQ ID NO: 698249 - DNA, 33 bp, Homo sapien
taaataaggaacctgcagatatggaagactgac

SEQ ID NO: 698250 - DNA, 33 bp, Homo sapien
taaataaggaacctgccgatatggaagactgac

SEQ ID NO: 698251 - DNA, 33 bp, Homo sapien
aagtgtggtttcattccagattgggcgctatca

SEQ ID NO: 698252 - DNA, 33 bp, Homo sapien
aagtgtggtttcattctagattgggcgctatca

SEQ ID NO: 698253 - DNA, 33 bp, Homo sapien
ttatgtatctgctctaccagtgtgttttattct

SEQ ID NO: 698254 - DNA, 33 bp, Homo sapien
ttatgtatctgctctatcagtgtgttttattct

SEQ ID NO: 698255 - DNA, 33 bp, Homo sapien
aattaacacatctgccagaaaaagtctttcccc

SEQ ID NO: 698256 - DNA, 33 bp, Homo sapien
aattaacacatctgccggaaaaagtctttcccc

SEQ ID NO: 698257 - DNA, 33 bp, Homo sapien
aaataaatcttcaccaactagaaaacttgaaag

SEQ ID NO: 698258 - DNA, 33 bp, Homo sapien
aaataaatcttcaccagctagaaaacttgaaag

SEQ ID NO: 698259 - DNA, 33 bp, Homo sapien
gtgtggcagtgaactaaaaataaatcttcacca

SEQ ID NO: 698260 - DNA, 33 bp, Homo sapien
gtgtggcagtgaactagaaataaatcttcacca

SEQ ID NO: 698261 - DNA, 33 bp, Homo sapien
gccctactcaatgtgacaatggtatgggatttt

SEQ ID NO: 698262 - DNA, 33 bp, Homo sapien
gccctactcaatgtgataatggtatgggatttt

SEQ ID NO: 698263 - DNA, 33 bp, Homo sapien
attcatcacttgacaacgtaaatgtgtagttta

SEQ ID NO: 698264 - DNA, 33 bp, Homo sapien
attcatcacttgacaatgtaaatgtgtagttta

SEQ ID NO: 698265 - DNA, 33 bp, Homo sapien
gtgacttatgagtgacaattcaatgtgtgtgtc

SEQ ID NO: 698266 - DNA, 33 bp, Homo sapien
gtgacttatgagtgacgattcaatgtgtgtgtc

SEQ ID NO: 698267 - DNA, 33 bp, Homo sapien
gaaaactgtactaggcaaggcccatagaataaa

SEQ ID NO: 698268 - DNA, 33 bp, Homo sapien
gaaaactgtactaggcgaggcccatagaataaa

SEQ ID NO: 698269 - DNA, 33 bp, Homo sapien
caagcatgaagtagaccggtatgtttgagtaac

SEQ ID NO: 698270 - DNA, 33 bp, Homo sapien
caagcatgaagtagactggtatgtttgagtaac

SEQ ID NO: 698271 - DNA, 33 bp, Homo sapien
tactcattcttaagacacttcctatctaacctc

SEQ ID NO: 698272 - DNA, 33 bp, Homo sapien
tactcattcttaagactcttcctatctaacctc

SEQ ID NO: 698273 - DNA, 33 bp, Homo sapien
taaaacagtatgatgcaaaagagaggtggttac

SEQ ID NO: 698274 - DNA, 33 bp, Homo sapien
taaaacagtatgatgccaaagagaggtggttac

SEQ ID NO: 698275 - DNA, 33 bp, Homo sapien
ttcaatgcataactcccgataatccatccagtt

SEQ ID NO: 698276 - DNA, 33 bp, Homo sapien
ttcaatgcataactcctgataatccatccagtt

SEQ ID NO: 698277 - DNA, 33 bp, Homo sapien
tggcaggttcagagacacccttcatgagccagg

SEQ ID NO: 698278 - DNA, 33 bp, Homo sapien
tggcaggttcagagacgcccttcatgagccagg

SEQ ID NO: 698279 - DNA, 33 bp, Homo sapien
ccaatgtgagaacaaacgaggctgtatggtata

SEQ ID NO: 698280 - DNA, 33 bp, Homo sapien
ccaatgtgagaacaaatgaggctgtatggtata

SEQ ID NO: 698281 - DNA, 33 bp, Homo sapien
gctctcatgttggacaaaggagatacagagtat

SEQ ID NO: 698282 - DNA, 33 bp, Homo sapien
gctctcatgttggacagaggagatacagagtat

SEQ ID NO: 698283 - DNA, 33 bp, Homo sapien
gtaggtgtttgacttgaaatcagtgtatagtaa

SEQ ID NO: 698284 - DNA, 33 bp, Homo sapien
gtaggtgtttgacttggaatcagtgtatagtaa

SEQ ID NO: 698285 - DNA, 33 bp, Homo sapien
catgccagctgcttcaaaccttaaaattctgtt

SEQ ID NO: 698286 - DNA, 33 bp, Homo sapien
catgccagctgcttcataccttaaaattctgtt

SEQ ID NO: 698287 - DNA, 33 bp, Homo sapien
tgaatctagtttttaacagtacggtgtgatttt

SEQ ID NO: 698288 - DNA, 33 bp, Homo sapien
tgaatctagtttttaatagtacggtgtgatttt

SEQ ID NO: 698289 - DNA, 33 bp, Homo sapien
aagtagcaaatctctcccctcgctggtattctc

SEQ ID NO: 698290 - DNA, 33 bp, Homo sapien
aagtagcaaatctctctcctcgctggtattctc

SEQ ID NO: 698291 - DNA, 33 bp, Homo sapien
cttaaggttttacctcaagtgacaggaaaaact

SEQ ID NO: 698292 - DNA, 33 bp, Homo sapien
cttaaggttttacctcgagtgacaggaaaaact

SEQ ID NO: 698293 - DNA, 33 bp, Homo sapien
cccaaatctggctttccaagcataatggaatct

SEQ ID NO: 698294 - DNA, 33 bp, Homo sapien
cccaaatctggctttctaagcataatggaatct

SEQ ID NO: 698295 - DNA, 33 bp, Homo sapien
acattacccaacttcaaactatgctataaggct

SEQ ID NO: 698296 - DNA, 33 bp, Homo sapien
acattacccaacttcacactatgctataaggct

SEQ ID NO: 698297 - DNA, 33 bp, Homo sapien
atatgccatggaaagactaaccaaaagaaaatt

SEQ ID NO: 698298 - DNA, 33 bp, Homo sapien
atatgccatggaaagattaaccaaaagaaaatt

SEQ ID NO: 698299 - DNA, 33 bp, Homo sapien
tagtatagtaaggagcaatgtaaggcatgaacc

SEQ ID NO: 698300 - DNA, 33 bp, Homo sapien
tagtatagtaaggagcgatgtaaggcatgaacc

SEQ ID NO: 698301 - DNA, 33 bp, Homo sapien
aggaaacaggcactcaactaggatttcaagcca

SEQ ID NO: 698302 - DNA, 33 bp, Homo sapien
aggaaacaggcactcagctaggatttcaagcca

SEQ ID NO: 698303 - DNA, 33 bp, Homo sapien
attaccactgaggaaactctcaaataaaatttg

SEQ ID NO: 698304 - DNA, 33 bp, Homo sapien
attaccactgaggaaattctcaaataaaatttg

SEQ ID NO: 698305 - DNA, 33 bp, Homo sapien
gtcttttaggaagacccgagaatttctgacaat

SEQ ID NO: 698306 - DNA, 33 bp, Homo sapien
gtcttttaggaagacctgagaatttctgacaat

SEQ ID NO: 698307 - DNA, 33 bp, Homo sapien
ttgatatgccagagacacctacttttcaaataa

SEQ ID NO: 698308 - DNA, 33 bp, Homo sapien
ttgatatgccagagacgcctacttttcaaataa

SEQ ID NO: 698309 - DNA, 33 bp, Homo sapien
tcttctggcttttaaacagtttatgtctatcta

SEQ ID NO: 698310 - DNA, 33 bp, Homo sapien
tcttctggcttttaaagagtttatgtctatcta

SEQ ID NO: 698311 - DNA, 33 bp, Homo sapien
tagctcagatgtacctcaccacagagtttgagc

SEQ ID NO: 698312 - DNA, 33 bp, Homo sapien
tagctcagatgtacctgaccacagagtttgagc

SEQ ID NO: 698313 - DNA, 33 bp, Homo sapien
ctctgacattgtatcactaaaaactcctagtaa

SEQ ID NO: 698314 - DNA, 33 bp, Homo sapien
ctctgacattgtatcattaaaaactcctagtaa

SEQ ID NO: 698315 - DNA, 33 bp, Homo sapien
ccaaagaagatggtccagacatactaggaaatg

SEQ ID NO: 698316 - DNA, 33 bp, Homo sapien
ccaaagaagatggtccggacatactaggaaatg

SEQ ID NO: 698317 - DNA, 33 bp, Homo sapien
aaggctatctttggaaaggtaattcttgacttt

SEQ ID NO: 698318 - DNA, 33 bp, Homo sapien
aaggctatctttggaagggtaattcttgacttt

SEQ ID NO: 698319 - DNA, 33 bp, Homo sapien
acaaatttcctatatacgtggatacgtctctac

SEQ ID NO: 698320 - DNA, 33 bp, Homo sapien
acaaatttcctatatatgtggatacgtctctac

SEQ ID NO: 698321 - DNA, 33 bp, Homo sapien
agactataaaaatagccaagtctgcctacagaa

SEQ ID NO: 698322 - DNA, 33 bp, Homo sapien
agactataaaaatagctaagtctgcctacagaa

SEQ ID NO: 698323 - DNA, 33 bp, Homo sapien
aatgtacattcctgaactggacctaaaagtggt

SEQ ID NO: 698324 - DNA, 33 bp, Homo sapien
aatgtacattcctgaattggacctaaaagtggt

SEQ ID NO: 698325 - DNA, 33 bp, Homo sapien
actatgacaacctccaagttcagagttaaaagt

SEQ ID NO: 698326 - DNA, 33 bp, Homo sapien
actatgacaacctccatgttcagagttaaaagt

SEQ ID NO: 698327 - DNA, 33 bp, Homo sapien
cctggatcagtggcatcagtatctcctgggaac

SEQ ID NO: 698328 - DNA, 33 bp, Homo sapien
cctggatcagtggcattagtatctcctgggaac

SEQ ID NO: 698329 - DNA, 33 bp, Homo sapien
ccacactttgaaaaccactggtcgataggataa

SEQ ID NO: 698330 - DNA, 33 bp, Homo sapien
ccacactttgaaaaccgctggtcgataggataa

SEQ ID NO: 698331 - DNA, 33 bp, Homo sapien
agggggcagtccaactcagttgcaaagtccagc

SEQ ID NO: 698332 - DNA, 33 bp, Homo sapien
agggggcagtccaacttagttgcaaagtccagc

SEQ ID NO: 698333 - DNA, 33 bp, Homo sapien
tgagagtgtctgcttacgccagtagttctcaca

SEQ ID NO: 698334 - DNA, 33 bp, Homo sapien
tgagagtgtctgcttatgccagtagttctcaca

SEQ ID NO: 698335 - DNA, 33 bp, Homo sapien
cagtacttattcctgacgattgtggtattttca

SEQ ID NO: 698336 - DNA, 33 bp, Homo sapien
cagtacttattcctgatgattgtggtattttca

SEQ ID NO: 698337 - DNA, 33 bp, Homo sapien
cccatctcttttctagacatctgtgtaaaatgc

SEQ ID NO: 698338 - DNA, 33 bp, Homo sapien
cccatctcttttctagtcatctgtgtaaaatgc

SEQ ID NO: 698339 - DNA, 33 bp, Homo sapien
aaccagctagaaaaaaaatgcattcccctgtgt

SEQ ID NO: 698340 - DNA, 33 bp, Homo sapien
aaccagctagaaaaaagatgcattcccctgtgt

SEQ ID NO: 698341 - DNA, 33 bp, Homo sapien
cctaatgtgtaaaatcactcttccttatctcag

SEQ ID NO: 698342 - DNA, 33 bp, Homo sapien
cctaatgtgtaaaatccctcttccttatctcag

SEQ ID NO: 698343 - DNA, 33 bp, Homo sapien
aaacaacaatcttttcacatctttttgaaatgc

SEQ ID NO: 698344 - DNA, 33 bp, Homo sapien
aaacaacaatcttttcgcatctttttgaaatgc

SEQ ID NO: 698345 - DNA, 33 bp, Homo sapien
ccaagattcagggttaccagaaaaattgtgtaa

SEQ ID NO: 698346 - DNA, 33 bp, Homo sapien
ccaagattcagggttatcagaaaaattgtgtaa

SEQ ID NO: 698347 - DNA, 33 bp, Homo sapien
aatgcctgacaacactcagtcagagttttaatt

SEQ ID NO: 698348 - DNA, 33 bp, Homo sapien
aatgcctgacaacactgagtcagagttttaatt

SEQ ID NO: 698349 - DNA, 33 bp, Homo sapien
aaattccaaatctgtacgtccatgtaaatagtg

SEQ ID NO: 698350 - DNA, 33 bp, Homo sapien
aaattccaaatctgtatgtccatgtaaatagtg

SEQ ID NO: 698351 - DNA, 33 bp, Homo sapien
ttaagaaataggcttaaaaattgaattgaaaaa

SEQ ID NO: 698352 - DNA, 33 bp, Homo sapien
ttaagaaataggcttagaaattgaattgaaaaa

SEQ ID NO: 698353 - DNA, 33 bp, Homo sapien
attcctgttggggcaactcatttaatctacatc

SEQ ID NO: 698354 - DNA, 33 bp, Homo sapien
attcctgttggggcaagtcatttaatctacatc

SEQ ID NO: 698355 - DNA, 33 bp, Homo sapien
ctcataaattccaaaccgtctacgctgacatac

SEQ ID NO: 698356 - DNA, 33 bp, Homo sapien
ctcataaattccaaactgtctacgctgacatac

SEQ ID NO: 698357 - DNA, 33 bp, Homo sapien
atgtgtgaaatgaagacgtagaactaaatgatc

SEQ ID NO: 698358 - DNA, 33 bp, Homo sapien
atgtgtgaaatgaagatgtagaactaaatgatc

SEQ ID NO: 698359 - DNA, 33 bp, Homo sapien
gctgtggtacctgctgcaggcaaggtaattttc

SEQ ID NO: 698360 - DNA, 33 bp, Homo sapien
gctgtggtacctgctgtaggcaaggtaattttc

SEQ ID NO: 698361 - DNA, 33 bp, Homo sapien
ggtgaattataaggcacatgaattgtatctcaa

SEQ ID NO: 698362 - DNA, 33 bp, Homo sapien
ggtgaattataaggcatatgaattgtatctcaa

SEQ ID NO: 698363 - DNA, 33 bp, Homo sapien
ctgatcacccctatacccagatatcaaagatgg

SEQ ID NO: 698364 - DNA, 33 bp, Homo sapien
ctgatcacccctatacgcagatatcaaagatgg

SEQ ID NO: 698365 - DNA, 33 bp, Homo sapien
gcaccatctgtaaaccagagagtaagagctcac

SEQ ID NO: 698366 - DNA, 33 bp, Homo sapien
gcaccatctgtaaaccggagagtaagagctcac

SEQ ID NO: 698367 - DNA, 33 bp, Homo sapien
ctaatgacttcctaaaggccccacctctcaaca

SEQ ID NO: 698368 - DNA, 33 bp, Homo sapien
ctaatgacttcctaaatgccccacctctcaaca

SEQ ID NO: 698369 - DNA, 33 bp, Homo sapien
ctctttcttaagctcaggtctgatgccatatga

SEQ ID NO: 698370 - DNA, 33 bp, Homo sapien
ctctttcttaagctcatgtctgatgccatatga

SEQ ID NO: 698371 - DNA, 33 bp, Homo sapien
ccactgtcttcttatacctttatatggcaggaa

SEQ ID NO: 698372 - DNA, 33 bp, Homo sapien
ccactgtcttcttatatctttatatggcaggaa

SEQ ID NO: 698373 - DNA, 33 bp, Homo sapien
gatgcaaggtttctaaaaattataatctagcca

SEQ ID NO: 698374 - DNA, 33 bp, Homo sapien
gatgcaaggtttctaagaattataatctagcca

SEQ ID NO: 698375 - DNA, 33 bp, Homo sapien
tagtggtaaccacagactattggggactgtgtt

SEQ ID NO: 698376 - DNA, 33 bp, Homo sapien
tagtggtaaccacagattattggggactgtgtt

SEQ ID NO: 698377 - DNA, 33 bp, Homo sapien
aacacaaaatccctgaatcaaagctcttcaggg

SEQ ID NO: 698378 - DNA, 33 bp, Homo sapien
aacacaaaatccctgagtcaaagctcttcaggg

SEQ ID NO: 698379 - DNA, 33 bp, Homo sapien
ggctctgtggctcacaactattgcttaacaaaa

SEQ ID NO: 698380 - DNA, 33 bp, Homo sapien
ggctctgtggctcacagctattgcttaacaaaa

SEQ ID NO: 698381 - DNA, 33 bp, Homo sapien
acttcctttcctttaacagagaaacagtttttt

SEQ ID NO: 698382 - DNA, 33 bp, Homo sapien
acttcctttcctttaagagagaaacagtttttt

SEQ ID NO: 698383 - DNA, 33 bp, Homo sapien
tccaattaacagtgaccctaaggcccaagttcc

SEQ ID NO: 698384 - DNA, 33 bp, Homo sapien
tccaattaacagtgactctaaggcccaagttcc

SEQ ID NO: 698385 - DNA, 33 bp, Homo sapien
cttgctactgggttaaacatgatagcttcctta

SEQ ID NO: 698386 - DNA, 33 bp, Homo sapien
cttgctactgggttaagcatgatagcttcctta

SEQ ID NO: 698387 - DNA, 33 bp, Homo sapien
tcttcccaggtggagacggcaaggtgtgtctct

SEQ ID NO: 698388 - DNA, 33 bp, Homo sapien
tcttcccaggtggagatggcaaggtgtgtctct

SEQ ID NO: 698389 - DNA, 33 bp, Homo sapien
aaatgcctgactctgcaagatttcagttcataa

SEQ ID NO: 698390 - DNA, 33 bp, Homo sapien
aaatgcctgactctgcgagatttcagttcataa

SEQ ID NO: 698391 - DNA, 33 bp, Homo sapien
tataagtagtggagccgattcaaattcaggagt

SEQ ID NO: 698392 - DNA, 33 bp, Homo sapien
tataagtagtggagcctattcaaattcaggagt

SEQ ID NO: 698393 - DNA, 33 bp, Homo sapien
attgcccagtggtagcagactaggcaacttgca

SEQ ID NO: 698394 - DNA, 33 bp, Homo sapien
attgcccagtggtagcggactaggcaacttgca

SEQ ID NO: 698395 - DNA, 33 bp, Homo sapien
aacatcaaagtgccgactaaggcatgccgtggg

SEQ ID NO: 698396 - DNA, 33 bp, Homo sapien
aacatcaaagtgccgattaaggcatgccgtggg

SEQ ID NO: 698397 - DNA, 33 bp, Homo sapien
ctagagaactgcaccccattccttgctgattac

SEQ ID NO: 698398 - DNA, 33 bp, Homo sapien
ctagagaactgcaccctattccttgctgattac

SEQ ID NO: 698399 - DNA, 33 bp, Homo sapien
tagagttccagttacacagacagagatccattc

SEQ ID NO: 698400 - DNA, 33 bp, Homo sapien
tagagttccagttacatagacagagatccattc

SEQ ID NO: 698401 - DNA, 33 bp, Homo sapien
tttaccttttaacatacctggaattggaatgta

SEQ ID NO: 698402 - DNA, 33 bp, Homo sapien
tttaccttttaacatatctggaattggaatgta

SEQ ID NO: 698403 - DNA, 33 bp, Homo sapien
ctagtttggctggaaacagaaagtagctggagg

SEQ ID NO: 698404 - DNA, 33 bp, Homo sapien
ctagtttggctggaaatagaaagtagctggagg

SEQ ID NO: 698405 - DNA, 33 bp, Homo sapien
atttggtaggcaatacagaaccacttaaggtct

SEQ ID NO: 698406 - DNA, 33 bp, Homo sapien
atttggtaggcaatacggaaccacttaaggtct

SEQ ID NO: 698407 - DNA, 33 bp, Homo sapien
tgttttgaacaaagtacccaactgtctgttaga

SEQ ID NO: 698408 - DNA, 33 bp, Homo sapien
tgttttgaacaaagtatccaactgtctgttaga

SEQ ID NO: 698409 - DNA, 33 bp, Homo sapien
ggtgcttaggagacaaagggtgtggctcgagag

SEQ ID NO: 698410 - DNA, 33 bp, Homo sapien
ggtgcttaggagacaacgggtgtggctcgagag

SEQ ID NO: 698411 - DNA, 33 bp, Homo sapien
cgagaggtggattttgaatttgttctacaggga

SEQ ID NO: 698412 - DNA, 33 bp, Homo sapien
cgagaggtggattttggatttgttctacaggga

SEQ ID NO: 698413 - DNA, 33 bp, Homo sapien
atcaaagtcaagataaagatccagtttttaaaa

SEQ ID NO: 698414 - DNA, 33 bp, Homo sapien
atcaaagtcaagataaggatccagtttttaaaa

SEQ ID NO: 698415 - DNA, 33 bp, Homo sapien
ctacagtgcctcagataaagagaacagctacca

SEQ ID NO: 698416 - DNA, 33 bp, Homo sapien
ctacagtgcctcagatgaagagaacagctacca

SEQ ID NO: 698417 - DNA, 33 bp, Homo sapien
tagagccactgggaagcccccagataaaggcaa

SEQ ID NO: 698418 - DNA, 33 bp, Homo sapien
tagagccactgggaagtccccagataaaggcaa

SEQ ID NO: 698419 - DNA, 33 bp, Homo sapien
gatggtggcattggcacattagtgtctacaatg

SEQ ID NO: 698420 - DNA, 33 bp, Homo sapien
gatggtggcattggcatattagtgtctacaatg

SEQ ID NO: 698421 - DNA, 33 bp, Homo sapien
caggttgaggtataagacaacagggcttgggtc

SEQ ID NO: 698422 - DNA, 33 bp, Homo sapien
caggttgaggtataaggcaacagggcttgggtc

SEQ ID NO: 698423 - DNA, 33 bp, Homo sapien
ctacatcaagaaactcacagcttacagtcttcc

SEQ ID NO: 698424 - DNA, 33 bp, Homo sapien
ctacatcaagaaactcgcagcttacagtcttcc

SEQ ID NO: 698425 - DNA, 33 bp, Homo sapien
gtgattttaagtggagacagttctagatgcagg

SEQ ID NO: 698426 - DNA, 33 bp, Homo sapien
gtgattttaagtggaggcagttctagatgcagg

SEQ ID NO: 698427 - DNA, 33 bp, Homo sapien
aaggtgtatttcttcactagtgatcttgacttg

SEQ ID NO: 698428 - DNA, 33 bp, Homo sapien
aaggtgtatttcttcattagtgatcttgacttg

SEQ ID NO: 698429 - DNA, 33 bp, Homo sapien
agccaaggaggaaaaagatagttgaaagaaact

SEQ ID NO: 698430 - DNA, 33 bp, Homo sapien
agccaaggaggaaaaatatagttgaaagaaact

SEQ ID NO: 698431 - DNA, 33 bp, Homo sapien
agcgggtactgtaagactctgggaattaccctg

SEQ ID NO: 698432 - DNA, 33 bp, Homo sapien
agcgggtactgtaagattctgggaattaccctg

SEQ ID NO: 698433 - DNA, 33 bp, Homo sapien
ccatctcccagatacaactacttagcaaaatca

SEQ ID NO: 698434 - DNA, 33 bp, Homo sapien
ccatctcccagatacagctacttagcaaaatca

SEQ ID NO: 698435 - DNA, 33 bp, Homo sapien
tccagcaccttgttaacggctgcagggtattct

SEQ ID NO: 698436 - DNA, 33 bp, Homo sapien
tccagcaccttgttaatggctgcagggtattct

SEQ ID NO: 698437 - DNA, 33 bp, Homo sapien
gtttttctcatcggacactccattttctcacct

SEQ ID NO: 698438 - DNA, 33 bp, Homo sapien
gtttttctcatcggacgctccattttctcacct

SEQ ID NO: 698439 - DNA, 33 bp, Homo sapien
ccctggggagatctgaaaacagtcctgcagcat

SEQ ID NO: 698440 - DNA, 33 bp, Homo sapien
ccctggggagatctgagaacagtcctgcagcat

SEQ ID NO: 698441 - DNA, 33 bp, Homo sapien
gcccacataaaatgacaaacttaatctgtaaat

SEQ ID NO: 698442 - DNA, 33 bp, Homo sapien
gcccacataaaatgacgaacttaatctgtaaat

SEQ ID NO: 698443 - DNA, 33 bp, Homo sapien
ggattaaccaagaatcactcagctaaaggttaa

SEQ ID NO: 698444 - DNA, 33 bp, Homo sapien
ggattaaccaagaatcgctcagctaaaggttaa

SEQ ID NO: 698445 - DNA, 33 bp, Homo sapien
agggataaagaggaagaacagataagctctcct

SEQ ID NO: 698446 - DNA, 33 bp, Homo sapien
agggataaagaggaagtacagataagctctcct

SEQ ID NO: 698447 - DNA, 33 bp, Homo sapien
ctggtttttttggcccaaatctgtctgattctg

SEQ ID NO: 698448 - DNA, 33 bp, Homo sapien
ctggtttttttggcccgaatctgtctgattctg

SEQ ID NO: 698449 - DNA, 33 bp, Homo sapien
aaacgacaactctgacactgtttaatattcgag

SEQ ID NO: 698450 - DNA, 33 bp, Homo sapien
aaacgacaactctgacgctgtttaatattcgag

SEQ ID NO: 698451 - DNA, 33 bp, Homo sapien
gaagatgacgaacttccgaaaatatgcaactgt

SEQ ID NO: 698452 - DNA, 33 bp, Homo sapien
gaagatgacgaacttctgaaaatatgcaactgt

SEQ ID NO: 698453 - DNA, 33 bp, Homo sapien
attctccttctgtgtccaaaataagatcaccaa

SEQ ID NO: 698454 - DNA, 33 bp, Homo sapien
attctccttctgtgtcgaaaataagatcaccaa

SEQ ID NO: 698455 - DNA, 33 bp, Homo sapien
ttccttcctacccttcaatgtccaagtccccgc

SEQ ID NO: 698456 - DNA, 33 bp, Homo sapien
ttccttcctacccttcgatgtccaagtccccgc

SEQ ID NO: 698457 - DNA, 33 bp, Homo sapien
actgagcagtcaataccggaggtgccatttttc

SEQ ID NO: 698458 - DNA, 33 bp, Homo sapien
actgagcagtcaatactggaggtgccatttttc

SEQ ID NO: 698459 - DNA, 33 bp, Homo sapien
tgaagttcaaatactcactttccaagacaataa

SEQ ID NO: 698460 - DNA, 33 bp, Homo sapien
tgaagttcaaatactccctttccaagacaataa

SEQ ID NO: 698461 - DNA, 33 bp, Homo sapien
agagaaataataatgaagactggtacaaatgca

SEQ ID NO: 698462 - DNA, 33 bp, Homo sapien
agagaaataataatgaggactggtacaaatgca

SEQ ID NO: 698463 - DNA, 33 bp, Homo sapien
tcttgccctggacagacatctaatgcagcatgc

SEQ ID NO: 698464 - DNA, 33 bp, Homo sapien
tcttgccctggacagatatctaatgcagcatgc

SEQ ID NO: 698465 - DNA, 33 bp, Homo sapien
acccccagattgaaacagacagtgattctgagt

SEQ ID NO: 698466 - DNA, 33 bp, Homo sapien
acccccagattgaaactgacagtgattctgagt

SEQ ID NO: 698467 - DNA, 33 bp, Homo sapien
atcatgtctgaatcacgaacaagttacttagtc

SEQ ID NO: 698468 - DNA, 33 bp, Homo sapien
atcatgtctgaatcactaacaagttacttagtc

SEQ ID NO: 698469 - DNA, 33 bp, Homo sapien
tatttgcaatgagataataaaaacatatctaaa

SEQ ID NO: 698470 - DNA, 33 bp, Homo sapien
tatttgcaatgagatagtaaaaacatatctaaa

SEQ ID NO: 698471 - DNA, 33 bp, Homo sapien
catgctctaccctacacattaggccattcttgc

SEQ ID NO: 698472 - DNA, 33 bp, Homo sapien
catgctctaccctacatattaggccattcttgc

SEQ ID NO: 698473 - DNA, 33 bp, Homo sapien
tcttacataactgacacaacaatgctatgaggc

SEQ ID NO: 698474 - DNA, 33 bp, Homo sapien
tcttacataactgacataacaatgctatgaggc

SEQ ID NO: 698475 - DNA, 33 bp, Homo sapien
tcaacaattgcttacagatttttcctcagtgag

SEQ ID NO: 698476 - DNA, 33 bp, Homo sapien
tcaacaattgcttacatatttttcctcagtgag

SEQ ID NO: 698477 - DNA, 33 bp, Homo sapien
tcaggggatgcttggaacgtgattcacacagga

SEQ ID NO: 698478 - DNA, 33 bp, Homo sapien
tcaggggatgcttggagcgtgattcacacagga

SEQ ID NO: 698479 - DNA, 33 bp, Homo sapien
gcactgctgtgcatcacggagggtatagctggg

SEQ ID NO: 698480 - DNA, 33 bp, Homo sapien
gcactgctgtgcatcatggagggtatagctggg

SEQ ID NO: 698481 - DNA, 33 bp, Homo sapien
ctgtacgcatacctggaaactcagaggtagaaa

SEQ ID NO: 698482 - DNA, 33 bp, Homo sapien
ctgtacgcatacctggcaactcagaggtagaaa

SEQ ID NO: 698483 - DNA, 33 bp, Homo sapien
tgtgacaccaggaggacaacatatgggcccttt

SEQ ID NO: 698484 - DNA, 33 bp, Homo sapien
tgtgacaccaggaggataacatatgggcccttt

SEQ ID NO: 698485 - DNA, 33 bp, Homo sapien
taggagcattctgccacggttgtgggataagaa

SEQ ID NO: 698486 - DNA, 33 bp, Homo sapien
taggagcattctgccatggttgtgggataagaa

SEQ ID NO: 698487 - DNA, 33 bp, Homo sapien
ctacccagaggctagacgctgaggttacttcta

SEQ ID NO: 698488 - DNA, 33 bp, Homo sapien
ctacccagaggctagatgctgaggttacttcta

SEQ ID NO: 698489 - DNA, 33 bp, Homo sapien
tccacggactccaggtgaaaacttttgcaatct

SEQ ID NO: 698490 - DNA, 33 bp, Homo sapien
tccacggactccaggttaaaacttttgcaatct

SEQ ID NO: 698491 - DNA, 33 bp, Homo sapien
tacctgtctaggcctccctttgcataatcacac

SEQ ID NO: 698492 - DNA, 33 bp, Homo sapien
tacctgtctaggcctctctttgcataatcacac

SEQ ID NO: 698493 - DNA, 33 bp, Homo sapien
aaggaaatatccccaccgaataaatttataggt

SEQ ID NO: 698494 - DNA, 33 bp, Homo sapien
aaggaaatatccccactgaataaatttataggt

SEQ ID NO: 698495 - DNA, 33 bp, Homo sapien
agtctacagttagtgaaggaaggaactaccaga

SEQ ID NO: 698496 - DNA, 33 bp, Homo sapien
agtctacagttagtgagggaaggaactaccaga

SEQ ID NO: 698497 - DNA, 33 bp, Homo sapien
ttcatcaatggtacaactggttttttaatggga

SEQ ID NO: 698498 - DNA, 33 bp, Homo sapien
ttcatcaatggtacaattggttttttaatggga

SEQ ID NO: 698499 - DNA, 33 bp, Homo sapien
tacatttcatcaaatcaagtacaccattactta

SEQ ID NO: 698500 - DNA, 33 bp, Homo sapien
tacatttcatcaaatcgagtacaccattactta

SEQ ID NO: 698501 - DNA, 33 bp, Homo sapien
ttaggcaaaagggttgcaaattctggcagttgc

SEQ ID NO: 698502 - DNA, 33 bp, Homo sapien
ttaggcaaaagggttgtaaattctggcagttgc

SEQ ID NO: 698503 - DNA, 33 bp, Homo sapien
attatcattctaattaacgcagcaagtgtttga

SEQ ID NO: 698504 - DNA, 33 bp, Homo sapien
attatcattctaattagcgcagcaagtgtttga

SEQ ID NO: 698505 - DNA, 33 bp, Homo sapien
gaaactcttaatcaaaccagtctatctgtgttt

SEQ ID NO: 698506 - DNA, 33 bp, Homo sapien
gaaactcttaatcaaagcagtctatctgtgttt

SEQ ID NO: 698507 - DNA, 33 bp, Homo sapien
cttattagtaaccttgcaaagtgcccacaacca

SEQ ID NO: 698508 - DNA, 33 bp, Homo sapien
cttattagtaaccttgtaaagtgcccacaacca

SEQ ID NO: 698509 - DNA, 33 bp, Homo sapien
tcatctgagttagatacgattttaagacatcac

SEQ ID NO: 698510 - DNA, 33 bp, Homo sapien
tcatctgagttagatatgattttaagacatcac

SEQ ID NO: 698511 - DNA, 33 bp, Homo sapien
ataaacattttttagcacttactaggtaccagt

SEQ ID NO: 698512 - DNA, 33 bp, Homo sapien
ataaacattttttagcgcttactaggtaccagt

SEQ ID NO: 698513 - DNA, 33 bp, Homo sapien
tagaggataaaggtcacggatgtttgacactgc

SEQ ID NO: 698514 - DNA, 33 bp, Homo sapien
tagaggataaaggtcatggatgtttgacactgc

SEQ ID NO: 698515 - DNA, 33 bp, Homo sapien
accagattttaaactgaaagtgagaagagtaac

SEQ ID NO: 698516 - DNA, 33 bp, Homo sapien
accagattttaaactggaagtgagaagagtaac

SEQ ID NO: 698517 - DNA, 33 bp, Homo sapien
ggatgatttttaggcaataattctccaatagtt

SEQ ID NO: 698518 - DNA, 33 bp, Homo sapien
ggatgatttttaggcagtaattctccaatagtt

SEQ ID NO: 698519 - DNA, 33 bp, Homo sapien
aatgtgatgataccaacaggtggagcttttggg

SEQ ID NO: 698520 - DNA, 33 bp, Homo sapien
aatgtgatgataccaagaggtggagcttttggg

SEQ ID NO: 698521 - DNA, 33 bp, Homo sapien
aggtgtttgctgaaaacgtttgttcatctgcat

SEQ ID NO: 698522 - DNA, 33 bp, Homo sapien
aggtgtttgctgaaaatgtttgttcatctgcat

SEQ ID NO: 698523 - DNA, 33 bp, Homo sapien
atgagaataatttataactctcttgtggctcca

SEQ ID NO: 698524 - DNA, 33 bp, Homo sapien
atgagaataatttatagctctcttgtggctcca

SEQ ID NO: 698525 - DNA, 33 bp, Homo sapien
cagggtctcacataacacaggaacttagatgtc

SEQ ID NO: 698526 - DNA, 33 bp, Homo sapien
cagggtctcacataacgcaggaacttagatgtc

SEQ ID NO: 698527 - DNA, 33 bp, Homo sapien
gttgaagcaccattagaactggcacagcagatg

SEQ ID NO: 698528 - DNA, 33 bp, Homo sapien
gttgaagcaccattaggactggcacagcagatg

SEQ ID NO: 698529 - DNA, 33 bp, Homo sapien
tgaatgcctctgacagaagctttacctgttcat

SEQ ID NO: 698530 - DNA, 33 bp, Homo sapien
tgaatgcctctgacaggagctttacctgttcat

SEQ ID NO: 698531 - DNA, 33 bp, Homo sapien
atgttaaacggagacactacagttactttccct

SEQ ID NO: 698532 - DNA, 33 bp, Homo sapien
atgttaaacggagacattacagttactttccct

SEQ ID NO: 698533 - DNA, 33 bp, Homo sapien
acaggaagtgttgacacatatttgcagaacttc

SEQ ID NO: 698534 - DNA, 33 bp, Homo sapien
acaggaagtgttgacatatatttgcagaacttc

SEQ ID NO: 698535 - DNA, 33 bp, Homo sapien
tcagtctcaatctcaacattatgtttctcgagt

SEQ ID NO: 698536 - DNA, 33 bp, Homo sapien
tcagtctcaatctcaatattatgtttctcgagt

SEQ ID NO: 698537 - DNA, 33 bp, Homo sapien
ccctgaggaaagccaccgaaataactcgagaaa

SEQ ID NO: 698538 - DNA, 33 bp, Homo sapien
ccctgaggaaagccactgaaataactcgagaaa

SEQ ID NO: 698539 - DNA, 33 bp, Homo sapien
acttttgtcagaaacacaggtaaaagacaaagt

SEQ ID NO: 698540 - DNA, 33 bp, Homo sapien
acttttgtcagaaacataggtaaaagacaaagt

SEQ ID NO: 698541 - DNA, 33 bp, Homo sapien
caaggcttttgaagacaacatttggatacataa

SEQ ID NO: 698542 - DNA, 33 bp, Homo sapien
caaggcttttgaagacgacatttggatacataa

SEQ ID NO: 698543 - DNA, 33 bp, Homo sapien
ctgttcacacaaatcaaatatgcccttcaaaca

SEQ ID NO: 698544 - DNA, 33 bp, Homo sapien
ctgttcacacaaatcagatatgcccttcaaaca

SEQ ID NO: 698545 - DNA, 33 bp, Homo sapien
ccttctggccaaacacaaagtatgattgtgcat

SEQ ID NO: 698546 - DNA, 33 bp, Homo sapien
ccttctggccaaacacgaagtatgattgtgcat

SEQ ID NO: 698547 - DNA, 33 bp, Homo sapien
ttagacatgctaatgacacttgaaagacattat

SEQ ID NO: 698548 - DNA, 33 bp, Homo sapien
ttagacatgctaatgatacttgaaagacattat

SEQ ID NO: 698549 - DNA, 33 bp, Homo sapien
catacagtaactgatcaaaaaatggtaactatc

SEQ ID NO: 698550 - DNA, 33 bp, Homo sapien
catacagtaactgatcgaaaaatggtaactatc

SEQ ID NO: 698551 - DNA, 33 bp, Homo sapien
agtacttaccatgttccattgtcatcatctgct

SEQ ID NO: 698552 - DNA, 33 bp, Homo sapien
agtacttaccatgttctattgtcatcatctgct

SEQ ID NO: 698553 - DNA, 33 bp, Homo sapien
tatctcaaggtaataagtagacatacatccttc

SEQ ID NO: 698554 - DNA, 33 bp, Homo sapien
tatctcaaggtaataattagacatacatccttc

SEQ ID NO: 698555 - DNA, 33 bp, Homo sapien
aatgaacccaccatcacgtgattagacatcagg

SEQ ID NO: 698556 - DNA, 33 bp, Homo sapien
aatgaacccaccatcatgtgattagacatcagg

SEQ ID NO: 698557 - DNA, 33 bp, Homo sapien
tcatcctagtaaacaccgtattcttctgagaaa

SEQ ID NO: 698558 - DNA, 33 bp, Homo sapien
tcatcctagtaaacactgtattcttctgagaaa

SEQ ID NO: 698559 - DNA, 33 bp, Homo sapien
tataaattggggtgaaacattatacctaactca

SEQ ID NO: 698560 - DNA, 33 bp, Homo sapien
tataaattggggtgaaccattatacctaactca

SEQ ID NO: 698561 - DNA, 33 bp, Homo sapien
atgttcttgagatggaaagaatagcttgacttc

SEQ ID NO: 698562 - DNA, 33 bp, Homo sapien
atgttcttgagatggagagaatagcttgacttc

SEQ ID NO: 698563 - DNA, 33 bp, Homo sapien
aagagacttctgctggacaattcctgtcttctc

SEQ ID NO: 698564 - DNA, 33 bp, Homo sapien
aagagacttctgctggccaattcctgtcttctc

SEQ ID NO: 698565 - DNA, 33 bp, Homo sapien
cttcacatgaccagcccagcagaaatgaactac

SEQ ID NO: 698566 - DNA, 33 bp, Homo sapien
cttcacatgaccagcctagcagaaatgaactac

SEQ ID NO: 698567 - DNA, 33 bp, Homo sapien
acagcctcaacaaataccatctatggcagagct

SEQ ID NO: 698568 - DNA, 33 bp, Homo sapien
acagcctcaacaaatatcatctatggcagagct

SEQ ID NO: 698569 - DNA, 33 bp, Homo sapien
ataaaatattaactggacatcatggacgtgcct

SEQ ID NO: 698570 - DNA, 33 bp, Homo sapien
ataaaatattaactgggcatcatggacgtgcct

SEQ ID NO: 698571 - DNA, 33 bp, Homo sapien
acactgtgaagttcaaccaatgccctgacaatc

SEQ ID NO: 698572 - DNA, 33 bp, Homo sapien
acactgtgaagttcaatcaatgccctgacaatc

SEQ ID NO: 698573 - DNA, 33 bp, Homo sapien
tactaaaccttcaccactcaatctcagaaactg

SEQ ID NO: 698574 - DNA, 33 bp, Homo sapien
tactaaaccttcaccattcaatctcagaaactg

SEQ ID NO: 698575 - DNA, 33 bp, Homo sapien
tataccattaaccctacagactatgctgccttt

SEQ ID NO: 698576 - DNA, 33 bp, Homo sapien
tataccattaaccctatagactatgctgccttt

SEQ ID NO: 698577 - DNA, 33 bp, Homo sapien
aaggtaatgagtggtaataagttcagctgagat

SEQ ID NO: 698578 - DNA, 33 bp, Homo sapien
aaggtaatgagtggtagtaagttcagctgagat

SEQ ID NO: 698579 - DNA, 33 bp, Homo sapien
gtccttaaatcactcagaagattcagtatacac

SEQ ID NO: 698580 - DNA, 33 bp, Homo sapien
gtccttaaatcactcataagattcagtatacac

SEQ ID NO: 698581 - DNA, 33 bp, Homo sapien
gtaaatgtgtgtcatgaagtcggggggcagttt

SEQ ID NO: 698582 - DNA, 33 bp, Homo sapien
gtaaatgtgtgtcatgcagtcggggggcagttt

SEQ ID NO: 698583 - DNA, 33 bp, Homo sapien
tttccccatctcctccaaagagcgaagcggaat

SEQ ID NO: 698584 - DNA, 33 bp, Homo sapien
tttccccatctcctccgaagagcgaagcggaat

SEQ ID NO: 698585 - DNA, 33 bp, Homo sapien
tctctttagggagagaactgacttcattggggg

SEQ ID NO: 698586 - DNA, 33 bp, Homo sapien
tctctttagggagagagctgacttcattggggg

SEQ ID NO: 698587 - DNA, 33 bp, Homo sapien
tttttataacccaatgacagtaactagatgttt

SEQ ID NO: 698588 - DNA, 33 bp, Homo sapien
tttttataacccaatggcagtaactagatgttt

SEQ ID NO: 698589 - DNA, 33 bp, Homo sapien
cattgctggaagataacgtgattgatttcatgt

SEQ ID NO: 698590 - DNA, 33 bp, Homo sapien
cattgctggaagataatgtgattgatttcatgt

SEQ ID NO: 698591 - DNA, 33 bp, Homo sapien
ttgcttaacttacactaacgcaccttacagtta

SEQ ID NO: 698592 - DNA, 33 bp, Homo sapien
ttgcttaacttacactgacgcaccttacagtta

SEQ ID NO: 698593 - DNA, 33 bp, Homo sapien
tgtggtggcattgtaaaaaattagtagacacac

SEQ ID NO: 698594 - DNA, 33 bp, Homo sapien
tgtggtggcattgtaagaaattagtagacacac

SEQ ID NO: 698595 - DNA, 33 bp, Homo sapien
ctgttgagctagagtgaactcttcccacatgaa

SEQ ID NO: 698596 - DNA, 33 bp, Homo sapien
ctgttgagctagagtggactcttcccacatgaa

SEQ ID NO: 698597 - DNA, 33 bp, Homo sapien
ctagaaattagggacacggatttcagataaaaa

SEQ ID NO: 698598 - DNA, 33 bp, Homo sapien
ctagaaattagggacatggatttcagataaaaa

SEQ ID NO: 698599 - DNA, 33 bp, Homo sapien
tctgtttccctgactcagaaggaagcatttttc

SEQ ID NO: 698600 - DNA, 33 bp, Homo sapien
tctgtttccctgactcggaaggaagcatttttc

SEQ ID NO: 698601 - DNA, 33 bp, Homo sapien
tttttatcaccaggtagctgggaggcagtgtgg

SEQ ID NO: 698602 - DNA, 33 bp, Homo sapien
tttttatcaccaggtatctgggaggcagtgtgg

SEQ ID NO: 698603 - DNA, 33 bp, Homo sapien
aaactgattaaaagagccatcccaattactaaa

SEQ ID NO: 698604 - DNA, 33 bp, Homo sapien
aaactgattaaaagagtcatcccaattactaaa

SEQ ID NO: 698605 - DNA, 33 bp, Homo sapien
aagagaggaggaatgcacaagaaactcaggcca

SEQ ID NO: 698606 - DNA, 33 bp, Homo sapien
aagagaggaggaatgcgcaagaaactcaggcca

SEQ ID NO: 698607 - DNA, 33 bp, Homo sapien
aaagcccgcattttccacagtacacaactgcaa

SEQ ID NO: 698608 - DNA, 33 bp, Homo sapien
aaagcccgcattttccgcagtacacaactgcaa

SEQ ID NO: 698609 - DNA, 33 bp, Homo sapien; identical to SEQ ID NO: 698607

SEQ ID NO: 698610 - DNA, 33 bp, Homo sapien; identical to SEQ ID NO: 698608

SEQ ID NO: 698611 - DNA, 33 bp, Homo sapien
ttaagaaagaaaataccggattcagttaagtgt

SEQ ID NO: 698612 - DNA, 33 bp, Homo sapien
ttaagaaagaaaatactggattcagttaagtgt

SEQ ID NO: 698613 - DNA, 33 bp, Homo sapien
tgtgaattactgatgaaggcaaaatatctgcag

SEQ ID NO: 698614 - DNA, 33 bp, Homo sapien
tgtgaattactgatgagggcaaaatatctgcag

SEQ ID NO: 698615 - DNA, 33 bp, Homo sapien
taaataacttaaagggcatagatcatggtaata

SEQ ID NO: 698616 - DNA, 33 bp, Homo sapien
taaataacttaaagggtatagatcatggtaata

SEQ ID NO: 698617 - DNA, 33 bp, Homo sapien
tcggcgaagctagtgcccaagaagtatttgggg

SEQ ID NO: 698618 - DNA, 33 bp, Homo sapien
tcggcgaagctagtgctcaagaagtatttgggg

SEQ ID NO: 698619 - DNA, 33 bp, Homo sapien
ttgcttagggtaagacacagaaaatggcatcaa

SEQ ID NO: 698620 - DNA, 33 bp, Homo sapien
ttgcttagggtaagacgcagaaaatggcatcaa

SEQ ID NO: 698621 - DNA, 33 bp, Homo sapien
gatccacagtgaaacacggtttattttgcctct

SEQ ID NO: 698622 - DNA, 33 bp, Homo sapien
gatccacagtgaaacatggtttattttgcctct

SEQ ID NO: 698623 - DNA, 33 bp, Homo sapien
tttcctctggctagaccgtagcatagatcctca

SEQ ID NO: 698624 - DNA, 33 bp, Homo sapien
tttcctctggctagactgtagcatagatcctca

SEQ ID NO: 698625 - DNA, 33 bp, Homo sapien
ttgaactcaattaactcaacttcataaaattaa

SEQ ID NO: 698626 - DNA, 33 bp, Homo sapien
ttgaactcaattaactgaacttcataaaattaa

SEQ ID NO: 698627 - DNA, 33 bp, Homo sapien
aaaaatctcttcaaaacaggacacacatattca

SEQ ID NO: 698628 - DNA, 33 bp, Homo sapien
aaaaatctcttcaaaataggacacacatattca

SEQ ID NO: 698629 - DNA, 33 bp, Homo sapien
acacacagctgatccactcaaccaaagccttca

SEQ ID NO: 698630 - DNA, 33 bp, Homo sapien
acacacagctgatccattcaaccaaagccttca

SEQ ID NO: 698631 - DNA, 33 bp, Homo sapien
aaatgatgcatggcaagattattcacggcagca

SEQ ID NO: 698632 - DNA, 33 bp, Homo sapien
aaatgatgcatggcaatattattcacggcagca

SEQ ID NO: 698633 - DNA, 33 bp, Homo sapien
gttttaatcttggtctaaaaatgtctttagtca

SEQ ID NO: 698634 - DNA, 33 bp, Homo sapien
gttttaatcttggtctgaaaatgtctttagtca

SEQ ID NO: 698635 - DNA, 33 bp, Homo sapien
attgacaatctgggagaagatatttataacttt

SEQ ID NO: 698636 - DNA, 33 bp, Homo sapien
attgacaatctgggaggagatatttataacttt

SEQ ID NO: 698637 - DNA, 33 bp, Homo sapien
ccatttccaaaaaatgccatcaataaaggcaaa

SEQ ID NO: 698638 - DNA, 33 bp, Homo sapien
ccatttccaaaaaatggcatcaataaaggcaaa

SEQ ID NO: 698639 - DNA, 33 bp, Homo sapien
aaatgagaggactgaacagcctgtacctcagtc

SEQ ID NO: 698640 - DNA, 33 bp, Homo sapien
aaatgagaggactgaatagcctgtacctcagtc

SEQ ID NO: 698641 - DNA, 33 bp, Homo sapien
ttaagcaatggctactaagagcagaagtggtcc

SEQ ID NO: 698642 - DNA, 33 bp, Homo sapien
ttaagcaatggctactgagagcagaagtggtcc

SEQ ID NO: 698643 - DNA, 33 bp, Homo sapien
cacctcgatggaattaaacatacatgtggactt

SEQ ID NO: 698644 - DNA, 33 bp, Homo sapien
cacctcgatggaattagacatacatgtggactt

SEQ ID NO: 698645 - DNA, 33 bp, Homo sapien
tcctaacctgaaccaacgctgtctataggtgga

SEQ ID NO: 698646 - DNA, 33 bp, Homo sapien
tcctaacctgaaccaatgctgtctataggtgga

SEQ ID NO: 698647 - DNA, 33 bp, Homo sapien
tgtggccctcaattcaatacatatcttttgaac

SEQ ID NO: 698648 - DNA, 33 bp, Homo sapien
tgtggccctcaattcagtacatatcttttgaac

SEQ ID NO: 698649 - DNA, 33 bp, Homo sapien
ccctggagcaagtgcaatcatgtggcggactat

SEQ ID NO: 698650 - DNA, 33 bp, Homo sapien
ccctggagcaagtgcagtcatgtggcggactat

SEQ ID NO: 698651 - DNA, 33 bp, Homo sapien
catctcgctactcccacgacctcagtaactgtc

SEQ ID NO: 698652 - DNA, 33 bp, Homo sapien
catctcgctactcccatgacctcagtaactgtc

SEQ ID NO: 698653 - DNA, 33 bp, Homo sapien
tgaatgaatgaacaaactgtaggtcagggttct

SEQ ID NO: 698654 - DNA, 33 bp, Homo sapien
tgaatgaatgaacaaattgtaggtcagggttct

SEQ ID NO: 698655 - DNA, 33 bp, Homo sapien
tctcagctgcaggtaactggaatccatatgcat

SEQ ID NO: 698656 - DNA, 33 bp, Homo sapien
tctcagctgcaggtaattggaatccatatgcat

SEQ ID NO: 698657 - DNA, 33 bp, Homo sapien
accaaattactggctccgaatgcaaaatgtctg

SEQ ID NO: 698658 - DNA, 33 bp, Homo sapien
accaaattactggctctgaatgcaaaatgtctg

SEQ ID NO: 698659 - DNA, 33 bp, Homo sapien
attactaattaatggaatagaaccaggtaggaa

SEQ ID NO: 698660 - DNA, 33 bp, Homo sapien
attactaattaatggagtagaaccaggtaggaa

SEQ ID NO: 698661 - DNA, 33 bp, Homo sapien
tctgctgtccctggccacataccaagctaacca

SEQ ID NO: 698662 - DNA, 33 bp, Homo sapien
tctgctgtccctggccgcataccaagctaacca

SEQ ID NO: 698663 - DNA, 33 bp, Homo sapien
gttgttaaggatgtcaaaatgagaaatgacgat

SEQ ID NO: 698664 - DNA, 33 bp, Homo sapien
gttgttaaggatgtcagaatgagaaatgacgat

SEQ ID NO: 698665 - DNA, 33 bp, Homo sapien
tacctaataatgattcccccatttcctcttcac

SEQ ID NO: 698666 - DNA, 33 bp, Homo sapien
tacctaataatgattctcccatttcctcttcac

SEQ ID NO: 698667 - DNA, 33 bp, Homo sapien
ttcactgaaactctgacgggatccctcactcag

SEQ ID NO: 698668 - DNA, 33 bp, Homo sapien
ttcactgaaactctgatgggatccctcactcag

SEQ ID NO: 698669 - DNA, 33 bp, Homo sapien
aggttttaaaaaaatccactgctaagtgagcca

SEQ ID NO: 698670 - DNA, 33 bp, Homo sapien
aggttttaaaaaaatctactgctaagtgagcca

SEQ ID NO: 698671 - DNA, 33 bp, Homo sapien
gctcatttgtacttggcatttggtgcctgctta

SEQ ID NO: 698672 - DNA, 33 bp, Homo sapien
gctcatttgtacttggtatttggtgcctgctta

SEQ ID NO: 698673 - DNA, 33 bp, Homo sapien
cccctttcttggagtcccctaggcttcagtgca

SEQ ID NO: 698674 - DNA, 33 bp, Homo sapien
cccctttcttggagtctcctaggcttcagtgca

SEQ ID NO: 698675 - DNA, 33 bp, Homo sapien
tccgctgagtacttacggcatgccagatgtttt

SEQ ID NO: 698676 - DNA, 33 bp, Homo sapien
tccgctgagtacttactgcatgccagatgtttt

SEQ ID NO: 698677 - DNA, 33 bp, Homo sapien
taaaaaagaatgccaactcagtgcagggatcac

SEQ ID NO: 698678 - DNA, 33 bp, Homo sapien
taaaaaagaatgccaagtcagtgcagggatcac

SEQ ID NO: 698679 - DNA, 33 bp, Homo sapien
aagagcaatgactcagacatcactacttagaag

SEQ ID NO: 698680 - DNA, 33 bp, Homo sapien
aagagcaatgactcaggcatcactacttagaag

SEQ ID NO: 698681 - DNA, 33 bp, Homo sapien
tgtatacttagcaaagaaactcatagattataa

SEQ ID NO: 698682 - DNA, 33 bp, Homo sapien
tgtatacttagcaaaggaactcatagattataa

SEQ ID NO: 698683 - DNA, 33 bp, Homo sapien
atacaggttaaaatcacattaaagaatttgtct

SEQ ID NO: 698684 - DNA, 33 bp, Homo sapien
atacaggttaaaatcagattaaagaatttgtct

SEQ ID NO: 698685 - DNA, 33 bp, Homo sapien
tgtcatcctcacactaagagaggggtcacagcc

SEQ ID NO: 698686 - DNA, 33 bp, Homo sapien
tgtcatcctcacactacgagaggggtcacagcc

SEQ ID NO: 698687 - DNA, 33 bp, Homo sapien
caggctcctagcatataaggaagaaaatctcat

SEQ ID NO: 698688 - DNA, 33 bp, Homo sapien
caggctcctagcatatgaggaagaaaatctcat

SEQ ID NO: 698689 - DNA, 33 bp, Homo sapien
agttctgttttttagggatcaaatgctaggata

SEQ ID NO: 698690 - DNA, 33 bp, Homo sapien
agttctgttttttaggtatcaaatgctaggata

SEQ ID NO: 698691 - DNA, 33 bp, Homo sapien
aatgttctgattaaaacggggctgaggaaacag

SEQ ID NO: 698692 - DNA, 33 bp, Homo sapien
aatgttctgattaaaatggggctgaggaaacag

SEQ ID NO: 698693 - DNA, 33 bp, Homo sapien
ataggtaattaaggcactgatttcattaactgc

SEQ ID NO: 698694 - DNA, 33 bp, Homo sapien
ataggtaattaaggcattgatttcattaactgc

SEQ ID NO: 698695 - DNA, 33 bp, Homo sapien
gatgcaagacggttacggctgaacagaaaggcg

SEQ ID NO: 698696 - DNA, 33 bp, Homo sapien
gatgcaagacggttactgctgaacagaaaggcg

SEQ ID NO: 698697 - DNA, 33 bp, Homo sapien
gatcaatgtatcagaactgcaacaactactgaa

SEQ ID NO: 698698 - DNA, 33 bp, Homo sapien
gatcaatgtatcagaattgcaacaactactgaa

SEQ ID NO: 698699 - DNA, 33 bp, Homo sapien
atttctgtttgcagacaaagtaaatcaaaacca

SEQ ID NO: 698700 - DNA, 33 bp, Homo sapien
atttctgtttgcagacgaagtaaatcaaaacca

SEQ ID NO: 698701 - DNA, 33 bp, Homo sapien
tttttatctcacccgggaattataaagacacct

SEQ ID NO: 698702 - DNA, 33 bp, Homo sapien
tttttatctcacccggtaattataaagacacct

SEQ ID NO: 698703 - DNA, 33 bp, Homo sapien
gagactgctgtgttgcaatacccaacctactct

SEQ ID NO: 698704 - DNA, 33 bp, Homo sapien
gagactgctgtgttgccatacccaacctactct

SEQ ID NO: 698705 - DNA, 33 bp, Homo sapien
atttcaggtcataagacacatctattagtgcct

SEQ ID NO: 698706 - DNA, 33 bp, Homo sapien
atttcaggtcataagagacatctattagtgcct

SEQ ID NO: 698707 - DNA, 33 bp, Homo sapien
atgtaggtaaaacatacccccaccagacttcta

SEQ ID NO: 698708 - DNA, 33 bp, Homo sapien
atgtaggtaaaacatatccccaccagacttcta

SEQ ID NO: 698709 - DNA, 33 bp, Homo sapien
agaactacttttacaccaacatacaatgagttt

SEQ ID NO: 698710 - DNA, 33 bp, Homo sapien
agaactacttttacactaacatacaatgagttt

SEQ ID NO: 698711 - DNA, 33 bp, Homo sapien
ttttgtgtattacctaaactgattcatcacact

SEQ ID NO: 698712 - DNA, 33 bp, Homo sapien
ttttgtgtattacctatactgattcatcacact

SEQ ID NO: 698713 - DNA, 33 bp, Homo sapien
agaacagagtagattacgactaaggtttgcttt

SEQ ID NO: 698714 - DNA, 33 bp, Homo sapien
agaacagagtagattatgactaaggtttgcttt

SEQ ID NO: 698715 - DNA, 33 bp, Homo sapien
gatgtggcggtgtttcaacaaaactttatttac

SEQ ID NO: 698716 - DNA, 33 bp, Homo sapien
gatgtggcggtgtttcgacaaaactttatttac

SEQ ID NO: 698717 - DNA, 33 bp, Homo sapien
gaaaaagtttgccaaacatagctctatagaaag

SEQ ID NO: 698718 - DNA, 33 bp, Homo sapien
gaaaaagtttgccaaatatagctctatagaaag

SEQ ID NO: 698719 - DNA, 33 bp, Homo sapien
tttcttcagggtgtcgcataaagagaaatgtgc

SEQ ID NO: 698720 - DNA, 33 bp, Homo sapien
tttcttcagggtgtcgtataaagagaaatgtgc

SEQ ID NO: 698721 - DNA, 33 bp, Homo sapien
ttagtgattcatttaactctgtgtgccagagac

SEQ ID NO: 698722 - DNA, 33 bp, Homo sapien
ttagtgattcatttaattctgtgtgccagagac

SEQ ID NO: 698723 - DNA, 33 bp, Homo sapien
tctttccaatggctgacagaaaacaaagctggg

SEQ ID NO: 698724 - DNA, 33 bp, Homo sapien
tctttccaatggctgatagaaaacaaagctggg

SEQ ID NO: 698725 - DNA, 33 bp, Homo sapien
ctgaagaggacggcgccctgctttcttaccaat

SEQ ID NO: 698726 - DNA, 33 bp, Homo sapien
ctgaagaggacggcgctctgctttcttaccaat

SEQ ID NO: 698727 - DNA, 33 bp, Homo sapien
cttactggtcaccagaatcaagactcaaaacaa

SEQ ID NO: 698728 - DNA, 33 bp, Homo sapien
cttactggtcaccagactcaagactcaaaacaa

SEQ ID NO: 698729 - DNA, 33 bp, Homo sapien
cttcagtacaggccaacgatggcgatccacagt

SEQ ID NO: 698730 - DNA, 33 bp, Homo sapien
cttcagtacaggccaatgatggcgatccacagt

SEQ ID NO: 698731 - DNA, 33 bp, Homo sapien
tgtgggttgtagaaaaacttgactgcctgaagt

SEQ ID NO: 698732 - DNA, 33 bp, Homo sapien
tgtgggttgtagaaaatcttgactgcctgaagt

SEQ ID NO: 698733 - DNA, 33 bp, Homo sapien
acaggcttttaatgtaaaatcagacaaaattca

SEQ ID NO: 698734 - DNA, 33 bp, Homo sapien
acaggcttttaatgtagaatcagacaaaattca

SEQ ID NO: 698735 - DNA, 33 bp, Homo sapien
ttccttctttcttcaggattgtggggaaactgt

SEQ ID NO: 698736 - DNA, 33 bp, Homo sapien
ttccttctttcttcagtattgtggggaaactgt

SEQ ID NO: 698737 - DNA, 33 bp, Homo sapien
tctatgctggtatgtcaatattttagatgccaa

SEQ ID NO: 698738 - DNA, 33 bp, Homo sapien
tctatgctggtatgtcgatattttagatgccaa

SEQ ID NO: 698739 - DNA, 33 bp, Homo sapien
gcatgcttatgtctgacgtgattaacttcagag

SEQ ID NO: 698740 - DNA, 33 bp, Homo sapien
gcatgcttatgtctgatgtgattaacttcagag

SEQ ID NO: 698741 - DNA, 33 bp, Homo sapien
gaatccttcatttgagccgagccttaaggatga

SEQ ID NO: 698742 - DNA, 33 bp, Homo sapien
gaatccttcatttgagtcgagccttaaggatga

SEQ ID NO: 698743 - DNA, 33 bp, Homo sapien
tctgcaaggaataaagaatacgacctgagctcc

SEQ ID NO: 698744 - DNA, 33 bp, Homo sapien
tctgcaaggaataaagtatacgacctgagctcc

SEQ ID NO: 698745 - DNA, 33 bp, Homo sapien
ttgtgagcagtaaaaacgagggagtggctcctg

SEQ ID NO: 698746 - DNA, 33 bp, Homo sapien
ttgtgagcagtaaaaatgagggagtggctcctg

SEQ ID NO: 698747 - DNA, 33 bp, Homo sapien
ctagtgcagtgtctcacactctgaatcttaaag

SEQ ID NO: 698748 - DNA, 33 bp, Homo sapien
ctagtgcagtgtctcatactctgaatcttaaag

SEQ ID NO: 698749 - DNA, 33 bp, Homo sapien
ggggttaaagcagagccacgataactaattatt

SEQ ID NO: 698750 - DNA, 33 bp, Homo sapien
ggggttaaagcagagcgacgataactaattatt

SEQ ID NO: 698751 - DNA, 33 bp, Homo sapien
ccactctaagaacaaaatatggccagaactagg

SEQ ID NO: 698752 - DNA, 33 bp, Homo sapien
ccactctaagaacaaagtatggccagaactagg

SEQ ID NO: 698753 - DNA, 33 bp, Homo sapien
agtggaaatggacacagcatgggaagaaaatag

SEQ ID NO: 698754 - DNA, 33 bp, Homo sapien
agtggaaatggacacatcatgggaagaaaatag

SEQ ID NO: 698755 - DNA, 33 bp, Homo sapien
gctagtttgaatgccaatagggagccatcagaa

SEQ ID NO: 698756 - DNA, 33 bp, Homo sapien
gctagtttgaatgccagtagggagccatcagaa

SEQ ID NO: 698757 - DNA, 33 bp, Homo sapien
aggcagggcggaaagcagaatcagaagacagct

SEQ ID NO: 698758 - DNA, 33 bp, Homo sapien
aggcagggcggaaagcggaatcagaagacagct

SEQ ID NO: 698759 - DNA, 33 bp, Homo sapien
gagaaagtacagacacagacggcttgagtcact

SEQ ID NO: 698760 - DNA, 33 bp, Homo sapien
gagaaagtacagacacggacggcttgagtcact

SEQ ID NO: 698761 - DNA, 33 bp, Homo sapien
ctgagccaggccctgacgatgggtggattttga

SEQ ID NO: 698762 - DNA, 33 bp, Homo sapien
ctgagccaggccctgatgatgggtggattttga

SEQ ID NO: 698763 - DNA, 33 bp, Homo sapien
tctgagaagcctgggaagagaaactgcaatctg

SEQ ID NO: 698764 - DNA, 33 bp, Homo sapien
tctgagaagcctgggaggagaaactgcaatctg

SEQ ID NO: 698765 - DNA, 33 bp, Homo sapien
aagtcaactaggattcaaggtcaacaaccactt

SEQ ID NO: 698766 - DNA, 33 bp, Homo sapien
aagtcaactaggattcgaggtcaacaaccactt

SEQ ID NO: 698767 - DNA, 33 bp, Homo sapien
ggaacccacagaggccagctgagatttcaattt

SEQ ID NO: 698768 - DNA, 33 bp, Homo sapien
ggaacccacagaggccggctgagatttcaattt

SEQ ID NO: 698769 - DNA, 33 bp, Homo sapien
aacgagctatatgccccgccgtgagttaagtgc

SEQ ID NO: 698770 - DNA, 33 bp, Homo sapien
aacgagctatatgccctgccgtgagttaagtgc

SEQ ID NO: 698771 - DNA, 33 bp, Homo sapien
gtgctgagctgaaaaacgtgggattatattatc

SEQ ID NO: 698772 - DNA, 33 bp, Homo sapien
gtgctgagctgaaaaatgtgggattatattatc

SEQ ID NO: 698773 - DNA, 33 bp, Homo sapien
acactctgcaagaaggcaatagaatgaggtatt

SEQ ID NO: 698774 - DNA, 33 bp, Homo sapien
acactctgcaagaaggtaatagaatgaggtatt

SEQ ID NO: 698775 - DNA, 33 bp, Homo sapien
tggtgatcctgaaagcacccgttcattcaaagt

SEQ ID NO: 698776 - DNA, 33 bp, Homo sapien
tggtgatcctgaaagcgcccgttcattcaaagt

SEQ ID NO: 698777 - DNA, 33 bp, Homo sapien
cagatgctctttctggaaactttgaacaactgc

SEQ ID NO: 698778 - DNA, 33 bp, Homo sapien
cagatgctctttctgggaactttgaacaactgc

SEQ ID NO: 698779 - DNA, 33 bp, Homo sapien
attggggtgaggattaaatgtaaaataaagggt

SEQ ID NO: 698780 - DNA, 33 bp, Homo sapien
attggggtgaggattagatgtaaaataaagggt

SEQ ID NO: 698781 - DNA, 33 bp, Homo sapien
gacttctaaatcaatcaatcaatttatcattgg

SEQ ID NO: 698782 - DNA, 33 bp, Homo sapien
gacttctaaatcaatcgatcaatttatcattgg

SEQ ID NO: 698783 - DNA, 33 bp, Homo sapien
aaattaaggtcaatgaagtttatggattaagag

SEQ ID NO: 698784 - DNA, 33 bp, Homo sapien
aaattaaggtcaatgaggtttatggattaagag

SEQ ID NO: 698785 - DNA, 33 bp, Homo sapien
agtattcaataaatcacgtgagatattcaacac

SEQ ID NO: 698786 - DNA, 33 bp, Homo sapien
agtattcaataaatcatgtgagatattcaacac

SEQ ID NO: 698787 - DNA, 33 bp, Homo sapien
ccccagcagagaaaaagcctatgcgaattcatt

SEQ ID NO: 698788 - DNA, 33 bp, Homo sapien
ccccagcagagaaaaatcctatgcgaattcatt

SEQ ID NO: 698789 - DNA, 33 bp, Homo sapien
taatatagcatcaaaacttagggagagaaaaat

SEQ ID NO: 698790 - DNA, 33 bp, Homo sapien
taatatagcatcaaaagttagggagagaaaaat

SEQ ID NO: 698791 - DNA, 33 bp, Homo sapien
ggaaaaggcctctttcaatggtgaggagagagg

SEQ ID NO: 698792 - DNA, 33 bp, Homo sapien
ggaaaaggcctctttcgatggtgaggagagagg

SEQ ID NO: 698793 - DNA, 33 bp, Homo sapien
ctctttattggatccaccagtcctcaagaggtt

SEQ ID NO: 698794 - DNA, 33 bp, Homo sapien
ctctttattggatccatcagtcctcaagaggtt

SEQ ID NO: 698795 - DNA, 33 bp, Homo sapien
gcttcaaacattccagaataccatattatttaa

SEQ ID NO: 698796 - DNA, 33 bp, Homo sapien
gcttcaaacattccaggataccatattatttaa

SEQ ID NO: 698797 - DNA, 33 bp, Homo sapien
ccagcctggagcagtgcaagaggaaatggactg

SEQ ID NO: 698798 - DNA, 33 bp, Homo sapien
ccagcctggagcagtgtaagaggaaatggactg

SEQ ID NO: 698799 - DNA, 33 bp, Homo sapien
cctgagagagatgtacagaaaagattgtgcaac

SEQ ID NO: 698800 - DNA, 33 bp, Homo sapien
cctgagagagatgtacggaaaagattgtgcaac

SEQ ID NO: 698801 - DNA, 33 bp, Homo sapien
ctcagagctagggaacaagggagagatgctgag

SEQ ID NO: 698802 - DNA, 33 bp, Homo sapien
ctcagagctagggaacgagggagagatgctgag

SEQ ID NO: 698803 - DNA, 33 bp, Homo sapien
ttttagccaatgagtgaagctgagcagccacca

SEQ ID NO: 698804 - DNA, 33 bp, Homo sapien
ttttagccaatgagtggagctgagcagccacca

SEQ ID NO: 698805 - DNA, 33 bp, Homo sapien
tttaattacatctctgaactgacactattcctt

SEQ ID NO: 698806 - DNA, 33 bp, Homo sapien
tttaattacatctctggactgacactattcctt

SEQ ID NO: 698807 - DNA, 33 bp, Homo sapien
gttttgagaaccagagaccagtattttgggcag

SEQ ID NO: 698808 - DNA, 33 bp, Homo sapien
gttttgagaaccagaggccagtattttgggcag

SEQ ID NO: 698809 - DNA, 33 bp, Homo sapien
acatgtcctgcactaaagagtaacaatggaaga

SEQ ID NO: 698810 - DNA, 33 bp, Homo sapien
acatgtcctgcactaacgagtaacaatggaaga

SEQ ID NO: 698811 - DNA, 33 bp, Homo sapien
acctctatttcctgcaatatagctaatcagata

SEQ ID NO: 698812 - DNA, 33 bp, Homo sapien
acctctatttcctgcagtatagctaatcagata

SEQ ID NO: 698813 - DNA, 33 bp, Homo sapien
gctttcaaagacactaatacggttatgaccaaa

SEQ ID NO: 698814 - DNA, 33 bp, Homo sapien
gctttcaaagacactattacggttatgaccaaa

SEQ ID NO: 698815 - DNA, 33 bp, Homo sapien
ggaactgaggcatagacaaatttaacacctcat

SEQ ID NO: 698816 - DNA, 33 bp, Homo sapien
ggaactgaggcatagataaatttaacacctcat

SEQ ID NO: 698817 - DNA, 33 bp, Homo sapien
tgaacacaaagtataacgtgagacttgaggcag

SEQ ID NO: 698818 - DNA, 33 bp, Homo sapien
tgaacacaaagtataatgtgagacttgaggcag

SEQ ID NO: 698819 - DNA, 33 bp, Homo sapien
actaatatgaaatgccacagggaaaaaatagac

SEQ ID NO: 698820 - DNA, 33 bp, Homo sapien
actaatatgaaatgccgcagggaaaaaatagac

SEQ ID NO: 698821 - DNA, 33 bp, Homo sapien
gtggtcctggaaaaagcagatgttggtcatcat

SEQ ID NO: 698822 - DNA, 33 bp, Homo sapien
gtggtcctggaaaaaggagatgttggtcatcat

SEQ ID NO: 698823 - DNA, 33 bp, Homo sapien
tgaaatgatctgttcacgggtccgacttcccca

SEQ ID NO: 698824 - DNA, 33 bp, Homo sapien
tgaaatgatctgttcatgggtccgacttcccca

SEQ ID NO: 698825 - DNA, 33 bp, Homo sapien
atgtgaaacctggagacatataatgggaaactt

SEQ ID NO: 698826 - DNA, 33 bp, Homo sapien
atgtgaaacctggagagatataatgggaaactt

SEQ ID NO: 698827 - DNA, 33 bp, Homo sapien
agattcctgcctgaaaaagggtgacatctgtcc

SEQ ID NO: 698828 - DNA, 33 bp, Homo sapien
agattcctgcctgaaagagggtgacatctgtcc

SEQ ID NO: 698829 - DNA, 33 bp, Homo sapien
tagctcatctccctcaaaggacttagggtgccg

SEQ ID NO: 698830 - DNA, 33 bp, Homo sapien
tagctcatctccctcagaggacttagggtgccg

SEQ ID NO: 698831 - DNA, 33 bp, Homo sapien
aataaagcaggcttaacgttgagagatgccctt

SEQ ID NO: 698832 - DNA, 33 bp, Homo sapien
aataaagcaggcttaatgttgagagatgccctt

SEQ ID NO: 698833 - DNA, 33 bp, Homo sapien
gtgtcctgcagttccccaaagtaggcttatatc

SEQ ID NO: 698834 - DNA, 33 bp, Homo sapien
gtgtcctgcagttccctaaagtaggcttatatc

SEQ ID NO: 698835 - DNA, 33 bp, Homo sapien
tatggccatagtaaccaatctaaataagccatg

SEQ ID NO: 698836 - DNA, 33 bp, Homo sapien
tatggccatagtaaccgatctaaataagccatg

SEQ ID NO: 698837 - DNA, 33 bp, Homo sapien
gcaaaaacgccagggcaatgaaaataaattaac

SEQ ID NO: 698838 - DNA, 33 bp, Homo sapien
gcaaaaacgccagggctatgaaaataaattaac

SEQ ID NO: 698839 - DNA, 33 bp, Homo sapien
gactggaagcatcgtccaattttatcctcataa

SEQ ID NO: 698840 - DNA, 33 bp, Homo sapien
gactggaagcatcgtctaattttatcctcataa

SEQ ID NO: 698841 - DNA, 33 bp, Homo sapien
gaggggttggattcatcaggatgggcaggatgg

SEQ ID NO: 698842 - DNA, 33 bp, Homo sapien
gaggggttggattcattaggatgggcaggatgg

SEQ ID NO: 698843 - DNA, 33 bp, Homo sapien
catgtgagatgaacccagctcgtatttttgttt

SEQ ID NO: 698844 - DNA, 33 bp, Homo sapien
catgtgagatgaacccggctcgtatttttgttt

SEQ ID NO: 698845 - DNA, 33 bp, Homo sapien
cagaggcttcgtgaataaccattaaattcaccg

SEQ ID NO: 698846 - DNA, 33 bp, Homo sapien
cagaggcttcgtgaatgaccattaaattcaccg

SEQ ID NO: 698847 - DNA, 33 bp, Homo sapien
gatagacacacagacacaagcatgagcggacag

SEQ ID NO: 698848 - DNA, 33 bp, Homo sapien
gatagacacacagacataagcatgagcggacag

SEQ ID NO: 698849 - DNA, 33 bp, Homo sapien
tatctgaaacccaaaccgctttaagggatgtgg

SEQ ID NO: 698850 - DNA, 33 bp, Homo sapien
tatctgaaacccaaactgctttaagggatgtgg

SEQ ID NO: 698851 - DNA, 33 bp, Homo sapien
gggatgttactcagcaaggttagcaaactacaa

SEQ ID NO: 698852 - DNA, 33 bp, Homo sapien
gggatgttactcagcagggttagcaaactacaa

SEQ ID NO: 698853 - DNA, 33 bp, Homo sapien
agtgcagtggctgtgacagagactgcatgactg

SEQ ID NO: 698854 - DNA, 33 bp, Homo sapien
agtgcagtggctgtgatagagactgcatgactg

SEQ ID NO: 698855 - DNA, 33 bp, Homo sapien
gctgacttaaaataccacagggagctggagagt

SEQ ID NO: 698856 - DNA, 33 bp, Homo sapien
gctgacttaaaataccgcagggagctggagagt

SEQ ID NO: 698857 - DNA, 33 bp, Homo sapien
aaataaatgaatatgacagcattgatctttaaa

SEQ ID NO: 698858 - DNA, 33 bp, Homo sapien
aaataaatgaatatgatagcattgatctttaaa

SEQ ID NO: 698859 - DNA, 33 bp, Homo sapien
aagattactgtcttgaccactaaatgtcttttg

SEQ ID NO: 698860 - DNA, 33 bp, Homo sapien
aagattactgtcttgatcactaaatgtcttttg

SEQ ID NO: 698861 - DNA, 33 bp, Homo sapien
tagtgaattcactaaaatgggtagcgacaaacc

SEQ ID NO: 698862 - DNA, 33 bp, Homo sapien
tagtgaattcactaaactgggtagcgacaaacc

SEQ ID NO: 698863 - DNA, 33 bp, Homo sapien
agtttctattttgttcacttggatcactgactc

SEQ ID NO: 698864 - DNA, 33 bp, Homo sapien
agtttctattttgttctcttggatcactgactc

SEQ ID NO: 698865 - DNA, 33 bp, Homo sapien
taaggatgtgagactgaattgttaggtatgaaa

SEQ ID NO: 698866 - DNA, 33 bp, Homo sapien
taaggatgtgagactgcattgttaggtatgaaa

SEQ ID NO: 698867 - DNA, 33 bp, Homo sapien
gattaaaatgagtaagccaaagggatgaaatgt

SEQ ID NO: 698868 - DNA, 33 bp, Homo sapien
gattaaaatgagtaaggcaaagggatgaaatgt

SEQ ID NO: 698869 - DNA, 33 bp, Homo sapien
gtagaaatacatttacaggaaatctgagacatt

SEQ ID NO: 698870 - DNA, 33 bp, Homo sapien
gtagaaatacatttacgggaaatctgagacatt

SEQ ID NO: 698871 - DNA, 33 bp, Homo sapien
gaaaaccaattcaaaacgcactagatacactct

SEQ ID NO: 698872 - DNA, 33 bp, Homo sapien
gaaaaccaattcaaaatgcactagatacactct

SEQ ID NO: 698873 - DNA, 33 bp, Homo sapien
aggacacatggtctcaaacgtttcctgcccaat

SEQ ID NO: 698874 - DNA, 33 bp, Homo sapien
aggacacatggtctcagacgtttcctgcccaat

SEQ ID NO: 698875 - DNA, 33 bp, Homo sapien
actgaaaagcaataataaaagtgctagaatttc

SEQ ID NO: 698876 - DNA, 33 bp, Homo sapien
actgaaaagcaataatgaaagtgctagaatttc

SEQ ID NO: 698877 - DNA, 33 bp, Homo sapien
catttgatgtccaaccactcattaacatttact

SEQ ID NO: 698878 - DNA, 33 bp, Homo sapien
catttgatgtccaaccgctcattaacatttact

SEQ ID NO: 698879 - DNA, 33 bp, Homo sapien
caccaaaaagaatgagaaagccgccataaacaa

SEQ ID NO: 698880 - DNA, 33 bp, Homo sapien
caccaaaaagaatgaggaagccgccataaacaa

SEQ ID NO: 698881 - DNA, 33 bp, Homo sapien
agcatgacaatctcacaaaggttcaataggcac

SEQ ID NO: 698882 - DNA, 33 bp, Homo sapien
agcatgacaatctcacgaaggttcaataggcac

SEQ ID NO: 698883 - DNA, 33 bp, Homo sapien
caccatcctaatgtcacagagagggaatgcatg

SEQ ID NO: 698884 - DNA, 33 bp, Homo sapien
caccatcctaatgtcatagagagggaatgcatg

SEQ ID NO: 698885 - DNA, 33 bp, Homo sapien
agacatctactcttaccctcatttgtgtttcct

SEQ ID NO: 698886 - DNA, 33 bp, Homo sapien
agacatctactcttactctcatttgtgtttcct

SEQ ID NO: 698887 - DNA, 33 bp, Homo sapien
ccttagaatgctttccacgtgagtaatcaagga

SEQ ID NO: 698888 - DNA, 33 bp, Homo sapien
ccttagaatgctttccgcgtgagtaatcaagga

SEQ ID NO: 698889 - DNA, 33 bp, Homo sapien
aagttagcaaaagcaaatatatccattttttaa

SEQ ID NO: 698890 - DNA, 33 bp, Homo sapien
aagttagcaaaagcaagtatatccattttttaa

SEQ ID NO: 698891 - DNA, 33 bp, Homo sapien
gtattataacttagaaactatcagcacaatgaa

SEQ ID NO: 698892 - DNA, 33 bp, Homo sapien
gtattataacttagaatctatcagcacaatgaa

SEQ ID NO: 698893 - DNA, 33 bp, Homo sapien
aataaaactattgtccaaatgttaacagtgatt

SEQ ID NO: 698894 - DNA, 33 bp, Homo sapien
aataaaactattgtccgaatgttaacagtgatt

SEQ ID NO: 698895 - DNA, 33 bp, Homo sapien
acctccccttcaatcactctcccagaattatca

SEQ ID NO: 698896 - DNA, 33 bp, Homo sapien
acctccccttcaatcagtctcccagaattatca

SEQ ID NO: 698897 - DNA, 33 bp, Homo sapien
taggagaggtgataaacggcaatttgtgaatgg

SEQ ID NO: 698898 - DNA, 33 bp, Homo sapien
taggagaggtgataaatggcaatttgtgaatgg

SEQ ID NO: 698899 - DNA, 33 bp, Homo sapien
agaactggaccaaggactcaagtactggatggg

SEQ ID NO: 698900 - DNA, 33 bp, Homo sapien
agaactggaccaaggattcaagtactggatggg

SEQ ID NO: 698901 - DNA, 33 bp, Homo sapien
aacggaggagattacgccctagcatggaaaata

SEQ ID NO: 698902 - DNA, 33 bp, Homo sapien
aacggaggagattacgtcctagcatggaaaata

SEQ ID NO: 698903 - DNA, 33 bp, Homo sapien
actagactgcatttcaactaagttaattaagct

SEQ ID NO: 698904 - DNA, 33 bp, Homo sapien
actagactgcatttcagctaagttaattaagct

SEQ ID NO: 698905 - DNA, 33 bp, Homo sapien
acgtatcgatattcaacctcacaaaataagctc

SEQ ID NO: 698906 - DNA, 33 bp, Homo sapien
acgtatcgatattcaagctcacaaaataagctc

SEQ ID NO: 698907 - DNA, 33 bp, Homo sapien
agtattgtccatgaaaatcaacctcctggacac

SEQ ID NO: 698908 - DNA, 33 bp, Homo sapien
agtattgtccatgaaagtcaacctcctggacac

SEQ ID NO: 698909 - DNA, 33 bp, Homo sapien
ggctctgctcttctaaagggaatagggagcaaa

SEQ ID NO: 698910 - DNA, 33 bp, Homo sapien
ggctctgctcttctaaggggaatagggagcaaa

SEQ ID NO: 698911 - DNA, 33 bp, Homo sapien
gtgcaaagagttgaaaaccatgtcacacacata

SEQ ID NO: 698912 - DNA, 33 bp, Homo sapien
gtgcaaagagttgaaagccatgtcacacacata

SEQ ID NO: 698913 - DNA, 33 bp, Homo sapien
catttatcccacaatcacaagagagggaagtaa

SEQ ID NO: 698914 - DNA, 33 bp, Homo sapien
catttatcccacaatcgcaagagagggaagtaa

SEQ ID NO: 698915 - DNA, 33 bp, Homo sapien
agtcttcaggtccactgactatgtgccaagtgc

SEQ ID NO: 698916 - DNA, 33 bp, Homo sapien
agtcttcaggtccacttactatgtgccaagtgc

SEQ ID NO: 698917 - DNA, 33 bp, Homo sapien
ccaggtgattcaatgaagacaagtgattttcga

SEQ ID NO: 698918 - DNA, 33 bp, Homo sapien
ccaggtgattcaatgatgacaagtgattttcga

SEQ ID NO: 698919 - DNA, 33 bp, Homo sapien
aattggctgaggtagcactttttattaagggaa

SEQ ID NO: 698920 - DNA, 33 bp, Homo sapien
aattggctgaggtagctctttttattaagggaa

SEQ ID NO: 698921 - DNA, 33 bp, Homo sapien
agctgaggttctggaccgagcacgttcttgcct

SEQ ID NO: 698922 - DNA, 33 bp, Homo sapien
agctgaggttctggactgagcacgttcttgcct

SEQ ID NO: 698923 - DNA, 33 bp, Homo sapien
tgatatatatgaaagcaattttctaccaactca

SEQ ID NO: 698924 - DNA, 33 bp, Homo sapien
tgatatatatgaaagcgattttctaccaactca

SEQ ID NO: 698925 - DNA, 33 bp, Homo sapien
ggccctcattttttgaaccaagtacatgatggt

SEQ ID NO: 698926 - DNA, 33 bp, Homo sapien
ggccctcattttttgagccaagtacatgatggt

SEQ ID NO: 698927 - DNA, 33 bp, Homo sapien
aatgcagcctgagaaacgaggggttcctgtctc

SEQ ID NO: 698928 - DNA, 33 bp, Homo sapien
aatgcagcctgagaaatgaggggttcctgtctc

SEQ ID NO: 698929 - DNA, 33 bp, Homo sapien
tataataacaataatacggatctatgtcctcac

SEQ ID NO: 698930 - DNA, 33 bp, Homo sapien
tataataacaataatatggatctatgtcctcac

SEQ ID NO: 698931 - DNA, 33 bp, Homo sapien
aaattgcttgatgcaaattatttgaactatatg

SEQ ID NO: 698932 - DNA, 33 bp, Homo sapien
aaattgcttgatgcaagttatttgaactatatg

SEQ ID NO: 698933 - DNA, 33 bp, Homo sapien
gaaaaaccagaaataaatggggataagaactta

SEQ ID NO: 698934 - DNA, 33 bp, Homo sapien
gaaaaaccagaaataagtggggataagaactta

SEQ ID NO: 698935 - DNA, 33 bp, Homo sapien
ttcagtgagcgatgccagaataaaataattcta

SEQ ID NO: 698936 - DNA, 33 bp, Homo sapien
ttcagtgagcgatgcctgaataaaataattcta

SEQ ID NO: 698937 - DNA, 33 bp, Homo sapien
atatttcttgttttccagactagacagtcaatt

SEQ ID NO: 698938 - DNA, 33 bp, Homo sapien
atatttcttgttttccggactagacagtcaatt

SEQ ID NO: 698939 - DNA, 33 bp, Homo sapien
acaagcacacataaacacaattgaaacagaggt

SEQ ID NO: 698940 - DNA, 33 bp, Homo sapien
acaagcacacataaacgcaattgaaacagaggt

SEQ ID NO: 698941 - DNA, 33 bp, Homo sapien
tgtgatgacactgcacaaaagccctcaccagat

SEQ ID NO: 698942 - DNA, 33 bp, Homo sapien
tgtgatgacactgcacgaaagccctcaccagat

SEQ ID NO: 698943 - DNA, 33 bp, Homo sapien
tctggctgagatttgcagaccaaaatgaggatc

SEQ ID NO: 698944 - DNA, 33 bp, Homo sapien
tctggctgagatttgcggaccaaaatgaggatc

SEQ ID NO: 698945 - DNA, 33 bp, Homo sapien
taatgtatgcaatgtaaataaactcacatagta

SEQ ID NO: 698946 - DNA, 33 bp, Homo sapien
taatgtatgcaatgtatataaactcacatagta

SEQ ID NO: 698947 - DNA, 33 bp, Homo sapien
aacatcttgaaaccacaagttgtgtcaaccatg

SEQ ID NO: 698948 - DNA, 33 bp, Homo sapien
aacatcttgaaaccacgagttgtgtcaaccatg

SEQ ID NO: 698949 - DNA, 33 bp, Homo sapien
tgcttcagtaattggacagagatataagaaatt

SEQ ID NO: 698950 - DNA, 33 bp, Homo sapien
tgcttcagtaattggagagagatataagaaatt

SEQ ID NO: 698951 - DNA, 33 bp, Homo sapien
gcaacactcagcaataacatttacaggctaatg

SEQ ID NO: 698952 - DNA, 33 bp, Homo sapien
gcaacactcagcaatagcatttacaggctaatg

SEQ ID NO: 698953 - DNA, 33 bp, Homo sapien
ttttcccgttgagaaaattcaagttccgagagg

SEQ ID NO: 698954 - DNA, 33 bp, Homo sapien
ttttcccgttgagaaagttcaagttccgagagg

SEQ ID NO: 698955 - DNA, 33 bp, Homo sapien
gattttaatatcaaaaagtttgcaagaaatgct

SEQ ID NO: 698956 - DNA, 33 bp, Homo sapien
gattttaatatcaaaaggtttgcaagaaatgct

SEQ ID NO: 698957 - DNA, 33 bp, Homo sapien
ttcttttatgtagcaacctatatcctaacctgc

SEQ ID NO: 698958 - DNA, 33 bp, Homo sapien
ttcttttatgtagcaagctatatcctaacctgc

SEQ ID NO: 698959 - DNA, 33 bp, Homo sapien
cacttctagataaaacaggtagacaatgaaaaa

SEQ ID NO: 698960 - DNA, 33 bp, Homo sapien
cacttctagataaaactggtagacaatgaaaaa

SEQ ID NO: 698961 - DNA, 33 bp, Homo sapien
gaaccctttcttagaacgtgtgtggtctgcaga

SEQ ID NO: 698962 - DNA, 33 bp, Homo sapien
gaaccctttcttagaatgtgtgtggtctgcaga

SEQ ID NO: 698963 - DNA, 33 bp, Homo sapien
aatttaactggtaggaagtgtggaaaaccaaag

SEQ ID NO: 698964 - DNA, 33 bp, Homo sapien
aatttaactggtaggaggtgtggaaaaccaaag

SEQ ID NO: 698965 - DNA, 33 bp, Homo sapien
gaccgggtagaggtgaaacatttatactaccat

SEQ ID NO: 698966 - DNA, 33 bp, Homo sapien
gaccgggtagaggtgagacatttatactaccat

SEQ ID NO: 698967 - DNA, 33 bp, Homo sapien
aacagatgggaaaaatgattcagaacaagacag

SEQ ID NO: 698968 - DNA, 33 bp, Homo sapien
aacagatgggaaaaattattcagaacaagacag

SEQ ID NO: 698969 - DNA, 33 bp, Homo sapien
tcctggctggttcccaatggctgaattacactc

SEQ ID NO: 698970 - DNA, 33 bp, Homo sapien
tcctggctggttcccattggctgaattacactc

SEQ ID NO: 698971 - DNA, 33 bp, Homo sapien
tcaggcaaagttaagaacagcatcggcaccaat

SEQ ID NO: 698972 - DNA, 33 bp, Homo sapien
tcaggcaaagttaagaccagcatcggcaccaat

SEQ ID NO: 698973 - DNA, 33 bp, Homo sapien
caggcaagagacagaacgagaaccaagcgaaac

SEQ ID NO: 698974 - DNA, 33 bp, Homo sapien
caggcaagagacagaatgagaaccaagcgaaac

SEQ ID NO: 698975 - DNA, 33 bp, Homo sapien
agacagaaatcattccaaatatttaaaacagag

SEQ ID NO: 698976 - DNA, 33 bp, Homo sapien
agacagaaatcattccgaatatttaaaacagag

SEQ ID NO: 698977 - DNA, 33 bp, Homo sapien
ccctgctttccaatgacggagggaaaactggct

SEQ ID NO: 698978 - DNA, 33 bp, Homo sapien
ccctgctttccaatgatggagggaaaactggct

SEQ ID NO: 698979 - DNA, 33 bp, Homo sapien
tgtgatactatatcaaagaatgttagccaaata

SEQ ID NO: 698980 - DNA, 33 bp, Homo sapien
tgtgatactatatcaaggaatgttagccaaata

SEQ ID NO: 698981 - DNA, 33 bp, Homo sapien
ggctgaaacttgaaaaccaaagacaccagcaac

SEQ ID NO: 698982 - DNA, 33 bp, Homo sapien
ggctgaaacttgaaaatcaaagacaccagcaac

SEQ ID NO: 698983 - DNA, 33 bp, Homo sapien
catcaggaataggagaaggccagtttaagagca

SEQ ID NO: 698984 - DNA, 33 bp, Homo sapien
catcaggaataggagagggccagtttaagagca

SEQ ID NO: 698985 - DNA, 33 bp, Homo sapien
tcagtaccaagtcagacggtccaaaacacgcaa

SEQ ID NO: 698986 - DNA, 33 bp, Homo sapien
tcagtaccaagtcagatggtccaaaacacgcaa

SEQ ID NO: 698987 - DNA, 33 bp, Homo sapien
gcaagaagattgacagccaaaaacccgtacaca

SEQ ID NO: 698988 - DNA, 33 bp, Homo sapien
gcaagaagattgacagtcaaaaacccgtacaca

SEQ ID NO: 698989 - DNA, 33 bp, Homo sapien
tgtggacaaaaaccaacatgctggatatgacag

SEQ ID NO: 698990 - DNA, 33 bp, Homo sapien
tgtggacaaaaaccaatatgctggatatgacag

SEQ ID NO: 698991 - DNA, 33 bp, Homo sapien
tggcagtacacatatggatctatttccaattcc

SEQ ID NO: 698992 - DNA, 33 bp, Homo sapien
tggcagtacacatatgtatctatttccaattcc

SEQ ID NO: 698993 - DNA, 33 bp, Homo sapien
taagctgcgtattcctcacttgattactgagtg

SEQ ID NO: 698994 - DNA, 33 bp, Homo sapien
taagctgcgtattccttacttgattactgagtg

SEQ ID NO: 698995 - DNA, 33 bp, Homo sapien
atgaagattaatcttaccacaaagcataaaaat

SEQ ID NO: 698996 - DNA, 33 bp, Homo sapien
atgaagattaatcttatcacaaagcataaaaat

SEQ ID NO: 698997 - DNA, 33 bp, Homo sapien
ccatgaatcagaatcacgtggagggcttatgac

SEQ ID NO: 698998 - DNA, 33 bp, Homo sapien
ccatgaatcagaatcatgtggagggcttatgac

SEQ ID NO: 698999 - DNA, 33 bp, Homo sapien
acttgctctggaggaaaccagttgctatgtcat

SEQ ID NO: 699000 - DNA, 33 bp, Homo sapien
acttgctctggaggaagccagttgctatgtcat

SEQ ID NO: 699001 - DNA, 33 bp, Homo sapien
gatagcaatcaaattacaagcaacagtgccttt

SEQ ID NO: 699002 - DNA, 33 bp, Homo sapien
gatagcaatcaaattagaagcaacagtgccttt

SEQ ID NO: 699003 - DNA, 33 bp, Homo sapien
tgataactacaaatgaatattgactatataaaa

SEQ ID NO: 699004 - DNA, 33 bp, Homo sapien
tgataactacaaatgagtattgactatataaaa

SEQ ID NO: 699005 - DNA, 33 bp, Homo sapien
cctcagcacatataccaagtttcttactcgctt

SEQ ID NO: 699006 - DNA, 33 bp, Homo sapien
cctcagcacatatacctagtttcttactcgctt

SEQ ID NO: 699007 - DNA, 33 bp, Homo sapien
atgaatttctgaaaaaaaaggaaacagcgtttt

SEQ ID NO: 699008 - DNA, 33 bp, Homo sapien
atgaatttctgaaaaacaaggaaacagcgtttt

SEQ ID NO: 699009 - DNA, 33 bp, Homo sapien
tgattaagcataccaaataactgactgttttgc

SEQ ID NO: 699010 - DNA, 33 bp, Homo sapien
tgattaagcataccaagtaactgactgttttgc

SEQ ID NO: 699011 - DNA, 33 bp, Homo sapien
tcgaaaaaacaggacactcacagttcaggaaac

SEQ ID NO: 699012 - DNA, 33 bp, Homo sapien
tcgaaaaaacaggacattcacagttcaggaaac

SEQ ID NO: 699013 - DNA, 33 bp, Homo sapien
cctcctttactctcacacaagcatcacgaagaa

SEQ ID NO: 699014 - DNA, 33 bp, Homo sapien
cctcctttactctcacgcaagcatcacgaagaa

SEQ ID NO: 699015 - DNA, 33 bp, Homo sapien
cacccctcaatcaagaatccgtttaagggtagg

SEQ ID NO: 699016 - DNA, 33 bp, Homo sapien
cacccctcaatcaagagtccgtttaagggtagg

SEQ ID NO: 699017 - DNA, 33 bp, Homo sapien
tattggatgaaaagacaaacaacataattatac

SEQ ID NO: 699018 - DNA, 33 bp, Homo sapien
tattggatgaaaagacgaacaacataattatac

SEQ ID NO: 699019 - DNA, 33 bp, Homo sapien
tttgtataatggtgtacatatcctaaaagttgc

SEQ ID NO: 699020 - DNA, 33 bp, Homo sapien
tttgtataatggtgtatatatcctaaaagttgc

SEQ ID NO: 699021 - DNA, 33 bp, Homo sapien
agctactattagtctacgaggcagtcaaaaaca

SEQ ID NO: 699022 - DNA, 33 bp, Homo sapien
agctactattagtctatgaggcagtcaaaaaca

SEQ ID NO: 699023 - DNA, 33 bp, Homo sapien
aaaaatgactgtatccaggagataaatcatgga

SEQ ID NO: 699024 - DNA, 33 bp, Homo sapien
aaaaatgactgtatccgggagataaatcatgga

SEQ ID NO: 699025 - DNA, 33 bp, Homo sapien
ataaagacttttggtgcacttaaagctatgcta

SEQ ID NO: 699026 - DNA, 33 bp, Homo sapien
ataaagacttttggtggacttaaagctatgcta

SEQ ID NO: 699027 - DNA, 33 bp, Homo sapien
cctttgaggaccttccaaaaggagcataaaaag

SEQ ID NO: 699028 - DNA, 33 bp, Homo sapien
cctttgaggaccttccgaaaggagcataaaaag

SEQ ID NO: 699029 - DNA, 33 bp, Homo sapien
atatgtaatatattgacaccatttgacataccc

SEQ ID NO: 699030 - DNA, 33 bp, Homo sapien
atatgtaatatattgagaccatttgacataccc

SEQ ID NO: 699031 - DNA, 33 bp, Homo sapien
agtaccattatcatcacatttgttatgcttgca

SEQ ID NO: 699032 - DNA, 33 bp, Homo sapien
agtaccattatcatcatatttgttatgcttgca

SEQ ID NO: 699033 - DNA, 33 bp, Homo sapien
ctcagaatctactggccgaatgagtgcgtggag

SEQ ID NO: 699034 - DNA, 33 bp, Homo sapien
ctcagaatctactggctgaatgagtgcgtggag

SEQ ID NO: 699035 - DNA, 33 bp, Homo sapien
ccatagaccaaacaaagaaatacatgtttcagt

SEQ ID NO: 699036 - DNA, 33 bp, Homo sapien
ccatagaccaaacaaataaatacatgtttcagt

SEQ ID NO: 699037 - DNA, 33 bp, Homo sapien
gacatgtaatataaaacgttctatgcttattgg

SEQ ID NO: 699038 - DNA, 33 bp, Homo sapien
gacatgtaatataaaatgttctatgcttattgg

SEQ ID NO: 699039 - DNA, 33 bp, Homo sapien
tagaggacaaggaacaataagaaccactgattt

SEQ ID NO: 699040 - DNA, 33 bp, Homo sapien
tagaggacaaggaacattaagaaccactgattt

SEQ ID NO: 699041 - DNA, 33 bp, Homo sapien
ttttgaatgtgtctataaaccaaaatgtaaata

SEQ ID NO: 699042 - DNA, 33 bp, Homo sapien
ttttgaatgtgtctatcaaccaaaatgtaaata

SEQ ID NO: 699043 - DNA, 33 bp, Homo sapien
gtgcaaagtgtcacatcaataaagagtgcaggg

SEQ ID NO: 699044 - DNA, 33 bp, Homo sapien
gtgcaaagtgtcacattaataaagagtgcaggg

SEQ ID NO: 699045 - DNA, 33 bp, Homo sapien
atatgagcagatcctaatagcctcgctgaattg

SEQ ID NO: 699046 - DNA, 33 bp, Homo sapien
atatgagcagatcctagtagcctcgctgaattg

SEQ ID NO: 699047 - DNA, 33 bp, Homo sapien
tataagctttgttaaactttaaatattgtcaca

SEQ ID NO: 699048 - DNA, 33 bp, Homo sapien
tataagctttgttaaattttaaatattgtcaca

SEQ ID NO: 699049 - DNA, 33 bp, Homo sapien
gtggaactcctactataagctaagtgctcttat

SEQ ID NO: 699050 - DNA, 33 bp, Homo sapien
gtggaactcctactatgagctaagtgctcttat

SEQ ID NO: 699051 - DNA, 33 bp, Homo sapien
ttatttgggtggcacacacaagcttttgcaatc

SEQ ID NO: 699052 - DNA, 33 bp, Homo sapien
ttatttgggtggcacatacaagcttttgcaatc

SEQ ID NO: 699053 - DNA, 33 bp, Homo sapien
gttgtttttaaaattccagatgcccagtccctg

SEQ ID NO: 699054 - DNA, 33 bp, Homo sapien
gttgtttttaaaattcgagatgcccagtccctg

SEQ ID NO: 699055 - DNA, 33 bp, Homo sapien
gagtgcagaagagacaaaagagtctgtttcctt

SEQ ID NO: 699056 - DNA, 33 bp, Homo sapien
gagtgcagaagagacagaagagtctgtttcctt

SEQ ID NO: 699057 - DNA, 33 bp, Homo sapien
tgaattgtttgtgttaaactgttgcattaattt

SEQ ID NO: 699058 - DNA, 33 bp, Homo sapien
tgaattgtttgtgttacactgttgcattaattt

SEQ ID NO: 699059 - DNA, 33 bp, Homo sapien
aaaaatctacaaactcacctagttcattcttga

SEQ ID NO: 699060 - DNA, 33 bp, Homo sapien
aaaaatctacaaactcgcctagttcattcttga

SEQ ID NO: 699061 - DNA, 33 bp, Homo sapien
tatttgttatttatgaacccctgcctgcttcca

SEQ ID NO: 699062 - DNA, 33 bp, Homo sapien
tatttgttatttatgaccccctgcctgcttcca

SEQ ID NO: 699063 - DNA, 33 bp, Homo sapien
gtcttttaatacaaaacgctgcaagttcttttt

SEQ ID NO: 699064 - DNA, 33 bp, Homo sapien
gtcttttaatacaaaatgctgcaagttcttttt

SEQ ID NO: 699065 - DNA, 33 bp, Homo sapien
tctccaacctgtgaaagtaagtcatgtgggaag

SEQ ID NO: 699066 - DNA, 33 bp, Homo sapien
tctccaacctgtgaaattaagtcatgtgggaag

SEQ ID NO: 699067 - DNA, 33 bp, Homo sapien
tgcccgggtgaatgatcaggatggtaacaaatg

SEQ ID NO: 699068 - DNA, 33 bp, Homo sapien
tgcccgggtgaatgatgaggatggtaacaaatg

SEQ ID NO: 699069 - DNA, 33 bp, Homo sapien
gttaaactactagagacctgacttaccggtgtg

SEQ ID NO: 699070 - DNA, 33 bp, Homo sapien
gttaaactactagagatctgacttaccggtgtg

SEQ ID NO: 699071 - DNA, 33 bp, Homo sapien
ctaacttctctctctcaccccttcacagccagc

SEQ ID NO: 699072 - DNA, 33 bp, Homo sapien
ctaacttctctctctcgccccttcacagccagc

SEQ ID NO: 699073 - DNA, 33 bp, Homo sapien
tgtacgcatacatagacatacatatatagacaa

SEQ ID NO: 699074 - DNA, 33 bp, Homo sapien
tgtacgcatacatagagatacatatatagacaa

SEQ ID NO: 699075 - DNA, 33 bp, Homo sapien
ctgtaggctcaacaaccgtgggctctctttctt

SEQ ID NO: 699076 - DNA, 33 bp, Homo sapien
ctgtaggctcaacaactgtgggctctctttctt

SEQ ID NO: 699077 - DNA, 33 bp, Homo sapien
cagctgaattttaccaagagaatctgacagtcg

SEQ ID NO: 699078 - DNA, 33 bp, Homo sapien
cagctgaattttaccaggagaatctgacagtcg

SEQ ID NO: 699079 - DNA, 33 bp, Homo sapien
cctcctggtagaatgacggatcagcagcaatgg

SEQ ID NO: 699080 - DNA, 33 bp, Homo sapien
cctcctggtagaatgatggatcagcagcaatgg

SEQ ID NO: 699081 - DNA, 33 bp, Homo sapien
ttcagttctaaaacagaaatcctctcttccttt

SEQ ID NO: 699082 - DNA, 33 bp, Homo sapien
ttcagttctaaaacagtaatcctctcttccttt

SEQ ID NO: 699083 - DNA, 33 bp, Homo sapien
aaagagtagatttccaatgcacataaatctaca

SEQ ID NO: 699084 - DNA, 33 bp, Homo sapien
aaagagtagatttccagtgcacataaatctaca

SEQ ID NO: 699085 - DNA, 33 bp, Homo sapien
cattattcaaaacttacgtaactcaaagcaatt

SEQ ID NO: 699086 - DNA, 33 bp, Homo sapien
cattattcaaaacttatgtaactcaaagcaatt

SEQ ID NO: 699087 - DNA, 33 bp, Homo sapien
taaaaatctatgtgcacgaacaaatgaataatc

SEQ ID NO: 699088 - DNA, 33 bp, Homo sapien
taaaaatctatgtgcatgaacaaatgaataatc

SEQ ID NO: 699089 - DNA, 33 bp, Homo sapien
taggatcagaaataaaaacctgtgcctgacatt

SEQ ID NO: 699090 - DNA, 33 bp, Homo sapien
taggatcagaaataaagacctgtgcctgacatt

SEQ ID NO: 699091 - DNA, 33 bp, Homo sapien
ttccagcgttttataacgatgtgtcttggtatg

SEQ ID NO: 699092 - DNA, 33 bp, Homo sapien
ttccagcgttttataatgatgtgtcttggtatg

SEQ ID NO: 699093 - DNA, 33 bp, Homo sapien
aaaggcaaattttgcactcaaaaacagaaatgc

SEQ ID NO: 699094 - DNA, 33 bp, Homo sapien
aaaggcaaattttgcattcaaaaacagaaatgc

SEQ ID NO: 699095 - DNA, 33 bp, Homo sapien
actctcattttgaatgacaataaactggagaca

SEQ ID NO: 699096 - DNA, 33 bp, Homo sapien
actctcattttgaatggcaataaactggagaca

SEQ ID NO: 699097 - DNA, 33 bp, Homo sapien
aagtgaggcagttggagagttcttttaaacaac

SEQ ID NO: 699098 - DNA, 33 bp, Homo sapien
aagtgaggcagttggatagttcttttaaacaac

SEQ ID NO: 699099 - DNA, 33 bp, Homo sapien
cacacatgcttttcccgaattatcctacgaaat

SEQ ID NO: 699100 - DNA, 33 bp, Homo sapien
cacacatgcttttccctaattatcctacgaaat

SEQ ID NO: 699101 - DNA, 33 bp, Homo sapien
ttgcttttgaccaaaacggacatagaaaacctg

SEQ ID NO: 699102 - DNA, 33 bp, Homo sapien
ttgcttttgaccaaaatggacatagaaaacctg

SEQ ID NO: 699103 - DNA, 33 bp, Homo sapien
taatgagaactataaaattggagcatgtacatt

SEQ ID NO: 699104 - DNA, 33 bp, Homo sapien
taatgagaactataaagttggagcatgtacatt

SEQ ID NO: 699105 - DNA, 33 bp, Homo sapien
tttatagttctcattacagtatttgagtagtca

SEQ ID NO: 699106 - DNA, 33 bp, Homo sapien
tttatagttctcattatagtatttgagtagtca

SEQ ID NO: 699107 - DNA, 33 bp, Homo sapien
aaatcttagtttagaaaatgctaagacatcggt

SEQ ID NO: 699108 - DNA, 33 bp, Homo sapien
aaatcttagtttagaacatgctaagacatcggt

SEQ ID NO: 699109 - DNA, 33 bp, Homo sapien
aacagctggatctcaaaacctttgaattcaaca

SEQ ID NO: 699110 - DNA, 33 bp, Homo sapien
aacagctggatctcaagacctttgaattcaaca

SEQ ID NO: 699111 - DNA, 33 bp, Homo sapien
tgaccccagccacaacaacactggatttatcct

SEQ ID NO: 699112 - DNA, 33 bp, Homo sapien
tgaccccagccacaacgacactggatttatcct

SEQ ID NO: 699113 - DNA, 33 bp, Homo sapien
cctctgctgtcataacaatactacaaaatatgt

SEQ ID NO: 699114 - DNA, 33 bp, Homo sapien
cctctgctgtcataactatactacaaaatatgt

SEQ ID NO: 699115 - DNA, 33 bp, Homo sapien
gacttacctcaacaacagagacatggcacagta

SEQ ID NO: 699116 - DNA, 33 bp, Homo sapien
gacttacctcaacaacggagacatggcacagta

SEQ ID NO: 699117 - DNA, 33 bp, Homo sapien
tcccagaccacctacactgagctattaattagg

SEQ ID NO: 699118 - DNA, 33 bp, Homo sapien
tcccagaccacctacattgagctattaattagg

SEQ ID NO: 699119 - DNA, 33 bp, Homo sapien
agatattggctaatcaccaccacaaactacata

SEQ ID NO: 699120 - DNA, 33 bp, Homo sapien
agatattggctaatcatcaccacaaactacata

SEQ ID NO: 699121 - DNA, 33 bp, Homo sapien
taaaaatattacatctcaaagttatcagcacat

SEQ ID NO: 699122 - DNA, 33 bp, Homo sapien
taaaaatattacatcttaaagttatcagcacat

SEQ ID NO: 699123 - DNA, 33 bp, Homo sapien
actctaagtgactttaagttcctttcagggaat

SEQ ID NO: 699124 - DNA, 33 bp, Homo sapien
actctaagtgactttaggttcctttcagggaat

SEQ ID NO: 699125 - DNA, 33 bp, Homo sapien
acagttctgacacataagggatccacttgtttc

SEQ ID NO: 699126 - DNA, 33 bp, Homo sapien
acagttctgacacataggggatccacttgtttc

SEQ ID NO: 699127 - DNA, 33 bp, Homo sapien
tctggtactttgttacagcaatttaaacagact

SEQ ID NO: 699128 - DNA, 33 bp, Homo sapien
tctggtactttgttacggcaatttaaacagact

SEQ ID NO: 699129 - DNA, 33 bp, Homo sapien
aggccacttttgcttccacctagcttggcactg

SEQ ID NO: 699130 - DNA, 33 bp, Homo sapien
aggccacttttgcttcgacctagcttggcactg

SEQ ID NO: 699131 - DNA, 33 bp, Homo sapien
acacaataaatgggcaaataaagctatgggatt

SEQ ID NO: 699132 - DNA, 33 bp, Homo sapien
acacaataaatgggcatataaagctatgggatt

SEQ ID NO: 699133 - DNA, 33 bp, Homo sapien
aatgaggctgtgtcaacgcatggtatacatgat

SEQ ID NO: 699134 - DNA, 33 bp, Homo sapien
aatgaggctgtgtcaatgcatggtatacatgat

SEQ ID NO: 699135 - DNA, 33 bp, Homo sapien
tacacaaaaacttttacgcgaatgtcaatggca

SEQ ID NO: 699136 - DNA, 33 bp, Homo sapien
tacacaaaaacttttatgcgaatgtcaatggca

SEQ ID NO: 699137 - DNA, 33 bp, Homo sapien
cagacaaatttctaccagagctgataaaaggcc

SEQ ID NO: 699138 - DNA, 33 bp, Homo sapien
cagacaaatttctaccggagctgataaaaggcc

SEQ ID NO: 699139 - DNA, 33 bp, Homo sapien
ggcaagggttggtccaatggaaatctccaacag

SEQ ID NO: 699140 - DNA, 33 bp, Homo sapien
ggcaagggttggtccagtggaaatctccaacag

SEQ ID NO: 699141 - DNA, 33 bp, Homo sapien
cctgaagtggagatcaaggatgagtggtaagaa

SEQ ID NO: 699142 - DNA, 33 bp, Homo sapien
cctgaagtggagatcagggatgagtggtaagaa

SEQ ID NO: 699143 - DNA, 33 bp, Homo sapien
aatctggtagacataaagaaaactgcacttggg

SEQ ID NO: 699144 - DNA, 33 bp, Homo sapien
aatctggtagacataaggaaaactgcacttggg

SEQ ID NO: 699145 - DNA, 33 bp, Homo sapien
ttttgtggcaggataccataaggacagctgacc

SEQ ID NO: 699146 - DNA, 33 bp, Homo sapien
ttttgtggcaggatactataaggacagctgacc

SEQ ID NO: 699147 - DNA, 33 bp, Homo sapien
ctttgtataccagctcaagggaagtctgcattc

SEQ ID NO: 699148 - DNA, 33 bp, Homo sapien
ctttgtataccagctcgagggaagtctgcattc

SEQ ID NO: 699149 - DNA, 33 bp, Homo sapien
gagaaagagacctatacacacacagtattcctt

SEQ ID NO: 699150 - DNA, 33 bp, Homo sapien
gagaaagagacctatatacacacagtattcctt

SEQ ID NO: 699151 - DNA, 33 bp, Homo sapien
tcttacttggcatgaaagactacgcctatggga

SEQ ID NO: 699152 - DNA, 33 bp, Homo sapien
tcttacttggcatgaaggactacgcctatggga

SEQ ID NO: 699153 - DNA, 33 bp, Homo sapien
ggaccaattcatggcccatcgcaaggtcctcat

SEQ ID NO: 699154 - DNA, 33 bp, Homo sapien
ggaccaattcatggcctatcgcaaggtcctcat

SEQ ID NO: 699155 - DNA, 33 bp, Homo sapien
ccctttgttttaaagacgctcctgattagttca

SEQ ID NO: 699156 - DNA, 33 bp, Homo sapien
ccctttgttttaaagatgctcctgattagttca

SEQ ID NO: 699157 - DNA, 33 bp, Homo sapien
tgaccgtattgagagacggccccaagattcttg

SEQ ID NO: 699158 - DNA, 33 bp, Homo sapien
tgaccgtattgagagatggccccaagattcttg

SEQ ID NO: 699159 - DNA, 33 bp, Homo sapien
taaagcctattgcgccaaggctgcaaacatagg

SEQ ID NO: 699160 - DNA, 33 bp, Homo sapien
taaagcctattgcgccgaggctgcaaacatagg

SEQ ID NO: 699161 - DNA, 33 bp, Homo sapien
gctccctttttgctgcactatagttcgctttgg

SEQ ID NO: 699162 - DNA, 33 bp, Homo sapien
gctccctttttgctgcgctatagttcgctttgg

SEQ ID NO: 699163 - DNA, 33 bp, Homo sapien
ccctgcctacctcttaaaagaagctccatatta

SEQ ID NO: 699164 - DNA, 33 bp, Homo sapien
ccctgcctacctcttagaagaagctccatatta

SEQ ID NO: 699165 - DNA, 33 bp, Homo sapien
cccagaggactgaggcaactgaacaaataaaca

SEQ ID NO: 699166 - DNA, 33 bp, Homo sapien
cccagaggactgaggcgactgaacaaataaaca

SEQ ID NO: 699167 - DNA, 33 bp, Homo sapien
tacacatccattcatacacagagagccagtaaa

SEQ ID NO: 699168 - DNA, 33 bp, Homo sapien
tacacatccattcatagacagagagccagtaaa

SEQ ID NO: 699169 - DNA, 33 bp, Homo sapien
aagaaaaaattgcaaaagtatataatccaacct

SEQ ID NO: 699170 - DNA, 33 bp, Homo sapien
aagaaaaaattgcaaacgtatataatccaacct

SEQ ID NO: 699171 - DNA, 33 bp, Homo sapien
aactgagcttctaatacccccatttccccagtc

SEQ ID NO: 699172 - DNA, 33 bp, Homo sapien
aactgagcttctaatatccccatttccccagtc

SEQ ID NO: 699173 - DNA, 33 bp, Homo sapien
tgatagaatccttaagaaactgttaactggttg

SEQ ID NO: 699174 - DNA, 33 bp, Homo sapien
tgatagaatccttaaggaactgttaactggttg

SEQ ID NO: 699175 - DNA, 33 bp, Homo sapien
gtcactcagctactaaatggtagagatgggatg

SEQ ID NO: 699176 - DNA, 33 bp, Homo sapien
gtcactcagctactaagtggtagagatgggatg

SEQ ID NO: 699177 - DNA, 33 bp, Homo sapien
gttccatctggaaaagcaagtttaatattagag

SEQ ID NO: 699178 - DNA, 33 bp, Homo sapien
gttccatctggaaaagtaagtttaatattagag

SEQ ID NO: 699179 - DNA, 33 bp, Homo sapien
cagtggattttgtaaacgtcacaggcaggactt

SEQ ID NO: 699180 - DNA, 33 bp, Homo sapien
cagtggattttgtaaatgtcacaggcaggactt

SEQ ID NO: 699181 - DNA, 33 bp, Homo sapien
ttgttgtcaatagtcacgtgaatgaattctgtg

SEQ ID NO: 699182 - DNA, 33 bp, Homo sapien
ttgttgtcaatagtcatgtgaatgaattctgtg

SEQ ID NO: 699183 - DNA, 33 bp, Homo sapien
gttaataacgtttacacacagcggtccccagtt

SEQ ID NO: 699184 - DNA, 33 bp, Homo sapien
gttaataacgtttacatacagcggtccccagtt

SEQ ID NO: 699185 - DNA, 33 bp, Homo sapien
gtcagcacgactgtcaccttttcttctcgttaa

SEQ ID NO: 699186 - DNA, 33 bp, Homo sapien
gtcagcacgactgtcatcttttcttctcgttaa

SEQ ID NO: 699187 - DNA, 33 bp, Homo sapien
agacaccatgactcttgaagagaaatagcttga

SEQ ID NO: 699188 - DNA, 33 bp, Homo sapien
agacaccatgactctttaagagaaatagcttga

SEQ ID NO: 699189 - DNA, 33 bp, Homo sapien
taaatgcagaggagaccgatattaaattcatct

SEQ ID NO: 699190 - DNA, 33 bp, Homo sapien
taaatgcagaggagactgatattaaattcatct

SEQ ID NO: 699191 - DNA, 33 bp, Homo sapien
ctcaaatcttaattacggacctcaaactcctct

SEQ ID NO: 699192 - DNA, 33 bp, Homo sapien
ctcaaatcttaattactgacctcaaactcctct

SEQ ID NO: 699193 - DNA, 33 bp, Homo sapien
catgtgcaggaaaataccaggcttgagctccac

SEQ ID NO: 699194 - DNA, 33 bp, Homo sapien
catgtgcaggaaaatatcaggcttgagctccac

SEQ ID NO: 699195 - DNA, 33 bp, Homo sapien
gaggtcatattggtcacgcgctaaccaaatagg

SEQ ID NO: 699196 - DNA, 33 bp, Homo sapien
gaggtcatattggtcatgcgctaaccaaatagg

SEQ ID NO: 699197 - DNA, 33 bp, Homo sapien
ttaacaacatctccaactgatccatgtgcacct

SEQ ID NO: 699198 - DNA, 33 bp, Homo sapien
ttaacaacatctccaattgatccatgtgcacct

SEQ ID NO: 699199 - DNA, 33 bp, Homo sapien
aaaatctctcccctggccacccagaaggcataa

SEQ ID NO: 699200 - DNA, 33 bp, Homo sapien
aaaatctctcccctggtcacccagaaggcataa

SEQ ID NO: 699201 - DNA, 33 bp, Homo sapien
tattcatggcaaacttcaacactgttatcctcc

SEQ ID NO: 699202 - DNA, 33 bp, Homo sapien
tattcatggcaaacttgaacactgttatcctcc

SEQ ID NO: 699203 - DNA, 33 bp, Homo sapien
ccagttgtttgaaagcacagccgtgacctggcc

SEQ ID NO: 699204 - DNA, 33 bp, Homo sapien
ccagttgtttgaaagcgcagccgtgacctggcc

SEQ ID NO: 699205 - DNA, 33 bp, Homo sapien
accaggaaaatgaacacgaatatttgtaaataa

SEQ ID NO: 699206 - DNA, 33 bp, Homo sapien
accaggaaaatgaacaggaatatttgtaaataa

SEQ ID NO: 699207 - DNA, 33 bp, Homo sapien
tactgggataagatcacgtttctttactgtgag

SEQ ID NO: 699208 - DNA, 33 bp, Homo sapien
tactgggataagatcatgtttctttactgtgag

SEQ ID NO: 699209 - DNA, 33 bp, Homo sapien
gtgtgatctgtgaggcaattttaaaatgcagtc

SEQ ID NO: 699210 - DNA, 33 bp, Homo sapien
gtgtgatctgtgaggcgattttaaaatgcagtc

SEQ ID NO: 699211 - DNA, 33 bp, Homo sapien
tgttctcagttgcatgaaaacaaccaaagttga

SEQ ID NO: 699212 - DNA, 33 bp, Homo sapien
tgttctcagttgcatggaaacaaccaaagttga

SEQ ID NO: 699213 - DNA, 33 bp, Homo sapien
atagggataagttaaacgatccttacagtagga

SEQ ID NO: 699214 - DNA, 33 bp, Homo sapien
atagggataagttaaatgatccttacagtagga

SEQ ID NO: 699215 - DNA, 33 bp, Homo sapien
cattcattgagtcaacacttactgggtaatttt

SEQ ID NO: 699216 - DNA, 33 bp, Homo sapien
cattcattgagtcaacgcttactgggtaatttt

SEQ ID NO: 699217 - DNA, 33 bp, Homo sapien
agaacagtattgactaagtgccaggtaccatat

SEQ ID NO: 699218 - DNA, 33 bp, Homo sapien
agaacagtattgactatgtgccaggtaccatat

SEQ ID NO: 699219 - DNA, 33 bp, Homo sapien
attcatgtttggaaagaaagtggtttgctctag

SEQ ID NO: 699220 - DNA, 33 bp, Homo sapien
attcatgtttggaaaggaagtggtttgctctag

SEQ ID NO: 699221 - DNA, 33 bp, Homo sapien
gacagtttgctttgtagagtttaaaggcttgtt

SEQ ID NO: 699222 - DNA, 33 bp, Homo sapien
gacagtttgctttgtatagtttaaaggcttgtt

SEQ ID NO: 699223 - DNA, 33 bp, Homo sapien
aaaaatatccttttcccgcgtacgtttccagag

SEQ ID NO: 699224 - DNA, 33 bp, Homo sapien
aaaaatatccttttcctgcgtacgtttccagag

SEQ ID NO: 699225 - DNA, 33 bp, Homo sapien
atcccctatcctcaccaaactgccttggttcta

SEQ ID NO: 699226 - DNA, 33 bp, Homo sapien
atcccctatcctcacctaactgccttggttcta

SEQ ID NO: 699227 - DNA, 33 bp, Homo sapien
ggcaagaacccttgatgaatagtcccaccaaga

SEQ ID NO: 699228 - DNA, 33 bp, Homo sapien
ggcaagaacccttgattaatagtcccaccaaga

SEQ ID NO: 699229 - DNA, 33 bp, Homo sapien
acaaagacagacacaacatttgtagtgaagagc

SEQ ID NO: 699230 - DNA, 33 bp, Homo sapien
acaaagacagacacaagatttgtagtgaagagc

SEQ ID NO: 699231 - DNA, 33 bp, Homo sapien
tgtagagtgaaggctcaataaataggtcttctt

SEQ ID NO: 699232 - DNA, 33 bp, Homo sapien
tgtagagtgaaggctcgataaataggtcttctt

SEQ ID NO: 699233 - DNA, 33 bp, Homo sapien
tgtgcgtggcttaaccagatcttctgcttaggg

SEQ ID NO: 699234 - DNA, 33 bp, Homo sapien
tgtgcgtggcttaaccggatcttctgcttaggg

SEQ ID NO: 699235 - DNA, 33 bp, Homo sapien
accagtaggtagcccacagaaacaacaggaggc

SEQ ID NO: 699236 - DNA, 33 bp, Homo sapien
accagtaggtagcccatagaaacaacaggaggc

SEQ ID NO: 699237 - DNA, 33 bp, Homo sapien
tttctaatttcctttaactcagccctgccaaaa

SEQ ID NO: 699238 - DNA, 33 bp, Homo sapien
tttctaatttcctttagctcagccctgccaaaa

SEQ ID NO: 699239 - DNA, 33 bp, Homo sapien
aaggtattatacgggtaaacttgagtaggtagc

SEQ ID NO: 699240 - DNA, 33 bp, Homo sapien
aaggtattatacgggtgaacttgagtaggtagc

SEQ ID NO: 699241 - DNA, 33 bp, Homo sapien
atctggggggaacatcaaggaacagtttaaatt

SEQ ID NO: 699242 - DNA, 33 bp, Homo sapien
atctggggggaacatcgaggaacagtttaaatt

SEQ ID NO: 699243 - DNA, 33 bp, Homo sapien
accttaaacagaattaagttatgcaagtatgta

SEQ ID NO: 699244 - DNA, 33 bp, Homo sapien
accttaaacagaattacgttatgcaagtatgta

SEQ ID NO: 699245 - DNA, 33 bp, Homo sapien
atagtagttaatataacggtttgatgcatttat

SEQ ID NO: 699246 - DNA, 33 bp, Homo sapien
atagtagttaatataatggtttgatgcatttat

SEQ ID NO: 699247 - DNA, 33 bp, Homo sapien
cagaaagagtttggagcattatctatgctgttc

SEQ ID NO: 699248 - DNA, 33 bp, Homo sapien
cagaaagagtttggagtattatctatgctgttc

SEQ ID NO: 699249 - DNA, 33 bp, Homo sapien
tataaatgatggttgactattgacaagatgaag

SEQ ID NO: 699250 - DNA, 33 bp, Homo sapien
tataaatgatggttgattattgacaagatgaag

SEQ ID NO: 699251 - DNA, 33 bp, Homo sapien
tctactatatgacagacgtggtgaataataggc

SEQ ID NO: 699252 - DNA, 33 bp, Homo sapien
tctactatatgacagatgtggtgaataataggc

SEQ ID NO: 699253 - DNA, 33 bp, Homo sapien
tgaactaaaaatccaaaactgaacaagtaacta

SEQ ID NO: 699254 - DNA, 33 bp, Homo sapien
tgaactaaaaatccaagactgaacaagtaacta

SEQ ID NO: 699255 - DNA, 33 bp, Homo sapien
ggatcaagtgactccactccttcagaaaactta

SEQ ID NO: 699256 - DNA, 33 bp, Homo sapien
ggatcaagtgactccagtccttcagaaaactta

SEQ ID NO: 699257 - DNA, 33 bp, Homo sapien
gaaactagaggctttaacaatttcagacaatct

SEQ ID NO: 699258 - DNA, 33 bp, Homo sapien
gaaactagaggctttagcaatttcagacaatct

SEQ ID NO: 699259 - DNA, 33 bp, Homo sapien
gcctctttctctactacaaagttgtcaattaca

SEQ ID NO: 699260 - DNA, 33 bp, Homo sapien
gcctctttctctactataaagttgtcaattaca

SEQ ID NO: 699261 - DNA, 33 bp, Homo sapien
ctgttagactcgtgtacgtagcttcactagcag

SEQ ID NO: 699262 - DNA, 33 bp, Homo sapien
ctgttagactcgtgtatgtagcttcactagcag

SEQ ID NO: 699263 - DNA, 33 bp, Homo sapien
aagaatatgagtaaaaactgtgtatgagattag

SEQ ID NO: 699264 - DNA, 33 bp, Homo sapien
aagaatatgagtaaaagctgtgtatgagattag

SEQ ID NO: 699265 - DNA, 33 bp, Homo sapien
tttccctagtctcttacaattatccagccttta

SEQ ID NO: 699266 - DNA, 33 bp, Homo sapien
tttccctagtctcttagaattatccagccttta

SEQ ID NO: 699267 - DNA, 33 bp, Homo sapien
actaggggtcctcaagaatataaggagtgcaca

SEQ ID NO: 699268 - DNA, 33 bp, Homo sapien
actaggggtcctcaaggatataaggagtgcaca

SEQ ID NO: 699269 - DNA, 33 bp, Homo sapien
ggatcattgtgggtacagcttatgcaagacaaa

SEQ ID NO: 699270 - DNA, 33 bp, Homo sapien
ggatcattgtgggtactgcttatgcaagacaaa

SEQ ID NO: 699271 - DNA, 33 bp, Homo sapien
aatgtgcatctctttgcaaaacctttccttttc

SEQ ID NO: 699272 - DNA, 33 bp, Homo sapien
aatgtgcatctctttgtaaaacctttccttttc

SEQ ID NO: 699273 - DNA, 33 bp, Homo sapien
gacattaacagtgacacgctttgatttgtttac

SEQ ID NO: 699274 - DNA, 33 bp, Homo sapien
gacattaacagtgacaggctttgatttgtttac

SEQ ID NO: 699275 - DNA, 33 bp, Homo sapien
tatgtgaacaatcctgaaattcatccatgtgca

SEQ ID NO: 699276 - DNA, 33 bp, Homo sapien
tatgtgaacaatcctggaattcatccatgtgca

SEQ ID NO: 699277 - DNA, 33 bp, Homo sapien
gcatattggtagaggacaaatgggaggcttttt

SEQ ID NO: 699278 - DNA, 33 bp, Homo sapien
gcatattggtagaggagaaatgggaggcttttt

SEQ ID NO: 699279 - DNA, 33 bp, Homo sapien
cgttccactgagttggaatatgaagagattgag

SEQ ID NO: 699280 - DNA, 33 bp, Homo sapien
cgttccactgagttgggatatgaagagattgag

SEQ ID NO: 699281 - DNA, 33 bp, Homo sapien
aggctaactggaattaaaaggatggcagcagaa

SEQ ID NO: 699282 - DNA, 33 bp, Homo sapien
aggctaactggaattagaaggatggcagcagaa

SEQ ID NO: 699283 - DNA, 33 bp, Homo sapien
actcaatagaatataacgggtaagggctgtgcc

SEQ ID NO: 699284 - DNA, 33 bp, Homo sapien
actcaatagaatataatgggtaagggctgtgcc

SEQ ID NO: 699285 - DNA, 33 bp, Homo sapien
agatgactgatactgcccctaaaatctgttgta

SEQ ID NO: 699286 - DNA, 33 bp, Homo sapien
agatgactgatactgctcctaaaatctgttgta

SEQ ID NO: 699287 - DNA, 33 bp, Homo sapien
ttgatccaattcaaaaagattggaaagaagaaa

SEQ ID NO: 699288 - DNA, 33 bp, Homo sapien
ttgatccaattcaaaatgattggaaagaagaaa

SEQ ID NO: 699289 - DNA, 33 bp, Homo sapien
agtttttaaatgatgacgatagaaagttagtat

SEQ ID NO: 699290 - DNA, 33 bp, Homo sapien
agtttttaaatgatgatgatagaaagttagtat

SEQ ID NO: 699291 - DNA, 33 bp, Homo sapien
tagtgggaagctgatactaggtaatcatctaat

SEQ ID NO: 699292 - DNA, 33 bp, Homo sapien
tagtgggaagctgatattaggtaatcatctaat

SEQ ID NO: 699293 - DNA, 33 bp, Homo sapien
ttgttcccaacaactcaaagaattttaaaatac

SEQ ID NO: 699294 - DNA, 33 bp, Homo sapien
ttgttcccaacaactcgaagaattttaaaatac

SEQ ID NO: 699295 - DNA, 33 bp, Homo sapien
tagaatatgaggcctccgagaggatgagaatga

SEQ ID NO: 699296 - DNA, 33 bp, Homo sapien
tagaatatgaggcctctgagaggatgagaatga

SEQ ID NO: 699297 - DNA, 33 bp, Homo sapien
caagtcacagcttctacctaaggctggttatga

SEQ ID NO: 699298 - DNA, 33 bp, Homo sapien
caagtcacagcttctatctaaggctggttatga

SEQ ID NO: 699299 - DNA, 33 bp, Homo sapien
tcctttctagttctgacatatgagcttaaatat

SEQ ID NO: 699300 - DNA, 33 bp, Homo sapien
tcctttctagttctgatatatgagcttaaatat

SEQ ID NO: 699301 - DNA, 33 bp, Homo sapien
attacaagcagcctacacgaattctaactgata

SEQ ID NO: 699302 - DNA, 33 bp, Homo sapien
attacaagcagcctacccgaattctaactgata

SEQ ID NO: 699303 - DNA, 33 bp, Homo sapien
caaaataattagccagacattgtgttgtgcgcc

SEQ ID NO: 699304 - DNA, 33 bp, Homo sapien
caaaataattagccaggcattgtgttgtgcgcc

SEQ ID NO: 699305 - DNA, 33 bp, Homo sapien
ctgtaaaactatcaacacaatcaaggtaataga

SEQ ID NO: 699306 - DNA, 33 bp, Homo sapien
ctgtaaaactatcaacgcaatcaaggtaataga

SEQ ID NO: 699307 - DNA, 33 bp, Homo sapien
tttgtggcactgttgaacaaatggtaatgtata

SEQ ID NO: 699308 - DNA, 33 bp, Homo sapien
tttgtggcactgttgagcaaatggtaatgtata

SEQ ID NO: 699309 - DNA, 33 bp, Homo sapien
acaagccttccatcaaacatttaagaagaggaa

SEQ ID NO: 699310 - DNA, 33 bp, Homo sapien
acaagccttccatcaagcatttaagaagaggaa

SEQ ID NO: 699311 - DNA, 33 bp, Homo sapien
aattcaatgggtgaaacaatagattttttcaac

SEQ ID NO: 699312 - DNA, 33 bp, Homo sapien
aattcaatgggtgaaagaatagattttttcaac

SEQ ID NO: 699313 - DNA, 33 bp, Homo sapien
tgtaaattaaaacaacgactattacacacccat

SEQ ID NO: 699314 - DNA, 33 bp, Homo sapien
tgtaaattaaaacaactactattacacacccat

SEQ ID NO: 699315 - DNA, 33 bp, Homo sapien
tttgtctcatctctgcacttcttagtctgttcc

SEQ ID NO: 699316 - DNA, 33 bp, Homo sapien
tttgtctcatctctgcgcttcttagtctgttcc

SEQ ID NO: 699317 - DNA, 33 bp, Homo sapien
tggagatgctacagaacgatcttagggtcagtt

SEQ ID NO: 699318 - DNA, 33 bp, Homo sapien
tggagatgctacagaatgatcttagggtcagtt

SEQ ID NO: 699319 - DNA, 33 bp, Homo sapien
tacttttcttggatgactaaaatagtgataaat

SEQ ID NO: 699320 - DNA, 33 bp, Homo sapien
tacttttcttggatgagtaaaatagtgataaat

SEQ ID NO: 699321 - DNA, 33 bp, Homo sapien
gatgtatattatctcaaagacttactagtttag

SEQ ID NO: 699322 - DNA, 33 bp, Homo sapien
gatgtatattatctcagagacttactagtttag

SEQ ID NO: 699323 - DNA, 33 bp, Homo sapien
aaagggtagaagtggaagaatacattggtgatt

SEQ ID NO: 699324 - DNA, 33 bp, Homo sapien
aaagggtagaagtggaggaatacattggtgatt

SEQ ID NO: 699325 - DNA, 33 bp, Homo sapien
ctctcatttatgtaccaacgtccctgctttacc

SEQ ID NO: 699326 - DNA, 33 bp, Homo sapien
ctctcatttatgtacctacgtccctgctttacc

SEQ ID NO: 699327 - DNA, 33 bp, Homo sapien
gcactattgttatcccaatttcacagataagaa

SEQ ID NO: 699328 - DNA, 33 bp, Homo sapien
gcactattgttatcccgatttcacagataagaa

SEQ ID NO: 699329 - DNA, 33 bp, Homo sapien
agatgggggtccatagaatgtcctcagatgtca

SEQ ID NO: 699330 - DNA, 33 bp, Homo sapien
agatgggggtccataggatgtcctcagatgtca

SEQ ID NO: 699331 - DNA, 33 bp, Homo sapien
tttgcccaagatcacactgtcagctaataatag

SEQ ID NO: 699332 - DNA, 33 bp, Homo sapien
tttgcccaagatcacattgtcagctaataatag

SEQ ID NO: 699333 - DNA, 33 bp, Homo sapien
aacacaaatagaagaacgcttcggaagaaaaga

SEQ ID NO: 699334 - DNA, 33 bp, Homo sapien
aacacaaatagaagaatgcttcggaagaaaaga

SEQ ID NO: 699335 - DNA, 33 bp, Homo sapien
gttatatttgtctaaaagccagtgaacaacagc

SEQ ID NO: 699336 - DNA, 33 bp, Homo sapien
gttatatttgtctaaacgccagtgaacaacagc

SEQ ID NO: 699337 - DNA, 33 bp, Homo sapien
ctctagactgtaatccacatcaagtttcagtat

SEQ ID NO: 699338 - DNA, 33 bp, Homo sapien
ctctagactgtaatccgcatcaagtttcagtat

SEQ ID NO: 699339 - DNA, 33 bp, Homo sapien
ccaaatacaccaaatcaataaaatacccgaaac

SEQ ID NO: 699340 - DNA, 33 bp, Homo sapien
ccaaatacaccaaatcgataaaatacccgaaac

SEQ ID NO: 699341 - DNA, 33 bp, Homo sapien
ggctcttgtggcaaaaatatagtctgttacaga

SEQ ID NO: 699342 - DNA, 33 bp, Homo sapien
ggctcttgtggcaaaagtatagtctgttacaga

SEQ ID NO: 699343 - DNA, 33 bp, Homo sapien
aaataaaataagtacaacagctaaaagctattt

SEQ ID NO: 699344 - DNA, 33 bp, Homo sapien
aaataaaataagtacagcagctaaaagctattt

SEQ ID NO: 699345 - DNA, 33 bp, Homo sapien
ccattccgtcctcacaacatccttagcagcaac

SEQ ID NO: 699346 - DNA, 33 bp, Homo sapien
ccattccgtcctcacatcatccttagcagcaac

SEQ ID NO: 699347 - DNA, 33 bp, Homo sapien
cagaaaaaatctgagaccaaaaagttaattgct

SEQ ID NO: 699348 - DNA, 33 bp, Homo sapien
cagaaaaaatctgagatcaaaaagttaattgct

SEQ ID NO: 699349 - DNA, 33 bp, Homo sapien
ttttctgaagctataagaagaagctagctgtac

SEQ ID NO: 699350 - DNA, 33 bp, Homo sapien
ttttctgaagctataataagaagctagctgtac

SEQ ID NO: 699351 - DNA, 33 bp, Homo sapien
ttaatttgatattttacgttgcaatgaagtatt

SEQ ID NO: 699352 - DNA, 33 bp, Homo sapien
ttaatttgatattttatgttgcaatgaagtatt

SEQ ID NO: 699353 - DNA, 33 bp, Homo sapien
ttgtctcatgagcaaactcaccttcccaaacct

SEQ ID NO: 699354 - DNA, 33 bp, Homo sapien
ttgtctcatgagcaaattcaccttcccaaacct

SEQ ID NO: 699355 - DNA, 33 bp, Homo sapien
tgaacgtcaaatgaggcaataatatctgtgaag

SEQ ID NO: 699356 - DNA, 33 bp, Homo sapien
tgaacgtcaaatgaggtaataatatctgtgaag

SEQ ID NO: 699357 - DNA, 33 bp, Homo sapien
cctctggctcctaatcccttcttcatctatttc

SEQ ID NO: 699358 - DNA, 33 bp, Homo sapien
cctctggctcctaatctcttcttcatctatttc

SEQ ID NO: 699359 - DNA, 33 bp, Homo sapien
agtaacaaggtaaaaaattttgctccaagatcg

SEQ ID NO: 699360 - DNA, 33 bp, Homo sapien
agtaacaaggtaaaaagttttgctccaagatcg

SEQ ID NO: 699361 - DNA, 33 bp, Homo sapien
tgttttgaaaactcagaacatcatggtattgaa

SEQ ID NO: 699362 - DNA, 33 bp, Homo sapien
tgttttgaaaactcagtacatcatggtattgaa

SEQ ID NO: 699363 - DNA, 33 bp, Homo sapien
gactcagtgactctggaaaggtgctctgggaac

SEQ ID NO: 699364 - DNA, 33 bp, Homo sapien
gactcagtgactctgggaaggtgctctgggaac

SEQ ID NO: 699365 - DNA, 33 bp, Homo sapien
ttgaaaggagcaaacacgtaagatctttggagt

SEQ ID NO: 699366 - DNA, 33 bp, Homo sapien
ttgaaaggagcaaacaggtaagatctttggagt

SEQ ID NO: 699367 - DNA, 33 bp, Homo sapien
aattaagttttccctgaagaactaggctcattt

SEQ ID NO: 699368 - DNA, 33 bp, Homo sapien
aattaagttttccctggagaactaggctcattt

SEQ ID NO: 699369 - DNA, 33 bp, Homo sapien
tcactgtttagctacactctcttaagttacctt

SEQ ID NO: 699370 - DNA, 33 bp, Homo sapien
tcactgtttagctacagtctcttaagttacctt

SEQ ID NO: 699371 - DNA, 33 bp, Homo sapien
caggatttcaaaacagcatgaggcttgtgggag

SEQ ID NO: 699372 - DNA, 33 bp, Homo sapien
caggatttcaaaacagtatgaggcttgtgggag

SEQ ID NO: 699373 - DNA, 33 bp, Homo sapien
gtgctgtaggaagaaaagcacaaattacattag

SEQ ID NO: 699374 - DNA, 33 bp, Homo sapien
gtgctgtaggaagaaatgcacaaattacattag

SEQ ID NO: 699375 - DNA, 33 bp, Homo sapien
gatgtttaatgcaaaccgtacattctcagcaga

SEQ ID NO: 699376 - DNA, 33 bp, Homo sapien
gatgtttaatgcaaactgtacattctcagcaga

SEQ ID NO: 699377 - DNA, 33 bp, Homo sapien
agtcatgttcagagtcaaaaaatttgaaagaat

SEQ ID NO: 699378 - DNA, 33 bp, Homo sapien
agtcatgttcagagtctaaaaatttgaaagaat

SEQ ID NO: 699379 - DNA, 33 bp, Homo sapien
ggcactgaccttatatcagctgtcagcagactc

SEQ ID NO: 699380 - DNA, 33 bp, Homo sapien
ggcactgaccttatattagctgtcagcagactc

SEQ ID NO: 699381 - DNA, 33 bp, Homo sapien
gtggtacagaaatggaaaatgggtttgagagaa

SEQ ID NO: 699382 - DNA, 33 bp, Homo sapien
gtggtacagaaatggagaatgggtttgagagaa

SEQ ID NO: 699383 - DNA, 33 bp, Homo sapien
tacccacaggaatgacaatatttggttataggc

SEQ ID NO: 699384 - DNA, 33 bp, Homo sapien
tacccacaggaatgactatatttggttataggc

SEQ ID NO: 699385 - DNA, 33 bp, Homo sapien
tgaagaaattaactagaagttgagagtgaagga

SEQ ID NO: 699386 - DNA, 33 bp, Homo sapien
tgaagaaattaactaggagttgagagtgaagga

SEQ ID NO: 699387 - DNA, 33 bp, Homo sapien
gttattactgccaatccctaccaggaaaggttg

SEQ ID NO: 699388 - DNA, 33 bp, Homo sapien
gttattactgccaatctctaccaggaaaggttg

SEQ ID NO: 699389 - DNA, 33 bp, Homo sapien
acatagggcaatgacagggaaaacagttcccat

SEQ ID NO: 699390 - DNA, 33 bp, Homo sapien
acatagggcaatgacatggaaaacagttcccat

SEQ ID NO: 699391 - DNA, 33 bp, Homo sapien
tcaggctatgacaccactacttgatgctgtagg

SEQ ID NO: 699392 - DNA, 33 bp, Homo sapien
tcaggctatgacaccattacttgatgctgtagg

SEQ ID NO: 699393 - DNA, 33 bp, Homo sapien
gataaattcacgaagacgaggaaacaccagtgc

SEQ ID NO: 699394 - DNA, 33 bp, Homo sapien
gataaattcacgaagatgaggaaacaccagtgc

SEQ ID NO: 699395 - DNA, 33 bp, Homo sapien
ttctttcaagatccaaattagtcatctgtagcc

SEQ ID NO: 699396 - DNA, 33 bp, Homo sapien
ttctttcaagatccaagttagtcatctgtagcc

SEQ ID NO: 699397 - DNA, 33 bp, Homo sapien
ggttgcacagctcttacatactcaaacatagtt

SEQ ID NO: 699398 - DNA, 33 bp, Homo sapien
ggttgcacagctcttatatactcaaacatagtt

SEQ ID NO: 699399 - DNA, 33 bp, Homo sapien
aaaaagaactagccaccaggcataacggctcat

SEQ ID NO: 699400 - DNA, 33 bp, Homo sapien
aaaaagaactagccacgaggcataacggctcat

SEQ ID NO: 699401 - DNA, 33 bp, Homo sapien
gaaagatacatatccaaaataatacatgagttg

SEQ ID NO: 699402 - DNA, 33 bp, Homo sapien
gaaagatacatatccagaataatacatgagttg

SEQ ID NO: 699403 - DNA, 33 bp, Homo sapien
actgctttctgtcccccattcagtgcagtaaaa

SEQ ID NO: 699404 - DNA, 33 bp, Homo sapien
actgctttctgtcccctattcagtgcagtaaaa

SEQ ID NO: 699405 - DNA, 33 bp, Homo sapien
ccctgcctggttgctgacacttgactgacaccg

SEQ ID NO: 699406 - DNA, 33 bp, Homo sapien
ccctgcctggttgctgccacttgactgacaccg

SEQ ID NO: 699407 - DNA, 33 bp, Homo sapien
gggcctcaaatacctaacaaatagcctcttctg

SEQ ID NO: 699408 - DNA, 33 bp, Homo sapien
gggcctcaaatacctaccaaatagcctcttctg

SEQ ID NO: 699409 - DNA, 33 bp, Homo sapien
gttgaacagattgcccagaaaattggcaggact

SEQ ID NO: 699410 - DNA, 33 bp, Homo sapien
gttgaacagattgcccggaaaattggcaggact

SEQ ID NO: 699411 - DNA, 33 bp, Homo sapien
ggacagtcatctaaacagcagaagaaataattt

SEQ ID NO: 699412 - DNA, 33 bp, Homo sapien
ggacagtcatctaaacggcagaagaaataattt

SEQ ID NO: 699413 - DNA, 33 bp, Homo sapien
gttaaccaatgtaaaccgacaactacacccacg

SEQ ID NO: 699414 - DNA, 33 bp, Homo sapien
gttaaccaatgtaaactgacaactacacccacg

SEQ ID NO: 699415 - DNA, 33 bp, Homo sapien
ttgtgggccagctatacgaagtgttctcggagt

SEQ ID NO: 699416 - DNA, 33 bp, Homo sapien
ttgtgggccagctatatgaagtgttctcggagt

SEQ ID NO: 699417 - DNA, 33 bp, Homo sapien
gtgacataaagttcaaaagcaaggttcaggata

SEQ ID NO: 699418 - DNA, 33 bp, Homo sapien
gtgacataaagttcaacagcaaggttcaggata

SEQ ID NO: 699419 - DNA, 33 bp, Homo sapien
gacttcacatatgctaactatgctaaagaatga

SEQ ID NO: 699420 - DNA, 33 bp, Homo sapien
gacttcacatatgctagctatgctaaagaatga

SEQ ID NO: 699421 - DNA, 33 bp, Homo sapien
gtttgtggtgcaacagcagtcctatgaaaccaa

SEQ ID NO: 699422 - DNA, 33 bp, Homo sapien
gtttgtggtgcaacagtagtcctatgaaaccaa

SEQ ID NO: 699423 - DNA, 33 bp, Homo sapien
tagaggaactctttccaaactcttacttccttg

SEQ ID NO: 699424 - DNA, 33 bp, Homo sapien
tagaggaactctttccgaactcttacttccttg

SEQ ID NO: 699425 - DNA, 33 bp, Homo sapien
aacttggactgagtcacgctgtcagctttcttg

SEQ ID NO: 699426 - DNA, 33 bp, Homo sapien
aacttggactgagtcatgctgtcagctttcttg

SEQ ID NO: 699427 - DNA, 33 bp, Homo sapien
gagagaatgagtaacaagcctaaggccacatag

SEQ ID NO: 699428 - DNA, 33 bp, Homo sapien
gagagaatgagtaacatgcctaaggccacatag

SEQ ID NO: 699429 - DNA, 33 bp, Homo sapien
aatgggaatataatcccagttgttgaggcagag

SEQ ID NO: 699430 - DNA, 33 bp, Homo sapien
aatgggaatataatcctagttgttgaggcagag

SEQ ID NO: 699431 - DNA, 33 bp, Homo sapien
caaatacctaagtaaacgctcgatatgtgtcag

SEQ ID NO: 699432 - DNA, 33 bp, Homo sapien
caaatacctaagtaaatgctcgatatgtgtcag

SEQ ID NO: 699433 - DNA, 33 bp, Homo sapien
atgtaagatttctttaccacactcaacccaggg

SEQ ID NO: 699434 - DNA, 33 bp, Homo sapien
atgtaagatttctttagcacactcaacccaggg

SEQ ID NO: 699435 - DNA, 33 bp, Homo sapien
tccagccttggcgatacggccagaccttgtctc

SEQ ID NO: 699436 - DNA, 33 bp, Homo sapien
tccagccttggcgatatggccagaccttgtctc

SEQ ID NO: 699437 - DNA, 33 bp, Homo sapien
aaaagagcaaatatcaatctaaatctttaaatg

SEQ ID NO: 699438 - DNA, 33 bp, Homo sapien
aaaagagcaaatatcagtctaaatctttaaatg

SEQ ID NO: 699439 - DNA, 33 bp, Homo sapien
tgggtttctaatctaccgagttgtgctgtagtt

SEQ ID NO: 699440 - DNA, 33 bp, Homo sapien
tgggtttctaatctactgagttgtgctgtagtt

SEQ ID NO: 699441 - DNA, 33 bp, Homo sapien
gaatcatcttcacaaagtttcgttgcttctgag

SEQ ID NO: 699442 - DNA, 33 bp, Homo sapien
gaatcatcttcacaaattttcgttgcttctgag

SEQ ID NO: 699443 - DNA, 33 bp, Homo sapien
agtcatggccttctgacaatttgcaatccaagg

SEQ ID NO: 699444 - DNA, 33 bp, Homo sapien
agtcatggccttctgataatttgcaatccaagg

SEQ ID NO: 699445 - DNA, 33 bp, Homo sapien
taggaaggcatcctgcaagagttgggacttcga

SEQ ID NO: 699446 - DNA, 33 bp, Homo sapien
taggaaggcatcctgcgagagttgggacttcga

SEQ ID NO: 699447 - DNA, 33 bp, Homo sapien
ttacagcccaagagacaatgaagatattatctc

SEQ ID NO: 699448 - DNA, 33 bp, Homo sapien
ttacagcccaagagacgatgaagatattatctc

SEQ ID NO: 699449 - DNA, 33 bp, Homo sapien
gatgtcagtattgttaaaccacaaaacccagcc

SEQ ID NO: 699450 - DNA, 33 bp, Homo sapien
gatgtcagtattgttagaccacaaaacccagcc

SEQ ID NO: 699451 - DNA, 33 bp, Homo sapien
cacttccagctggctacaacttcctctatttac

SEQ ID NO: 699452 - DNA, 33 bp, Homo sapien
cacttccagctggctataacttcctctatttac

SEQ ID NO: 699453 - DNA, 33 bp, Homo sapien
ctcatttgttcacctactacatcaagatattaa

SEQ ID NO: 699454 - DNA, 33 bp, Homo sapien
ctcatttgttcacctattacatcaagatattaa

SEQ ID NO: 699455 - DNA, 33 bp, Homo sapien
gaattgaccatagttacaaggatttattgctgg

SEQ ID NO: 699456 - DNA, 33 bp, Homo sapien
gaattgaccatagttataaggatttattgctgg

SEQ ID NO: 699457 - DNA, 33 bp, Homo sapien
gacagtaactacagaccaccacaggtggcagca

SEQ ID NO: 699458 - DNA, 33 bp, Homo sapien
gacagtaactacagactaccacaggtggcagca

SEQ ID NO: 699459 - DNA, 33 bp, Homo sapien
aggttagcgatactcaacaagtaaatataatgc

SEQ ID NO: 699460 - DNA, 33 bp, Homo sapien
aggttagcgatactcagcaagtaaatataatgc

SEQ ID NO: 699461 - DNA, 33 bp, Homo sapien
ctgtaaccccagtaacaagtgctctaaatattt

SEQ ID NO: 699462 - DNA, 33 bp, Homo sapien
ctgtaaccccagtaacgagtgctctaaatattt

SEQ ID NO: 699463 - DNA, 33 bp, Homo sapien
ggccctcacagaataacagcccgaagtcataac

SEQ ID NO: 699464 - DNA, 33 bp, Homo sapien
ggccctcacagaataagagcccgaagtcataac

SEQ ID NO: 699465 - DNA, 33 bp, Homo sapien
ccttctgtctgtagtcaaagttccaagagtccc

SEQ ID NO: 699466 - DNA, 33 bp, Homo sapien
ccttctgtctgtagtcgaagttccaagagtccc

SEQ ID NO: 699467 - DNA, 33 bp, Homo sapien
tccagatgagacttgacaccagttggcatgact

SEQ ID NO: 699468 - DNA, 33 bp, Homo sapien
tccagatgagacttgataccagttggcatgact

SEQ ID NO: 699469 - DNA, 33 bp, Homo sapien
taatttcttgtcttggaagtattccctgcttaa

SEQ ID NO: 699470 - DNA, 33 bp, Homo sapien
taatttcttgtcttggtagtattccctgcttaa

SEQ ID NO: 699471 - DNA, 33 bp, Homo sapien
gtgtgattgtcttctgaaagtcactcaaaacta

SEQ ID NO: 699472 - DNA, 33 bp, Homo sapien
gtgtgattgtcttctggaagtcactcaaaacta

SEQ ID NO: 699473 - DNA, 33 bp, Homo sapien
catttagtaaagcaccgaaaaccggtgatttcc

SEQ ID NO: 699474 - DNA, 33 bp, Homo sapien
catttagtaaagcacctaaaaccggtgatttcc

SEQ ID NO: 699475 - DNA, 33 bp, Homo sapien
ggctttggaagaatgcaaagtgtcggtagaagg

SEQ ID NO: 699476 - DNA, 33 bp, Homo sapien
ggctttggaagaatgcgaagtgtcggtagaagg

SEQ ID NO: 699477 - DNA, 33 bp, Homo sapien
ctgttgcaaaatatcaagggagatgtttacagt

SEQ ID NO: 699478 - DNA, 33 bp, Homo sapien
ctgttgcaaaatatcatgggagatgtttacagt

SEQ ID NO: 699479 - DNA, 33 bp, Homo sapien
cttccctatagggagacggcaaaggaagcagtt

SEQ ID NO: 699480 - DNA, 33 bp, Homo sapien
cttccctatagggagatggcaaaggaagcagtt

SEQ ID NO: 699481 - DNA, 33 bp, Homo sapien
gagctggtggtttctccaagcttccgagagctc

SEQ ID NO: 699482 - DNA, 33 bp, Homo sapien
gagctggtggtttctctaagcttccgagagctc

SEQ ID NO: 699483 - DNA, 33 bp, Homo sapien
gcccagtttagagtccactggtcattgtagaca

SEQ ID NO: 699484 - DNA, 33 bp, Homo sapien
gcccagtttagagtcccctggtcattgtagaca

SEQ ID NO: 699485 - DNA, 33 bp, Homo sapien
ttgctcagtttcatcaaggtttgaaggataggc

SEQ ID NO: 699486 - DNA, 33 bp, Homo sapien
ttgctcagtttcatcagggtttgaaggataggc

SEQ ID NO: 699487 - DNA, 33 bp, Homo sapien
aacagcgtctggcaaacgtgtttattgttatcc

SEQ ID NO: 699488 - DNA, 33 bp, Homo sapien
aacagcgtctggcaaatgtgtttattgttatcc

SEQ ID NO: 699489 - DNA, 33 bp, Homo sapien
atagtgtctacagcacagactctggaaccatac

SEQ ID NO: 699490 - DNA, 33 bp, Homo sapien
atagtgtctacagcacggactctggaaccatac

SEQ ID NO: 699491 - DNA, 33 bp, Homo sapien
aggcgggtgacttagacgtgagtacaagccacc

SEQ ID NO: 699492 - DNA, 33 bp, Homo sapien
aggcgggtgacttagaggtgagtacaagccacc

SEQ ID NO: 699493 - DNA, 33 bp, Homo sapien
aggtcggatgtggcaaagccattcagtcaagct

SEQ ID NO: 699494 - DNA, 33 bp, Homo sapien
aggtcggatgtggcaacgccattcagtcaagct

SEQ ID NO: 699495 - DNA, 33 bp, Homo sapien
accagagctaacccaaaggcagttgttgcatcg

SEQ ID NO: 699496 - DNA, 33 bp, Homo sapien
accagagctaacccaagggcagttgttgcatcg

SEQ ID NO: 699497 - DNA, 33 bp, Homo sapien
agagtccaaagctccaggttagaggctggaagt

SEQ ID NO: 699498 - DNA, 33 bp, Homo sapien
agagtccaaagctccatgttagaggctggaagt

SEQ ID NO: 699499 - DNA, 33 bp, Homo sapien
ttctttccaggattggaatgttccctataagcc

SEQ ID NO: 699500 - DNA, 33 bp, Homo sapien
ttctttccaggattgggatgttccctataagcc

SEQ ID NO: 699501 - DNA, 33 bp, Homo sapien
tctacttctcaacctcaaagataaggatgttgt

SEQ ID NO: 699502 - DNA, 33 bp, Homo sapien
tctacttctcaacctcgaagataaggatgttgt

SEQ ID NO: 699503 - DNA, 33 bp, Homo sapien
agttttgctgtccttacatctcctcaagtagag

SEQ ID NO: 699504 - DNA, 33 bp, Homo sapien
agttttgctgtccttatatctcctcaagtagag

SEQ ID NO: 699505 - DNA, 33 bp, Homo sapien
agtcaggctttctggaaatggactgtaccttta

SEQ ID NO: 699506 - DNA, 33 bp, Homo sapien
agtcaggctttctggagatggactgtaccttta

SEQ ID NO: 699507 - DNA, 33 bp, Homo sapien
cagaaagcctgactatgaggccatcactcttac

SEQ ID NO: 699508 - DNA, 33 bp, Homo sapien
cagaaagcctgactattaggccatcactcttac

SEQ ID NO: 699509 - DNA, 33 bp, Homo sapien
gaaatacaggttcttcccgctttgtccaggtgt

SEQ ID NO: 699510 - DNA, 33 bp, Homo sapien
gaaatacaggttcttcgcgctttgtccaggtgt

SEQ ID NO: 699511 - DNA, 33 bp, Homo sapien
tgtctgagccttgaatgatagcttgggtcttat

SEQ ID NO: 699512 - DNA, 33 bp, Homo sapien
tgtctgagccttgaattatagcttgggtcttat

SEQ ID NO: 699513 - DNA, 33 bp, Homo sapien
aacgaatttcatcctaatacgcatataagaccc

SEQ ID NO: 699514 - DNA, 33 bp, Homo sapien
aacgaatttcatcctagtacgcatataagaccc

SEQ ID NO: 699515 - DNA, 33 bp, Homo sapien
gaatctgtactcttaactcttacacattcctgc

SEQ ID NO: 699516 - DNA, 33 bp, Homo sapien
gaatctgtactcttaattcttacacattcctgc

SEQ ID NO: 699517 - DNA, 33 bp, Homo sapien
ggaattggaccgcacccctcattgtgggcagag

SEQ ID NO: 699518 - DNA, 33 bp, Homo sapien
ggaattggaccgcacctctcattgtgggcagag

SEQ ID NO: 699519 - DNA, 33 bp, Homo sapien
atatcatttccatctcacacatgaaacatgttg

SEQ ID NO: 699520 - DNA, 33 bp, Homo sapien
atatcatttccatctctcacatgaaacatgttg

SEQ ID NO: 699521 - DNA, 33 bp, Homo sapien
aagaagtttctacttcacttctactcagatggc

SEQ ID NO: 699522 - DNA, 33 bp, Homo sapien
aagaagtttctacttcgcttctactcagatggc

SEQ ID NO: 699523 - DNA, 33 bp, Homo sapien
ctctcgcctgaaataccgaaatgacagcctgac

SEQ ID NO: 699524 - DNA, 33 bp, Homo sapien
ctctcgcctgaaatactgaaatgacagcctgac

SEQ ID NO: 699525 - DNA, 33 bp, Homo sapien
ttaaaatattggtttaacatcttgtattacagt

SEQ ID NO: 699526 - DNA, 33 bp, Homo sapien
ttaaaatattggtttaccatcttgtattacagt

SEQ ID NO: 699527 - DNA, 33 bp, Homo sapien
gcaggggagtgtaacacggtcagagtccaaaac

SEQ ID NO: 699528 - DNA, 33 bp, Homo sapien
gcaggggagtgtaacatggtcagagtccaaaac

SEQ ID NO: 699529 - DNA, 33 bp, Homo sapien
tgcaatatttccctgcccgttgcaaacactgtc

SEQ ID NO: 699530 - DNA, 33 bp, Homo sapien
tgcaatatttccctgctcgttgcaaacactgtc

SEQ ID NO: 699531 - DNA, 33 bp, Homo sapien
cctgatttttttagcactcatggccagggtgtt

SEQ ID NO: 699532 - DNA, 33 bp, Homo sapien
cctgatttttttagcagtcatggccagggtgtt

SEQ ID NO: 699533 - DNA, 33 bp, Homo sapien
aagcttagagctggaaagaaaccatccatctac

SEQ ID NO: 699534 - DNA, 33 bp, Homo sapien
aagcttagagctggaaggaaaccatccatctac

SEQ ID NO: 699535 - DNA, 33 bp, Homo sapien
ctaataacttcggcaaagaattgtcccaagaaa

SEQ ID NO: 699536 - DNA, 33 bp, Homo sapien
ctaataacttcggcaatgaattgtcccaagaaa

SEQ ID NO: 699537 - DNA, 33 bp, Homo sapien
agaggatgtctaggaacaagccataatcccaat

SEQ ID NO: 699538 - DNA, 33 bp, Homo sapien
agaggatgtctaggaataagccataatcccaat

SEQ ID NO: 699539 - DNA, 33 bp, Homo sapien
gacattggagatggaacgaggaagggatcctgg

SEQ ID NO: 699540 - DNA, 33 bp, Homo sapien
gacattggagatggaatgaggaagggatcctgg

SEQ ID NO: 699541 - DNA, 33 bp, Homo sapien
tgtcactgtggctcggaagtctggaatcaactc

SEQ ID NO: 699542 - DNA, 33 bp, Homo sapien
tgtcactgtggctcgggagtctggaatcaactc

SEQ ID NO: 699543 - DNA, 33 bp, Homo sapien
tacaccattcaacctaagtgtatagaaggctag

SEQ ID NO: 699544 - DNA, 33 bp, Homo sapien
tacaccattcaacctaggtgtatagaaggctag

SEQ ID NO: 699545 - DNA, 33 bp, Homo sapien
tcaatgacccaagagacataagagtcgagattg

SEQ ID NO: 699546 - DNA, 33 bp, Homo sapien
tcaatgacccaagagagataagagtcgagattg

SEQ ID NO: 699547 - DNA, 33 bp, Homo sapien
tttgtctctttgtgaactatctttttatactgt

SEQ ID NO: 699548 - DNA, 33 bp, Homo sapien
tttgtctctttgtgaattatctttttatactgt

SEQ ID NO: 699549 - DNA, 33 bp, Homo sapien
ttaaaggtaactgccacgtcttgaggacctact

SEQ ID NO: 699550 - DNA, 33 bp, Homo sapien
ttaaaggtaactgccatgtcttgaggacctact

SEQ ID NO: 699551 - DNA, 33 bp, Homo sapien
aatcatctctggaaaaaggcatggaccacagac

SEQ ID NO: 699552 - DNA, 33 bp, Homo sapien
aatcatctctggaaaagggcatggaccacagac

SEQ ID NO: 699553 - DNA, 33 bp, Homo sapien
tgcagtgattatgggacgttgcattggcactca

SEQ ID NO: 699554 - DNA, 33 bp, Homo sapien
tgcagtgattatgggatgttgcattggcactca

SEQ ID NO: 699555 - DNA, 33 bp, Homo sapien
ccctggtaatctcttacgttggtgcaaaattag

SEQ ID NO: 699556 - DNA, 33 bp, Homo sapien
ccctggtaatctcttatgttggtgcaaaattag

SEQ ID NO: 699557 - DNA, 33 bp, Homo sapien
acttctcccgagaccacgtcgctggtaagtgaa

SEQ ID NO: 699558 - DNA, 33 bp, Homo sapien
acttctcccgagaccatgtcgctggtaagtgaa

SEQ ID NO: 699559 - DNA, 33 bp, Homo sapien
gtaaccaacatccagaggagtaacatgaccagc

SEQ ID NO: 699560 - DNA, 33 bp, Homo sapien
gtaaccaacatccagatgagtaacatgaccagc

SEQ ID NO: 699561 - DNA, 33 bp, Homo sapien
agggtggtgaggtcgacggaagtaaaactatct

SEQ ID NO: 699562 - DNA, 33 bp, Homo sapien
agggtggtgaggtcgatggaagtaaaactatct

SEQ ID NO: 699563 - DNA, 33 bp, Homo sapien
acaaacaaagtagaacaagccaagaaagaaggg

SEQ ID NO: 699564 - DNA, 33 bp, Homo sapien
acaaacaaagtagaacgagccaagaaagaaggg

SEQ ID NO: 699565 - DNA, 33 bp, Homo sapien
gtttctggtaactgtgcagaatggagtttcaag

SEQ ID NO: 699566 - DNA, 33 bp, Homo sapien
gtttctggtaactgtgtagaatggagtttcaag

SEQ ID NO: 699567 - DNA, 33 bp, Homo sapien
tacatagatggttggacattttgcatccaatgt

SEQ ID NO: 699568 - DNA, 33 bp, Homo sapien
tacatagatggttggatattttgcatccaatgt

SEQ ID NO: 699569 - DNA, 33 bp, Homo sapien
tcccaggattttacctaaagaaaggagagtcaa

SEQ ID NO: 699570 - DNA, 33 bp, Homo sapien
tcccaggattttacctgaagaaaggagagtcaa

SEQ ID NO: 699571 - DNA, 33 bp, Homo sapien
atgcctcccgggccaacgtttttccaatccatg

SEQ ID NO: 699572 - DNA, 33 bp, Homo sapien
atgcctcccgggccaatgtttttccaatccatg

SEQ ID NO: 699573 - DNA, 33 bp, Homo sapien
agccgtcttggtaaagaaggtactggccaggga

SEQ ID NO: 699574 - DNA, 33 bp, Homo sapien
agccgtcttggtaaagtaggtactggccaggga

SEQ ID NO: 699575 - DNA, 33 bp, Homo sapien
aaggatacaaacttagcctaagggcaatgggag

SEQ ID NO: 699576 - DNA, 33 bp, Homo sapien
aaggatacaaacttagtctaagggcaatgggag

SEQ ID NO: 699577 - DNA, 33 bp, Homo sapien
ggtggcagatgtagaactcatatccaggttccc

SEQ ID NO: 699578 - DNA, 33 bp, Homo sapien
ggtggcagatgtagaattcatatccaggttccc

SEQ ID NO: 699579 - DNA, 33 bp, Homo sapien
tgctatatggactgcaccataatgaaacagctg

SEQ ID NO: 699580 - DNA, 33 bp, Homo sapien
tgctatatggactgcatcataatgaaacagctg

SEQ ID NO: 699581 - DNA, 33 bp, Homo sapien
tgtgagtatgagtgaccaatgctgaaacagtca

SEQ ID NO: 699582 - DNA, 33 bp, Homo sapien
tgtgagtatgagtgactaatgctgaaacagtca

SEQ ID NO: 699583 - DNA, 33 bp, Homo sapien
ttaccaccaatccttcacaaattcttccaaaaa

SEQ ID NO: 699584 - DNA, 33 bp, Homo sapien
ttaccaccaatccttcgcaaattcttccaaaaa

SEQ ID NO: 699585 - DNA, 33 bp, Homo sapien
atgttccatgttctccactaatttcacttcaga

SEQ ID NO: 699586 - DNA, 33 bp, Homo sapien
atgttccatgttctccgctaatttcacttcaga

SEQ ID NO: 699587 - DNA, 33 bp, Homo sapien
aggtttttagtgataaagttctagtctgaagtg

SEQ ID NO: 699588 - DNA, 33 bp, Homo sapien
aggtttttagtgataaggttctagtctgaagtg

SEQ ID NO: 699589 - DNA, 33 bp, Homo sapien
ttaagcaaagaagacacaaagaaaacaggcttt

SEQ ID NO: 699590 - DNA, 33 bp, Homo sapien
ttaagcaaagaagacagaaagaaaacaggcttt

SEQ ID NO: 699591 - DNA, 33 bp, Homo sapien
tgtagggtcctgggccacaatagtttttaaaag

SEQ ID NO: 699592 - DNA, 33 bp, Homo sapien
tgtagggtcctgggccgcaatagtttttaaaag

SEQ ID NO: 699593 - DNA, 33 bp, Homo sapien
cccaaatagctaccaaacaaaatggctacctag

SEQ ID NO: 699594 - DNA, 33 bp, Homo sapien
cccaaatagctaccaaccaaaatggctacctag

SEQ ID NO: 699595 - DNA, 33 bp, Homo sapien
gtgcctttataaactgcaggtgttacagcctga

SEQ ID NO: 699596 - DNA, 33 bp, Homo sapien
gtgcctttataaactggaggtgttacagcctga

SEQ ID NO: 699597 - DNA, 33 bp, Homo sapien
ggttttctatcacgtcccttactcaggtttcac

SEQ ID NO: 699598 - DNA, 33 bp, Homo sapien
ggttttctatcacgtctcttactcaggtttcac

SEQ ID NO: 699599 - DNA, 33 bp, Homo sapien
ttgaggaacttaatgaagaacataatcattgcc

SEQ ID NO: 699600 - DNA, 33 bp, Homo sapien
ttgaggaacttaatgaggaacataatcattgcc

SEQ ID NO: 699601 - DNA, 33 bp, Homo sapien
catcataccttatggaaaaacatgaagacaaag

SEQ ID NO: 699602 - DNA, 33 bp, Homo sapien
catcataccttatggagaaacatgaagacaaag

SEQ ID NO: 699603 - DNA, 33 bp, Homo sapien
cgtcatttgatgaatacagcctggtctgaattg

SEQ ID NO: 699604 - DNA, 33 bp, Homo sapien
cgtcatttgatgaatatagcctggtctgaattg

SEQ ID NO: 699605 - DNA, 33 bp, Homo sapien
aactgtcacaggagtacgatgagtctgcattag

SEQ ID NO: 699606 - DNA, 33 bp, Homo sapien
aactgtcacaggagtatgatgagtctgcattag

SEQ ID NO: 699607 - DNA, 33 bp, Homo sapien
gatagtgagggtacaaatcattttagaaatatt

SEQ ID NO: 699608 - DNA, 33 bp, Homo sapien
gatagtgagggtacaagtcattttagaaatatt

SEQ ID NO: 699609 - DNA, 33 bp, Homo sapien
taagcctagcatttccagattaaattctctgcc

SEQ ID NO: 699610 - DNA, 33 bp, Homo sapien
taagcctagcatttccggattaaattctctgcc

SEQ ID NO: 699611 - DNA, 33 bp, Homo sapien
ttgtgcctcagtgaacaaactgctctctctgct

SEQ ID NO: 699612 - DNA, 33 bp, Homo sapien
ttgtgcctcagtgaacgaactgctctctctgct

SEQ ID NO: 699613 - DNA, 33 bp, Homo sapien
ctccttactcatctgcaactcatctggtcctgg

SEQ ID NO: 699614 - DNA, 33 bp, Homo sapien
ctccttactcatctgcgactcatctggtcctgg

SEQ ID NO: 699615 - DNA, 33 bp, Homo sapien
ctgacctgcttctacacgagaggtatacacaca

SEQ ID NO: 699616 - DNA, 33 bp, Homo sapien
ctgacctgcttctacatgagaggtatacacaca

SEQ ID NO: 699617 - DNA, 33 bp, Homo sapien
taaaattaagcagcaaagtaaacagagattaaa

SEQ ID NO: 699618 - DNA, 33 bp, Homo sapien
taaaattaagcagcaatgtaaacagagattaaa

SEQ ID NO: 699619 - DNA, 33 bp, Homo sapien
atcaaacctgttccaacacttttactatcaaca

SEQ ID NO: 699620 - DNA, 33 bp, Homo sapien
atcaaacctgttccaagacttttactatcaaca

SEQ ID NO: 699621 - DNA, 33 bp, Homo sapien
gagcctctgggaaacactgaagccaacctgcta

SEQ ID NO: 699622 - DNA, 33 bp, Homo sapien
gagcctctgggaaacattgaagccaacctgcta

SEQ ID NO: 699623 - DNA, 33 bp, Homo sapien
gtgggatgaagagctgaaggtgggttgtgagcc

SEQ ID NO: 699624 - DNA, 33 bp, Homo sapien
gtgggatgaagagctgcaggtgggttgtgagcc

SEQ ID NO: 699625 - DNA, 33 bp, Homo sapien
attctaaaagtaaacaccagtcttgtggtcctc

SEQ ID NO: 699626 - DNA, 33 bp, Homo sapien
attctaaaagtaaacatcagtcttgtggtcctc

SEQ ID NO: 699627 - DNA, 33 bp, Homo sapien
aagatgtgcttaccaaattctctggttagattt

SEQ ID NO: 699628 - DNA, 33 bp, Homo sapien
aagatgtgcttaccaatttctctggttagattt

SEQ ID NO: 699629 - DNA, 33 bp, Homo sapien
cctttgaccaccaggaaacagaaacagagttag

SEQ ID NO: 699630 - DNA, 33 bp, Homo sapien
cctttgaccaccaggagacagaaacagagttag

SEQ ID NO: 699631 - DNA, 33 bp, Homo sapien
tcacttgaaaagtggacggagcgccaagctgga

SEQ ID NO: 699632 - DNA, 33 bp, Homo sapien
tcacttgaaaagtggatggagcgccaagctgga

SEQ ID NO: 699633 - DNA, 33 bp, Homo sapien
gcaaacacaaagccacaaggtgtactggggtgc

SEQ ID NO: 699634 - DNA, 33 bp, Homo sapien
gcaaacacaaagccacgaggtgtactggggtgc

SEQ ID NO: 699635 - DNA, 33 bp, Homo sapien
gtaatcactcctgggccagtttccctttcagga

SEQ ID NO: 699636 - DNA, 33 bp, Homo sapien
gtaatcactcctgggctagtttccctttcagga

SEQ ID NO: 699637 - DNA, 33 bp, Homo sapien
aacacgaaattatggacagcataaaagatttga

SEQ ID NO: 699638 - DNA, 33 bp, Homo sapien
aacacgaaattatggagagcataaaagatttga

SEQ ID NO: 699639 - DNA, 33 bp, Homo sapien
tgtatctcttttgtaaatactatcactctctac

SEQ ID NO: 699640 - DNA, 33 bp, Homo sapien
tgtatctcttttgtaagtactatcactctctac

SEQ ID NO: 699641 - DNA, 33 bp, Homo sapien
cacagcctcaagtgccgcacggaaatgatgatg

SEQ ID NO: 699642 - DNA, 33 bp, Homo sapien
cacagcctcaagtgcctcacggaaatgatgatg

SEQ ID NO: 699643 - DNA, 33 bp, Homo sapien
ttggtacctattggtcactctgctgagttctgg

SEQ ID NO: 699644 - DNA, 33 bp, Homo sapien
ttggtacctattggtcgctctgctgagttctgg

SEQ ID NO: 699645 - DNA, 33 bp, Homo sapien
caagcttagacttggaactctttttctatcctg

SEQ ID NO: 699646 - DNA, 33 bp, Homo sapien
caagcttagacttggatctctttttctatcctg

SEQ ID NO: 699647 - DNA, 33 bp, Homo sapien
gaaggccaagactcaacgcttgattattttatt

SEQ ID NO: 699648 - DNA, 33 bp, Homo sapien
gaaggccaagactcaatgcttgattattttatt

SEQ ID NO: 699649 - DNA, 33 bp, Homo sapien
ttaccttcattccaacgctcttgacccttcatt

SEQ ID NO: 699650 - DNA, 33 bp, Homo sapien
ttaccttcattccaactctcttgacccttcatt

SEQ ID NO: 699651 - DNA, 33 bp, Homo sapien
ttcttctctctttagcccttatccctcatgcta

SEQ ID NO: 699652 - DNA, 33 bp, Homo sapien
ttcttctctctttagctcttatccctcatgcta

SEQ ID NO: 699653 - DNA, 33 bp, Homo sapien
attcacagcccaggagaaacttaacacagctag

SEQ ID NO: 699654 - DNA, 33 bp, Homo sapien
attcacagcccaggagcaacttaacacagctag

SEQ ID NO: 699655 - DNA, 33 bp, Homo sapien
cacatagctcagagaaaaaattgagattcaaac

SEQ ID NO: 699656 - DNA, 33 bp, Homo sapien
cacatagctcagagaagaaattgagattcaaac

SEQ ID NO: 699657 - DNA, 33 bp, Homo sapien
tcattttcatggaagacattttgccgcagtcct

SEQ ID NO: 699658 - DNA, 33 bp, Homo sapien
tcattttcatggaagatattttgccgcagtcct

SEQ ID NO: 699659 - DNA, 33 bp, Homo sapien
agagcctttcagaaggaagagctcagccgccgg

SEQ ID NO: 699660 - DNA, 33 bp, Homo sapien
agagcctttcagaaggcagagctcagccgccgg

SEQ ID NO: 699661 - DNA, 33 bp, Homo sapien
tcctagtgacctcgaaaatatataagcaaaaaa

SEQ ID NO: 699662 - DNA, 33 bp, Homo sapien
tcctagtgacctcgaagatatataagcaaaaaa

SEQ ID NO: 699663 - DNA, 33 bp, Homo sapien
cacaaactaccatgaaacgaaattagccattga

SEQ ID NO: 699664 - DNA, 33 bp, Homo sapien
cacaaactaccatgaagcgaaattagccattga

SEQ ID NO: 699665 - DNA, 33 bp, Homo sapien
ctcttactttaaatcaagagctagaagtgggct

SEQ ID NO: 699666 - DNA, 33 bp, Homo sapien
ctcttactttaaatcaggagctagaagtgggct

SEQ ID NO: 699667 - DNA, 33 bp, Homo sapien
tcctgttatattcttcactatgtctgcatggtt

SEQ ID NO: 699668 - DNA, 33 bp, Homo sapien
tcctgttatattcttcgctatgtctgcatggtt

SEQ ID NO: 699669 - DNA, 33 bp, Homo sapien
atggtccattactgcaactactcttttgcaaaa

SEQ ID NO: 699670 - DNA, 33 bp, Homo sapien
atggtccattactgcagctactcttttgcaaaa

SEQ ID NO: 699671 - DNA, 33 bp, Homo sapien
gatcttagcagagaaacggataggtggtttgat

SEQ ID NO: 699672 - DNA, 33 bp, Homo sapien
gatcttagcagagaaatggataggtggtttgat

SEQ ID NO: 699673 - DNA, 33 bp, Homo sapien
tctctgtccaacatgaaataggtacttaatact

SEQ ID NO: 699674 - DNA, 33 bp, Homo sapien
tctctgtccaacatgagataggtacttaatact

SEQ ID NO: 699675 - DNA, 33 bp, Homo sapien
tcagagtactagtatacgttaggcatgtgaata

SEQ ID NO: 699676 - DNA, 33 bp, Homo sapien
tcagagtactagtatatgttaggcatgtgaata

SEQ ID NO: 699677 - DNA, 33 bp, Homo sapien
tacaccacaccgataacgcctaatttaggttat

SEQ ID NO: 699678 - DNA, 33 bp, Homo sapien
tacaccacaccgataatgcctaatttaggttat

SEQ ID NO: 699679 - DNA, 33 bp, Homo sapien
aaaattagacatcacactgacaattgttgacag

SEQ ID NO: 699680 - DNA, 33 bp, Homo sapien
aaaattagacatcacagtgacaattgttgacag

SEQ ID NO: 699681 - DNA, 33 bp, Homo sapien
aaaagtctaatcagaacacatggaaaacatatc

SEQ ID NO: 699682 - DNA, 33 bp, Homo sapien
aaaagtctaatcagaatacatggaaaacatatc

SEQ ID NO: 699683 - DNA, 33 bp, Homo sapien
aattactaccaagacagtcactcttataaacct

SEQ ID NO: 699684 - DNA, 33 bp, Homo sapien
aattactaccaagacattcactcttataaacct

SEQ ID NO: 699685 - DNA, 33 bp, Homo sapien
tgctctgaaacccatcaagattgttctgcctcc

SEQ ID NO: 699686 - DNA, 33 bp, Homo sapien
tgctctgaaacccatcgagattgttctgcctcc

SEQ ID NO: 699687 - DNA, 33 bp, Homo sapien
tcaactgctctttggcccctataaaaaacacaa

SEQ ID NO: 699688 - DNA, 33 bp, Homo sapien
tcaactgctctttggctcctataaaaaacacaa

SEQ ID NO: 699689 - DNA, 33 bp, Homo sapien
taatatccaggaaagagaatacattaacacaat

SEQ ID NO: 699690 - DNA, 33 bp, Homo sapien
taatatccaggaaagataatacattaacacaat

SEQ ID NO: 699691 - DNA, 33 bp, Homo sapien
ctgcttggtaatagaaactcctcctgaaaagca

SEQ ID NO: 699692 - DNA, 33 bp, Homo sapien
ctgcttggtaatagaacctcctcctgaaaagca

SEQ ID NO: 699693 - DNA, 33 bp, Homo sapien
agctcagggagaagtaagcagattgttcagcca

SEQ ID NO: 699694 - DNA, 33 bp, Homo sapien
agctcagggagaagtaggcagattgttcagcca

SEQ ID NO: 699695 - DNA, 33 bp, Homo sapien
actgaatttcacagaacccttctatctagtgta

SEQ ID NO: 699696 - DNA, 33 bp, Homo sapien
actgaatttcacagaatccttctatctagtgta

SEQ ID NO: 699697 - DNA, 33 bp, Homo sapien
gtgagcatgcagccgacgttgggtgttcgcatt

SEQ ID NO: 699698 - DNA, 33 bp, Homo sapien
gtgagcatgcagccgatgttgggtgttcgcatt

SEQ ID NO: 699699 - DNA, 33 bp, Homo sapien
tcaaccacacaaagtccaaaaacctctgggtgg

SEQ ID NO: 699700 - DNA, 33 bp, Homo sapien
tcaaccacacaaagtcgaaaaacctctgggtgg

SEQ ID NO: 699701 - DNA, 33 bp, Homo sapien
ggcggatgtgatcaacaaaggatcctgagatgg

SEQ ID NO: 699702 - DNA, 33 bp, Homo sapien
ggcggatgtgatcaacgaaggatcctgagatgg

SEQ ID NO: 699703 - DNA, 33 bp, Homo sapien
caccataaaatccaaacggcagttgcattcatt

SEQ ID NO: 699704 - DNA, 33 bp, Homo sapien
caccataaaatccaaatggcagttgcattcatt

SEQ ID NO: 699705 - DNA, 33 bp, Homo sapien
cgtggatgagggaggcaattaagaataactctg

SEQ ID NO: 699706 - DNA, 33 bp, Homo sapien
cgtggatgagggaggcgattaagaataactctg

SEQ ID NO: 699707 - DNA, 33 bp, Homo sapien
aaagaagagacacaagaaactatagctataacc

SEQ ID NO: 699708 - DNA, 33 bp, Homo sapien
aaagaagagacacaaggaactatagctataacc

SEQ ID NO: 699709 - DNA, 33 bp, Homo sapien
tgttttcaagactggacgcttttattttctgac

SEQ ID NO: 699710 - DNA, 33 bp, Homo sapien
tgttttcaagactggatgcttttattttctgac

SEQ ID NO: 699711 - DNA, 33 bp, Homo sapien
acatgacaccaactccaacacaaagaggagatc

SEQ ID NO: 699712 - DNA, 33 bp, Homo sapien
acatgacaccaactccgacacaaagaggagatc

SEQ ID NO: 699713 - DNA, 33 bp, Homo sapien
acagagcaactagaccaaagagcatggagcact

SEQ ID NO: 699714 - DNA, 33 bp, Homo sapien
acagagcaactagaccgaagagcatggagcact

SEQ ID NO: 699715 - DNA, 33 bp, Homo sapien
catggcaaacctttaaacactgcccacaagccc

SEQ ID NO: 699716 - DNA, 33 bp, Homo sapien
catggcaaacctttaagcactgcccacaagccc

SEQ ID NO: 699717 - DNA, 33 bp, Homo sapien
taatatgctgttcggcagataaggagcatccat

SEQ ID NO: 699718 - DNA, 33 bp, Homo sapien
taatatgctgttcggcggataaggagcatccat

SEQ ID NO: 699719 - DNA, 33 bp, Homo sapien
ctgaaaattcaaccagcataccaataacctatg

SEQ ID NO: 699720 - DNA, 33 bp, Homo sapien
ctgaaaattcaaccaggataccaataacctatg

SEQ ID NO: 699721 - DNA, 33 bp, Homo sapien
ggacaaatgagcagcaaaaaagattttcaatga

SEQ ID NO: 699722 - DNA, 33 bp, Homo sapien
ggacaaatgagcagcataaaagattttcaatga

SEQ ID NO: 699723 - DNA, 33 bp, Homo sapien
ttttctcaaattacaaacatggaacttgccaga

SEQ ID NO: 699724 - DNA, 33 bp, Homo sapien
ttttctcaaattacaatcatggaacttgccaga

SEQ ID NO: 699725 - DNA, 33 bp, Homo sapien
aacatctgaacagatacgtcaccaaagaagata

SEQ ID NO: 699726 - DNA, 33 bp, Homo sapien
aacatctgaacagatatgtcaccaaagaagata

SEQ ID NO: 699727 - DNA, 33 bp, Homo sapien
tgtctgttcctcttagcacatcccatgagggca

SEQ ID NO: 699728 - DNA, 33 bp, Homo sapien
tgtctgttcctcttagtacatcccatgagggca

SEQ ID NO: 699729 - DNA, 33 bp, Homo sapien
taaggacacagattcacgggtgagctttagggg

SEQ ID NO: 699730 - DNA, 33 bp, Homo sapien
taaggacacagattcatgggtgagctttagggg

SEQ ID NO: 699731 - DNA, 33 bp, Homo sapien
cgttctctctggttccacaagatactattattt

SEQ ID NO: 699732 - DNA, 33 bp, Homo sapien
cgttctctctggttccgcaagatactattattt

SEQ ID NO: 699733 - DNA, 33 bp, Homo sapien
gttagtggcttcaacacctgggccccaagccac

SEQ ID NO: 699734 - DNA, 33 bp, Homo sapien
gttagtggcttcaacatctgggccccaagccac

SEQ ID NO: 699735 - DNA, 33 bp, Homo sapien
ggctcaccaagattgactaacctgggtcacact

SEQ ID NO: 699736 - DNA, 33 bp, Homo sapien
ggctcaccaagattgagtaacctgggtcacact

SEQ ID NO: 699737 - DNA, 33 bp, Homo sapien
aagaaactgattttgacgtaagcccccttgata

SEQ ID NO: 699738 - DNA, 33 bp, Homo sapien
aagaaactgattttgatgtaagcccccttgata

SEQ ID NO: 699739 - DNA, 33 bp, Homo sapien
ctatgcttagaatacactgaagacattatttca

SEQ ID NO: 699740 - DNA, 33 bp, Homo sapien
ctatgcttagaatacattgaagacattatttca

SEQ ID NO: 699741 - DNA, 33 bp, Homo sapien
tgtccctgaggagcccacggattcgagaagtca

SEQ ID NO: 699742 - DNA, 33 bp, Homo sapien
tgtccctgaggagcccgcggattcgagaagtca

SEQ ID NO: 699743 - DNA, 33 bp, Homo sapien
ataagcattctttatgcattcgccattatactg

SEQ ID NO: 699744 - DNA, 33 bp, Homo sapien
ataagcattctttatgtattcgccattatactg

SEQ ID NO: 699745 - DNA, 33 bp, Homo sapien
cctcacatggctgttaaaaacattgaattgaca

SEQ ID NO: 699746 - DNA, 33 bp, Homo sapien
cctcacatggctgttataaacattgaattgaca

SEQ ID NO: 699747 - DNA, 33 bp, Homo sapien
agtctacaaacaacacagagtaataacattata

SEQ ID NO: 699748 - DNA, 33 bp, Homo sapien
agtctacaaacaacacggagtaataacattata

SEQ ID NO: 699749 - DNA, 33 bp, Homo sapien
aagtttgcaggtgataccaatactgccagtcta

SEQ ID NO: 699750 - DNA, 33 bp, Homo sapien
aagtttgcaggtgatatcaatactgccagtcta

SEQ ID NO: 699751 - DNA, 33 bp, Homo sapien
gtctcagtgtataacaagtcattttcaatatat

SEQ ID NO: 699752 - DNA, 33 bp, Homo sapien
gtctcagtgtataacacgtcattttcaatatat

SEQ ID NO: 699753 - DNA, 33 bp, Homo sapien
tactcctctttgtccacgtatcagttcactcta

SEQ ID NO: 699754 - DNA, 33 bp, Homo sapien
tactcctctttgtccatgtatcagttcactcta

SEQ ID NO: 699755 - DNA, 33 bp, Homo sapien
aatgggtctaaatttgaagtgtctttgctctca

SEQ ID NO: 699756 - DNA, 33 bp, Homo sapien
aatgggtctaaatttgcagtgtctttgctctca

SEQ ID NO: 699757 - DNA, 33 bp, Homo sapien
gggctactaatatggacgtgagatgaggacctg

SEQ ID NO: 699758 - DNA, 33 bp, Homo sapien
gggctactaatatggatgtgagatgaggacctg

SEQ ID NO: 699759 - DNA, 33 bp, Homo sapien
ggtttgtgcaattaaaccagtctctgtgagcag

SEQ ID NO: 699760 - DNA, 33 bp, Homo sapien
ggtttgtgcaattaaatcagtctctgtgagcag

SEQ ID NO: 699761 - DNA, 33 bp, Homo sapien
agttggagaaggtcacaattaagtaatgacttc

SEQ ID NO: 699762 - DNA, 33 bp, Homo sapien
agttggagaaggtcaccattaagtaatgacttc

SEQ ID NO: 699763 - DNA, 33 bp, Homo sapien
gaacttttgtgaatcccgaaagcaaactgttca

SEQ ID NO: 699764 - DNA, 33 bp, Homo sapien
gaacttttgtgaatcctgaaagcaaactgttca

SEQ ID NO: 699765 - DNA, 33 bp, Homo sapien
aaactcctagactcaaacagttctcccgccttg

SEQ ID NO: 699766 - DNA, 33 bp, Homo sapien
aaactcctagactcaagcagttctcccgccttg

SEQ ID NO: 699767 - DNA, 33 bp, Homo sapien
cagagtagacaggaagcatttgttgaattaatt

SEQ ID NO: 699768 - DNA, 33 bp, Homo sapien
cagagtagacaggaaggatttgttgaattaatt

SEQ ID NO: 699769 - DNA, 33 bp, Homo sapien
ttgagtaagcccagcaaagactatgcctccatg

SEQ ID NO: 699770 - DNA, 33 bp, Homo sapien
ttgagtaagcccagcagagactatgcctccatg

SEQ ID NO: 699771 - DNA, 33 bp, Homo sapien
atgaggaagaaagcacaaacagctgtctaggac

SEQ ID NO: 699772 - DNA, 33 bp, Homo sapien
atgaggaagaaagcacgaacagctgtctaggac

SEQ ID NO: 699773 - DNA, 33 bp, Homo sapien
gagcagtagaacgttacgagtgcttcaaaattg

SEQ ID NO: 699774 - DNA, 33 bp, Homo sapien
gagcagtagaacgttatgagtgcttcaaaattg

SEQ ID NO: 699775 - DNA, 33 bp, Homo sapien
ttttacacttatacaaattcatctcatctgttg

SEQ ID NO: 699776 - DNA, 33 bp, Homo sapien
ttttacacttatacaatttcatctcatctgttg

SEQ ID NO: 699777 - DNA, 33 bp, Homo sapien
tgtaatcaaaccgtcaaaccttcccgctgatga

SEQ ID NO: 699778 - DNA, 33 bp, Homo sapien
tgtaatcaaaccgtcagaccttcccgctgatga

SEQ ID NO: 699779 - DNA, 33 bp, Homo sapien
tcaagatagagttgtcatttttagggagaagtc

SEQ ID NO: 699780 - DNA, 33 bp, Homo sapien
tcaagatagagttgtcgtttttagggagaagtc

SEQ ID NO: 699781 - DNA, 33 bp, Homo sapien
catagttgatgagagcaagagtcacaaacctaa

SEQ ID NO: 699782 - DNA, 33 bp, Homo sapien
catagttgatgagagcgagagtcacaaacctaa

SEQ ID NO: 699783 - DNA, 33 bp, Homo sapien
ccaaggcaaagcgtgaagtcaactgaaaccaaa

SEQ ID NO: 699784 - DNA, 33 bp, Homo sapien
ccaaggcaaagcgtgaggtcaactgaaaccaaa

SEQ ID NO: 699785 - DNA, 33 bp, Homo sapien
gattcacgatcattaacgcatgctctctgatgt

SEQ ID NO: 699786 - DNA, 33 bp, Homo sapien
gattcacgatcattaatgcatgctctctgatgt

SEQ ID NO: 699787 - DNA, 33 bp, Homo sapien
aatgccacttccactacgaaacctttctagacc

SEQ ID NO: 699788 - DNA, 33 bp, Homo sapien
aatgccacttccactatgaaacctttctagacc

SEQ ID NO: 699789 - DNA, 33 bp, Homo sapien
ttcattcaccaatctacgtattacctgaaacct

SEQ ID NO: 699790 - DNA, 33 bp, Homo sapien
ttcattcaccaatctatgtattacctgaaacct

SEQ ID NO: 699791 - DNA, 33 bp, Homo sapien
tgtcatccagcccagaaaccaagaaggatcatc

SEQ ID NO: 699792 - DNA, 33 bp, Homo sapien
tgtcatccagcccagagaccaagaaggatcatc

SEQ ID NO: 699793 - DNA, 33 bp, Homo sapien
tctgcagcagcaaatcaccattcccaatgatgg

SEQ ID NO: 699794 - DNA, 33 bp, Homo sapien
tctgcagcagcaaatcgccattcccaatgatgg

SEQ ID NO: 699795 - DNA, 33 bp, Homo sapien
aaaaagtcattagacaactgccatgattaaact

SEQ ID NO: 699796 - DNA, 33 bp, Homo sapien
aaaaagtcattagacacctgccatgattaaact

SEQ ID NO: 699797 - DNA, 33 bp, Homo sapien
gaaactatctggcaaccgcatttatctcaaata

SEQ ID NO: 699798 - DNA, 33 bp, Homo sapien
gaaactatctggcaactgcatttatctcaaata

SEQ ID NO: 699799 - DNA, 33 bp, Homo sapien
tttctttcttcccagcaagagacatatagaata

SEQ ID NO: 699800 - DNA, 33 bp, Homo sapien
tttctttcttcccagcgagagacatatagaata

SEQ ID NO: 699801 - DNA, 33 bp, Homo sapien
ggaacagcagatttgcactttctcataatctca

SEQ ID NO: 699802 - DNA, 33 bp, Homo sapien
ggaacagcagatttgcgctttctcataatctca

SEQ ID NO: 699803 - DNA, 33 bp, Homo sapien
aaacacaaagaaggagacaacaaacactggagt

SEQ ID NO: 699804 - DNA, 33 bp, Homo sapien
aaacacaaagaaggaggcaacaaacactggagt

SEQ ID NO: 699805 - DNA, 33 bp, Homo sapien
ttctgttaaaagcctcacaaattttctagggga

SEQ ID NO: 699806 - DNA, 33 bp, Homo sapien
ttctgttaaaagcctcgcaaattttctagggga

SEQ ID NO: 699807 - DNA, 33 bp, Homo sapien
tgaaataaggagtacaatcatctctgcctgaaa

SEQ ID NO: 699808 - DNA, 33 bp, Homo sapien
tgaaataaggagtacagtcatctctgcctgaaa

SEQ ID NO: 699809 - DNA, 33 bp, Homo sapien
tgatacactagttatacccacaacaaccaaatg

SEQ ID NO: 699810 - DNA, 33 bp, Homo sapien
tgatacactagttatagccacaacaaccaaatg

SEQ ID NO: 699811 - DNA, 33 bp, Homo sapien
acttcttgtagtgagacgaaggaatttaaaaag

SEQ ID NO: 699812 - DNA, 33 bp, Homo sapien
acttcttgtagtgagaggaaggaatttaaaaag

SEQ ID NO: 699813 - DNA, 33 bp, Homo sapien
cctctcggtaaaatgacgtagttgaaacaagtg

SEQ ID NO: 699814 - DNA, 33 bp, Homo sapien
cctctcggtaaaatgaggtagttgaaacaagtg

SEQ ID NO: 699815 - DNA, 33 bp, Homo sapien
caggctttgcccctgaaaaagatgagaagaatg

SEQ ID NO: 699816 - DNA, 33 bp, Homo sapien
caggctttgcccctgagaaagatgagaagaatg

SEQ ID NO: 699817 - DNA, 33 bp, Homo sapien
catcttttggtaacccactaaaatcctgctttt

SEQ ID NO: 699818 - DNA, 33 bp, Homo sapien
catcttttggtaacccgctaaaatcctgctttt

SEQ ID NO: 699819 - DNA, 33 bp, Homo sapien
tcaagctgacgttctgcagaggctactcatagc

SEQ ID NO: 699820 - DNA, 33 bp, Homo sapien
tcaagctgacgttctgtagaggctactcatagc

SEQ ID NO: 699821 - DNA, 33 bp, Homo sapien
agcctgtagaagaatacatacattagaccaggc

SEQ ID NO: 699822 - DNA, 33 bp, Homo sapien
agcctgtagaagaatagatacattagaccaggc

SEQ ID NO: 699823 - DNA, 33 bp, Homo sapien
ccaggtgttttccatcacatcgggtttctaatg

SEQ ID NO: 699824 - DNA, 33 bp, Homo sapien
ccaggtgttttccatcgcatcgggtttctaatg

SEQ ID NO: 699825 - DNA, 33 bp, Homo sapien
gctctctgcttgctcactctgttctggactgtt

SEQ ID NO: 699826 - DNA, 33 bp, Homo sapien
gctctctgcttgctcattctgttctggactgtt

SEQ ID NO: 699827 - DNA, 33 bp, Homo sapien
ttctttgtcatgaaagccgtcctcagttttcag

SEQ ID NO: 699828 - DNA, 33 bp, Homo sapien
ttctttgtcatgaaaggcgtcctcagttttcag

SEQ ID NO: 699829 - DNA, 33 bp, Homo sapien
gcttgtctgtatctgaaggtgacggttaccatt

SEQ ID NO: 699830 - DNA, 33 bp, Homo sapien
gcttgtctgtatctgacggtgacggttaccatt

SEQ ID NO: 699831 - DNA, 33 bp, Homo sapien
taataccagatactgacgatggaaaaaatgtgt

SEQ ID NO: 699832 - DNA, 33 bp, Homo sapien
taataccagatactgaggatggaaaaaatgtgt

SEQ ID NO: 699833 - DNA, 33 bp, Homo sapien
gggatctgaaggtaaccgcatcactatttcata

SEQ ID NO: 699834 - DNA, 33 bp, Homo sapien
gggatctgaaggtaactgcatcactatttcata

SEQ ID NO: 699835 - DNA, 33 bp, Homo sapien
ttattacttgagatcaacatttcatctgggctt

SEQ ID NO: 699836 - DNA, 33 bp, Homo sapien
ttattacttgagatcagcatttcatctgggctt

SEQ ID NO: 699837 - DNA, 33 bp, Homo sapien
ggaatatgtcacctgcactcttgtataatataa

SEQ ID NO: 699838 - DNA, 33 bp, Homo sapien
ggaatatgtcacctgcgctcttgtataatataa

SEQ ID NO: 699839 - DNA, 33 bp, Homo sapien
tgtaataggagagcccaaggggtatgccgactt

SEQ ID NO: 699840 - DNA, 33 bp, Homo sapien
tgtaataggagagcccgaggggtatgccgactt

SEQ ID NO: 699841 - DNA, 33 bp, Homo sapien
ttagagagcctgagaaaatagtttctgtgtgtt

SEQ ID NO: 699842 - DNA, 33 bp, Homo sapien
ttagagagcctgagaatatagtttctgtgtgtt

SEQ ID NO: 699843 - DNA, 33 bp, Homo sapien
tcgttccagtgcttcaaaacttacgggaaattc

SEQ ID NO: 699844 - DNA, 33 bp, Homo sapien
tcgttccagtgcttcataacttacgggaaattc

SEQ ID NO: 699845 - DNA, 33 bp, Homo sapien
aacttggcaaagagaaatatgcagaagtcaatt

SEQ ID NO: 699846 - DNA, 33 bp, Homo sapien
aacttggcaaagagaagtatgcagaagtcaatt

SEQ ID NO: 699847 - DNA, 33 bp, Homo sapien
ataggagccacaaagaagtggctgcatccgggg

SEQ ID NO: 699848 - DNA, 33 bp, Homo sapien
ataggagccacaaagacgtggctgcatccgggg

SEQ ID NO: 699849 - DNA, 33 bp, Homo sapien
caaggatagaattaggccaagcagcaaggaggt

SEQ ID NO: 699850 - DNA, 33 bp, Homo sapien
caaggatagaattagggcaagcagcaaggaggt

SEQ ID NO: 699851 - DNA, 33 bp, Homo sapien
aatggtttgttaaataactcatccgactcagta

SEQ ID NO: 699852 - DNA, 33 bp, Homo sapien
aatggtttgttaaatacctcatccgactcagta

SEQ ID NO: 699853 - DNA, 33 bp, Homo sapien
agacagctttctgataacctctcatttggctag

SEQ ID NO: 699854 - DNA, 33 bp, Homo sapien
agacagctttctgatagcctctcatttggctag

SEQ ID NO: 699855 - DNA, 33 bp, Homo sapien
ccacccttcaaagttcaaaaacacaaatgagtg

SEQ ID NO: 699856 - DNA, 33 bp, Homo sapien
ccacccttcaaagttcgaaaacacaaatgagtg

SEQ ID NO: 699857 - DNA, 33 bp, Homo sapien
ttactgaagtcaccaaattatttttctcaacag

SEQ ID NO: 699858 - DNA, 33 bp, Homo sapien
ttactgaagtcaccaagttatttttctcaacag

SEQ ID NO: 699859 - DNA, 33 bp, Homo sapien
tttctttacattttcacacaggtaatcttgagg

SEQ ID NO: 699860 - DNA, 33 bp, Homo sapien
tttctttacattttcatacaggtaatcttgagg

SEQ ID NO: 699861 - DNA, 33 bp, Homo sapien
gcaatgtgacatagagaacagcttgggtaatgc

SEQ ID NO: 699862 - DNA, 33 bp, Homo sapien
gcaatgtgacatagaggacagcttgggtaatgc

SEQ ID NO: 699863 - DNA, 33 bp, Homo sapien
actagacctttgctgaactgggcataagtttgg

SEQ ID NO: 699864 - DNA, 33 bp, Homo sapien
actagacctttgctgagctgggcataagtttgg

SEQ ID NO: 699865 - DNA, 33 bp, Homo sapien
tgaaggaaccaaataccgagatttcttcagaga

SEQ ID NO: 699866 - DNA, 33 bp, Homo sapien
tgaaggaaccaaatacggagatttcttcagaga

SEQ ID NO: 699867 - DNA, 33 bp, Homo sapien
tatatgccacaatacccagaagctacatgcaaa

SEQ ID NO: 699868 - DNA, 33 bp, Homo sapien
tatatgccacaatacctagaagctacatgcaaa

SEQ ID NO: 699869 - DNA, 33 bp, Homo sapien
ctaagatgattttaaacgagaatcgtgtgaaca

SEQ ID NO: 699870 - DNA, 33 bp, Homo sapien
ctaagatgattttaaatgagaatcgtgtgaaca

SEQ ID NO: 699871 - DNA, 33 bp, Homo sapien
gtcacgtagttcttcaaagcttgactagtaggt

SEQ ID NO: 699872 - DNA, 33 bp, Homo sapien
gtcacgtagttcttcagagcttgactagtaggt

SEQ ID NO: 699873 - DNA, 33 bp, Homo sapien
tgtagatcatgcatcacaggtgaagtttatgta

SEQ ID NO: 699874 - DNA, 33 bp, Homo sapien
tgtagatcatgcatcataggtgaagtttatgta

SEQ ID NO: 699875 - DNA, 33 bp, Homo sapien
tctcttactatcactacaaaaaatgtcagtaat

SEQ ID NO: 699876 - DNA, 33 bp, Homo sapien
tctcttactatcactataaaaaatgtcagtaat

SEQ ID NO: 699877 - DNA, 33 bp, Homo sapien
tctttcaatacaatgacgaacacttgccaagtg

SEQ ID NO: 699878 - DNA, 33 bp, Homo sapien
tctttcaatacaatgatgaacacttgccaagtg

SEQ ID NO: 699879 - DNA, 33 bp, Homo sapien
atcaaatttaatcccaacaattacatttaaaaa

SEQ ID NO: 699880 - DNA, 33 bp, Homo sapien
atcaaatttaatcccatcaattacatttaaaaa

SEQ ID NO: 699881 - DNA, 33 bp, Homo sapien
ttttgatagaatggtaagaatgaaagcctaatt

SEQ ID NO: 699882 - DNA, 33 bp, Homo sapien
ttttgatagaatggtaggaatgaaagcctaatt

SEQ ID NO: 699883 - DNA, 33 bp, Homo sapien
gcagctatgttcaccactataccaccaatactg

SEQ ID NO: 699884 - DNA, 33 bp, Homo sapien
gcagctatgttcaccattataccaccaatactg

SEQ ID NO: 699885 - DNA, 33 bp, Homo sapien
cataactaaaagcacccatcacagtttataggc

SEQ ID NO: 699886 - DNA, 33 bp, Homo sapien
cataactaaaagcacctatcacagtttataggc

SEQ ID NO: 699887 - DNA, 33 bp, Homo sapien
gggagggggtgaagacagagaagacttacatag

SEQ ID NO: 699888 - DNA, 33 bp, Homo sapien
gggagggggtgaagacggagaagacttacatag

SEQ ID NO: 699889 - DNA, 33 bp, Homo sapien
agaagtgaacaaagtacagctgatgtagagcaa

SEQ ID NO: 699890 - DNA, 33 bp, Homo sapien
agaagtgaacaaagtatagctgatgtagagcaa

SEQ ID NO: 699891 - DNA, 33 bp, Homo sapien
atgtgctcaggataatcacggaggataagttcc

SEQ ID NO: 699892 - DNA, 33 bp, Homo sapien
atgtgctcaggataattacggaggataagttcc

SEQ ID NO: 699893 - DNA, 33 bp, Homo sapien
gacagttgccttatacagagggctcattaaaca

SEQ ID NO: 699894 - DNA, 33 bp, Homo sapien
gacagttgccttatacggagggctcattaaaca

SEQ ID NO: 699895 - DNA, 33 bp, Homo sapien
ttgtttagggttaccacgctgatcaaatcaaac

SEQ ID NO: 699896 - DNA, 33 bp, Homo sapien
ttgtttagggttaccatgctgatcaaatcaaac

SEQ ID NO: 699897 - DNA, 33 bp, Homo sapien
ttattatcttcagaaaatacagatgacagtccc

SEQ ID NO: 699898 - DNA, 33 bp, Homo sapien
ttattatcttcagaaagtacagatgacagtccc

SEQ ID NO: 699899 - DNA, 33 bp, Homo sapien
gatcatacccaattcacaatttgaaacctgtct

SEQ ID NO: 699900 - DNA, 33 bp, Homo sapien
gatcatacccaattcagaatttgaaacctgtct

SEQ ID NO: 699901 - DNA, 33 bp, Homo sapien
gggtctgtgacttccccgctcctcggagcttca

SEQ ID NO: 699902 - DNA, 33 bp, Homo sapien
gggtctgtgacttcccggctcctcggagcttca

SEQ ID NO: 699903 - DNA, 33 bp, Homo sapien
tgccacgaatacagagaccactaacaagagggc

SEQ ID NO: 699904 - DNA, 33 bp, Homo sapien
tgccacgaatacagagtccactaacaagagggc

SEQ ID NO: 699905 - DNA, 33 bp, Homo sapien
cctgtctgttctttaccgcctttcagtactcct

SEQ ID NO: 699906 - DNA, 33 bp, Homo sapien
cctgtctgttctttactgcctttcagtactcct

SEQ ID NO: 699907 - DNA, 33 bp, Homo sapien
tggcaagagctgtggcgagtgactcctcatgta

SEQ ID NO: 699908 - DNA, 33 bp, Homo sapien
tggcaagagctgtggctagtgactcctcatgta

SEQ ID NO: 699909 - DNA, 33 bp, Homo sapien
attatagcttgagaataacaaggaaagcaccaa

SEQ ID NO: 699910 - DNA, 33 bp, Homo sapien
attatagcttgagaatgacaaggaaagcaccaa

SEQ ID NO: 699911 - DNA, 33 bp, Homo sapien
gccgctgaatggtccacgaaattggtaagtctg

SEQ ID NO: 699912 - DNA, 33 bp, Homo sapien
gccgctgaatggtccatgaaattggtaagtctg

SEQ ID NO: 699913 - DNA, 33 bp, Homo sapien
cttccttcttcaacaacggcatttccctttacc

SEQ ID NO: 699914 - DNA, 33 bp, Homo sapien
cttccttcttcaacaatggcatttccctttacc

SEQ ID NO: 699915 - DNA, 33 bp, Homo sapien
agaacatggaaagaaaggaatggtatagaaaag

SEQ ID NO: 699916 - DNA, 33 bp, Homo sapien
agaacatggaaagaaatgaatggtatagaaaag

SEQ ID NO: 699917 - DNA, 33 bp, Homo sapien
tgctgatatgtgttgacggcatttctctcagcc

SEQ ID NO: 699918 - DNA, 33 bp, Homo sapien
tgctgatatgtgttgatggcatttctctcagcc

SEQ ID NO: 699919 - DNA, 33 bp, Homo sapien
ttgacaatgacctcagacagaagatccaatgtg

SEQ ID NO: 699920 - DNA, 33 bp, Homo sapien
ttgacaatgacctcaggcagaagatccaatgtg

SEQ ID NO: 699921 - DNA, 33 bp, Homo sapien
tgacaggacaggacaccgtctctaaaatctttt

SEQ ID NO: 699922 - DNA, 33 bp, Homo sapien
tgacaggacaggacacggtctctaaaatctttt

SEQ ID NO: 699923 - DNA, 33 bp, Homo sapien
aattaaagactccatcaaaaggactgctccata

SEQ ID NO: 699924 - DNA, 33 bp, Homo sapien
aattaaagactccatcgaaaggactgctccata

SEQ ID NO: 699925 - DNA, 33 bp, Homo sapien
tgctctctggtactaacagaagagtaagatctc

SEQ ID NO: 699926 - DNA, 33 bp, Homo sapien
tgctctctggtactaatagaagagtaagatctc

SEQ ID NO: 699927 - DNA, 33 bp, Homo sapien
caattctagtctacaactgacaagatcgcacaa

SEQ ID NO: 699928 - DNA, 33 bp, Homo sapien
caattctagtctacaattgacaagatcgcacaa

SEQ ID NO: 699929 - DNA, 33 bp, Homo sapien
ttgcctgggttaatagcagtctttagggctgca

SEQ ID NO: 699930 - DNA, 33 bp, Homo sapien
ttgcctgggttaatagtagtctttagggctgca

SEQ ID NO: 699931 - DNA, 33 bp, Homo sapien
gatttctataaaagacatagatcacctagaaca

SEQ ID NO: 699932 - DNA, 33 bp, Homo sapien
gatttctataaaagacgtagatcacctagaaca

SEQ ID NO: 699933 - DNA, 33 bp, Homo sapien
agctaacgtgcagggacctaattcattcaagct

SEQ ID NO: 699934 - DNA, 33 bp, Homo sapien
agctaacgtgcagggatctaattcattcaagct

SEQ ID NO: 699935 - DNA, 33 bp, Homo sapien
caccataatcagggctaagagaactgtgaataa

SEQ ID NO: 699936 - DNA, 33 bp, Homo sapien
caccataatcagggcttagagaactgtgaataa

SEQ ID NO: 699937 - DNA, 33 bp, Homo sapien
ttccgggggcagggacagacctaacttaaaagg

SEQ ID NO: 699938 - DNA, 33 bp, Homo sapien
ttccgggggcagggacggacctaacttaaaagg

SEQ ID NO: 699939 - DNA, 33 bp, Homo sapien
gttcaaaaggagtttaaaaacgattcagcgtcc

SEQ ID NO: 699940 - DNA, 33 bp, Homo sapien
gttcaaaaggagtttataaacgattcagcgtcc

SEQ ID NO: 699941 - DNA, 33 bp, Homo sapien
acaatgagagggaccccgaaacgagcagccctc

SEQ ID NO: 699942 - DNA, 33 bp, Homo sapien
acaatgagagggaccctgaaacgagcagccctc

SEQ ID NO: 699943 - DNA, 33 bp, Homo sapien
tagagtgcacctctcacggttgaagattaggtt

SEQ ID NO: 699944 - DNA, 33 bp, Homo sapien
tagagtgcacctctcatggttgaagattaggtt

SEQ ID NO: 699945 - DNA, 33 bp, Homo sapien
atcagtcactgtgtaacaaatgaccccaaactg

SEQ ID NO: 699946 - DNA, 33 bp, Homo sapien
atcagtcactgtgtaataaatgaccccaaactg

SEQ ID NO: 699947 - DNA, 33 bp, Homo sapien
gggaagacagtggaaacaccctcttagatttca

SEQ ID NO: 699948 - DNA, 33 bp, Homo sapien
gggaagacagtggaaagaccctcttagatttca

SEQ ID NO: 699949 - DNA, 33 bp, Homo sapien
tagttttcagttgtccagcttataacaaccggg

SEQ ID NO: 699950 - DNA, 33 bp, Homo sapien
tagttttcagttgtccggcttataacaaccggg

SEQ ID NO: 699951 - DNA, 33 bp, Homo sapien
ctcagcaatcaatcaaaagtttaagagatctta

SEQ ID NO: 699952 - DNA, 33 bp, Homo sapien
ctcagcaatcaatcaagagtttaagagatctta

SEQ ID NO: 699953 - DNA, 33 bp, Homo sapien
agaaaatatacaggtacgaaataatgagtcagt

SEQ ID NO: 699954 - DNA, 33 bp, Homo sapien
agaaaatatacaggtatgaaataatgagtcagt

SEQ ID NO: 699955 - DNA, 33 bp, Homo sapien
agcttctgagtactaacagatcttaaacattca

SEQ ID NO: 699956 - DNA, 33 bp, Homo sapien
agcttctgagtactaatagatcttaaacattca

SEQ ID NO: 699957 - DNA, 33 bp, Homo sapien
ttctggttctaaggtaccatctggggcccaatc

SEQ ID NO: 699958 - DNA, 33 bp, Homo sapien
ttctggttctaaggtatcatctggggcccaatc

SEQ ID NO: 699959 - DNA, 33 bp, Homo sapien
atacagagggaaatcccgagataaagttactgc

SEQ ID NO: 699960 - DNA, 33 bp, Homo sapien
atacagagggaaatcctgagataaagttactgc

SEQ ID NO: 699961 - DNA, 33 bp, Homo sapien
acgtaacaaaccccagcactcacattgtgatca

SEQ ID NO: 699962 - DNA, 33 bp, Homo sapien
acgtaacaaaccccagtactcacattgtgatca

SEQ ID NO: 699963 - DNA, 33 bp, Homo sapien
ttcagagaaaaaaatacaagctgccaaagttta

SEQ ID NO: 699964 - DNA, 33 bp, Homo sapien
ttcagagaaaaaaatagaagctgccaaagttta

SEQ ID NO: 699965 - DNA, 33 bp, Homo sapien
ctagcaagtcataaagccaaataatacagaact

SEQ ID NO: 699966 - DNA, 33 bp, Homo sapien
ctagcaagtcataaagtcaaataatacagaact

SEQ ID NO: 699967 - DNA, 33 bp, Homo sapien
tttagagtcttgcagacatttcctcatcccagc

SEQ ID NO: 699968 - DNA, 33 bp, Homo sapien
tttagagtcttgcagatatttcctcatcccagc

SEQ ID NO: 699969 - DNA, 33 bp, Homo sapien
caggcttttaggaccagtaggcaagatttccca

SEQ ID NO: 699970 - DNA, 33 bp, Homo sapien
caggcttttaggaccattaggcaagatttccca

SEQ ID NO: 699971 - DNA, 33 bp, Homo sapien
aagtaagaagtagcaaaagaagccaggagtggg

SEQ ID NO: 699972 - DNA, 33 bp, Homo sapien
aagtaagaagtagcaagagaagccaggagtggg

SEQ ID NO: 699973 - DNA, 33 bp, Homo sapien
gagaaccagtggcatacagaataactgtagtat

SEQ ID NO: 699974 - DNA, 33 bp, Homo sapien
gagaaccagtggcatagagaataactgtagtat

SEQ ID NO: 699975 - DNA, 33 bp, Homo sapien
agaattagagacacaacctgtgtttgaagtaaa

SEQ ID NO: 699976 - DNA, 33 bp, Homo sapien
agaattagagacacaatctgtgtttgaagtaaa

SEQ ID NO: 699977 - DNA, 33 bp, Homo sapien
cagaaagtgtttggcactgaaaagaagaaccac

SEQ ID NO: 699978 - DNA, 33 bp, Homo sapien
cagaaagtgtttggcattgaaaagaagaaccac

SEQ ID NO: 699979 - DNA, 33 bp, Homo sapien
gaaacagatgtccttcaacttggtttcggttat

SEQ ID NO: 699980 - DNA, 33 bp, Homo sapien
gaaacagatgtccttcgacttggtttcggttat

SEQ ID NO: 699981 - DNA, 33 bp, Homo sapien
caaatctacttgtcaacttcccacccaactgga

SEQ ID NO: 699982 - DNA, 33 bp, Homo sapien
caaatctacttgtcaagttcccacccaactgga

SEQ ID NO: 699983 - DNA, 33 bp, Homo sapien
ttcagtttctcagataccaagaagtatgtcttg

SEQ ID NO: 699984 - DNA, 33 bp, Homo sapien
ttcagtttctcagatatcaagaagtatgtcttg

SEQ ID NO: 699985 - DNA, 33 bp, Homo sapien
gtaagtttggaatccacagggctaaatattact

SEQ ID NO: 699986 - DNA, 33 bp, Homo sapien
gtaagtttggaatccatagggctaaatattact

SEQ ID NO: 699987 - DNA, 33 bp, Homo sapien
tcccaagaacaaacacaaggaccaacacaaagc

SEQ ID NO: 699988 - DNA, 33 bp, Homo sapien
tcccaagaacaaacacgaggaccaacacaaagc

SEQ ID NO: 699989 - DNA, 33 bp, Homo sapien
taccccaaaaaccaacagtaaccaggtgtatgg

SEQ ID NO: 699990 - DNA, 33 bp, Homo sapien
taccccaaaaaccaactgtaaccaggtgtatgg

SEQ ID NO: 699991 - DNA, 33 bp, Homo sapien
atcatatccatatccagtccatgatgcactgaa

SEQ ID NO: 699992 - DNA, 33 bp, Homo sapien
atcatatccatatccattccatgatgcactgaa

SEQ ID NO: 699993 - DNA, 33 bp, Homo sapien
tactattgataatatagcagacctatttctatg

SEQ ID NO: 699994 - DNA, 33 bp, Homo sapien
tactattgataatatatcagacctatttctatg

SEQ ID NO: 699995 - DNA, 33 bp, Homo sapien
gttgcttcgactcagcacacaagttaatttaat

SEQ ID NO: 699996 - DNA, 33 bp, Homo sapien
gttgcttcgactcagcgcacaagttaatttaat

SEQ ID NO: 699997 - DNA, 33 bp, Homo sapien
caaataaattggaagcaagattaatgtgcaaaa

SEQ ID NO: 699998 - DNA, 33 bp, Homo sapien
caaataaattggaagctagattaatgtgcaaaa

SEQ ID NO: 699999 - DNA, 33 bp, Homo sapien
gagttcttataaggaactaggatatgcaaaact

SEQ ID NO: 700000 - DNA, 33 bp, Homo sapien
gagttcttataaggaagtaggatatgcaaaact

SEQ ID NO: 700001 - DNA, 33 bp, Homo sapien
aaataaatctcaaaacaagctatgacataatcc

SEQ ID NO: 700002 - DNA, 33 bp, Homo sapien
aaataaatctcaaaaccagctatgacataatcc

SEQ ID NO: 700003 - DNA, 33 bp, Homo sapien
ttttagctttgtcaacggatcacttctaaaagc

SEQ ID NO: 700004 - DNA, 33 bp, Homo sapien
ttttagctttgtcaactgatcacttctaaaagc

SEQ ID NO: 700005 - DNA, 33 bp, Homo sapien
cctgttcccctcatgacagcataagccattgct

SEQ ID NO: 700006 - DNA, 33 bp, Homo sapien
cctgttcccctcatgatagcataagccattgct

SEQ ID NO: 700007 - DNA, 33 bp, Homo sapien
cacttcatcaatggccagcattattaccatctt

SEQ ID NO: 700008 - DNA, 33 bp, Homo sapien
cacttcatcaatggccggcattattaccatctt

SEQ ID NO: 700009 - DNA, 33 bp, Homo sapien
attggaaatggatcaaagcactctgaacatatt

SEQ ID NO: 700010 - DNA, 33 bp, Homo sapien
attggaaatggatcaaggcactctgaacatatt

SEQ ID NO: 700011 - DNA, 33 bp, Homo sapien
tgcacatacgtgtctcactgtcatacatcctaa

SEQ ID NO: 700012 - DNA, 33 bp, Homo sapien
tgcacatacgtgtctcgctgtcatacatcctaa

SEQ ID NO: 700013 - DNA, 33 bp, Homo sapien
ctcttttcatgaatgcacttattttttaaccat

SEQ ID NO: 700014 - DNA, 33 bp, Homo sapien
ctcttttcatgaatgcgcttattttttaaccat

SEQ ID NO: 700015 - DNA, 33 bp, Homo sapien
attatcagcctctcacaccaaaacaaatttagc

SEQ ID NO: 700016 - DNA, 33 bp, Homo sapien
attatcagcctctcaccccaaaacaaatttagc

SEQ ID NO: 700017 - DNA, 33 bp, Homo sapien
ggagaactgtttaagcagaatccttgcccttct

SEQ ID NO: 700018 - DNA, 33 bp, Homo sapien
ggagaactgtttaagcggaatccttgcccttct

SEQ ID NO: 700019 - DNA, 33 bp, Homo sapien
gagaaccgtggaagtacatgaacataacagggg

SEQ ID NO: 700020 - DNA, 33 bp, Homo sapien
gagaaccgtggaagtatatgaacataacagggg

SEQ ID NO: 700021 - DNA, 33 bp, Homo sapien
tgtcagttttcataaaataaagcagataacttt

SEQ ID NO: 700022 - DNA, 33 bp, Homo sapien
tgtcagttttcataaactaaagcagataacttt

SEQ ID NO: 700023 - DNA, 33 bp, Homo sapien
cctgagctcatgattccagccttctggagtgtt

SEQ ID NO: 700024 - DNA, 33 bp, Homo sapien
cctgagctcatgattcgagccttctggagtgtt

SEQ ID NO: 700025 - DNA, 33 bp, Homo sapien
aaagcctccaaagtaacgcgatggcatttatat

SEQ ID NO: 700026 - DNA, 33 bp, Homo sapien
aaagcctccaaagtaaggcgatggcatttatat

SEQ ID NO: 700027 - DNA, 33 bp, Homo sapien
gtgacagcagaaggaactgggaagcatgagcac

SEQ ID NO: 700028 - DNA, 33 bp, Homo sapien
gtgacagcagaaggaattgggaagcatgagcac

SEQ ID NO: 700029 - DNA, 33 bp, Homo sapien
tgagacttggcagcagaatatatggacaaaaat

SEQ ID NO: 700030 - DNA, 33 bp, Homo sapien
tgagacttggcagcagtatatatggacaaaaat

SEQ ID NO: 700031 - DNA, 33 bp, Homo sapien
tggattaaacaacacaaggtcagaaagagcctg

SEQ ID NO: 700032 - DNA, 33 bp, Homo sapien
tggattaaacaacacagggtcagaaagagcctg

SEQ ID NO: 700033 - DNA, 33 bp, Homo sapien
gtctattttcctctccaagtggaacactgcaaa

SEQ ID NO: 700034 - DNA, 33 bp, Homo sapien
gtctattttcctctcccagtggaacactgcaaa

SEQ ID NO: 700035 - DNA, 33 bp, Homo sapien
cttcattcttggaccaactatcagaaaatttac

SEQ ID NO: 700036 - DNA, 33 bp, Homo sapien
cttcattcttggaccagctatcagaaaatttac

SEQ ID NO: 700037 - DNA, 33 bp, Homo sapien
ttactattcatagtaactgccaatacctcgacc

SEQ ID NO: 700038 - DNA, 33 bp, Homo sapien
ttactattcatagtaagtgccaatacctcgacc

SEQ ID NO: 700039 - DNA, 33 bp, Homo sapien
cgatgaccgtctgtacaccagatggactgcaca

SEQ ID NO: 700040 - DNA, 33 bp, Homo sapien
cgatgaccgtctgtacgccagatggactgcaca

SEQ ID NO: 700041 - DNA, 33 bp, Homo sapien
ggaaaactagatggaaaatggtactgaagctgg

SEQ ID NO: 700042 - DNA, 33 bp, Homo sapien
ggaaaactagatggaagatggtactgaagctgg

SEQ ID NO: 700043 - DNA, 33 bp, Homo sapien
ataaacctcactagcccgaaaatgatgcccaaa

SEQ ID NO: 700044 - DNA, 33 bp, Homo sapien
ataaacctcactagcctgaaaatgatgcccaaa

SEQ ID NO: 700045 - DNA, 33 bp, Homo sapien
cctaaatttatagaccaggaggcaacgcagtgt

SEQ ID NO: 700046 - DNA, 33 bp, Homo sapien
cctaaatttatagacctggaggcaacgcagtgt

SEQ ID NO: 700047 - DNA, 33 bp, Homo sapien
accctttcctaagcacccaggtttgggaagata

SEQ ID NO: 700048 - DNA, 33 bp, Homo sapien
accctttcctaagcactcaggtttgggaagata

SEQ ID NO: 700049 - DNA, 33 bp, Homo sapien
tgggttagaatgatgacgagtcagtgcttaggc

SEQ ID NO: 700050 - DNA, 33 bp, Homo sapien
tgggttagaatgatgatgagtcagtgcttaggc

SEQ ID NO: 700051 - DNA, 33 bp, Homo sapien
agaacatgagtttagcgcttcaaccaagtgggt

SEQ ID NO: 700052 - DNA, 33 bp, Homo sapien
agaacatgagtttagctcttcaaccaagtgggt

SEQ ID NO: 700053 - DNA, 33 bp, Homo sapien
agatgttcagataggacctcagcccacactaac

SEQ ID NO: 700054 - DNA, 33 bp, Homo sapien
agatgttcagataggatctcagcccacactaac

SEQ ID NO: 700055 - DNA, 33 bp, Homo sapien
aattcatctccttgcaactatagaattcatggc

SEQ ID NO: 700056 - DNA, 33 bp, Homo sapien
aattcatctccttgcagctatagaattcatggc

SEQ ID NO: 700057 - DNA, 33 bp, Homo sapien
ctacaaaaatctgaaacgatggtggtgattaca

SEQ ID NO: 700058 - DNA, 33 bp, Homo sapien
ctacaaaaatctgaaatgatggtggtgattaca

SEQ ID NO: 700059 - DNA, 33 bp, Homo sapien
taaagctttttctgcactgatgataaaagttca

SEQ ID NO: 700060 - DNA, 33 bp, Homo sapien
taaagctttttctgcagtgatgataaaagttca

SEQ ID NO: 700061 - DNA, 33 bp, Homo sapien
aagccaggcctgactaactgaaaaaggaagaac

SEQ ID NO: 700062 - DNA, 33 bp, Homo sapien
aagccaggcctgactagctgaaaaaggaagaac

SEQ ID NO: 700063 - DNA, 33 bp, Homo sapien
ctgccatataagtagccgccacttcaatgctgg

SEQ ID NO: 700064 - DNA, 33 bp, Homo sapien
ctgccatataagtagcggccacttcaatgctgg

SEQ ID NO: 700065 - DNA, 33 bp, Homo sapien
taagcctaactgtatccgagaattacaattagc

SEQ ID NO: 700066 - DNA, 33 bp, Homo sapien
taagcctaactgtatctgagaattacaattagc

SEQ ID NO: 700067 - DNA, 33 bp, Homo sapien
atggcaaagaagaaacagaaagcgctccaagag

SEQ ID NO: 700068 - DNA, 33 bp, Homo sapien
atggcaaagaagaaacggaaagcgctccaagag

SEQ ID NO: 700069 - DNA, 33 bp, Homo sapien
agatcagaggtcagaaagttattctgtgccctt

SEQ ID NO: 700070 - DNA, 33 bp, Homo sapien
agatcagaggtcagaaggttattctgtgccctt

SEQ ID NO: 700071 - DNA, 33 bp, Homo sapien
aagcaagctggaaataaaaactgccggtgaaat

SEQ ID NO: 700072 - DNA, 33 bp, Homo sapien
aagcaagctggaaatagaaactgccggtgaaat

SEQ ID NO: 700073 - DNA, 33 bp, Homo sapien
ataaccagagtccaatcaaggaagaggtctctt

SEQ ID NO: 700074 - DNA, 33 bp, Homo sapien
ataaccagagtccaatgaaggaagaggtctctt

SEQ ID NO: 700075 - DNA, 33 bp, Homo sapien
caatgtatataggctagctgtaatcaagggaaa

SEQ ID NO: 700076 - DNA, 33 bp, Homo sapien
caatgtatataggctatctgtaatcaagggaaa

SEQ ID NO: 700077 - DNA, 33 bp, Homo sapien
tcatgtatcaattctgaaagaacataatattaa

SEQ ID NO: 700078 - DNA, 33 bp, Homo sapien
tcatgtatcaattctggaagaacataatattaa

SEQ ID NO: 700079 - DNA, 33 bp, Homo sapien
tgccagcctccactacaaggaaatgctatgagg

SEQ ID NO: 700080 - DNA, 33 bp, Homo sapien
tgccagcctccactacgaggaaatgctatgagg

SEQ ID NO: 700081 - DNA, 33 bp, Homo sapien
atattattcataaaaaatccttctgaggataaa

SEQ ID NO: 700082 - DNA, 33 bp, Homo sapien
atattattcataaaaattccttctgaggataaa

SEQ ID NO: 700083 - DNA, 33 bp, Homo sapien
gcctgctgacaaagaaacattattataaacaac

SEQ ID NO: 700084 - DNA, 33 bp, Homo sapien
gcctgctgacaaagaagcattattataaacaac

SEQ ID NO: 700085 - DNA, 33 bp, Homo sapien
taaatttaaatgttaaatgtttgaactgaatga

SEQ ID NO: 700086 - DNA, 33 bp, Homo sapien
taaatttaaatgttaactgtttgaactgaatga

SEQ ID NO: 700087 - DNA, 33 bp, Homo sapien
tacaaaatgaggcccaagtttcatttgtccaaa

SEQ ID NO: 700088 - DNA, 33 bp, Homo sapien
tacaaaatgaggcccatgtttcatttgtccaaa

SEQ ID NO: 700089 - DNA, 33 bp, Homo sapien
caaaatgccaaacttaacaggcagagccaaaac

SEQ ID NO: 700090 - DNA, 33 bp, Homo sapien
caaaatgccaaacttatcaggcagagccaaaac

SEQ ID NO: 700091 - DNA, 33 bp, Homo sapien
aaataaaatgaacttacgtagaacagcactaaa

SEQ ID NO: 700092 - DNA, 33 bp, Homo sapien
aaataaaatgaacttatgtagaacagcactaaa

SEQ ID NO: 700093 - DNA, 33 bp, Homo sapien
tcccttacctagaaggaacccacagaaagccca

SEQ ID NO: 700094 - DNA, 33 bp, Homo sapien
tcccttacctagaagggacccacagaaagccca

SEQ ID NO: 700095 - DNA, 33 bp, Homo sapien
aacatttgaaaagaccccagggagtttgcatta

SEQ ID NO: 700096 - DNA, 33 bp, Homo sapien
aacatttgaaaagaccgcagggagtttgcatta

SEQ ID NO: 700097 - DNA, 33 bp, Homo sapien
gagacttaacatgaggcatatggaagatgaggc

SEQ ID NO: 700098 - DNA, 33 bp, Homo sapien
gagacttaacatgaggtatatggaagatgaggc

SEQ ID NO: 700099 - DNA, 33 bp, Homo sapien
agcccctggtctgtgaacagcaagaacctacag

SEQ ID NO: 700100 - DNA, 33 bp, Homo sapien
agcccctggtctgtgatcagcaagaacctacag

SEQ ID NO: 700101 - DNA, 33 bp, Homo sapien
ggtccggagttcttgacagcaaaaaaagtgatg

SEQ ID NO: 700102 - DNA, 33 bp, Homo sapien
ggtccggagttcttgatagcaaaaaaagtgatg

SEQ ID NO: 700103 - DNA, 33 bp, Homo sapien
ttggctctctgaagtacacacgtattctgcctt

SEQ ID NO: 700104 - DNA, 33 bp, Homo sapien
ttggctctctgaagtatacacgtattctgcctt

SEQ ID NO: 700105 - DNA, 33 bp, Homo sapien
tgggacttgcatctggaactatgacagcaggaa

SEQ ID NO: 700106 - DNA, 33 bp, Homo sapien
tgggacttgcatctgggactatgacagcaggaa

SEQ ID NO: 700107 - DNA, 33 bp, Homo sapien
caaactaattgagcgaagactcatgtatcacta

SEQ ID NO: 700108 - DNA, 33 bp, Homo sapien
caaactaattgagcgaggactcatgtatcacta

SEQ ID NO: 700109 - DNA, 33 bp, Homo sapien
actaactttctctatcacaacattctcaagtta

SEQ ID NO: 700110 - DNA, 33 bp, Homo sapien
actaactttctctatcgcaacattctcaagtta

SEQ ID NO: 700111 - DNA, 33 bp, Homo sapien
cctcttccctgacacaatgtccaagttaccatc

SEQ ID NO: 700112 - DNA, 33 bp, Homo sapien
cctcttccctgacacagtgtccaagttaccatc

SEQ ID NO: 700113 - DNA, 33 bp, Homo sapien
ttagaaatgtaggaagaattttgctgtcttttt

SEQ ID NO: 700114 - DNA, 33 bp, Homo sapien
ttagaaatgtaggaagcattttgctgtcttttt

SEQ ID NO: 700115 - DNA, 33 bp, Homo sapien
cctcagacattttcaaacgttatttatttattt

SEQ ID NO: 700116 - DNA, 33 bp, Homo sapien
cctcagacattttcaatcgttatttatttattt

SEQ ID NO: 700117 - DNA, 33 bp, Homo sapien
acgtgcaagtttttagcaaggataccacgtagg

SEQ ID NO: 700118 - DNA, 33 bp, Homo sapien
acgtgcaagtttttagtaaggataccacgtagg

SEQ ID NO: 700119 - DNA, 33 bp, Homo sapien
cttatggttttaccaaataacatcctatgagct

SEQ ID NO: 700120 - DNA, 33 bp, Homo sapien
cttatggttttaccaactaacatcctatgagct

SEQ ID NO: 700121 - DNA, 33 bp, Homo sapien
tggaaggagtagagacaaggattcaaactccag

SEQ ID NO: 700122 - DNA, 33 bp, Homo sapien
tggaaggagtagagaccaggattcaaactccag

SEQ ID NO: 700123 - DNA, 33 bp, Homo sapien
tcaattcaagggattcgcaataaaaacatctgt

SEQ ID NO: 700124 - DNA, 33 bp, Homo sapien
tcaattcaagggattctcaataaaaacatctgt

SEQ ID NO: 700125 - DNA, 33 bp, Homo sapien
gctaataagcaacggaaccagaatttaaactag

SEQ ID NO: 700126 - DNA, 33 bp, Homo sapien
gctaataagcaacggagccagaatttaaactag

SEQ ID NO: 700127 - DNA, 33 bp, Homo sapien
gaagcctcagcccgaaaagtctctctctaacaa

SEQ ID NO: 700128 - DNA, 33 bp, Homo sapien
gaagcctcagcccgaacagtctctctctaacaa

SEQ ID NO: 700129 - DNA, 33 bp, Homo sapien
aaattacaggaacactaaacaaggaggctgcag

SEQ ID NO: 700130 - DNA, 33 bp, Homo sapien
aaattacaggaacactgaacaaggaggctgcag

SEQ ID NO: 700131 - DNA, 33 bp, Homo sapien
ccataccaagaaaaaacagagcaagtgaagcct

SEQ ID NO: 700132 - DNA, 33 bp, Homo sapien
ccataccaagaaaaaagagagcaagtgaagcct

SEQ ID NO: 700133 - DNA, 33 bp, Homo sapien
tcatgctttgccgagacagaaataaagagatta

SEQ ID NO: 700134 - DNA, 33 bp, Homo sapien
tcatgctttgccgagagagaaataaagagatta

SEQ ID NO: 700135 - DNA, 33 bp, Homo sapien
cgctgagctgcaggtaactgaggtcgatggata

SEQ ID NO: 700136 - DNA, 33 bp, Homo sapien
cgctgagctgcaggtagctgaggtcgatggata

SEQ ID NO: 700137 - DNA, 33 bp, Homo sapien
gaccactccatatttaaaattgaaactctccca

SEQ ID NO: 700138 - DNA, 33 bp, Homo sapien
gaccactccatatttataattgaaactctccca

SEQ ID NO: 700139 - DNA, 33 bp, Homo sapien
tgccctggggtttcacggcttctgccaaggatt

SEQ ID NO: 700140 - DNA, 33 bp, Homo sapien
tgccctggggtttcactgcttctgccaaggatt

SEQ ID NO: 700141 - DNA, 33 bp, Homo sapien
agccaacagactagcaacattgtcaaatgtctt

SEQ ID NO: 700142 - DNA, 33 bp, Homo sapien
agccaacagactagcagcattgtcaaatgtctt

SEQ ID NO: 700143 - DNA, 33 bp, Homo sapien
ttatttcagcagccagcatagattgcaatggag

SEQ ID NO: 700144 - DNA, 33 bp, Homo sapien
ttatttcagcagccaggatagattgcaatggag

SEQ ID NO: 700145 - DNA, 33 bp, Homo sapien
gccttgtatcacaactaaaaaaaaggacgagag

SEQ ID NO: 700146 - DNA, 33 bp, Homo sapien
gccttgtatcacaactgaaaaaaaggacgagag

SEQ ID NO: 700147 - DNA, 33 bp, Homo sapien
ctagctgctttgccaacgttctgagcatcagga

SEQ ID NO: 700148 - DNA, 33 bp, Homo sapien
ctagctgctttgccaatgttctgagcatcagga

SEQ ID NO: 700149 - DNA, 33 bp, Homo sapien
accaagatgcaaagaaagctcagagtttaaaat

SEQ ID NO: 700150 - DNA, 33 bp, Homo sapien
accaagatgcaaagaaggctcagagtttaaaat

SEQ ID NO: 700151 - DNA, 33 bp, Homo sapien
ccagaagcccgcatctaaaaaaatataccagat

SEQ ID NO: 700152 - DNA, 33 bp, Homo sapien
ccagaagcccgcatctgaaaaaatataccagat

SEQ ID NO: 700153 - DNA, 33 bp, Homo sapien
tattgctttctaaaaaaggctgttgttcaccac

SEQ ID NO: 700154 - DNA, 33 bp, Homo sapien
tattgctttctaaaaatggctgttgttcaccac

SEQ ID NO: 700155 - DNA, 33 bp, Homo sapien
ctggaacctcctgagtcacatcaaagcagtgaa

SEQ ID NO: 700156 - DNA, 33 bp, Homo sapien
ctggaacctcctgagtgacatcaaagcagtgaa

SEQ ID NO: 700157 - DNA, 33 bp, Homo sapien
aaaatgcatgagaagaacagtagattgagaatc

SEQ ID NO: 700158 - DNA, 33 bp, Homo sapien
aaaatgcatgagaagagcagtagattgagaatc

SEQ ID NO: 700159 - DNA, 33 bp, Homo sapien
aaggtttctttaatccaaactggctttatgtga

SEQ ID NO: 700160 - DNA, 33 bp, Homo sapien
aaggtttctttaatcccaactggctttatgtga

SEQ ID NO: 700161 - DNA, 33 bp, Homo sapien
tgttacactgacctcaatccaatttacataatt

SEQ ID NO: 700162 - DNA, 33 bp, Homo sapien
tgttacactgacctcagtccaatttacataatt

SEQ ID NO: 700163 - DNA, 33 bp, Homo sapien
aatcatgcaacggtaacgaagatcagcatgaat

SEQ ID NO: 700164 - DNA, 33 bp, Homo sapien
aatcatgcaacggtaatgaagatcagcatgaat

SEQ ID NO: 700165 - DNA, 33 bp, Homo sapien
agataattattacctaccttagtggtcaaaatg

SEQ ID NO: 700166 - DNA, 33 bp, Homo sapien
agataattattacctatcttagtggtcaaaatg

SEQ ID NO: 700167 - DNA, 33 bp, Homo sapien
catccacctcgttcagcactacactatcagcaa

SEQ ID NO: 700168 - DNA, 33 bp, Homo sapien
catccacctcgttcaggactacactatcagcaa

SEQ ID NO: 700169 - DNA, 33 bp, Homo sapien
caaggaaggacttttaaactgtggagtaatccc

SEQ ID NO: 700170 - DNA, 33 bp, Homo sapien
caaggaaggacttttagactgtggagtaatccc

SEQ ID NO: 700171 - DNA, 33 bp, Homo sapien
acatcatggaaaatgaagaactcacagttataa

SEQ ID NO: 700172 - DNA, 33 bp, Homo sapien
acatcatggaaaatgacgaactcacagttataa

SEQ ID NO: 700173 - DNA, 33 bp, Homo sapien
gcaaatgctaagtaaaccgttgttacactgtat

SEQ ID NO: 700174 - DNA, 33 bp, Homo sapien
gcaaatgctaagtaaatcgttgttacactgtat

SEQ ID NO: 700175 - DNA, 33 bp, Homo sapien
aggagaggcacttaaccgagtcttgagtggtta

SEQ ID NO: 700176 - DNA, 33 bp, Homo sapien
aggagaggcacttaactgagtcttgagtggtta

SEQ ID NO: 700177 - DNA, 33 bp, Homo sapien
tgattaagttcaataacgttgagcattgtagaa

SEQ ID NO: 700178 - DNA, 33 bp, Homo sapien
tgattaagttcaataatgttgagcattgtagaa

SEQ ID NO: 700179 - DNA, 33 bp, Homo sapien
agctaaattgtaagaaatggatgtgtaggttct

SEQ ID NO: 700180 - DNA, 33 bp, Homo sapien
agctaaattgtaagaagtggatgtgtaggttct

SEQ ID NO: 700181 - DNA, 33 bp, Homo sapien
ggtaaattcttcaaaacctttccatcacacaag

SEQ ID NO: 700182 - DNA, 33 bp, Homo sapien
ggtaaattcttcaaaagctttccatcacacaag

SEQ ID NO: 700183 - DNA, 33 bp, Homo sapien
tatgcaaggaaagaacaaagtagcagtgctcaa

SEQ ID NO: 700184 - DNA, 33 bp, Homo sapien
tatgcaaggaaagaacgaagtagcagtgctcaa

SEQ ID NO: 700185 - DNA, 33 bp, Homo sapien
caaaaaaaaagcaagaccagaaagtatgtatag

SEQ ID NO: 700186 - DNA, 33 bp, Homo sapien
caaaaaaaaagcaagagcagaaagtatgtatag

SEQ ID NO: 700187 - DNA, 33 bp, Homo sapien
taagagtgtgtatgacagatataaatctcacta

SEQ ID NO: 700188 - DNA, 33 bp, Homo sapien
taagagtgtgtatgacggatataaatctcacta

SEQ ID NO: 700189 - DNA, 33 bp, Homo sapien
ctgcttttatctacctaaaacacataattttct

SEQ ID NO: 700190 - DNA, 33 bp, Homo sapien
ctgcttttatctacctgaaacacataattttct

SEQ ID NO: 700191 - DNA, 33 bp, Homo sapien
aactggtgagaaaagacggtcttctatatgtgg

SEQ ID NO: 700192 - DNA, 33 bp, Homo sapien
aactggtgagaaaagatggtcttctatatgtgg

SEQ ID NO: 700193 - DNA, 33 bp, Homo sapien
gacattgggtaaatacaatgtctccatttggcg

SEQ ID NO: 700194 - DNA, 33 bp, Homo sapien
gacattgggtaaataccatgtctccatttggcg

SEQ ID NO: 700195 - DNA, 33 bp, Homo sapien
cttttgaattccacaaacatcattttaagacta

SEQ ID NO: 700196 - DNA, 33 bp, Homo sapien
cttttgaattccacaagcatcattttaagacta

SEQ ID NO: 700197 - DNA, 33 bp, Homo sapien
agtttaatttttagaacgtgactggacataacc

SEQ ID NO: 700198 - DNA, 33 bp, Homo sapien
agtttaatttttagaatgtgactggacataacc

SEQ ID NO: 700199 - DNA, 33 bp, Homo sapien
tagttctgactacaacccaaaatagagaagaaa

SEQ ID NO: 700200 - DNA, 33 bp, Homo sapien
tagttctgactacaactcaaaatagagaagaaa

SEQ ID NO: 700201 - DNA, 33 bp, Homo sapien
aatttcattaaaataaaaaaaatgtgttgctag

SEQ ID NO: 700202 - DNA, 33 bp, Homo sapien
aatttcattaaaataagaaaaatgtgttgctag

SEQ ID NO: 700203 - DNA, 33 bp, Homo sapien
agacaaaataacagtgaaatcaaaagctgaaag

SEQ ID NO: 700204 - DNA, 33 bp, Homo sapien
agacaaaataacagtggaatcaaaagctgaaag

SEQ ID NO: 700205 - DNA, 33 bp, Homo sapien
agtcttcacagagtataaacacatttcattatt

SEQ ID NO: 700206 - DNA, 33 bp, Homo sapien
agtcttcacagagtattaacacatttcattatt

SEQ ID NO: 700207 - DNA, 33 bp, Homo sapien
ttcaaaaattatgtcaaataaagctcatgaact

SEQ ID NO: 700208 - DNA, 33 bp, Homo sapien
ttcaaaaattatgtcagataaagctcatgaact

SEQ ID NO: 700209 - DNA, 33 bp, Homo sapien
atcatatgcagacctaccttagatattatatcc

SEQ ID NO: 700210 - DNA, 33 bp, Homo sapien
atcatatgcagacctagcttagatattatatcc

SEQ ID NO: 700211 - DNA, 33 bp, Homo sapien
ttttgtgtggtgaaaacaaaatcactgcaaaac

SEQ ID NO: 700212 - DNA, 33 bp, Homo sapien
ttttgtgtggtgaaaagaaaatcactgcaaaac

SEQ ID NO: 700213 - DNA, 33 bp, Homo sapien
aaatgcccatttgtaactgaagaaactcacaga

SEQ ID NO: 700214 - DNA, 33 bp, Homo sapien
aaatgcccatttgtaattgaagaaactcacaga

SEQ ID NO: 700215 - DNA, 33 bp, Homo sapien
taagtacaagcactaagatattctactttagat

SEQ ID NO: 700216 - DNA, 33 bp, Homo sapien
taagtacaagcactaatatattctactttagat

SEQ ID NO: 700217 - DNA, 33 bp, Homo sapien
gagagagttgaaacccgcaaacattgctggtag

SEQ ID NO: 700218 - DNA, 33 bp, Homo sapien
gagagagttgaaaccctcaaacattgctggtag

SEQ ID NO: 700219 - DNA, 33 bp, Homo sapien
cttttccatccaaaatcactgtctacactgggc

SEQ ID NO: 700220 - DNA, 33 bp, Homo sapien
cttttccatccaaaattactgtctacactgggc

SEQ ID NO: 700221 - DNA, 33 bp, Homo sapien
ctattctgcctttgtacgcagaacgctgctcaa

SEQ ID NO: 700222 - DNA, 33 bp, Homo sapien
ctattctgcctttgtatgcagaacgctgctcaa

SEQ ID NO: 700223 - DNA, 33 bp, Homo sapien
aaaagctcactcactaagatcggatgctgtcat

SEQ ID NO: 700224 - DNA, 33 bp, Homo sapien
aaaagctcactcactaggatcggatgctgtcat

SEQ ID NO: 700225 - DNA, 33 bp, Homo sapien
ttggtcctgatttaaacaagaggagaccatgca

SEQ ID NO: 700226 - DNA, 33 bp, Homo sapien
ttggtcctgatttaaagaagaggagaccatgca

SEQ ID NO: 700227 - DNA, 33 bp, Homo sapien
taggtccgagacccagcagaggagttagaactg

SEQ ID NO: 700228 - DNA, 33 bp, Homo sapien
taggtccgagacccaggagaggagttagaactg

SEQ ID NO: 700229 - DNA, 33 bp, Homo sapien
tgtttctccatccacaaattctgaatgttgaga

SEQ ID NO: 700230 - DNA, 33 bp, Homo sapien
tgtttctccatccacagattctgaatgttgaga

SEQ ID NO: 700231 - DNA, 33 bp, Homo sapien
aagaaatattcaggaccctcaaacttccagaaa

SEQ ID NO: 700232 - DNA, 33 bp, Homo sapien
aagaaatattcaggactctcaaacttccagaaa

SEQ ID NO: 700233 - DNA, 33 bp, Homo sapien
tttagaaaaacagaacaatgtattcagcagtaa

SEQ ID NO: 700234 - DNA, 33 bp, Homo sapien
tttagaaaaacagaacgatgtattcagcagtaa

SEQ ID NO: 700235 - DNA, 33 bp, Homo sapien
tagaagaaaaacaccaccatagcctcatctgtt

SEQ ID NO: 700236 - DNA, 33 bp, Homo sapien
tagaagaaaaacaccagcatagcctcatctgtt

SEQ ID NO: 700237 - DNA, 33 bp, Homo sapien
caagtgcaaatacagacctagacaaatagaagt

SEQ ID NO: 700238 - DNA, 33 bp, Homo sapien
caagtgcaaatacagagctagacaaatagaagt

SEQ ID NO: 700239 - DNA, 33 bp, Homo sapien
tagcgttgttgttctcacttagtggtacataag

SEQ ID NO: 700240 - DNA, 33 bp, Homo sapien
tagcgttgttgttctctcttagtggtacataag

SEQ ID NO: 700241 - DNA, 33 bp, Homo sapien
ttttgtgaaagacaccactgtttgacctgggga

SEQ ID NO: 700242 - DNA, 33 bp, Homo sapien
ttttgtgaaagacaccgctgtttgacctgggga

SEQ ID NO: 700243 - DNA, 33 bp, Homo sapien
tgacaatactgtcatacaaaaagcaccgctgaa

SEQ ID NO: 700244 - DNA, 33 bp, Homo sapien
tgacaatactgtcatataaaaagcaccgctgaa

SEQ ID NO: 700245 - DNA, 33 bp, Homo sapien
atctggaaaacggagacaggtgcgtctagaaaa

SEQ ID NO: 700246 - DNA, 33 bp, Homo sapien
atctggaaaacggagataggtgcgtctagaaaa

SEQ ID NO: 700247 - DNA, 33 bp, Homo sapien
acaagatgcattttgaaattttgttacatagag

SEQ ID NO: 700248 - DNA, 33 bp, Homo sapien
acaagatgcattttgagattttgttacatagag

SEQ ID NO: 700249 - DNA, 33 bp, Homo sapien
tgaggtcagttggaaacttaggattataatcca

SEQ ID NO: 700250 - DNA, 33 bp, Homo sapien
tgaggtcagttggaaatttaggattataatcca

SEQ ID NO: 700251 - DNA, 33 bp, Homo sapien
atgtttaaatcaccaacaacaaggtctcacctc

SEQ ID NO: 700252 - DNA, 33 bp, Homo sapien
atgtttaaatcaccaataacaaggtctcacctc

SEQ ID NO: 700253 - DNA, 33 bp, Homo sapien
atgttagggagaacaacctgctttactcagtct

SEQ ID NO: 700254 - DNA, 33 bp, Homo sapien
atgttagggagaacaatctgctttactcagtct

SEQ ID NO: 700255 - DNA, 33 bp, Homo sapien
cctgacttcccaattcgactcttgtggcctttc

SEQ ID NO: 700256 - DNA, 33 bp, Homo sapien
cctgacttcccaattctactcttgtggcctttc

SEQ ID NO: 700257 - DNA, 33 bp, Homo sapien
tgttctggacagttacaccttatctcaagatgt

SEQ ID NO: 700258 - DNA, 33 bp, Homo sapien
tgttctggacagttactccttatctcaagatgt

SEQ ID NO: 700259 - DNA, 33 bp, Homo sapien
attcagattgaattaaaagaaagatacttgtct

SEQ ID NO: 700260 - DNA, 33 bp, Homo sapien
attcagattgaattaagagaaagatacttgtct

SEQ ID NO: 700261 - DNA, 33 bp, Homo sapien
agagacctcagaacctcaagaaaactctaggac

SEQ ID NO: 700262 - DNA, 33 bp, Homo sapien
agagacctcagaaccttaagaaaactctaggac

SEQ ID NO: 700263 - DNA, 33 bp, Homo sapien
tttgcagtgaatgagacataggtatggagtaat

SEQ ID NO: 700264 - DNA, 33 bp, Homo sapien
tttgcagtgaatgagatataggtatggagtaat

SEQ ID NO: 700265 - DNA, 33 bp, Homo sapien
gagagaatcatccaacactcagactcacctaga

SEQ ID NO: 700266 - DNA, 33 bp, Homo sapien
gagagaatcatccaacgctcagactcacctaga

SEQ ID NO: 700267 - DNA, 33 bp, Homo sapien
cactttggagggaatacgcaatgtcagttcgaa

SEQ ID NO: 700268 - DNA, 33 bp, Homo sapien
cactttggagggaatatgcaatgtcagttcgaa

SEQ ID NO: 700269 - DNA, 33 bp, Homo sapien
tctccagcattgctaccaataaagctgatcagc

SEQ ID NO: 700270 - DNA, 33 bp, Homo sapien
tctccagcattgctactaataaagctgatcagc

SEQ ID NO: 700271 - DNA, 33 bp, Homo sapien
aagatatccagcacacacctctactagaatgca

SEQ ID NO: 700272 - DNA, 33 bp, Homo sapien
aagatatccagcacacgcctctactagaatgca

SEQ ID NO: 700273 - DNA, 33 bp, Homo sapien
tcagtgtcactatcaacagagctatgagtgagc

SEQ ID NO: 700274 - DNA, 33 bp, Homo sapien
tcagtgtcactatcaatagagctatgagtgagc

SEQ ID NO: 700275 - DNA, 33 bp, Homo sapien
cttgctctaaatacccactttatactgactggg

SEQ ID NO: 700276 - DNA, 33 bp, Homo sapien
cttgctctaaatacccgctttatactgactggg

SEQ ID NO: 700277 - DNA, 33 bp, Homo sapien
cggggtgagaaaaggaaaaggagcagactgagg

SEQ ID NO: 700278 - DNA, 33 bp, Homo sapien
cggggtgagaaaaggagaaggagcagactgagg

SEQ ID NO: 700279 - DNA, 33 bp, Homo sapien
gaagtaggtcccataaccagatgttagatccag

SEQ ID NO: 700280 - DNA, 33 bp, Homo sapien
gaagtaggtcccataagcagatgttagatccag

SEQ ID NO: 700281 - DNA, 33 bp, Homo sapien
aattagcctggatgtaaaatacaaatatctgaa

SEQ ID NO: 700282 - DNA, 33 bp, Homo sapien
aattagcctggatgtacaatacaaatatctgaa

SEQ ID NO: 700283 - DNA, 33 bp, Homo sapien
tccttgttccaggagcacaaaaaatccttaata

SEQ ID NO: 700284 - DNA, 33 bp, Homo sapien
tccttgttccaggagcgcaaaaaatccttaata

SEQ ID NO: 700285 - DNA, 33 bp, Homo sapien
ttcatatacctgaatcaaggtttttaagtgaaa

SEQ ID NO: 700286 - DNA, 33 bp, Homo sapien
ttcatatacctgaatcgaggtttttaagtgaaa

SEQ ID NO: 700287 - DNA, 33 bp, Homo sapien
gggaagtgggagttgaaatgcatcattatacct

SEQ ID NO: 700288 - DNA, 33 bp, Homo sapien
gggaagtgggagttgacatgcatcattatacct

SEQ ID NO: 700289 - DNA, 33 bp, Homo sapien
agccttgtcttgtcaacgggttgtattgatgac

SEQ ID NO: 700290 - DNA, 33 bp, Homo sapien
agccttgtcttgtcaatgggttgtattgatgac

SEQ ID NO: 700291 - DNA, 33 bp, Homo sapien
gggtgaagggaagaaactcacagtgagcaaagg

SEQ ID NO: 700292 - DNA, 33 bp, Homo sapien
gggtgaagggaagaaattcacagtgagcaaagg

SEQ ID NO: 700293 - DNA, 33 bp, Homo sapien
cacagagatctcacaacggtaagtgaaaatgtc

SEQ ID NO: 700294 - DNA, 33 bp, Homo sapien
cacagagatctcacaatggtaagtgaaaatgtc

SEQ ID NO: 700295 - DNA, 33 bp, Homo sapien
tacttcaactctcaaaacatcacaactagctag

SEQ ID NO: 700296 - DNA, 33 bp, Homo sapien
tacttcaactctcaaatcatcacaactagctag

SEQ ID NO: 700297 - DNA, 33 bp, Homo sapien
ccaagtccccggtgaacatggtcaagttgtgaa

SEQ ID NO: 700298 - DNA, 33 bp, Homo sapien
ccaagtccccggtgaatatggtcaagttgtgaa

SEQ ID NO: 700299 - DNA, 33 bp, Homo sapien
cggctttatcctgtagacagccttttccaacag

SEQ ID NO: 700300 - DNA, 33 bp, Homo sapien
cggctttatcctgtaggcagccttttccaacag

SEQ ID NO: 700301 - DNA, 33 bp, Homo sapien
gcccctgggtgctttaccatcccttgttgattt

SEQ ID NO: 700302 - DNA, 33 bp, Homo sapien
gcccctgggtgctttatcatcccttgttgattt

SEQ ID NO: 700303 - DNA, 33 bp, Homo sapien
cttaaccgtcaccttcaatacataatttttcat

SEQ ID NO: 700304 - DNA, 33 bp, Homo sapien
cttaaccgtcaccttcgatacataatttttcat

SEQ ID NO: 700305 - DNA, 33 bp, Homo sapien
aatgcaatgctgaataacaactggaaactttaa

SEQ ID NO: 700306 - DNA, 33 bp, Homo sapien
aatgcaatgctgaatagcaactggaaactttaa

SEQ ID NO: 700307 - DNA, 33 bp, Homo sapien
actggttggattttaccgaaaaccagccagctc

SEQ ID NO: 700308 - DNA, 33 bp, Homo sapien
actggttggattttacggaaaaccagccagctc

SEQ ID NO: 700309 - DNA, 33 bp, Homo sapien
agtatactgtattataacagaccaagaagagga

SEQ ID NO: 700310 - DNA, 33 bp, Homo sapien
agtatactgtattatatcagaccaagaagagga

SEQ ID NO: 700311 - DNA, 33 bp, Homo sapien
cctttgtcatgtactaaatttccacacatatgt

SEQ ID NO: 700312 - DNA, 33 bp, Homo sapien
cctttgtcatgtactatatttccacacatatgt

SEQ ID NO: 700313 - DNA, 33 bp, Homo sapien
aaagccagatggaaagaactacatactctatga

SEQ ID NO: 700314 - DNA, 33 bp, Homo sapien
aaagccagatggaaaggactacatactctatga

SEQ ID NO: 700315 - DNA, 33 bp, Homo sapien
tttgtttgtctgtagaaggttcactctgaagtc

SEQ ID NO: 700316 - DNA, 33 bp, Homo sapien
tttgtttgtctgtagatggttcactctgaagtc

SEQ ID NO: 700317 - DNA, 33 bp, Homo sapien
tcctccctctgtagtcccttaggtcttttggct

SEQ ID NO: 700318 - DNA, 33 bp, Homo sapien
tcctccctctgtagtctcttaggtcttttggct

SEQ ID NO: 700319 - DNA, 33 bp, Homo sapien
aggctctgaagatgtacggacctgcgttcagga

SEQ ID NO: 700320 - DNA, 33 bp, Homo sapien
aggctctgaagatgtatggacctgcgttcagga

SEQ ID NO: 700321 - DNA, 33 bp, Homo sapien
atacttcaagaataagaaagaatcaagacatcc

SEQ ID NO: 700322 - DNA, 33 bp, Homo sapien
atacttcaagaataaggaagaatcaagacatcc

SEQ ID NO: 700323 - DNA, 33 bp, Homo sapien
cactcagaatcttccacctagactctgattttc

SEQ ID NO: 700324 - DNA, 33 bp, Homo sapien
cactcagaatcttccatctagactctgattttc

SEQ ID NO: 700325 - DNA, 33 bp, Homo sapien
aacactctctccaacactcacacattttagact

SEQ ID NO: 700326 - DNA, 33 bp, Homo sapien
aacactctctccaacagtcacacattttagact

SEQ ID NO: 700327 - DNA, 33 bp, Homo sapien
tagacaactcaggcgacggatttggactctgga

SEQ ID NO: 700328 - DNA, 33 bp, Homo sapien
tagacaactcaggcgatggatttggactctgga

SEQ ID NO: 700329 - DNA, 33 bp, Homo sapien
attattagacagatcacatatggattataatgc

SEQ ID NO: 700330 - DNA, 33 bp, Homo sapien
attattagacagatcatatatggattataatgc

SEQ ID NO: 700331 - DNA, 33 bp, Homo sapien
aaggtctgattccttaacatccaggccaaaaaa

SEQ ID NO: 700332 - DNA, 33 bp, Homo sapien
aaggtctgattccttagcatccaggccaaaaaa

SEQ ID NO: 700333 - DNA, 33 bp, Homo sapien
ttgaacactgtatgaaaacagagaccagattac

SEQ ID NO: 700334 - DNA, 33 bp, Homo sapien
ttgaacactgtatgaacacagagaccagattac

SEQ ID NO: 700335 - DNA, 33 bp, Homo sapien
tttctgggaggaatccactgaagaagtctgtgg

SEQ ID NO: 700336 - DNA, 33 bp, Homo sapien
tttctgggaggaatcctctgaagaagtctgtgg

SEQ ID NO: 700337 - DNA, 33 bp, Homo sapien
gagtctgactgccctcgctgttctccggatctc

SEQ ID NO: 700338 - DNA, 33 bp, Homo sapien
gagtctgactgccctctctgttctccggatctc

SEQ ID NO: 700339 - DNA, 33 bp, Homo sapien
acttaaatttagaaccagacagtaggcctggca

SEQ ID NO: 700340 - DNA, 33 bp, Homo sapien
acttaaatttagaacctgacagtaggcctggca

SEQ ID NO: 700341 - DNA, 33 bp, Homo sapien
gagtgaatgatttgagaaaaccaaaagcaggga

SEQ ID NO: 700342 - DNA, 33 bp, Homo sapien
gagtgaatgatttgaggaaaccaaaagcaggga

SEQ ID NO: 700343 - DNA, 33 bp, Homo sapien
ctagaaatctgccacaagataggctttttacct

SEQ ID NO: 700344 - DNA, 33 bp, Homo sapien
ctagaaatctgccacaggataggctttttacct

SEQ ID NO: 700345 - DNA, 33 bp, Homo sapien
cgattattgtgaaaaacagaagttctgcatttt

SEQ ID NO: 700346 - DNA, 33 bp, Homo sapien
cgattattgtgaaaaatagaagttctgcatttt

SEQ ID NO: 700347 - DNA, 33 bp, Homo sapien
tcaaaatccatgctcaatcaccctctggaatcc

SEQ ID NO: 700348 - DNA, 33 bp, Homo sapien
tcaaaatccatgctcagtcaccctctggaatcc

SEQ ID NO: 700349 - DNA, 33 bp, Homo sapien
ttgttttaatgctgtacgttaacttgatataaa

SEQ ID NO: 700350 - DNA, 33 bp, Homo sapien
ttgttttaatgctgtatgttaacttgatataaa

SEQ ID NO: 700351 - DNA, 33 bp, Homo sapien
tgactgagaaaaggaactggaggagaaaagagc

SEQ ID NO: 700352 - DNA, 33 bp, Homo sapien
tgactgagaaaaggaagtggaggagaaaagagc

SEQ ID NO: 700353 - DNA, 33 bp, Homo sapien
actgtatattctgtaacgaaaagatgtctgcca

SEQ ID NO: 700354 - DNA, 33 bp, Homo sapien
actgtatattctgtaatgaaaagatgtctgcca

SEQ ID NO: 700355 - DNA, 33 bp, Homo sapien
ccctgggaaagattgccacaaggcgtttggatt

SEQ ID NO: 700356 - DNA, 33 bp, Homo sapien
ccctgggaaagattgctacaaggcgtttggatt

SEQ ID NO: 700357 - DNA, 33 bp, Homo sapien
cccttacatatttgaccctgaataaacgttgaa

SEQ ID NO: 700358 - DNA, 33 bp, Homo sapien
cccttacatatttgactctgaataaacgttgaa

SEQ ID NO: 700359 - DNA, 33 bp, Homo sapien
tgagctttggagacaccgaagtttagttctatt

SEQ ID NO: 700360 - DNA, 33 bp, Homo sapien
tgagctttggagacactgaagtttagttctatt

SEQ ID NO: 700361 - DNA, 33 bp, Homo sapien
ctctgtttagctaaaacgagtgaagctatttaa

SEQ ID NO: 700362 - DNA, 33 bp, Homo sapien
ctctgtttagctaaaaggagtgaagctatttaa

SEQ ID NO: 700363 - DNA, 33 bp, Homo sapien
tggtacttgtcaatcaagttttgatatgtttgt

SEQ ID NO: 700364 - DNA, 33 bp, Homo sapien
tggtacttgtcaatcaggttttgatatgtttgt

SEQ ID NO: 700365 - DNA, 33 bp, Homo sapien
accattaattgatagacgtaggtatggcctgta

SEQ ID NO: 700366 - DNA, 33 bp, Homo sapien
accattaattgatagatgtaggtatggcctgta

SEQ ID NO: 700367 - DNA, 33 bp, Homo sapien
gcaagagttcagatgacgaaaaatttgtctaaa

SEQ ID NO: 700368 - DNA, 33 bp, Homo sapien
gcaagagttcagatgatgaaaaatttgtctaaa

SEQ ID NO: 700369 - DNA, 33 bp, Homo sapien
cttgctactcaccaaacacggaaacaaaaacag

SEQ ID NO: 700370 - DNA, 33 bp, Homo sapien
cttgctactcaccaaatacggaaacaaaaacag

SEQ ID NO: 700371 - DNA, 33 bp, Homo sapien
agataatgtactatacacttaaaactctactta

SEQ ID NO: 700372 - DNA, 33 bp, Homo sapien
agataatgtactatacgcttaaaactctactta

SEQ ID NO: 700373 - DNA, 33 bp, Homo sapien
ggctcgttccctagtacgtttattcctgttgta

SEQ ID NO: 700374 - DNA, 33 bp, Homo sapien
ggctcgttccctagtatgtttattcctgttgta

SEQ ID NO: 700375 - DNA, 33 bp, Homo sapien
agtgtttcatatgttcccatccatttgctgtac

SEQ ID NO: 700376 - DNA, 33 bp, Homo sapien
agtgtttcatatgttctcatccatttgctgtac

SEQ ID NO: 700377 - DNA, 33 bp, Homo sapien
atagtgcttgatttcaactgtatccataaatct

SEQ ID NO: 700378 - DNA, 33 bp, Homo sapien
atagtgcttgatttcagctgtatccataaatct

SEQ ID NO: 700379 - DNA, 33 bp, Homo sapien
gctgttagactgatacaaacaggtttcattcca

SEQ ID NO: 700380 - DNA, 33 bp, Homo sapien
gctgttagactgatacgaacaggtttcattcca

SEQ ID NO: 700381 - DNA, 33 bp, Homo sapien
tcatcttgtctttaccaccaacagagacatctc

SEQ ID NO: 700382 - DNA, 33 bp, Homo sapien
tcatcttgtctttaccgccaacagagacatctc

SEQ ID NO: 700383 - DNA, 33 bp, Homo sapien
aagggatggtgaagaaatgactgcagaagggat

SEQ ID NO: 700384 - DNA, 33 bp, Homo sapien
aagggatggtgaagaattgactgcagaagggat

SEQ ID NO: 700385 - DNA, 33 bp, Homo sapien
gtataatcacctctacggctctgtcttccacct

SEQ ID NO: 700386 - DNA, 33 bp, Homo sapien
gtataatcacctctactgctctgtcttccacct

SEQ ID NO: 700387 - DNA, 33 bp, Homo sapien
tgtaaaactatctggccgagtatttggaaatat

SEQ ID NO: 700388 - DNA, 33 bp, Homo sapien
tgtaaaactatctggctgagtatttggaaatat

SEQ ID NO: 700389 - DNA, 33 bp, Homo sapien
gaaatattcagctattaaaggcatttcgagagt

SEQ ID NO: 700390 - DNA, 33 bp, Homo sapien
gaaatattcagctatttaaggcatttcgagagt

SEQ ID NO: 700391 - DNA, 33 bp, Homo sapien
tgggtcccccaggagaacctctaaggtcacaca

SEQ ID NO: 700392 - DNA, 33 bp, Homo sapien
tgggtcccccaggagagcctctaaggtcacaca

SEQ ID NO: 700393 - DNA, 33 bp, Homo sapien
aacccataaaacgctaactttaatgatgccaaa

SEQ ID NO: 700394 - DNA, 33 bp, Homo sapien
aacccataaaacgctatctttaatgatgccaaa

SEQ ID NO: 700395 - DNA, 33 bp, Homo sapien
catctcgtggtagccaaagttacttctaaaatg

SEQ ID NO: 700396 - DNA, 33 bp, Homo sapien
catctcgtggtagccagagttacttctaaaatg

SEQ ID NO: 700397 - DNA, 33 bp, Homo sapien
acacagaaaagtgctaaacagtaattactctct

SEQ ID NO: 700398 - DNA, 33 bp, Homo sapien
acacagaaaagtgctagacagtaattactctct

SEQ ID NO: 700399 - DNA, 33 bp, Homo sapien
actaaaactaaaatcactcagctaggccatatt

SEQ ID NO: 700400 - DNA, 33 bp, Homo sapien
actaaaactaaaatcagtcagctaggccatatt

SEQ ID NO: 700401 - DNA, 33 bp, Homo sapien
attaatgaagtctagagaatgcattgttttgga

SEQ ID NO: 700402 - DNA, 33 bp, Homo sapien
attaatgaagtctagataatgcattgttttgga

SEQ ID NO: 700403 - DNA, 33 bp, Homo sapien
cacttggccatctgaacgtttgaagtcttgtgc

SEQ ID NO: 700404 - DNA, 33 bp, Homo sapien
cacttggccatctgaatgtttgaagtcttgtgc

SEQ ID NO: 700405 - DNA, 33 bp, Homo sapien
taaaattgctttatcaggacattcctccaatta

SEQ ID NO: 700406 - DNA, 33 bp, Homo sapien
taaaattgctttatcatgacattcctccaatta

SEQ ID NO: 700407 - DNA, 33 bp, Homo sapien
ggtaaataagtttgaacgtggagagaaaactga

SEQ ID NO: 700408 - DNA, 33 bp, Homo sapien
ggtaaataagtttgaatgtggagagaaaactga

SEQ ID NO: 700409 - DNA, 33 bp, Homo sapien
taactgatgaatcctcacacacctttctctaga

SEQ ID NO: 700410 - DNA, 33 bp, Homo sapien
taactgatgaatcctcgcacacctttctctaga

SEQ ID NO: 700411 - DNA, 33 bp, Homo sapien
tccttagaacaatgaaaataaacaccaccacat

SEQ ID NO: 700412 - DNA, 33 bp, Homo sapien
tccttagaacaatgaagataaacaccaccacat

SEQ ID NO: 700413 - DNA, 33 bp, Homo sapien
ctctgttacttttggcccaacaaccctaaatgc

SEQ ID NO: 700414 - DNA, 33 bp, Homo sapien
ctctgttacttttggctcaacaaccctaaatgc

SEQ ID NO: 700415 - DNA, 33 bp, Homo sapien
cgctttccatatattgaaggaatgtcatcttcc

SEQ ID NO: 700416 - DNA, 33 bp, Homo sapien
cgctttccatatattggaggaatgtcatcttcc

SEQ ID NO: 700417 - DNA, 33 bp, Homo sapien
gagttttgcatttaaaacaatgagctgtcaaag

SEQ ID NO: 700418 - DNA, 33 bp, Homo sapien
gagttttgcatttaaagcaatgagctgtcaaag

SEQ ID NO: 700419 - DNA, 33 bp, Homo sapien
ttgtggatattgagtcactgttgaaggtttatg

SEQ ID NO: 700420 - DNA, 33 bp, Homo sapien
ttgtggatattgagtcgctgttgaaggtttatg

SEQ ID NO: 700421 - DNA, 33 bp, Homo sapien
aagtataagacgggaacttcaacttacaactta

SEQ ID NO: 700422 - DNA, 33 bp, Homo sapien
aagtataagacgggaatttcaacttacaactta

SEQ ID NO: 700423 - DNA, 33 bp, Homo sapien
aggctttgtatgatacaatctttgagcgaacag

SEQ ID NO: 700424 - DNA, 33 bp, Homo sapien
aggctttgtatgatacgatctttgagcgaacag

SEQ ID NO: 700425 - DNA, 33 bp, Homo sapien
gctgattgtttccacaaactgagtgtatgctgc

SEQ ID NO: 700426 - DNA, 33 bp, Homo sapien
gctgattgtttccacagactgagtgtatgctgc

SEQ ID NO: 700427 - DNA, 33 bp, Homo sapien
cttcccatcacagaatcaggttacttgtcatga

SEQ ID NO: 700428 - DNA, 33 bp, Homo sapien
cttcccatcacagaattaggttacttgtcatga

SEQ ID NO: 700429 - DNA, 33 bp, Homo sapien
atactcacctatttaacggaaatggacttcaag

SEQ ID NO: 700430 - DNA, 33 bp, Homo sapien
atactcacctatttaatggaaatggacttcaag

SEQ ID NO: 700431 - DNA, 33 bp, Homo sapien
tagtcgcagccactggaataacaatacaatggt

SEQ ID NO: 700432 - DNA, 33 bp, Homo sapien
tagtcgcagccactgggataacaatacaatggt

SEQ ID NO: 700433 - DNA, 33 bp, Homo sapien
aaaaatctttaacgtcaacatttgaagagctct

SEQ ID NO: 700434 - DNA, 33 bp, Homo sapien
aaaaatctttaacgtcgacatttgaagagctct

SEQ ID NO: 700435 - DNA, 33 bp, Homo sapien
caccagatttagaaaacgtagcacaaaaaatgt

SEQ ID NO: 700436 - DNA, 33 bp, Homo sapien
caccagatttagaaaatgtagcacaaaaaatgt

SEQ ID NO: 700437 - DNA, 33 bp, Homo sapien
agtcctccagattcaaatcatccattacctaat

SEQ ID NO: 700438 - DNA, 33 bp, Homo sapien
agtcctccagattcaagtcatccattacctaat

SEQ ID NO: 700439 - DNA, 33 bp, Homo sapien
aaacaaaatccaaatcaatgtcattaaaagaac

SEQ ID NO: 700440 - DNA, 33 bp, Homo sapien
aaacaaaatccaaatcgatgtcattaaaagaac

SEQ ID NO: 700441 - DNA, 33 bp, Homo sapien
atctctagaacatcaaatgatctctcttcaact

SEQ ID NO: 700442 - DNA, 33 bp, Homo sapien
atctctagaacatcaagtgatctctcttcaact

SEQ ID NO: 700443 - DNA, 33 bp, Homo sapien
aaaaaataatcattaaagatttgtcacgaaaca

SEQ ID NO: 700444 - DNA, 33 bp, Homo sapien
aaaaaataatcattaaggatttgtcacgaaaca

SEQ ID NO: 700445 - DNA, 33 bp, Homo sapien
gatatttatattaaggcatctgccctagaatgc

SEQ ID NO: 700446 - DNA, 33 bp, Homo sapien
gatatttatattaaggtatctgccctagaatgc

SEQ ID NO: 700447 - DNA, 33 bp, Homo sapien
aataaatatgccgatgcagatctttaaggaatt

SEQ ID NO: 700448 - DNA, 33 bp, Homo sapien
aataaatatgccgatgtagatctttaaggaatt

SEQ ID NO: 700449 - DNA, 33 bp, Homo sapien
tgatactgatttgtcacgtttactgttcaattc

SEQ ID NO: 700450 - DNA, 33 bp, Homo sapien
tgatactgatttgtcaggtttactgttcaattc

SEQ ID NO: 700451 - DNA, 33 bp, Homo sapien
gtcttcactttcctcacgtgtaaaatatatacc

SEQ ID NO: 700452 - DNA, 33 bp, Homo sapien
gtcttcactttcctcatgtgtaaaatatatacc

SEQ ID NO: 700453 - DNA, 33 bp, Homo sapien
gatgacagccaactaacaggaaagcctggaaaa

SEQ ID NO: 700454 - DNA, 33 bp, Homo sapien
gatgacagccaactaataggaaagcctggaaaa

SEQ ID NO: 700455 - DNA, 33 bp, Homo sapien
gcaccaattcattaggccatcaggtgtatatga

SEQ ID NO: 700456 - DNA, 33 bp, Homo sapien
gcaccaattcattaggtcatcaggtgtatatga

SEQ ID NO: 700457 - DNA, 33 bp, Homo sapien
gtgacttactgtgtaaaggtagcaagttagact

SEQ ID NO: 700458 - DNA, 33 bp, Homo sapien
gtgacttactgtgtaagggtagcaagttagact

SEQ ID NO: 700459 - DNA, 33 bp, Homo sapien
tgtcttttaaagagaaatatctccatgaacatc

SEQ ID NO: 700460 - DNA, 33 bp, Homo sapien
tgtcttttaaagagaagtatctccatgaacatc

SEQ ID NO: 700461 - DNA, 33 bp, Homo sapien
caaggttgcaaaaataacactttacaagtctct

SEQ ID NO: 700462 - DNA, 33 bp, Homo sapien
caaggttgcaaaaatagcactttacaagtctct

SEQ ID NO: 700463 - DNA, 33 bp, Homo sapien
tactgcattgctcatgacaaaaattgtagaaag

SEQ ID NO: 700464 - DNA, 33 bp, Homo sapien
tactgcattgctcatgccaaaaattgtagaaag

SEQ ID NO: 700465 - DNA, 33 bp, Homo sapien
tgctcaacatacatggaaggttatacgtttaca

SEQ ID NO: 700466 - DNA, 33 bp, Homo sapien
tgctcaacatacatggcaggttatacgtttaca

SEQ ID NO: 700467 - DNA, 33 bp, Homo sapien
acaatgtaacacctcaatagtgggggtctagat

SEQ ID NO: 700468 - DNA, 33 bp, Homo sapien
acaatgtaacacctcagtagtgggggtctagat

SEQ ID NO: 700469 - DNA, 33 bp, Homo sapien
agatttacttaccagcaacttcaaaacatctag

SEQ ID NO: 700470 - DNA, 33 bp, Homo sapien
agatttacttaccagcgacttcaaaacatctag

SEQ ID NO: 700471 - DNA, 33 bp, Homo sapien
gagtccagtgacaaacggaagatcattagcttc

SEQ ID NO: 700472 - DNA, 33 bp, Homo sapien
gagtccagtgacaaactgaagatcattagcttc

SEQ ID NO: 700473 - DNA, 33 bp, Homo sapien
gctttcttttctaaaccatgtctgacaaataat

SEQ ID NO: 700474 - DNA, 33 bp, Homo sapien
gctttcttttctaaactatgtctgacaaataat

SEQ ID NO: 700475 - DNA, 33 bp, Homo sapien
aggaatcaataatccacgtgagttttttatttt

SEQ ID NO: 700476 - DNA, 33 bp, Homo sapien
aggaatcaataatccatgtgagttttttatttt

SEQ ID NO: 700477 - DNA, 33 bp, Homo sapien
tactttacatatgcaaacccaaatgccaggctt

SEQ ID NO: 700478 - DNA, 33 bp, Homo sapien
tactttacatatgcaagcccaaatgccaggctt

SEQ ID NO: 700479 - DNA, 33 bp, Homo sapien
acaggccctgtgacaacgtctggctgacaaaag

SEQ ID NO: 700480 - DNA, 33 bp, Homo sapien
acaggccctgtgacaatgtctggctgacaaaag

SEQ ID NO: 700481 - DNA, 33 bp, Homo sapien
acggagtagcaagttgcattaagacacaggacc

SEQ ID NO: 700482 - DNA, 33 bp, Homo sapien
acggagtagcaagttggattaagacacaggacc

SEQ ID NO: 700483 - DNA, 33 bp, Homo sapien
cttcagagcctaatgacgaaattattctgttgc

SEQ ID NO: 700484 - DNA, 33 bp, Homo sapien
cttcagagcctaatgatgaaattattctgttgc

SEQ ID NO: 700485 - DNA, 33 bp, Homo sapien
tgttgcagtaaagaagaaaatgtatagaaataa

SEQ ID NO: 700486 - DNA, 33 bp, Homo sapien
tgttgcagtaaagaaggaaatgtatagaaataa

SEQ ID NO: 700487 - DNA, 33 bp, Homo sapien
gcttctattattttgaaaaaccatgctgattag

SEQ ID NO: 700488 - DNA, 33 bp, Homo sapien
gcttctattattttgacaaaccatgctgattag

SEQ ID NO: 700489 - DNA, 33 bp, Homo sapien
ccaaaataaaattacgaaaaagcatccctgtca

SEQ ID NO: 700490 - DNA, 33 bp, Homo sapien
ccaaaataaaattacggaaaagcatccctgtca

SEQ ID NO: 700491 - DNA, 33 bp, Homo sapien
tacaattcgtgcataaacgaaaggagatgcaga

SEQ ID NO: 700492 - DNA, 33 bp, Homo sapien
tacaattcgtgcataaccgaaaggagatgcaga

SEQ ID NO: 700493 - DNA, 33 bp, Homo sapien
gtgtggttatttctacacatagcataggagaca

SEQ ID NO: 700494 - DNA, 33 bp, Homo sapien
gtgtggttatttctacgcatagcataggagaca

SEQ ID NO: 700495 - DNA, 33 bp, Homo sapien
aacttctctcacttgggaatctttttaaataag

SEQ ID NO: 700496 - DNA, 33 bp, Homo sapien
aacttctctcacttggtaatctttttaaataag

SEQ ID NO: 700497 - DNA, 33 bp, Homo sapien
ctcaagactcagagggcacccaaaacaatatct

SEQ ID NO: 700498 - DNA, 33 bp, Homo sapien
ctcaagactcagaggggacccaaaacaatatct

SEQ ID NO: 700499 - DNA, 33 bp, Homo sapien
aaatatgctgaggcacaggaaggcgcaaagaaa

SEQ ID NO: 700500 - DNA, 33 bp, Homo sapien
aaatatgctgaggcacgggaaggcgcaaagaaa

SEQ ID NO: 700501 - DNA, 33 bp, Homo sapien
attgggcatattatcaacgcaaacataattgaa

SEQ ID NO: 700502 - DNA, 33 bp, Homo sapien
attgggcatattatcagcgcaaacataattgaa

SEQ ID NO: 700503 - DNA, 33 bp, Homo sapien
agtcatcctcttcctcaatgtcttgcccaccaa

SEQ ID NO: 700504 - DNA, 33 bp, Homo sapien
agtcatcctcttcctcgatgtcttgcccaccaa

SEQ ID NO: 700505 - DNA, 33 bp, Homo sapien
tatttacttctccttccactgacatgatttctt

SEQ ID NO: 700506 - DNA, 33 bp, Homo sapien
tatttacttctccttctactgacatgatttctt

SEQ ID NO: 700507 - DNA, 33 bp, Homo sapien
aacagtgtaaactcgacccaaagtgtagtcttt

SEQ ID NO: 700508 - DNA, 33 bp, Homo sapien
aacagtgtaaactcgatccaaagtgtagtcttt

SEQ ID NO: 700509 - DNA, 33 bp, Homo sapien
agttttataattcgacaaaccaaataatttttt

SEQ ID NO: 700510 - DNA, 33 bp, Homo sapien
agttttataattcgaccaaccaaataatttttt

SEQ ID NO: 700511 - DNA, 33 bp, Homo sapien
caaactcaggttagaactatgtattcctgctac

SEQ ID NO: 700512 - DNA, 33 bp, Homo sapien
caaactcaggttagaagtatgtattcctgctac

SEQ ID NO: 700513 - DNA, 33 bp, Homo sapien
cttctctaaatcccagacctgaatttttttcag

SEQ ID NO: 700514 - DNA, 33 bp, Homo sapien
cttctctaaatcccaggcctgaatttttttcag

SEQ ID NO: 700515 - DNA, 33 bp, Homo sapien
gtttgttattcttctagacattggatattcata

SEQ ID NO: 700516 - DNA, 33 bp, Homo sapien
gtttgttattcttctatacattggatattcata

SEQ ID NO: 700517 - DNA, 33 bp, Homo sapien
gacaaaccatccacaaaagtatcaccacaaatt

SEQ ID NO: 700518 - DNA, 33 bp, Homo sapien
gacaaaccatccacaagagtatcaccacaaatt

SEQ ID NO: 700519 - DNA, 33 bp, Homo sapien
ttatacttcatttagacctgatgggtatatata

SEQ ID NO: 700520 - DNA, 33 bp, Homo sapien
ttatacttcatttagatctgatgggtatatata

SEQ ID NO: 700521 - DNA, 33 bp, Homo sapien
ttaagggaccacagtgaacaagataaagttctg

SEQ ID NO: 700522 - DNA, 33 bp, Homo sapien
ttaagggaccacagtggacaagataaagttctg

SEQ ID NO: 700523 - DNA, 33 bp, Homo sapien
gtttgatggtgagaaagagtcacatttcatgaa

SEQ ID NO: 700524 - DNA, 33 bp, Homo sapien
gtttgatggtgagaaatagtcacatttcatgaa

SEQ ID NO: 700525 - DNA, 33 bp, Homo sapien
tgatatgacctctaataagacaaagaatctatg

SEQ ID NO: 700526 - DNA, 33 bp, Homo sapien
tgatatgacctctaatgagacaaagaatctatg

SEQ ID NO: 700527 - DNA, 33 bp, Homo sapien
gtattattgctggtacaagcacacaaaaacttt

SEQ ID NO: 700528 - DNA, 33 bp, Homo sapien
gtattattgctggtactagcacacaaaaacttt

SEQ ID NO: 700529 - DNA, 33 bp, Homo sapien
agaagagctttgggaagtgaatatagaaaaatc

SEQ ID NO: 700530 - DNA, 33 bp, Homo sapien
agaagagctttgggaattgaatatagaaaaatc

SEQ ID NO: 700531 - DNA, 33 bp, Homo sapien
caaatctgacattctgaaagcttgttaacagct

SEQ ID NO: 700532 - DNA, 33 bp, Homo sapien
caaatctgacattctggaagcttgttaacagct

SEQ ID NO: 700533 - DNA, 33 bp, Homo sapien
ggctgcagcaatttcaaacatcacaggagtatt

SEQ ID NO: 700534 - DNA, 33 bp, Homo sapien
ggctgcagcaatttcagacatcacaggagtatt

SEQ ID NO: 700535 - DNA, 33 bp, Homo sapien
gagtggtatttggctgacagataggctggtctg

SEQ ID NO: 700536 - DNA, 33 bp, Homo sapien
gagtggtatttggctggcagataggctggtctg

SEQ ID NO: 700537 - DNA, 33 bp, Homo sapien
ctgtaatagagcaaagactatatcttacacttc

SEQ ID NO: 700538 - DNA, 33 bp, Homo sapien
ctgtaatagagcaaaggctatatcttacacttc

SEQ ID NO: 700539 - DNA, 33 bp, Homo sapien
ctctccttcatttgtacctaatgcatggactct

SEQ ID NO: 700540 - DNA, 33 bp, Homo sapien
ctctccttcatttgtatctaatgcatggactct

SEQ ID NO: 700541 - DNA, 33 bp, Homo sapien
tgaaccactatcattacatgagatgccatcatt

SEQ ID NO: 700542 - DNA, 33 bp, Homo sapien
tgaaccactatcattatatgagatgccatcatt

SEQ ID NO: 700543 - DNA, 33 bp, Homo sapien
tgcagtaatctgcaataatgacttgaacacgag

SEQ ID NO: 700544 - DNA, 33 bp, Homo sapien
tgcagtaatctgcaatgatgacttgaacacgag

SEQ ID NO: 700545 - DNA, 33 bp, Homo sapien
aagaggtgagatgagagaatagggttagggaca

SEQ ID NO: 700546 - DNA, 33 bp, Homo sapien
aagaggtgagatgagataatagggttagggaca

SEQ ID NO: 700547 - DNA, 33 bp, Homo sapien
cactgggagttcaagagaattaactgtctatga

SEQ ID NO: 700548 - DNA, 33 bp, Homo sapien
cactgggagttcaagataattaactgtctatga

SEQ ID NO: 700549 - DNA, 33 bp, Homo sapien
tttatgacataatttgcatggtttgcaatcact

SEQ ID NO: 700550 - DNA, 33 bp, Homo sapien
tttatgacataatttgtatggtttgcaatcact

SEQ ID NO: 700551 - DNA, 33 bp, Homo sapien
aaatatgtggagctagaaactactctatgaaaa

SEQ ID NO: 700552 - DNA, 33 bp, Homo sapien
aaatatgtggagctagcaactactctatgaaaa

SEQ ID NO: 700553 - DNA, 33 bp, Homo sapien
ctcatgtttgctggccacttatatatcttcttt

SEQ ID NO: 700554 - DNA, 33 bp, Homo sapien
ctcatgtttgctggccgcttatatatcttcttt

SEQ ID NO: 700555 - DNA, 33 bp, Homo sapien
gatcacagtagccttacagtagtgtagtttgaa

SEQ ID NO: 700556 - DNA, 33 bp, Homo sapien
gatcacagtagccttatagtagtgtagtttgaa

SEQ ID NO: 700557 - DNA, 33 bp, Homo sapien
ttttcatgtttagcaggaaatgttaattcttta

SEQ ID NO: 700558 - DNA, 33 bp, Homo sapien
ttttcatgtttagcagtaaatgttaattcttta

SEQ ID NO: 700559 - DNA, 33 bp, Homo sapien
tgtaacacattcagtaataagcctgctaaagca

SEQ ID NO: 700560 - DNA, 33 bp, Homo sapien
tgtaacacattcagtagtaagcctgctaaagca

SEQ ID NO: 700561 - DNA, 33 bp, Homo sapien
tagatcaatgggcaaactagccagggggttgcc

SEQ ID NO: 700562 - DNA, 33 bp, Homo sapien
tagatcaatgggcaaattagccagggggttgcc

SEQ ID NO: 700563 - DNA, 33 bp, Homo sapien
aatttctttgcaattaaggagaatttagcaagt

SEQ ID NO: 700564 - DNA, 33 bp, Homo sapien
aatttctttgcaattagggagaatttagcaagt

SEQ ID NO: 700565 - DNA, 33 bp, Homo sapien
atgttccgtgacagtgaaggtttcagaggtagt

SEQ ID NO: 700566 - DNA, 33 bp, Homo sapien
atgttccgtgacagtggaggtttcagaggtagt

SEQ ID NO: 700567 - DNA, 33 bp, Homo sapien
gagagattcaaaactccataagctcctgccctc

SEQ ID NO: 700568 - DNA, 33 bp, Homo sapien
gagagattcaaaactctataagctcctgccctc

SEQ ID NO: 700569 - DNA, 33 bp, Homo sapien
ctgagaggtgttcagacggtgagttaggaacaa

SEQ ID NO: 700570 - DNA, 33 bp, Homo sapien
ctgagaggtgttcagatggtgagttaggaacaa

SEQ ID NO: 700571 - DNA, 33 bp, Homo sapien
ctcatctgacaaaatccatctctagcaaatcaa

SEQ ID NO: 700572 - DNA, 33 bp, Homo sapien
ctcatctgacaaaatctatctctagcaaatcaa

SEQ ID NO: 700573 - DNA, 33 bp, Homo sapien
caaaggtgatacgcgaataagaacagttgccct

SEQ ID NO: 700574 - DNA, 33 bp, Homo sapien
caaaggtgatacgcgagtaagaacagttgccct

SEQ ID NO: 700575 - DNA, 33 bp, Homo sapien
aagatcttcatgattacgttgggcctatccagt

SEQ ID NO: 700576 - DNA, 33 bp, Homo sapien
aagatcttcatgattatgttgggcctatccagt

SEQ ID NO: 700577 - DNA, 33 bp, Homo sapien
gctcttggatcctccacgtaggaatggacaggg

SEQ ID NO: 700578 - DNA, 33 bp, Homo sapien
gctcttggatcctccatgtaggaatggacaggg

SEQ ID NO: 700579 - DNA, 33 bp, Homo sapien
tgtggggaaagaatcccgaatgatgtctagtac

SEQ ID NO: 700580 - DNA, 33 bp, Homo sapien
tgtggggaaagaatcctgaatgatgtctagtac

SEQ ID NO: 700581 - DNA, 33 bp, Homo sapien
atttctatgaaatgaacgagttattgtgtataa

SEQ ID NO: 700582 - DNA, 33 bp, Homo sapien
atttctatgaaatgaatgagttattgtgtataa

SEQ ID NO: 700583 - DNA, 33 bp, Homo sapien
tattatccttcttcaaacaaattgtgaatcaaa

SEQ ID NO: 700584 - DNA, 33 bp, Homo sapien
tattatccttcttcaatcaaattgtgaatcaaa

SEQ ID NO: 700585 - DNA, 33 bp, Homo sapien
tcttgtggtaccaagacgccttttacggagtgg

SEQ ID NO: 700586 - DNA, 33 bp, Homo sapien
tcttgtggtaccaagatgccttttacggagtgg

SEQ ID NO: 700587 - DNA, 33 bp, Homo sapien
tacatttagtgtcttaagtttcatgtgatcgtt

SEQ ID NO: 700588 - DNA, 33 bp, Homo sapien
tacatttagtgtcttacgtttcatgtgatcgtt

SEQ ID NO: 700589 - DNA, 33 bp, Homo sapien
acaggatagaaaataaatgattcaggtcataag

SEQ ID NO: 700590 - DNA, 33 bp, Homo sapien
acaggatagaaaataagtgattcaggtcataag

SEQ ID NO: 700591 - DNA, 33 bp, Homo sapien
atatgaaaattgttcagggctatcatttaaata

SEQ ID NO: 700592 - DNA, 33 bp, Homo sapien
atatgaaaattgttcatggctatcatttaaata

SEQ ID NO: 700593 - DNA, 33 bp, Homo sapien
agcagtgacaagaccactatatattcatgtatg

SEQ ID NO: 700594 - DNA, 33 bp, Homo sapien
agcagtgacaagaccattatatattcatgtatg

SEQ ID NO: 700595 - DNA, 33 bp, Homo sapien
gagtttctgctctgtgaaaagcatcatggcctt

SEQ ID NO: 700596 - DNA, 33 bp, Homo sapien
gagtttctgctctgtgcaaagcatcatggcctt

SEQ ID NO: 700597 - DNA, 33 bp, Homo sapien
ttggtaataaattgcccgccacaaattgcacaa

SEQ ID NO: 700598 - DNA, 33 bp, Homo sapien
ttggtaataaattgcctgccacaaattgcacaa

SEQ ID NO: 700599 - DNA, 33 bp, Homo sapien
ggaagatactatcacaaggttacattttatcag

SEQ ID NO: 700600 - DNA, 33 bp, Homo sapien
ggaagatactatcacacggttacattttatcag

SEQ ID NO: 700601 - DNA, 33 bp, Homo sapien
acataggtaaagagaaataggcagacatggcat

SEQ ID NO: 700602 - DNA, 33 bp, Homo sapien
acataggtaaagagaattaggcagacatggcat

SEQ ID NO: 700603 - DNA, 33 bp, Homo sapien
aagaggaaatcaggacacatcccatgtctaatg

SEQ ID NO: 700604 - DNA, 33 bp, Homo sapien
aagaggaaatcaggacgcatcccatgtctaatg

SEQ ID NO: 700605 - DNA, 33 bp, Homo sapien
tctgggagccaagagacctaagtgtgttcactg

SEQ ID NO: 700606 - DNA, 33 bp, Homo sapien
tctgggagccaagagagctaagtgtgttcactg

SEQ ID NO: 700607 - DNA, 33 bp, Homo sapien
atatagttagatgcaacgaatcagatctaattt

SEQ ID NO: 700608 - DNA, 33 bp, Homo sapien
atatagttagatgcaatgaatcagatctaattt

SEQ ID NO: 700609 - DNA, 33 bp, Homo sapien
gtctgatgactagagaagactggatggaaggtg

SEQ ID NO: 700610 - DNA, 33 bp, Homo sapien
gtctgatgactagagacgactggatggaaggtg

SEQ ID NO: 700611 - DNA, 33 bp, Homo sapien
tttctgtcatgagcaaatgtctgagtcagcttg

SEQ ID NO: 700612 - DNA, 33 bp, Homo sapien
tttctgtcatgagcaactgtctgagtcagcttg

SEQ ID NO: 700613 - DNA, 33 bp, Homo sapien
tttggaatggtgcacaactgagttccaattttc

SEQ ID NO: 700614 - DNA, 33 bp, Homo sapien
tttggaatggtgcacatctgagttccaattttc

SEQ ID NO: 700615 - DNA, 33 bp, Homo sapien
tgaagggttgataccacgttgtattttatagcc

SEQ ID NO: 700616 - DNA, 33 bp, Homo sapien
tgaagggttgataccatgttgtattttatagcc

SEQ ID NO: 700617 - DNA, 33 bp, Homo sapien
atctatatatggctcacgaatattttcctctga

SEQ ID NO: 700618 - DNA, 33 bp, Homo sapien
atctatatatggctcatgaatattttcctctga

SEQ ID NO: 700619 - DNA, 33 bp, Homo sapien
agattccacatataaacgagatcacgcagtatt

SEQ ID NO: 700620 - DNA, 33 bp, Homo sapien
agattccacatataaatgagatcacgcagtatt

SEQ ID NO: 700621 - DNA, 33 bp, Homo sapien
agagcattaggaaaaacagaaaatgcatgcgag

SEQ ID NO: 700622 - DNA, 33 bp, Homo sapien
agagcattaggaaaaatagaaaatgcatgcgag

SEQ ID NO: 700623 - DNA, 33 bp, Homo sapien
aactaactaaattaataaataaatggctacaca

SEQ ID NO: 700624 - DNA, 33 bp, Homo sapien
aactaactaaattaatgaataaatggctacaca

SEQ ID NO: 700625 - DNA, 33 bp, Homo sapien
acatttctccttgggaagaatctcaatcatggt

SEQ ID NO: 700626 - DNA, 33 bp, Homo sapien
acatttctccttgggatgaatctcaatcatggt

SEQ ID NO: 700627 - DNA, 33 bp, Homo sapien
tgtcacagtgatgatacatagtaaagtaattcc

SEQ ID NO: 700628 - DNA, 33 bp, Homo sapien
tgtcacagtgatgatatatagtaaagtaattcc

SEQ ID NO: 700629 - DNA, 33 bp, Homo sapien
atcattgtcaagcacaaaaacatttcctgtcca

SEQ ID NO: 700630 - DNA, 33 bp, Homo sapien
atcattgtcaagcacacaaacatttcctgtcca

SEQ ID NO: 700631 - DNA, 33 bp, Homo sapien
cctttttttattcctcaaaatgtgtatttcttc

SEQ ID NO: 700632 - DNA, 33 bp, Homo sapien
cctttttttattcctcgaaatgtgtatttcttc

SEQ ID NO: 700633 - DNA, 33 bp, Homo sapien
tctctcatataccccaaactaggagttctctgt

SEQ ID NO: 700634 - DNA, 33 bp, Homo sapien
tctctcatataccccagactaggagttctctgt

SEQ ID NO: 700635 - DNA, 33 bp, Homo sapien
ctaggatgccaaagagaagaagacatttttcct

SEQ ID NO: 700636 - DNA, 33 bp, Homo sapien
ctaggatgccaaagaggagaagacatttttcct

SEQ ID NO: 700637 - DNA, 33 bp, Homo sapien
cttgtgtctccaaaaaccacattttaatttgta

SEQ ID NO: 700638 - DNA, 33 bp, Homo sapien
cttgtgtctccaaaaagcacattttaatttgta

SEQ ID NO: 700639 - DNA, 33 bp, Homo sapien
atctgtagaatggagacagacttaatgaagaga

SEQ ID NO: 700640 - DNA, 33 bp, Homo sapien
atctgtagaatggagatagacttaatgaagaga

SEQ ID NO: 700641 - DNA, 33 bp, Homo sapien
gactatactgtggcagaacacaaaacctgggtt

SEQ ID NO: 700642 - DNA, 33 bp, Homo sapien
gactatactgtggcaggacacaaaacctgggtt

SEQ ID NO: 700643 - DNA, 33 bp, Homo sapien
actagacatatcctggaaagttctagtttgctg

SEQ ID NO: 700644 - DNA, 33 bp, Homo sapien
actagacatatcctggcaagttctagtttgctg

SEQ ID NO: 700645 - DNA, 33 bp, Homo sapien
tttattgttgatgtcacgtttatctttgagcaa

SEQ ID NO: 700646 - DNA, 33 bp, Homo sapien
tttattgttgatgtcaggtttatctttgagcaa

SEQ ID NO: 700647 - DNA, 33 bp, Homo sapien
ttgtgattatttctcccgaacttttacagtttc

SEQ ID NO: 700648 - DNA, 33 bp, Homo sapien
ttgtgattatttctcctgaacttttacagtttc

SEQ ID NO: 700649 - DNA, 33 bp, Homo sapien
atatatagtaaaactgcagcctacttttaatca

SEQ ID NO: 700650 - DNA, 33 bp, Homo sapien
atatatagtaaaactggagcctacttttaatca

SEQ ID NO: 700651 - DNA, 33 bp, Homo sapien
ctaataatcaataaccggcataatacagtttgt

SEQ ID NO: 700652 - DNA, 33 bp, Homo sapien
ctaataatcaataacctgcataatacagtttgt

SEQ ID NO: 700653 - DNA, 33 bp, Homo sapien
atgttcccaaaggtgacggtaataggtagtgta

SEQ ID NO: 700654 - DNA, 33 bp, Homo sapien
atgttcccaaaggtgatggtaataggtagtgta

SEQ ID NO: 700655 - DNA, 33 bp, Homo sapien
ctcccattagcttttaactccagatgtggtagc

SEQ ID NO: 700656 - DNA, 33 bp, Homo sapien
ctcccattagcttttatctccagatgtggtagc

SEQ ID NO: 700657 - DNA, 33 bp, Homo sapien
acagttcagttgcccacaagactcaaatttgca

SEQ ID NO: 700658 - DNA, 33 bp, Homo sapien
acagttcagttgcccataagactcaaatttgca

SEQ ID NO: 700659 - DNA, 33 bp, Homo sapien
acaattcttccaagctatttgcaactgtaaaca

SEQ ID NO: 700660 - DNA, 33 bp, Homo sapien
acaattcttccaagctctttgcaactgtaaaca

SEQ ID NO: 700661 - DNA, 33 bp, Homo sapien
ataaggcagatacaaaaaataattactgtgtga

SEQ ID NO: 700662 - DNA, 33 bp, Homo sapien
ataaggcagatacaaacaataattactgtgtga

SEQ ID NO: 700663 - DNA, 33 bp, Homo sapien
gagggtgctggcatcaccactcttttgccctag

SEQ ID NO: 700664 - DNA, 33 bp, Homo sapien
gagggtgctggcatcatcactcttttgccctag

SEQ ID NO: 700665 - DNA, 33 bp, Homo sapien
ctaatgatcttctcaacgctctgtatatccagg

SEQ ID NO: 700666 - DNA, 33 bp, Homo sapien
ctaatgatcttctcaatgctctgtatatccagg

SEQ ID NO: 700667 - DNA, 33 bp, Homo sapien
acatcatagagagcacaacaaaatcgtctaatg

SEQ ID NO: 700668 - DNA, 33 bp, Homo sapien
acatcatagagagcactacaaaatcgtctaatg

SEQ ID NO: 700669 - DNA, 33 bp, Homo sapien
ttgtttaaagtgtgaaaggaatatttaatccat

SEQ ID NO: 700670 - DNA, 33 bp, Homo sapien
ttgtttaaagtgtgaacggaatatttaatccat

SEQ ID NO: 700671 - DNA, 33 bp, Homo sapien
accaacaaaaagtacaaaagtgtgaaaaacatg

SEQ ID NO: 700672 - DNA, 33 bp, Homo sapien
accaacaaaaagtacagaagtgtgaaaaacatg

SEQ ID NO: 700673 - DNA, 33 bp, Homo sapien
cagattttatacatgacagcttttctttgctta

SEQ ID NO: 700674 - DNA, 33 bp, Homo sapien
cagattttatacatgatagcttttctttgctta

SEQ ID NO: 700675 - DNA, 33 bp, Homo sapien
agaataagacctctccaaatgcattaagaccaa

SEQ ID NO: 700676 - DNA, 33 bp, Homo sapien
agaataagacctctcctaatgcattaagaccaa

SEQ ID NO: 700677 - DNA, 33 bp, Homo sapien
acagccctctagaatacggcgttttttcacaga

SEQ ID NO: 700678 - DNA, 33 bp, Homo sapien
acagccctctagaatatggcgttttttcacaga

SEQ ID NO: 700679 - DNA, 33 bp, Homo sapien
gctgttgaccattttacctatcacctttcaagg

SEQ ID NO: 700680 - DNA, 33 bp, Homo sapien
gctgttgaccattttatctatcacctttcaagg

SEQ ID NO: 700681 - DNA, 33 bp, Homo sapien
tactgttgtatacacaaggaagcctcaatcttc

SEQ ID NO: 700682 - DNA, 33 bp, Homo sapien
tactgttgtatacacatggaagcctcaatcttc

SEQ ID NO: 700683 - DNA, 33 bp, Homo sapien
acatttccaccttgatcaggctgcttataatgt

SEQ ID NO: 700684 - DNA, 33 bp, Homo sapien
acatttccaccttgattaggctgcttataatgt

SEQ ID NO: 700685 - DNA, 33 bp, Homo sapien
aatggcatacaataataagtgtttatttctcat

SEQ ID NO: 700686 - DNA, 33 bp, Homo sapien
aatggcatacaataattagtgtttatttctcat

SEQ ID NO: 700687 - DNA, 33 bp, Homo sapien
gtaaaccagaacttcacagtgtccagaaagaga

SEQ ID NO: 700688 - DNA, 33 bp, Homo sapien
gtaaaccagaacttcatagtgtccagaaagaga

SEQ ID NO: 700689 - DNA, 33 bp, Homo sapien
gcctcccacttatagcactactgctttatgatt

SEQ ID NO: 700690 - DNA, 33 bp, Homo sapien
gcctcccacttatagcgctactgctttatgatt

SEQ ID NO: 700691 - DNA, 33 bp, Homo sapien
aacagtgcatttgtaaatcaatattcttggatt

SEQ ID NO: 700692 - DNA, 33 bp, Homo sapien
aacagtgcatttgtaagtcaatattcttggatt

SEQ ID NO: 700693 - DNA, 33 bp, Homo sapien
caaactccataattcaatagggaagacaaatga

SEQ ID NO: 700694 - DNA, 33 bp, Homo sapien
caaactccataattcagtagggaagacaaatga

SEQ ID NO: 700695 - DNA, 33 bp, Homo sapien
tggatttaagttcagaaaagaaattgacaaaag

SEQ ID NO: 700696 - DNA, 33 bp, Homo sapien
tggatttaagttcagagaagaaattgacaaaag

SEQ ID NO: 700697 - DNA, 33 bp, Homo sapien
tgaaaacatcaaaaagaccagcaggtagcccta

SEQ ID NO: 700698 - DNA, 33 bp, Homo sapien
tgaaaacatcaaaaagtccagcaggtagcccta

SEQ ID NO: 700699 - DNA, 33 bp, Homo sapien
ggttactgaaaacaagaagggcatagaatcatg

SEQ ID NO: 700700 - DNA, 33 bp, Homo sapien
ggttactgaaaacaaggagggcatagaatcatg

SEQ ID NO: 700701 - DNA, 33 bp, Homo sapien
tggatgttttctattgccaactgaaaaacacag

SEQ ID NO: 700702 - DNA, 33 bp, Homo sapien
tggatgttttctattgtcaactgaaaaacacag

SEQ ID NO: 700703 - DNA, 33 bp, Homo sapien
gcttctcagagagtccgcagtgggattgaacac

SEQ ID NO: 700704 - DNA, 33 bp, Homo sapien
gcttctcagagagtcctcagtgggattgaacac

SEQ ID NO: 700705 - DNA, 33 bp, Homo sapien
gtgctcctacaaaagcagacctcgagacaagta

SEQ ID NO: 700706 - DNA, 33 bp, Homo sapien
gtgctcctacaaaagccgacctcgagacaagta

SEQ ID NO: 700707 - DNA, 33 bp, Homo sapien
attcatatcaagaacaagtgctcattttatggt

SEQ ID NO: 700708 - DNA, 33 bp, Homo sapien
attcatatcaagaacaggtgctcattttatggt

SEQ ID NO: 700709 - DNA, 33 bp, Homo sapien
agaaaatatccagaggacaaatggcatataaaa

SEQ ID NO: 700710 - DNA, 33 bp, Homo sapien
agaaaatatccagagggcaaatggcatataaaa

SEQ ID NO: 700711 - DNA, 33 bp, Homo sapien
taatcatcatctgcaccctaaggtcttcgtatt

SEQ ID NO: 700712 - DNA, 33 bp, Homo sapien
taatcatcatctgcactctaaggtcttcgtatt

SEQ ID NO: 700713 - DNA, 33 bp, Homo sapien
aatgttagtggtaaacgcaaggcttgattattt

SEQ ID NO: 700714 - DNA, 33 bp, Homo sapien
aatgttagtggtaaactcaaggcttgattattt

SEQ ID NO: 700715 - DNA, 33 bp, Homo sapien
ttctgaaaaagaaaataagaggtcaagcatttt

SEQ ID NO: 700716 - DNA, 33 bp, Homo sapien
ttctgaaaaagaaaatgagaggtcaagcatttt

SEQ ID NO: 700717 - DNA, 33 bp, Homo sapien
tcatggcattctatggcatattttctttatcca

SEQ ID NO: 700718 - DNA, 33 bp, Homo sapien
tcatggcattctatggtatattttctttatcca

SEQ ID NO: 700719 - DNA, 33 bp, Homo sapien
tcttccagagatttcacgagtgtgtaaacaact

SEQ ID NO: 700720 - DNA, 33 bp, Homo sapien
tcttccagagatttcatgagtgtgtaaacaact

SEQ ID NO: 700721 - DNA, 33 bp, Homo sapien
tgtgtatttgcacctccctgtcagactaggagc

SEQ ID NO: 700722 - DNA, 33 bp, Homo sapien
tgtgtatttgcacctctctgtcagactaggagc

SEQ ID NO: 700723 - DNA, 33 bp, Homo sapien
aagagggtactacagaaacaagaggaaaggagg

SEQ ID NO: 700724 - DNA, 33 bp, Homo sapien
aagagggtactacagacacaagaggaaaggagg

SEQ ID NO: 700725 - DNA, 33 bp, Homo sapien
aaaagacaagttttcacagagtgacattactat

SEQ ID NO: 700726 - DNA, 33 bp, Homo sapien
aaaagacaagttttcatagagtgacattactat

SEQ ID NO: 700727 - DNA, 33 bp, Homo sapien
ctgtcacaccatgtcacagagtcttcctcaaca

SEQ ID NO: 700728 - DNA, 33 bp, Homo sapien
ctgtcacaccatgtcatagagtcttcctcaaca

SEQ ID NO: 700729 - DNA, 33 bp, Homo sapien
actgtcctccaatgtgaataaggtttccattat

SEQ ID NO: 700730 - DNA, 33 bp, Homo sapien
actgtcctccaatgtgtataaggtttccattat

SEQ ID NO: 700731 - DNA, 33 bp, Homo sapien
ctctggcactcttatcactagaaattgtcaggc

SEQ ID NO: 700732 - DNA, 33 bp, Homo sapien
ctctggcactcttatcgctagaaattgtcaggc

SEQ ID NO: 700733 - DNA, 33 bp, Homo sapien
tgcagaatcactgatgaaatacagagcttcaaa

SEQ ID NO: 700734 - DNA, 33 bp, Homo sapien
tgcagaatcactgatggaatacagagcttcaaa

SEQ ID NO: 700735 - DNA, 33 bp, Homo sapien
gcaggaaactacaagaccaattcttcttcataa

SEQ ID NO: 700736 - DNA, 33 bp, Homo sapien
gcaggaaactacaagagcaattcttcttcataa

SEQ ID NO: 700737 - DNA, 33 bp, Homo sapien
taaagaggtatgcaaacgacagggaagtcagtg

SEQ ID NO: 700738 - DNA, 33 bp, Homo sapien
taaagaggtatgcaaatgacagggaagtcagtg

SEQ ID NO: 700739 - DNA, 33 bp, Homo sapien
atgtttattgtgtcaaatacctgtggagcatag

SEQ ID NO: 700740 - DNA, 33 bp, Homo sapien
atgtttattgtgtcaagtacctgtggagcatag

SEQ ID NO: 700741 - DNA, 33 bp, Homo sapien
attcatagcaaatggcagcaattggagcactgg

SEQ ID NO: 700742 - DNA, 33 bp, Homo sapien
attcatagcaaatggcggcaattggagcactgg

SEQ ID NO: 700743 - DNA, 33 bp, Homo sapien
ttctaaggtagcaataagcaaataaccataaca

SEQ ID NO: 700744 - DNA, 33 bp, Homo sapien
ttctaaggtagcaataggcaaataaccataaca

SEQ ID NO: 700745 - DNA, 33 bp, Homo sapien
atcttcagtatccttcacaacagcaatatttgt

SEQ ID NO: 700746 - DNA, 33 bp, Homo sapien
atcttcagtatccttcgcaacagcaatatttgt

SEQ ID NO: 700747 - DNA, 33 bp, Homo sapien
cctcaaatatcttcaactcaaattgccaaaagt

SEQ ID NO: 700748 - DNA, 33 bp, Homo sapien
cctcaaatatcttcaagtcaaattgccaaaagt

SEQ ID NO: 700749 - DNA, 33 bp, Homo sapien
atttacatatgatatcagataatacttacttat

SEQ ID NO: 700750 - DNA, 33 bp, Homo sapien
atttacatatgatatctgataatacttacttat

SEQ ID NO: 700751 - DNA, 33 bp, Homo sapien
tctacaaatgaagaaacagcaccgtgaaataag

SEQ ID NO: 700752 - DNA, 33 bp, Homo sapien
tctacaaatgaagaaatagcaccgtgaaataag

SEQ ID NO: 700753 - DNA, 33 bp, Homo sapien
agtggccatacaactaacaacttacattaatta

SEQ ID NO: 700754 - DNA, 33 bp, Homo sapien
agtggccatacaactagcaacttacattaatta

SEQ ID NO: 700755 - DNA, 33 bp, Homo sapien
actcataaaaggtcatcaagcttcaccttgaac

SEQ ID NO: 700756 - DNA, 33 bp, Homo sapien
actcataaaaggtcattaagcttcaccttgaac

SEQ ID NO: 700757 - DNA, 33 bp, Homo sapien
gtcaatattccttacaatggcactaaaagccca

SEQ ID NO: 700758 - DNA, 33 bp, Homo sapien
gtcaatattccttacattggcactaaaagccca

SEQ ID NO: 700759 - DNA, 33 bp, Homo sapien
ttgtaaatattgctctaaagataaaggcaaaag

SEQ ID NO: 700760 - DNA, 33 bp, Homo sapien
ttgtaaatattgctctgaagataaaggcaaaag

SEQ ID NO: 700761 - DNA, 33 bp, Homo sapien
gatgctggtcaatcaagaaaaacagaggcagac

SEQ ID NO: 700762 - DNA, 33 bp, Homo sapien
gatgctggtcaatcaataaaaacagaggcagac

SEQ ID NO: 700763 - DNA, 33 bp, Homo sapien
aaaccacagctagagacgatgaagagaaatgca

SEQ ID NO: 700764 - DNA, 33 bp, Homo sapien
aaaccacagctagagatgatgaagagaaatgca

SEQ ID NO: 700765 - DNA, 33 bp, Homo sapien
tagaggactaagataaacagtaggctatggaca

SEQ ID NO: 700766 - DNA, 33 bp, Homo sapien
tagaggactaagataagcagtaggctatggaca

SEQ ID NO: 700767 - DNA, 33 bp, Homo sapien
gttgttccacccaagaatctctcctgtgctgta

SEQ ID NO: 700768 - DNA, 33 bp, Homo sapien
gttgttccacccaagattctctcctgtgctgta

SEQ ID NO: 700769 - DNA, 33 bp, Homo sapien
ccatttggatagcccacatgtacttttattgca

SEQ ID NO: 700770 - DNA, 33 bp, Homo sapien
ccatttggatagcccagatgtacttttattgca

SEQ ID NO: 700771 - DNA, 33 bp, Homo sapien
ccttattaaaatgtgacacaagtgaaggaagat

SEQ ID NO: 700772 - DNA, 33 bp, Homo sapien
ccttattaaaatgtgatacaagtgaaggaagat

SEQ ID NO: 700773 - DNA, 33 bp, Homo sapien
catttaataaacttcaataaatatgttggctac

SEQ ID NO: 700774 - DNA, 33 bp, Homo sapien
catttaataaacttcagtaaatatgttggctac

SEQ ID NO: 700775 - DNA, 33 bp, Homo sapien
tgaattacgtagttcaagaagcaatattgcctc

SEQ ID NO: 700776 - DNA, 33 bp, Homo sapien
tgaattacgtagttcaggaagcaatattgcctc

SEQ ID NO: 700777 - DNA, 33 bp, Homo sapien
tctcagttgttgtcccaatctaaatgcttttat

SEQ ID NO: 700778 - DNA, 33 bp, Homo sapien
tctcagttgttgtccctatctaaatgcttttat

SEQ ID NO: 700779 - DNA, 33 bp, Homo sapien
acccactctacaccaaacattcttctaagcttt

SEQ ID NO: 700780 - DNA, 33 bp, Homo sapien
acccactctacaccaagcattcttctaagcttt

SEQ ID NO: 700781 - DNA, 33 bp, Homo sapien
aatgaatgacagcataatagatttgtttacagc

SEQ ID NO: 700782 - DNA, 33 bp, Homo sapien
aatgaatgacagcatagtagatttgtttacagc

SEQ ID NO: 700783 - DNA, 33 bp, Homo sapien
atgaaaagggcttaaccagaaagagaggaggga

SEQ ID NO: 700784 - DNA, 33 bp, Homo sapien
atgaaaagggcttaactagaaagagaggaggga

SEQ ID NO: 700785 - DNA, 33 bp, Homo sapien
tgatataaaaaacagcagagaagtatgtgtttt

SEQ ID NO: 700786 - DNA, 33 bp, Homo sapien
tgatataaaaaacagcggagaagtatgtgtttt

SEQ ID NO: 700787 - DNA, 33 bp, Homo sapien
aagccttgacccttgcggaagtgcattggataa

SEQ ID NO: 700788 - DNA, 33 bp, Homo sapien
aagccttgacccttgctgaagtgcattggataa

SEQ ID NO: 700789 - DNA, 33 bp, Homo sapien
aagggggcattactcaatcaaagctgtgtgaca

SEQ ID NO: 700790 - DNA, 33 bp, Homo sapien
aagggggcattactcagtcaaagctgtgtgaca

SEQ ID NO: 700791 - DNA, 33 bp, Homo sapien
ggaaaacaagtgaataagttcaagaaaccattg

SEQ ID NO: 700792 - DNA, 33 bp, Homo sapien
ggaaaacaagtgaatacgttcaagaaaccattg

SEQ ID NO: 700793 - DNA, 33 bp, Homo sapien
acaacagatatagagcacctcattagtgaattt

SEQ ID NO: 700794 - DNA, 33 bp, Homo sapien
acaacagatatagagcgcctcattagtgaattt

SEQ ID NO: 700795 - DNA, 33 bp, Homo sapien
tattaaaagaaaacacacttgcatttgtcaatt

SEQ ID NO: 700796 - DNA, 33 bp, Homo sapien
tattaaaagaaaacacgcttgcatttgtcaatt

SEQ ID NO: 700797 - DNA, 33 bp, Homo sapien
ttcatatgggttagtagatataaagaggttaaa

SEQ ID NO: 700798 - DNA, 33 bp, Homo sapien
ttcatatgggttagtatatataaagaggttaaa

SEQ ID NO: 700799 - DNA, 33 bp, Homo sapien
gcccaatttgagataacgcaacaagacatttta

SEQ ID NO: 700800 - DNA, 33 bp, Homo sapien
gcccaatttgagataatgcaacaagacatttta

SEQ ID NO: 700801 - DNA, 33 bp, Homo sapien
actggggcataggaaactactctgccttgaact

SEQ ID NO: 700802 - DNA, 33 bp, Homo sapien
actggggcataggaaagtactctgccttgaact

SEQ ID NO: 700803 - DNA, 33 bp, Homo sapien
acagccttgaagaaaaggacccaagcatagcag

SEQ ID NO: 700804 - DNA, 33 bp, Homo sapien
acagccttgaagaaaatgacccaagcatagcag

SEQ ID NO: 700805 - DNA, 33 bp, Homo sapien
tccagtgatttaactacaatggccttgttgggg

SEQ ID NO: 700806 - DNA, 33 bp, Homo sapien
tccagtgatttaactataatggccttgttgggg

SEQ ID NO: 700807 - DNA, 33 bp, Homo sapien
gaagaggaagagagaccggtgaaagcatttctt

SEQ ID NO: 700808 - DNA, 33 bp, Homo sapien
gaagaggaagagagactggtgaaagcatttctt

SEQ ID NO: 700809 - DNA, 33 bp, Homo sapien
gaaggaaatcatataactgagttgagtagtttc

SEQ ID NO: 700810 - DNA, 33 bp, Homo sapien
gaaggaaatcatataattgagttgagtagtttc

SEQ ID NO: 700811 - DNA, 33 bp, Homo sapien
acagctatttgagatgaagtacaagtcaaaatg

SEQ ID NO: 700812 - DNA, 33 bp, Homo sapien
acagctatttgagatggagtacaagtcaaaatg

SEQ ID NO: 700813 - DNA, 33 bp, Homo sapien
gcttttacattttttcaatagagaggtaaagtt

SEQ ID NO: 700814 - DNA, 33 bp, Homo sapien
gcttttacattttttccatagagaggtaaagtt

SEQ ID NO: 700815 - DNA, 33 bp, Homo sapien
aatgtcaaattttttacaggacttggaaggtca

SEQ ID NO: 700816 - DNA, 33 bp, Homo sapien
aatgtcaaattttttataggacttggaaggtca

SEQ ID NO: 700817 - DNA, 33 bp, Homo sapien
gccctgacttaaatcactaccatcttttacctg

SEQ ID NO: 700818 - DNA, 33 bp, Homo sapien
gccctgacttaaatcagtaccatcttttacctg

SEQ ID NO: 700819 - DNA, 33 bp, Homo sapien
gtgtatggataccaagcagacaaggtgtagacc

SEQ ID NO: 700820 - DNA, 33 bp, Homo sapien
gtgtatggataccaagtagacaaggtgtagacc

SEQ ID NO: 700821 - DNA, 33 bp, Homo sapien
ctttgcctatagatgaaaaaatgaatgttggtt

SEQ ID NO: 700822 - DNA, 33 bp, Homo sapien
ctttgcctatagatgagaaaatgaatgttggtt

SEQ ID NO: 700823 - DNA, 33 bp, Homo sapien
gcctggactagctatcagaattttgtacctagt

SEQ ID NO: 700824 - DNA, 33 bp, Homo sapien
gcctggactagctatcggaattttgtacctagt

SEQ ID NO: 700825 - DNA, 33 bp, Homo sapien
tgagaaacagcaacagcctaactctctactctt

SEQ ID NO: 700826 - DNA, 33 bp, Homo sapien
tgagaaacagcaacaggctaactctctactctt

SEQ ID NO: 700827 - DNA, 33 bp, Homo sapien
aatattattggcatggaaaaatcatcaaaatat

SEQ ID NO: 700828 - DNA, 33 bp, Homo sapien
aatattattggcatgggaaaatcatcaaaatat

SEQ ID NO: 700829 - DNA, 33 bp, Homo sapien
tcaactcaagtacatacgataagttttaaagga

SEQ ID NO: 700830 - DNA, 33 bp, Homo sapien
tcaactcaagtacatatgataagttttaaagga

SEQ ID NO: 700831 - DNA, 33 bp, Homo sapien
gtatttacaggtgctacgaacaaattcaaaatc

SEQ ID NO: 700832 - DNA, 33 bp, Homo sapien
gtatttacaggtgctatgaacaaattcaaaatc

SEQ ID NO: 700833 - DNA, 33 bp, Homo sapien
tattaggactgctaacacttctatctccatcac

SEQ ID NO: 700834 - DNA, 33 bp, Homo sapien
tattaggactgctaacccttctatctccatcac

SEQ ID NO: 700835 - DNA, 33 bp, Homo sapien
ccatagtggtgtctgaataaaaatttgaagact

SEQ ID NO: 700836 - DNA, 33 bp, Homo sapien
ccatagtggtgtctgattaaaaatttgaagact

SEQ ID NO: 700837 - DNA, 33 bp, Homo sapien
tagctgcattctattcacagaaatatttgtcaa

SEQ ID NO: 700838 - DNA, 33 bp, Homo sapien
tagctgcattctattcccagaaatatttgtcaa

SEQ ID NO: 700839 - DNA, 33 bp, Homo sapien
cacagtgtgcttctgaatacatcattgtcttca

SEQ ID NO: 700840 - DNA, 33 bp, Homo sapien
cacagtgtgcttctgagtacatcattgtcttca

SEQ ID NO: 700841 - DNA, 33 bp, Homo sapien
atgcttggcaattgcacaaagcatacgatgaga

SEQ ID NO: 700842 - DNA, 33 bp, Homo sapien
atgcttggcaattgcataaagcatacgatgaga

SEQ ID NO: 700843 - DNA, 33 bp, Homo sapien
taaaataaattgagacagatcaacatacactaa

SEQ ID NO: 700844 - DNA, 33 bp, Homo sapien
taaaataaattgagactgatcaacatacactaa

SEQ ID NO: 700845 - DNA, 33 bp, Homo sapien
tcaaataatacaatgacgttctaagagtctgtg

SEQ ID NO: 700846 - DNA, 33 bp, Homo sapien
tcaaataatacaatgatgttctaagagtctgtg

SEQ ID NO: 700847 - DNA, 33 bp, Homo sapien
aaggcttgtgatgttagtaaatctatgtgtggt

SEQ ID NO: 700848 - DNA, 33 bp, Homo sapien
aaggcttgtgatgttattaaatctatgtgtggt

SEQ ID NO: 700849 - DNA, 33 bp, Homo sapien
caagctacacaaactcgccatgcccaactttcc

SEQ ID NO: 700850 - DNA, 33 bp, Homo sapien
caagctacacaaactctccatgcccaactttcc

SEQ ID NO: 700851 - DNA, 33 bp, Homo sapien
cccaaactgcctagagcctcaccttcatctcat

SEQ ID NO: 700852 - DNA, 33 bp, Homo sapien
cccaaactgcctagagtctcaccttcatctcat

SEQ ID NO: 700853 - DNA, 33 bp, Homo sapien
caaagtgcctgaagctcacaacatgaatattag

SEQ ID NO: 700854 - DNA, 33 bp, Homo sapien
caaagtgcctgaagctgacaacatgaatattag

SEQ ID NO: 700855 - DNA, 33 bp, Homo sapien
ttatactcgctgaaaccgtagaaaatagatgat

SEQ ID NO: 700856 - DNA, 33 bp, Homo sapien
ttatactcgctgaaactgtagaaaatagatgat

SEQ ID NO: 700857 - DNA, 33 bp, Homo sapien
gttaaggtcagaatcaatgaaaggcaggtaaat

SEQ ID NO: 700858 - DNA, 33 bp, Homo sapien
gttaaggtcagaatcagtgaaaggcaggtaaat

SEQ ID NO: 700859 - DNA, 33 bp, Homo sapien
taagattcagtagaaagttgaaagacaatcaga

SEQ ID NO: 700860 - DNA, 33 bp, Homo sapien
taagattcagtagaaatttgaaagacaatcaga

SEQ ID NO: 700861 - DNA, 33 bp, Homo sapien
cctgatgaacaacacaaatgcaaaaatcttcaa

SEQ ID NO: 700862 - DNA, 33 bp, Homo sapien
cctgatgaacaacacagatgcaaaaatcttcaa

SEQ ID NO: 700863 - DNA, 33 bp, Homo sapien
atttctggcatggctacagtgaactttagatga

SEQ ID NO: 700864 - DNA, 33 bp, Homo sapien
atttctggcatggctagagtgaactttagatga

SEQ ID NO: 700865 - DNA, 33 bp, Homo sapien
gctcttcacactcttccagagacaatagaacta

SEQ ID NO: 700866 - DNA, 33 bp, Homo sapien
gctcttcacactcttctagagacaatagaacta

SEQ ID NO: 700867 - DNA, 33 bp, Homo sapien
tgaataccatgaaagagtattatccagatatat

SEQ ID NO: 700868 - DNA, 33 bp, Homo sapien
tgaataccatgaaagattattatccagatatat

SEQ ID NO: 700869 - DNA, 33 bp, Homo sapien
aaattataaagctacagataaaattttgctact

SEQ ID NO: 700870 - DNA, 33 bp, Homo sapien
aaattataaagctacatataaaattttgctact

SEQ ID NO: 700871 - DNA, 33 bp, Homo sapien
agcttattatctcagacggcaaccttgaattct

SEQ ID NO: 700872 - DNA, 33 bp, Homo sapien
agcttattatctcagatggcaaccttgaattct

SEQ ID NO: 700873 - DNA, 33 bp, Homo sapien
ctcacatattaatcctcacaaaaatctcgacat

SEQ ID NO: 700874 - DNA, 33 bp, Homo sapien
ctcacatattaatccttacaaaaatctcgacat

SEQ ID NO: 700875 - DNA, 33 bp, Homo sapien
tctgtcttaggtgaaacaggatttatgtgaatg

SEQ ID NO: 700876 - DNA, 33 bp, Homo sapien
tctgtcttaggtgaaataggatttatgtgaatg

SEQ ID NO: 700877 - DNA, 33 bp, Homo sapien
ttaaaaggagcaaccaagttaaaatattggaat

SEQ ID NO: 700878 - DNA, 33 bp, Homo sapien
ttaaaaggagcaaccaggttaaaatattggaat

SEQ ID NO: 700879 - DNA, 33 bp, Homo sapien
ctcttcaaacataaaacgacccactgacttgtt

SEQ ID NO: 700880 - DNA, 33 bp, Homo sapien
ctcttcaaacataaaatgacccactgacttgtt

SEQ ID NO: 700881 - DNA, 33 bp, Homo sapien
ttctccctaatccatccccttttcttaagcagt

SEQ ID NO: 700882 - DNA, 33 bp, Homo sapien
ttctccctaatccatctccttttcttaagcagt

SEQ ID NO: 700883 - DNA, 33 bp, Homo sapien
tgccatgacagtagaaaaattaaattgccacca

SEQ ID NO: 700884 - DNA, 33 bp, Homo sapien
tgccatgacagtagaacaattaaattgccacca

SEQ ID NO: 700885 - DNA, 33 bp, Homo sapien
gtatgtatcttaattaccaccatccaatccacc

SEQ ID NO: 700886 - DNA, 33 bp, Homo sapien
gtatgtatcttaattatcaccatccaatccacc

SEQ ID NO: 700887 - DNA, 33 bp, Homo sapien
ttctttttatatcgacccatgttacagatgata

SEQ ID NO: 700888 - DNA, 33 bp, Homo sapien
ttctttttatatcgactcatgttacagatgata

SEQ ID NO: 700889 - DNA, 33 bp, Homo sapien
acataagaaagataaaagtcttgcttctgtcta

SEQ ID NO: 700890 - DNA, 33 bp, Homo sapien
acataagaaagataaatgtcttgcttctgtcta

SEQ ID NO: 700891 - DNA, 33 bp, Homo sapien
cttctgtctattgtcaccctgcgccgcctcccc

SEQ ID NO: 700892 - DNA, 33 bp, Homo sapien
cttctgtctattgtcagcctgcgccgcctcccc

SEQ ID NO: 700893 - DNA, 33 bp, Homo sapien
agtactgtttgttttagagtgcaaattaagtcc

SEQ ID NO: 700894 - DNA, 33 bp, Homo sapien
agtactgtttgttttatagtgcaaattaagtcc

SEQ ID NO: 700895 - DNA, 33 bp, Homo sapien
gtacagaaaatacttacgctaccttgcaggtct

SEQ ID NO: 700896 - DNA, 33 bp, Homo sapien
gtacagaaaatacttatgctaccttgcaggtct

SEQ ID NO: 700897 - DNA, 33 bp, Homo sapien
agcaggataacagtacaaataaataactctaaa

SEQ ID NO: 700898 - DNA, 33 bp, Homo sapien
agcaggataacagtaccaataaataactctaaa

SEQ ID NO: 700899 - DNA, 33 bp, Homo sapien
ggccacatttgatttacagacactaaccaatac

SEQ ID NO: 700900 - DNA, 33 bp, Homo sapien
ggccacatttgatttatagacactaaccaatac

SEQ ID NO: 700901 - DNA, 33 bp, Homo sapien
ggtagacttgagtaaacctgagaagcattaaaa

SEQ ID NO: 700902 - DNA, 33 bp, Homo sapien
ggtagacttgagtaaatctgagaagcattaaaa

SEQ ID NO: 700903 - DNA, 33 bp, Homo sapien
acatccttattcatggcacagcatcatccatta

SEQ ID NO: 700904 - DNA, 33 bp, Homo sapien
acatccttattcatggtacagcatcatccatta

SEQ ID NO: 700905 - DNA, 33 bp, Homo sapien
actcaccttaatccaaactctaaaatctcataa

SEQ ID NO: 700906 - DNA, 33 bp, Homo sapien
actcaccttaatccaagctctaaaatctcataa

SEQ ID NO: 700907 - DNA, 33 bp, Homo sapien
agtgaaagacgaatataactgcaagcctagata

SEQ ID NO: 700908 - DNA, 33 bp, Homo sapien
agtgaaagacgaatatgactgcaagcctagata

SEQ ID NO: 700909 - DNA, 33 bp, Homo sapien
gcaaaaacaattgaccaattatccatctactat

SEQ ID NO: 700910 - DNA, 33 bp, Homo sapien
gcaaaaacaattgacccattatccatctactat

SEQ ID NO: 700911 - DNA, 33 bp, Homo sapien
aagaaagttgtcatgaacattgaatggacacta

SEQ ID NO: 700912 - DNA, 33 bp, Homo sapien
aagaaagttgtcatgagcattgaatggacacta

SEQ ID NO: 700913 - DNA, 33 bp, Homo sapien
atatcttgtgcaggaaaagaaataagttgttga

SEQ ID NO: 700914 - DNA, 33 bp, Homo sapien
atatcttgtgcaggaagagaaataagttgttga

SEQ ID NO: 700915 - DNA, 33 bp, Homo sapien
gaatcatctgtgcttcaattcattgcaaaatgt

SEQ ID NO: 700916 - DNA, 33 bp, Homo sapien
gaatcatctgtgcttcgattcattgcaaaatgt

SEQ ID NO: 700917 - DNA, 33 bp, Homo sapien
tgaaaaaatgttggtaagtaatatgtttcagtt

SEQ ID NO: 700918 - DNA, 33 bp, Homo sapien
tgaaaaaatgttggtaggtaatatgtttcagtt

SEQ ID NO: 700919 - DNA, 33 bp, Homo sapien
tagaaccagtttctcaatcccagaaatagttca

SEQ ID NO: 700920 - DNA, 33 bp, Homo sapien
tagaaccagtttctcagtcccagaaatagttca

SEQ ID NO: 700921 - DNA, 33 bp, Homo sapien
tagtccagtgatggaaagtgtggagaaatggaa

SEQ ID NO: 700922 - DNA, 33 bp, Homo sapien
tagtccagtgatggaaggtgtggagaaatggaa

SEQ ID NO: 700923 - DNA, 33 bp, Homo sapien
ggtatgctttactaacacctgtctttgcctttc

SEQ ID NO: 700924 - DNA, 33 bp, Homo sapien
ggtatgctttactaacgcctgtctttgcctttc

SEQ ID NO: 700925 - DNA, 33 bp, Homo sapien
atgcctgcaggccatcaacctgtggaataaggc

SEQ ID NO: 700926 - DNA, 33 bp, Homo sapien
atgcctgcaggccatcgacctgtggaataaggc

SEQ ID NO: 700927 - DNA, 33 bp, Homo sapien
attttatctacttaacacctcttgctttgggag

SEQ ID NO: 700928 - DNA, 33 bp, Homo sapien
attttatctacttaacgcctcttgctttgggag

SEQ ID NO: 700929 - DNA, 33 bp, Homo sapien
tgaaaagcaactgaaaacaattattcatgtcat

SEQ ID NO: 700930 - DNA, 33 bp, Homo sapien
tgaaaagcaactgaaagcaattattcatgtcat

SEQ ID NO: 700931 - DNA, 33 bp, Homo sapien
ccttagggatttgaaaactactctcgtgtagga

SEQ ID NO: 700932 - DNA, 33 bp, Homo sapien
ccttagggatttgaaagctactctcgtgtagga

SEQ ID NO: 700933 - DNA, 33 bp, Homo sapien
tcaatcaattttgtgccctgaaaccacagtagt

SEQ ID NO: 700934 - DNA, 33 bp, Homo sapien
tcaatcaattttgtgcgctgaaaccacagtagt

SEQ ID NO: 700935 - DNA, 33 bp, Homo sapien
tgtattacagcaacctaaagatgtaagaaattg

SEQ ID NO: 700936 - DNA, 33 bp, Homo sapien
tgtattacagcaacctgaagatgtaagaaattg

SEQ ID NO: 700937 - DNA, 33 bp, Homo sapien
atttgttgcctgggtacattgtgtcatgcttag

SEQ ID NO: 700938 - DNA, 33 bp, Homo sapien
atttgttgcctgggtatattgtgtcatgcttag

SEQ ID NO: 700939 - DNA, 33 bp, Homo sapien
ttgagatggcaacctccaaagggagaggacata

SEQ ID NO: 700940 - DNA, 33 bp, Homo sapien
ttgagatggcaacctctaaagggagaggacata

SEQ ID NO: 700941 - DNA, 33 bp, Homo sapien
catgacgtttataggcagcaaatatccaaaata

SEQ ID NO: 700942 - DNA, 33 bp, Homo sapien
catgacgtttataggcggcaaatatccaaaata

SEQ ID NO: 700943 - DNA, 33 bp, Homo sapien
tctgattgttcaaaaaagcctagcatctcctcc

SEQ ID NO: 700944 - DNA, 33 bp, Homo sapien
tctgattgttcaaaaaggcctagcatctcctcc

SEQ ID NO: 700945 - DNA, 33 bp, Homo sapien
tttttagcacttatcaatatctgacagtatctg

SEQ ID NO: 700946 - DNA, 33 bp, Homo sapien
tttttagcacttatcagtatctgacagtatctg

SEQ ID NO: 700947 - DNA, 33 bp, Homo sapien
aaataaaaattggagaaaatagtattgacaact

SEQ ID NO: 700948 - DNA, 33 bp, Homo sapien
aaataaaaattggagacaatagtattgacaact

SEQ ID NO: 700949 - DNA, 33 bp, Homo sapien
tcaaacaagtcttacacgattatagtacaacct

SEQ ID NO: 700950 - DNA, 33 bp, Homo sapien
tcaaacaagtcttacatgattatagtacaacct

SEQ ID NO: 700951 - DNA, 33 bp, Homo sapien
catttagaagtgaaaaagtttctggatttgtga

SEQ ID NO: 700952 - DNA, 33 bp, Homo sapien
catttagaagtgaaaatgtttctggatttgtga

SEQ ID NO: 700953 - DNA, 33 bp, Homo sapien
tgtaaaataaacagaagagaatgctacaggaaa

SEQ ID NO: 700954 - DNA, 33 bp, Homo sapien
tgtaaaataaacagaatagaatgctacaggaaa

SEQ ID NO: 700955 - DNA, 33 bp, Homo sapien
caggtgtgatcaaaacactaagtaggattctat

SEQ ID NO: 700956 - DNA, 33 bp, Homo sapien
caggtgtgatcaaaacgctaagtaggattctat

SEQ ID NO: 700957 - DNA, 33 bp, Homo sapien
ctatggatctaaaaaaagacttccttagtttga

SEQ ID NO: 700958 - DNA, 33 bp, Homo sapien
ctatggatctaaaaaacgacttccttagtttga

SEQ ID NO: 700959 - DNA, 33 bp, Homo sapien
agatccatagggtaacacaagaacttgatgctt

SEQ ID NO: 700960 - DNA, 33 bp, Homo sapien
agatccatagggtaacgcaagaacttgatgctt

SEQ ID NO: 700961 - DNA, 33 bp, Homo sapien
gatagttcactgaagcactataaaagtaacaca

SEQ ID NO: 700962 - DNA, 33 bp, Homo sapien
gatagttcactgaagcgctataaaagtaacaca

SEQ ID NO: 700963 - DNA, 33 bp, Homo sapien
tacacttttaaggtcactctacaaataagcttc

SEQ ID NO: 700964 - DNA, 33 bp, Homo sapien
tacacttttaaggtcattctacaaataagcttc

SEQ ID NO: 700965 - DNA, 33 bp, Homo sapien
ctgattttacataaaaagatgaactttctgtat

SEQ ID NO: 700966 - DNA, 33 bp, Homo sapien
ctgattttacataaaaggatgaactttctgtat

SEQ ID NO: 700967 - DNA, 33 bp, Homo sapien
aagattattaaccactcaaacaccacacacaca

SEQ ID NO: 700968 - DNA, 33 bp, Homo sapien
aagattattaaccacttaaacaccacacacaca

SEQ ID NO: 700969 - DNA, 33 bp, Homo sapien
gtagctgggactatgacattgtgccaccatgcc

SEQ ID NO: 700970 - DNA, 33 bp, Homo sapien
gtagctgggactatgatattgtgccaccatgcc

SEQ ID NO: 700971 - DNA, 33 bp, Homo sapien
aagatgatcaaaatacacttagtcatggaaagg

SEQ ID NO: 700972 - DNA, 33 bp, Homo sapien
aagatgatcaaaatacgcttagtcatggaaagg

SEQ ID NO: 700973 - DNA, 33 bp, Homo sapien
ctgacgcttagcaactcacatgaataaaatgtt

SEQ ID NO: 700974 - DNA, 33 bp, Homo sapien
ctgacgcttagcaacttacatgaataaaatgtt

SEQ ID NO: 700975 - DNA, 33 bp, Homo sapien
cagtgtaacgatgagaaaatttccagagtagag

SEQ ID NO: 700976 - DNA, 33 bp, Homo sapien
cagtgtaacgatgagataatttccagagtagag

SEQ ID NO: 700977 - DNA, 33 bp, Homo sapien
gcagcgatgagatagaagtcacaatattagaga

SEQ ID NO: 700978 - DNA, 33 bp, Homo sapien
gcagcgatgagatagaggtcacaatattagaga

SEQ ID NO: 700979 - DNA, 33 bp, Homo sapien
caagacaagaaaatgcaagttaagaccacggta

SEQ ID NO: 700980 - DNA, 33 bp, Homo sapien
caagacaagaaaatgccagttaagaccacggta

SEQ ID NO: 700981 - DNA, 33 bp, Homo sapien
ctccacttacccactgcatgatattgttggtgt

SEQ ID NO: 700982 - DNA, 33 bp, Homo sapien
ctccacttacccactgtatgatattgttggtgt

SEQ ID NO: 700983 - DNA, 33 bp, Homo sapien
cttctaacatcccaaaagatacagctgtgggag

SEQ ID NO: 700984 - DNA, 33 bp, Homo sapien
cttctaacatcccaaaggatacagctgtgggag

SEQ ID NO: 700985 - DNA, 33 bp, Homo sapien
catacattccttaatccgataatgtatacattt

SEQ ID NO: 700986 - DNA, 33 bp, Homo sapien
catacattccttaatctgataatgtatacattt

SEQ ID NO: 700987 - DNA, 33 bp, Homo sapien
catgctagattaaaagcagtagaagccaccaaa

SEQ ID NO: 700988 - DNA, 33 bp, Homo sapien
catgctagattaaaagtagtagaagccaccaaa

SEQ ID NO: 700989 - DNA, 33 bp, Homo sapien
gaacacttcctttggcagaatattgagctatgg

SEQ ID NO: 700990 - DNA, 33 bp, Homo sapien
gaacacttcctttggctgaatattgagctatgg

SEQ ID NO: 700991 - DNA, 33 bp, Homo sapien
tttttggcccttccggaatgccttcaaaatatg

SEQ ID NO: 700992 - DNA, 33 bp, Homo sapien
tttttggcccttccggtatgccttcaaaatatg

SEQ ID NO: 700993 - DNA, 33 bp, Homo sapien
ttgttatactctttcactcataaaagtggctaa

SEQ ID NO: 700994 - DNA, 33 bp, Homo sapien
ttgttatactctttcattcataaaagtggctaa

SEQ ID NO: 700995 - DNA, 33 bp, Homo sapien
aacttcacatcaagcaaaattctgctctattca

SEQ ID NO: 700996 - DNA, 33 bp, Homo sapien
aacttcacatcaagcacaattctgctctattca

SEQ ID NO: 700997 - DNA, 33 bp, Homo sapien
atgaaataacagtaaaacaaccacttcctttta

SEQ ID NO: 700998 - DNA, 33 bp, Homo sapien
atgaaataacagtaaagcaaccacttcctttta

SEQ ID NO: 700999 - DNA, 33 bp, Homo sapien
aaaaaagatgatgggaaatggtgaaatcagtac

SEQ ID NO: 701000 - DNA, 33 bp, Homo sapien
aaaaaagatgatgggagatggtgaaatcagtac

SEQ ID NO: 701001 - DNA, 33 bp, Homo sapien
atattacttcagctcaatctccattattgggtc

SEQ ID NO: 701002 - DNA, 33 bp, Homo sapien
atattacttcagctcagtctccattattgggtc

SEQ ID NO: 701003 - DNA, 33 bp, Homo sapien
ttcattagggtgaataaaccttctagaggattt

SEQ ID NO: 701004 - DNA, 33 bp, Homo sapien
ttcattagggtgaatataccttctagaggattt

SEQ ID NO: 701005 - DNA, 33 bp, Homo sapien
atcattctacccaaaagacacgtgtacctgtat

SEQ ID NO: 701006 - DNA, 33 bp, Homo sapien
atcattctacccaaaatacacgtgtacctgtat

SEQ ID NO: 701007 - DNA, 33 bp, Homo sapien
taaggatcagaaaaaaaagggaggacttatctc

SEQ ID NO: 701008 - DNA, 33 bp, Homo sapien
taaggatcagaaaaaagagggaggacttatctc

SEQ ID NO: 701009 - DNA, 33 bp, Homo sapien
tatatattggaaagacaggagtattagtcatgg

SEQ ID NO: 701010 - DNA, 33 bp, Homo sapien
tatatattggaaagactggagtattagtcatgg

SEQ ID NO: 701011 - DNA, 33 bp, Homo sapien
cctgggagagtaagtaacttgcacggttggaca

SEQ ID NO: 701012 - DNA, 33 bp, Homo sapien
cctgggagagtaagtatcttgcacggttggaca

SEQ ID NO: 701013 - DNA, 33 bp, Homo sapien
atttagcccaattaacagtgccattttatttag

SEQ ID NO: 701014 - DNA, 33 bp, Homo sapien
atttagcccaattaactgtgccattttatttag

SEQ ID NO: 701015 - DNA, 33 bp, Homo sapien
aataaatataaactagccagaatctcaaagaaa

SEQ ID NO: 701016 - DNA, 33 bp, Homo sapien
aataaatataaactaggcagaatctcaaagaaa

SEQ ID NO: 701017 - DNA, 33 bp, Homo sapien
actgaggcatcactatgaagtatttcatgtttt

SEQ ID NO: 701018 - DNA, 33 bp, Homo sapien
actgaggcatcactattaagtatttcatgtttt

SEQ ID NO: 701019 - DNA, 33 bp, Homo sapien
gccttgctattgagtaccttatagtcagaaaac

SEQ ID NO: 701020 - DNA, 33 bp, Homo sapien
gccttgctattgagtagcttatagtcagaaaac

SEQ ID NO: 701021 - DNA, 33 bp, Homo sapien
acctttaacacagaagaaactaggccacttgaa

SEQ ID NO: 701022 - DNA, 33 bp, Homo sapien
acctttaacacagaagcaactaggccacttgaa

SEQ ID NO: 701023 - DNA, 33 bp, Homo sapien
agggagaaaagatggcacttcacaaagatccca

SEQ ID NO: 701024 - DNA, 33 bp, Homo sapien
agggagaaaagatggcccttcacaaagatccca

SEQ ID NO: 701025 - DNA, 33 bp, Homo sapien
tgaattatttactgtgaattagtttgttggttt

SEQ ID NO: 701026 - DNA, 33 bp, Homo sapien
tgaattatttactgtggattagtttgttggttt

SEQ ID NO: 701027 - DNA, 33 bp, Homo sapien
cacaacttgtatcttacgtatctattaggcatg

SEQ ID NO: 701028 - DNA, 33 bp, Homo sapien
cacaacttgtatcttatgtatctattaggcatg

SEQ ID NO: 701029 - DNA, 33 bp, Homo sapien
gaggctgcttagtttaaaatatcggttaatgaa

SEQ ID NO: 701030 - DNA, 33 bp, Homo sapien
gaggctgcttagtttataatatcggttaatgaa

SEQ ID NO: 701031 - DNA, 33 bp, Homo sapien
actgagaacagatataagggttcatgtagccaa

SEQ ID NO: 701032 - DNA, 33 bp, Homo sapien
actgagaacagatatacgggttcatgtagccaa

SEQ ID NO: 701033 - DNA, 33 bp, Homo sapien
cctacagaatgtgtgccacagcaaaatcctatg

SEQ ID NO: 701034 - DNA, 33 bp, Homo sapien
cctacagaatgtgtgctacagcaaaatcctatg

SEQ ID NO: 701035 - DNA, 33 bp, Homo sapien
actctttagcctaaagaagcaatttgaggaaat

SEQ ID NO: 701036 - DNA, 33 bp, Homo sapien
actctttagcctaaaggagcaatttgaggaaat

SEQ ID NO: 701037 - DNA, 33 bp, Homo sapien
catgcccacactggggaactatggagatttcaa

SEQ ID NO: 701038 - DNA, 33 bp, Homo sapien
catgcccacactgggggactatggagatttcaa

SEQ ID NO: 701039 - DNA, 33 bp, Homo sapien
aaagaattttggcataccttggcattggctata

SEQ ID NO: 701040 - DNA, 33 bp, Homo sapien
aaagaattttggcatatcttggcattggctata

SEQ ID NO: 701041 - DNA, 33 bp, Homo sapien
agaataaagtttttgacgaaaataatgctatta

SEQ ID NO: 701042 - DNA, 33 bp, Homo sapien
agaataaagtttttgatgaaaataatgctatta

SEQ ID NO: 701043 - DNA, 33 bp, Homo sapien
caattttctcctggtcaaccccagccaaaatca

SEQ ID NO: 701044 - DNA, 33 bp, Homo sapien
caattttctcctggtcgaccccagccaaaatca

SEQ ID NO: 701045 - DNA, 33 bp, Homo sapien
ctggatgactgtttgaaatttgaatcagcttgt

SEQ ID NO: 701046 - DNA, 33 bp, Homo sapien
ctggatgactgtttgacatttgaatcagcttgt

SEQ ID NO: 701047 - DNA, 33 bp, Homo sapien
ttctctctaaaccataccacaaccttcttgttc

SEQ ID NO: 701048 - DNA, 33 bp, Homo sapien
ttctctctaaaccatatcacaaccttcttgttc

SEQ ID NO: 701049 - DNA, 33 bp, Homo sapien
atttcagatttttggcacagggatattcaacct

SEQ ID NO: 701050 - DNA, 33 bp, Homo sapien
atttcagatttttggcgcagggatattcaacct

SEQ ID NO: 701051 - DNA, 33 bp, Homo sapien
taactaatggacaataagaatgaattacctatt

SEQ ID NO: 701052 - DNA, 33 bp, Homo sapien
taactaatggacaatatgaatgaattacctatt

SEQ ID NO: 701053 - DNA, 33 bp, Homo sapien
ataaaaactatggatgaaattatgagaaaaatc

SEQ ID NO: 701054 - DNA, 33 bp, Homo sapien
ataaaaactatggatgcaattatgagaaaaatc

SEQ ID NO: 701055 - DNA, 33 bp, Homo sapien
ggctgcactgcagtcaagttaaggccaaggtac

SEQ ID NO: 701056 - DNA, 33 bp, Homo sapien
ggctgcactgcagtcaggttaaggccaaggtac

SEQ ID NO: 701057 - DNA, 33 bp, Homo sapien
cctgatgaatcccagaacatgaaattactagat

SEQ ID NO: 701058 - DNA, 33 bp, Homo sapien
cctgatgaatcccagatcatgaaattactagat

SEQ ID NO: 701059 - DNA, 33 bp, Homo sapien
gcaccacaaggtatacaggctagtgcttaaagg

SEQ ID NO: 701060 - DNA, 33 bp, Homo sapien
gcaccacaaggtatactggctagtgcttaaagg

SEQ ID NO: 701061 - DNA, 33 bp, Homo sapien
ttataatctgacaaaaagcgtcattctggtttt

SEQ ID NO: 701062 - DNA, 33 bp, Homo sapien
ttataatctgacaaaaggcgtcattctggtttt

SEQ ID NO: 701063 - DNA, 33 bp, Homo sapien
aataagcagaaaaatacagcaaaatggtgaaaa

SEQ ID NO: 701064 - DNA, 33 bp, Homo sapien
aataagcagaaaaatagagcaaaatggtgaaaa

SEQ ID NO: 701065 - DNA, 33 bp, Homo sapien
caataagaaaaaattgaaatgtctggcatccca

SEQ ID NO: 701066 - DNA, 33 bp, Homo sapien
caataagaaaaaattgcaatgtctggcatccca

SEQ ID NO: 701067 - DNA, 33 bp, Homo sapien
gtctttgatcaaatctaacctactaaaactgca

SEQ ID NO: 701068 - DNA, 33 bp, Homo sapien
gtctttgatcaaatctcacctactaaaactgca

SEQ ID NO: 701069 - DNA, 33 bp, Homo sapien
tgcccataatatgtccccctgttttctctctaa

SEQ ID NO: 701070 - DNA, 33 bp, Homo sapien
tgcccataatatgtcctcctgttttctctctaa

SEQ ID NO: 701071 - DNA, 33 bp, Homo sapien
tagggtaaaagccacaatcaatgacctaaaagg

SEQ ID NO: 701072 - DNA, 33 bp, Homo sapien
tagggtaaaagccacagtcaatgacctaaaagg

SEQ ID NO: 701073 - DNA, 33 bp, Homo sapien
cttcctacccttatcaccacaccattagtcaaa

SEQ ID NO: 701074 - DNA, 33 bp, Homo sapien
cttcctacccttatcatcacaccattagtcaaa

SEQ ID NO: 701075 - DNA, 33 bp, Homo sapien
ggacaggaatataatcagagagcctaaagttag

SEQ ID NO: 701076 - DNA, 33 bp, Homo sapien
ggacaggaatataatcggagagcctaaagttag

SEQ ID NO: 701077 - DNA, 33 bp, Homo sapien
ttgtgcttagggataccagacagtgtttcagca

SEQ ID NO: 701078 - DNA, 33 bp, Homo sapien
ttgtgcttagggatactagacagtgtttcagca

SEQ ID NO: 701079 - DNA, 33 bp, Homo sapien
ctgtgccttacgatgaagataagtatttgagat

SEQ ID NO: 701080 - DNA, 33 bp, Homo sapien
ctgtgccttacgatgacgataagtatttgagat

SEQ ID NO: 701081 - DNA, 33 bp, Homo sapien
caggcgtgagttatacaactattgaccatgact

SEQ ID NO: 701082 - DNA, 33 bp, Homo sapien
caggcgtgagttataccactattgaccatgact

SEQ ID NO: 701083 - DNA, 33 bp, Homo sapien
agaaactttggcaagacgacgatatacgaggtc

SEQ ID NO: 701084 - DNA, 33 bp, Homo sapien
agaaactttggcaagatgacgatatacgaggtc

SEQ ID NO: 701085 - DNA, 33 bp, Homo sapien
tggtatgaggtaggataaaagttcattctgtat

SEQ ID NO: 701086 - DNA, 33 bp, Homo sapien
tggtatgaggtaggatgaaagttcattctgtat

SEQ ID NO: 701087 - DNA, 33 bp, Homo sapien
tctgagagctttatgcaattacctcatgtaatc

SEQ ID NO: 701088 - DNA, 33 bp, Homo sapien
tctgagagctttatgcgattacctcatgtaatc

SEQ ID NO: 701089 - DNA, 33 bp, Homo sapien
cctaaaccgatgctcgcatactttgttcatgta

SEQ ID NO: 701090 - DNA, 33 bp, Homo sapien
cctaaaccgatgctcgtatactttgttcatgta

SEQ ID NO: 701091 - DNA, 33 bp, Homo sapien
tgaagtctccagaggcacctacagcaatgaagt

SEQ ID NO: 701092 - DNA, 33 bp, Homo sapien
tgaagtctccagaggcccctacagcaatgaagt

SEQ ID NO: 701093 - DNA, 33 bp, Homo sapien
caattaactcattcaaataactcattcaattat

SEQ ID NO: 701094 - DNA, 33 bp, Homo sapien
caattaactcattcaactaactcattcaattat

SEQ ID NO: 701095 - DNA, 33 bp, Homo sapien
agacagtgtgatagtccgaccaaggtattatga

SEQ ID NO: 701096 - DNA, 33 bp, Homo sapien
agacagtgtgatagtctgaccaaggtattatga

SEQ ID NO: 701097 - DNA, 33 bp, Homo sapien
tttgctgtgtcaactccgactgagatgtcaagt

SEQ ID NO: 701098 - DNA, 33 bp, Homo sapien
tttgctgtgtcaactctgactgagatgtcaagt

SEQ ID NO: 701099 - DNA, 33 bp, Homo sapien
aaaatgttgacaatggaaacaaagaaaaggaca

SEQ ID NO: 701100 - DNA, 33 bp, Homo sapien
aaaatgttgacaatgggaacaaagaaaaggaca

SEQ ID NO: 701101 - DNA, 33 bp, Homo sapien
gcaaatactgtgaaaacaatttgctaggaattg

SEQ ID NO: 701102 - DNA, 33 bp, Homo sapien
gcaaatactgtgaaaataatttgctaggaattg

SEQ ID NO: 701103 - DNA, 33 bp, Homo sapien
atgagacttcctaacactgattttagataactg

SEQ ID NO: 701104 - DNA, 33 bp, Homo sapien
atgagacttcctaacattgattttagataactg

SEQ ID NO: 701105 - DNA, 33 bp, Homo sapien
aattgctagcaggacactatcccgcattggttc

SEQ ID NO: 701106 - DNA, 33 bp, Homo sapien
aattgctagcaggacattatcccgcattggttc

SEQ ID NO: 701107 - DNA, 33 bp, Homo sapien
aatttccaccaataacaattgcacaggatttca

SEQ ID NO: 701108 - DNA, 33 bp, Homo sapien
aatttccaccaataacgattgcacaggatttca

SEQ ID NO: 701109 - DNA, 33 bp, Homo sapien
cttgactatatgaatgaagtgtatgttgtgata

SEQ ID NO: 701110 - DNA, 33 bp, Homo sapien
cttgactatatgaatgtagtgtatgttgtgata

SEQ ID NO: 701111 - DNA, 33 bp, Homo sapien
tcaaaaccatgcttaaacctaatacattcaaat

SEQ ID NO: 701112 - DNA, 33 bp, Homo sapien
tcaaaaccatgcttaaccctaatacattcaaat

SEQ ID NO: 701113 - DNA, 33 bp, Homo sapien
tcatagactctctgaaacttgctgttaaataca

SEQ ID NO: 701114 - DNA, 33 bp, Homo sapien
tcatagactctctgaaccttgctgttaaataca

SEQ ID NO: 701115 - DNA, 33 bp, Homo sapien
atttcaactttaaagaatcggacaattatgtgt

SEQ ID NO: 701116 - DNA, 33 bp, Homo sapien
atttcaactttaaagattcggacaattatgtgt

SEQ ID NO: 701117 - DNA, 33 bp, Homo sapien; identical to SEQ ID NO: 701115

SEQ ID NO: 701118 - DNA, 33 bp, Homo sapien; identical to SEQ ID NO: 701116

SEQ ID NO: 701119 - DNA, 33 bp, Homo sapien
gatactgcctgtatgagtacataaaatattcac

SEQ ID NO: 701120 - DNA, 33 bp, Homo sapien
gatactgcctgtatgattacataaaatattcac

SEQ ID NO: 701121 - DNA, 33 bp, Homo sapien
ttaaagataattcatcacaaaagattgttaaga

SEQ ID NO: 701122 - DNA, 33 bp, Homo sapien
ttaaagataattcatcgcaaaagattgttaaga

SEQ ID NO: 701123 - DNA, 33 bp, Homo sapien
agcactttcactgtaaacattagttctcacaag

SEQ ID NO: 701124 - DNA, 33 bp, Homo sapien
agcactttcactgtaaccattagttctcacaag

SEQ ID NO: 701125 - DNA, 33 bp, Homo sapien
ccgttttgactccataacttccagctcctattt

SEQ ID NO: 701126 - DNA, 33 bp, Homo sapien
ccgttttgactccataccttccagctcctattt

SEQ ID NO: 701127 - DNA, 33 bp, Homo sapien
atctttgctttcagtcacaacttgaactaatct

SEQ ID NO: 701128 - DNA, 33 bp, Homo sapien
atctttgctttcagtcgcaacttgaactaatct

SEQ ID NO: 701129 - DNA, 33 bp, Homo sapien
tgcttttctcaatagaggtatttctgagaaaag

SEQ ID NO: 701130 - DNA, 33 bp, Homo sapien
tgcttttctcaatagatgtatttctgagaaaag

SEQ ID NO: 701131 - DNA, 33 bp, Homo sapien
agttgctgtactgatcaaccctgcttttctcaa

SEQ ID NO: 701132 - DNA, 33 bp, Homo sapien
agttgctgtactgatcgaccctgcttttctcaa

SEQ ID NO: 701133 - DNA, 33 bp, Homo sapien
cttttcctgcctgaaaagacgtgaagaaaaaac

SEQ ID NO: 701134 - DNA, 33 bp, Homo sapien
cttttcctgcctgaaacgacgtgaagaaaaaac

SEQ ID NO: 701135 - DNA, 33 bp, Homo sapien
acacacaatggacaccaagaggaaatctgaata

SEQ ID NO: 701136 - DNA, 33 bp, Homo sapien
acacacaatggacaccgagaggaaatctgaata

SEQ ID NO: 701137 - DNA, 33 bp, Homo sapien
agacacaaagagataaaccaggcagaggaaata

SEQ ID NO: 701138 - DNA, 33 bp, Homo sapien
agacacaaagagataagccaggcagaggaaata

SEQ ID NO: 701139 - DNA, 33 bp, Homo sapien
agtttcttttctcaccacttctgtagagatgaa

SEQ ID NO: 701140 - DNA, 33 bp, Homo sapien
agtttcttttctcaccgcttctgtagagatgaa

SEQ ID NO: 701141 - DNA, 33 bp, Homo sapien
aggtatttagatgatacgtgcctctgtaaaata

SEQ ID NO: 701142 - DNA, 33 bp, Homo sapien
aggtatttagatgatatgtgcctctgtaaaata

SEQ ID NO: 701143 - DNA, 33 bp, Homo sapien
caccagaaatttatgcactcaaactttattttt

SEQ ID NO: 701144 - DNA, 33 bp, Homo sapien
caccagaaatttatgcgctcaaactttattttt

SEQ ID NO: 701145 - DNA, 33 bp, Homo sapien
aacataagacactgtacactgcaggctgacagc

SEQ ID NO: 701146 - DNA, 33 bp, Homo sapien
aacataagacactgtatactgcaggctgacagc

SEQ ID NO: 701147 - DNA, 33 bp, Homo sapien
tatgagtagaacacacagcttttttacatcagg

SEQ ID NO: 701148 - DNA, 33 bp, Homo sapien
tatgagtagaacacacggcttttttacatcagg

SEQ ID NO: 701149 - DNA, 33 bp, Homo sapien
aaaaatacacctttaacgacttgacaaaaccag

SEQ ID NO: 701150 - DNA, 33 bp, Homo sapien
aaaaatacacctttaatgacttgacaaaaccag

SEQ ID NO: 701151 - DNA, 33 bp, Homo sapien
gaaccttacagtgacccgcatgtctaatattag

SEQ ID NO: 701152 - DNA, 33 bp, Homo sapien
gaaccttacagtgacctgcatgtctaatattag

SEQ ID NO: 701153 - DNA, 33 bp, Homo sapien
agcctatattcaaggtaaaggaaattacatccc

SEQ ID NO: 701154 - DNA, 33 bp, Homo sapien
agcctatattcaaggtgaaggaaattacatccc

SEQ ID NO: 701155 - DNA, 33 bp, Homo sapien
ctttttattgttgttaagaagatgacataaaga

SEQ ID NO: 701156 - DNA, 33 bp, Homo sapien
ctttttattgttgttaggaagatgacataaaga

SEQ ID NO: 701157 - DNA, 33 bp, Homo sapien
aaaggaaagaccagaaacactattgtgatcatc

SEQ ID NO: 701158 - DNA, 33 bp, Homo sapien
aaaggaaagaccagaaccactattgtgatcatc

SEQ ID NO: 701159 - DNA, 33 bp, Homo sapien
ccagcctgactagatcacagatttcagccttgt

SEQ ID NO: 701160 - DNA, 33 bp, Homo sapien
ccagcctgactagatcccagatttcagccttgt

SEQ ID NO: 701161 - DNA, 33 bp, Homo sapien
gtagtctagataagcaaaagatactatgtcaga

SEQ ID NO: 701162 - DNA, 33 bp, Homo sapien
gtagtctagataagcagaagatactatgtcaga

SEQ ID NO: 701163 - DNA, 33 bp, Homo sapien
tccagtgcttcagttcaccatgctgtcttcgtt

SEQ ID NO: 701164 - DNA, 33 bp, Homo sapien
tccagtgcttcagttcgccatgctgtcttcgtt

SEQ ID NO: 701165 - DNA, 33 bp, Homo sapien
aatatttaggggaaaaagatgtttgcatctgta

SEQ ID NO: 701166 - DNA, 33 bp, Homo sapien
aatatttaggggaaaaggatgtttgcatctgta

SEQ ID NO: 701167 - DNA, 33 bp, Homo sapien
accccagacctagtcactaaataatatatccat

SEQ ID NO: 701168 - DNA, 33 bp, Homo sapien
accccagacctagtcagtaaataatatatccat

SEQ ID NO: 701169 - DNA, 33 bp, Homo sapien
ctgaaatggaccaaacgatttcctaacagttct

SEQ ID NO: 701170 - DNA, 33 bp, Homo sapien
ctgaaatggaccaaactatttcctaacagttct

SEQ ID NO: 701171 - DNA, 33 bp, Homo sapien
tgaggctaagtgagaaaacggaaaagcaccaga

SEQ ID NO: 701172 - DNA, 33 bp, Homo sapien
tgaggctaagtgagaacacggaaaagcaccaga

SEQ ID NO: 701173 - DNA, 33 bp, Homo sapien
aatcagctcagttttaaatatgaaaaaactgag

SEQ ID NO: 701174 - DNA, 33 bp, Homo sapien
aatcagctcagttttagatatgaaaaaactgag

SEQ ID NO: 701175 - DNA, 33 bp, Homo sapien
tgatagtctgaaaatacgctttgagctaagcaa

SEQ ID NO: 701176 - DNA, 33 bp, Homo sapien
tgatagtctgaaaatatgctttgagctaagcaa

SEQ ID NO: 701177 - DNA, 33 bp, Homo sapien
tacattgattattctaccacagttcttacagtt

SEQ ID NO: 701178 - DNA, 33 bp, Homo sapien
tacattgattattctatcacagttcttacagtt

SEQ ID NO: 701179 - DNA, 33 bp, Homo sapien
aaggtgacataagtaacaagtggtgaaagttaa

SEQ ID NO: 701180 - DNA, 33 bp, Homo sapien
aaggtgacataagtaataagtggtgaaagttaa

SEQ ID NO: 701181 - DNA, 33 bp, Homo sapien
ttctggtttatccaacaatgtgagagaagttta

SEQ ID NO: 701182 - DNA, 33 bp, Homo sapien
ttctggtttatccaacgatgtgagagaagttta

SEQ ID NO: 701183 - DNA, 33 bp, Homo sapien
tttacacagcagacaaagagacaaacaaattgt

SEQ ID NO: 701184 - DNA, 33 bp, Homo sapien
tttacacagcagacaacgagacaaacaaattgt

SEQ ID NO: 701185 - DNA, 33 bp, Homo sapien
aactgcatatgctttcaaggtttgcccttatta

SEQ ID NO: 701186 - DNA, 33 bp, Homo sapien
aactgcatatgctttccaggtttgcccttatta

SEQ ID NO: 701187 - DNA, 33 bp, Homo sapien
atgaatggataacccaatatgtaacactacaga

SEQ ID NO: 701188 - DNA, 33 bp, Homo sapien
atgaatggataacccagtatgtaacactacaga

SEQ ID NO: 701189 - DNA, 33 bp, Homo sapien
aaaagtatatggtaagccataaagagctggcag

SEQ ID NO: 701190 - DNA, 33 bp, Homo sapien
aaaagtatatggtaagtcataaagagctggcag

SEQ ID NO: 701191 - DNA, 33 bp, Homo sapien
gaaaaattttcagtgacatgagctaggtgacag

SEQ ID NO: 701192 - DNA, 33 bp, Homo sapien
gaaaaattttcagtgatatgagctaggtgacag

SEQ ID NO: 701193 - DNA, 33 bp, Homo sapien
ttaatttacctgggaacatccttaggcacaatg

SEQ ID NO: 701194 - DNA, 33 bp, Homo sapien
ttaatttacctgggaagatccttaggcacaatg

SEQ ID NO: 701195 - DNA, 33 bp, Homo sapien
agccaagagagttttgaaaagatattaaaactt

SEQ ID NO: 701196 - DNA, 33 bp, Homo sapien
agccaagagagttttgtaaagatattaaaactt

SEQ ID NO: 701197 - DNA, 33 bp, Homo sapien
acaaaagtaggttacaataaggacaggaagtcc

SEQ ID NO: 701198 - DNA, 33 bp, Homo sapien
acaaaagtaggttacagtaaggacaggaagtcc

SEQ ID NO: 701199 - DNA, 33 bp, Homo sapien
gctgtgaggtctaggtaaatagagaatgtaagc

SEQ ID NO: 701200 - DNA, 33 bp, Homo sapien
gctgtgaggtctaggttaatagagaatgtaagc

SEQ ID NO: 701201 - DNA, 33 bp, Homo sapien
gttaccttattcaacagcaactttcatgagcag

SEQ ID NO: 701202 - DNA, 33 bp, Homo sapien
gttaccttattcaacatcaactttcatgagcag

SEQ ID NO: 701203 - DNA, 33 bp, Homo sapien
agacaactgtaaaaacaccaagcaaatagggag

SEQ ID NO: 701204 - DNA, 33 bp, Homo sapien
agacaactgtaaaaacgccaagcaaatagggag

SEQ ID NO: 701205 - DNA, 33 bp, Homo sapien
aaagggaagttattcaagagtattgggaaacaa

SEQ ID NO: 701206 - DNA, 33 bp, Homo sapien
aaagggaagttattcatgagtattgggaaacaa

SEQ ID NO: 701207 - DNA, 33 bp, Homo sapien
tgactgataaccaagaaaacaatgggtacaaac

SEQ ID NO: 701208 - DNA, 33 bp, Homo sapien
tgactgataaccaagagaacaatgggtacaaac

SEQ ID NO: 701209 - DNA, 33 bp, Homo sapien
gacataaagatggacacaatggacaatggtgct

SEQ ID NO: 701210 - DNA, 33 bp, Homo sapien
gacataaagatggacagaatggacaatggtgct

SEQ ID NO: 701211 - DNA, 33 bp, Homo sapien
tgcagtgtgcttgaacactagaaggttgggacc

SEQ ID NO: 701212 - DNA, 33 bp, Homo sapien
tgcagtgtgcttgaaccctagaaggttgggacc

SEQ ID NO: 701213 - DNA, 33 bp, Homo sapien
actcactccttatttaagtcctgttcaggtcct

SEQ ID NO: 701214 - DNA, 33 bp, Homo sapien
actcactccttatttaggtcctgttcaggtcct

SEQ ID NO: 701215 - DNA, 33 bp, Homo sapien
tttgcttgctaaaggtaaattaatgaaccaggc

SEQ ID NO: 701216 - DNA, 33 bp, Homo sapien
tttgcttgctaaaggtcaattaatgaaccaggc

SEQ ID NO: 701217 - DNA, 33 bp, Homo sapien
gattccagattctcccaggactttagatattta

SEQ ID NO: 701218 - DNA, 33 bp, Homo sapien
gattccagattctcccgggactttagatattta

SEQ ID NO: 701219 - DNA, 33 bp, Homo sapien
tatgcttaggctgatacaaaattcagtaaatac

SEQ ID NO: 701220 - DNA, 33 bp, Homo sapien
tatgcttaggctgatataaaattcagtaaatac

SEQ ID NO: 701221 - DNA, 33 bp, Homo sapien
ggataaaaatgctaaaggtcaagcaaaagagtt

SEQ ID NO: 701222 - DNA, 33 bp, Homo sapien
ggataaaaatgctaaatgtcaagcaaaagagtt

SEQ ID NO: 701223 - DNA, 33 bp, Homo sapien
acaacaacgaaaaaccgcatgaacatggggccc

SEQ ID NO: 701224 - DNA, 33 bp, Homo sapien
acaacaacgaaaaacctcatgaacatggggccc

SEQ ID NO: 701225 - DNA, 33 bp, Homo sapien
acttgagatttaatcagtgaatttggacaggcc

SEQ ID NO: 701226 - DNA, 33 bp, Homo sapien
acttgagatttaatcattgaatttggacaggcc

SEQ ID NO: 701227 - DNA, 33 bp, Homo sapien
tgagtaacaaagatcaaattctgcctctcatct

SEQ ID NO: 701228 - DNA, 33 bp, Homo sapien
tgagtaacaaagatcagattctgcctctcatct

SEQ ID NO: 701229 - DNA, 33 bp, Homo sapien
cagccagtggtggttccagtgattgcatccctg

SEQ ID NO: 701230 - DNA, 33 bp, Homo sapien
cagccagtggtggttctagtgattgcatccctg

SEQ ID NO: 701231 - DNA, 33 bp, Homo sapien
aggtgcacaaagtcctaaaattgaataaaggtc

SEQ ID NO: 701232 - DNA, 33 bp, Homo sapien
aggtgcacaaagtcctgaaattgaataaaggtc

SEQ ID NO: 701233 - DNA, 33 bp, Homo sapien
tctgtataaaggagaacgttaccaaaagaatgt

SEQ ID NO: 701234 - DNA, 33 bp, Homo sapien
tctgtataaaggagaaggttaccaaaagaatgt

SEQ ID NO: 701235 - DNA, 33 bp, Homo sapien
aactgctgacttaagccaatgaatcttttccag

SEQ ID NO: 701236 - DNA, 33 bp, Homo sapien
aactgctgacttaagctaatgaatcttttccag

SEQ ID NO: 701237 - DNA, 33 bp, Homo sapien
taataaacacaactcaatacgaaatcagaagga

SEQ ID NO: 701238 - DNA, 33 bp, Homo sapien
taataaacacaactcagtacgaaatcagaagga

SEQ ID NO: 701239 - DNA, 33 bp, Homo sapien
taactcgtataatggccctgtgaaattgtcagt

SEQ ID NO: 701240 - DNA, 33 bp, Homo sapien
taactcgtataatggctctgtgaaattgtcagt

SEQ ID NO: 701241 - DNA, 33 bp, Homo sapien
aaatgccaatggaacacagtgattcaaataaga

SEQ ID NO: 701242 - DNA, 33 bp, Homo sapien
aaatgccaatggaacatagtgattcaaataaga

SEQ ID NO: 701243 - DNA, 33 bp, Homo sapien
ttttctctttccccaactccaaaacgtaatgag

SEQ ID NO: 701244 - DNA, 33 bp, Homo sapien
ttttctctttccccaattccaaaacgtaatgag

SEQ ID NO: 701245 - DNA, 33 bp, Homo sapien
ggaacattcacaactacgaaagaactgtaaaag

SEQ ID NO: 701246 - DNA, 33 bp, Homo sapien
ggaacattcacaactatgaaagaactgtaaaag

SEQ ID NO: 701247 - DNA, 33 bp, Homo sapien
aagttatcaattgaacagagacagatgtatatt

SEQ ID NO: 701248 - DNA, 33 bp, Homo sapien
aagttatcaattgaactgagacagatgtatatt

SEQ ID NO: 701249 - DNA, 33 bp, Homo sapien
aacaaaagcagatctggacaaaactgataaatg

SEQ ID NO: 701250 - DNA, 33 bp, Homo sapien
aacaaaagcagatctgtacaaaactgataaatg

SEQ ID NO: 701251 - DNA, 33 bp, Homo sapien
actgatgtaaatgccaagacagtaagcataagt

SEQ ID NO: 701252 - DNA, 33 bp, Homo sapien
actgatgtaaatgccaggacagtaagcataagt

SEQ ID NO: 701253 - DNA, 33 bp, Homo sapien
gggctgaaatagttccaacttatgcttactgtc

SEQ ID NO: 701254 - DNA, 33 bp, Homo sapien
gggctgaaatagttccgacttatgcttactgtc

SEQ ID NO: 701255 - DNA, 33 bp, Homo sapien
atctcactaccagtaacagagtctagatactaa

SEQ ID NO: 701256 - DNA, 33 bp, Homo sapien
atctcactaccagtaatagagtctagatactaa

SEQ ID NO: 701257 - DNA, 33 bp, Homo sapien
tatatgattcatgtcaaagtaaatatgtctgtg

SEQ ID NO: 701258 - DNA, 33 bp, Homo sapien
tatatgattcatgtcagagtaaatatgtctgtg

SEQ ID NO: 701259 - DNA, 33 bp, Homo sapien
agtttgccatggtccaaatcagttcctgttatc

SEQ ID NO: 701260 - DNA, 33 bp, Homo sapien
agtttgccatggtccagatcagttcctgttatc

SEQ ID NO: 701261 - DNA, 33 bp, Homo sapien
ctggtttctagctttacgcttcagtggaaggca

SEQ ID NO: 701262 - DNA, 33 bp, Homo sapien
ctggtttctagctttatgcttcagtggaaggca

SEQ ID NO: 701263 - DNA, 33 bp, Homo sapien
taagtaagatctttccaaaacaccgttctaaat

SEQ ID NO: 701264 - DNA, 33 bp, Homo sapien
taagtaagatctttccgaaacaccgttctaaat

SEQ ID NO: 701265 - DNA, 33 bp, Homo sapien
agtctttgtatacatactaccagagcaagactt

SEQ ID NO: 701266 - DNA, 33 bp, Homo sapien
agtctttgtatacatattaccagagcaagactt

SEQ ID NO: 701267 - DNA, 33 bp, Homo sapien
atgaagaagctgaagacagtgtccattatgcag

SEQ ID NO: 701268 - DNA, 33 bp, Homo sapien
atgaagaagctgaagatagtgtccattatgcag

SEQ ID NO: 701269 - DNA, 33 bp, Homo sapien
tttcaaagaacttagaagtagcattcgacccag

SEQ ID NO: 701270 - DNA, 33 bp, Homo sapien
tttcaaagaacttagaggtagcattcgacccag

SEQ ID NO: 701271 - DNA, 33 bp, Homo sapien
ctctccaggtattgaaacacaaagaaattgaaa

SEQ ID NO: 701272 - DNA, 33 bp, Homo sapien
ctctccaggtattgaatcacaaagaaattgaaa

SEQ ID NO: 701273 - DNA, 33 bp, Homo sapien
tgttgtgaagagggacgggggaataatctttct

SEQ ID NO: 701274 - DNA, 33 bp, Homo sapien
tgttgtgaagagggactggggaataatctttct

SEQ ID NO: 701275 - DNA, 33 bp, Homo sapien
caaaataccctggagcactggtgataacaaatc

SEQ ID NO: 701276 - DNA, 33 bp, Homo sapien
caaaataccctggagcgctggtgataacaaatc

SEQ ID NO: 701277 - DNA, 33 bp, Homo sapien
cagtttttgtgttaaactcaggacgaggtcaga

SEQ ID NO: 701278 - DNA, 33 bp, Homo sapien
cagtttttgtgttaaattcaggacgaggtcaga

SEQ ID NO: 701279 - DNA, 33 bp, Homo sapien
agcattcttacattgaacactaaaattatttca

SEQ ID NO: 701280 - DNA, 33 bp, Homo sapien
agcattcttacattgaccactaaaattatttca

SEQ ID NO: 701281 - DNA, 33 bp, Homo sapien
ttattctttcaaaagtaaagagttctgaatatt

SEQ ID NO: 701282 - DNA, 33 bp, Homo sapien
ttattctttcaaaagtgaagagttctgaatatt

SEQ ID NO: 701283 - DNA, 33 bp, Homo sapien
gtttgatccaatgccaacatttgggagtcctca

SEQ ID NO: 701284 - DNA, 33 bp, Homo sapien
gtttgatccaatgccaccatttgggagtcctca

SEQ ID NO: 701285 - DNA, 33 bp, Homo sapien
cataattacttttcatgacgactataacttaat

SEQ ID NO: 701286 - DNA, 33 bp, Homo sapien
cataattacttttcattacgactataacttaat

SEQ ID NO: 701287 - DNA, 33 bp, Homo sapien
cctatgattaatgtaaaccacaaagcaattaga

SEQ ID NO: 701288 - DNA, 33 bp, Homo sapien
cctatgattaatgtaagccacaaagcaattaga

SEQ ID NO: 701289 - DNA, 33 bp, Homo sapien
atgtcagtttgggagaatataacaagaaatttt

SEQ ID NO: 701290 - DNA, 33 bp, Homo sapien
atgtcagtttgggagagtataacaagaaatttt

SEQ ID NO: 701291 - DNA, 33 bp, Homo sapien
aaggactgtcctctatgaacattgaagactata

SEQ ID NO: 701292 - DNA, 33 bp, Homo sapien
aaggactgtcctctattaacattgaagactata

SEQ ID NO: 701293 - DNA, 33 bp, Homo sapien
tctctaaaaccagaaaatgaaaaagcttgaaag

SEQ ID NO: 701294 - DNA, 33 bp, Homo sapien
tctctaaaaccagaaagtgaaaaagcttgaaag

SEQ ID NO: 701295 - DNA, 33 bp, Homo sapien
gtcaaaaattataagcagattttcgtctgagtg

SEQ ID NO: 701296 - DNA, 33 bp, Homo sapien
gtcaaaaattataagcggattttcgtctgagtg

SEQ ID NO: 701297 - DNA, 33 bp, Homo sapien
ttgagtggcgttctacccttaacccaacctcct

SEQ ID NO: 701298 - DNA, 33 bp, Homo sapien
ttgagtggcgttctactcttaacccaacctcct

SEQ ID NO: 701299 - DNA, 33 bp, Homo sapien
actgcaatatgacaaccatattctatctggatt

SEQ ID NO: 701300 - DNA, 33 bp, Homo sapien
actgcaatatgacaacgatattctatctggatt

SEQ ID NO: 701301 - DNA, 33 bp, Homo sapien
ggcgtatttggaatccacacacatggctattct

SEQ ID NO: 701302 - DNA, 33 bp, Homo sapien
ggcgtatttggaatccgcacacatggctattct

SEQ ID NO: 701303 - DNA, 33 bp, Homo sapien
tccatcctttatttcccatgtaactcaacaggt

SEQ ID NO: 701304 - DNA, 33 bp, Homo sapien
tccatcctttatttcctatgtaactcaacaggt

SEQ ID NO: 701305 - DNA, 33 bp, Homo sapien
gagagctaaaggtgaaaggtccacactcatggc

SEQ ID NO: 701306 - DNA, 33 bp, Homo sapien
gagagctaaaggtgaatggtccacactcatggc

SEQ ID NO: 701307 - DNA, 33 bp, Homo sapien
aattgatccaaagcacaggattcccttccccac

SEQ ID NO: 701308 - DNA, 33 bp, Homo sapien
aattgatccaaagcacgggattcccttccccac

SEQ ID NO: 701309 - DNA, 33 bp, Homo sapien
gtcctccaaaattgtcaaagactagatacccta

SEQ ID NO: 701310 - DNA, 33 bp, Homo sapien
gtcctccaaaattgtcgaagactagatacccta

SEQ ID NO: 701311 - DNA, 33 bp, Homo sapien
ccaatttagccaactcaagaggcttgttcccat

SEQ ID NO: 701312 - DNA, 33 bp, Homo sapien
ccaatttagccaactcgagaggcttgttcccat

SEQ ID NO: 701313 - DNA, 33 bp, Homo sapien
aacatgaaaaatggtgaacttttactggtatat

SEQ ID NO: 701314 - DNA, 33 bp, Homo sapien
aacatgaaaaatggtggacttttactggtatat

SEQ ID NO: 701315 - DNA, 33 bp, Homo sapien
aggggcataaggcacaatgcgagatcgatgcaa

SEQ ID NO: 701316 - DNA, 33 bp, Homo sapien
aggggcataaggcacagtgcgagatcgatgcaa

SEQ ID NO: 701317 - DNA, 33 bp, Homo sapien
attcaccaccagtaacagtatcacttagcaata

SEQ ID NO: 701318 - DNA, 33 bp, Homo sapien
attcaccaccagtaacggtatcacttagcaata

SEQ ID NO: 701319 - DNA, 33 bp, Homo sapien
agttgtttgtatctggaatatgagagaaattta

SEQ ID NO: 701320 - DNA, 33 bp, Homo sapien
agttgtttgtatctggtatatgagagaaattta

SEQ ID NO: 701321 - DNA, 33 bp, Homo sapien
gttattagtcaactcaagctaccttaacaaaat

SEQ ID NO: 701322 - DNA, 33 bp, Homo sapien
gttattagtcaactcaggctaccttaacaaaat

SEQ ID NO: 701323 - DNA, 33 bp, Homo sapien
gattctggatattagaccgttgtgatatgcata

SEQ ID NO: 701324 - DNA, 33 bp, Homo sapien
gattctggatattagagcgttgtgatatgcata

SEQ ID NO: 701325 - DNA, 33 bp, Homo sapien
cggatggagtttattacctgctaactgacgtga

SEQ ID NO: 701326 - DNA, 33 bp, Homo sapien
cggatggagtttattagctgctaactgacgtga

SEQ ID NO: 701327 - DNA, 33 bp, Homo sapien
ggaaagttgaaatttaaaatcagaaaagtgcca

SEQ ID NO: 701328 - DNA, 33 bp, Homo sapien
ggaaagttgaaatttagaatcagaaaagtgcca

SEQ ID NO: 701329 - DNA, 33 bp, Homo sapien
ggtggttcctggatcaatatcatcagtagcacc

SEQ ID NO: 701330 - DNA, 33 bp, Homo sapien
ggtggttcctggatcagtatcatcagtagcacc

SEQ ID NO: 701331 - DNA, 33 bp, Homo sapien
caactctctcacaaagcctccgtaaaattgata

SEQ ID NO: 701332 - DNA, 33 bp, Homo sapien
caactctctcacaaaggctccgtaaaattgata

SEQ ID NO: 701333 - DNA, 33 bp, Homo sapien
ggacacattatgctagacctttctcatctttaa

SEQ ID NO: 701334 - DNA, 33 bp, Homo sapien
ggacacattatgctagccctttctcatctttaa

SEQ ID NO: 701335 - DNA, 33 bp, Homo sapien
ctctactaggtcagtacagaggtaaaatagagc

SEQ ID NO: 701336 - DNA, 33 bp, Homo sapien
ctctactaggtcagtagagaggtaaaatagagc

SEQ ID NO: 701337 - DNA, 33 bp, Homo sapien
gagattattttggaacggtagaatttaatgact

SEQ ID NO: 701338 - DNA, 33 bp, Homo sapien
gagattattttggaactgtagaatttaatgact

SEQ ID NO: 701339 - DNA, 33 bp, Homo sapien
aaggaggtatgctttgcagggcctcagaaaact

SEQ ID NO: 701340 - DNA, 33 bp, Homo sapien
aaggaggtatgctttggagggcctcagaaaact

SEQ ID NO: 701341 - DNA, 33 bp, Homo sapien
ttgccttttattaccactggcacaggtttgcta

SEQ ID NO: 701342 - DNA, 33 bp, Homo sapien
ttgccttttattaccattggcacaggtttgcta

SEQ ID NO: 701343 - DNA, 33 bp, Homo sapien
aaatgtttggctccaaattataagagagaacat

SEQ ID NO: 701344 - DNA, 33 bp, Homo sapien
aaatgtttggctccaagttataagagagaacat

SEQ ID NO: 701345 - DNA, 33 bp, Homo sapien
aagattactttaaaaccaggagtaaggcattct

SEQ ID NO: 701346 - DNA, 33 bp, Homo sapien
aagattactttaaaactaggagtaaggcattct

SEQ ID NO: 701347 - DNA, 33 bp, Homo sapien
tacacagacataaaaacaactagatcatgtcct

SEQ ID NO: 701348 - DNA, 33 bp, Homo sapien
tacacagacataaaaagaactagatcatgtcct

SEQ ID NO: 701349 - DNA, 33 bp, Homo sapien
tgtttaagcaaaaatcaagaaggtttcagactc

SEQ ID NO: 701350 - DNA, 33 bp, Homo sapien
tgtttaagcaaaaatcgagaaggtttcagactc

SEQ ID NO: 701351 - DNA, 33 bp, Homo sapien
ttgattcaaatgcctgaactttcaaccactgcc

SEQ ID NO: 701352 - DNA, 33 bp, Homo sapien
ttgattcaaatgcctgcactttcaaccactgcc

SEQ ID NO: 701353 - DNA, 33 bp, Homo sapien
ctcctctgtttttggacagaaactaaggcagtg

SEQ ID NO: 701354 - DNA, 33 bp, Homo sapien
ctcctctgtttttggagagaaactaaggcagtg

SEQ ID NO: 701355 - DNA, 33 bp, Homo sapien
ccttcacctggtgaaccgagtaaagatgatggt

SEQ ID NO: 701356 - DNA, 33 bp, Homo sapien
ccttcacctggtgaactgagtaaagatgatggt

SEQ ID NO: 701357 - DNA, 33 bp, Homo sapien
tataacattgagctaaaaaaaaatcattacaaa

SEQ ID NO: 701358 - DNA, 33 bp, Homo sapien
tataacattgagctaagaaaaaatcattacaaa

SEQ ID NO: 701359 - DNA, 33 bp, Homo sapien
caataggtcaaaaaaaattctcaatgagacaca

SEQ ID NO: 701360 - DNA, 33 bp, Homo sapien
caataggtcaaaaaaatttctcaatgagacaca

SEQ ID NO: 701361 - DNA, 33 bp, Homo sapien
aaatactgaattacaccgagggagcaagataac

SEQ ID NO: 701362 - DNA, 33 bp, Homo sapien
aaatactgaattacactgagggagcaagataac

SEQ ID NO: 701363 - DNA, 33 bp, Homo sapien
tataactctggtgtagaaatttttacctgacta

SEQ ID NO: 701364 - DNA, 33 bp, Homo sapien
tataactctggtgtaggaatttttacctgacta

SEQ ID NO: 701365 - DNA, 33 bp, Homo sapien
ctgtgttgcaattacccatttgtgtgcttcttg

SEQ ID NO: 701366 - DNA, 33 bp, Homo sapien
ctgtgttgcaattacctatttgtgtgcttcttg

SEQ ID NO: 701367 - DNA, 33 bp, Homo sapien
ctctagatgttaaaacacaaataggcaagaagc

SEQ ID NO: 701368 - DNA, 33 bp, Homo sapien
ctctagatgttaaaacgcaaataggcaagaagc

SEQ ID NO: 701369 - DNA, 33 bp, Homo sapien
gactaaatatcgttcaatagggtgtaaaaatag

SEQ ID NO: 701370 - DNA, 33 bp, Homo sapien
gactaaatatcgttcagtagggtgtaaaaatag

SEQ ID NO: 701371 - DNA, 33 bp, Homo sapien
cttcaggaaataatacaaggccccaggattcta

SEQ ID NO: 701372 - DNA, 33 bp, Homo sapien
cttcaggaaataatacgaggccccaggattcta

SEQ ID NO: 701373 - DNA, 33 bp, Homo sapien
atttctctgagataaacttccaggagtgcaatt

SEQ ID NO: 701374 - DNA, 33 bp, Homo sapien
atttctctgagataaatttccaggagtgcaatt

SEQ ID NO: 701375 - DNA, 33 bp, Homo sapien
aataattaaaccttgccgacttagacttaaaac

SEQ ID NO: 701376 - DNA, 33 bp, Homo sapien
aataattaaaccttgctgacttagacttaaaac

SEQ ID NO: 701377 - DNA, 33 bp, Homo sapien
caagttggcaaccaataagcagtgaagctaaat

SEQ ID NO: 701378 - DNA, 33 bp, Homo sapien
caagttggcaaccaatgagcagtgaagctaaat

SEQ ID NO: 701379 - DNA, 33 bp, Homo sapien
gtcttgtttggtttgaactctatcaatgttaaa

SEQ ID NO: 701380 - DNA, 33 bp, Homo sapien
gtcttgtttggtttgagctctatcaatgttaaa

SEQ ID NO: 701381 - DNA, 33 bp, Homo sapien
agacagagatagctccgaagtggtagatcattc

SEQ ID NO: 701382 - DNA, 33 bp, Homo sapien
agacagagatagctcctaagtggtagatcattc

SEQ ID NO: 701383 - DNA, 33 bp, Homo sapien
atagataaactcaggccattgtggcagatacta

SEQ ID NO: 701384 - DNA, 33 bp, Homo sapien
atagataaactcaggctattgtggcagatacta

SEQ ID NO: 701385 - DNA, 33 bp, Homo sapien
aggtcagggctagagaatcccgtagggcaccat

SEQ ID NO: 701386 - DNA, 33 bp, Homo sapien
aggtcagggctagagagtcccgtagggcaccat

SEQ ID NO: 701387 - DNA, 33 bp, Homo sapien
aaatataggaatataacgtgtaactggagaaga

SEQ ID NO: 701388 - DNA, 33 bp, Homo sapien
aaatataggaatataatgtgtaactggagaaga

SEQ ID NO: 701389 - DNA, 33 bp, Homo sapien
agtaatagtggaagtaggagaaaaccaatttta

SEQ ID NO: 701390 - DNA, 33 bp, Homo sapien
agtaatagtggaagtatgagaaaaccaatttta

SEQ ID NO: 701391 - DNA, 33 bp, Homo sapien
ttcttactaatagagaaatgtatgatagatctt

SEQ ID NO: 701392 - DNA, 33 bp, Homo sapien
ttcttactaatagagagatgtatgatagatctt

SEQ ID NO: 701393 - DNA, 33 bp, Homo sapien
tgatttacctaagttaccttatagcacaggttt

SEQ ID NO: 701394 - DNA, 33 bp, Homo sapien
tgatttacctaagttatcttatagcacaggttt

SEQ ID NO: 701395 - DNA, 33 bp, Homo sapien
cacaacatttgtgacaactgcctacatgcctag

SEQ ID NO: 701396 - DNA, 33 bp, Homo sapien
cacaacatttgtgacagctgcctacatgcctag

SEQ ID NO: 701397 - DNA, 33 bp, Homo sapien
agtaattagtcacacaatgtaggagatttcaaa

SEQ ID NO: 701398 - DNA, 33 bp, Homo sapien
agtaattagtcacacactgtaggagatttcaaa

SEQ ID NO: 701399 - DNA, 33 bp, Homo sapien
tccttgaatgagtagactaattttcatctgcct

SEQ ID NO: 701400 - DNA, 33 bp, Homo sapien
tccttgaatgagtagagtaattttcatctgcct

SEQ ID NO: 701401 - DNA, 33 bp, Homo sapien
atataaatgaaggtccaaaccttgttaattgat

SEQ ID NO: 701402 - DNA, 33 bp, Homo sapien
atataaatgaaggtccgaaccttgttaattgat

SEQ ID NO: 701403 - DNA, 33 bp, Homo sapien
cagtagaaaagcagtggattacaaaaaagacct

SEQ ID NO: 701404 - DNA, 33 bp, Homo sapien
cagtagaaaagcagtgtattacaaaaaagacct

SEQ ID NO: 701405 - DNA, 33 bp, Homo sapien
ttctgttttttatccagcttgcagcagaaaaaa

SEQ ID NO: 701406 - DNA, 33 bp, Homo sapien
ttctgttttttatccatcttgcagcagaaaaaa

SEQ ID NO: 701407 - DNA, 33 bp, Homo sapien
taatacctgcttctgactcagaaaaagattaat

SEQ ID NO: 701408 - DNA, 33 bp, Homo sapien
taatacctgcttctgattcagaaaaagattaat

SEQ ID NO: 701409 - DNA, 33 bp, Homo sapien
ctgaccaggattctccacagaaagctaaagtga

SEQ ID NO: 701410 - DNA, 33 bp, Homo sapien
ctgaccaggattctccgcagaaagctaaagtga

SEQ ID NO: 701411 - DNA, 33 bp, Homo sapien
tagacacgtagattgacggaagaaaatagagaa

SEQ ID NO: 701412 - DNA, 33 bp, Homo sapien
tagacacgtagattgatggaagaaaatagagaa

SEQ ID NO: 701413 - DNA, 33 bp, Homo sapien
tctaatattttcaagcgatgatacagaacaaac

SEQ ID NO: 701414 - DNA, 33 bp, Homo sapien
tctaatattttcaagctatgatacagaacaaac

SEQ ID NO: 701415 - DNA, 33 bp, Homo sapien
ttaataaaaacaagcacgatatctaggaacttt

SEQ ID NO: 701416 - DNA, 33 bp, Homo sapien
ttaataaaaacaagcatgatatctaggaacttt

SEQ ID NO: 701417 - DNA, 33 bp, Homo sapien
caaatgtagtttcaccaaaagcctcaataacaa

SEQ ID NO: 701418 - DNA, 33 bp, Homo sapien
caaatgtagtttcaccgaaagcctcaataacaa

SEQ ID NO: 701419 - DNA, 33 bp, Homo sapien
ataaattagtgtaagacaatgctatgaaacatc

SEQ ID NO: 701420 - DNA, 33 bp, Homo sapien
ataaattagtgtaagataatgctatgaaacatc

SEQ ID NO: 701421 - DNA, 33 bp, Homo sapien
ctcaagtccaaaattacaacaatctctagggca

SEQ ID NO: 701422 - DNA, 33 bp, Homo sapien
ctcaagtccaaaattataacaatctctagggca

SEQ ID NO: 701423 - DNA, 33 bp, Homo sapien
caatgtattgcctctacggcttataatggaatg

SEQ ID NO: 701424 - DNA, 33 bp, Homo sapien
caatgtattgcctctatggcttataatggaatg

SEQ ID NO: 701425 - DNA, 33 bp, Homo sapien
gctctaataaacacagaatgtctcagattccat

SEQ ID NO: 701426 - DNA, 33 bp, Homo sapien
gctctaataaacacagtatgtctcagattccat

SEQ ID NO: 701427 - DNA, 33 bp, Homo sapien
tgtcaccattataagccgagcatggagtaacac

SEQ ID NO: 701428 - DNA, 33 bp, Homo sapien
tgtcaccattataagctgagcatggagtaacac

SEQ ID NO: 701429 - DNA, 33 bp, Homo sapien
gtctttgtgtgtactggcaataaatttattaaa

SEQ ID NO: 701430 - DNA, 33 bp, Homo sapien
gtctttgtgtgtactgtcaataaatttattaaa

SEQ ID NO: 701431 - DNA, 33 bp, Homo sapien
tttagaatgtaggcaacaaagacccgttgcatg

SEQ ID NO: 701432 - DNA, 33 bp, Homo sapien
tttagaatgtaggcaataaagacccgttgcatg

SEQ ID NO: 701433 - DNA, 33 bp, Homo sapien
aagctatgtgagcaaaccttaactagaatatag

SEQ ID NO: 701434 - DNA, 33 bp, Homo sapien
aagctatgtgagcaaatcttaactagaatatag

SEQ ID NO: 701435 - DNA, 33 bp, Homo sapien
ctcatgaaatttgacactagaacgacctaaatt

SEQ ID NO: 701436 - DNA, 33 bp, Homo sapien
ctcatgaaatttgacattagaacgacctaaatt

SEQ ID NO: 701437 - DNA, 33 bp, Homo sapien
gacacaaagaggaagaatagacaccaaaattta

SEQ ID NO: 701438 - DNA, 33 bp, Homo sapien
gacacaaagaggaagagtagacaccaaaattta

SEQ ID NO: 701439 - DNA, 33 bp, Homo sapien
aagcccattaggctaaaggcagaactttcagca

SEQ ID NO: 701440 - DNA, 33 bp, Homo sapien
aagcccattaggctaacggcagaactttcagca

SEQ ID NO: 701441 - DNA, 33 bp, Homo sapien
gaggacccagatagaacaaattgacagaagaag

SEQ ID NO: 701442 - DNA, 33 bp, Homo sapien
gaggacccagatagaataaattgacagaagaag

SEQ ID NO: 701443 - DNA, 33 bp, Homo sapien
atgtcatctgtatttgaaagcaaactctccagg

SEQ ID NO: 701444 - DNA, 33 bp, Homo sapien
atgtcatctgtatttggaagcaaactctccagg

SEQ ID NO: 701445 - DNA, 33 bp, Homo sapien
taccaccggaaatcttcaaatccacctagaatc

SEQ ID NO: 701446 - DNA, 33 bp, Homo sapien
taccaccggaaatctttaaatccacctagaatc

SEQ ID NO: 701447 - DNA, 33 bp, Homo sapien
aaagaaatactggaataaaatgtgttgaaatat

SEQ ID NO: 701448 - DNA, 33 bp, Homo sapien
aaagaaatactggaatcaaatgtgttgaaatat

SEQ ID NO: 701449 - DNA, 33 bp, Homo sapien
ttgatatgaagtactgaattagctcatcttgac

SEQ ID NO: 701450 - DNA, 33 bp, Homo sapien
ttgatatgaagtactgcattagctcatcttgac

SEQ ID NO: 701451 - DNA, 33 bp, Homo sapien
gagagggcaatgggtaactggatcatatcaaag

SEQ ID NO: 701452 - DNA, 33 bp, Homo sapien
gagagggcaatgggtatctggatcatatcaaag

SEQ ID NO: 701453 - DNA, 33 bp, Homo sapien
atagttgttacttctacagttggcataaggcaa

SEQ ID NO: 701454 - DNA, 33 bp, Homo sapien
atagttgttacttctatagttggcataaggcaa

SEQ ID NO: 701455 - DNA, 33 bp, Homo sapien
cttggatattgcagaacgaaaataactgtatgt

SEQ ID NO: 701456 - DNA, 33 bp, Homo sapien
cttggatattgcagaatgaaaataactgtatgt

SEQ ID NO: 701457 - DNA, 33 bp, Homo sapien
aaaccaacaaccaaatcaaaagctagccaatga

SEQ ID NO: 701458 - DNA, 33 bp, Homo sapien
aaaccaacaaccaaattaaaagctagccaatga

SEQ ID NO: 701459 - DNA, 33 bp, Homo sapien
ttaagtaaccataaataaagcaatgtattatag

SEQ ID NO: 701460 - DNA, 33 bp, Homo sapien
ttaagtaaccataaattaagcaatgtattatag

SEQ ID NO: 701461 - DNA, 33 bp, Homo sapien
gaatttgttcaacataaatggaagtagatggaa

SEQ ID NO: 701462 - DNA, 33 bp, Homo sapien
gaatttgttcaacatagatggaagtagatggaa

SEQ ID NO: 701463 - DNA, 33 bp, Homo sapien
tttgtccagtttctgacgcctccacaaaactcc

SEQ ID NO: 701464 - DNA, 33 bp, Homo sapien
tttgtccagtttctgatgcctccacaaaactcc

SEQ ID NO: 701465 - DNA, 33 bp, Homo sapien
tgattctccagaccaggatatctgttggttttt

SEQ ID NO: 701466 - DNA, 33 bp, Homo sapien
tgattctccagaccagtatatctgttggttttt

SEQ ID NO: 701467 - DNA, 33 bp, Homo sapien
aaatgccaagagacaacaagattttgaaaaata

SEQ ID NO: 701468 - DNA, 33 bp, Homo sapien
aaatgccaagagacaagaagattttgaaaaata

SEQ ID NO: 701469 - DNA, 33 bp, Homo sapien
ctgccctacttgccaccgctagaccccatgtaa

SEQ ID NO: 701470 - DNA, 33 bp, Homo sapien
ctgccctacttgccactgctagaccccatgtaa

SEQ ID NO: 701471 - DNA, 33 bp, Homo sapien
ttcttatgcacatttaacttgatcagttctggg

SEQ ID NO: 701472 - DNA, 33 bp, Homo sapien
ttcttatgcacatttatcttgatcagttctggg

SEQ ID NO: 701473 - DNA, 33 bp, Homo sapien
tcatcctactggacaccaatattgattgattca

SEQ ID NO: 701474 - DNA, 33 bp, Homo sapien
tcatcctactggacactaatattgattgattca

SEQ ID NO: 701475 - DNA, 33 bp, Homo sapien
tgaaactgactatctacgttttgtttagtttag

SEQ ID NO: 701476 - DNA, 33 bp, Homo sapien
tgaaactgactatctatgttttgtttagtttag

SEQ ID NO: 701477 - DNA, 33 bp, Homo sapien
gttttctaataatgaaatagcaatgaacattca

SEQ ID NO: 701478 - DNA, 33 bp, Homo sapien
gttttctaataatgaagtagcaatgaacattca

SEQ ID NO: 701479 - DNA, 33 bp, Homo sapien
ctgttacctttctccagcaccacaataactgct

SEQ ID NO: 701480 - DNA, 33 bp, Homo sapien
ctgttacctttctccatcaccacaataactgct

SEQ ID NO: 701481 - DNA, 33 bp, Homo sapien
ttcatccttgttaaatcaggtcagctcaggtaa

SEQ ID NO: 701482 - DNA, 33 bp, Homo sapien
ttcatccttgttaaattaggtcagctcaggtaa

SEQ ID NO: 701483 - DNA, 33 bp, Homo sapien
gaccaatcatgtgggtgaaagcttctgtgctga

SEQ ID NO: 701484 - DNA, 33 bp, Homo sapien
gaccaatcatgtgggttaaagcttctgtgctga

SEQ ID NO: 701485 - DNA, 33 bp, Homo sapien
tatttatatccaaatgaaaagcaaaaggttggg

SEQ ID NO: 701486 - DNA, 33 bp, Homo sapien
tatttatatccaaatggaaagcaaaaggttggg

SEQ ID NO: 701487 - DNA, 33 bp, Homo sapien
ttatgcaggcaaaaaacacctgaataaatgctc

SEQ ID NO: 701488 - DNA, 33 bp, Homo sapien
ttatgcaggcaaaaaagacctgaataaatgctc

SEQ ID NO: 701489 - DNA, 33 bp, Homo sapien
acataatatttatgcaagtctaaagctcaatac

SEQ ID NO: 701490 - DNA, 33 bp, Homo sapien
acataatatttatgcacgtctaaagctcaatac

SEQ ID NO: 701491 - DNA, 33 bp, Homo sapien
atccaatgaaataaaaatgttcatgttgtaagt

SEQ ID NO: 701492 - DNA, 33 bp, Homo sapien
atccaatgaaataaaattgttcatgttgtaagt

SEQ ID NO: 701493 - DNA, 33 bp, Homo sapien
gatgctgaaagaaaagaatccaaagaagtaata

SEQ ID NO: 701494 - DNA, 33 bp, Homo sapien
gatgctgaaagaaaagtatccaaagaagtaata

SEQ ID NO: 701495 - DNA, 33 bp, Homo sapien
tctcaaatcaataaacccttcttcatccaaatg

SEQ ID NO: 701496 - DNA, 33 bp, Homo sapien
tctcaaatcaataaactcttcttcatccaaatg

SEQ ID NO: 701497 - DNA, 33 bp, Homo sapien
ttggccttcgtatgaaacataggcaggttttga

SEQ ID NO: 701498 - DNA, 33 bp, Homo sapien
ttggccttcgtatgaatcataggcaggttttga

SEQ ID NO: 701499 - DNA, 33 bp, Homo sapien
gtatctattaacatcaagcacattagaatgtta

SEQ ID NO: 701500 - DNA, 33 bp, Homo sapien
gtatctattaacatcaggcacattagaatgtta

SEQ ID NO: 701501 - DNA, 33 bp, Homo sapien
agtggatggtaaaataactcccatagtgacaag

SEQ ID NO: 701502 - DNA, 33 bp, Homo sapien
agtggatggtaaaatagctcccatagtgacaag

SEQ ID NO: 701503 - DNA, 33 bp, Homo sapien
ttgtcctgaatatctaagtgttcaatttcagta

SEQ ID NO: 701504 - DNA, 33 bp, Homo sapien
ttgtcctgaatatctaggtgttcaatttcagta

SEQ ID NO: 701505 - DNA, 33 bp, Homo sapien
gtctcgagtcataagcaaatctggaaattctaa

SEQ ID NO: 701506 - DNA, 33 bp, Homo sapien
gtctcgagtcataagcgaatctggaaattctaa

SEQ ID NO: 701507 - DNA, 33 bp, Homo sapien
ggaataatcagtaaagcagaccaaggatgtttc

SEQ ID NO: 701508 - DNA, 33 bp, Homo sapien
ggaataatcagtaaagtagaccaaggatgtttc

SEQ ID NO: 701509 - DNA, 33 bp, Homo sapien
gtgagattgtccgggaaaactggcctgttacag

SEQ ID NO: 701510 - DNA, 33 bp, Homo sapien
gtgagattgtccgggagaactggcctgttacag

SEQ ID NO: 701511 - DNA, 33 bp, Homo sapien
taaatgtgcacaagtaagcttttttggagacat

SEQ ID NO: 701512 - DNA, 33 bp, Homo sapien
taaatgtgcacaagtaggcttttttggagacat

SEQ ID NO: 701513 - DNA, 33 bp, Homo sapien
aatagcaattcgataaaagaaagagggtagaat

SEQ ID NO: 701514 - DNA, 33 bp, Homo sapien
aatagcaattcgataagagaaagagggtagaat

SEQ ID NO: 701515 - DNA, 33 bp, Homo sapien
attccatctctagtggacaattacaggatatag

SEQ ID NO: 701516 - DNA, 33 bp, Homo sapien
attccatctctagtgggcaattacaggatatag

SEQ ID NO: 701517 - DNA, 33 bp, Homo sapien
acaatgactctggaaacagggattgttactgtt

SEQ ID NO: 701518 - DNA, 33 bp, Homo sapien
acaatgactctggaaatagggattgttactgtt

SEQ ID NO: 701519 - DNA, 33 bp, Homo sapien
ggaatttttcctcaatgattcctccaaatatgt

SEQ ID NO: 701520 - DNA, 33 bp, Homo sapien
ggaatttttcctcaattattcctccaaatatgt

SEQ ID NO: 701521 - DNA, 33 bp, Homo sapien; identical to SEQ ID NO: 701519

SEQ ID NO: 701522 - DNA, 33 bp, Homo sapien; identical to SEQ ID NO: 701520

SEQ ID NO: 701523 - DNA, 33 bp, Homo sapien; identical to SEQ ID NO: 701519

SEQ ID NO: 701524 - DNA, 33 bp, Homo sapien; identical to SEQ ID NO: 701520

SEQ ID NO: 701525 - DNA, 33 bp, Homo sapien
ttaacctagaaagctcaccctgatcccccacag

SEQ ID NO: 701526 - DNA, 33 bp, Homo sapien
ttaacctagaaagctcgccctgatcccccacag

SEQ ID NO: 701527 - DNA, 33 bp, Homo sapien
ttattgcacacacagagattttgttagagtccc

SEQ ID NO: 701528 - DNA, 33 bp, Homo sapien
ttattgcacacacagatattttgttagagtccc

SEQ ID NO: 701529 - DNA, 33 bp, Homo sapien
taaacacctaagtataaacagaatgcatatctt

SEQ ID NO: 701530 - DNA, 33 bp, Homo sapien
taaacacctaagtatagacagaatgcatatctt

SEQ ID NO: 701531 - DNA, 33 bp, Homo sapien
tttgttcctaaatccaaaacaagcatggccatt

SEQ ID NO: 701532 - DNA, 33 bp, Homo sapien
tttgttcctaaatccagaacaagcatggccatt

SEQ ID NO: 701533 - DNA, 33 bp, Homo sapien
cagtctcctttatcaacaccctcacaaacacac

SEQ ID NO: 701534 - DNA, 33 bp, Homo sapien
cagtctcctttatcaataccctcacaaacacac

SEQ ID NO: 701535 - DNA, 33 bp, Homo sapien
ggaataatacagaaataatggttacagagacta

SEQ ID NO: 701536 - DNA, 33 bp, Homo sapien
ggaataatacagaaatgatggttacagagacta

SEQ ID NO: 701537 - DNA, 33 bp, Homo sapien
aagatttaagatcagaatattgtggcttgagtt

SEQ ID NO: 701538 - DNA, 33 bp, Homo sapien
aagatttaagatcagagtattgtggcttgagtt

SEQ ID NO: 701539 - DNA, 33 bp, Homo sapien
tgcatcaggttaaaagcctcaccttcctactta

SEQ ID NO: 701540 - DNA, 33 bp, Homo sapien
tgcatcaggttaaaagtctcaccttcctactta

SEQ ID NO: 701541 - DNA, 33 bp, Homo sapien
gaaaggtcatgtagtacgaaatatgaaaagcaa

SEQ ID NO: 701542 - DNA, 33 bp, Homo sapien
gaaaggtcatgtagtaggaaatatgaaaagcaa

SEQ ID NO: 701543 - DNA, 33 bp, Homo sapien
ttaactcttcaaatgaatcagttttgtgtaaag

SEQ ID NO: 701544 - DNA, 33 bp, Homo sapien
ttaactcttcaaatgactcagttttgtgtaaag

SEQ ID NO: 701545 - DNA, 33 bp, Homo sapien
agtaaggatatactagaacttctgcaatatggg

SEQ ID NO: 701546 - DNA, 33 bp, Homo sapien
agtaaggatatactaggacttctgcaatatggg

SEQ ID NO: 701547 - DNA, 33 bp, Homo sapien
gcacaattcatctaaacacttggatcaactaac

SEQ ID NO: 701548 - DNA, 33 bp, Homo sapien
gcacaattcatctaaatacttggatcaactaac

SEQ ID NO: 701549 - DNA, 33 bp, Homo sapien
ctcatttttctctataagtaatggaagcataac

SEQ ID NO: 701550 - DNA, 33 bp, Homo sapien
ctcatttttctctataggtaatggaagcataac

SEQ ID NO: 701551 - DNA, 33 bp, Homo sapien
gtctcagtactcattaacccttgcagatttccc

SEQ ID NO: 701552 - DNA, 33 bp, Homo sapien
gtctcagtactcattagcccttgcagatttccc

SEQ ID NO: 701553 - DNA, 33 bp, Homo sapien
gttacatatgctgcttaaaaaaaaattgttttt

SEQ ID NO: 701554 - DNA, 33 bp, Homo sapien
gttacatatgctgctttaaaaaaaattgttttt

SEQ ID NO: 701555 - DNA, 33 bp, Homo sapien
aattgcttcatgcttacatcaatcaggagttgt

SEQ ID NO: 701556 - DNA, 33 bp, Homo sapien
aattgcttcatgcttagatcaatcaggagttgt

SEQ ID NO: 701557 - DNA, 33 bp, Homo sapien
ttctagtatttacttcaaagaggacacataaga

SEQ ID NO: 701558 - DNA, 33 bp, Homo sapien
ttctagtatttacttccaagaggacacataaga

SEQ ID NO: 701559 - DNA, 33 bp, Homo sapien
tactattactgtttaacaaagtacaccataact

SEQ ID NO: 701560 - DNA, 33 bp, Homo sapien
tactattactgtttaataaagtacaccataact

SEQ ID NO: 701561 - DNA, 33 bp, Homo sapien
agtataattccagctaagaagacagatacattg

SEQ ID NO: 701562 - DNA, 33 bp, Homo sapien
agtataattccagctatgaagacagatacattg

SEQ ID NO: 701563 - DNA, 33 bp, Homo sapien
gcactcctttgaactacggttcacctactgtgc

SEQ ID NO: 701564 - DNA, 33 bp, Homo sapien
gcactcctttgaactatggttcacctactgtgc

SEQ ID NO: 701565 - DNA, 33 bp, Homo sapien
aggaaaatctggaatacatgctgaacctaagaa

SEQ ID NO: 701566 - DNA, 33 bp, Homo sapien
aggaaaatctggaatatatgctgaacctaagaa

SEQ ID NO: 701567 - DNA, 33 bp, Homo sapien
gaaaacatacatagaaatataccatcctgctta

SEQ ID NO: 701568 - DNA, 33 bp, Homo sapien
gaaaacatacatagaattataccatcctgctta

SEQ ID NO: 701569 - DNA, 33 bp, Homo sapien
agaattgaacataactcacacttttgaaaatcc

SEQ ID NO: 701570 - DNA, 33 bp, Homo sapien
agaattgaacataacttacacttttgaaaatcc

SEQ ID NO: 701571 - DNA, 33 bp, Homo sapien
tattaaactgaatgtcacaggtaattgtaacac

SEQ ID NO: 701572 - DNA, 33 bp, Homo sapien
tattaaactgaatgtcgcaggtaattgtaacac

SEQ ID NO: 701573 - DNA, 33 bp, Homo sapien
aagttcaaagtgcagaaaaataaacagagacaa

SEQ ID NO: 701574 - DNA, 33 bp, Homo sapien
aagttcaaagtgcagagaaataaacagagacaa

SEQ ID NO: 701575 - DNA, 33 bp, Homo sapien
ttgcagtgaggcccacagtaattgaaactgatg

SEQ ID NO: 701576 - DNA, 33 bp, Homo sapien
ttgcagtgaggcccacggtaattgaaactgatg

SEQ ID NO: 701577 - DNA, 33 bp, Homo sapien
gtaaaagtctaaagcactacatgagaaaattta

SEQ ID NO: 701578 - DNA, 33 bp, Homo sapien
gtaaaagtctaaagcagtacatgagaaaattta

SEQ ID NO: 701579 - DNA, 33 bp, Homo sapien
taaaattggaccatcccgaggcaatctgccaag

SEQ ID NO: 701580 - DNA, 33 bp, Homo sapien
taaaattggaccatcctgaggcaatctgccaag

SEQ ID NO: 701581 - DNA, 33 bp, Homo sapien
ttactgtaatgatgtacgtaagtaaaaatatgt

SEQ ID NO: 701582 - DNA, 33 bp, Homo sapien
ttactgtaatgatgtatgtaagtaaaaatatgt

SEQ ID NO: 701583 - DNA, 33 bp, Homo sapien
ggagtcgcacactatacgacaaaaaaagcactg

SEQ ID NO: 701584 - DNA, 33 bp, Homo sapien
ggagtcgcacactatatgacaaaaaaagcactg

SEQ ID NO: 701585 - DNA, 33 bp, Homo sapien
taagtggttagaatgaaacaaaaagtataggta

SEQ ID NO: 701586 - DNA, 33 bp, Homo sapien
taagtggttagaatgatacaaaaagtataggta

SEQ ID NO: 701587 - DNA, 33 bp, Homo sapien
tattaagctaacaaaagagttttccatagaact

SEQ ID NO: 701588 - DNA, 33 bp, Homo sapien
tattaagctaacaaaatagttttccatagaact

SEQ ID NO: 701589 - DNA, 33 bp, Homo sapien
tgcctctttcctctccagcgttcggattctaaa

SEQ ID NO: 701590 - DNA, 33 bp, Homo sapien
tgcctctttcctctcccgcgttcggattctaaa

SEQ ID NO: 701591 - DNA, 33 bp, Homo sapien
gaacctgaaattgatgcattggctgaagtatag

SEQ ID NO: 701592 - DNA, 33 bp, Homo sapien
gaacctgaaattgatgtattggctgaagtatag

SEQ ID NO: 701593 - DNA, 33 bp, Homo sapien
gcctggtacctcatgacatttctaaggtttcaa

SEQ ID NO: 701594 - DNA, 33 bp, Homo sapien
gcctggtacctcatgatatttctaaggtttcaa

SEQ ID NO: 701595 - DNA, 33 bp, Homo sapien
ctcctcctatcattacagaagaagcttgtctct

SEQ ID NO: 701596 - DNA, 33 bp, Homo sapien
ctcctcctatcattacggaagaagcttgtctct

SEQ ID NO: 701597 - DNA, 33 bp, Homo sapien
gtcaaacataattgaaacttcagtatcctgtgg

SEQ ID NO: 701598 - DNA, 33 bp, Homo sapien
gtcaaacataattgaatcttcagtatcctgtgg

SEQ ID NO: 701599 - DNA, 33 bp, Homo sapien
ttaagtaggtcaatggacacagaaaacttgcca

SEQ ID NO: 701600 - DNA, 33 bp, Homo sapien
ttaagtaggtcaatggtcacagaaaacttgcca

SEQ ID NO: 701601 - DNA, 33 bp, Homo sapien
tcaaattgaaatgtcacaaaagaggaaaagtaa

SEQ ID NO: 701602 - DNA, 33 bp, Homo sapien
tcaaattgaaatgtcataaaagaggaaaagtaa

SEQ ID NO: 701603 - DNA, 33 bp, Homo sapien
ataaatagcactgggacaagtatcaacaccatt

SEQ ID NO: 701604 - DNA, 33 bp, Homo sapien
ataaatagcactgggataagtatcaacaccatt

SEQ ID NO: 701605 - DNA, 33 bp, Homo sapien
ggtattgagcataataaacgactagctaattaa

SEQ ID NO: 701606 - DNA, 33 bp, Homo sapien
ggtattgagcataatagacgactagctaattaa

SEQ ID NO: 701607 - DNA, 33 bp, Homo sapien
attaccttttacttggaactgggacaaatcagc

SEQ ID NO: 701608 - DNA, 33 bp, Homo sapien
attaccttttacttggtactgggacaaatcagc

SEQ ID NO: 701609 - DNA, 33 bp, Homo sapien
tgttagccacttttcacaagaattgaactgtga

SEQ ID NO: 701610 - DNA, 33 bp, Homo sapien
tgttagccacttttcataagaattgaactgtga

SEQ ID NO: 701611 - DNA, 33 bp, Homo sapien
tggaagttcatattgccgaatccatgcataacc

SEQ ID NO: 701612 - DNA, 33 bp, Homo sapien
tggaagttcatattgctgaatccatgcataacc

SEQ ID NO: 701613 - DNA, 33 bp, Homo sapien
tgtcaagatggacaagaacaccatgttagccat

SEQ ID NO: 701614 - DNA, 33 bp, Homo sapien
tgtcaagatggacaagcacaccatgttagccat

SEQ ID NO: 701615 - DNA, 33 bp, Homo sapien
ccacaataaatcatcacaaccaagtaagtaact

SEQ ID NO: 701616 - DNA, 33 bp, Homo sapien
ccacaataaatcatcataaccaagtaagtaact

SEQ ID NO: 701617 - DNA, 33 bp, Homo sapien
agagactaaaatgtaacgtcagacagaaattct

SEQ ID NO: 701618 - DNA, 33 bp, Homo sapien
agagactaaaatgtaatgtcagacagaaattct

SEQ ID NO: 701619 - DNA, 33 bp, Homo sapien
tgttagaggcaactgtaaatgtaaatggcctgt

SEQ ID NO: 701620 - DNA, 33 bp, Homo sapien
tgttagaggcaactgtgaatgtaaatggcctgt

SEQ ID NO: 701621 - DNA, 33 bp, Homo sapien
caaattggcaatgcaaccatctttacagtatac

SEQ ID NO: 701622 - DNA, 33 bp, Homo sapien
caaattggcaatgcaatcatctttacagtatac

SEQ ID NO: 701623 - DNA, 33 bp, Homo sapien
ttaaagtgaatttcaaatgacctgattaatttc

SEQ ID NO: 701624 - DNA, 33 bp, Homo sapien
ttaaagtgaatttcaagtgacctgattaatttc

SEQ ID NO: 701625 - DNA, 33 bp, Homo sapien
cctcacaactggacaaagtttaagatgacttat

SEQ ID NO: 701626 - DNA, 33 bp, Homo sapien
cctcacaactggacaaggtttaagatgacttat

SEQ ID NO: 701627 - DNA, 33 bp, Homo sapien
tgcagaataaaaaggaactaattggaatgacca

SEQ ID NO: 701628 - DNA, 33 bp, Homo sapien
tgcagaataaaaaggagctaattggaatgacca

SEQ ID NO: 701629 - DNA, 33 bp, Homo sapien
atcatgctcgtttttaaatgaatcaatgcacac

SEQ ID NO: 701630 - DNA, 33 bp, Homo sapien
atcatgctcgtttttacatgaatcaatgcacac

SEQ ID NO: 701631 - DNA, 33 bp, Homo sapien
tatcatcacagtttcaagttttgagggatcact

SEQ ID NO: 701632 - DNA, 33 bp, Homo sapien
tatcatcacagtttcaggttttgagggatcact

SEQ ID NO: 701633 - DNA, 33 bp, Homo sapien
tgaaacagataaaacaaaacctcattttacaga

SEQ ID NO: 701634 - DNA, 33 bp, Homo sapien
tgaaacagataaaacataacctcattttacaga

SEQ ID NO: 701635 - DNA, 33 bp, Homo sapien
tactcttgtgtatgtccgaaaaacaaaaagaaa

SEQ ID NO: 701636 - DNA, 33 bp, Homo sapien
tactcttgtgtatgtctgaaaaacaaaaagaaa

SEQ ID NO: 701637 - DNA, 33 bp, Homo sapien
cacaaagacaaataccaaaagttgatgggtgga

SEQ ID NO: 701638 - DNA, 33 bp, Homo sapien
cacaaagacaaataccgaaagttgatgggtgga

SEQ ID NO: 701639 - DNA, 33 bp, Homo sapien
ttgaccagatattaaaactcacaactctctaaa

SEQ ID NO: 701640 - DNA, 33 bp, Homo sapien
ttgaccagatattaaatctcacaactctctaaa

SEQ ID NO: 701641 - DNA, 33 bp, Homo sapien
gcattatctcttagaaactccagaagctactgg

SEQ ID NO: 701642 - DNA, 33 bp, Homo sapien
gcattatctcttagaatctccagaagctactgg

SEQ ID NO: 701643 - DNA, 33 bp, Homo sapien
ggttagagcttggacaatgaaaactttgaagta

SEQ ID NO: 701644 - DNA, 33 bp, Homo sapien
ggttagagcttggacagtgaaaactttgaagta

SEQ ID NO: 701645 - DNA, 33 bp, Homo sapien
ttttttaattgagcaccatcttccctaatagac

SEQ ID NO: 701646 - DNA, 33 bp, Homo sapien
ttttttaattgagcactatcttccctaatagac

SEQ ID NO: 701647 - DNA, 33 bp, Homo sapien
ttcttaattctctatcacttgaaatcttctttt

SEQ ID NO: 701648 - DNA, 33 bp, Homo sapien
ttcttaattctctatcgcttgaaatcttctttt

SEQ ID NO: 701649 - DNA, 33 bp, Homo sapien
aatccaacaaagagcaaagtaaatatccgaggc

SEQ ID NO: 701650 - DNA, 33 bp, Homo sapien
aatccaacaaagagcagagtaaatatccgaggc

SEQ ID NO: 701651 - DNA, 33 bp, Homo sapien
gctcaggcagttaagacgagatgaaagatttct

SEQ ID NO: 701652 - DNA, 33 bp, Homo sapien
gctcaggcagttaagatgagatgaaagatttct

SEQ ID NO: 701653 - DNA, 33 bp, Homo sapien
aatcagaaaattgacaaatagattggctttggt

SEQ ID NO: 701654 - DNA, 33 bp, Homo sapien
aatcagaaaattgacagatagattggctttggt

SEQ ID NO: 701655 - DNA, 33 bp, Homo sapien
agctgtttatgtttctaaatcttgctctacatt

SEQ ID NO: 701656 - DNA, 33 bp, Homo sapien
agctgtttatgtttctcaatcttgctctacatt

SEQ ID NO: 701657 - DNA, 33 bp, Homo sapien
tctcctaaagttcactcagtaggataaccttca

SEQ ID NO: 701658 - DNA, 33 bp, Homo sapien
tctcctaaagttcactgagtaggataaccttca

SEQ ID NO: 701659 - DNA, 33 bp, Homo sapien
tttatctgaggcgataaaatccaaacgtgcaac

SEQ ID NO: 701660 - DNA, 33 bp, Homo sapien
tttatctgaggcgatagaatccaaacgtgcaac

SEQ ID NO: 701661 - DNA, 33 bp, Homo sapien
agctaaataagagagcaaatgtttgtttaggtt

SEQ ID NO: 701662 - DNA, 33 bp, Homo sapien
agctaaataagagagcgaatgtttgtttaggtt

SEQ ID NO: 701663 - DNA, 33 bp, Homo sapien
ggtaattcaaaccaaaaatttcctcactgaaaa

SEQ ID NO: 701664 - DNA, 33 bp, Homo sapien
ggtaattcaaaccaaatatttcctcactgaaaa

SEQ ID NO: 701665 - DNA, 33 bp, Homo sapien
tggaaactggacgaataagtgtctgattcacca

SEQ ID NO: 701666 - DNA, 33 bp, Homo sapien
tggaaactggacgaatgagtgtctgattcacca

SEQ ID NO: 701667 - DNA, 33 bp, Homo sapien
gaatcaggcaatgcaccaattcaaggatataca

SEQ ID NO: 701668 - DNA, 33 bp, Homo sapien
gaatcaggcaatgcactaattcaaggatataca

SEQ ID NO: 701669 - DNA, 33 bp, Homo sapien
catgagttttatggagaagtgagtttccagcaa

SEQ ID NO: 701670 - DNA, 33 bp, Homo sapien
catgagttttatggaggagtgagtttccagcaa

SEQ ID NO: 701671 - DNA, 33 bp, Homo sapien
ttttttgtcccctacccatttgtgccaattgta

SEQ ID NO: 701672 - DNA, 33 bp, Homo sapien
ttttttgtcccctaccgatttgtgccaattgta

SEQ ID NO: 701673 - DNA, 33 bp, Homo sapien
agaacgaaaaacatcccaagaagccttgagtga

SEQ ID NO: 701674 - DNA, 33 bp, Homo sapien
agaacgaaaaacatcctaagaagccttgagtga

SEQ ID NO: 701675 - DNA, 33 bp, Homo sapien
aattgcttagattcgaccctggatgaataacac

SEQ ID NO: 701676 - DNA, 33 bp, Homo sapien
aattgcttagattcgatcctggatgaataacac

SEQ ID NO: 701677 - DNA, 33 bp, Homo sapien
ctttttgagaatctgacgctatagttggctatt

SEQ ID NO: 701678 - DNA, 33 bp, Homo sapien
ctttttgagaatctgatgctatagttggctatt

SEQ ID NO: 701679 - DNA, 33 bp, Homo sapien
gcctaaagtgacacaacgctttagcaatgcata

SEQ ID NO: 701680 - DNA, 33 bp, Homo sapien
gcctaaagtgacacaatgctttagcaatgcata

SEQ ID NO: 701681 - DNA, 33 bp, Homo sapien
tagggctgagacgagacgcataaaccaaccatc

SEQ ID NO: 701682 - DNA, 33 bp, Homo sapien
tagggctgagacgagaggcataaaccaaccatc

SEQ ID NO: 701683 - DNA, 33 bp, Homo sapien
tgtattactctctaaaacctggctgagaaaagg

SEQ ID NO: 701684 - DNA, 33 bp, Homo sapien
tgtattactctctaaaccctggctgagaaaagg

SEQ ID NO: 701685 - DNA, 33 bp, Homo sapien
cctagatcctagatgacgtaaacaaatggaaaa

SEQ ID NO: 701686 - DNA, 33 bp, Homo sapien
cctagatcctagatgatgtaaacaaatggaaaa

SEQ ID NO: 701687 - DNA, 33 bp, Homo sapien
tttggcttttctgagaatctaatgccgctggtg

SEQ ID NO: 701688 - DNA, 33 bp, Homo sapien
tttggcttttctgagactctaatgccgctggtg

SEQ ID NO: 701689 - DNA, 33 bp, Homo sapien
gcatttggatcttgaaacaatcttctcctgcat

SEQ ID NO: 701690 - DNA, 33 bp, Homo sapien
gcatttggatcttgaagcaatcttctcctgcat

SEQ ID NO: 701691 - DNA, 33 bp, Homo sapien
agcctataagagtttccatgtgcatggtttaaa

SEQ ID NO: 701692 - DNA, 33 bp, Homo sapien
agcctataagagtttctatgtgcatggtttaaa

SEQ ID NO: 701693 - DNA, 33 bp, Homo sapien
aacacaatgaatgtaagcagtaattttgctatt

SEQ ID NO: 701694 - DNA, 33 bp, Homo sapien
aacacaatgaatgtaatcagtaattttgctatt

SEQ ID NO: 701695 - DNA, 33 bp, Homo sapien
tcaaaattgaaaactcacctgtcaaaaatatca

SEQ ID NO: 701696 - DNA, 33 bp, Homo sapien
tcaaaattgaaaactctcctgtcaaaaatatca

SEQ ID NO: 701697 - DNA, 33 bp, Homo sapien
caaacaattttaatgcaaaatggaaacaattgg

SEQ ID NO: 701698 - DNA, 33 bp, Homo sapien
caaacaattttaatgcgaaatggaaacaattgg

SEQ ID NO: 701699 - DNA, 33 bp, Homo sapien
aaacaaaagatgtccagtatacattgaaagtac

SEQ ID NO: 701700 - DNA, 33 bp, Homo sapien
aaacaaaagatgtccattatacattgaaagtac

SEQ ID NO: 701701 - DNA, 33 bp, Homo sapien
tatagtcaacctgtaccgatttcatttgcttta

SEQ ID NO: 701702 - DNA, 33 bp, Homo sapien
tatagtcaacctgtactgatttcatttgcttta

SEQ ID NO: 701703 - DNA, 33 bp, Homo sapien
ttagggatactcaaaactgtaaagcaactattc

SEQ ID NO: 701704 - DNA, 33 bp, Homo sapien
ttagggatactcaaaagtgtaaagcaactattc

SEQ ID NO: 701705 - DNA, 33 bp, Homo sapien
tggatctgactgtctaacaggagattgttaatg

SEQ ID NO: 701706 - DNA, 33 bp, Homo sapien
tggatctgactgtctagcaggagattgttaatg

SEQ ID NO: 701707 - DNA, 33 bp, Homo sapien
atgacatgggtggtcaacaattagataaataaa

SEQ ID NO: 701708 - DNA, 33 bp, Homo sapien
atgacatgggtggtcagcaattagataaataaa

SEQ ID NO: 701709 - DNA, 33 bp, Homo sapien
gcagagtcaaaacagcaataataataatctgac

SEQ ID NO: 701710 - DNA, 33 bp, Homo sapien
gcagagtcaaaacagcgataataataatctgac

SEQ ID NO: 701711 - DNA, 33 bp, Homo sapien
gaaagattaggtctaaaaaaacatatgaaaatg

SEQ ID NO: 701712 - DNA, 33 bp, Homo sapien
gaaagattaggtctaacaaaacatatgaaaatg

SEQ ID NO: 701713 - DNA, 33 bp, Homo sapien
aaatctgagtcacccaatgcacattatcacagc

SEQ ID NO: 701714 - DNA, 33 bp, Homo sapien
aaatctgagtcacccagtgcacattatcacagc

SEQ ID NO: 701715 - DNA, 33 bp, Homo sapien
tggtgaaggttgagacaccgtagaaggagcact

SEQ ID NO: 701716 - DNA, 33 bp, Homo sapien
tggtgaaggttgagaccccgtagaaggagcact

SEQ ID NO: 701717 - DNA, 33 bp, Homo sapien
tcaaactagatctgtcaacttacgatgtaaaaa

SEQ ID NO: 701718 - DNA, 33 bp, Homo sapien
tcaaactagatctgtcgacttacgatgtaaaaa

SEQ ID NO: 701719 - DNA, 33 bp, Homo sapien
cttctaagtaaggaagacgtacatgatgccatg

SEQ ID NO: 701720 - DNA, 33 bp, Homo sapien
cttctaagtaaggaagccgtacatgatgccatg

SEQ ID NO: 701721 - DNA, 33 bp, Homo sapien
cccattttgtggatgaaggaagttaggcacaaa

SEQ ID NO: 701722 - DNA, 33 bp, Homo sapien
cccattttgtggatgagggaagttaggcacaaa

SEQ ID NO: 701723 - DNA, 33 bp, Homo sapien
aagaacatatggaccaacatatcaattctcttg

SEQ ID NO: 701724 - DNA, 33 bp, Homo sapien
aagaacatatggaccatcatatcaattctcttg

SEQ ID NO: 701725 - DNA, 33 bp, Homo sapien
attacctcagagaccaacctagtaacagcagac

SEQ ID NO: 701726 - DNA, 33 bp, Homo sapien
attacctcagagaccagcctagtaacagcagac

SEQ ID NO: 701727 - DNA, 33 bp, Homo sapien
gtgtttccagcactgaaaaagcactgtggttaa

SEQ ID NO: 701728 - DNA, 33 bp, Homo sapien
gtgtttccagcactgacaaagcactgtggttaa

SEQ ID NO: 701729 - DNA, 33 bp, Homo sapien
cttgccttctttgttaagcgtgtctgtgtggtt

SEQ ID NO: 701730 - DNA, 33 bp, Homo sapien
cttgccttctttgttaggcgtgtctgtgtggtt

SEQ ID NO: 701731 - DNA, 33 bp, Homo sapien
ggaaacaatcatggataaactaatctgatttct

SEQ ID NO: 701732 - DNA, 33 bp, Homo sapien
ggaaacaatcatggatgaactaatctgatttct

SEQ ID NO: 701733 - DNA, 33 bp, Homo sapien
ccctgcaagcagcctcaaaaatgaaaaaaaggt

SEQ ID NO: 701734 - DNA, 33 bp, Homo sapien
ccctgcaagcagcctctaaaatgaaaaaaaggt

SEQ ID NO: 701735 - DNA, 33 bp, Homo sapien
ttgcttctcctgttgaactcctaatgcacagta

SEQ ID NO: 701736 - DNA, 33 bp, Homo sapien
ttgcttctcctgttgagctcctaatgcacagta

SEQ ID NO: 701737 - DNA, 33 bp, Homo sapien
tgtcactaggcaataacggaagattcaggaaaa

SEQ ID NO: 701738 - DNA, 33 bp, Homo sapien
tgtcactaggcaataatggaagattcaggaaaa

SEQ ID NO: 701739 - DNA, 33 bp, Homo sapien
cagtggccccggtagtaaatatcacagtcatga

SEQ ID NO: 701740 - DNA, 33 bp, Homo sapien
cagtggccccggtagttaatatcacagtcatga

SEQ ID NO: 701741 - DNA, 33 bp, Homo sapien
aatgatcactgatatgcacctttctttcacata

SEQ ID NO: 701742 - DNA, 33 bp, Homo sapien
aatgatcactgatatggacctttctttcacata

SEQ ID NO: 701743 - DNA, 33 bp, Homo sapien
ctattgcactttcaccacctttattatcagtta

SEQ ID NO: 701744 - DNA, 33 bp, Homo sapien
ctattgcactttcacctcctttattatcagtta

SEQ ID NO: 701745 - DNA, 33 bp, Homo sapien
ccatgagactgtctaacggggaaaaagaaaatt

SEQ ID NO: 701746 - DNA, 33 bp, Homo sapien
ccatgagactgtctaatggggaaaaagaaaatt

SEQ ID NO: 701747 - DNA, 33 bp, Homo sapien
tattggtagatgtacccagtgacaattttagga

SEQ ID NO: 701748 - DNA, 33 bp, Homo sapien
tattggtagatgtacctagtgacaattttagga

SEQ ID NO: 701749 - DNA, 33 bp, Homo sapien
tttgaaagtggcagaaatagacttaggcaatct

SEQ ID NO: 701750 - DNA, 33 bp, Homo sapien
tttgaaagtggcagaagtagacttaggcaatct

SEQ ID NO: 701751 - DNA, 33 bp, Homo sapien
cataggactgtatttgaacacttaagtattata

SEQ ID NO: 701752 - DNA, 33 bp, Homo sapien
cataggactgtatttggacacttaagtattata

SEQ ID NO: 701753 - DNA, 33 bp, Homo sapien
aacaggcaaaaaaagacggcgcagaggcaaatt

SEQ ID NO: 701754 - DNA, 33 bp, Homo sapien
aacaggcaaaaaaagatggcgcagaggcaaatt

SEQ ID NO: 701755 - DNA, 33 bp, Homo sapien
ttagcttgattaagcaaacttgttcaaatgcta

SEQ ID NO: 701756 - DNA, 33 bp, Homo sapien
ttagcttgattaagcagacttgttcaaatgcta

SEQ ID NO: 701757 - DNA, 33 bp, Homo sapien
tagatttcctcttgtaaaagaacatcataaaaa

SEQ ID NO: 701758 - DNA, 33 bp, Homo sapien
tagatttcctcttgtagaagaacatcataaaaa

SEQ ID NO: 701759 - DNA, 33 bp, Homo sapien
agcacctgcagcattcaagattagacatctgta

SEQ ID NO: 701760 - DNA, 33 bp, Homo sapien
agcacctgcagcattcgagattagacatctgta

SEQ ID NO: 701761 - DNA, 33 bp, Homo sapien
caggcacacaaagtacagctccaaggttttgat

SEQ ID NO: 701762 - DNA, 33 bp, Homo sapien
caggcacacaaagtacggctccaaggttttgat

SEQ ID NO: 701763 - DNA, 33 bp, Homo sapien
tttgctgttaaaaagaagcgactaataaggcaa

SEQ ID NO: 701764 - DNA, 33 bp, Homo sapien
tttgctgttaaaaagaggcgactaataaggcaa

SEQ ID NO: 701765 - DNA, 33 bp, Homo sapien
gaagtgacggagtaaacggagaagtaataacaa

SEQ ID NO: 701766 - DNA, 33 bp, Homo sapien
gaagtgacggagtaaatggagaagtaataacaa

SEQ ID NO: 701767 - DNA, 33 bp, Homo sapien
catacttcctgactacagcaattgccattacag

SEQ ID NO: 701768 - DNA, 33 bp, Homo sapien
catacttcctgactaccgcaattgccattacag

SEQ ID NO: 701769 - DNA, 33 bp, Homo sapien
cattttttccaagctaaggagaaagcgttcctg

SEQ ID NO: 701770 - DNA, 33 bp, Homo sapien
cattttttccaagctagggagaaagcgttcctg

SEQ ID NO: 701771 - DNA, 33 bp, Homo sapien
tgaacctggccacttcgctcagagcaggttgca

SEQ ID NO: 701772 - DNA, 33 bp, Homo sapien
tgaacctggccacttctctcagagcaggttgca

SEQ ID NO: 701773 - DNA, 33 bp, Homo sapien
aagtctatttcaacagccatattggcattaatc

SEQ ID NO: 701774 - DNA, 33 bp, Homo sapien
aagtctatttcaacagtcatattggcattaatc

SEQ ID NO: 701775 - DNA, 33 bp, Homo sapien
ttcaatggtagatgaaattcaaaggtcaaagta

SEQ ID NO: 701776 - DNA, 33 bp, Homo sapien
ttcaatggtagatgaagttcaaaggtcaaagta

SEQ ID NO: 701777 - DNA, 33 bp, Homo sapien
gtaaccaggaaagttacgaaatcgaatgattta

SEQ ID NO: 701778 - DNA, 33 bp, Homo sapien
gtaaccaggaaagttatgaaatcgaatgattta

SEQ ID NO: 701779 - DNA, 33 bp, Homo sapien
atctaggaaaagggcccagcatctaggaaaaat

SEQ ID NO: 701780 - DNA, 33 bp, Homo sapien
atctaggaaaagggccgagcatctaggaaaaat

SEQ ID NO: 701781 - DNA, 33 bp, Homo sapien
gggcgaagtctaaacacgagagagtagaagtgg

SEQ ID NO: 701782 - DNA, 33 bp, Homo sapien
gggcgaagtctaaacatgagagagtagaagtgg

SEQ ID NO: 701783 - DNA, 33 bp, Homo sapien
ttatgccaaatgaaaacgctgtgaccattgtgg

SEQ ID NO: 701784 - DNA, 33 bp, Homo sapien
ttatgccaaatgaaaatgctgtgaccattgtgg

SEQ ID NO: 701785 - DNA, 33 bp, Homo sapien
gtgtaggccaaactaaggcttgtaattttcttt

SEQ ID NO: 701786 - DNA, 33 bp, Homo sapien
gtgtaggccaaactaatgcttgtaattttcttt

SEQ ID NO: 701787 - DNA, 33 bp, Homo sapien
gcatagaataattaaaccaggctgttactccat

SEQ ID NO: 701788 - DNA, 33 bp, Homo sapien
gcatagaataattaaatcaggctgttactccat

SEQ ID NO: 701789 - DNA, 33 bp, Homo sapien
tgttgtctataaaatacggtacatggagtggat

SEQ ID NO: 701790 - DNA, 33 bp, Homo sapien
tgttgtctataaaatatggtacatggagtggat

SEQ ID NO: 701791 - DNA, 33 bp, Homo sapien
aaacacagaatactccagaaggtttgtcaaagt

SEQ ID NO: 701792 - DNA, 33 bp, Homo sapien
aaacacagaatactccggaaggtttgtcaaagt

SEQ ID NO: 701793 - DNA, 33 bp, Homo sapien
agatatctgtggcaaccactttgtaagtgaatg

SEQ ID NO: 701794 - DNA, 33 bp, Homo sapien
agatatctgtggcaactactttgtaagtgaatg

SEQ ID NO: 701795 - DNA, 33 bp, Homo sapien
catagtatctaatcagaaatcccaaggaaaaaa

SEQ ID NO: 701796 - DNA, 33 bp, Homo sapien
catagtatctaatcagtaatcccaaggaaaaaa

SEQ ID NO: 701797 - DNA, 33 bp, Homo sapien
cttaactaatttctataacaaacaatgcctatg

SEQ ID NO: 701798 - DNA, 33 bp, Homo sapien
cttaactaatttctatgacaaacaatgcctatg

SEQ ID NO: 701799 - DNA, 33 bp, Homo sapien
tgaaatgtgttcaataccatagggaatttggga

SEQ ID NO: 701800 - DNA, 33 bp, Homo sapien
tgaaatgtgttcaatatcatagggaatttggga

SEQ ID NO: 701801 - DNA, 33 bp, Homo sapien
atgcccaagctctcaagttaaaatttcccacat

SEQ ID NO: 701802 - DNA, 33 bp, Homo sapien
atgcccaagctctcaatttaaaatttcccacat

SEQ ID NO: 701803 - DNA, 33 bp, Homo sapien
ctgaattagtacataacccaggcaaacaaaaca

SEQ ID NO: 701804 - DNA, 33 bp, Homo sapien
ctgaattagtacataatccaggcaaacaaaaca

SEQ ID NO: 701805 - DNA, 33 bp, Homo sapien
tcctgcttggagccagaattgtggatatatttt

SEQ ID NO: 701806 - DNA, 33 bp, Homo sapien
tcctgcttggagccaggattgtggatatatttt

SEQ ID NO: 701807 - DNA, 33 bp, Homo sapien
tatgctgtgaactacactcagaaagtttgtacc

SEQ ID NO: 701808 - DNA, 33 bp, Homo sapien
tatgctgtgaactacattcagaaagtttgtacc

SEQ ID NO: 701809 - DNA, 33 bp, Homo sapien
aatttttggtcctgtgcacaatacagaatttat

SEQ ID NO: 701810 - DNA, 33 bp, Homo sapien
aatttttggtcctgtgtacaatacagaatttat

SEQ ID NO: 701811 - DNA, 33 bp, Homo sapien
taaaccatgcttgttacatgatacagtggaaag

SEQ ID NO: 701812 - DNA, 33 bp, Homo sapien
taaaccatgcttgttatatgatacagtggaaag

SEQ ID NO: 701813 - DNA, 33 bp, Homo sapien
gtaggtaggtagactacgataagaagagttgaa

SEQ ID NO: 701814 - DNA, 33 bp, Homo sapien
gtaggtaggtagactatgataagaagagttgaa

SEQ ID NO: 701815 - DNA, 33 bp, Homo sapien
aacatatttgcctacactgcatagctgtttttc

SEQ ID NO: 701816 - DNA, 33 bp, Homo sapien
aacatatttgcctacagtgcatagctgtttttc

SEQ ID NO: 701817 - DNA, 33 bp, Homo sapien
tcattttagaaataagccaagtcaggaacagtg

SEQ ID NO: 701818 - DNA, 33 bp, Homo sapien
tcattttagaaataaggcaagtcaggaacagtg

SEQ ID NO: 701819 - DNA, 33 bp, Homo sapien
tgagtctattgatagccacaacaaaaagcctac

SEQ ID NO: 701820 - DNA, 33 bp, Homo sapien
tgagtctattgatagctacaacaaaaagcctac

SEQ ID NO: 701821 - DNA, 33 bp, Homo sapien
attttaagtgacatagacggaggtgatattgta

SEQ ID NO: 701822 - DNA, 33 bp, Homo sapien
attttaagtgacataggcggaggtgatattgta

SEQ ID NO: 701823 - DNA, 33 bp, Homo sapien
atgagaaaatgcattcagaatgagtagcaaagt

SEQ ID NO: 701824 - DNA, 33 bp, Homo sapien
atgagaaaatgcattcggaatgagtagcaaagt

SEQ ID NO: 701825 - DNA, 33 bp, Homo sapien
cctggagagattctaaaggacaggagcggatat

SEQ ID NO: 701826 - DNA, 33 bp, Homo sapien
cctggagagattctaagggacaggagcggatat

SEQ ID NO: 701827 - DNA, 33 bp, Homo sapien
tttgtaatctctgtacaataatccatgtatttc

SEQ ID NO: 701828 - DNA, 33 bp, Homo sapien
tttgtaatctctgtaccataatccatgtatttc

SEQ ID NO: 701829 - DNA, 33 bp, Homo sapien
gacactgtcttgaagactccactgaattattcc

SEQ ID NO: 701830 - DNA, 33 bp, Homo sapien
gacactgtcttgaagattccactgaattattcc

SEQ ID NO: 701831 - DNA, 33 bp, Homo sapien
ccattgccagaggaaacctggttgttactgcag

SEQ ID NO: 701832 - DNA, 33 bp, Homo sapien
ccattgccagaggaaatctggttgttactgcag

SEQ ID NO: 701833 - DNA, 33 bp, Homo sapien
ggcccatttttgttgaactgatggagtggctca

SEQ ID NO: 701834 - DNA, 33 bp, Homo sapien
ggcccatttttgttgacctgatggagtggctca

SEQ ID NO: 701835 - DNA, 33 bp, Homo sapien
aagattatgagaggctcaaatattgaatgacag

SEQ ID NO: 701836 - DNA, 33 bp, Homo sapien
aagattatgagaggcttaaatattgaatgacag

SEQ ID NO: 701837 - DNA, 33 bp, Homo sapien
aatgttcaatgttggaagaatgatacaaaagag

SEQ ID NO: 701838 - DNA, 33 bp, Homo sapien
aatgttcaatgttggaggaatgatacaaaagag

SEQ ID NO: 701839 - DNA, 33 bp, Homo sapien
gtatttcaagcagccagagtggttaataatata

SEQ ID NO: 701840 - DNA, 33 bp, Homo sapien
gtatttcaagcagccatagtggttaataatata

SEQ ID NO: 701841 - DNA, 33 bp, Homo sapien
atctagcaaagaatgacaaagaataaatagcct

SEQ ID NO: 701842 - DNA, 33 bp, Homo sapien
atctagcaaagaatgagaaagaataaatagcct

SEQ ID NO: 701843 - DNA, 33 bp, Homo sapien
ctatttatcatagatcaaagaggaaaaatgtca

SEQ ID NO: 701844 - DNA, 33 bp, Homo sapien
ctatttatcatagatcgaagaggaaaaatgtca

SEQ ID NO: 701845 - DNA, 33 bp, Homo sapien
tctgtatttgaagatcaaaatcagaagcacagt

SEQ ID NO: 701846 - DNA, 33 bp, Homo sapien
tctgtatttgaagatcgaaatcagaagcacagt

SEQ ID NO: 701847 - DNA, 33 bp, Homo sapien
gcattccctccaatcaccatttcacatacacac

SEQ ID NO: 701848 - DNA, 33 bp, Homo sapien
gcattccctccaatcatcatttcacatacacac

SEQ ID NO: 701849 - DNA, 33 bp, Homo sapien
gggagtgtgtatgtgcaatgaaagatgtggcag

SEQ ID NO: 701850 - DNA, 33 bp, Homo sapien
gggagtgtgtatgtgcgatgaaagatgtggcag

SEQ ID NO: 701851 - DNA, 33 bp, Homo sapien
ataaatgtaatgcagccatagaaatgaactgac

SEQ ID NO: 701852 - DNA, 33 bp, Homo sapien
ataaatgtaatgcagctatagaaatgaactgac

SEQ ID NO: 701853 - DNA, 33 bp, Homo sapien
cctatggaatgtgaatcatgaagacatttgtta

SEQ ID NO: 701854 - DNA, 33 bp, Homo sapien
cctatggaatgtgaatgatgaagacatttgtta

SEQ ID NO: 701855 - DNA, 33 bp, Homo sapien
acacaattgaaaaaatcattacacaggagaaca

SEQ ID NO: 701856 - DNA, 33 bp, Homo sapien
acacaattgaaaaaattattacacaggagaaca

SEQ ID NO: 701857 - DNA, 33 bp, Homo sapien
catacctcctgttctacctactgccttccctct

SEQ ID NO: 701858 - DNA, 33 bp, Homo sapien
catacctcctgttctagctactgccttccctct

SEQ ID NO: 701859 - DNA, 33 bp, Homo sapien
catctttccctacaccgcattggcccagagtat

SEQ ID NO: 701860 - DNA, 33 bp, Homo sapien
catctttccctacacctcattggcccagagtat

SEQ ID NO: 701861 - DNA, 33 bp, Homo sapien
actgttacatgactataaaactggcatccatga

SEQ ID NO: 701862 - DNA, 33 bp, Homo sapien
actgttacatgactatgaaactggcatccatga

SEQ ID NO: 701863 - DNA, 33 bp, Homo sapien
attttaaatgctgtaaagtaatccagtgtatat

SEQ ID NO: 701864 - DNA, 33 bp, Homo sapien
attttaaatgctgtaaggtaatccagtgtatat

SEQ ID NO: 701865 - DNA, 33 bp, Homo sapien
tactgtgtatcaagcactgaacttgtacatgca

SEQ ID NO: 701866 - DNA, 33 bp, Homo sapien
tactgtgtatcaagcattgaacttgtacatgca

SEQ ID NO: 701867 - DNA, 33 bp, Homo sapien
atgctaagatgacaacagagagcaaaagttaag

SEQ ID NO: 701868 - DNA, 33 bp, Homo sapien
atgctaagatgacaacggagagcaaaagttaag

SEQ ID NO: 701869 - DNA, 33 bp, Homo sapien
gagttaactaggcaaaaaggagttgaaagtgcc

SEQ ID NO: 701870 - DNA, 33 bp, Homo sapien
gagttaactaggcaaagaggagttgaaagtgcc

SEQ ID NO: 701871 - DNA, 33 bp, Homo sapien
aacatttcttccctggatttcaatttggtaggc

SEQ ID NO: 701872 - DNA, 33 bp, Homo sapien
aacatttcttccctgggtttcaatttggtaggc

SEQ ID NO: 701873 - DNA, 33 bp, Homo sapien
gtacaggaactgaggacaggttttcagagtgca

SEQ ID NO: 701874 - DNA, 33 bp, Homo sapien
gtacaggaactgaggataggttttcagagtgca

SEQ ID NO: 701875 - DNA, 33 bp, Homo sapien
agagggacctccatacagggaccggagaggtgg

SEQ ID NO: 701876 - DNA, 33 bp, Homo sapien
agagggacctccatacggggaccggagaggtgg

SEQ ID NO: 701877 - DNA, 33 bp, Homo sapien
cagcgattagcaacaccaggaagattgatgtca

SEQ ID NO: 701878 - DNA, 33 bp, Homo sapien
cagcgattagcaacacgaggaagattgatgtca

SEQ ID NO: 701879 - DNA, 33 bp, Homo sapien
ttagtttccattatgacgaaaagttgcaaggtt

SEQ ID NO: 701880 - DNA, 33 bp, Homo sapien
ttagtttccattatgatgaaaagttgcaaggtt

SEQ ID NO: 701881 - DNA, 33 bp, Homo sapien
accagattgctagaacaaataaaccccacaatt

SEQ ID NO: 701882 - DNA, 33 bp, Homo sapien
accagattgctagaaccaataaaccccacaatt

SEQ ID NO: 701883 - DNA, 33 bp, Homo sapien
ggcaaatctatccataccctcatctaatccttt

SEQ ID NO: 701884 - DNA, 33 bp, Homo sapien
ggcaaatctatccatatcctcatctaatccttt

SEQ ID NO: 701885 - DNA, 33 bp, Homo sapien
ctgtcatttcaaccaccattctcaccccaactc

SEQ ID NO: 701886 - DNA, 33 bp, Homo sapien
ctgtcatttcaaccactattctcaccccaactc

SEQ ID NO: 701887 - DNA, 33 bp, Homo sapien
cccttgattagggttcaatttgtcatctctaga

SEQ ID NO: 701888 - DNA, 33 bp, Homo sapien
cccttgattagggttccatttgtcatctctaga

SEQ ID NO: 701889 - DNA, 33 bp, Homo sapien
tcctgaccttgctttaggtgtgttaggtcctag

SEQ ID NO: 701890 - DNA, 33 bp, Homo sapien
tcctgaccttgctttatgtgtgttaggtcctag

SEQ ID NO: 701891 - DNA, 33 bp, Homo sapien
agactaatacatcctccgacagaagagtggtta

SEQ ID NO: 701892 - DNA, 33 bp, Homo sapien
agactaatacatcctctgacagaagagtggtta

SEQ ID NO: 701893 - DNA, 33 bp, Homo sapien
actggccccattcttgaaagattcagattatta

SEQ ID NO: 701894 - DNA, 33 bp, Homo sapien
actggccccattcttggaagattcagattatta

SEQ ID NO: 701895 - DNA, 33 bp, Homo sapien
aagtttgcacagcagcaaaatagcctgaaatgt

SEQ ID NO: 701896 - DNA, 33 bp, Homo sapien
aagtttgcacagcagcgaaatagcctgaaatgt

SEQ ID NO: 701897 - DNA, 33 bp, Homo sapien
tgttttggtagctatcaccttgtagtataattt

SEQ ID NO: 701898 - DNA, 33 bp, Homo sapien
tgttttggtagctatcgccttgtagtataattt

SEQ ID NO: 701899 - DNA, 33 bp, Homo sapien
gaacagattctcaacacccttggtcactaggga

SEQ ID NO: 701900 - DNA, 33 bp, Homo sapien
gaacagattctcaacatccttggtcactaggga

SEQ ID NO: 701901 - DNA, 33 bp, Homo sapien
gaatggtgttagaaacagagctaggtatactca

SEQ ID NO: 701902 - DNA, 33 bp, Homo sapien
gaatggtgttagaaaccgagctaggtatactca

SEQ ID NO: 701903 - DNA, 33 bp, Homo sapien
ttctgagagtttaccactatttttggtctcact

SEQ ID NO: 701904 - DNA, 33 bp, Homo sapien
ttctgagagtttaccagtatttttggtctcact

SEQ ID NO: 701905 - DNA, 33 bp, Homo sapien
atatttgcaagagctcaacactgaaaactacaa

SEQ ID NO: 701906 - DNA, 33 bp, Homo sapien
atatttgcaagagctcgacactgaaaactacaa

SEQ ID NO: 701907 - DNA, 33 bp, Homo sapien
taaagctctgttatggcagggccttatttattc

SEQ ID NO: 701908 - DNA, 33 bp, Homo sapien
taaagctctgttatggtagggccttatttattc

SEQ ID NO: 701909 - DNA, 33 bp, Homo sapien
ggccttgtgtacaaagcaaaagagcctagactt

SEQ ID NO: 701910 - DNA, 33 bp, Homo sapien
ggccttgtgtacaaagtaaaagagcctagactt

SEQ ID NO: 701911 - DNA, 33 bp, Homo sapien
actgaaaattgaggcacctgggctcaccctctc

SEQ ID NO: 701912 - DNA, 33 bp, Homo sapien
actgaaaattgaggcatctgggctcaccctctc

SEQ ID NO: 701913 - DNA, 33 bp, Homo sapien
tcccagagttttaacagaagtctctactaaagt

SEQ ID NO: 701914 - DNA, 33 bp, Homo sapien
tcccagagttttaacataagtctctactaaagt

SEQ ID NO: 701915 - DNA, 33 bp, Homo sapien
tgtagttccatctctacgaggtatattctggtc

SEQ ID NO: 701916 - DNA, 33 bp, Homo sapien
tgtagttccatctctatgaggtatattctggtc

SEQ ID NO: 701917 - DNA, 33 bp, Homo sapien
actcaacaattaggaaagcaaatcccattccaa

SEQ ID NO: 701918 - DNA, 33 bp, Homo sapien
actcaacaattaggaaggcaaatcccattccaa

SEQ ID NO: 701919 - DNA, 33 bp, Homo sapien
gcttagcgattatcagcaggctagaattctagg

SEQ ID NO: 701920 - DNA, 33 bp, Homo sapien
gcttagcgattatcagtaggctagaattctagg

SEQ ID NO: 701921 - DNA, 33 bp, Homo sapien
tgcaggtaagcaataaccaggacaatttaaaaa

SEQ ID NO: 701922 - DNA, 33 bp, Homo sapien
tgcaggtaagcaataatcaggacaatttaaaaa

SEQ ID NO: 701923 - DNA, 33 bp, Homo sapien
gtgccactttaggaaacgtgaaatattttgagg

SEQ ID NO: 701924 - DNA, 33 bp, Homo sapien
gtgccactttaggaaatgtgaaatattttgagg

SEQ ID NO: 701925 - DNA, 33 bp, Homo sapien
aattaattgtcaatgcaaaatatatggcacagt

SEQ ID NO: 701926 - DNA, 33 bp, Homo sapien
aattaattgtcaatgcgaaatatatggcacagt

SEQ ID NO: 701927 - DNA, 33 bp, Homo sapien
aaattcatatactgcacgattatcctaatttta

SEQ ID NO: 701928 - DNA, 33 bp, Homo sapien
aaattcatatactgcatgattatcctaatttta

SEQ ID NO: 701929 - DNA, 33 bp, Homo sapien
tcagcacatgacttaacgcaataaaagcatgga

SEQ ID NO: 701930 - DNA, 33 bp, Homo sapien
tcagcacatgacttaatgcaataaaagcatgga

SEQ ID NO: 701931 - DNA, 33 bp, Homo sapien
gagaaacaggtattaaatcattttagctcattc

SEQ ID NO: 701932 - DNA, 33 bp, Homo sapien
gagaaacaggtattaagtcattttagctcattc

SEQ ID NO: 701933 - DNA, 33 bp, Homo sapien
tcatactgcatttccacgccatgtattctccca

SEQ ID NO: 701934 - DNA, 33 bp, Homo sapien
tcatactgcatttccaggccatgtattctccca

SEQ ID NO: 701935 - DNA, 33 bp, Homo sapien
ggttgagagaatatacaaggaagtgattacagt

SEQ ID NO: 701936 - DNA, 33 bp, Homo sapien
ggttgagagaatatacgaggaagtgattacagt

SEQ ID NO: 701937 - DNA, 33 bp, Homo sapien
cattccatatgagatacctggattaagcttaag

SEQ ID NO: 701938 - DNA, 33 bp, Homo sapien
cattccatatgagatatctggattaagcttaag

SEQ ID NO: 701939 - DNA, 33 bp, Homo sapien
ttattcactgtttatgaataattaggctcaaag

SEQ ID NO: 701940 - DNA, 33 bp, Homo sapien
ttattcactgtttatgcataattaggctcaaag

SEQ ID NO: 701941 - DNA, 33 bp, Homo sapien
gaaaacacaaacaaaacgtcaaagttcttatat

SEQ ID NO: 701942 - DNA, 33 bp, Homo sapien
gaaaacacaaacaaaatgtcaaagttcttatat

SEQ ID NO: 701943 - DNA, 33 bp, Homo sapien
tttagtgttctttccaggaaaccacgcgcattt

SEQ ID NO: 701944 - DNA, 33 bp, Homo sapien
tttagtgttctttccatgaaaccacgcgcattt

SEQ ID NO: 701945 - DNA, 33 bp, Homo sapien
tggtgggtagatgaaaagacttagagatgatgg

SEQ ID NO: 701946 - DNA, 33 bp, Homo sapien
tggtgggtagatgaaaggacttagagatgatgg

SEQ ID NO: 701947 - DNA, 33 bp, Homo sapien
caggtaacagagcaaacataaaaaaggtaggca

SEQ ID NO: 701948 - DNA, 33 bp, Homo sapien
caggtaacagagcaaagataaaaaaggtaggca

SEQ ID NO: 701949 - DNA, 33 bp, Homo sapien
aatcttacaatgggacaaggagacatcgtgggc

SEQ ID NO: 701950 - DNA, 33 bp, Homo sapien
aatcttacaatgggacgaggagacatcgtgggc

SEQ ID NO: 701951 - DNA, 33 bp, Homo sapien
aaggtaaaaatctcatcactaagcagagacaaa

SEQ ID NO: 701952 - DNA, 33 bp, Homo sapien
aaggtaaaaatctcattactaagcagagacaaa

SEQ ID NO: 701953 - DNA, 33 bp, Homo sapien
gtgttcataacatttcaaagagctaatactagc

SEQ ID NO: 701954 - DNA, 33 bp, Homo sapien
gtgttcataacatttcgaagagctaatactagc

SEQ ID NO: 701955 - DNA, 33 bp, Homo sapien
agtgttgcctaggagacaatttggtgaagaata

SEQ ID NO: 701956 - DNA, 33 bp, Homo sapien
agtgttgcctaggagataatttggtgaagaata

SEQ ID NO: 701957 - DNA, 33 bp, Homo sapien
aggaatttattgatgacgtaacaccatttaaaa

SEQ ID NO: 701958 - DNA, 33 bp, Homo sapien
aggaatttattgatgatgtaacaccatttaaaa

SEQ ID NO: 701959 - DNA, 33 bp, Homo sapien
tctttaagtaatttcacggctttctgtccccat

SEQ ID NO: 701960 - DNA, 33 bp, Homo sapien
tctttaagtaatttcatggctttctgtccccat

SEQ ID NO: 701961 - DNA, 33 bp, Homo sapien
tgaaattacttaaagaaagattggtgtcagtga

SEQ ID NO: 701962 - DNA, 33 bp, Homo sapien
tgaaattacttaaagagagattggtgtcagtga

SEQ ID NO: 701963 - DNA, 33 bp, Homo sapien
aagtaggtagatttgacgatggaaaaagaaggg

SEQ ID NO: 701964 - DNA, 33 bp, Homo sapien
aagtaggtagatttgatgatggaaaaagaaggg

SEQ ID NO: 701965 - DNA, 33 bp, Homo sapien
aatcctatgagttagaagctattaccctactat

SEQ ID NO: 701966 - DNA, 33 bp, Homo sapien
aatcctatgagttagatgctattaccctactat

SEQ ID NO: 701967 - DNA, 33 bp, Homo sapien
aggaaaacttgtttaacgggctggtgattcacc

SEQ ID NO: 701968 - DNA, 33 bp, Homo sapien
aggaaaacttgtttaatgggctggtgattcacc

SEQ ID NO: 701969 - DNA, 33 bp, Homo sapien
cattactctcccattacgagtaaagaaaaagcg

SEQ ID NO: 701970 - DNA, 33 bp, Homo sapien
cattactctcccattatgagtaaagaaaaagcg

SEQ ID NO: 701971 - DNA, 33 bp, Homo sapien
aggcaaattgcacacacgaagaaatttcacagc

SEQ ID NO: 701972 - DNA, 33 bp, Homo sapien
aggcaaattgcacacatgaagaaatttcacagc

SEQ ID NO: 701973 - DNA, 33 bp, Homo sapien
ttgcatacagacttaccggtctcccccaacaca

SEQ ID NO: 701974 - DNA, 33 bp, Homo sapien
ttgcatacagacttactggtctcccccaacaca

SEQ ID NO: 701975 - DNA, 33 bp, Homo sapien
tattcacttgttaaaaatagagcttatctaaaa

SEQ ID NO: 701976 - DNA, 33 bp, Homo sapien
tattcacttgttaaaactagagcttatctaaaa

SEQ ID NO: 701977 - DNA, 33 bp, Homo sapien
ttcagataaaagctcacaatccaaaaaactgat

SEQ ID NO: 701978 - DNA, 33 bp, Homo sapien
ttcagataaaagctcataatccaaaaaactgat

SEQ ID NO: 701979 - DNA, 33 bp, Homo sapien
tttttataaaatcatacgtaatcagacgtaagt

SEQ ID NO: 701980 - DNA, 33 bp, Homo sapien
tttttataaaatcataggtaatcagacgtaagt

SEQ ID NO: 701981 - DNA, 33 bp, Homo sapien
ccagctcactagaacaacgtgtacaaggattgg

SEQ ID NO: 701982 - DNA, 33 bp, Homo sapien
ccagctcactagaacagcgtgtacaaggattgg

SEQ ID NO: 701983 - DNA, 33 bp, Homo sapien
tttggctttggcttcacgtccagactttcccct

SEQ ID NO: 701984 - DNA, 33 bp, Homo sapien
tttggctttggcttcatgtccagactttcccct

SEQ ID NO: 701985 - DNA, 33 bp, Homo sapien
gcaatgaagtcagcaacttcctgtgctattgag

SEQ ID NO: 701986 - DNA, 33 bp, Homo sapien
gcaatgaagtcagcaagttcctgtgctattgag

SEQ ID NO: 701987 - DNA, 33 bp, Homo sapien
ctttttactatatcagaagcaaatttttctact

SEQ ID NO: 701988 - DNA, 33 bp, Homo sapien
ctttttactatatcaggagcaaatttttctact

SEQ ID NO: 701989 - DNA, 33 bp, Homo sapien
ttttctatttcatcaactacagaacagaaagga

SEQ ID NO: 701990 - DNA, 33 bp, Homo sapien
ttttctatttcatcaattacagaacagaaagga

SEQ ID NO: 701991 - DNA, 33 bp, Homo sapien
ctagaatatagttatcactgtgaaggcagggat

SEQ ID NO: 701992 - DNA, 33 bp, Homo sapien
ctagaatatagttatctctgtgaaggcagggat

SEQ ID NO: 701993 - DNA, 33 bp, Homo sapien
ccagagtggtcaggataaaaaatgtggacattt

SEQ ID NO: 701994 - DNA, 33 bp, Homo sapien
ccagagtggtcaggatcaaaaatgtggacattt

SEQ ID NO: 701995 - DNA, 33 bp, Homo sapien
tagtactatcacatgaacattacaagataatgt

SEQ ID NO: 701996 - DNA, 33 bp, Homo sapien
tagtactatcacatgagcattacaagataatgt

SEQ ID NO: 701997 - DNA, 33 bp, Homo sapien
ctgcactaaataaagaaataccacactatggca

SEQ ID NO: 701998 - DNA, 33 bp, Homo sapien
ctgcactaaataaagatataccacactatggca

SEQ ID NO: 701999 - DNA, 33 bp, Homo sapien
agtaagagattcctaagatttgtagaacagcaa

SEQ ID NO: 702000 - DNA, 33 bp, Homo sapien
agtaagagattcctaatatttgtagaacagcaa

SEQ ID NO: 702001 - DNA, 33 bp, Homo sapien
tctgtaatgatcttgacaagaacgcaaccagag

SEQ ID NO: 702002 - DNA, 33 bp, Homo sapien
tctgtaatgatcttgataagaacgcaaccagag

SEQ ID NO: 702003 - DNA, 33 bp, Homo sapien
tgtggaaataacaaaaatgggatatgaacctca

SEQ ID NO: 702004 - DNA, 33 bp, Homo sapien
tgtggaaataacaaaagtgggatatgaacctca

SEQ ID NO: 702005 - DNA, 33 bp, Homo sapien
taattacttgtttaaaagtgtgtctcctcacta

SEQ ID NO: 702006 - DNA, 33 bp, Homo sapien
taattacttgtttaaatgtgtgtctcctcacta

SEQ ID NO: 702007 - DNA, 33 bp, Homo sapien
tcttgttgccctatgaatacctgatttaagaat

SEQ ID NO: 702008 - DNA, 33 bp, Homo sapien
tcttgttgccctatgactacctgatttaagaat

SEQ ID NO: 702009 - DNA, 33 bp, Homo sapien
cgaaggtgaatgtttacgatattaactgctgct

SEQ ID NO: 702010 - DNA, 33 bp, Homo sapien
cgaaggtgaatgtttatgatattaactgctgct

SEQ ID NO: 702011 - DNA, 33 bp, Homo sapien
agttaattaattgctacgtagagtgattcctgt

SEQ ID NO: 702012 - DNA, 33 bp, Homo sapien
agttaattaattgctatgtagagtgattcctgt

SEQ ID NO: 702013 - DNA, 33 bp, Homo sapien
ttaaaactgatgcttacaggttaatgaggtggg

SEQ ID NO: 702014 - DNA, 33 bp, Homo sapien
ttaaaactgatgcttagaggttaatgaggtggg

SEQ ID NO: 702015 - DNA, 33 bp, Homo sapien
tctggaggaaatgactcaaaggtgcagggtgac

SEQ ID NO: 702016 - DNA, 33 bp, Homo sapien
tctggaggaaatgactgaaaggtgcagggtgac

SEQ ID NO: 702017 - DNA, 33 bp, Homo sapien
agactatgctagacagaactccttccctcaagg

SEQ ID NO: 702018 - DNA, 33 bp, Homo sapien
agactatgctagacaggactccttccctcaagg

SEQ ID NO: 702019 - DNA, 33 bp, Homo sapien
cctgcaaggagggatacgctcgcctgtattcac

SEQ ID NO: 702020 - DNA, 33 bp, Homo sapien
cctgcaaggagggatatgctcgcctgtattcac

SEQ ID NO: 702021 - DNA, 33 bp, Homo sapien
tattgcactcacaaaagactcattctggaagta

SEQ ID NO: 702022 - DNA, 33 bp, Homo sapien
tattgcactcacaaaatactcattctggaagta

SEQ ID NO: 702023 - DNA, 33 bp, Homo sapien
aggctaggaaggaccagaacaatattcacttta

SEQ ID NO: 702024 - DNA, 33 bp, Homo sapien
aggctaggaaggaccataacaatattcacttta

SEQ ID NO: 702025 - DNA, 33 bp, Homo sapien
ttacctgtctggcaaactgggaaggcacgtatc

SEQ ID NO: 702026 - DNA, 33 bp, Homo sapien
ttacctgtctggcaaattgggaaggcacgtatc

SEQ ID NO: 702027 - DNA, 33 bp, Homo sapien
gtcttaacaggcaacagaattcctctgaagata

SEQ ID NO: 702028 - DNA, 33 bp, Homo sapien
gtcttaacaggcaacataattcctctgaagata

SEQ ID NO: 702029 - DNA, 33 bp, Homo sapien
cttttgagtctataaccggctcctagaatagtg

SEQ ID NO: 702030 - DNA, 33 bp, Homo sapien
cttttgagtctataactggctcctagaatagtg

SEQ ID NO: 702031 - DNA, 33 bp, Homo sapien
tgtattttgttttctacgaccagttggtgtttt

SEQ ID NO: 702032 - DNA, 33 bp, Homo sapien
tgtattttgttttctaggaccagttggtgtttt

SEQ ID NO: 702033 - DNA, 33 bp, Homo sapien
cctgagtcaagcagagaatggtctactttatcc

SEQ ID NO: 702034 - DNA, 33 bp, Homo sapien
cctgagtcaagcagagtatggtctactttatcc

SEQ ID NO: 702035 - DNA, 33 bp, Homo sapien
gacaaaagggtaggacacgtgcagttcccaagc

SEQ ID NO: 702036 - DNA, 33 bp, Homo sapien
gacaaaagggtaggacccgtgcagttcccaagc

SEQ ID NO: 702037 - DNA, 33 bp, Homo sapien
ttcaaagttggaatcaaatggtggttctgtatg

SEQ ID NO: 702038 - DNA, 33 bp, Homo sapien
ttcaaagttggaatcagatggtggttctgtatg

SEQ ID NO: 702039 - DNA, 33 bp, Homo sapien
tgtttcaaagacctaggacttcactgtcataaa

SEQ ID NO: 702040 - DNA, 33 bp, Homo sapien
tgtttcaaagacctagtacttcactgtcataaa

SEQ ID NO: 702041 - DNA, 33 bp, Homo sapien
tctgtccatctgtctaccgaaatacgtatctta

SEQ ID NO: 702042 - DNA, 33 bp, Homo sapien
tctgtccatctgtctatcgaaatacgtatctta

SEQ ID NO: 702043 - DNA, 33 bp, Homo sapien
tgtgattgtaactaaaagttgtggacagaatac

SEQ ID NO: 702044 - DNA, 33 bp, Homo sapien
tgtgattgtaactaaatgttgtggacagaatac

SEQ ID NO: 702045 - DNA, 33 bp, Homo sapien
ggagacacatagactcaactattttggatcaac

SEQ ID NO: 702046 - DNA, 33 bp, Homo sapien
ggagacacatagactcgactattttggatcaac

SEQ ID NO: 702047 - DNA, 33 bp, Homo sapien
aggcccaaatatctcacctgtggcagacattga

SEQ ID NO: 702048 - DNA, 33 bp, Homo sapien
aggcccaaatatctcatctgtggcagacattga

SEQ ID NO: 702049 - DNA, 33 bp, Homo sapien
gcagcctactgtactacgccttgttggtttatc

SEQ ID NO: 702050 - DNA, 33 bp, Homo sapien
gcagcctactgtactatgccttgttggtttatc

SEQ ID NO: 702051 - DNA, 33 bp, Homo sapien
atttaagtaatgcccacgtaagagttaaatgtc

SEQ ID NO: 702052 - DNA, 33 bp, Homo sapien
atttaagtaatgcccatgtaagagttaaatgtc

SEQ ID NO: 702053 - DNA, 33 bp, Homo sapien
caggctttggtatgcaaacctgccctgttagtc

SEQ ID NO: 702054 - DNA, 33 bp, Homo sapien
caggctttggtatgcagacctgccctgttagtc

SEQ ID NO: 702055 - DNA, 33 bp, Homo sapien
gcaaactgagcaaaaagtactgaacctacagaa

SEQ ID NO: 702056 - DNA, 33 bp, Homo sapien
gcaaactgagcaaaaattactgaacctacagaa

SEQ ID NO: 702057 - DNA, 33 bp, Homo sapien
cactatgtatttaaacgggcatgaacaatagtt

SEQ ID NO: 702058 - DNA, 33 bp, Homo sapien
cactatgtatttaaactggcatgaacaatagtt

SEQ ID NO: 702059 - DNA, 33 bp, Homo sapien
gtcttcttcagtcttcccttatcttttatgact

SEQ ID NO: 702060 - DNA, 33 bp, Homo sapien
gtcttcttcagtcttctcttatcttttatgact

SEQ ID NO: 702061 - DNA, 33 bp, Homo sapien
tgctggcagttgtcccaatcagctcaccttaca

SEQ ID NO: 702062 - DNA, 33 bp, Homo sapien
tgctggcagttgtcccgatcagctcaccttaca

SEQ ID NO: 702063 - DNA, 33 bp, Homo sapien
tcaccgagaacctcaaaatgtgtccttcctttg

SEQ ID NO: 702064 - DNA, 33 bp, Homo sapien
tcaccgagaacctcaacatgtgtccttcctttg

SEQ ID NO: 702065 - DNA, 33 bp, Homo sapien
gtccttcctttgcatacagggtctttgcagttg

SEQ ID NO: 702066 - DNA, 33 bp, Homo sapien
gtccttcctttgcatatagggtctttgcagttg

SEQ ID NO: 702067 - DNA, 33 bp, Homo sapien
ggttttacagcagaaactaatacaacagaagga

SEQ ID NO: 702068 - DNA, 33 bp, Homo sapien
ggttttacagcagaaattaatacaacagaagga

SEQ ID NO: 702069 - DNA, 33 bp, Homo sapien
attaaggaggtagtgaagtgccaacataagctt

SEQ ID NO: 702070 - DNA, 33 bp, Homo sapien
attaaggaggtagtgaggtgccaacataagctt

SEQ ID NO: 702071 - DNA, 33 bp, Homo sapien
aaacagaaaagtgagacgcaagtgatagggagt

SEQ ID NO: 702072 - DNA, 33 bp, Homo sapien
aaacagaaaagtgagatgcaagtgatagggagt

SEQ ID NO: 702073 - DNA, 33 bp, Homo sapien
gaaaaaaaaaatatgcaaaggacgtcaacagcc

SEQ ID NO: 702074 - DNA, 33 bp, Homo sapien
gaaaaaaaaaatatgcgaaggacgtcaacagcc

SEQ ID NO: 702075 - DNA, 33 bp, Homo sapien
tcattcatttctatacaataatcaacactgaac

SEQ ID NO: 702076 - DNA, 33 bp, Homo sapien
tcattcatttctatacgataatcaacactgaac

SEQ ID NO: 702077 - DNA, 33 bp, Homo sapien
gtaagctccctgaagacagaagaaagccaggtt

SEQ ID NO: 702078 - DNA, 33 bp, Homo sapien
gtaagctccctgaagatagaagaaagccaggtt

SEQ ID NO: 702079 - DNA, 33 bp, Homo sapien
tgctgcttgaatttccaagttcactgatactat

SEQ ID NO: 702080 - DNA, 33 bp, Homo sapien
tgctgcttgaatttccgagttcactgatactat

SEQ ID NO: 702081 - DNA, 33 bp, Homo sapien
aaccagcacgcctccccgcttcttgaattaatc

SEQ ID NO: 702082 - DNA, 33 bp, Homo sapien
aaccagcacgcctccctgcttcttgaattaatc

SEQ ID NO: 702083 - DNA, 33 bp, Homo sapien
agttctagtttctccacattcttgcaaacagtt

SEQ ID NO: 702084 - DNA, 33 bp, Homo sapien
agttctagtttctccatattcttgcaaacagtt

SEQ ID NO: 702085 - DNA, 33 bp, Homo sapien
acaatccatattaagacaacatgtcagtaatga

SEQ ID NO: 702086 - DNA, 33 bp, Homo sapien
acaatccatattaagagaacatgtcagtaatga

SEQ ID NO: 702087 - DNA, 33 bp, Homo sapien
aaacctacttaggacactgtaaatttaggtaat

SEQ ID NO: 702088 - DNA, 33 bp, Homo sapien
aaacctacttaggacattgtaaatttaggtaat

SEQ ID NO: 702089 - DNA, 33 bp, Homo sapien
taataatatttctggacgattaacaagggaaat

SEQ ID NO: 702090 - DNA, 33 bp, Homo sapien
taataatatttctggatgattaacaagggaaat

SEQ ID NO: 702091 - DNA, 33 bp, Homo sapien
attttcttaaaattctcaatgattttattcaag

SEQ ID NO: 702092 - DNA, 33 bp, Homo sapien
attttcttaaaattctgaatgattttattcaag

SEQ ID NO: 702093 - DNA, 33 bp, Homo sapien
tttcatgagtaatcaacaagctgtctggtaata

SEQ ID NO: 702094 - DNA, 33 bp, Homo sapien
tttcatgagtaatcaataagctgtctggtaata

SEQ ID NO: 702095 - DNA, 33 bp, Homo sapien
gcttatgataggaccactggatcccaaactcag

SEQ ID NO: 702096 - DNA, 33 bp, Homo sapien
gcttatgataggaccattggatcccaaactcag

SEQ ID NO: 702097 - DNA, 33 bp, Homo sapien
gatcattgttttagcacatatacagtatcctag

SEQ ID NO: 702098 - DNA, 33 bp, Homo sapien
gatcattgttttagcatatatacagtatcctag

SEQ ID NO: 702099 - DNA, 33 bp, Homo sapien
atgcagtgaaatcacaatagtcaccatctgtat

SEQ ID NO: 702100 - DNA, 33 bp, Homo sapien
atgcagtgaaatcacagtagtcaccatctgtat

SEQ ID NO: 702101 - DNA, 33 bp, Homo sapien
ataaagcataaaagtacatcctgagcctccatg

SEQ ID NO: 702102 - DNA, 33 bp, Homo sapien
ataaagcataaaagtatatcctgagcctccatg

SEQ ID NO: 702103 - DNA, 33 bp, Homo sapien
tgcttcaggaccctgaaagaaggatcagagaga

SEQ ID NO: 702104 - DNA, 33 bp, Homo sapien
tgcttcaggaccctgacagaaggatcagagaga

SEQ ID NO: 702105 - DNA, 33 bp, Homo sapien
tcatcgggcagtggcaatatttcccaagagacg

SEQ ID NO: 702106 - DNA, 33 bp, Homo sapien
tcatcgggcagtggcagtatttcccaagagacg

SEQ ID NO: 702107 - DNA, 33 bp, Homo sapien
tctgctatctacacacaatgtgggatctcagga

SEQ ID NO: 702108 - DNA, 33 bp, Homo sapien
tctgctatctacacacgatgtgggatctcagga

SEQ ID NO: 702109 - DNA, 33 bp, Homo sapien
tcctgcaaggggaatcagaaaaccttcccattt

SEQ ID NO: 702110 - DNA, 33 bp, Homo sapien
tcctgcaaggggaatcggaaaaccttcccattt

SEQ ID NO: 702111 - DNA, 33 bp, Homo sapien
ttggatccaaagactccatgggcccagggacct

SEQ ID NO: 702112 - DNA, 33 bp, Homo sapien
ttggatccaaagactctatgggcccagggacct

SEQ ID NO: 702113 - DNA, 33 bp, Homo sapien
gaatatcgactatccactcagaaaatataaagc

SEQ ID NO: 702114 - DNA, 33 bp, Homo sapien
gaatatcgactatccattcagaaaatataaagc

SEQ ID NO: 702115 - DNA, 33 bp, Homo sapien
ctggactgtaattccacggagattttgtcagtc

SEQ ID NO: 702116 - DNA, 33 bp, Homo sapien
ctggactgtaattccatggagattttgtcagtc

SEQ ID NO: 702117 - DNA, 33 bp, Homo sapien
ctgcgccgattgccagactcaagtttattttgg

SEQ ID NO: 702118 - DNA, 33 bp, Homo sapien
ctgcgccgattgccaggctcaagtttattttgg

SEQ ID NO: 702119 - DNA, 33 bp, Homo sapien
tgggtctcagcttgaaaatcactttcgtaaggg

SEQ ID NO: 702120 - DNA, 33 bp, Homo sapien
tgggtctcagcttgaatatcactttcgtaaggg

SEQ ID NO: 702121 - DNA, 33 bp, Homo sapien
tcactggaatgagatccacccacactgatttca

SEQ ID NO: 702122 - DNA, 33 bp, Homo sapien
tcactggaatgagatctacccacactgatttca

SEQ ID NO: 702123 - DNA, 33 bp, Homo sapien
aaaagagtactattgaaaggagatttgtactat

SEQ ID NO: 702124 - DNA, 33 bp, Homo sapien
aaaagagtactattgagaggagatttgtactat

SEQ ID NO: 702125 - DNA, 33 bp, Homo sapien
acctgaatagtgaacactgaacccaacaggtag

SEQ ID NO: 702126 - DNA, 33 bp, Homo sapien
acctgaatagtgaacattgaacccaacaggtag

SEQ ID NO: 702127 - DNA, 33 bp, Homo sapien
tttcaaagtttgtagaaattctggaggataatc

SEQ ID NO: 702128 - DNA, 33 bp, Homo sapien
tttcaaagtttgtagagattctggaggataatc

SEQ ID NO: 702129 - DNA, 33 bp, Homo sapien
tgaaattatgactcaacggagaatatgactgat

SEQ ID NO: 702130 - DNA, 33 bp, Homo sapien
tgaaattatgactcaatggagaatatgactgat

SEQ ID NO: 702131 - DNA, 33 bp, Homo sapien
tgtaacctgaattgcactgaattccttaggtct

SEQ ID NO: 702132 - DNA, 33 bp, Homo sapien
tgtaacctgaattgcattgaattccttaggtct

SEQ ID NO: 702133 - DNA, 33 bp, Homo sapien
aaagctaagtagagcacagggaatacaacgcta

SEQ ID NO: 702134 - DNA, 33 bp, Homo sapien
aaagctaagtagagcagagggaatacaacgcta

SEQ ID NO: 702135 - DNA, 33 bp, Homo sapien
ggcacttctagctatacctcactacatggaact

SEQ ID NO: 702136 - DNA, 33 bp, Homo sapien
ggcacttctagctatatctcactacatggaact

SEQ ID NO: 702137 - DNA, 33 bp, Homo sapien
atgaataggaggtttaagggtcaattgtagagt

SEQ ID NO: 702138 - DNA, 33 bp, Homo sapien
atgaataggaggtttaggggtcaattgtagagt

SEQ ID NO: 702139 - DNA, 33 bp, Homo sapien
atttcctatgtcataacattaacctcccttcca

SEQ ID NO: 702140 - DNA, 33 bp, Homo sapien
atttcctatgtcataatattaacctcccttcca

SEQ ID NO: 702141 - DNA, 33 bp, Homo sapien
ttattactgagacctcaattcacataacatgaa

SEQ ID NO: 702142 - DNA, 33 bp, Homo sapien
ttattactgagacctcgattcacataacatgaa

SEQ ID NO: 702143 - DNA, 33 bp, Homo sapien
aaaatcctggatttccaaaacaatggagcttga

SEQ ID NO: 702144 - DNA, 33 bp, Homo sapien
aaaatcctggatttccgaaacaatggagcttga

SEQ ID NO: 702145 - DNA, 33 bp, Homo sapien
atttcaggattcatgcacagaaacaggctcctc

SEQ ID NO: 702146 - DNA, 33 bp, Homo sapien
atttcaggattcatgcgcagaaacaggctcctc

SEQ ID NO: 702147 - DNA, 33 bp, Homo sapien
tctcatttacctaggcacatccacagccatttg

SEQ ID NO: 702148 - DNA, 33 bp, Homo sapien
tctcatttacctaggcgcatccacagccatttg

SEQ ID NO: 702149 - DNA, 33 bp, Homo sapien
tacctctctgtgtgtaacgccaagtcattttta

SEQ ID NO: 702150 - DNA, 33 bp, Homo sapien
tacctctctgtgtgtaccgccaagtcattttta

SEQ ID NO: 702151 - DNA, 33 bp, Homo sapien
ccataatgagatactacgacacaccagattggc

SEQ ID NO: 702152 - DNA, 33 bp, Homo sapien
ccataatgagatactatgacacaccagattggc

SEQ ID NO: 702153 - DNA, 33 bp, Homo sapien
gagtagtgatcagggacggattctggaggaaaa

SEQ ID NO: 702154 - DNA, 33 bp, Homo sapien
gagtagtgatcagggatggattctggaggaaaa

SEQ ID NO: 702155 - DNA, 33 bp, Homo sapien
tcatagatgtttaaaaagtaaatggaaagtgag

SEQ ID NO: 702156 - DNA, 33 bp, Homo sapien
tcatagatgtttaaaacgtaaatggaaagtgag

SEQ ID NO: 702157 - DNA, 33 bp, Homo sapien
atctataagggagataagattttgtgtacttgt

SEQ ID NO: 702158 - DNA, 33 bp, Homo sapien
atctataagggagatatgattttgtgtacttgt

SEQ ID NO: 702159 - DNA, 33 bp, Homo sapien
ttttcctataccttaaccaacatttgaaattac

SEQ ID NO: 702160 - DNA, 33 bp, Homo sapien
ttttcctataccttaagcaacatttgaaattac

SEQ ID NO: 702161 - DNA, 33 bp, Homo sapien
atagtgattaggaacaagagtttgaatcccagc

SEQ ID NO: 702162 - DNA, 33 bp, Homo sapien
atagtgattaggaacatgagtttgaatcccagc

SEQ ID NO: 702163 - DNA, 33 bp, Homo sapien
tacagacgaggaaactaaagcacagaacattta

SEQ ID NO: 702164 - DNA, 33 bp, Homo sapien
tacagacgaggaaactgaagcacagaacattta

SEQ ID NO: 702165 - DNA, 33 bp, Homo sapien
gcaccactaaatccaacggtcaactctaagtcc

SEQ ID NO: 702166 - DNA, 33 bp, Homo sapien
gcaccactaaatccaatggtcaactctaagtcc

SEQ ID NO: 702167 - DNA, 33 bp, Homo sapien
gtggatgagaagattaaataagattgcagaggc

SEQ ID NO: 702168 - DNA, 33 bp, Homo sapien
gtggatgagaagattagataagattgcagaggc

SEQ ID NO: 702169 - DNA, 33 bp, Homo sapien
ggatccaggaagctacagagagaagcagccagc

SEQ ID NO: 702170 - DNA, 33 bp, Homo sapien
ggatccaggaagctacggagagaagcagccagc

SEQ ID NO: 702171 - DNA, 33 bp, Homo sapien
tccagaatccattccaaaaaacctctcactgct

SEQ ID NO: 702172 - DNA, 33 bp, Homo sapien
tccagaatccattccacaaaacctctcactgct

SEQ ID NO: 702173 - DNA, 33 bp, Homo sapien
ctgggaacataaatgaaaaagcaaactgtattt

SEQ ID NO: 702174 - DNA, 33 bp, Homo sapien
ctgggaacataaatgagaaagcaaactgtattt

SEQ ID NO: 702175 - DNA, 33 bp, Homo sapien
ctttataagactcttaaaatgcactcagcaaga

SEQ ID NO: 702176 - DNA, 33 bp, Homo sapien
ctttataagactcttagaatgcactcagcaaga

SEQ ID NO: 702177 - DNA, 33 bp, Homo sapien
atataccactggaataactcatgtcctaaggtc

SEQ ID NO: 702178 - DNA, 33 bp, Homo sapien
atataccactggaatatctcatgtcctaaggtc

SEQ ID NO: 702179 - DNA, 33 bp, Homo sapien
taatatgcagtaatttaaaatcaaccacattct

SEQ ID NO: 702180 - DNA, 33 bp, Homo sapien
taatatgcagtaattttaaatcaaccacattct

SEQ ID NO: 702181 - DNA, 33 bp, Homo sapien
caggtgacaaaagaaacggcaaaacataagcac

SEQ ID NO: 702182 - DNA, 33 bp, Homo sapien
caggtgacaaaagaaatggcaaaacataagcac

SEQ ID NO: 702183 - DNA, 33 bp, Homo sapien
ggaagagtacaaatgaaaatccacataacatat

SEQ ID NO: 702184 - DNA, 33 bp, Homo sapien
ggaagagtacaaatgagaatccacataacatat

SEQ ID NO: 702185 - DNA, 33 bp, Homo sapien
gtagatagcattttaacctgtttttgttgttgg

SEQ ID NO: 702186 - DNA, 33 bp, Homo sapien
gtagatagcattttaatctgtttttgttgttgg

SEQ ID NO: 702187 - DNA, 33 bp, Homo sapien
cctgccatcaaggtacaagtttttctattttat

SEQ ID NO: 702188 - DNA, 33 bp, Homo sapien
cctgccatcaaggtacgagtttttctattttat

SEQ ID NO: 702189 - DNA, 33 bp, Homo sapien
cctttagcactttatcactctgatatcatggct

SEQ ID NO: 702190 - DNA, 33 bp, Homo sapien
cctttagcactttatcgctctgatatcatggct

SEQ ID NO: 702191 - DNA, 33 bp, Homo sapien
gaaaagcatgaaggagcaaccatcccatctagg

SEQ ID NO: 702192 - DNA, 33 bp, Homo sapien
gaaaagcatgaaggaggaaccatcccatctagg

SEQ ID NO: 702193 - DNA, 33 bp, Homo sapien
ggagaagaaagtaggacggatggagagaatggt

SEQ ID NO: 702194 - DNA, 33 bp, Homo sapien
ggagaagaaagtaggatggatggagagaatggt

SEQ ID NO: 702195 - DNA, 33 bp, Homo sapien
ttccatccctgaactactaaaattgttgagatg

SEQ ID NO: 702196 - DNA, 33 bp, Homo sapien
ttccatccctgaactattaaaattgttgagatg

SEQ ID NO: 702197 - DNA, 33 bp, Homo sapien
tacaagtagaacagaaagcattccatccctgaa

SEQ ID NO: 702198 - DNA, 33 bp, Homo sapien
tacaagtagaacagaacgcattccatccctgaa

SEQ ID NO: 702199 - DNA, 33 bp, Homo sapien
agaacatgaagaagttaaacaaattgtgtatct

SEQ ID NO: 702200 - DNA, 33 bp, Homo sapien
agaacatgaagaagttgaacaaattgtgtatct

SEQ ID NO: 702201 - DNA, 33 bp, Homo sapien
gaaaaagtagagaaatgaagaacatcgtatttg

SEQ ID NO: 702202 - DNA, 33 bp, Homo sapien
gaaaaagtagagaaattaagaacatcgtatttg

SEQ ID NO: 702203 - DNA, 33 bp, Homo sapien
tcccttggccttagtcactgaaaattcttttat

SEQ ID NO: 702204 - DNA, 33 bp, Homo sapien
tcccttggccttagtctctgaaaattcttttat

SEQ ID NO: 702205 - DNA, 33 bp, Homo sapien
ttttctcttagagacaaggtaaaagaaaagcaa

SEQ ID NO: 702206 - DNA, 33 bp, Homo sapien
ttttctcttagagacagggtaaaagaaaagcaa

SEQ ID NO: 702207 - DNA, 33 bp, Homo sapien
gcaagtaatccaaatacgcaatggccaaatctg

SEQ ID NO: 702208 - DNA, 33 bp, Homo sapien
gcaagtaatccaaatatgcaatggccaaatctg

SEQ ID NO: 702209 - DNA, 33 bp, Homo sapien
gaagtgataacccagaacaatgacagccctgag

SEQ ID NO: 702210 - DNA, 33 bp, Homo sapien
gaagtgataacccagagcaatgacagccctgag

SEQ ID NO: 702211 - DNA, 33 bp, Homo sapien
catgcacacaattatgaactggaaatataaatt

SEQ ID NO: 702212 - DNA, 33 bp, Homo sapien
catgcacacaattatggactggaaatataaatt

SEQ ID NO: 702213 - DNA, 33 bp, Homo sapien
gctcagtcacccttgacagttctagttccacac

SEQ ID NO: 702214 - DNA, 33 bp, Homo sapien
gctcagtcacccttgatagttctagttccacac

SEQ ID NO: 702215 - DNA, 33 bp, Homo sapien
tttgaaacttaacaacaatggcaatattactaa

SEQ ID NO: 702216 - DNA, 33 bp, Homo sapien
tttgaaacttaacaaccatggcaatattactaa

SEQ ID NO: 702217 - DNA, 33 bp, Homo sapien
atgggaatctgtacaacgcaaggagccattatt

SEQ ID NO: 702218 - DNA, 33 bp, Homo sapien
atgggaatctgtacaatgcaaggagccattatt

SEQ ID NO: 702219 - DNA, 33 bp, Homo sapien
tatcctagccactttacctatactgatccattt

SEQ ID NO: 702220 - DNA, 33 bp, Homo sapien
tatcctagccactttatctatactgatccattt

SEQ ID NO: 702221 - DNA, 33 bp, Homo sapien
agaattggactttggagctcttaatttggttgg

SEQ ID NO: 702222 - DNA, 33 bp, Homo sapien
agaattggactttggatctcttaatttggttgg

SEQ ID NO: 702223 - DNA, 33 bp, Homo sapien
ctgttttttttctagaatatcttcctcagacgt

SEQ ID NO: 702224 - DNA, 33 bp, Homo sapien
ctgttttttttctagagtatcttcctcagacgt

SEQ ID NO: 702225 - DNA, 33 bp, Homo sapien
aaactgaagttcagaaaagttaaatggcttact

SEQ ID NO: 702226 - DNA, 33 bp, Homo sapien
aaactgaagttcagaacagttaaatggcttact

SEQ ID NO: 702227 - DNA, 33 bp, Homo sapien
cttctatcccatacaactaaagttcaccactgt

SEQ ID NO: 702228 - DNA, 33 bp, Homo sapien
cttctatcccatacaattaaagttcaccactgt

SEQ ID NO: 702229 - DNA, 33 bp, Homo sapien
agcacattcaaagcacaatgtgagtcttatcag

SEQ ID NO: 702230 - DNA, 33 bp, Homo sapien
agcacattcaaagcacgatgtgagtcttatcag

SEQ ID NO: 702231 - DNA, 33 bp, Homo sapien
aagtaaatggcctcataatctccccagctgctc

SEQ ID NO: 702232 - DNA, 33 bp, Homo sapien
aagtaaatggcctcatcatctccccagctgctc

SEQ ID NO: 702233 - DNA, 33 bp, Homo sapien
ttctatgatcaaatgaagttgggaagcgctgca

SEQ ID NO: 702234 - DNA, 33 bp, Homo sapien
ttctatgatcaaatgaggttgggaagcgctgca

SEQ ID NO: 702235 - DNA, 33 bp, Homo sapien
tcagacaaattcgctacagttcttaaagagaat

SEQ ID NO: 702236 - DNA, 33 bp, Homo sapien
tcagacaaattcgctagagttcttaaagagaat

SEQ ID NO: 702237 - DNA, 33 bp, Homo sapien
caaagtcctttacaagcattaggccatgaatct

SEQ ID NO: 702238 - DNA, 33 bp, Homo sapien
caaagtcctttacaagtattaggccatgaatct

SEQ ID NO: 702239 - DNA, 33 bp, Homo sapien
ttgtcagttgaaaacacattttcaggcatctac

SEQ ID NO: 702240 - DNA, 33 bp, Homo sapien
ttgtcagttgaaaacatattttcaggcatctac

SEQ ID NO: 702241 - DNA, 33 bp, Homo sapien
gctatggaaacgccaacggcagtgttttccaaa

SEQ ID NO: 702242 - DNA, 33 bp, Homo sapien
gctatggaaacgccaatggcagtgttttccaaa

SEQ ID NO: 702243 - DNA, 33 bp, Homo sapien
ctgtctctgttatcaaatcaacatgtacaagaa

SEQ ID NO: 702244 - DNA, 33 bp, Homo sapien
ctgtctctgttatcaagtcaacatgtacaagaa

SEQ ID NO: 702245 - DNA, 33 bp, Homo sapien
attgttgttaatttctcactgcacataatttat

SEQ ID NO: 702246 - DNA, 33 bp, Homo sapien
attgttgttaatttcttactgcacataatttat

SEQ ID NO: 702247 - DNA, 33 bp, Homo sapien
aataaatctgttaacgaaaaagaaaggcagggg

SEQ ID NO: 702248 - DNA, 33 bp, Homo sapien
aataaatctgttaacgcaaaagaaaggcagggg

SEQ ID NO: 702249 - DNA, 33 bp, Homo sapien
caaaagagaataacagaacacttactatatgat

SEQ ID NO: 702250 - DNA, 33 bp, Homo sapien
caaaagagaataacaggacacttactatatgat

SEQ ID NO: 702251 - DNA, 33 bp, Homo sapien
atgcactcatttagaaactgtgcaattgacatc

SEQ ID NO: 702252 - DNA, 33 bp, Homo sapien
atgcactcatttagaagctgtgcaattgacatc

SEQ ID NO: 702253 - DNA, 33 bp, Homo sapien
tcatgttgaaattggacaccctatgttggaagc

SEQ ID NO: 702254 - DNA, 33 bp, Homo sapien
tcatgttgaaattggataccctatgttggaagc

SEQ ID NO: 702255 - DNA, 33 bp, Homo sapien
actggtagttactgcccaaacaccattctattt

SEQ ID NO: 702256 - DNA, 33 bp, Homo sapien
actggtagttactgcctaaacaccattctattt

SEQ ID NO: 702257 - DNA, 33 bp, Homo sapien
aagaggaggggatcaaataaaacgtggacttgt

SEQ ID NO: 702258 - DNA, 33 bp, Homo sapien
aagaggaggggatcaagtaaaacgtggacttgt

SEQ ID NO: 702259 - DNA, 33 bp, Homo sapien
gcaagtctctaacctcaactggcctccaatttt

SEQ ID NO: 702260 - DNA, 33 bp, Homo sapien
gcaagtctctaacctcgactggcctccaatttt

SEQ ID NO: 702261 - DNA, 33 bp, Homo sapien
caaagctcattgcaaactgggtcttgtcactca

SEQ ID NO: 702262 - DNA, 33 bp, Homo sapien
caaagctcattgcaaattgggtcttgtcactca

SEQ ID NO: 702263 - DNA, 33 bp, Homo sapien
ggaaggaagcttctaaatactcatccttcactg

SEQ ID NO: 702264 - DNA, 33 bp, Homo sapien
ggaaggaagcttctaagtactcatccttcactg

SEQ ID NO: 702265 - DNA, 33 bp, Homo sapien
actgtcacgtgcaggactacaaatacctgttgt

SEQ ID NO: 702266 - DNA, 33 bp, Homo sapien
actgtcacgtgcaggattacaaatacctgttgt

SEQ ID NO: 702267 - DNA, 33 bp, Homo sapien
gttcatatgccctgcccggactctaacaggcta

SEQ ID NO: 702268 - DNA, 33 bp, Homo sapien
gttcatatgccctgcctggactctaacaggcta

SEQ ID NO: 702269 - DNA, 33 bp, Homo sapien
gtatttttatattggactcaaatcatgatatgg

SEQ ID NO: 702270 - DNA, 33 bp, Homo sapien
gtatttttatattggattcaaatcatgatatgg

SEQ ID NO: 702271 - DNA, 33 bp, Homo sapien
accaggacaatcctcccaagttctttgagcttt

SEQ ID NO: 702272 - DNA, 33 bp, Homo sapien
accaggacaatcctccgaagttctttgagcttt

SEQ ID NO: 702273 - DNA, 33 bp, Homo sapien
tcagaattgcacttagaatcccctttggcccat

SEQ ID NO: 702274 - DNA, 33 bp, Homo sapien
tcagaattgcacttagcatcccctttggcccat

SEQ ID NO: 702275 - DNA, 33 bp, Homo sapien
tgggccaatttggagaactggatatttatagaa

SEQ ID NO: 702276 - DNA, 33 bp, Homo sapien
tgggccaatttggagacctggatatttatagaa

SEQ ID NO: 702277 - DNA, 33 bp, Homo sapien
ctgtgatgcacaacgaagttagttctcatccct

SEQ ID NO: 702278 - DNA, 33 bp, Homo sapien
ctgtgatgcacaacgatgttagttctcatccct

SEQ ID NO: 702279 - DNA, 33 bp, Homo sapien
aaacactatcaataaacgacctgaatatgaaat

SEQ ID NO: 702280 - DNA, 33 bp, Homo sapien
aaacactatcaataaatgacctgaatatgaaat

SEQ ID NO: 702281 - DNA, 33 bp, Homo sapien
atgaaaactttttaggccacagatacctttgag

SEQ ID NO: 702282 - DNA, 33 bp, Homo sapien
atgaaaactttttaggtcacagatacctttgag

SEQ ID NO: 702283 - DNA, 33 bp, Homo sapien
acagctattaattcaaataggatccttccagac

SEQ ID NO: 702284 - DNA, 33 bp, Homo sapien
acagctattaattcaagtaggatccttccagac

SEQ ID NO: 702285 - DNA, 33 bp, Homo sapien
ctgttcttcaaacataccaggcatggtcctatc

SEQ ID NO: 702286 - DNA, 33 bp, Homo sapien
ctgttcttcaaacatatcaggcatggtcctatc

SEQ ID NO: 702287 - DNA, 33 bp, Homo sapien
tttcatatctagacaactactttcaagtatgaa

SEQ ID NO: 702288 - DNA, 33 bp, Homo sapien
tttcatatctagacaattactttcaagtatgaa

SEQ ID NO: 702289 - DNA, 33 bp, Homo sapien
aatcattttaagaagaagactaaggagaaacat

SEQ ID NO: 702290 - DNA, 33 bp, Homo sapien
aatcattttaagaagacgactaaggagaaacat

SEQ ID NO: 702291 - DNA, 33 bp, Homo sapien
aaaagaatgataaatacgtattcatctgacaat

SEQ ID NO: 702292 - DNA, 33 bp, Homo sapien
aaaagaatgataaatatgtattcatctgacaat

SEQ ID NO: 702293 - DNA, 33 bp, Homo sapien
accaccagggcttcaaataccaaatatatgcag

SEQ ID NO: 702294 - DNA, 33 bp, Homo sapien
accaccagggcttcaagtaccaaatatatgcag

SEQ ID NO: 702295 - DNA, 33 bp, Homo sapien
atcaattagcaaatcaggcatccattcagttat

SEQ ID NO: 702296 - DNA, 33 bp, Homo sapien
atcaattagcaaatcatgcatccattcagttat

SEQ ID NO: 702297 - DNA, 33 bp, Homo sapien
ggcctttgtttttaagaccaggattcatcgttt

SEQ ID NO: 702298 - DNA, 33 bp, Homo sapien
ggcctttgtttttaaggccaggattcatcgttt

SEQ ID NO: 702299 - DNA, 33 bp, Homo sapien
tatgttttgtagctgaataacagtttgagtggg

SEQ ID NO: 702300 - DNA, 33 bp, Homo sapien
tatgttttgtagctgagtaacagtttgagtggg

SEQ ID NO: 702301 - DNA, 33 bp, Homo sapien
gtgcactaccacaggccataaatatgaagcaat

SEQ ID NO: 702302 - DNA, 33 bp, Homo sapien
gtgcactaccacaggctataaatatgaagcaat

SEQ ID NO: 702303 - DNA, 33 bp, Homo sapien
taactcagttcataaggctggctaataaacgaa

SEQ ID NO: 702304 - DNA, 33 bp, Homo sapien
taactcagttcataagtctggctaataaacgaa

SEQ ID NO: 702305 - DNA, 33 bp, Homo sapien
ctgaaagtgtcaaggcaattttaagtttatcct

SEQ ID NO: 702306 - DNA, 33 bp, Homo sapien
ctgaaagtgtcaaggcgattttaagtttatcct

SEQ ID NO: 702307 - DNA, 33 bp, Homo sapien
cattagctgtgtgacaagaggcgaatgtagtca

SEQ ID NO: 702308 - DNA, 33 bp, Homo sapien
cattagctgtgtgacaggaggcgaatgtagtca

SEQ ID NO: 702309 - DNA, 33 bp, Homo sapien
agttgagacagcctaaacaatacacttgaccca

SEQ ID NO: 702310 - DNA, 33 bp, Homo sapien
agttgagacagcctaatcaatacacttgaccca

SEQ ID NO: 702311 - DNA, 33 bp, Homo sapien
catgttcgaaccagtaaaaaacacatcgccttt

SEQ ID NO: 702312 - DNA, 33 bp, Homo sapien
catgttcgaaccagtagaaaacacatcgccttt

SEQ ID NO: 702313 - DNA, 33 bp, Homo sapien
gtttctgttattctaaactgctcctccttttgt

SEQ ID NO: 702314 - DNA, 33 bp, Homo sapien
gtttctgttattctaagctgctcctccttttgt

SEQ ID NO: 702315 - DNA, 33 bp, Homo sapien
ttatccctcataattacgccaaatcagcgatac

SEQ ID NO: 702316 - DNA, 33 bp, Homo sapien
ttatccctcataattatgccaaatcagcgatac

SEQ ID NO: 702317 - DNA, 33 bp, Homo sapien
aacagatcttacagcaaggaaggagagggggca

SEQ ID NO: 702318 - DNA, 33 bp, Homo sapien
aacagatcttacagcagggaaggagagggggca

SEQ ID NO: 702319 - DNA, 33 bp, Homo sapien
gacacctgtaccagcacacatcctaggcgatga

SEQ ID NO: 702320 - DNA, 33 bp, Homo sapien
gacacctgtaccagcagacatcctaggcgatga

SEQ ID NO: 702321 - DNA, 33 bp, Homo sapien
cagtgagatgtatgaaactctcaagaatggatg

SEQ ID NO: 702322 - DNA, 33 bp, Homo sapien
cagtgagatgtatgaagctctcaagaatggatg

SEQ ID NO: 702323 - DNA, 33 bp, Homo sapien
atccagaagaatctccgcccttacagagaatat

SEQ ID NO: 702324 - DNA, 33 bp, Homo sapien
atccagaagaatctcctcccttacagagaatat

SEQ ID NO: 702325 - DNA, 33 bp, Homo sapien
gggaggtagagagaaacgaataggcaaagcatg

SEQ ID NO: 702326 - DNA, 33 bp, Homo sapien
gggaggtagagagaaatgaataggcaaagcatg

SEQ ID NO: 702327 - DNA, 33 bp, Homo sapien
agaagagtagcacacaacagaaacattcttcag

SEQ ID NO: 702328 - DNA, 33 bp, Homo sapien
agaagagtagcacacagcagaaacattcttcag

SEQ ID NO: 702329 - DNA, 33 bp, Homo sapien
tacataaaagatatcaccaccttctgatacttc

SEQ ID NO: 702330 - DNA, 33 bp, Homo sapien
tacataaaagatatcatcaccttctgatacttc

SEQ ID NO: 702331 - DNA, 33 bp, Homo sapien
tcaaaaccatgatccacggaaaaaaattattaa

SEQ ID NO: 702332 - DNA, 33 bp, Homo sapien
tcaaaaccatgatccagggaaaaaaattattaa

SEQ ID NO: 702333 - DNA, 33 bp, Homo sapien
acctttatctcacatacagtctctttcaatagc

SEQ ID NO: 702334 - DNA, 33 bp, Homo sapien
acctttatctcacatatagtctctttcaatagc

SEQ ID NO: 702335 - DNA, 33 bp, Homo sapien
taataagttttcctcaccgcctagcctcagtta

SEQ ID NO: 702336 - DNA, 33 bp, Homo sapien
taataagttttcctcatcgcctagcctcagtta

SEQ ID NO: 702337 - DNA, 33 bp, Homo sapien
caatcagtctattcccaacaaacagaaaaaaca

SEQ ID NO: 702338 - DNA, 33 bp, Homo sapien
caatcagtctattccccacaaacagaaaaaaca

SEQ ID NO: 702339 - DNA, 33 bp, Homo sapien
aaagcagttaaataaaacctgtgacatctgaga

SEQ ID NO: 702340 - DNA, 33 bp, Homo sapien
aaagcagttaaataaatcctgtgacatctgaga

SEQ ID NO: 702341 - DNA, 33 bp, Homo sapien
gatttgccataaagaacgttattgggcaaatag

SEQ ID NO: 702342 - DNA, 33 bp, Homo sapien
gatttgccataaagaaggttattgggcaaatag

SEQ ID NO: 702343 - DNA, 33 bp, Homo sapien
tgaaattgtcatatgactcaaatattctaccct

SEQ ID NO: 702344 - DNA, 33 bp, Homo sapien
tgaaattgtcatatgagtcaaatattctaccct

SEQ ID NO: 702345 - DNA, 33 bp, Homo sapien
aatcatctgatacctccgaagacatttaaggtt

SEQ ID NO: 702346 - DNA, 33 bp, Homo sapien
aatcatctgatacctctgaagacatttaaggtt

SEQ ID NO: 702347 - DNA, 33 bp, Homo sapien
acaaagtgacagtgccaatctggggctcaggaa

SEQ ID NO: 702348 - DNA, 33 bp, Homo sapien
acaaagtgacagtgccgatctggggctcaggaa

SEQ ID NO: 702349 - DNA, 33 bp, Homo sapien
tgggacagagattggcccacaaaacccaaaata

SEQ ID NO: 702350 - DNA, 33 bp, Homo sapien
tgggacagagattggctcacaaaacccaaaata

SEQ ID NO: 702351 - DNA, 33 bp, Homo sapien
tactgtacaagaagaacggatttgaacttcaga

SEQ ID NO: 702352 - DNA, 33 bp, Homo sapien
tactgtacaagaagaatggatttgaacttcaga

SEQ ID NO: 702353 - DNA, 33 bp, Homo sapien
gaggacaccacaggccaaaagctatcccaagac

SEQ ID NO: 702354 - DNA, 33 bp, Homo sapien
gaggacaccacaggccgaaagctatcccaagac

SEQ ID NO: 702355 - DNA, 33 bp, Homo sapien
aacacagctggggcgacgccttgattttagccc

SEQ ID NO: 702356 - DNA, 33 bp, Homo sapien
aacacagctggggcgatgccttgattttagccc

SEQ ID NO: 702357 - DNA, 33 bp, Homo sapien
gtacaaatgaaagcccacatactttatgtctaa

SEQ ID NO: 702358 - DNA, 33 bp, Homo sapien
gtacaaatgaaagcccgcatactttatgtctaa

SEQ ID NO: 702359 - DNA, 33 bp, Homo sapien
atttgcttgtaccttcccattgtagtggtggac

SEQ ID NO: 702360 - DNA, 33 bp, Homo sapien
atttgcttgtaccttctcattgtagtggtggac

SEQ ID NO: 702361 - DNA, 33 bp, Homo sapien
cttaacaaatctttcgacaaattgctaatgaga

SEQ ID NO: 702362 - DNA, 33 bp, Homo sapien
cttaacaaatctttcggcaaattgctaatgaga

SEQ ID NO: 702363 - DNA, 33 bp, Homo sapien
aatgtatcaagccaaactgtagcctgatcacct

SEQ ID NO: 702364 - DNA, 33 bp, Homo sapien
aatgtatcaagccaaattgtagcctgatcacct

SEQ ID NO: 702365 - DNA, 33 bp, Homo sapien
ggggctcaaatgctgccgagagtcttcttcctc

SEQ ID NO: 702366 - DNA, 33 bp, Homo sapien
ggggctcaaatgctgctgagagtcttcttcctc

SEQ ID NO: 702367 - DNA, 33 bp, Homo sapien
tcccaaaaatacataaacaaggcacatgtgtta

SEQ ID NO: 702368 - DNA, 33 bp, Homo sapien
tcccaaaaatacataagcaaggcacatgtgtta

SEQ ID NO: 702369 - DNA, 33 bp, Homo sapien
atgggagggaataaacacatggcactagggaaa

SEQ ID NO: 702370 - DNA, 33 bp, Homo sapien
atgggagggaataaacgcatggcactagggaaa

SEQ ID NO: 702371 - DNA, 33 bp, Homo sapien
cataatcaaagactgcagagctacgtgggtagt

SEQ ID NO: 702372 - DNA, 33 bp, Homo sapien
cataatcaaagactgcggagctacgtgggtagt

SEQ ID NO: 702373 - DNA, 33 bp, Homo sapien; identical to SEQ ID NO: 702371

SEQ ID NO: 702374 - DNA, 33 bp, Homo sapien; identical to SEQ ID NO: 702372

SEQ ID NO: 702375 - DNA, 33 bp, Homo sapien
ccatttccagagacacaagaactggaacttacc

SEQ ID NO: 702376 - DNA, 33 bp, Homo sapien
ccatttccagagacacgagaactggaacttacc

SEQ ID NO: 702377 - DNA, 33 bp, Homo sapien
taaagagatccattaacgtcggcccctatcttc

SEQ ID NO: 702378 - DNA, 33 bp, Homo sapien
taaagagatccattaatgtcggcccctatcttc

SEQ ID NO: 702379 - DNA, 33 bp, Homo sapien
ctaggttatttattccaaaatctctaagatcaa

SEQ ID NO: 702380 - DNA, 33 bp, Homo sapien
ctaggttatttattcccaaatctctaagatcaa

SEQ ID NO: 702381 - DNA, 33 bp, Homo sapien
aaaaattcaacgaaggaagggatcaagccatac

SEQ ID NO: 702382 - DNA, 33 bp, Homo sapien
aaaaattcaacgaagggagggatcaagccatac

SEQ ID NO: 702383 - DNA, 33 bp, Homo sapien
aatttagaagttctgccaaaatagatttttata

SEQ ID NO: 702384 - DNA, 33 bp, Homo sapien
aatttagaagttctgcgaaaatagatttttata

SEQ ID NO: 702385 - DNA, 33 bp, Homo sapien
ttagtttagtgagagaaaagataacagattgga

SEQ ID NO: 702386 - DNA, 33 bp, Homo sapien
ttagtttagtgagagagaagataacagattgga

SEQ ID NO: 702387 - DNA, 33 bp, Homo sapien
agaacaaaatagaaaactgcgccccccagaagt

SEQ ID NO: 702388 - DNA, 33 bp, Homo sapien
agaacaaaatagaaaagtgcgccccccagaagt

SEQ ID NO: 702389 - DNA, 33 bp, Homo sapien
ggcctgctgcgttttgaacatttatgtatccta

SEQ ID NO: 702390 - DNA, 33 bp, Homo sapien
ggcctgctgcgttttggacatttatgtatccta

SEQ ID NO: 702391 - DNA, 33 bp, Homo sapien
tggtacagcagtacgaagttttgacagcattga

SEQ ID NO: 702392 - DNA, 33 bp, Homo sapien
tggtacagcagtacgaggttttgacagcattga

SEQ ID NO: 702393 - DNA, 33 bp, Homo sapien; identical to SEQ ID NO: 702391

SEQ ID NO: 702394 - DNA, 33 bp, Homo sapien; identical to SEQ ID NO: 702392

SEQ ID NO: 702395 - DNA, 33 bp, Homo sapien
tgaaaccagtatttaagaaagaaccagaatgcc

SEQ ID NO: 702396 - DNA, 33 bp, Homo sapien
tgaaaccagtatttaataaagaaccagaatgcc

SEQ ID NO: 702397 - DNA, 33 bp, Homo sapien
gctaaatcatcaacaacagagttcttgccctaa

SEQ ID NO: 702398 - DNA, 33 bp, Homo sapien
gctaaatcatcaacaatagagttcttgccctaa

SEQ ID NO: 702399 - DNA, 33 bp, Homo sapien
cagctcatagagcaaaacttgtccaactctctt

SEQ ID NO: 702400 - DNA, 33 bp, Homo sapien
cagctcatagagcaaagcttgtccaactctctt

SEQ ID NO: 702401 - DNA, 33 bp, Homo sapien
taaatggtggagtaaacagtttcccaatagatg

SEQ ID NO: 702402 - DNA, 33 bp, Homo sapien
taaatggtggagtaaagagtttcccaatagatg

SEQ ID NO: 702403 - DNA, 33 bp, Homo sapien
acttgtgaataggctgaagaagattaaaaagag

SEQ ID NO: 702404 - DNA, 33 bp, Homo sapien
acttgtgaataggctggagaagattaaaaagag

SEQ ID NO: 702405 - DNA, 33 bp, Homo sapien
agactcagttggaaaactgcaccttctgagatc

SEQ ID NO: 702406 - DNA, 33 bp, Homo sapien
agactcagttggaaaattgcaccttctgagatc

SEQ ID NO: 702407 - DNA, 33 bp, Homo sapien
cttcattttaaaaataagagacttgacatccaa

SEQ ID NO: 702408 - DNA, 33 bp, Homo sapien
cttcattttaaaaatatgagacttgacatccaa

SEQ ID NO: 702409 - DNA, 33 bp, Homo sapien
cagcgtcctacctgcacaaggttaaggcagcat

SEQ ID NO: 702410 - DNA, 33 bp, Homo sapien
cagcgtcctacctgcagaaggttaaggcagcat

SEQ ID NO: 702411 - DNA, 33 bp, Homo sapien
agataacaattaaaagacatcatcacatccagg

SEQ ID NO: 702412 - DNA, 33 bp, Homo sapien
agataacaattaaaagtcatcatcacatccagg

SEQ ID NO: 702413 - DNA, 33 bp, Homo sapien
gatctgatacgtgtcccaaataaaatgtttcag

SEQ ID NO: 702414 - DNA, 33 bp, Homo sapien
gatctgatacgtgtcctaaataaaatgtttcag

SEQ ID NO: 702415 - DNA, 33 bp, Homo sapien
tactgacttggctttacgtgctgctttccagct

SEQ ID NO: 702416 - DNA, 33 bp, Homo sapien
tactgacttggctttatgtgctgctttccagct

SEQ ID NO: 702417 - DNA, 33 bp, Homo sapien
tgaagcagaaaaatgacgtaagacttcccagca

SEQ ID NO: 702418 - DNA, 33 bp, Homo sapien
tgaagcagaaaaatgaggtaagacttcccagca

SEQ ID NO: 702419 - DNA, 33 bp, Homo sapien
agaaagagacacagaaataacagatgatggaac

SEQ ID NO: 702420 - DNA, 33 bp, Homo sapien
agaaagagacacagaattaacagatgatggaac

SEQ ID NO: 702421 - DNA, 33 bp, Homo sapien
tcacttgcttgtttgacatttatgataattatc

SEQ ID NO: 702422 - DNA, 33 bp, Homo sapien
tcacttgcttgtttgatatttatgataattatc

SEQ ID NO: 702423 - DNA, 33 bp, Homo sapien
ataatctctaggtgaacctttttccttttatac

SEQ ID NO: 702424 - DNA, 33 bp, Homo sapien
ataatctctaggtgaagctttttccttttatac

SEQ ID NO: 702425 - DNA, 33 bp, Homo sapien
ctcctacctccttccaaaagttggcctcttaaa

SEQ ID NO: 702426 - DNA, 33 bp, Homo sapien
ctcctacctccttccagaagttggcctcttaaa

SEQ ID NO: 702427 - DNA, 33 bp, Homo sapien
tgagcttaaaatgagaacatcgatttgtttaaa

SEQ ID NO: 702428 - DNA, 33 bp, Homo sapien
tgagcttaaaatgagatcatcgatttgtttaaa

SEQ ID NO: 702429 - DNA, 33 bp, Homo sapien
ttcttcattctttacaacatggccaggctaaga

SEQ ID NO: 702430 - DNA, 33 bp, Homo sapien
ttcttcattctttacatcatggccaggctaaga

SEQ ID NO: 702431 - DNA, 33 bp, Homo sapien
taacagggttacaaaaggttctatacaagacta

SEQ ID NO: 702432 - DNA, 33 bp, Homo sapien
taacagggttacaaaatgttctatacaagacta

SEQ ID NO: 702433 - DNA, 33 bp, Homo sapien
ggttttctcccccctggatttgggtgtgagtga

SEQ ID NO: 702434 - DNA, 33 bp, Homo sapien
ggttttctcccccctgtatttgggtgtgagtga

SEQ ID NO: 702435 - DNA, 33 bp, Homo sapien
ttcaacatatgatgaacgtacctcaattgtcat

SEQ ID NO: 702436 - DNA, 33 bp, Homo sapien
ttcaacatatgatgaatgtacctcaattgtcat

SEQ ID NO: 702437 - DNA, 33 bp, Homo sapien
tggtgaccatgcacagaaagggtaaaaaatcaa

SEQ ID NO: 702438 - DNA, 33 bp, Homo sapien
tggtgaccatgcacagcaagggtaaaaaatcaa

SEQ ID NO: 702439 - DNA, 33 bp, Homo sapien
ttagcttaaggaagaactacaggctcctatctt

SEQ ID NO: 702440 - DNA, 33 bp, Homo sapien
ttagcttaaggaagaagtacaggctcctatctt

SEQ ID NO: 702441 - DNA, 33 bp, Homo sapien
tctgttgcagttagacaaagtggttctaacttt

SEQ ID NO: 702442 - DNA, 33 bp, Homo sapien
tctgttgcagttagacgaagtggttctaacttt

SEQ ID NO: 702443 - DNA, 33 bp, Homo sapien
caataaaaatgcacagaaaatacaacagatgaa

SEQ ID NO: 702444 - DNA, 33 bp, Homo sapien
caataaaaatgcacaggaaatacaacagatgaa

SEQ ID NO: 702445 - DNA, 33 bp, Homo sapien
atctccataacctccacgacaactcccattctt

SEQ ID NO: 702446 - DNA, 33 bp, Homo sapien
atctccataacctccatgacaactcccattctt

SEQ ID NO: 702447 - DNA, 33 bp, Homo sapien
gagttatggagggtcacggtttagtgtaactgg

SEQ ID NO: 702448 - DNA, 33 bp, Homo sapien
gagttatggagggtcatggtttagtgtaactgg

SEQ ID NO: 702449 - DNA, 33 bp, Homo sapien
acatatgtgagatagaaacaatggttccttagt

SEQ ID NO: 702450 - DNA, 33 bp, Homo sapien
acatatgtgagatagatacaatggttccttagt

SEQ ID NO: 702451 - DNA, 33 bp, Homo sapien
ttatgataatgattgaagtttaaagtacacata

SEQ ID NO: 702452 - DNA, 33 bp, Homo sapien
ttatgataatgattgatgtttaaagtacacata

SEQ ID NO: 702453 - DNA, 33 bp, Homo sapien
acttataacgtggaaacttcttattcatttccc

SEQ ID NO: 702454 - DNA, 33 bp, Homo sapien
acttataacgtggaaagttcttattcatttccc

SEQ ID NO: 702455 - DNA, 33 bp, Homo sapien
gaacagtgagataaaaagaatcagaaacctcca

SEQ ID NO: 702456 - DNA, 33 bp, Homo sapien
gaacagtgagataaaacgaatcagaaacctcca

SEQ ID NO: 702457 - DNA, 33 bp, Homo sapien
tttctagtctgatctccacctgttcaaaaacta

SEQ ID NO: 702458 - DNA, 33 bp, Homo sapien
tttctagtctgatctctacctgttcaaaaacta

SEQ ID NO: 702459 - DNA, 33 bp, Homo sapien
cagtgaaaactcagagaatttgtgctcaataag

SEQ ID NO: 702460 - DNA, 33 bp, Homo sapien
cagtgaaaactcagagtatttgtgctcaataag

SEQ ID NO: 702461 - DNA, 33 bp, Homo sapien
aaaaactgaccatataatagcctgcaaaggcaa

SEQ ID NO: 702462 - DNA, 33 bp, Homo sapien
aaaaactgaccatatattagcctgcaaaggcaa

SEQ ID NO: 702463 - DNA, 33 bp, Homo sapien; identical to SEQ ID NO: 702461

SEQ ID NO: 702464 - DNA, 33 bp, Homo sapien; identical to SEQ ID NO: 702462

SEQ ID NO: 702465 - DNA, 33 bp, Homo sapien
caatcaaggtgtgtcaactttatatgtaaggaa

SEQ ID NO: 702466 - DNA, 33 bp, Homo sapien
caatcaaggtgtgtcagctttatatgtaaggaa

SEQ ID NO: 702467 - DNA, 33 bp, Homo sapien
agctccctggatcaaaatctccagggacatctg

SEQ ID NO: 702468 - DNA, 33 bp, Homo sapien
agctccctggatcaaagtctccagggacatctg

SEQ ID NO: 702469 - DNA, 33 bp, Homo sapien
taagcaggctgagaacccaaatttctatagaac

SEQ ID NO: 702470 - DNA, 33 bp, Homo sapien
taagcaggctgagaacgcaaatttctatagaac

SEQ ID NO: 702471 - DNA, 33 bp, Homo sapien
agaactaattaagagccatgcataagagaaaga

SEQ ID NO: 702472 - DNA, 33 bp, Homo sapien
agaactaattaagagctatgcataagagaaaga

SEQ ID NO: 702473 - DNA, 33 bp, Homo sapien
tatttcacattattataagagacaagcaaaagt

SEQ ID NO: 702474 - DNA, 33 bp, Homo sapien
tatttcacattattatcagagacaagcaaaagt

SEQ ID NO: 702475 - DNA, 33 bp, Homo sapien
ttccaccaggtcaagacgacaaaaaggctctta

SEQ ID NO: 702476 - DNA, 33 bp, Homo sapien
ttccaccaggtcaagatgacaaaaaggctctta

SEQ ID NO: 702477 - DNA, 33 bp, Homo sapien
acctttgttggcttccaaagaaagtgacccatc

SEQ ID NO: 702478 - DNA, 33 bp, Homo sapien
acctttgttggcttcctaagaaagtgacccatc

SEQ ID NO: 702479 - DNA, 33 bp, Homo sapien
aggaagaagtaccaaaagtgctgtctctctcct

SEQ ID NO: 702480 - DNA, 33 bp, Homo sapien
aggaagaagtaccaaaggtgctgtctctctcct

SEQ ID NO: 702481 - DNA, 33 bp, Homo sapien
attcctctggctcaaaatctattttattggaaa

SEQ ID NO: 702482 - DNA, 33 bp, Homo sapien
attcctctggctcaaagtctattttattggaaa

SEQ ID NO: 702483 - DNA, 33 bp, Homo sapien
tctaataagtttcaaacaattgtggcctttatt

SEQ ID NO: 702484 - DNA, 33 bp, Homo sapien
tctaataagtttcaaataattgtggcctttatt

SEQ ID NO: 702485 - DNA, 33 bp, Homo sapien
tgggatcacttccaggacctatgtaatcttctt

SEQ ID NO: 702486 - DNA, 33 bp, Homo sapien
tgggatcacttccagggcctatgtaatcttctt

SEQ ID NO: 702487 - DNA, 33 bp, Homo sapien
gattacaaacttccatgaaaagaaagctgcaga

SEQ ID NO: 702488 - DNA, 33 bp, Homo sapien
gattacaaacttccattaaaagaaagctgcaga

SEQ ID NO: 702489 - DNA, 33 bp, Homo sapien
atgattagtttacagcacgtgtttcaacttttc

SEQ ID NO: 702490 - DNA, 33 bp, Homo sapien
atgattagtttacagcgcgtgtttcaacttttc

SEQ ID NO: 702491 - DNA, 33 bp, Homo sapien
gggaggtggatgaaaacggcataagcagtgaaa

SEQ ID NO: 702492 - DNA, 33 bp, Homo sapien
gggaggtggatgaaaatggcataagcagtgaaa

SEQ ID NO: 702493 - DNA, 33 bp, Homo sapien
tgctgaggtacccagaactttagaggttatccc

SEQ ID NO: 702494 - DNA, 33 bp, Homo sapien
tgctgaggtacccagagctttagaggttatccc

SEQ ID NO: 702495 - DNA, 33 bp, Homo sapien
gctggaattccagtcacgccctggtgtgtaaga

SEQ ID NO: 702496 - DNA, 33 bp, Homo sapien
gctggaattccagtcatgccctggtgtgtaaga

SEQ ID NO: 702497 - DNA, 33 bp, Homo sapien
tgtaagatctttctataacctcacatagatggt

SEQ ID NO: 702498 - DNA, 33 bp, Homo sapien
tgtaagatctttctatgacctcacatagatggt

SEQ ID NO: 702499 - DNA, 33 bp, Homo sapien
taacctaatgcataaaagaatttgctgagaatt

SEQ ID NO: 702500 - DNA, 33 bp, Homo sapien
taacctaatgcataaaggaatttgctgagaatt

SEQ ID NO: 702501 - DNA, 33 bp, Homo sapien
aataagaaggaagccacctgtaatctgaccagg

SEQ ID NO: 702502 - DNA, 33 bp, Homo sapien
aataagaaggaagccatctgtaatctgaccagg

SEQ ID NO: 702503 - DNA, 33 bp, Homo sapien
agtatctggaatgtaacggtagattcttccaaa

SEQ ID NO: 702504 - DNA, 33 bp, Homo sapien
agtatctggaatgtaatggtagattcttccaaa

SEQ ID NO: 702505 - DNA, 33 bp, Homo sapien
gctggcatggacttgacaggtaagaaaatatca

SEQ ID NO: 702506 - DNA, 33 bp, Homo sapien
gctggcatggacttgagaggtaagaaaatatca

SEQ ID NO: 702507 - DNA, 33 bp, Homo sapien
ctgagcctcctagcagccaagtcaaaaagaaca

SEQ ID NO: 702508 - DNA, 33 bp, Homo sapien
ctgagcctcctagcaggcaagtcaaaaagaaca

SEQ ID NO: 702509 - DNA, 33 bp, Homo sapien
aaataaatggagcaaaccttaaaataacagtac

SEQ ID NO: 702510 - DNA, 33 bp, Homo sapien
aaataaatggagcaaatcttaaaataacagtac

SEQ ID NO: 702511 - DNA, 33 bp, Homo sapien
agggaaataactggacactgtcatttctatgat

SEQ ID NO: 702512 - DNA, 33 bp, Homo sapien
agggaaataactggacgctgtcatttctatgat

SEQ ID NO: 702513 - DNA, 33 bp, Homo sapien
ccatagaatggattcaagaattttcaagaattg

SEQ ID NO: 702514 - DNA, 33 bp, Homo sapien
ccatagaatggattcaggaattttcaagaattg

SEQ ID NO: 702515 - DNA, 33 bp, Homo sapien
tttattgagagaatgcaacaagacacaacccac

SEQ ID NO: 702516 - DNA, 33 bp, Homo sapien
tttattgagagaatgcgacaagacacaacccac

SEQ ID NO: 702517 - DNA, 33 bp, Homo sapien
cagcatccatggtaaaacttggatccagatgta

SEQ ID NO: 702518 - DNA, 33 bp, Homo sapien
cagcatccatggtaaatcttggatccagatgta

SEQ ID NO: 702519 - DNA, 33 bp, Homo sapien
gtccacattcatctgcaccttaaatttctttgt

SEQ ID NO: 702520 - DNA, 33 bp, Homo sapien
gtccacattcatctgcgccttaaatttctttgt

SEQ ID NO: 702521 - DNA, 33 bp, Homo sapien
accatttgatcttggacaaacctgaaaaaaaca

SEQ ID NO: 702522 - DNA, 33 bp, Homo sapien
accatttgatcttggataaacctgaaaaaaaca

SEQ ID NO: 702523 - DNA, 33 bp, Homo sapien
gatgaaatgaatgaaacgaaatgagaagggaag

SEQ ID NO: 702524 - DNA, 33 bp, Homo sapien
gatgaaatgaatgaaatgaaatgagaagggaag

SEQ ID NO: 702525 - DNA, 33 bp, Homo sapien
tctctctacgtttagacaagggcattatttctt

SEQ ID NO: 702526 - DNA, 33 bp, Homo sapien
tctctctacgtttagataagggcattatttctt

SEQ ID NO: 702527 - DNA, 33 bp, Homo sapien
tatgtgtaatcattcaatcaaaatatatttaat

SEQ ID NO: 702528 - DNA, 33 bp, Homo sapien
tatgtgtaatcattcagtcaaaatatatttaat

SEQ ID NO: 702529 - DNA, 33 bp, Homo sapien
ttcaaatattccttcaccacatcactctcaatc

SEQ ID NO: 702530 - DNA, 33 bp, Homo sapien
ttcaaatattccttcatcacatcactctcaatc

SEQ ID NO: 702531 - DNA, 33 bp, Homo sapien
gaaggttgccactgggaaagaaggccattctct

SEQ ID NO: 702532 - DNA, 33 bp, Homo sapien
gaaggttgccactgggtaagaaggccattctct

SEQ ID NO: 702533 - DNA, 33 bp, Homo sapien
cggttacagctatgcacacaaagtaaaggaggt

SEQ ID NO: 702534 - DNA, 33 bp, Homo sapien
cggttacagctatgcatacaaagtaaaggaggt

SEQ ID NO: 702535 - DNA, 33 bp, Homo sapien
tggtacccacataccccaaattcatagccagtg

SEQ ID NO: 702536 - DNA, 33 bp, Homo sapien
tggtacccacatacccgaaattcatagccagtg

SEQ ID NO: 702537 - DNA, 33 bp, Homo sapien
agttcaccgaatttcccgattcttttcagagtt

SEQ ID NO: 702538 - DNA, 33 bp, Homo sapien
agttcaccgaatttcctgattcttttcagagtt

SEQ ID NO: 702539 - DNA, 33 bp, Homo sapien
caagtttaggaaacaccgatataggcaatcact

SEQ ID NO: 702540 - DNA, 33 bp, Homo sapien
caagtttaggaaacactgatataggcaatcact

SEQ ID NO: 702541 - DNA, 33 bp, Homo sapien
ttatacctcagacactcagccagaaggaccagg

SEQ ID NO: 702542 - DNA, 33 bp, Homo sapien
ttatacctcagacacttagccagaaggaccagg

SEQ ID NO: 702543 - DNA, 33 bp, Homo sapien
tacaaatgttgtactaagaagaatgtggaagag

SEQ ID NO: 702544 - DNA, 33 bp, Homo sapien
tacaaatgttgtactacgaagaatgtggaagag

SEQ ID NO: 702545 - DNA, 33 bp, Homo sapien
ctccacactttgtgtaaaggagaaccatatggc

SEQ ID NO: 702546 - DNA, 33 bp, Homo sapien
ctccacactttgtgtacaggagaaccatatggc

SEQ ID NO: 702547 - DNA, 33 bp, Homo sapien
gtacattgtgcaaagacaccttctgcccaagac

SEQ ID NO: 702548 - DNA, 33 bp, Homo sapien
gtacattgtgcaaagagaccttctgcccaagac

SEQ ID NO: 702549 - DNA, 33 bp, Homo sapien
ttgatcactgggttcaggtgctatcagcttgat

SEQ ID NO: 702550 - DNA, 33 bp, Homo sapien
ttgatcactgggttcatgtgctatcagcttgat

SEQ ID NO: 702551 - DNA, 33 bp, Homo sapien
tcttttggggtaactcaaagaggtactgagttc

SEQ ID NO: 702552 - DNA, 33 bp, Homo sapien
tcttttggggtaactccaagaggtactgagttc

SEQ ID NO: 702553 - DNA, 33 bp, Homo sapien
acctcccctgcccagggaagtggtactgaaaaa

SEQ ID NO: 702554 - DNA, 33 bp, Homo sapien
acctcccctgcccaggtaagtggtactgaaaaa

SEQ ID NO: 702555 - DNA, 33 bp, Homo sapien
cccagcaaggagataaaggaatgggcacccacg

SEQ ID NO: 702556 - DNA, 33 bp, Homo sapien
cccagcaaggagataagggaatgggcacccacg

SEQ ID NO: 702557 - DNA, 33 bp, Homo sapien
cccccaggcacaactgaaaacctcttttctcaa

SEQ ID NO: 702558 - DNA, 33 bp, Homo sapien
cccccaggcacaactggaaacctcttttctcaa

SEQ ID NO: 702559 - DNA, 33 bp, Homo sapien
cttcaacaaagcatacaaaaacgtaaagtgggg

SEQ ID NO: 702560 - DNA, 33 bp, Homo sapien
cttcaacaaagcataccaaaacgtaaagtgggg

SEQ ID NO: 702561 - DNA, 33 bp, Homo sapien
agctcagacatttgtgcagagcattctgtatta

SEQ ID NO: 702562 - DNA, 33 bp, Homo sapien
agctcagacatttgtggagagcattctgtatta

SEQ ID NO: 702563 - DNA, 33 bp, Homo sapien
gtgtgggttagaataaagtggagggcttgtgaa

SEQ ID NO: 702564 - DNA, 33 bp, Homo sapien
gtgtgggttagaataacgtggagggcttgtgaa

SEQ ID NO: 702565 - DNA, 33 bp, Homo sapien
aggaagccttccctaaatgtctagtttgaagta

SEQ ID NO: 702566 - DNA, 33 bp, Homo sapien
aggaagccttccctaactgtctagtttgaagta

SEQ ID NO: 702567 - DNA, 33 bp, Homo sapien
ccttgtctcagatttacccaagttacctctacc

SEQ ID NO: 702568 - DNA, 33 bp, Homo sapien
ccttgtctcagatttatccaagttacctctacc

SEQ ID NO: 702569 - DNA, 33 bp, Homo sapien
ctataccctgggaacacagaagacaaaaaaatc

SEQ ID NO: 702570 - DNA, 33 bp, Homo sapien
ctataccctgggaacagagaagacaaaaaaatc

SEQ ID NO: 702571 - DNA, 33 bp, Homo sapien
atggtttaagagtgcacctgcctagagacgttg

SEQ ID NO: 702572 - DNA, 33 bp, Homo sapien
atggtttaagagtgcatctgcctagagacgttg

SEQ ID NO: 702573 - DNA, 33 bp, Homo sapien
ttttgtagttattaagcatctgttgcataaggc

SEQ ID NO: 702574 - DNA, 33 bp, Homo sapien
ttttgtagttattaaggatctgttgcataaggc

SEQ ID NO: 702575 - DNA, 33 bp, Homo sapien
taacactcagttactacggattatattcataaa

SEQ ID NO: 702576 - DNA, 33 bp, Homo sapien
taacactcagttactagggattatattcataaa

SEQ ID NO: 702577 - DNA, 33 bp, Homo sapien
gaggatgtagcaggagaaaagtaaagaaagcct

SEQ ID NO: 702578 - DNA, 33 bp, Homo sapien
gaggatgtagcaggagcaaagtaaagaaagcct

SEQ ID NO: 702579 - DNA, 33 bp, Homo sapien
caaaatgacattaaaaacttaacacaaggaaat

SEQ ID NO: 702580 - DNA, 33 bp, Homo sapien
caaaatgacattaaaatcttaacacaaggaaat

SEQ ID NO: 702581 - DNA, 33 bp, Homo sapien
cttttattttcaggtacgtcctactctgtctat

SEQ ID NO: 702582 - DNA, 33 bp, Homo sapien
cttttattttcaggtatgtcctactctgtctat

SEQ ID NO: 702583 - DNA, 33 bp, Homo sapien
tgccaacgaacctactattttgacaggtatacc

SEQ ID NO: 702584 - DNA, 33 bp, Homo sapien
tgccaacgaacctactgttttgacaggtatacc

SEQ ID NO: 702585 - DNA, 33 bp, Homo sapien
tggaacatctggtttggaaggaagccttatagg

SEQ ID NO: 702586 - DNA, 33 bp, Homo sapien
tggaacatctggtttgtaaggaagccttatagg

SEQ ID NO: 702587 - DNA, 33 bp, Homo sapien
cgtgattcagaagagacaaagggaacttggttt

SEQ ID NO: 702588 - DNA, 33 bp, Homo sapien
cgtgattcagaagagagaaagggaacttggttt

SEQ ID NO: 702589 - DNA, 33 bp, Homo sapien
ttaacaaacacacaagactagcaataaaattca

SEQ ID NO: 702590 - DNA, 33 bp, Homo sapien
ttaacaaacacacaaggctagcaataaaattca

SEQ ID NO: 702591 - DNA, 33 bp, Homo sapien
cttgaattttaatccacgaacaggtgggaagtg

SEQ ID NO: 702592 - DNA, 33 bp, Homo sapien
cttgaattttaatccatgaacaggtgggaagtg

SEQ ID NO: 702593 - DNA, 33 bp, Homo sapien
aagagcgagtccatcacgctgtgtatcccagga

SEQ ID NO: 702594 - DNA, 33 bp, Homo sapien
aagagcgagtccatcatgctgtgtatcccagga

SEQ ID NO: 702595 - DNA, 33 bp, Homo sapien
caactcacaaagaaaactaaggaagtctggctc

SEQ ID NO: 702596 - DNA, 33 bp, Homo sapien
caactcacaaagaaaagtaaggaagtctggctc

SEQ ID NO: 702597 - DNA, 33 bp, Homo sapien
ccaggtaaagctgtcccgaaggtaggaatagag

SEQ ID NO: 702598 - DNA, 33 bp, Homo sapien
ccaggtaaagctgtccggaaggtaggaatagag

SEQ ID NO: 702599 - DNA, 33 bp, Homo sapien
tcactttttttgcttacggatgtccaattgctc

SEQ ID NO: 702600 - DNA, 33 bp, Homo sapien
tcactttttttgcttatggatgtccaattgctc

SEQ ID NO: 702601 - DNA, 33 bp, Homo sapien
gcttcacaccattgtaaagtgaaaaaattataa

SEQ ID NO: 702602 - DNA, 33 bp, Homo sapien
gcttcacaccattgtagagtgaaaaaattataa

SEQ ID NO: 702603 - DNA, 33 bp, Homo sapien
agggagaactactgtacgctttattgtatcaca

SEQ ID NO: 702604 - DNA, 33 bp, Homo sapien
agggagaactactgtatgctttattgtatcaca

SEQ ID NO: 702605 - DNA, 33 bp, Homo sapien
tgatgtgccctttagacggtctctctgaaaatc

SEQ ID NO: 702606 - DNA, 33 bp, Homo sapien
tgatgtgccctttagatggtctctctgaaaatc

SEQ ID NO: 702607 - DNA, 33 bp, Homo sapien
gcatagaacaggatcaaagaagtactagtagtg

SEQ ID NO: 702608 - DNA, 33 bp, Homo sapien
gcatagaacaggatcagagaagtactagtagtg

SEQ ID NO: 702609 - DNA, 33 bp, Homo sapien
atgttcaaattacacacatttaagtgagctaca

SEQ ID NO: 702610 - DNA, 33 bp, Homo sapien
atgttcaaattacacatatttaagtgagctaca

SEQ ID NO: 702611 - DNA, 33 bp, Homo sapien
aagtccatctctaatacggctgtaaaggtttca

SEQ ID NO: 702612 - DNA, 33 bp, Homo sapien
aagtccatctctaatatggctgtaaaggtttca

SEQ ID NO: 702613 - DNA, 33 bp, Homo sapien
acatgaaagagttttacagtgattccctcacat

SEQ ID NO: 702614 - DNA, 33 bp, Homo sapien
acatgaaagagttttatagtgattccctcacat

SEQ ID NO: 702615 - DNA, 33 bp, Homo sapien
tcaaacttttaatagaccattcaattcgtttaa

SEQ ID NO: 702616 - DNA, 33 bp, Homo sapien
tcaaacttttaatagatcattcaattcgtttaa

SEQ ID NO: 702617 - DNA, 33 bp, Homo sapien
ctcttcctgcaagtaaaagagtaagggctgtta

SEQ ID NO: 702618 - DNA, 33 bp, Homo sapien
ctcttcctgcaagtaacagagtaagggctgtta

SEQ ID NO: 702619 - DNA, 33 bp, Homo sapien
tgataaagagcatctacggaaaactcagctaac

SEQ ID NO: 702620 - DNA, 33 bp, Homo sapien
tgataaagagcatctatggaaaactcagctaac

SEQ ID NO: 702621 - DNA, 33 bp, Homo sapien
tatctcactttcttcactcattcatcagctgat

SEQ ID NO: 702622 - DNA, 33 bp, Homo sapien
tatctcactttcttcattcattcatcagctgat

SEQ ID NO: 702623 - DNA, 33 bp, Homo sapien
ggggaatgaagagagagaagttcagaggtacaa

SEQ ID NO: 702624 - DNA, 33 bp, Homo sapien
ggggaatgaagagagataagttcagaggtacaa

SEQ ID NO: 702625 - DNA, 33 bp, Homo sapien
cattctgatctcttgcaattagataacttctca

SEQ ID NO: 702626 - DNA, 33 bp, Homo sapien
cattctgatctcttgcgattagataacttctca

SEQ ID NO: 702627 - DNA, 33 bp, Homo sapien
gcttcaaaggataaaactgaccacattaaatgt

SEQ ID NO: 702628 - DNA, 33 bp, Homo sapien
gcttcaaaggataaaattgaccacattaaatgt

SEQ ID NO: 702629 - DNA, 33 bp, Homo sapien
aatatttggtataaagacaccatgacagaatgg

SEQ ID NO: 702630 - DNA, 33 bp, Homo sapien
aatatttggtataaaggcaccatgacagaatgg

SEQ ID NO: 702631 - DNA, 33 bp, Homo sapien
tgggccacgtgtccaccaagatctaatcagagc

SEQ ID NO: 702632 - DNA, 33 bp, Homo sapien
tgggccacgtgtccactaagatctaatcagagc

SEQ ID NO: 702633 - DNA, 33 bp, Homo sapien
ttaacaatcaaacacacagcgccatctctgccc

SEQ ID NO: 702634 - DNA, 33 bp, Homo sapien
ttaacaatcaaacacatagcgccatctctgccc

SEQ ID NO: 702635 - DNA, 33 bp, Homo sapien
tttctgtaaagaaagaatcaaatggaattaatg

SEQ ID NO: 702636 - DNA, 33 bp, Homo sapien
tttctgtaaagaaagagtcaaatggaattaatg

SEQ ID NO: 702637 - DNA, 33 bp, Homo sapien
caattcagaataccaaacaccctcctgtgccat

SEQ ID NO: 702638 - DNA, 33 bp, Homo sapien
caattcagaataccaaccaccctcctgtgccat

SEQ ID NO: 702639 - DNA, 33 bp, Homo sapien
tctaacaacgttacaaagctatacacacttttg

SEQ ID NO: 702640 - DNA, 33 bp, Homo sapien
tctaacaacgttacaacgctatacacacttttg

SEQ ID NO: 702641 - DNA, 33 bp, Homo sapien
gcatttcaagggctgaactgtttaacaaggtag

SEQ ID NO: 702642 - DNA, 33 bp, Homo sapien
gcatttcaagggctgagctgtttaacaaggtag

SEQ ID NO: 702643 - DNA, 33 bp, Homo sapien
ttgcctgtctttttcacgtcccattgtcgctgt

SEQ ID NO: 702644 - DNA, 33 bp, Homo sapien
ttgcctgtctttttcaggtcccattgtcgctgt

SEQ ID NO: 702645 - DNA, 33 bp, Homo sapien
ggtctccttgcatttcaccagctctgcttagaa

SEQ ID NO: 702646 - DNA, 33 bp, Homo sapien
ggtctccttgcatttcgccagctctgcttagaa

SEQ ID NO: 702647 - DNA, 33 bp, Homo sapien
tttttttcacaaaacacgttccgcatattgata

SEQ ID NO: 702648 - DNA, 33 bp, Homo sapien
tttttttcacaaaacaggttccgcatattgata

SEQ ID NO: 702649 - DNA, 33 bp, Homo sapien
gctcagtgcaaggaagaagcatgggaggataga

SEQ ID NO: 702650 - DNA, 33 bp, Homo sapien
gctcagtgcaaggaagcagcatgggaggataga

SEQ ID NO: 702651 - DNA, 33 bp, Homo sapien
tttctgcaagacggggaaatggaacaagagatc

SEQ ID NO: 702652 - DNA, 33 bp, Homo sapien
tttctgcaagacggggcaatggaacaagagatc

SEQ ID NO: 702653 - DNA, 33 bp, Homo sapien
tcaactgcactgccccaagaagatggacagcag

SEQ ID NO: 702654 - DNA, 33 bp, Homo sapien
tcaactgcactgccccgagaagatggacagcag

SEQ ID NO: 702655 - DNA, 33 bp, Homo sapien
aataaaacctcatagaccaagagcagggaatgt

SEQ ID NO: 702656 - DNA, 33 bp, Homo sapien
aataaaacctcatagatcaagagcagggaatgt

SEQ ID NO: 702657 - DNA, 33 bp, Homo sapien
attctatatagtacaaacatttccctacatcaa

SEQ ID NO: 702658 - DNA, 33 bp, Homo sapien
attctatatagtacaatcatttccctacatcaa

SEQ ID NO: 702659 - DNA, 33 bp, Homo sapien
taagttttagtgtttacggtgaacttttactca

SEQ ID NO: 702660 - DNA, 33 bp, Homo sapien
taagttttagtgtttatggtgaacttttactca

SEQ ID NO: 702661 - DNA, 33 bp, Homo sapien
gaaactcaagacttaacagacaggtatttttaa

SEQ ID NO: 702662 - DNA, 33 bp, Homo sapien
gaaactcaagacttaagagacaggtatttttaa

SEQ ID NO: 702663 - DNA, 33 bp, Homo sapien
aaggctactctacttaccaactatactttcaaa

SEQ ID NO: 702664 - DNA, 33 bp, Homo sapien
aaggctactctacttatcaactatactttcaaa

SEQ ID NO: 702665 - DNA, 33 bp, Homo sapien
gagctacatccagaaactaaaaacatggagata

SEQ ID NO: 702666 - DNA, 33 bp, Homo sapien
gagctacatccagaaattaaaaacatggagata

SEQ ID NO: 702667 - DNA, 33 bp, Homo sapien
ccacaccaacagacataaaagagtattcaagct

SEQ ID NO: 702668 - DNA, 33 bp, Homo sapien
ccacaccaacagacatgaaagagtattcaagct

SEQ ID NO: 702669 - DNA, 33 bp, Homo sapien
cccctccacaggaataagaggaaatctgactcc

SEQ ID NO: 702670 - DNA, 33 bp, Homo sapien
cccctccacaggaataggaggaaatctgactcc

SEQ ID NO: 702671 - DNA, 33 bp, Homo sapien
ctacctaattttccgaaaagtggaagagtgaaa

SEQ ID NO: 702672 - DNA, 33 bp, Homo sapien
ctacctaattttccgagaagtggaagagtgaaa

SEQ ID NO: 702673 - DNA, 33 bp, Homo sapien
tcaagatctacatgaactaggtaaatggattca

SEQ ID NO: 702674 - DNA, 33 bp, Homo sapien
tcaagatctacatgaattaggtaaatggattca

SEQ ID NO: 702675 - DNA, 33 bp, Homo sapien
agacacgagagtatacactgcattattttacta

SEQ ID NO: 702676 - DNA, 33 bp, Homo sapien
agacacgagagtataccctgcattattttacta

SEQ ID NO: 702677 - DNA, 33 bp, Homo sapien
ggtttaagatcacacacagagatttgaacctag

SEQ ID NO: 702678 - DNA, 33 bp, Homo sapien
ggtttaagatcacacatagagatttgaacctag

SEQ ID NO: 702679 - DNA, 33 bp, Homo sapien
catagtggaggaacagcctagattaaaacaagc

SEQ ID NO: 702680 - DNA, 33 bp, Homo sapien
catagtggaggaacaggctagattaaaacaagc

SEQ ID NO: 702681 - DNA, 33 bp, Homo sapien
cctgtgagtaggtgccaaaattcctcaatttga

SEQ ID NO: 702682 - DNA, 33 bp, Homo sapien
cctgtgagtaggtgccgaaattcctcaatttga

SEQ ID NO: 702683 - DNA, 33 bp, Homo sapien
gtacgttttctctttcaccagtgtacaagctca

SEQ ID NO: 702684 - DNA, 33 bp, Homo sapien
gtacgttttctctttcgccagtgtacaagctca

SEQ ID NO: 702685 - DNA, 33 bp, Homo sapien
aacttacttcctagaaataatcatcattagcat

SEQ ID NO: 702686 - DNA, 33 bp, Homo sapien
aacttacttcctagaactaatcatcattagcat

SEQ ID NO: 702687 - DNA, 33 bp, Homo sapien
gacagctggaagccaccagagatgatgctaacc

SEQ ID NO: 702688 - DNA, 33 bp, Homo sapien
gacagctggaagccactagagatgatgctaacc

SEQ ID NO: 702689 - DNA, 33 bp, Homo sapien
tgctgaaacttactcacgtgcctacacctagct

SEQ ID NO: 702690 - DNA, 33 bp, Homo sapien
tgctgaaacttactcatgtgcctacacctagct

SEQ ID NO: 702691 - DNA, 33 bp, Homo sapien
gccaaatagaggccaaaagattgagaaaagcaa

SEQ ID NO: 702692 - DNA, 33 bp, Homo sapien
gccaaatagaggccaacagattgagaaaagcaa

SEQ ID NO: 702693 - DNA, 33 bp, Homo sapien
tgaaatatataattcccgaagcctagatagaat

SEQ ID NO: 702694 - DNA, 33 bp, Homo sapien
tgaaatatataattcctgaagcctagatagaat

SEQ ID NO: 702695 - DNA, 33 bp, Homo sapien
tactgctgtataagtacgaccttttggtccatc

SEQ ID NO: 702696 - DNA, 33 bp, Homo sapien
tactgctgtataagtatgaccttttggtccatc

SEQ ID NO: 702697 - DNA, 33 bp, Homo sapien
tgtctgatccaccgccactttaataccaatatg

SEQ ID NO: 702698 - DNA, 33 bp, Homo sapien
tgtctgatccaccgccgctttaataccaatatg

SEQ ID NO: 702699 - DNA, 33 bp, Homo sapien
ttatttttggtaaaacagtaagacatactttga

SEQ ID NO: 702700 - DNA, 33 bp, Homo sapien
ttatttttggtaaaactgtaagacatactttga

SEQ ID NO: 702701 - DNA, 33 bp, Homo sapien
ttcacttgtccaaaccacatttgttgaaaggct

SEQ ID NO: 702702 - DNA, 33 bp, Homo sapien
ttcacttgtccaaaccgcatttgttgaaaggct

SEQ ID NO: 702703 - DNA, 33 bp, Homo sapien
catgttattgaatcaaaggctgtagaaggtgaa

SEQ ID NO: 702704 - DNA, 33 bp, Homo sapien
catgttattgaatcaagggctgtagaaggtgaa

SEQ ID NO: 702705 - DNA, 33 bp, Homo sapien
gctatctttgtgtgaacgggggaagtcaggagg

SEQ ID NO: 702706 - DNA, 33 bp, Homo sapien
gctatctttgtgtgaatgggggaagtcaggagg

SEQ ID NO: 702707 - DNA, 33 bp, Homo sapien
cacagtctcctctgtagctaggtgtgcttgtgc

SEQ ID NO: 702708 - DNA, 33 bp, Homo sapien
cacagtctcctctgtatctaggtgtgcttgtgc

SEQ ID NO: 702709 - DNA, 33 bp, Homo sapien
agtagggggattcaaaaataagcaagactctac

SEQ ID NO: 702710 - DNA, 33 bp, Homo sapien
agtagggggattcaaacataagcaagactctac

SEQ ID NO: 702711 - DNA, 33 bp, Homo sapien
aatgagtcaccacagacgtgctaacagtcaagc

SEQ ID NO: 702712 - DNA, 33 bp, Homo sapien
aatgagtcaccacagatgtgctaacagtcaagc

SEQ ID NO: 702713 - DNA, 33 bp, Homo sapien
gttttcttaggttgccaagttttggagtaattt

SEQ ID NO: 702714 - DNA, 33 bp, Homo sapien
gttttcttaggttgccgagttttggagtaattt

SEQ ID NO: 702715 - DNA, 33 bp, Homo sapien
catacctggtaagcacacactattgttcaaaat

SEQ ID NO: 702716 - DNA, 33 bp, Homo sapien
catacctggtaagcacgcactattgttcaaaat

SEQ ID NO: 702717 - DNA, 33 bp, Homo sapien
gtatcccagagagacacactaaatgtgagcaag

SEQ ID NO: 702718 - DNA, 33 bp, Homo sapien
gtatcccagagagacatactaaatgtgagcaag

SEQ ID NO: 702719 - DNA, 33 bp, Homo sapien
ctagcaagtatcaagactaaagcctaaatgtcc

SEQ ID NO: 702720 - DNA, 33 bp, Homo sapien
ctagcaagtatcaagattaaagcctaaatgtcc

SEQ ID NO: 702721 - DNA, 33 bp, Homo sapien
gcaatgttctttgggaccattctcttctccagt

SEQ ID NO: 702722 - DNA, 33 bp, Homo sapien
gcaatgttctttgggatcattctcttctccagt

SEQ ID NO: 702723 - DNA, 33 bp, Homo sapien
gataaaatcttactgaatagcaggggaatataa

SEQ ID NO: 702724 - DNA, 33 bp, Homo sapien
gataaaatcttactgagtagcaggggaatataa

SEQ ID NO: 702725 - DNA, 33 bp, Homo sapien
aattgcttttctcttaccagtatgatttgtaac

SEQ ID NO: 702726 - DNA, 33 bp, Homo sapien
aattgcttttctcttatcagtatgatttgtaac

SEQ ID NO: 702727 - DNA, 33 bp, Homo sapien
ctgccgtttagacaaactatgacctagtatcct

SEQ ID NO: 702728 - DNA, 33 bp, Homo sapien
ctgccgtttagacaaagtatgacctagtatcct

SEQ ID NO: 702729 - DNA, 33 bp, Homo sapien
tctgctatggccgattaaagtcacaaaagtaat

SEQ ID NO: 702730 - DNA, 33 bp, Homo sapien
tctgctatggccgattgaagtcacaaaagtaat

SEQ ID NO: 702731 - DNA, 33 bp, Homo sapien
tctgggaaggaatatccaatgggagagctaaga

SEQ ID NO: 702732 - DNA, 33 bp, Homo sapien
tctgggaaggaatatcgaatgggagagctaaga

SEQ ID NO: 702733 - DNA, 33 bp, Homo sapien
ctggagttcttacaaaatttcactaggtgggtc

SEQ ID NO: 702734 - DNA, 33 bp, Homo sapien
ctggagttcttacaaagtttcactaggtgggtc

SEQ ID NO: 702735 - DNA, 33 bp, Homo sapien
gggttcctggcttcaacgatgccacaagatctt

SEQ ID NO: 702736 - DNA, 33 bp, Homo sapien
gggttcctggcttcaatgatgccacaagatctt

SEQ ID NO: 702737 - DNA, 33 bp, Homo sapien
tcctaaattcaacaagcctgaagtgcaagtttt

SEQ ID NO: 702738 - DNA, 33 bp, Homo sapien
tcctaaattcaacaagtctgaagtgcaagtttt

SEQ ID NO: 702739 - DNA, 33 bp, Homo sapien
aaggtggaggacacaagctctctgggacagcac

SEQ ID NO: 702740 - DNA, 33 bp, Homo sapien
aaggtggaggacacaatctctctgggacagcac

SEQ ID NO: 702741 - DNA, 33 bp, Homo sapien
tgtgtccaaataaatcccctgatctgtaataaa

SEQ ID NO: 702742 - DNA, 33 bp, Homo sapien
tgtgtccaaataaatctcctgatctgtaataaa

SEQ ID NO: 702743 - DNA, 33 bp, Homo sapien
tcagtattgccaataccaagaagattaggtgtg

SEQ ID NO: 702744 - DNA, 33 bp, Homo sapien
tcagtattgccaatacgaagaagattaggtgtg

SEQ ID NO: 702745 - DNA, 33 bp, Homo sapien
tatgcctgacctgcgaactactcaataaatgtt

SEQ ID NO: 702746 - DNA, 33 bp, Homo sapien
tatgcctgacctgcgagctactcaataaatgtt

SEQ ID NO: 702747 - DNA, 33 bp, Homo sapien
aaaatgaatgctaacaacttgaaatctagtaaa

SEQ ID NO: 702748 - DNA, 33 bp, Homo sapien
aaaatgaatgctaacatcttgaaatctagtaaa

SEQ ID NO: 702749 - DNA, 33 bp, Homo sapien
attcttctatcaagtacgtctttagcctcatct

SEQ ID NO: 702750 - DNA, 33 bp, Homo sapien
attcttctatcaagtatgtctttagcctcatct

SEQ ID NO: 702751 - DNA, 33 bp, Homo sapien
actgaattaatggttcaaggtaaacaaagtggg

SEQ ID NO: 702752 - DNA, 33 bp, Homo sapien
actgaattaatggttccaggtaaacaaagtggg

SEQ ID NO: 702753 - DNA, 33 bp, Homo sapien
ctataaaagcccccccacaaaaaatgatgggcc

SEQ ID NO: 702754 - DNA, 33 bp, Homo sapien
ctataaaagcccccccgcaaaaaatgatgggcc

SEQ ID NO: 702755 - DNA, 33 bp, Homo sapien
cctgtcctcagagccaatgccaaaatctcaact

SEQ ID NO: 702756 - DNA, 33 bp, Homo sapien
cctgtcctcagagccagtgccaaaatctcaact

SEQ ID NO: 702757 - DNA, 33 bp, Homo sapien
ctgctagctcctctgtaacaattttcctcttta

SEQ ID NO: 702758 - DNA, 33 bp, Homo sapien
ctgctagctcctctgttacaattttcctcttta

SEQ ID NO: 702759 - DNA, 33 bp, Homo sapien
ggtaatccagaggtgacgagaacctaaatgagg

SEQ ID NO: 702760 - DNA, 33 bp, Homo sapien
ggtaatccagaggtgatgagaacctaaatgagg

SEQ ID NO: 702761 - DNA, 33 bp, Homo sapien
atgcagagaaaccagaagtgcatcagcagtgtc

SEQ ID NO: 702762 - DNA, 33 bp, Homo sapien
atgcagagaaaccagatgtgcatcagcagtgtc

SEQ ID NO: 702763 - DNA, 33 bp, Homo sapien
ttgactgcataatgaacggtagacacatttatt

SEQ ID NO: 702764 - DNA, 33 bp, Homo sapien
ttgactgcataatgaatggtagacacatttatt

SEQ ID NO: 702765 - DNA, 33 bp, Homo sapien
aagcatgttgattttcgaccagctatgtgctca

SEQ ID NO: 702766 - DNA, 33 bp, Homo sapien
aagcatgttgattttctaccagctatgtgctca

SEQ ID NO: 702767 - DNA, 33 bp, Homo sapien
ctcctcatacattaaactaaagagacagctgta

SEQ ID NO: 702768 - DNA, 33 bp, Homo sapien
ctcctcatacattaaattaaagagacagctgta

SEQ ID NO: 702769 - DNA, 33 bp, Homo sapien
aactgctttaagggataaactccagtccaagaa

SEQ ID NO: 702770 - DNA, 33 bp, Homo sapien
aactgctttaagggatgaactccagtccaagaa

SEQ ID NO: 702771 - DNA, 33 bp, Homo sapien
agaaagacagatgataagactgacagtttctta

SEQ ID NO: 702772 - DNA, 33 bp, Homo sapien
agaaagacagatgataggactgacagtttctta

SEQ ID NO: 702773 - DNA, 33 bp, Homo sapien
agcatctcacaggataacttgtttcaggcatag

SEQ ID NO: 702774 - DNA, 33 bp, Homo sapien
agcatctcacaggataccttgtttcaggcatag

SEQ ID NO: 702775 - DNA, 33 bp, Homo sapien
aggtgacactctatgacgactggtgccaagcca

SEQ ID NO: 702776 - DNA, 33 bp, Homo sapien
aggtgacactctatgatgactggtgccaagcca

SEQ ID NO: 702777 - DNA, 33 bp, Homo sapien
tacttggcagtgaaaaattgtgctttgataaac

SEQ ID NO: 702778 - DNA, 33 bp, Homo sapien
tacttggcagtgaaaacttgtgctttgataaac

SEQ ID NO: 702779 - DNA, 33 bp, Homo sapien
ctgtggaaatcaagtacgttagttttatacatg

SEQ ID NO: 702780 - DNA, 33 bp, Homo sapien
ctgtggaaatcaagtatgttagttttatacatg

SEQ ID NO: 702781 - DNA, 33 bp, Homo sapien
ctagtactccattccaatacaaagaaggcaagc

SEQ ID NO: 702782 - DNA, 33 bp, Homo sapien
ctagtactccattccagtacaaagaaggcaagc

SEQ ID NO: 702783 - DNA, 33 bp, Homo sapien
ttagcagtcaccagacagtacacacattccctc

SEQ ID NO: 702784 - DNA, 33 bp, Homo sapien
ttagcagtcaccagacggtacacacattccctc

SEQ ID NO: 702785 - DNA, 33 bp, Homo sapien
tgttacaggctatagacgttaaacaggaaaaaa

SEQ ID NO: 702786 - DNA, 33 bp, Homo sapien
tgttacaggctatagatgttaaacaggaaaaaa

SEQ ID NO: 702787 - DNA, 33 bp, Homo sapien
gctccgatcatatggcactccctcaagttctct

SEQ ID NO: 702788 - DNA, 33 bp, Homo sapien
gctccgatcatatggctctccctcaagttctct

SEQ ID NO: 702789 - DNA, 33 bp, Homo sapien
agattaaatctaataacgaatgcaaattgccta

SEQ ID NO: 702790 - DNA, 33 bp, Homo sapien
agattaaatctaataatgaatgcaaattgccta

SEQ ID NO: 702791 - DNA, 33 bp, Homo sapien
gctctccagctgtgaacgtttaaatgctataag

SEQ ID NO: 702792 - DNA, 33 bp, Homo sapien
gctctccagctgtgaatgtttaaatgctataag

SEQ ID NO: 702793 - DNA, 33 bp, Homo sapien
tcagacctcataaggaaatattttaagactgtg

SEQ ID NO: 702794 - DNA, 33 bp, Homo sapien
tcagacctcataaggagatattttaagactgtg

SEQ ID NO: 702795 - DNA, 33 bp, Homo sapien
ataagtgatctatgaccgctgctagttatatgc

SEQ ID NO: 702796 - DNA, 33 bp, Homo sapien
ataagtgatctatgactgctgctagttatatgc

SEQ ID NO: 702797 - DNA, 33 bp, Homo sapien
tcttgccaaaagttaacaatgcagtaaaaatta

SEQ ID NO: 702798 - DNA, 33 bp, Homo sapien
tcttgccaaaagttaataatgcagtaaaaatta

SEQ ID NO: 702799 - DNA, 33 bp, Homo sapien
ctgaagtatgtctgtacgtcattatgcccactc

SEQ ID NO: 702800 - DNA, 33 bp, Homo sapien
ctgaagtatgtctgtatgtcattatgcccactc

SEQ ID NO: 702801 - DNA, 33 bp, Homo sapien
aacttgcccagtcacacagctagtaaaccacag

SEQ ID NO: 702802 - DNA, 33 bp, Homo sapien
aacttgcccagtcacagagctagtaaaccacag

SEQ ID NO: 702803 - DNA, 33 bp, Homo sapien
attatccatttgaacccaattctgacctgatgg

SEQ ID NO: 702804 - DNA, 33 bp, Homo sapien
attatccatttgaacctaattctgacctgatgg

SEQ ID NO: 702805 - DNA, 33 bp, Homo sapien
aaatggtggtgctgaaggaaggaatgaacaaag

SEQ ID NO: 702806 - DNA, 33 bp, Homo sapien
aaatggtggtgctgaatgaaggaatgaacaaag

SEQ ID NO: 702807 - DNA, 33 bp, Homo sapien
agtccctaggatcctcacaaatcaatactgagg

SEQ ID NO: 702808 - DNA, 33 bp, Homo sapien
agtccctaggatcctcgcaaatcaatactgagg

SEQ ID NO: 702809 - DNA, 33 bp, Homo sapien
gatgattagggaaggaataagaaaggcagtgac

SEQ ID NO: 702810 - DNA, 33 bp, Homo sapien
gatgattagggaaggattaagaaaggcagtgac

SEQ ID NO: 702811 - DNA, 33 bp, Homo sapien
ctgacgtgttataatacgctggaagaagaagat

SEQ ID NO: 702812 - DNA, 33 bp, Homo sapien
ctgacgtgttataatatgctggaagaagaagat

SEQ ID NO: 702813 - DNA, 33 bp, Homo sapien
caataatatctcttgacggtgattgccctgtgg

SEQ ID NO: 702814 - DNA, 33 bp, Homo sapien
caataatatctcttgatggtgattgccctgtgg

SEQ ID NO: 702815 - DNA, 33 bp, Homo sapien
gaagtgtccagacttcccgggagcagaatgtgc

SEQ ID NO: 702816 - DNA, 33 bp, Homo sapien
gaagtgtccagacttctcgggagcagaatgtgc

SEQ ID NO: 702817 - DNA, 33 bp, Homo sapien
gcttctcccttacaaacgattctaagtagcaac

SEQ ID NO: 702818 - DNA, 33 bp, Homo sapien
gcttctcccttacaaatgattctaagtagcaac

SEQ ID NO: 702819 - DNA, 33 bp, Homo sapien
tatcctcttattcccaaatgctaccaaatgctt

SEQ ID NO: 702820 - DNA, 33 bp, Homo sapien
tatcctcttattcccatatgctaccaaatgctt

SEQ ID NO: 702821 - DNA, 33 bp, Homo sapien
tctaggtaaatggaaaaataagtttagccctgg

SEQ ID NO: 702822 - DNA, 33 bp, Homo sapien
tctaggtaaatggaaagataagtttagccctgg

SEQ ID NO: 702823 - DNA, 33 bp, Homo sapien
ggaagttcagcactaacgatcagttcctcttgg

SEQ ID NO: 702824 - DNA, 33 bp, Homo sapien
ggaagttcagcactaatgatcagttcctcttgg

SEQ ID NO: 702825 - DNA, 33 bp, Homo sapien
aatgaatcaagtcagacgcatttttttctactc

SEQ ID NO: 702826 - DNA, 33 bp, Homo sapien
aatgaatcaagtcagaggcatttttttctactc

SEQ ID NO: 702827 - DNA, 33 bp, Homo sapien
agggaaaacaagacggcacttcaacaccaatta

SEQ ID NO: 702828 - DNA, 33 bp, Homo sapien
agggaaaacaagacgggacttcaacaccaatta

SEQ ID NO: 702829 - DNA, 33 bp, Homo sapien
aaataatatgccagaaaaaagaactggtaccac

SEQ ID NO: 702830 - DNA, 33 bp, Homo sapien
aaataatatgccagaagaaagaactggtaccac

SEQ ID NO: 702831 - DNA, 33 bp, Homo sapien
gcacgaactcctgtgacgaatattgcaacaaaa

SEQ ID NO: 702832 - DNA, 33 bp, Homo sapien
gcacgaactcctgtgatgaatattgcaacaaaa

SEQ ID NO: 702833 - DNA, 33 bp, Homo sapien
acactaacactggagtaaatactgaataaccaa

SEQ ID NO: 702834 - DNA, 33 bp, Homo sapien
acactaacactggagttaatactgaataaccaa

SEQ ID NO: 702835 - DNA, 33 bp, Homo sapien
cagagagatgctcagaaaagtacgaggggcaga

SEQ ID NO: 702836 - DNA, 33 bp, Homo sapien
cagagagatgctcagagaagtacgaggggcaga

SEQ ID NO: 702837 - DNA, 33 bp, Homo sapien
gctgttctcaggataacgggtgaatctcacaag

SEQ ID NO: 702838 - DNA, 33 bp, Homo sapien
gctgttctcaggataatgggtgaatctcacaag

SEQ ID NO: 702839 - DNA, 33 bp, Homo sapien
ctctctcttatctccaaggtccaatatcactgt

SEQ ID NO: 702840 - DNA, 33 bp, Homo sapien
ctctctcttatctccatggtccaatatcactgt

SEQ ID NO: 702841 - DNA, 33 bp, Homo sapien
ctctgacactttatgccgagttgctaccatttc

SEQ ID NO: 702842 - DNA, 33 bp, Homo sapien
ctctgacactttatgctgagttgctaccatttc

SEQ ID NO: 702843 - DNA, 33 bp, Homo sapien
gtatctgtaaactttccacatagactcaatatg

SEQ ID NO: 702844 - DNA, 33 bp, Homo sapien
gtatctgtaaactttctacatagactcaatatg

SEQ ID NO: 702845 - DNA, 33 bp, Homo sapien
gctaatatttttatcaagagttttaatgttttt

SEQ ID NO: 702846 - DNA, 33 bp, Homo sapien
gctaatatttttatcaggagttttaatgttttt

SEQ ID NO: 702847 - DNA, 33 bp, Homo sapien
ccattctaccagatacacagacatcaccacagt

SEQ ID NO: 702848 - DNA, 33 bp, Homo sapien
ccattctaccagatacgcagacatcaccacagt

SEQ ID NO: 702849 - DNA, 33 bp, Homo sapien
gtgaaatgtgaacgcgcaccattatcttgtgac

SEQ ID NO: 702850 - DNA, 33 bp, Homo sapien
gtgaaatgtgaacgcgtaccattatcttgtgac

SEQ ID NO: 702851 - DNA, 33 bp, Homo sapien
atatgcaaacttatcaatcagaactcacccctc

SEQ ID NO: 702852 - DNA, 33 bp, Homo sapien
atatgcaaacttatcagtcagaactcacccctc

SEQ ID NO: 702853 - DNA, 33 bp, Homo sapien
tatcctttgtaaaagcaaaaggatgtcagtcag

SEQ ID NO: 702854 - DNA, 33 bp, Homo sapien
tatcctttgtaaaagcgaaaggatgtcagtcag

SEQ ID NO: 702855 - DNA, 33 bp, Homo sapien
tagaaatgggttgataaatgtcattttacttcc

SEQ ID NO: 702856 - DNA, 33 bp, Homo sapien
tagaaatgggttgatacatgtcattttacttcc

SEQ ID NO: 702857 - DNA, 33 bp, Homo sapien
ataaatccatgaaaagccttatctacttcattt

SEQ ID NO: 702858 - DNA, 33 bp, Homo sapien
ataaatccatgaaaaggcttatctacttcattt

SEQ ID NO: 702859 - DNA, 33 bp, Homo sapien
aggaaaaaagcaatgaagaattggtctggttga

SEQ ID NO: 702860 - DNA, 33 bp, Homo sapien
aggaaaaaagcaatgaggaattggtctggttga

SEQ ID NO: 702861 - DNA, 33 bp, Homo sapien
tacttattaagaccacaagtcaccaaatactgt

SEQ ID NO: 702862 - DNA, 33 bp, Homo sapien
tacttattaagaccactagtcaccaaatactgt

SEQ ID NO: 702863 - DNA, 33 bp, Homo sapien
tccaacaacttattcaacttaagctccttaaaa

SEQ ID NO: 702864 - DNA, 33 bp, Homo sapien
tccaacaacttattcaccttaagctccttaaaa

SEQ ID NO: 702865 - DNA, 33 bp, Homo sapien
aggtggtaaatacaaacggtatgagctggaaaa

SEQ ID NO: 702866 - DNA, 33 bp, Homo sapien
aggtggtaaatacaaatggtatgagctggaaaa

SEQ ID NO: 702867 - DNA, 33 bp, Homo sapien
aatggcctggtagtggcccacaagaaccggggg

SEQ ID NO: 702868 - DNA, 33 bp, Homo sapien
aatggcctggtagtggtccacaagaaccggggg

SEQ ID NO: 702869 - DNA, 33 bp, Homo sapien
ctgtcttttcttatgaaagtccaaacccctctc

SEQ ID NO: 702870 - DNA, 33 bp, Homo sapien
ctgtcttttcttatgagagtccaaacccctctc

SEQ ID NO: 702871 - DNA, 33 bp, Homo sapien
tacacaggttgtgtgaaacaatggttctgtcag

SEQ ID NO: 702872 - DNA, 33 bp, Homo sapien
tacacaggttgtgtgatacaatggttctgtcag

SEQ ID NO: 702873 - DNA, 33 bp, Homo sapien
tgaagagttttgaattcaatggtttctactcta

SEQ ID NO: 702874 - DNA, 33 bp, Homo sapien
tgaagagttttgaatttaatggtttctactcta

SEQ ID NO: 702875 - DNA, 33 bp, Homo sapien
actgtatttaaggcaacgtgaggaatagaaaac

SEQ ID NO: 702876 - DNA, 33 bp, Homo sapien
actgtatttaaggcaatgtgaggaatagaaaac

SEQ ID NO: 702877 - DNA, 33 bp, Homo sapien
atttactatgtgattgcataatttgtttgtaca

SEQ ID NO: 702878 - DNA, 33 bp, Homo sapien
atttactatgtgattgtataatttgtttgtaca

SEQ ID NO: 702879 - DNA, 33 bp, Homo sapien
ttaccagtctctgtgacgtacggtcaaaaatta

SEQ ID NO: 702880 - DNA, 33 bp, Homo sapien
ttaccagtctctgtgatgtacggtcaaaaatta

SEQ ID NO: 702881 - DNA, 33 bp, Homo sapien
atacttgcaagaagccaggcgataccatagaca

SEQ ID NO: 702882 - DNA, 33 bp, Homo sapien
atacttgcaagaagccgggcgataccatagaca

SEQ ID NO: 702883 - DNA, 33 bp, Homo sapien
tggcaaaaagactataacatttttgatcaaatt

SEQ ID NO: 702884 - DNA, 33 bp, Homo sapien
tggcaaaaagactatatcatttttgatcaaatt

SEQ ID NO: 702885 - DNA, 33 bp, Homo sapien
ttgatgctgcataaaaatagagctgaaatattt

SEQ ID NO: 702886 - DNA, 33 bp, Homo sapien
ttgatgctgcataaaattagagctgaaatattt

SEQ ID NO: 702887 - DNA, 33 bp, Homo sapien
agctatcagggcattacaccaatgatatcagtg

SEQ ID NO: 702888 - DNA, 33 bp, Homo sapien
agctatcagggcattataccaatgatatcagtg

SEQ ID NO: 702889 - DNA, 33 bp, Homo sapien
ctagtttattcacagaactccaaaaaactattt

SEQ ID NO: 702890 - DNA, 33 bp, Homo sapien
ctagtttattcacagagctccaaaaaactattt

SEQ ID NO: 702891 - DNA, 33 bp, Homo sapien
tagcaattcctgggccaaatgtgttgttgatgt

SEQ ID NO: 702892 - DNA, 33 bp, Homo sapien
tagcaattcctgggcctaatgtgttgttgatgt

SEQ ID NO: 702893 - DNA, 33 bp, Homo sapien
agctgtattttcattacgtgttttgtgctttag

SEQ ID NO: 702894 - DNA, 33 bp, Homo sapien
agctgtattttcattatgtgttttgtgctttag

SEQ ID NO: 702895 - DNA, 33 bp, Homo sapien
agtgactcaggcataaaattagaaaggcttgaa

SEQ ID NO: 702896 - DNA, 33 bp, Homo sapien
agtgactcaggcataacattagaaaggcttgaa

SEQ ID NO: 702897 - DNA, 33 bp, Homo sapien
taagtatttgttgtcactaattcataccaactc

SEQ ID NO: 702898 - DNA, 33 bp, Homo sapien
taagtatttgttgtcattaattcataccaactc

SEQ ID NO: 702899 - DNA, 33 bp, Homo sapien
tattctacggagtttccaatattcttataccag

SEQ ID NO: 702900 - DNA, 33 bp, Homo sapien
tattctacggagtttcgaatattcttataccag

SEQ ID NO: 702901 - DNA, 33 bp, Homo sapien
tcattctcttacagtggagtttccaggggccac

SEQ ID NO: 702902 - DNA, 33 bp, Homo sapien
tcattctcttacagtgtagtttccaggggccac

SEQ ID NO: 702903 - DNA, 33 bp, Homo sapien
cagtctctacattccaaccacaacacacttctt

SEQ ID NO: 702904 - DNA, 33 bp, Homo sapien
cagtctctacattccagccacaacacacttctt

SEQ ID NO: 702905 - DNA, 33 bp, Homo sapien
aaattaggatgtcatgcactcaataccattgaa

SEQ ID NO: 702906 - DNA, 33 bp, Homo sapien
aaattaggatgtcatgtactcaataccattgaa

SEQ ID NO: 702907 - DNA, 33 bp, Homo sapien
ttcaagacttcttacacaactgacaacatttat

SEQ ID NO: 702908 - DNA, 33 bp, Homo sapien
ttcaagacttcttacagaactgacaacatttat

SEQ ID NO: 702909 - DNA, 33 bp, Homo sapien
tggggttttctaaagcacagctatcggtgtttt

SEQ ID NO: 702910 - DNA, 33 bp, Homo sapien
tggggttttctaaagcgcagctatcggtgtttt

SEQ ID NO: 702911 - DNA, 33 bp, Homo sapien
tcagagctgcaggtcaatcagactaaatcttag

SEQ ID NO: 702912 - DNA, 33 bp, Homo sapien
tcagagctgcaggtcattcagactaaatcttag

SEQ ID NO: 702913 - DNA, 33 bp, Homo sapien
attgtctgagtcaatgcaaaagagcatggaatt

SEQ ID NO: 702914 - DNA, 33 bp, Homo sapien
attgtctgagtcaatggaaaagagcatggaatt

SEQ ID NO: 702915 - DNA, 33 bp, Homo sapien
tcagatgggagtgccacgaaagagaaatgggga

SEQ ID NO: 702916 - DNA, 33 bp, Homo sapien
tcagatgggagtgccatgaaagagaaatgggga

SEQ ID NO: 702917 - DNA, 33 bp, Homo sapien
tgtgttcagcctgcaactgactctttctcttcc

SEQ ID NO: 702918 - DNA, 33 bp, Homo sapien
tgtgttcagcctgcaattgactctttctcttcc

SEQ ID NO: 702919 - DNA, 33 bp, Homo sapien
cttccaaaatccactacggctgatgaaaactgc

SEQ ID NO: 702920 - DNA, 33 bp, Homo sapien
cttccaaaatccactatggctgatgaaaactgc

SEQ ID NO: 702921 - DNA, 33 bp, Homo sapien
ttgcaaatctatgttacgccctgacagtatgag

SEQ ID NO: 702922 - DNA, 33 bp, Homo sapien
ttgcaaatctatgttatgccctgacagtatgag

SEQ ID NO: 702923 - DNA, 33 bp, Homo sapien
atccaaaaactcaatcaattcctgtctttacct

SEQ ID NO: 702924 - DNA, 33 bp, Homo sapien
atccaaaaactcaatcgattcctgtctttacct

SEQ ID NO: 702925 - DNA, 33 bp, Homo sapien
gaatttcatgagtgaacattatgtgcagctaca

SEQ ID NO: 702926 - DNA, 33 bp, Homo sapien
gaatttcatgagtgaatattatgtgcagctaca

SEQ ID NO: 702927 - DNA, 33 bp, Homo sapien
aatttatggaataaaaccttgcctaacactggg

SEQ ID NO: 702928 - DNA, 33 bp, Homo sapien
aatttatggaataaaatcttgcctaacactggg

SEQ ID NO: 702929 - DNA, 33 bp, Homo sapien
aagtccaggtgacttcaaaagcacttggaaacc

SEQ ID NO: 702930 - DNA, 33 bp, Homo sapien
aagtccaggtgacttcgaaagcacttggaaacc

SEQ ID NO: 702931 - DNA, 33 bp, Homo sapien
tatttctcatggcactcaacccattattgttat

SEQ ID NO: 702932 - DNA, 33 bp, Homo sapien
tatttctcatggcacttaacccattattgttat

SEQ ID NO: 702933 - DNA, 33 bp, Homo sapien
ctgttatatgaacatacctctcatagtcagtgg

SEQ ID NO: 702934 - DNA, 33 bp, Homo sapien
ctgttatatgaacatatctctcatagtcagtgg

SEQ ID NO: 702935 - DNA, 33 bp, Homo sapien
agaacatttaactgacaaattaggctaaacatt

SEQ ID NO: 702936 - DNA, 33 bp, Homo sapien
agaacatttaactgaccaattaggctaaacatt

SEQ ID NO: 702937 - DNA, 33 bp, Homo sapien
gatggcttcctcacatcagtgccagagaagtgt

SEQ ID NO: 702938 - DNA, 33 bp, Homo sapien
gatggcttcctcacattagtgccagagaagtgt

SEQ ID NO: 702939 - DNA, 33 bp, Homo sapien
tatttaccatgaggttgaaagattcgcacaaaa

SEQ ID NO: 702940 - DNA, 33 bp, Homo sapien
tatttaccatgaggtttaaagattcgcacaaaa

SEQ ID NO: 702941 - DNA, 33 bp, Homo sapien
tgacaacagagggctcacagtcagctccttgca

SEQ ID NO: 702942 - DNA, 33 bp, Homo sapien
tgacaacagagggctcgcagtcagctccttgca

SEQ ID NO: 702943 - DNA, 33 bp, Homo sapien
aaggaactgaggaattgaacatccagctactgc

SEQ ID NO: 702944 - DNA, 33 bp, Homo sapien
aaggaactgaggaatttaacatccagctactgc

SEQ ID NO: 702945 - DNA, 33 bp, Homo sapien
tccacccagtaaaacacgaagctctgttggcag

SEQ ID NO: 702946 - DNA, 33 bp, Homo sapien
tccacccagtaaaacatgaagctctgttggcag

SEQ ID NO: 702947 - DNA, 33 bp, Homo sapien
gcccttggatggtgtaagttcatttcctgtggc

SEQ ID NO: 702948 - DNA, 33 bp, Homo sapien
gcccttggatggtgtatgttcatttcctgtggc

SEQ ID NO: 702949 - DNA, 33 bp, Homo sapien
tgaggagaatttcctacggggactatcaaaatg

SEQ ID NO: 702950 - DNA, 33 bp, Homo sapien
tgaggagaatttcctatggggactatcaaaatg

SEQ ID NO: 702951 - DNA, 33 bp, Homo sapien
ggaagttccaaccacaagagacagactaaacag

SEQ ID NO: 702952 - DNA, 33 bp, Homo sapien
ggaagttccaaccacaggagacagactaaacag

SEQ ID NO: 702953 - DNA, 33 bp, Homo sapien
caaatcaatctaacaaaacaaattggctcatta

SEQ ID NO: 702954 - DNA, 33 bp, Homo sapien
caaatcaatctaacaagacaaattggctcatta

SEQ ID NO: 702955 - DNA, 33 bp, Homo sapien
atgggaagtgtattcacagatggagagcattgt

SEQ ID NO: 702956 - DNA, 33 bp, Homo sapien
atgggaagtgtattcatagatggagagcattgt

SEQ ID NO: 702957 - DNA, 33 bp, Homo sapien
tgtcactgacaacaaaagaacagctttcagtga

SEQ ID NO: 702958 - DNA, 33 bp, Homo sapien
tgtcactgacaacaaaggaacagctttcagtga

SEQ ID NO: 702959 - DNA, 33 bp, Homo sapien
catgactgttaatcggccatttggcttgttccc

SEQ ID NO: 702960 - DNA, 33 bp, Homo sapien
catgactgttaatcggtcatttggcttgttccc

SEQ ID NO: 702961 - DNA, 33 bp, Homo sapien
aatattcagttgcagaaaatgtttttgttctaa

SEQ ID NO: 702962 - DNA, 33 bp, Homo sapien
aatattcagttgcagacaatgtttttgttctaa

SEQ ID NO: 702963 - DNA, 33 bp, Homo sapien
agtcttcttcaccttcactgtcctatttttgaa

SEQ ID NO: 702964 - DNA, 33 bp, Homo sapien
agtcttcttcaccttcgctgtcctatttttgaa

SEQ ID NO: 702965 - DNA, 33 bp, Homo sapien
ccggcctgagaggtgccgatttcttttgtgatg

SEQ ID NO: 702966 - DNA, 33 bp, Homo sapien
ccggcctgagaggtgctgatttcttttgtgatg

SEQ ID NO: 702967 - DNA, 33 bp, Homo sapien
gactaatcactttaaacaatgactttgagaact

SEQ ID NO: 702968 - DNA, 33 bp, Homo sapien
gactaatcactttaaagaatgactttgagaact

SEQ ID NO: 702969 - DNA, 33 bp, Homo sapien
tttcacacctttataactcagtagggccaggtt

SEQ ID NO: 702970 - DNA, 33 bp, Homo sapien
tttcacacctttataattcagtagggccaggtt

SEQ ID NO: 702971 - DNA, 33 bp, Homo sapien
acttggaagcttaacagctatctccaagaggtt

SEQ ID NO: 702972 - DNA, 33 bp, Homo sapien
acttggaagcttaacatctatctccaagaggtt

SEQ ID NO: 702973 - DNA, 33 bp, Homo sapien
gcagggaaaaatacaacgtgccaatggagacac

SEQ ID NO: 702974 - DNA, 33 bp, Homo sapien
gcagggaaaaatacaatgtgccaatggagacac

SEQ ID NO: 702975 - DNA, 33 bp, Homo sapien
tgaacttcctggatgacaataaagacacatacc

SEQ ID NO: 702976 - DNA, 33 bp, Homo sapien
tgaacttcctggatgataataaagacacatacc

SEQ ID NO: 702977 - DNA, 33 bp, Homo sapien
acaaaagatcacaaaacgaccggatcctgtaag

SEQ ID NO: 702978 - DNA, 33 bp, Homo sapien
acaaaagatcacaaaatgaccggatcctgtaag

SEQ ID NO: 702979 - DNA, 33 bp, Homo sapien
gcagaagcagagctaaccacgaccttggcggca

SEQ ID NO: 702980 - DNA, 33 bp, Homo sapien
gcagaagcagagctaatcacgaccttggcggca

SEQ ID NO: 702981 - DNA, 33 bp, Homo sapien
ccctgactgtgggcacaaaactgagaccatatc

SEQ ID NO: 702982 - DNA, 33 bp, Homo sapien
ccctgactgtgggcacgaaactgagaccatatc

SEQ ID NO: 702983 - DNA, 33 bp, Homo sapien
gtacaatgtttaaagaagataacacactaaaat

SEQ ID NO: 702984 - DNA, 33 bp, Homo sapien
gtacaatgtttaaagacgataacacactaaaat

SEQ ID NO: 702985 - DNA, 33 bp, Homo sapien
cactgcactgaatatacgggtgtatgtgtcttt

SEQ ID NO: 702986 - DNA, 33 bp, Homo sapien
cactgcactgaatatatgggtgtatgtgtcttt

SEQ ID NO: 702987 - DNA, 33 bp, Homo sapien
ataatcaaacacctaaccacactactagagaaa

SEQ ID NO: 702988 - DNA, 33 bp, Homo sapien
ataatcaaacacctaatcacactactagagaaa

SEQ ID NO: 702989 - DNA, 33 bp, Homo sapien
accaaataacattagacggccttaatttttttt

SEQ ID NO: 702990 - DNA, 33 bp, Homo sapien
accaaataacattagatggccttaatttttttt

SEQ ID NO: 702991 - DNA, 33 bp, Homo sapien
aatacaaacttgcatcaaaagatctgtataagg

SEQ ID NO: 702992 - DNA, 33 bp, Homo sapien
aatacaaacttgcatcgaaagatctgtataagg

SEQ ID NO: 702993 - DNA, 33 bp, Homo sapien
tccctgggggtctttcaccttgacctttctgca

SEQ ID NO: 702994 - DNA, 33 bp, Homo sapien
tccctgggggtctttcgccttgacctttctgca

SEQ ID NO: 702995 - DNA, 33 bp, Homo sapien
gttaatctgtatgtacaatgtgcctacaagttt

SEQ ID NO: 702996 - DNA, 33 bp, Homo sapien
gttaatctgtatgtacgatgtgcctacaagttt

SEQ ID NO: 702997 - DNA, 33 bp, Homo sapien
taaaataaaaagacaaaccatggaatgtgagaa

SEQ ID NO: 702998 - DNA, 33 bp, Homo sapien
taaaataaaaagacaacccatggaatgtgagaa

SEQ ID NO: 702999 - DNA, 33 bp, Homo sapien
acttactgggttttcacagaacatttcaagctt

SEQ ID NO: 703000 - DNA, 33 bp, Homo sapien
acttactgggttttcatagaacatttcaagctt

SEQ ID NO: 703001 - DNA, 33 bp, Homo sapien
tactgctcctaaaagacggtctagaagtgcttg

SEQ ID NO: 703002 - DNA, 33 bp, Homo sapien
tactgctcctaaaagatggtctagaagtgcttg

SEQ ID NO: 703003 - DNA, 33 bp, Homo sapien
agaagacctgaagaaacaaatgattcctgaaaa

SEQ ID NO: 703004 - DNA, 33 bp, Homo sapien
agaagacctgaagaaataaatgattcctgaaaa

SEQ ID NO: 703005 - DNA, 33 bp, Homo sapien
cttgtttcattactacagaatttcatcacttct

SEQ ID NO: 703006 - DNA, 33 bp, Homo sapien
cttgtttcattactacggaatttcatcacttct

SEQ ID NO: 703007 - DNA, 33 bp, Homo sapien
aagtcagaggcataatcaagagttatttaggtc

SEQ ID NO: 703008 - DNA, 33 bp, Homo sapien
aagtcagaggcataatgaagagttatttaggtc

SEQ ID NO: 703009 - DNA, 33 bp, Homo sapien
aatatatacagaaaaagatctcttggttagaaa

SEQ ID NO: 703010 - DNA, 33 bp, Homo sapien
aatatatacagaaaaatatctcttggttagaaa

SEQ ID NO: 703011 - DNA, 33 bp, Homo sapien
aaccaccataccatgtaacacaatagctgtatc

SEQ ID NO: 703012 - DNA, 33 bp, Homo sapien
aaccaccataccatgttacacaatagctgtatc

SEQ ID NO: 703013 - DNA, 33 bp, Homo sapien
atggacttggtgtaagcaaatgttcactcaaca

SEQ ID NO: 703014 - DNA, 33 bp, Homo sapien
atggacttggtgtaagtaaatgttcactcaaca

SEQ ID NO: 703015 - DNA, 33 bp, Homo sapien
atcgacatttgttgaactgaattcaatgcccag

SEQ ID NO: 703016 - DNA, 33 bp, Homo sapien
atcgacatttgttgaagtgaattcaatgcccag

SEQ ID NO: 703017 - DNA, 33 bp, Homo sapien
aacatttgtcagaatacgtggccaagaatgtac

SEQ ID NO: 703018 - DNA, 33 bp, Homo sapien
aacatttgtcagaatatgtggccaagaatgtac

SEQ ID NO: 703019 - DNA, 33 bp, Homo sapien
gtgctgacttcatctcaccaggcagaagtttcc

SEQ ID NO: 703020 - DNA, 33 bp, Homo sapien
gtgctgacttcatctcgccaggcagaagtttcc

SEQ ID NO: 703021 - DNA, 33 bp, Homo sapien
tttctcaaaaagacaaaatccaacctggtcact

SEQ ID NO: 703022 - DNA, 33 bp, Homo sapien
tttctcaaaaagacaacatccaacctggtcact

SEQ ID NO: 703023 - DNA, 33 bp, Homo sapien
ctctcagtgaaaaagccaaaagtaagaagaaaa

SEQ ID NO: 703024 - DNA, 33 bp, Homo sapien
ctctcagtgaaaaagctaaaagtaagaagaaaa

SEQ ID NO: 703025 - DNA, 33 bp, Homo sapien
aatgtgtacttctctgcagtcacctcccacact

SEQ ID NO: 703026 - DNA, 33 bp, Homo sapien
aatgtgtacttctctgtagtcacctcccacact

SEQ ID NO: 703027 - DNA, 33 bp, Homo sapien
ttgttggccgcataaaggtcctcttctgagaaa

SEQ ID NO: 703028 - DNA, 33 bp, Homo sapien
ttgttggccgcataaatgtcctcttctgagaaa

SEQ ID NO: 703029 - DNA, 33 bp, Homo sapien
catccttttccaggtacacattcttaatctcca

SEQ ID NO: 703030 - DNA, 33 bp, Homo sapien
catccttttccaggtagacattcttaatctcca

SEQ ID NO: 703031 - DNA, 33 bp, Homo sapien
acttacagactttgtgaatgatttgtcttccac

SEQ ID NO: 703032 - DNA, 33 bp, Homo sapien
acttacagactttgtgcatgatttgtcttccac

SEQ ID NO: 703033 - DNA, 33 bp, Homo sapien
taagactttagctttgcatgacagaaaggttag

SEQ ID NO: 703034 - DNA, 33 bp, Homo sapien
taagactttagctttgtatgacagaaaggttag

SEQ ID NO: 703035 - DNA, 33 bp, Homo sapien
ttagggacactggcgaaagttgtctgcacatgt

SEQ ID NO: 703036 - DNA, 33 bp, Homo sapien
ttagggacactggcgagagttgtctgcacatgt

SEQ ID NO: 703037 - DNA, 33 bp, Homo sapien
tgcccttacctggagaccttgcccttaggaaag

SEQ ID NO: 703038 - DNA, 33 bp, Homo sapien
tgcccttacctggagagcttgcccttaggaaag

SEQ ID NO: 703039 - DNA, 33 bp, Homo sapien
aagccctctcacaaccaaagtacaactgttgat

SEQ ID NO: 703040 - DNA, 33 bp, Homo sapien
aagccctctcacaaccgaagtacaactgttgat

SEQ ID NO: 703041 - DNA, 33 bp, Homo sapien
ccctttcctctagatgcatgcataagaccagct

SEQ ID NO: 703042 - DNA, 33 bp, Homo sapien
ccctttcctctagatgtatgcataagaccagct

SEQ ID NO: 703043 - DNA, 33 bp, Homo sapien
gatgaagtaagcttggacagctgagttctaaag

SEQ ID NO: 703044 - DNA, 33 bp, Homo sapien
gatgaagtaagcttggccagctgagttctaaag

SEQ ID NO: 703045 - DNA, 33 bp, Homo sapien
actttctagtacctgccgactagttccccagaa

SEQ ID NO: 703046 - DNA, 33 bp, Homo sapien
actttctagtacctgctgactagttccccagaa

SEQ ID NO: 703047 - DNA, 33 bp, Homo sapien
ttagactctctggatgaagttattcaaggccag

SEQ ID NO: 703048 - DNA, 33 bp, Homo sapien
ttagactctctggatggagttattcaaggccag

SEQ ID NO: 703049 - DNA, 33 bp, Homo sapien
ctcacatacgatgtcaaagaaaagaaactatgg

SEQ ID NO: 703050 - DNA, 33 bp, Homo sapien
ctcacatacgatgtcagagaaaagaaactatgg

SEQ ID NO: 703051 - DNA, 33 bp, Homo sapien
cttttttgtgtatctcaaagctagtgagtgcct

SEQ ID NO: 703052 - DNA, 33 bp, Homo sapien
cttttttgtgtatctctaagctagtgagtgcct

SEQ ID NO: 703053 - DNA, 33 bp, Homo sapien
ccctattgacgtggtaacattttggatatattg

SEQ ID NO: 703054 - DNA, 33 bp, Homo sapien
ccctattgacgtggtaccattttggatatattg

SEQ ID NO: 703055 - DNA, 33 bp, Homo sapien
gggaaacttgagctgacacaaaatgcaaaaagg

SEQ ID NO: 703056 - DNA, 33 bp, Homo sapien
gggaaacttgagctgatacaaaatgcaaaaagg

SEQ ID NO: 703057 - DNA, 33 bp, Homo sapien
taacctaaagcattcaaggaaaacaatatgccc

SEQ ID NO: 703058 - DNA, 33 bp, Homo sapien
taacctaaagcattcagggaaaacaatatgccc

SEQ ID NO: 703059 - DNA, 33 bp, Homo sapien
atgtgaaaagcacaaaacaatttcagcctagtt

SEQ ID NO: 703060 - DNA, 33 bp, Homo sapien
atgtgaaaagcacaaagcaatttcagcctagtt

SEQ ID NO: 703061 - DNA, 33 bp, Homo sapien
agctgtagcatattaaataaaaaagcaaccttc

SEQ ID NO: 703062 - DNA, 33 bp, Homo sapien
agctgtagcatattaagtaaaaaagcaaccttc

SEQ ID NO: 703063 - DNA, 33 bp, Homo sapien
ctcctttcccaactgccgaagtgttagcctaat

SEQ ID NO: 703064 - DNA, 33 bp, Homo sapien
ctcctttcccaactgctgaagtgttagcctaat

SEQ ID NO: 703065 - DNA, 33 bp, Homo sapien
ccacttttcttccatacaggtccataaacctga

SEQ ID NO: 703066 - DNA, 33 bp, Homo sapien
ccacttttcttccatataggtccataaacctga

SEQ ID NO: 703067 - DNA, 33 bp, Homo sapien
agggaatgagtagcaacgagtagctgtaagaaa

SEQ ID NO: 703068 - DNA, 33 bp, Homo sapien
agggaatgagtagcaatgagtagctgtaagaaa

SEQ ID NO: 703069 - DNA, 33 bp, Homo sapien
ttgttatggaaaccctaagacatcaatacaccc

SEQ ID NO: 703070 - DNA, 33 bp, Homo sapien
ttgttatggaaaccctgagacatcaatacaccc

SEQ ID NO: 703071 - DNA, 33 bp, Homo sapien
catcactgtgcgagcaacatagagcatactgac

SEQ ID NO: 703072 - DNA, 33 bp, Homo sapien
catcactgtgcgagcatcatagagcatactgac

SEQ ID NO: 703073 - DNA, 33 bp, Homo sapien
tcagaaagctcacaagacttaacttttgcttgc

SEQ ID NO: 703074 - DNA, 33 bp, Homo sapien
tcagaaagctcacaagccttaacttttgcttgc

SEQ ID NO: 703075 - DNA, 33 bp, Homo sapien
tgtgagagagacttatcagcaggggcagaggca

SEQ ID NO: 703076 - DNA, 33 bp, Homo sapien
tgtgagagagacttattagcaggggcagaggca

SEQ ID NO: 703077 - DNA, 33 bp, Homo sapien
ttgtaaagcaaagtgaaaaacaacagctgctcg

SEQ ID NO: 703078 - DNA, 33 bp, Homo sapien
ttgtaaagcaaagtgagaaacaacagctgctcg

SEQ ID NO: 703079 - DNA, 33 bp, Homo sapien
agattcaaacttaatgcaagaaactgaggctca

SEQ ID NO: 703080 - DNA, 33 bp, Homo sapien
agattcaaacttaatggaagaaactgaggctca

SEQ ID NO: 703081 - DNA, 33 bp, Homo sapien
gcctcaaacagtttcaagcataatcactgctaa

SEQ ID NO: 703082 - DNA, 33 bp, Homo sapien
gcctcaaacagtttcaggcataatcactgctaa

SEQ ID NO: 703083 - DNA, 33 bp, Homo sapien
tgaatcagagctctgggatggaataatagaaaa

SEQ ID NO: 703084 - DNA, 33 bp, Homo sapien
tgaatcagagctctggtatggaataatagaaaa

SEQ ID NO: 703085 - DNA, 33 bp, Homo sapien
aaatttggaatgataacccttcatggtttctat

SEQ ID NO: 703086 - DNA, 33 bp, Homo sapien
aaatttggaatgataatccttcatggtttctat

SEQ ID NO: 703087 - DNA, 33 bp, Homo sapien
aataaattcttcctgaacctgttggatgtgttc

SEQ ID NO: 703088 - DNA, 33 bp, Homo sapien
aataaattcttcctgatcctgttggatgtgttc

SEQ ID NO: 703089 - DNA, 33 bp, Homo sapien
tttatgacttatagagaccccgtggtagagagt

SEQ ID NO: 703090 - DNA, 33 bp, Homo sapien
tttatgacttatagagcccccgtggtagagagt

SEQ ID NO: 703091 - DNA, 33 bp, Homo sapien
gatccattagacagtcactgactcacctatcag

SEQ ID NO: 703092 - DNA, 33 bp, Homo sapien
gatccattagacagtcgctgactcacctatcag

SEQ ID NO: 703093 - DNA, 33 bp, Homo sapien
agtttgcctttgcaaaagagtaatctacaggac

SEQ ID NO: 703094 - DNA, 33 bp, Homo sapien
agtttgcctttgcaaaggagtaatctacaggac

SEQ ID NO: 703095 - DNA, 33 bp, Homo sapien
tttatttttccatcacacttcatcacctgctta

SEQ ID NO: 703096 - DNA, 33 bp, Homo sapien
tttatttttccatcacgcttcatcacctgctta

SEQ ID NO: 703097 - DNA, 33 bp, Homo sapien
cctgtgctcagctcacagataggggctgggcct

SEQ ID NO: 703098 - DNA, 33 bp, Homo sapien
cctgtgctcagctcacggataggggctgggcct

SEQ ID NO: 703099 - DNA, 33 bp, Homo sapien
cttctattacaatagaagaacaggagaatgcgt

SEQ ID NO: 703100 - DNA, 33 bp, Homo sapien
cttctattacaatagaggaacaggagaatgcgt

SEQ ID NO: 703101 - DNA, 33 bp, Homo sapien
aatatctgccaagcgaaatcactttctctgaaa

SEQ ID NO: 703102 - DNA, 33 bp, Homo sapien
aatatctgccaagcgacatcactttctctgaaa

SEQ ID NO: 703103 - DNA, 33 bp, Homo sapien
aacaaaactgcttgtcaccatctaatgaaagaa

SEQ ID NO: 703104 - DNA, 33 bp, Homo sapien
aacaaaactgcttgtcgccatctaatgaaagaa

SEQ ID NO: 703105 - DNA, 33 bp, Homo sapien
attgtggtgctgggggacagatagcattaggat

SEQ ID NO: 703106 - DNA, 33 bp, Homo sapien
attgtggtgctgggggtcagatagcattaggat

SEQ ID NO: 703107 - DNA, 33 bp, Homo sapien
tttattctttaacacaatggaataaccctttgt

SEQ ID NO: 703108 - DNA, 33 bp, Homo sapien
tttattctttaacacattggaataaccctttgt

SEQ ID NO: 703109 - DNA, 33 bp, Homo sapien
tactagaggacaagtcaaagagcttcaacatct

SEQ ID NO: 703110 - DNA, 33 bp, Homo sapien
tactagaggacaagtcgaagagcttcaacatct

SEQ ID NO: 703111 - DNA, 33 bp, Homo sapien
caaccaacatctaagaagtccaaactcctctct

SEQ ID NO: 703112 - DNA, 33 bp, Homo sapien
caaccaacatctaagaggtccaaactcctctct

SEQ ID NO: 703113 - DNA, 33 bp, Homo sapien
atgttccttctttgataagacttttgaggtcta

SEQ ID NO: 703114 - DNA, 33 bp, Homo sapien
atgttccttctttgatcagacttttgaggtcta

SEQ ID NO: 703115 - DNA, 33 bp, Homo sapien
agagtcccaaacctcaaattctcatttcccaat

SEQ ID NO: 703116 - DNA, 33 bp, Homo sapien
agagtcccaaacctcagattctcatttcccaat

SEQ ID NO: 703117 - DNA, 33 bp, Homo sapien
ctccctgtaattgacaaaaacaaagtatagcct

SEQ ID NO: 703118 - DNA, 33 bp, Homo sapien
ctccctgtaattgacagaaacaaagtatagcct

SEQ ID NO: 703119 - DNA, 33 bp, Homo sapien
tcagcctatggatgaacatggaacatggaagac

SEQ ID NO: 703120 - DNA, 33 bp, Homo sapien
tcagcctatggatgaagatggaacatggaagac

SEQ ID NO: 703121 - DNA, 33 bp, Homo sapien
tgctatggggagacaccgcttgaggttcagtaa

SEQ ID NO: 703122 - DNA, 33 bp, Homo sapien
tgctatggggagacactgcttgaggttcagtaa

SEQ ID NO: 703123 - DNA, 33 bp, Homo sapien
taaggtccttcaaacagtgacatcactcctacc

SEQ ID NO: 703124 - DNA, 33 bp, Homo sapien
taaggtccttcaaacattgacatcactcctacc

SEQ ID NO: 703125 - DNA, 33 bp, Homo sapien
cttccatgtcaaatcaaacttacttcctagagg

SEQ ID NO: 703126 - DNA, 33 bp, Homo sapien
cttccatgtcaaatcacacttacttcctagagg

SEQ ID NO: 703127 - DNA, 33 bp, Homo sapien
acatccacttatacggaaagacgctgagtaacg

SEQ ID NO: 703128 - DNA, 33 bp, Homo sapien
acatccacttatacggcaagacgctgagtaacg

SEQ ID NO: 703129 - DNA, 33 bp, Homo sapien
agaaaagccagaaatccagagttgtatgcaaat

SEQ ID NO: 703130 - DNA, 33 bp, Homo sapien
agaaaagccagaaatcgagagttgtatgcaaat

SEQ ID NO: 703131 - DNA, 33 bp, Homo sapien
cacagggtgtccacaactctttgcacccatgcc

SEQ ID NO: 703132 - DNA, 33 bp, Homo sapien
cacagggtgtccacaattctttgcacccatgcc

SEQ ID NO: 703133 - DNA, 33 bp, Homo sapien
tcatgaaatcaaagaacggctgactagtttaac

SEQ ID NO: 703134 - DNA, 33 bp, Homo sapien
tcatgaaatcaaagaatggctgactagtttaac

SEQ ID NO: 703135 - DNA, 33 bp, Homo sapien
aaagtgagatggaagaaaagaagatattggagg

SEQ ID NO: 703136 - DNA, 33 bp, Homo sapien
aaagtgagatggaagataagaagatattggagg

SEQ ID NO: 703137 - DNA, 33 bp, Homo sapien
actgacttagatgctacagaatctgatggtagt

SEQ ID NO: 703138 - DNA, 33 bp, Homo sapien
actgacttagatgctatagaatctgatggtagt

SEQ ID NO: 703139 - DNA, 33 bp, Homo sapien
cactgggatgaaggcaatcaagcatgaggtcat

SEQ ID NO: 703140 - DNA, 33 bp, Homo sapien
cactgggatgaaggcactcaagcatgaggtcat

SEQ ID NO: 703141 - DNA, 33 bp, Homo sapien
aaggccagataggtgaaataattgcagacatac

SEQ ID NO: 703142 - DNA, 33 bp, Homo sapien
aaggccagataggtgagataattgcagacatac

SEQ ID NO: 703143 - DNA, 33 bp, Homo sapien
gtcctagaggaccctgaagagagttggtcaagt

SEQ ID NO: 703144 - DNA, 33 bp, Homo sapien
gtcctagaggaccctggagagagttggtcaagt

SEQ ID NO: 703145 - DNA, 33 bp, Homo sapien
tggtctctcctttccacgcaaaaaggggcacag

SEQ ID NO: 703146 - DNA, 33 bp, Homo sapien
tggtctctcctttccatgcaaaaaggggcacag

SEQ ID NO: 703147 - DNA, 33 bp, Homo sapien
ctgtttgattttccccaagtaccatgcagttta

SEQ ID NO: 703148 - DNA, 33 bp, Homo sapien
ctgtttgattttccccgagtaccatgcagttta

SEQ ID NO: 703149 - DNA, 33 bp, Homo sapien
ttcctggagaggtttagccgatcatactgaaaa

SEQ ID NO: 703150 - DNA, 33 bp, Homo sapien
ttcctggagaggtttatccgatcatactgaaaa

SEQ ID NO: 703151 - DNA, 33 bp, Homo sapien
gcttaaacagatgtaacgaagttttgtggtaga

SEQ ID NO: 703152 - DNA, 33 bp, Homo sapien
gcttaaacagatgtaatgaagttttgtggtaga

SEQ ID NO: 703153 - DNA, 33 bp, Homo sapien
gctgggtggtcagtgaacccatttcctggaatg

SEQ ID NO: 703154 - DNA, 33 bp, Homo sapien
gctgggtggtcagtgatcccatttcctggaatg

SEQ ID NO: 703155 - DNA, 33 bp, Homo sapien
aagtgagtcatcaagacagcaaagaacttcaga

SEQ ID NO: 703156 - DNA, 33 bp, Homo sapien
aagtgagtcatcaagatagcaaagaacttcaga

SEQ ID NO: 703157 - DNA, 33 bp, Homo sapien
gtgaagctgatatggacgttgagcatttagagg

SEQ ID NO: 703158 - DNA, 33 bp, Homo sapien
gtgaagctgatatggatgttgagcatttagagg

SEQ ID NO: 703159 - DNA, 33 bp, Homo sapien
attgctcacttgtgacaaagcatcctggcgctg

SEQ ID NO: 703160 - DNA, 33 bp, Homo sapien
attgctcacttgtgacgaagcatcctggcgctg

SEQ ID NO: 703161 - DNA, 33 bp, Homo sapien
tactggcagggagcacagcaagtgagtaagcag

SEQ ID NO: 703162 - DNA, 33 bp, Homo sapien
tactggcagggagcacggcaagtgagtaagcag

SEQ ID NO: 703163 - DNA, 33 bp, Homo sapien
tgctgttctaggttagcatgtctccccctctgc

SEQ ID NO: 703164 - DNA, 33 bp, Homo sapien
tgctgttctaggttagtatgtctccccctctgc

SEQ ID NO: 703165 - DNA, 33 bp, Homo sapien
gacacatgtggataataaacaatccttcccctt

SEQ ID NO: 703166 - DNA, 33 bp, Homo sapien
gacacatgtggataatgaacaatccttcccctt

SEQ ID NO: 703167 - DNA, 33 bp, Homo sapien
gtaagaacgctgtagagtcactcactcaaagtc

SEQ ID NO: 703168 - DNA, 33 bp, Homo sapien
gtaagaacgctgtagattcactcactcaaagtc

SEQ ID NO: 703169 - DNA, 33 bp, Homo sapien
tttgtccaaaaaaaaacgctatccaatacagta

SEQ ID NO: 703170 - DNA, 33 bp, Homo sapien
tttgtccaaaaaaaaatgctatccaatacagta

SEQ ID NO: 703171 - DNA, 33 bp, Homo sapien
tgaaaagaaggctatacagagagaacactggga

SEQ ID NO: 703172 - DNA, 33 bp, Homo sapien
tgaaaagaaggctatatagagagaacactggga

SEQ ID NO: 703173 - DNA, 33 bp, Homo sapien
aactggcaagtatgcaagtcactgataaatgca

SEQ ID NO: 703174 - DNA, 33 bp, Homo sapien
aactggcaagtatgcaggtcactgataaatgca

SEQ ID NO: 703175 - DNA, 33 bp, Homo sapien
cctagaagggtaagtcactgaacttaagtcaat

SEQ ID NO: 703176 - DNA, 33 bp, Homo sapien
cctagaagggtaagtcgctgaacttaagtcaat

SEQ ID NO: 703177 - DNA, 33 bp, Homo sapien
agatgaaaatacaagactagtctcctcacctca

SEQ ID NO: 703178 - DNA, 33 bp, Homo sapien
agatgaaaatacaagagtagtctcctcacctca

SEQ ID NO: 703179 - DNA, 33 bp, Homo sapien
gtacttagctctcttcactaccatcttttaagt

SEQ ID NO: 703180 - DNA, 33 bp, Homo sapien
gtacttagctctcttcgctaccatcttttaagt

SEQ ID NO: 703181 - DNA, 33 bp, Homo sapien
agaccagaaagaacaaacagaggactcctggaa

SEQ ID NO: 703182 - DNA, 33 bp, Homo sapien
agaccagaaagaacaaccagaggactcctggaa

SEQ ID NO: 703183 - DNA, 33 bp, Homo sapien
gaaggctttaacttcaaatgtaactggaaactg

SEQ ID NO: 703184 - DNA, 33 bp, Homo sapien
gaaggctttaacttcagatgtaactggaaactg

SEQ ID NO: 703185 - DNA, 33 bp, Homo sapien
ggtttcccagtgagaaataagttagccaggaag

SEQ ID NO: 703186 - DNA, 33 bp, Homo sapien
ggtttcccagtgagaagtaagttagccaggaag

SEQ ID NO: 703187 - DNA, 33 bp, Homo sapien
aagccgctccgaggaacagggtaaacaaacagg

SEQ ID NO: 703188 - DNA, 33 bp, Homo sapien
aagccgctccgaggaagagggtaaacaaacagg

SEQ ID NO: 703189 - DNA, 33 bp, Homo sapien
gaacaaacatatgcccagaaaccgagggataga

SEQ ID NO: 703190 - DNA, 33 bp, Homo sapien
gaacaaacatatgcccggaaaccgagggataga

SEQ ID NO: 703191 - DNA, 33 bp, Homo sapien
tgctcacgggagcctccgagagtttctcttggt

SEQ ID NO: 703192 - DNA, 33 bp, Homo sapien
tgctcacgggagcctctgagagtttctcttggt

SEQ ID NO: 703193 - DNA, 33 bp, Homo sapien
tgtttctgtttttcaagtggggcataatggaaa

SEQ ID NO: 703194 - DNA, 33 bp, Homo sapien
tgtttctgtttttcaattggggcataatggaaa

SEQ ID NO: 703195 - DNA, 33 bp, Homo sapien
tgttgccctctgtgaccgcttttagttagaacc

SEQ ID NO: 703196 - DNA, 33 bp, Homo sapien
tgttgccctctgtgactgcttttagttagaacc

SEQ ID NO: 703197 - DNA, 33 bp, Homo sapien
taaagggcccttaaaaacaactctgctgattat

SEQ ID NO: 703198 - DNA, 33 bp, Homo sapien
taaagggcccttaaaaccaactctgctgattat

SEQ ID NO: 703199 - DNA, 33 bp, Homo sapien
tagaccaccttttgtagaagaatttggcctatt

SEQ ID NO: 703200 - DNA, 33 bp, Homo sapien
tagaccaccttttgtataagaatttggcctatt

SEQ ID NO: 703201 - DNA, 33 bp, Homo sapien
ttcttcagaaagaatcacacaagtacaaagatg

SEQ ID NO: 703202 - DNA, 33 bp, Homo sapien
ttcttcagaaagaatcgcacaagtacaaagatg

SEQ ID NO: 703203 - DNA, 33 bp, Homo sapien
gaaacattttcatctcaccaaagtaaaattcct

SEQ ID NO: 703204 - DNA, 33 bp, Homo sapien
gaaacattttcatctcgccaaagtaaaattcct

SEQ ID NO: 703205 - DNA, 33 bp, Homo sapien
actgagaatgctctacacagttttcttttggaa

SEQ ID NO: 703206 - DNA, 33 bp, Homo sapien
actgagaatgctctacgcagttttcttttggaa

SEQ ID NO: 703207 - DNA, 33 bp, Homo sapien
caagacagttatttgccaagaagtaaaagagag

SEQ ID NO: 703208 - DNA, 33 bp, Homo sapien
caagacagttatttgctaagaagtaaaagagag

SEQ ID NO: 703209 - DNA, 33 bp, Homo sapien
taaccaactacctagaccttcactgcataccac

SEQ ID NO: 703210 - DNA, 33 bp, Homo sapien
taaccaactacctagatcttcactgcataccac

SEQ ID NO: 703211 - DNA, 33 bp, Homo sapien
acaagttcagcccagacgcaaaggatgggcaac

SEQ ID NO: 703212 - DNA, 33 bp, Homo sapien
acaagttcagcccagatgcaaaggatgggcaac

SEQ ID NO: 703213 - DNA, 33 bp, Homo sapien
caagagatgtttagcacgtagaattgagaggat

SEQ ID NO: 703214 - DNA, 33 bp, Homo sapien
caagagatgtttagcatgtagaattgagaggat

SEQ ID NO: 703215 - DNA, 33 bp, Homo sapien
caaagctatcatcttcccctcaaactaaatcta

SEQ ID NO: 703216 - DNA, 33 bp, Homo sapien
caaagctatcatcttctcctcaaactaaatcta

SEQ ID NO: 703217 - DNA, 33 bp, Homo sapien
ataaatataatttgcaaagaggggtaagagaac

SEQ ID NO: 703218 - DNA, 33 bp, Homo sapien
ataaatataatttgcagagaggggtaagagaac

SEQ ID NO: 703219 - DNA, 33 bp, Homo sapien
atgcatatgtcatggaagatgaatgtttcccaa

SEQ ID NO: 703220 - DNA, 33 bp, Homo sapien
atgcatatgtcatggaggatgaatgtttcccaa

SEQ ID NO: 703221 - DNA, 33 bp, Homo sapien
ggcagctcagaaaacactcttcgttttccttcc

SEQ ID NO: 703222 - DNA, 33 bp, Homo sapien
ggcagctcagaaaacagtcttcgttttccttcc

SEQ ID NO: 703223 - DNA, 33 bp, Homo sapien
ttccctcacagccctaagataagaatcaggcca

SEQ ID NO: 703224 - DNA, 33 bp, Homo sapien
ttccctcacagccctacgataagaatcaggcca

SEQ ID NO: 703225 - DNA, 33 bp, Homo sapien
aatataagtaactgaaactacaaattctgagaa

SEQ ID NO: 703226 - DNA, 33 bp, Homo sapien
aatataagtaactgaagctacaaattctgagaa

SEQ ID NO: 703227 - DNA, 33 bp, Homo sapien
tttcctcacctattagacctgtagtgaggctct

SEQ ID NO: 703228 - DNA, 33 bp, Homo sapien
tttcctcacctattagtcctgtagtgaggctct

SEQ ID NO: 703229 - DNA, 33 bp, Homo sapien
ctgaggagtgtttttcactggccagaccccacc

SEQ ID NO: 703230 - DNA, 33 bp, Homo sapien
ctgaggagtgtttttccctggccagaccccacc

SEQ ID NO: 703231 - DNA, 33 bp, Homo sapien
cctcctgtaaatgacacacattgttggaagttt

SEQ ID NO: 703232 - DNA, 33 bp, Homo sapien
cctcctgtaaatgacatacattgttggaagttt

SEQ ID NO: 703233 - DNA, 33 bp, Homo sapien
ttgaatcaatcagcccagatggacatgaatata

SEQ ID NO: 703234 - DNA, 33 bp, Homo sapien
ttgaatcaatcagcccggatggacatgaatata

SEQ ID NO: 703235 - DNA, 33 bp, Homo sapien
tcttctgtattttgcaatgagaccggtggataa

SEQ ID NO: 703236 - DNA, 33 bp, Homo sapien
tcttctgtattttgcagtgagaccggtggataa

SEQ ID NO: 703237 - DNA, 33 bp, Homo sapien
cagtctagttcccaggcaaaaagagggtttgtt

SEQ ID NO: 703238 - DNA, 33 bp, Homo sapien
cagtctagttcccagggaaaaagagggtttgtt

SEQ ID NO: 703239 - DNA, 33 bp, Homo sapien
ctgcagaccatatggcacagaaaaaaataagat

SEQ ID NO: 703240 - DNA, 33 bp, Homo sapien
ctgcagaccatatggcgcagaaaaaaataagat

SEQ ID NO: 703241 - DNA, 33 bp, Homo sapien
tggtaagtgaacctggaagcccacgtggtctct

SEQ ID NO: 703242 - DNA, 33 bp, Homo sapien
tggtaagtgaacctggcagcccacgtggtctct

SEQ ID NO: 703243 - DNA, 33 bp, Homo sapien
ttccttgtgccaggagaacgttgcgagcagcca

SEQ ID NO: 703244 - DNA, 33 bp, Homo sapien
ttccttgtgccaggaggacgttgcgagcagcca

SEQ ID NO: 703245 - DNA, 33 bp, Homo sapien; identical to SEQ ID NO: 703243

SEQ ID NO: 703246 - DNA, 33 bp, Homo sapien; identical to SEQ ID NO: 703244

SEQ ID NO: 703247 - DNA, 33 bp, Homo sapien
aatagctttagtgaatcaaatttagttgagcat

SEQ ID NO: 703248 - DNA, 33 bp, Homo sapien
aatagctttagtgaattaaatttagttgagcat

SEQ ID NO: 703249 - DNA, 33 bp, Homo sapien
ccaagatagcacaagacaaatgacttttaaaaa

SEQ ID NO: 703250 - DNA, 33 bp, Homo sapien
ccaagatagcacaagataaatgacttttaaaaa

SEQ ID NO: 703251 - DNA, 33 bp, Homo sapien
tggatgatcaaatgagccaaaggcagcacttcc

SEQ ID NO: 703252 - DNA, 33 bp, Homo sapien
tggatgatcaaatgagtcaaaggcagcacttcc

SEQ ID NO: 703253 - DNA, 33 bp, Homo sapien
tttctactgcatgtcaagaaagtgaccatgaaa

SEQ ID NO: 703254 - DNA, 33 bp, Homo sapien
tttctactgcatgtcaggaaagtgaccatgaaa

SEQ ID NO: 703255 - DNA, 33 bp, Homo sapien
caaatatggagaattactaacattggcctgggc

SEQ ID NO: 703256 - DNA, 33 bp, Homo sapien
caaatatggagaattagtaacattggcctgggc

SEQ ID NO: 703257 - DNA, 33 bp, Homo sapien
cctatatgtgacactaagttcctgatttcttat

SEQ ID NO: 703258 - DNA, 33 bp, Homo sapien
cctatatgtgacactaggttcctgatttcttat

SEQ ID NO: 703259 - DNA, 33 bp, Homo sapien
accataaacagactgtaaattttaatccaggct

SEQ ID NO: 703260 - DNA, 33 bp, Homo sapien
accataaacagactgtgaattttaatccaggct

SEQ ID NO: 703261 - DNA, 33 bp, Homo sapien
aggggaatggatctgactaaagggatgttcaag

SEQ ID NO: 703262 - DNA, 33 bp, Homo sapien
aggggaatggatctgattaaagggatgttcaag

SEQ ID NO: 703263 - DNA, 33 bp, Homo sapien
aaccactgcacctggcaagatcgatttaaaaaa

SEQ ID NO: 703264 - DNA, 33 bp, Homo sapien
aaccactgcacctggcgagatcgatttaaaaaa

SEQ ID NO: 703265 - DNA, 33 bp, Homo sapien
gagtgtggccaaaacacgtgagacattcccaaa

SEQ ID NO: 703266 - DNA, 33 bp, Homo sapien
gagtgtggccaaaacatgtgagacattcccaaa

SEQ ID NO: 703267 - DNA, 33 bp, Homo sapien
ctaagccaatgagatccaagacttcagggtcag

SEQ ID NO: 703268 - DNA, 33 bp, Homo sapien
ctaagccaatgagatctaagacttcagggtcag

SEQ ID NO: 703269 - DNA, 33 bp, Homo sapien
gcttcgcttgtctctcactacagaattgctgag

SEQ ID NO: 703270 - DNA, 33 bp, Homo sapien
gcttcgcttgtctctcgctacagaattgctgag

SEQ ID NO: 703271 - DNA, 33 bp, Homo sapien
gccccagatcctttccaaacggtgagtagggag

SEQ ID NO: 703272 - DNA, 33 bp, Homo sapien
gccccagatcctttccgaacggtgagtagggag

SEQ ID NO: 703273 - DNA, 33 bp, Homo sapien
tgagatgtcagaaacacagcactcaaagggaaa

SEQ ID NO: 703274 - DNA, 33 bp, Homo sapien
tgagatgtcagaaacatagcactcaaagggaaa

SEQ ID NO: 703275 - DNA, 33 bp, Homo sapien
aggatactgttttcctcaaatagcagccctagc

SEQ ID NO: 703276 - DNA, 33 bp, Homo sapien
aggatactgttttcctgaaatagcagccctagc

SEQ ID NO: 703277 - DNA, 33 bp, Homo sapien
ggtacactctactatgcatgcacagccacaggt

SEQ ID NO: 703278 - DNA, 33 bp, Homo sapien
ggtacactctactatgtatgcacagccacaggt

SEQ ID NO: 703279 - DNA, 33 bp, Homo sapien
agaacaaaagatagacacgtgagtcagacagat

SEQ ID NO: 703280 - DNA, 33 bp, Homo sapien
agaacaaaagatagacgcgtgagtcagacagat

SEQ ID NO: 703281 - DNA, 33 bp, Homo sapien
tcttcctttcagcaaaattgattaagaaaacat

SEQ ID NO: 703282 - DNA, 33 bp, Homo sapien
tcttcctttcagcaaagttgattaagaaaacat

SEQ ID NO: 703283 - DNA, 33 bp, Homo sapien
gaaattacaacctagacaaatgctaagaaacgg

SEQ ID NO: 703284 - DNA, 33 bp, Homo sapien
gaaattacaacctagataaatgctaagaaacgg

SEQ ID NO: 703285 - DNA, 33 bp, Homo sapien
acagcacagtgcaaaaatcctgtttcggtctct

SEQ ID NO: 703286 - DNA, 33 bp, Homo sapien
acagcacagtgcaaaagtcctgtttcggtctct

SEQ ID NO: 703287 - DNA, 33 bp, Homo sapien
gctcattttcctgaaaccgtggagctcctctcc

SEQ ID NO: 703288 - DNA, 33 bp, Homo sapien
gctcattttcctgaaagcgtggagctcctctcc

SEQ ID NO: 703289 - DNA, 33 bp, Homo sapien
tgctgagttgtcgagaaaagattttcattctga

SEQ ID NO: 703290 - DNA, 33 bp, Homo sapien
tgctgagttgtcgagagaagattttcattctga

SEQ ID NO: 703291 - DNA, 33 bp, Homo sapien
caaagtgagaatttgacagaagagaccctcaaa

SEQ ID NO: 703292 - DNA, 33 bp, Homo sapien
caaagtgagaatttgagagaagagaccctcaaa

SEQ ID NO: 703293 - DNA, 33 bp, Homo sapien
ggtttccagggtcatgaaaacaagcatggtaga

SEQ ID NO: 703294 - DNA, 33 bp, Homo sapien
ggtttccagggtcatgcaaacaagcatggtaga

SEQ ID NO: 703295 - DNA, 33 bp, Homo sapien
caaattgtgtggattacagcactattaatagct

SEQ ID NO: 703296 - DNA, 33 bp, Homo sapien
caaattgtgtggattagagcactattaatagct

SEQ ID NO: 703297 - DNA, 33 bp, Homo sapien
tgtgatcacgtgactaaccttgaaccaatcacg

SEQ ID NO: 703298 - DNA, 33 bp, Homo sapien
tgtgatcacgtgactatccttgaaccaatcacg

SEQ ID NO: 703299 - DNA, 33 bp, Homo sapien
ttcactaatgataagcaatgtaccacactaaca

SEQ ID NO: 703300 - DNA, 33 bp, Homo sapien
ttcactaatgataagcgatgtaccacactaaca

SEQ ID NO: 703301 - DNA, 33 bp, Homo sapien
acaatgtgtggtaatacgccttagatttgcata

SEQ ID NO: 703302 - DNA, 33 bp, Homo sapien
acaatgtgtggtaatatgccttagatttgcata

SEQ ID NO: 703303 - DNA, 33 bp, Homo sapien
gcagctggaaaattgccattcaaagagttgcag

SEQ ID NO: 703304 - DNA, 33 bp, Homo sapien
gcagctggaaaattgctattcaaagagttgcag

SEQ ID NO: 703305 - DNA, 33 bp, Homo sapien
aaactacaactttgaacgaaggtcattgcaacc

SEQ ID NO: 703306 - DNA, 33 bp, Homo sapien
aaactacaactttgaatgaaggtcattgcaacc

SEQ ID NO: 703307 - DNA, 33 bp, Homo sapien
gtcaaccttagatcctcagctgaaaaagtactt

SEQ ID NO: 703308 - DNA, 33 bp, Homo sapien
gtcaaccttagatccttagctgaaaaagtactt

SEQ ID NO: 703309 - DNA, 33 bp, Homo sapien
caaggacacttggaaaataagatacagaggcag

SEQ ID NO: 703310 - DNA, 33 bp, Homo sapien
caaggacacttggaaagtaagatacagaggcag

SEQ ID NO: 703311 - DNA, 33 bp, Homo sapien
gaagtatttgatgcaactcaaaaaaaatgacta

SEQ ID NO: 703312 - DNA, 33 bp, Homo sapien
gaagtatttgatgcaattcaaaaaaaatgacta

SEQ ID NO: 703313 - DNA, 33 bp, Homo sapien
ggcttttcccctggaactgtctactgtttgcag

SEQ ID NO: 703314 - DNA, 33 bp, Homo sapien
ggcttttcccctggaattgtctactgtttgcag

SEQ ID NO: 703315 - DNA, 33 bp, Homo sapien
agcacagagctgaacacagtatttcatattttg

SEQ ID NO: 703316 - DNA, 33 bp, Homo sapien
agcacagagctgaacagagtatttcatattttg

SEQ ID NO: 703317 - DNA, 33 bp, Homo sapien
ggaagattagatgtcaagataattagctctctg

SEQ ID NO: 703318 - DNA, 33 bp, Homo sapien
ggaagattagatgtcaggataattagctctctg

SEQ ID NO: 703319 - DNA, 33 bp, Homo sapien
atttgaaaagtagatagcctatgtggcagagag

SEQ ID NO: 703320 - DNA, 33 bp, Homo sapien
atttgaaaagtagatatcctatgtggcagagag

SEQ ID NO: 703321 - DNA, 33 bp, Homo sapien
cccataccaatgggacaggtaattatggcttct

SEQ ID NO: 703322 - DNA, 33 bp, Homo sapien
cccataccaatgggactggtaattatggcttct

SEQ ID NO: 703323 - DNA, 33 bp, Homo sapien
ggatataaagagattacagtgaacccagttccc

SEQ ID NO: 703324 - DNA, 33 bp, Homo sapien
ggatataaagagattatagtgaacccagttccc

SEQ ID NO: 703325 - DNA, 33 bp, Homo sapien
aataatacttttataacctcttaggcctgtctt

SEQ ID NO: 703326 - DNA, 33 bp, Homo sapien
aataatacttttataatctcttaggcctgtctt

SEQ ID NO: 703327 - DNA, 33 bp, Homo sapien
ccctaatctactccaaataaatgctatatcaag

SEQ ID NO: 703328 - DNA, 33 bp, Homo sapien
ccctaatctactccaagtaaatgctatatcaag

SEQ ID NO: 703329 - DNA, 33 bp, Homo sapien
ttcaacctgttcgagaaattggtggttgactgt

SEQ ID NO: 703330 - DNA, 33 bp, Homo sapien
ttcaacctgttcgagatattggtggttgactgt

SEQ ID NO: 703331 - DNA, 33 bp, Homo sapien
aagtctgaggcactccaagactattgtaaaact

SEQ ID NO: 703332 - DNA, 33 bp, Homo sapien
aagtctgaggcactccgagactattgtaaaact

SEQ ID NO: 703333 - DNA, 33 bp, Homo sapien
tcaatggaaactgaccccaaagacactaaaaga

SEQ ID NO: 703334 - DNA, 33 bp, Homo sapien
tcaatggaaactgacctcaaagacactaaaaga

SEQ ID NO: 703335 - DNA, 33 bp, Homo sapien
tttagagaagaacagactcacaattggctatga

SEQ ID NO: 703336 - DNA, 33 bp, Homo sapien
tttagagaagaacagagtcacaattggctatga

SEQ ID NO: 703337 - DNA, 33 bp, Homo sapien
cagctacttgggatgaagtcgagggctgaaatg

SEQ ID NO: 703338 - DNA, 33 bp, Homo sapien
cagctacttgggatgaggtcgagggctgaaatg

SEQ ID NO: 703339 - DNA, 33 bp, Homo sapien
tgatgtccaagctcagacagagtgaaggggagc

SEQ ID NO: 703340 - DNA, 33 bp, Homo sapien
tgatgtccaagctcaggcagagtgaaggggagc

SEQ ID NO: 703341 - DNA, 33 bp, Homo sapien
gttcatcatttagtataaacaggaaacagaaaa

SEQ ID NO: 703342 - DNA, 33 bp, Homo sapien
gttcatcatttagtattaacaggaaacagaaaa

SEQ ID NO: 703343 - DNA, 33 bp, Homo sapien
aaaaattcatcttgaaagctattatgtgccagc

SEQ ID NO: 703344 - DNA, 33 bp, Homo sapien
aaaaattcatcttgaacgctattatgtgccagc

SEQ ID NO: 703345 - DNA, 33 bp, Homo sapien
ttattgtttgttgtcgcaatcatcttcatttta

SEQ ID NO: 703346 - DNA, 33 bp, Homo sapien
ttattgtttgttgtcgtaatcatcttcatttta

SEQ ID NO: 703347 - DNA, 33 bp, Homo sapien
ttagggccttggataacgtggcctcctggtccc

SEQ ID NO: 703348 - DNA, 33 bp, Homo sapien
ttagggccttggataatgtggcctcctggtccc

SEQ ID NO: 703349 - DNA, 33 bp, Homo sapien
tttcctgaatgtcaagccttcttcaatttcata

SEQ ID NO: 703350 - DNA, 33 bp, Homo sapien
tttcctgaatgtcaagtcttcttcaatttcata

SEQ ID NO: 703351 - DNA, 33 bp, Homo sapien
gaggtggcggatgtaaacggtgattcctgacta

SEQ ID NO: 703352 - DNA, 33 bp, Homo sapien
gaggtggcggatgtaagcggtgattcctgacta

SEQ ID NO: 703353 - DNA, 33 bp, Homo sapien
ccctattcccatttgacggatgctgaaactgaa

SEQ ID NO: 703354 - DNA, 33 bp, Homo sapien
ccctattcccatttgatggatgctgaaactgaa

SEQ ID NO: 703355 - DNA, 33 bp, Homo sapien
ataacttcacctagcaactgtatttgtcaagaa

SEQ ID NO: 703356 - DNA, 33 bp, Homo sapien
ataacttcacctagcacctgtatttgtcaagaa

SEQ ID NO: 703357 - DNA, 33 bp, Homo sapien
gacatagaggaaagccaagctgagagatagaga

SEQ ID NO: 703358 - DNA, 33 bp, Homo sapien
gacatagaggaaagccgagctgagagatagaga

SEQ ID NO: 703359 - DNA, 33 bp, Homo sapien
tatccactggaatgtacgccacaaagacaggta

SEQ ID NO: 703360 - DNA, 33 bp, Homo sapien
tatccactggaatgtatgccacaaagacaggta

SEQ ID NO: 703361 - DNA, 33 bp, Homo sapien
ggctgaacacctgacaagcacattcaagaaaca

SEQ ID NO: 703362 - DNA, 33 bp, Homo sapien
ggctgaacacctgacaggcacattcaagaaaca

SEQ ID NO: 703363 - DNA, 33 bp, Homo sapien
acatgccttcagacacaccatatttcattgaat

SEQ ID NO: 703364 - DNA, 33 bp, Homo sapien
acatgccttcagacacgccatatttcattgaat

SEQ ID NO: 703365 - DNA, 33 bp, Homo sapien
aaagatacagagagaaagaaatatacagcagga

SEQ ID NO: 703366 - DNA, 33 bp, Homo sapien
aaagatacagagagaaggaaatatacagcagga

SEQ ID NO: 703367 - DNA, 33 bp, Homo sapien
gactgccaaaagccacagtcaggtggatagagg

SEQ ID NO: 703368 - DNA, 33 bp, Homo sapien
gactgccaaaagccacggtcaggtggatagagg

SEQ ID NO: 703369 - DNA, 33 bp, Homo sapien
ctcaaaaaaatctcaaaaaaagactatgtgggc

SEQ ID NO: 703370 - DNA, 33 bp, Homo sapien
ctcaaaaaaatctcaacaaaagactatgtgggc

SEQ ID NO: 703371 - DNA, 33 bp, Homo sapien
ctgtgttgtatgagcaaaattgtacttggatgc

SEQ ID NO: 703372 - DNA, 33 bp, Homo sapien
ctgtgttgtatgagcataattgtacttggatgc

SEQ ID NO: 703373 - DNA, 33 bp, Homo sapien
acgcaaagcaatgtacagattaggaattattat

SEQ ID NO: 703374 - DNA, 33 bp, Homo sapien
acgcaaagcaatgtacggattaggaattattat

SEQ ID NO: 703375 - DNA, 33 bp, Homo sapien
attcagttgtcacttacaatcttagcccatttt

SEQ ID NO: 703376 - DNA, 33 bp, Homo sapien
attcagttgtcacttataatcttagcccatttt

SEQ ID NO: 703377 - DNA, 33 bp, Homo sapien
aactctatgcaaatgacgacacacataccatac

SEQ ID NO: 703378 - DNA, 33 bp, Homo sapien
aactctatgcaaatgaggacacacataccatac

SEQ ID NO: 703379 - DNA, 33 bp, Homo sapien
tgtcatgggtcaaaaccgtaggagctagaggca

SEQ ID NO: 703380 - DNA, 33 bp, Homo sapien
tgtcatgggtcaaaacggtaggagctagaggca

SEQ ID NO: 703381 - DNA, 33 bp, Homo sapien
agtgctttcttgcacaacttggaacccagaccc

SEQ ID NO: 703382 - DNA, 33 bp, Homo sapien
agtgctttcttgcacaccttggaacccagaccc

SEQ ID NO: 703383 - DNA, 33 bp, Homo sapien
aacaggtgggatttgaagacactgggcttgggt

SEQ ID NO: 703384 - DNA, 33 bp, Homo sapien
aacaggtgggatttgacgacactgggcttgggt

SEQ ID NO: 703385 - DNA, 33 bp, Homo sapien
tggataaagagctggaagtctgcagggcccagc

SEQ ID NO: 703386 - DNA, 33 bp, Homo sapien
tggataaagagctggaggtctgcagggcccagc

SEQ ID NO: 703387 - DNA, 33 bp, Homo sapien
ctgctcaagagctggaaggtataaaacacacaa

SEQ ID NO: 703388 - DNA, 33 bp, Homo sapien
ctgctcaagagctggagggtataaaacacacaa

SEQ ID NO: 703389 - DNA, 33 bp, Homo sapien
tggaatgatggaataacagtggcaaaaataaga

SEQ ID NO: 703390 - DNA, 33 bp, Homo sapien
tggaatgatggaataatagtggcaaaaataaga

SEQ ID NO: 703391 - DNA, 33 bp, Homo sapien
gcagatgtaaacggaacaaagttgtagggcctg

SEQ ID NO: 703392 - DNA, 33 bp, Homo sapien
gcagatgtaaacggaataaagttgtagggcctg

SEQ ID NO: 703393 - DNA, 33 bp, Homo sapien
aggaccaagtcttacaaatcttgacataactcc

SEQ ID NO: 703394 - DNA, 33 bp, Homo sapien
aggaccaagtcttacacatcttgacataactcc

SEQ ID NO: 703395 - DNA, 33 bp, Homo sapien
tttacactggatgtccaagggcagaaaacaggc

SEQ ID NO: 703396 - DNA, 33 bp, Homo sapien
tttacactggatgtcccagggcagaaaacaggc

SEQ ID NO: 703397 - DNA, 33 bp, Homo sapien
gacatggacccaaccccacacacgattccagta

SEQ ID NO: 703398 - DNA, 33 bp, Homo sapien
gacatggacccaacccgacacacgattccagta

SEQ ID NO: 703399 - DNA, 33 bp, Homo sapien
gttttgagatcaaagaaacctctttctccagag

SEQ ID NO: 703400 - DNA, 33 bp, Homo sapien
gttttgagatcaaagagacctctttctccagag

SEQ ID NO: 703401 - DNA, 33 bp, Homo sapien
tgatacacaaaaggcaatgaactggaatgaaaa

SEQ ID NO: 703402 - DNA, 33 bp, Homo sapien
tgatacacaaaaggcagtgaactggaatgaaaa

SEQ ID NO: 703403 - DNA, 33 bp, Homo sapien
tctgtagcaaggaacaactctagctcttagatt

SEQ ID NO: 703404 - DNA, 33 bp, Homo sapien
tctgtagcaaggaacacctctagctcttagatt

SEQ ID NO: 703405 - DNA, 33 bp, Homo sapien
ctgctagtgttctagacagtgctgcccagattt

SEQ ID NO: 703406 - DNA, 33 bp, Homo sapien
ctgctagtgttctagagagtgctgcccagattt

SEQ ID NO: 703407 - DNA, 33 bp, Homo sapien
gcacagtgtttggaaaatccctggagactgact

SEQ ID NO: 703408 - DNA, 33 bp, Homo sapien
gcacagtgtttggaaagtccctggagactgact

SEQ ID NO: 703409 - DNA, 33 bp, Homo sapien
ctactaggcagcaagcccccttctaggcctgct

SEQ ID NO: 703410 - DNA, 33 bp, Homo sapien
ctactaggcagcaagctcccttctaggcctgct

SEQ ID NO: 703411 - DNA, 33 bp, Homo sapien
attgtgttataggagacaaagtctttccactta

SEQ ID NO: 703412 - DNA, 33 bp, Homo sapien
attgtgttataggagataaagtctttccactta

SEQ ID NO: 703413 - DNA, 33 bp, Homo sapien
tcacagacaatgagcacattttcctaagtcatc

SEQ ID NO: 703414 - DNA, 33 bp, Homo sapien
tcacagacaatgagcatattttcctaagtcatc

SEQ ID NO: 703415 - DNA, 33 bp, Homo sapien
acaaaaacagtgaataaatgttgcaaaatatta

SEQ ID NO: 703416 - DNA, 33 bp, Homo sapien
acaaaaacagtgaatacatgttgcaaaatatta

SEQ ID NO: 703417 - DNA, 33 bp, Homo sapien
taaaaactcaaggtcacacagggagttgatggt

SEQ ID NO: 703418 - DNA, 33 bp, Homo sapien
taaaaactcaaggtcatacagggagttgatggt

SEQ ID NO: 703419 - DNA, 33 bp, Homo sapien
ccagcaaacgccaacccatctgaagaccctgcc

SEQ ID NO: 703420 - DNA, 33 bp, Homo sapien
ccagcaaacgccaacctatctgaagaccctgcc

SEQ ID NO: 703421 - DNA, 33 bp, Homo sapien
gagcaggaaacataaaaggatgagcaggctgct

SEQ ID NO: 703422 - DNA, 33 bp, Homo sapien
gagcaggaaacataaatggatgagcaggctgct

SEQ ID NO: 703423 - DNA, 33 bp, Homo sapien
cacgtaagagggagatcacaacacagtgtgaga

SEQ ID NO: 703424 - DNA, 33 bp, Homo sapien
cacgtaagagggagattacaacacagtgtgaga

SEQ ID NO: 703425 - DNA, 33 bp, Homo sapien
caggtgggaacctgaaagtctgtgacatctgaa

SEQ ID NO: 703426 - DNA, 33 bp, Homo sapien
caggtgggaacctgaacgtctgtgacatctgaa

SEQ ID NO: 703427 - DNA, 33 bp, Homo sapien
ctctgaggttccatccagctctaaaattttaat

SEQ ID NO: 703428 - DNA, 33 bp, Homo sapien
ctctgaggttccatccggctctaaaattttaat

SEQ ID NO: 703429 - DNA, 33 bp, Homo sapien
gggagtgttcggattccctggaggatttgatca

SEQ ID NO: 703430 - DNA, 33 bp, Homo sapien
gggagtgttcggattctctggaggatttgatca

SEQ ID NO: 703431 - DNA, 33 bp, Homo sapien
agctatgtgaactagaacctagtaggagactag

SEQ ID NO: 703432 - DNA, 33 bp, Homo sapien
agctatgtgaactagaccctagtaggagactag

SEQ ID NO: 703433 - DNA, 33 bp, Homo sapien
tctcatcaggcttcacaactgatgatttagggc

SEQ ID NO: 703434 - DNA, 33 bp, Homo sapien
tctcatcaggcttcaccactgatgatttagggc

SEQ ID NO: 703435 - DNA, 33 bp, Homo sapien
tgtgcccagctctatagccattcacatgattca

SEQ ID NO: 703436 - DNA, 33 bp, Homo sapien
tgtgcccagctctatatccattcacatgattca

SEQ ID NO: 703437 - DNA, 33 bp, Homo sapien
gtagtgacattggccaccctgtattcccagaac

SEQ ID NO: 703438 - DNA, 33 bp, Homo sapien
gtagtgacattggccatcctgtattcccagaac

SEQ ID NO: 703439 - DNA, 33 bp, Homo sapien
atggtcctgggtaggcaccaatgttacaggatt

SEQ ID NO: 703440 - DNA, 33 bp, Homo sapien
atggtcctgggtaggcgccaatgttacaggatt

SEQ ID NO: 703441 - DNA, 33 bp, Homo sapien
ttaccattggtttggaagacataggcatcactt

SEQ ID NO: 703442 - DNA, 33 bp, Homo sapien
ttaccattggtttggaggacataggcatcactt

SEQ ID NO: 703443 - DNA, 33 bp, Homo sapien
tcccatctcatcttccactactctctacagacg

SEQ ID NO: 703444 - DNA, 33 bp, Homo sapien
tcccatctcatcttccgctactctctacagacg

SEQ ID NO: 703445 - DNA, 33 bp, Homo sapien
tcttggattccttctccagaaccagaacaatac

SEQ ID NO: 703446 - DNA, 33 bp, Homo sapien
tcttggattccttctcgagaaccagaacaatac

SEQ ID NO: 703447 - DNA, 33 bp, Homo sapien
ccacctatagacctaaggctgctaatttcattg

SEQ ID NO: 703448 - DNA, 33 bp, Homo sapien
ccacctatagacctaatgctgctaatttcattg

SEQ ID NO: 703449 - DNA, 33 bp, Homo sapien
aaccagttcctttggacaatgcaaatttctgtt

SEQ ID NO: 703450 - DNA, 33 bp, Homo sapien
aaccagttcctttggagaatgcaaatttctgtt

SEQ ID NO: 703451 - DNA, 33 bp, Homo sapien
cagtgatctgtggaagcaggagtgacctgttga

SEQ ID NO: 703452 - DNA, 33 bp, Homo sapien
cagtgatctgtggaagtaggagtgacctgttga

SEQ ID NO: 703453 - DNA, 33 bp, Homo sapien
gcccatattcttgctgccacatttagatgctgc

SEQ ID NO: 703454 - DNA, 33 bp, Homo sapien
gcccatattcttgctgtcacatttagatgctgc

SEQ ID NO: 703455 - DNA, 33 bp, Homo sapien
gtgagacgttgagtccactaggtgcagcatcta

SEQ ID NO: 703456 - DNA, 33 bp, Homo sapien
gtgagacgttgagtccgctaggtgcagcatcta

SEQ ID NO: 703457 - DNA, 33 bp, Homo sapien
ataggtttgtgttttacccttgatcaattttga

SEQ ID NO: 703458 - DNA, 33 bp, Homo sapien
ataggtttgtgttttatccttgatcaattttga

SEQ ID NO: 703459 - DNA, 33 bp, Homo sapien
atctcattccatgtcaatattagctccttttac

SEQ ID NO: 703460 - DNA, 33 bp, Homo sapien
atctcattccatgtcactattagctccttttac

SEQ ID NO: 703461 - DNA, 33 bp, Homo sapien
acttgtggctgtgaaacctgaatctggttttgt

SEQ ID NO: 703462 - DNA, 33 bp, Homo sapien
acttgtggctgtgaaatctgaatctggttttgt

SEQ ID NO: 703463 - DNA, 33 bp, Homo sapien
gtcactatatgttaacaatctctgcctcctgca

SEQ ID NO: 703464 - DNA, 33 bp, Homo sapien
gtcactatatgttaacgatctctgcctcctgca

SEQ ID NO: 703465 - DNA, 33 bp, Homo sapien
ctgtggaagggtgaaaagagttccttaggaagt

SEQ ID NO: 703466 - DNA, 33 bp, Homo sapien
ctgtggaagggtgaaaggagttccttaggaagt

SEQ ID NO: 703467 - DNA, 33 bp, Homo sapien
acatgcatgatatctaaggatgacagggaaagt

SEQ ID NO: 703468 - DNA, 33 bp, Homo sapien
acatgcatgatatctatggatgacagggaaagt

SEQ ID NO: 703469 - DNA, 33 bp, Homo sapien
taaggtaagtggtaaagagtagcacaactaagg

SEQ ID NO: 703470 - DNA, 33 bp, Homo sapien
taaggtaagtggtaaatagtagcacaactaagg

SEQ ID NO: 703471 - DNA, 33 bp, Homo sapien
aggattctggataaccaaggaaatgacaaatgt

SEQ ID NO: 703472 - DNA, 33 bp, Homo sapien
aggattctggataacctaggaaatgacaaatgt

SEQ ID NO: 703473 - DNA, 33 bp, Homo sapien
atacataccaggcttacggatgagtagaatcaa

SEQ ID NO: 703474 - DNA, 33 bp, Homo sapien
atacataccaggcttatggatgagtagaatcaa

SEQ ID NO: 703475 - DNA, 33 bp, Homo sapien
tgtgttctactaaccaaactttaggcatggtgg

SEQ ID NO: 703476 - DNA, 33 bp, Homo sapien
tgtgttctactaaccagactttaggcatggtgg

SEQ ID NO: 703477 - DNA, 33 bp, Homo sapien
taacagaggtcttcacggtatccaccatctgta

SEQ ID NO: 703478 - DNA, 33 bp, Homo sapien
taacagaggtcttcactgtatccaccatctgta

SEQ ID NO: 703479 - DNA, 33 bp, Homo sapien
gtatctttcacctcaggcattgtcttgcccata

SEQ ID NO: 703480 - DNA, 33 bp, Homo sapien
gtatctttcacctcagtcattgtcttgcccata

SEQ ID NO: 703481 - DNA, 33 bp, Homo sapien
gagtgtgtcccttccacatgcgtacttcctctg

SEQ ID NO: 703482 - DNA, 33 bp, Homo sapien
gagtgtgtcccttccagatgcgtacttcctctg

SEQ ID NO: 703483 - DNA, 33 bp, Homo sapien
gagaggtgaatcagtacgctcaaggtcacacag

SEQ ID NO: 703484 - DNA, 33 bp, Homo sapien
gagaggtgaatcagtatgctcaaggtcacacag

SEQ ID NO: 703485 - DNA, 33 bp, Homo sapien
atatcaatagcatttccactgtgaaccactgta

SEQ ID NO: 703486 - DNA, 33 bp, Homo sapien
atatcaatagcatttctactgtgaaccactgta

SEQ ID NO: 703487 - DNA, 33 bp, Homo sapien
atacagaaaggcagaaggaaagttagagtaaga

SEQ ID NO: 703488 - DNA, 33 bp, Homo sapien
atacagaaaggcagaatgaaagttagagtaaga

SEQ ID NO: 703489 - DNA, 33 bp, Homo sapien
atgaagggctaatatacagaatcaacaaaggac

SEQ ID NO: 703490 - DNA, 33 bp, Homo sapien
atgaagggctaatatagagaatcaacaaaggac

SEQ ID NO: 703491 - DNA, 33 bp, Homo sapien; identical to SEQ ID NO: 703489

SEQ ID NO: 703492 - DNA, 33 bp, Homo sapien; identical to SEQ ID NO: 703490

SEQ ID NO: 703493 - DNA, 33 bp, Homo sapien
tcattacctttgattacgaaaaagccctgagca

SEQ ID NO: 703494 - DNA, 33 bp, Homo sapien
tcattacctttgattatgaaaaagccctgagca

SEQ ID NO: 703495 - DNA, 33 bp, Homo sapien
tcatcaggaaattacaaactaaaacaatgagat

SEQ ID NO: 703496 - DNA, 33 bp, Homo sapien
tcatcaggaaattacagactaaaacaatgagat

SEQ ID NO: 703497 - DNA, 33 bp, Homo sapien
aggctagagctagaagccacattggtagaaagt

SEQ ID NO: 703498 - DNA, 33 bp, Homo sapien
aggctagagctagaagtcacattggtagaaagt

SEQ ID NO: 703499 - DNA, 33 bp, Homo sapien
ataccagcactacttacaatacccaaaagctag

SEQ ID NO: 703500 - DNA, 33 bp, Homo sapien
ataccagcactacttataatacccaaaagctag

SEQ ID NO: 703501 - DNA, 33 bp, Homo sapien
ctctagctatatctacacagttgaagaacatgg

SEQ ID NO: 703502 - DNA, 33 bp, Homo sapien
ctctagctatatctacgcagttgaagaacatgg

SEQ ID NO: 703503 - DNA, 33 bp, Homo sapien
caaatagagccttaagaaagagtaattaattgt

SEQ ID NO: 703504 - DNA, 33 bp, Homo sapien
caaatagagccttaaggaagagtaattaattgt

SEQ ID NO: 703505 - DNA, 33 bp, Homo sapien
ccaaatacacttgccacaaacaatcagtagggc

SEQ ID NO: 703506 - DNA, 33 bp, Homo sapien
ccaaatacacttgccagaaacaatcagtagggc

SEQ ID NO: 703507 - DNA, 33 bp, Homo sapien
tgtagtggatttgaaacgatacttgttgaataa

SEQ ID NO: 703508 - DNA, 33 bp, Homo sapien
tgtagtggatttgaaatgatacttgttgaataa

SEQ ID NO: 703509 - DNA, 33 bp, Homo sapien
catctgaaatctttaacagaagaaagaaggtat

SEQ ID NO: 703510 - DNA, 33 bp, Homo sapien
catctgaaatctttaagagaagaaagaaggtat

SEQ ID NO: 703511 - DNA, 33 bp, Homo sapien
ggttttggctggaaaccgcttaaataagaagga

SEQ ID NO: 703512 - DNA, 33 bp, Homo sapien
ggttttggctggaaactgcttaaataagaagga

SEQ ID NO: 703513 - DNA, 33 bp, Homo sapien
tcagaatcctcgctaccatcgtctggcagattg

SEQ ID NO: 703514 - DNA, 33 bp, Homo sapien
tcagaatcctcgctactatcgtctggcagattg

SEQ ID NO: 703515 - DNA, 33 bp, Homo sapien
aaattgcagggttaaaagcaagaatgaaagggc

SEQ ID NO: 703516 - DNA, 33 bp, Homo sapien
aaattgcagggttaaaggcaagaatgaaagggc

SEQ ID NO: 703517 - DNA, 33 bp, Homo sapien
aaagcagcagtgggaacatggcttgtttgtggg

SEQ ID NO: 703518 - DNA, 33 bp, Homo sapien
aaagcagcagtgggaatatggcttgtttgtggg

SEQ ID NO: 703519 - DNA, 33 bp, Homo sapien
atcttcagatacctcaagttaataagatggtag

SEQ ID NO: 703520 - DNA, 33 bp, Homo sapien
atcttcagatacctcaggttaataagatggtag

SEQ ID NO: 703521 - DNA, 33 bp, Homo sapien
ttatactccatgtccagaaactcaaaccctggg

SEQ ID NO: 703522 - DNA, 33 bp, Homo sapien
ttatactccatgtccataaactcaaaccctggg

SEQ ID NO: 703523 - DNA, 33 bp, Homo sapien
gaagacctagcaaaaacgggatgctctgacttc

SEQ ID NO: 703524 - DNA, 33 bp, Homo sapien
gaagacctagcaaaaatgggatgctctgacttc

SEQ ID NO: 703525 - DNA, 33 bp, Homo sapien
taaaagaaagttgtaactgcatatctgttctgt

SEQ ID NO: 703526 - DNA, 33 bp, Homo sapien
taaaagaaagttgtaattgcatatctgttctgt

SEQ ID NO: 703527 - DNA, 33 bp, Homo sapien
gaagctattagaagaaactctagtgtgtggtga

SEQ ID NO: 703528 - DNA, 33 bp, Homo sapien
gaagctattagaagaagctctagtgtgtggtga

SEQ ID NO: 703529 - DNA, 33 bp, Homo sapien
ctaatgtcactcagacaatgaaaacggaattta

SEQ ID NO: 703530 - DNA, 33 bp, Homo sapien
ctaatgtcactcagacgatgaaaacggaattta

SEQ ID NO: 703531 - DNA, 33 bp, Homo sapien
ggagcatttctatataacactaatgatcaagct

SEQ ID NO: 703532 - DNA, 33 bp, Homo sapien
ggagcatttctatataccactaatgatcaagct

SEQ ID NO: 703533 - DNA, 33 bp, Homo sapien
ccagatcaagaaggcactcccatttacaatacc

SEQ ID NO: 703534 - DNA, 33 bp, Homo sapien
ccagatcaagaaggcattcccatttacaatacc

SEQ ID NO: 703535 - DNA, 33 bp, Homo sapien
ttattaaaagagataccagagagaccaaccagc

SEQ ID NO: 703536 - DNA, 33 bp, Homo sapien
ttattaaaagagatacgagagagaccaaccagc

SEQ ID NO: 703537 - DNA, 33 bp, Homo sapien
gaatggccacattaaaagttgtcttgaagatga

SEQ ID NO: 703538 - DNA, 33 bp, Homo sapien
gaatggccacattaaaggttgtcttgaagatga

SEQ ID NO: 703539 - DNA, 33 bp, Homo sapien
tttaatccttcttccaagtaaatctaatccctc

SEQ ID NO: 703540 - DNA, 33 bp, Homo sapien
tttaatccttcttccaggtaaatctaatccctc

SEQ ID NO: 703541 - DNA, 33 bp, Homo sapien
actgcagaagtggtgaaatgaactagagcctcg

SEQ ID NO: 703542 - DNA, 33 bp, Homo sapien
actgcagaagtggtgacatgaactagagcctcg

SEQ ID NO: 703543 - DNA, 33 bp, Homo sapien
gccctacagatttctcaattaaaattccagacg

SEQ ID NO: 703544 - DNA, 33 bp, Homo sapien
gccctacagatttctcgattaaaattccagacg

SEQ ID NO: 703545 - DNA, 33 bp, Homo sapien
atgtgaactaggagaaaagaaggtggcttcagg

SEQ ID NO: 703546 - DNA, 33 bp, Homo sapien
atgtgaactaggagaagagaaggtggcttcagg

SEQ ID NO: 703547 - DNA, 33 bp, Homo sapien
ctttttgaattgactgcatctagatgagatttg

SEQ ID NO: 703548 - DNA, 33 bp, Homo sapien
ctttttgaattgactgtatctagatgagatttg

SEQ ID NO: 703549 - DNA, 33 bp, Homo sapien
ctccttcactgtcaaaaactttgccacacaact

SEQ ID NO: 703550 - DNA, 33 bp, Homo sapien
ctccttcactgtcaaatactttgccacacaact

SEQ ID NO: 703551 - DNA, 33 bp, Homo sapien
gagtccagggatatgaataactccaaagacaag

SEQ ID NO: 703552 - DNA, 33 bp, Homo sapien
gagtccagggatatgagtaactccaaagacaag

SEQ ID NO: 703553 - DNA, 33 bp, Homo sapien
accccactgagaggaacgtaaattgatggaata

SEQ ID NO: 703554 - DNA, 33 bp, Homo sapien
accccactgagaggaatgtaaattgatggaata

SEQ ID NO: 703555 - DNA, 33 bp, Homo sapien
aagagtaaacacttcaactagtaaaataaatga

SEQ ID NO: 703556 - DNA, 33 bp, Homo sapien
aagagtaaacacttcagctagtaaaataaatga

SEQ ID NO: 703557 - DNA, 33 bp, Homo sapien
gctgtgctgcaacatacggtgtgtaggtcgtgc

SEQ ID NO: 703558 - DNA, 33 bp, Homo sapien
gctgtgctgcaacatatggtgtgtaggtcgtgc

SEQ ID NO: 703559 - DNA, 33 bp, Homo sapien
attttttagcttctctgacaaatcatagtggcc

SEQ ID NO: 703560 - DNA, 33 bp, Homo sapien
attttttagcttctcttacaaatcatagtggcc

SEQ ID NO: 703561 - DNA, 33 bp, Homo sapien
attcattcatgcacaaattacaattctaaatgc

SEQ ID NO: 703562 - DNA, 33 bp, Homo sapien
attcattcatgcacaagttacaattctaaatgc

SEQ ID NO: 703563 - DNA, 33 bp, Homo sapien
ccatctggggataggaaggtgaacacaaattgt

SEQ ID NO: 703564 - DNA, 33 bp, Homo sapien
ccatctggggataggagggtgaacacaaattgt

SEQ ID NO: 703565 - DNA, 33 bp, Homo sapien
gaacattttgttcctacaaacatttgctgatgg

SEQ ID NO: 703566 - DNA, 33 bp, Homo sapien
gaacattttgttcctataaacatttgctgatgg

SEQ ID NO: 703567 - DNA, 33 bp, Homo sapien
ctcccatctttaacaggcacatcagcaggacag

SEQ ID NO: 703568 - DNA, 33 bp, Homo sapien
ctcccatctttaacagtcacatcagcaggacag

SEQ ID NO: 703569 - DNA, 33 bp, Homo sapien
gctagggctattccaaatgctccctctggtgtg

SEQ ID NO: 703570 - DNA, 33 bp, Homo sapien
gctagggctattccaagtgctccctctggtgtg

SEQ ID NO: 703571 - DNA, 33 bp, Homo sapien
tagccctagccagaggcaatcgctcatcctagc

SEQ ID NO: 703572 - DNA, 33 bp, Homo sapien
tagccctagccagagggaatcgctcatcctagc

SEQ ID NO: 703573 - DNA, 33 bp, Homo sapien
tagggaatccatcacccatgcctcggcagacct

SEQ ID NO: 703574 - DNA, 33 bp, Homo sapien
tagggaatccatcacctatgcctcggcagacct

SEQ ID NO: 703575 - DNA, 33 bp, Homo sapien
gaggttccctgacctacccaaggtttcacttaa

SEQ ID NO: 703576 - DNA, 33 bp, Homo sapien
gaggttccctgacctatccaaggtttcacttaa

SEQ ID NO: 703577 - DNA, 33 bp, Homo sapien
tcctggacacataggaataaaacaaaggataaa

SEQ ID NO: 703578 - DNA, 33 bp, Homo sapien
tcctggacacataggactaaaacaaaggataaa

SEQ ID NO: 703579 - DNA, 33 bp, Homo sapien
atgttttgatcatcagaagcaaatgtcaaagtg

SEQ ID NO: 703580 - DNA, 33 bp, Homo sapien
atgttttgatcatcaggagcaaatgtcaaagtg

SEQ ID NO: 703581 - DNA, 33 bp, Homo sapien
gatttcaaaagactcacatcttagctgtacaat

SEQ ID NO: 703582 - DNA, 33 bp, Homo sapien
gatttcaaaagactcagatcttagctgtacaat

SEQ ID NO: 703583 - DNA, 33 bp, Homo sapien
atgtaagttgaaagagaaggttaaatttcagca

SEQ ID NO: 703584 - DNA, 33 bp, Homo sapien
atgtaagttgaaagagtaggttaaatttcagca

SEQ ID NO: 703585 - DNA, 33 bp, Homo sapien
ctcagagaagggaaccaaagtagagaggaacag

SEQ ID NO: 703586 - DNA, 33 bp, Homo sapien
ctcagagaagggaaccgaagtagagaggaacag

SEQ ID NO: 703587 - DNA, 33 bp, Homo sapien
aaaaaaattcagcaccgggaaatcaacattttg

SEQ ID NO: 703588 - DNA, 33 bp, Homo sapien
aaaaaaattcagcacctggaaatcaacattttg

SEQ ID NO: 703589 - DNA, 33 bp, Homo sapien
tctctgattactaatgaagttgagggactttaa

SEQ ID NO: 703590 - DNA, 33 bp, Homo sapien
tctctgattactaatggagttgagggactttaa

SEQ ID NO: 703591 - DNA, 33 bp, Homo sapien
tttaagtgttgattgtaaaacaagacagattgg

SEQ ID NO: 703592 - DNA, 33 bp, Homo sapien
tttaagtgttgattgtgaaacaagacagattgg

SEQ ID NO: 703593 - DNA, 33 bp, Homo sapien
tgacatatgatgctgaacatctttttatttgcc

SEQ ID NO: 703594 - DNA, 33 bp, Homo sapien
tgacatatgatgctgaccatctttttatttgcc

SEQ ID NO: 703595 - DNA, 33 bp, Homo sapien
acatttagattgtttcaaaaagtttactatttt

SEQ ID NO: 703596 - DNA, 33 bp, Homo sapien
acatttagattgtttcgaaaagtttactatttt

SEQ ID NO: 703597 - DNA, 33 bp, Homo sapien
atatgaagaggttttcaaggaaagcattctggg

SEQ ID NO: 703598 - DNA, 33 bp, Homo sapien
atatgaagaggttttcgaggaaagcattctggg

SEQ ID NO: 703599 - DNA, 33 bp, Homo sapien
aaacaaactccttgaacacaaaatgagtcttta

SEQ ID NO: 703600 - DNA, 33 bp, Homo sapien
aaacaaactccttgaatacaaaatgagtcttta

SEQ ID NO: 703601 - DNA, 33 bp, Homo sapien
tggtcacccaattttaacatgcctctctgatag

SEQ ID NO: 703602 - DNA, 33 bp, Homo sapien
tggtcacccaattttagcatgcctctctgatag

SEQ ID NO: 703603 - DNA, 33 bp, Homo sapien
aatgctaagaaaggcaaagctagatatttaata

SEQ ID NO: 703604 - DNA, 33 bp, Homo sapien
aatgctaagaaaggcagagctagatatttaata

SEQ ID NO: 703605 - DNA, 33 bp, Homo sapien
gtgcacacttcttcaccgaaagtccttgaggaa

SEQ ID NO: 703606 - DNA, 33 bp, Homo sapien
gtgcacacttcttcactgaaagtccttgaggaa

SEQ ID NO: 703607 - DNA, 33 bp, Homo sapien
attctggatcattgtgcagaggcagttggaatg

SEQ ID NO: 703608 - DNA, 33 bp, Homo sapien
attctggatcattgtgtagaggcagttggaatg

SEQ ID NO: 703609 - DNA, 33 bp, Homo sapien
accatcagcctctcacaatttttgagtagttcc

SEQ ID NO: 703610 - DNA, 33 bp, Homo sapien
accatcagcctctcacgatttttgagtagttcc

SEQ ID NO: 703611 - DNA, 33 bp, Homo sapien
tatatatgtaagtatacgtgtcagtaaatttta

SEQ ID NO: 703612 - DNA, 33 bp, Homo sapien
tatatatgtaagtatatgtgtcagtaaatttta

SEQ ID NO: 703613 - DNA, 33 bp, Homo sapien
tgataaagtatcttgcccaaggttaaccattag

SEQ ID NO: 703614 - DNA, 33 bp, Homo sapien
tgataaagtatcttgctcaaggttaaccattag

SEQ ID NO: 703615 - DNA, 33 bp, Homo sapien
ggtcatgcaataatagaatagacaaatgtgtag

SEQ ID NO: 703616 - DNA, 33 bp, Homo sapien
ggtcatgcaataataggatagacaaatgtgtag

SEQ ID NO: 703617 - DNA, 33 bp, Homo sapien
acgatcacaatacatacgctcacgggattatct

SEQ ID NO: 703618 - DNA, 33 bp, Homo sapien
acgatcacaatacatatgctcacgggattatct

SEQ ID NO: 703619 - DNA, 33 bp, Homo sapien
tgtacacgtacaaagacgttcattaagcattga

SEQ ID NO: 703620 - DNA, 33 bp, Homo sapien
tgtacacgtacaaagatgttcattaagcattga

SEQ ID NO: 703621 - DNA, 33 bp, Homo sapien
atttgcattttacagaagtaagagactgacgcc

SEQ ID NO: 703622 - DNA, 33 bp, Homo sapien
atttgcattttacagaggtaagagactgacgcc

SEQ ID NO: 703623 - DNA, 33 bp, Homo sapien
gttacaagattgctgacagtcggcgaagtttat

SEQ ID NO: 703624 - DNA, 33 bp, Homo sapien
gttacaagattgctgatagtcggcgaagtttat

SEQ ID NO: 703625 - DNA, 33 bp, Homo sapien
tgcccattaattgaggcatttcttcacagcgtc

SEQ ID NO: 703626 - DNA, 33 bp, Homo sapien
tgcccattaattgaggtatttcttcacagcgtc

SEQ ID NO: 703627 - DNA, 33 bp, Homo sapien
tttacttgaatctgacactgtattggaaaggga

SEQ ID NO: 703628 - DNA, 33 bp, Homo sapien
tttacttgaatctgacgctgtattggaaaggga

SEQ ID NO: 703629 - DNA, 33 bp, Homo sapien
ttgatgtaattctagccacaagtggaacacaag

SEQ ID NO: 703630 - DNA, 33 bp, Homo sapien
ttgatgtaattctagctacaagtggaacacaag

SEQ ID NO: 703631 - DNA, 33 bp, Homo sapien
ggaggtatacaagttgaatgggacatggagaac

SEQ ID NO: 703632 - DNA, 33 bp, Homo sapien
ggaggtatacaagttggatgggacatggagaac

SEQ ID NO: 703633 - DNA, 33 bp, Homo sapien
ggggtggtgacctctacaaactcttgctaccaa

SEQ ID NO: 703634 - DNA, 33 bp, Homo sapien
ggggtggtgacctctataaactcttgctaccaa

SEQ ID NO: 703635 - DNA, 33 bp, Homo sapien
ctggggtctgaagaacacagctaaatgaaggaa

SEQ ID NO: 703636 - DNA, 33 bp, Homo sapien
ctggggtctgaagaacgcagctaaatgaaggaa

SEQ ID NO: 703637 - DNA, 33 bp, Homo sapien
agaaaacctgcattcaagccacataagcacatc

SEQ ID NO: 703638 - DNA, 33 bp, Homo sapien
agaaaacctgcattcaggccacataagcacatc

SEQ ID NO: 703639 - DNA, 33 bp, Homo sapien
aagtgggtgatggaagaccttagctgctatgtt

SEQ ID NO: 703640 - DNA, 33 bp, Homo sapien
aagtgggtgatggaaggccttagctgctatgtt

SEQ ID NO: 703641 - DNA, 33 bp, Homo sapien
tccactatattaggcaaccctgctttacattct

SEQ ID NO: 703642 - DNA, 33 bp, Homo sapien
tccactatattaggcacccctgctttacattct

SEQ ID NO: 703643 - DNA, 33 bp, Homo sapien
ggaaaaagttatattacgaatggtgactaaagg

SEQ ID NO: 703644 - DNA, 33 bp, Homo sapien
ggaaaaagttatattatgaatggtgactaaagg

SEQ ID NO: 703645 - DNA, 33 bp, Homo sapien
ttgatgatttttgaagaattgtcctagactgaa

SEQ ID NO: 703646 - DNA, 33 bp, Homo sapien
ttgatgatttttgaagtattgtcctagactgaa

SEQ ID NO: 703647 - DNA, 33 bp, Homo sapien
ttacctttaggtgcccaagtattgattacaagt

SEQ ID NO: 703648 - DNA, 33 bp, Homo sapien
ttacctttaggtgcccgagtattgattacaagt

SEQ ID NO: 703649 - DNA, 33 bp, Homo sapien
catgggaacatcatcaacctctctgaacctgtt

SEQ ID NO: 703650 - DNA, 33 bp, Homo sapien
catgggaacatcatcaccctctctgaacctgtt

SEQ ID NO: 703651 - DNA, 33 bp, Homo sapien
tagaacagtggcttgcacataatagatacacca

SEQ ID NO: 703652 - DNA, 33 bp, Homo sapien
tagaacagtggcttgcgcataatagatacacca

SEQ ID NO: 703653 - DNA, 33 bp, Homo sapien
agcacatggagcctgaaacagcattgtgaagtg

SEQ ID NO: 703654 - DNA, 33 bp, Homo sapien
agcacatggagcctgagacagcattgtgaagtg

SEQ ID NO: 703655 - DNA, 33 bp, Homo sapien
cacagccagagctaacaatctgtggcttccaca

SEQ ID NO: 703656 - DNA, 33 bp, Homo sapien
cacagccagagctaacgatctgtggcttccaca

SEQ ID NO: 703657 - DNA, 33 bp, Homo sapien
aattgggcagaaaaacagtagtgttcaggcagt

SEQ ID NO: 703658 - DNA, 33 bp, Homo sapien
aattgggcagaaaaacggtagtgttcaggcagt

SEQ ID NO: 703659 - DNA, 33 bp, Homo sapien
gcactctgtttttaccaaattgctgggtgagca

SEQ ID NO: 703660 - DNA, 33 bp, Homo sapien
gcactctgtttttaccgaattgctgggtgagca

SEQ ID NO: 703661 - DNA, 33 bp, Homo sapien
tgcaatcaaaatcaaaatgtattctcatacatc

SEQ ID NO: 703662 - DNA, 33 bp, Homo sapien
tgcaatcaaaatcaaagtgtattctcatacatc

SEQ ID NO: 703663 - DNA, 33 bp, Homo sapien
cagccacagtgctagtaactaagcaaaaaaagt

SEQ ID NO: 703664 - DNA, 33 bp, Homo sapien
cagccacagtgctagtcactaagcaaaaaaagt

SEQ ID NO: 703665 - DNA, 33 bp, Homo sapien
attgtcactcaaacgacgcttgtttctctaaga

SEQ ID NO: 703666 - DNA, 33 bp, Homo sapien
attgtcactcaaacgatgcttgtttctctaaga

SEQ ID NO: 703667 - DNA, 33 bp, Homo sapien
tgcaggtatagattcggagtagtagattcttgg

SEQ ID NO: 703668 - DNA, 33 bp, Homo sapien
tgcaggtatagattcgtagtagtagattcttgg

SEQ ID NO: 703669 - DNA, 33 bp, Homo sapien
ctggcacaaaacatatcaactgatctaagataa

SEQ ID NO: 703670 - DNA, 33 bp, Homo sapien
ctggcacaaaacatattaactgatctaagataa

SEQ ID NO: 703671 - DNA, 33 bp, Homo sapien
aagaataatggtatccaccgcataaggttatca

SEQ ID NO: 703672 - DNA, 33 bp, Homo sapien
aagaataatggtatccgccgcataaggttatca

SEQ ID NO: 703673 - DNA, 33 bp, Homo sapien
gcttgaagtatagtgaagtaggaaaagaaagat

SEQ ID NO: 703674 - DNA, 33 bp, Homo sapien
gcttgaagtatagtgacgtaggaaaagaaagat

SEQ ID NO: 703675 - DNA, 33 bp, Homo sapien
ctggtattgttataaacgatcgctctgggtgaa

SEQ ID NO: 703676 - DNA, 33 bp, Homo sapien
ctggtattgttataaatgatcgctctgggtgaa

SEQ ID NO: 703677 - DNA, 33 bp, Homo sapien
tgagataagtctttaaactactatgaaatgcat

SEQ ID NO: 703678 - DNA, 33 bp, Homo sapien
tgagataagtctttaagctactatgaaatgcat

SEQ ID NO: 703679 - DNA, 33 bp, Homo sapien
gaccaggccagtcttaaaaaaatggggaagtag

SEQ ID NO: 703680 - DNA, 33 bp, Homo sapien
gaccaggccagtcttagaaaaatggggaagtag

SEQ ID NO: 703681 - DNA, 33 bp, Homo sapien
tcccacctgttatgtaagaataaaaacacatgc

SEQ ID NO: 703682 - DNA, 33 bp, Homo sapien
tcccacctgttatgtaggaataaaaacacatgc

SEQ ID NO: 703683 - DNA, 33 bp, Homo sapien
cttaaagtgttgtcagcagtcagcaaaaacatg

SEQ ID NO: 703684 - DNA, 33 bp, Homo sapien
cttaaagtgttgtcagtagtcagcaaaaacatg

SEQ ID NO: 703685 - DNA, 33 bp, Homo sapien
ggattagaaaaggaaacaagtagtagccaacaa

SEQ ID NO: 703686 - DNA, 33 bp, Homo sapien
ggattagaaaaggaaataagtagtagccaacaa

SEQ ID NO: 703687 - DNA, 33 bp, Homo sapien
ccactgcttgataaggacataagaactccctaa

SEQ ID NO: 703688 - DNA, 33 bp, Homo sapien
ccactgcttgataaggccataagaactccctaa

SEQ ID NO: 703689 - DNA, 33 bp, Homo sapien
agaatcctggccctataacttaatagctgtgtg

SEQ ID NO: 703690 - DNA, 33 bp, Homo sapien
agaatcctggccctattacttaatagctgtgtg

SEQ ID NO: 703691 - DNA, 33 bp, Homo sapien
ttctatttctttcttacggcaggagtgttaacc

SEQ ID NO: 703692 - DNA, 33 bp, Homo sapien
ttctatttctttcttatggcaggagtgttaacc

SEQ ID NO: 703693 - DNA, 33 bp, Homo sapien
aaccaataagtatatgaaaaggtgctaactcta

SEQ ID NO: 703694 - DNA, 33 bp, Homo sapien
aaccaataagtatatggaaaggtgctaactcta

SEQ ID NO: 703695 - DNA, 33 bp, Homo sapien
tgttccttattgtacacgtggttagccaagaaa

SEQ ID NO: 703696 - DNA, 33 bp, Homo sapien
tgttccttattgtacatgtggttagccaagaaa

SEQ ID NO: 703697 - DNA, 33 bp, Homo sapien
gtgtcacttccgttcacgaaggcttgctatgca

SEQ ID NO: 703698 - DNA, 33 bp, Homo sapien
gtgtcacttccgttcatgaaggcttgctatgca

SEQ ID NO: 703699 - DNA, 33 bp, Homo sapien
actctactgggatctccagtcttttgatctcat

SEQ ID NO: 703700 - DNA, 33 bp, Homo sapien
actctactgggatctctagtcttttgatctcat

SEQ ID NO: 703701 - DNA, 33 bp, Homo sapien
cccatagtaatagatgaaaaaggatggacttta

SEQ ID NO: 703702 - DNA, 33 bp, Homo sapien
cccatagtaatagatggaaaaggatggacttta

SEQ ID NO: 703703 - DNA, 33 bp, Homo sapien
catgttttgtcagatgcaccaaattttcaagag

SEQ ID NO: 703704 - DNA, 33 bp, Homo sapien
catgttttgtcagatgtaccaaattttcaagag

SEQ ID NO: 703705 - DNA, 33 bp, Homo sapien
caagaacatttcgacactggtgtagtccacaag

SEQ ID NO: 703706 - DNA, 33 bp, Homo sapien
caagaacatttcgacattggtgtagtccacaag

SEQ ID NO: 703707 - DNA, 33 bp, Homo sapien
aagctcgtttttaaaggaccgtcaacgtaggtg

SEQ ID NO: 703708 - DNA, 33 bp, Homo sapien
aagctcgtttttaaagtaccgtcaacgtaggtg

SEQ ID NO: 703709 - DNA, 33 bp, Homo sapien
attacccataatagcaatacgcaacgatagata

SEQ ID NO: 703710 - DNA, 33 bp, Homo sapien
attacccataatagcagtacgcaacgatagata

SEQ ID NO: 703711 - DNA, 33 bp, Homo sapien
tgtacatcgcaaatccaactcttgccctcctgc

SEQ ID NO: 703712 - DNA, 33 bp, Homo sapien
tgtacatcgcaaatcccactcttgccctcctgc

SEQ ID NO: 703713 - DNA, 33 bp, Homo sapien
caatgtgatttttaaacttaagagtcagttgaa

SEQ ID NO: 703714 - DNA, 33 bp, Homo sapien
caatgtgatttttaaagttaagagtcagttgaa

SEQ ID NO: 703715 - DNA, 33 bp, Homo sapien
ctgctttgctcaggtaacatgtgttcactggat

SEQ ID NO: 703716 - DNA, 33 bp, Homo sapien
ctgctttgctcaggtagcatgtgttcactggat

SEQ ID NO: 703717 - DNA, 33 bp, Homo sapien
aaataaagctaatcgaacctttcagcagttatt

SEQ ID NO: 703718 - DNA, 33 bp, Homo sapien
aaataaagctaatcgagcctttcagcagttatt

SEQ ID NO: 703719 - DNA, 33 bp, Homo sapien
tataataaatttatgaaaggtgtaatggctgct

SEQ ID NO: 703720 - DNA, 33 bp, Homo sapien
tataataaatttatgagaggtgtaatggctgct

SEQ ID NO: 703721 - DNA, 33 bp, Homo sapien
atagtttgttatagaacattcagtgcaaaatag

SEQ ID NO: 703722 - DNA, 33 bp, Homo sapien
atagtttgttatagaatattcagtgcaaaatag

SEQ ID NO: 703723 - DNA, 33 bp, Homo sapien
ctgaagtattcatcacaccaaacaataccgatt

SEQ ID NO: 703724 - DNA, 33 bp, Homo sapien
ctgaagtattcatcaccccaaacaataccgatt

SEQ ID NO: 703725 - DNA, 33 bp, Homo sapien
tgtagcaaatcagtgacggcaggggtctaaacc

SEQ ID NO: 703726 - DNA, 33 bp, Homo sapien
tgtagcaaatcagtgatggcaggggtctaaacc

SEQ ID NO: 703727 - DNA, 33 bp, Homo sapien
gctcacgtcttccatccgaaataaaggagtttc

SEQ ID NO: 703728 - DNA, 33 bp, Homo sapien
gctcacgtcttccatctgaaataaaggagtttc

SEQ ID NO: 703729 - DNA, 33 bp, Homo sapien
gagaccaaattgttaacggtttctaacttggga

SEQ ID NO: 703730 - DNA, 33 bp, Homo sapien
gagaccaaattgttaatggtttctaacttggga

SEQ ID NO: 703731 - DNA, 33 bp, Homo sapien
aaacctaatctgtcatcaagacctgctacttat

SEQ ID NO: 703732 - DNA, 33 bp, Homo sapien
aaacctaatctgtcatgaagacctgctacttat

SEQ ID NO: 703733 - DNA, 33 bp, Homo sapien
catacattcaacaaataatcactgagtgacgct

SEQ ID NO: 703734 - DNA, 33 bp, Homo sapien
catacattcaacaaatcatcactgagtgacgct

SEQ ID NO: 703735 - DNA, 33 bp, Homo sapien
agacttgagacgtggccataatctatttataca

SEQ ID NO: 703736 - DNA, 33 bp, Homo sapien
agacttgagacgtggctataatctatttataca

SEQ ID NO: 703737 - DNA, 33 bp, Homo sapien
taaatgttaatgcctacggttgtcatctttaat

SEQ ID NO: 703738 - DNA, 33 bp, Homo sapien
taaatgttaatgcctatggttgtcatctttaat

SEQ ID NO: 703739 - DNA, 33 bp, Homo sapien
agaaagtacaatataacggaagccaagggagga

SEQ ID NO: 703740 - DNA, 33 bp, Homo sapien
agaaagtacaatataagggaagccaagggagga

SEQ ID NO: 703741 - DNA, 33 bp, Homo sapien
gtaaccagtaaacaaacagctattgagaaaaac

SEQ ID NO: 703742 - DNA, 33 bp, Homo sapien
gtaaccagtaaacaaagagctattgagaaaaac

SEQ ID NO: 703743 - DNA, 33 bp, Homo sapien
gttgagttagccaccaatgctcttgattttatt

SEQ ID NO: 703744 - DNA, 33 bp, Homo sapien
gttgagttagccaccagtgctcttgattttatt

SEQ ID NO: 703745 - DNA, 33 bp, Homo sapien
tcaagttgcttaagtaaaggagcatttgattcc

SEQ ID NO: 703746 - DNA, 33 bp, Homo sapien
tcaagttgcttaagtagaggagcatttgattcc

SEQ ID NO: 703747 - DNA, 33 bp, Homo sapien
gtaagaagatttttaccaaagacataacaggac

SEQ ID NO: 703748 - DNA, 33 bp, Homo sapien
gtaagaagatttttacgaaagacataacaggac

SEQ ID NO: 703749 - DNA, 33 bp, Homo sapien
atgtgaggactgacacaagaaaatgagagggga

SEQ ID NO: 703750 - DNA, 33 bp, Homo sapien
atgtgaggactgacacgagaaaatgagagggga

SEQ ID NO: 703751 - DNA, 33 bp, Homo sapien
gggatattcttctgaacggaaaaatctgtcaat

SEQ ID NO: 703752 - DNA, 33 bp, Homo sapien
gggatattcttctgaatggaaaaatctgtcaat

SEQ ID NO: 703753 - DNA, 33 bp, Homo sapien
tagaatcattatttcaataggagtatgcactgt

SEQ ID NO: 703754 - DNA, 33 bp, Homo sapien
tagaatcattatttcattaggagtatgcactgt

SEQ ID NO: 703755 - DNA, 33 bp, Homo sapien
cacctaattcagtgacactctttactgcattta

SEQ ID NO: 703756 - DNA, 33 bp, Homo sapien
cacctaattcagtgacgctctttactgcattta

SEQ ID NO: 703757 - DNA, 33 bp, Homo sapien
ttggtggccttaaaaaagtggttagatttagca

SEQ ID NO: 703758 - DNA, 33 bp, Homo sapien
ttggtggccttaaaaaggtggttagatttagca

SEQ ID NO: 703759 - DNA, 33 bp, Homo sapien
tgtagactgaaaaaacagtgagcatagacttgg

SEQ ID NO: 703760 - DNA, 33 bp, Homo sapien
tgtagactgaaaaaaccgtgagcatagacttgg

SEQ ID NO: 703761 - DNA, 33 bp, Homo sapien
aggtgcagtgtagacaataaggaaaaaaaaagc

SEQ ID NO: 703762 - DNA, 33 bp, Homo sapien
aggtgcagtgtagacagtaaggaaaaaaaaagc

SEQ ID NO: 703763 - DNA, 33 bp, Homo sapien
aattgtatgtttctgaactgcgaatgtttataa

SEQ ID NO: 703764 - DNA, 33 bp, Homo sapien
aattgtatgtttctgacctgcgaatgtttataa

SEQ ID NO: 703765 - DNA, 33 bp, Homo sapien
tgaaaaaatattcggaaatcaaaacttttaggt

SEQ ID NO: 703766 - DNA, 33 bp, Homo sapien
tgaaaaaatattcggagatcaaaacttttaggt

SEQ ID NO: 703767 - DNA, 33 bp, Homo sapien
ctggcacagaacagaaagctcaataaatacttg

SEQ ID NO: 703768 - DNA, 33 bp, Homo sapien
ctggcacagaacagaatgctcaataaatacttg

SEQ ID NO: 703769 - DNA, 33 bp, Homo sapien
gggtcaccacagtgtcaacgtctcaggctcaag

SEQ ID NO: 703770 - DNA, 33 bp, Homo sapien
gggtcaccacagtgtcgacgtctcaggctcaag

SEQ ID NO: 703771 - DNA, 33 bp, Homo sapien
tcatggaatccaagcaacttttgggtttgtttt

SEQ ID NO: 703772 - DNA, 33 bp, Homo sapien
tcatggaatccaagcaccttttgggtttgtttt

SEQ ID NO: 703773 - DNA, 33 bp, Homo sapien
gaatgccgtgctattagactttaaggcttttta

SEQ ID NO: 703774 - DNA, 33 bp, Homo sapien
gaatgccgtgctattatactttaaggcttttta

SEQ ID NO: 703775 - DNA, 33 bp, Homo sapien
agtgtaatggaagatgaagaatgaagcatcaga

SEQ ID NO: 703776 - DNA, 33 bp, Homo sapien
agtgtaatggaagatggagaatgaagcatcaga

SEQ ID NO: 703777 - DNA, 33 bp, Homo sapien
tcagaaataaaccaggaccctaatttgcatgga

SEQ ID NO: 703778 - DNA, 33 bp, Homo sapien
tcagaaataaaccagggccctaatttgcatgga

SEQ ID NO: 703779 - DNA, 33 bp, Homo sapien
tatttaattatttaccaagacctgttgataatc

SEQ ID NO: 703780 - DNA, 33 bp, Homo sapien
tatttaattatttacccagacctgttgataatc

SEQ ID NO: 703781 - DNA, 33 bp, Homo sapien
tgcattgagaatatacactacagaaattcagta

SEQ ID NO: 703782 - DNA, 33 bp, Homo sapien
tgcattgagaatatacgctacagaaattcagta

SEQ ID NO: 703783 - DNA, 33 bp, Homo sapien
gtaaatacttccagcaaacttagaggtatagaa

SEQ ID NO: 703784 - DNA, 33 bp, Homo sapien
gtaaatacttccagcagacttagaggtatagaa

SEQ ID NO: 703785 - DNA, 33 bp, Homo sapien
cacagaaaccataatgaaagccttatgcccatg

SEQ ID NO: 703786 - DNA, 33 bp, Homo sapien
cacagaaaccataatggaagccttatgcccatg

SEQ ID NO: 703787 - DNA, 33 bp, Homo sapien
gtttctacttctttccccacttaattctgaatt

SEQ ID NO: 703788 - DNA, 33 bp, Homo sapien
gtttctacttctttcctcacttaattctgaatt

SEQ ID NO: 703789 - DNA, 33 bp, Homo sapien
agatagattcatgacactgagtttgacaataat

SEQ ID NO: 703790 - DNA, 33 bp, Homo sapien
agatagattcatgacattgagtttgacaataat

SEQ ID NO: 703791 - DNA, 33 bp, Homo sapien
gagcacaggattttgagaccccatctctacaaa

SEQ ID NO: 703792 - DNA, 33 bp, Homo sapien
gagcacaggattttgataccccatctctacaaa

SEQ ID NO: 703793 - DNA, 33 bp, Homo sapien
tgtagtttgaaattgaaggacaaatttggtaaa

SEQ ID NO: 703794 - DNA, 33 bp, Homo sapien
tgtagtttgaaattgagggacaaatttggtaaa

SEQ ID NO: 703795 - DNA, 33 bp, Homo sapien
taagagcatctgtttgcagactagaagagaatt

SEQ ID NO: 703796 - DNA, 33 bp, Homo sapien
taagagcatctgtttgtagactagaagagaatt

SEQ ID NO: 703797 - DNA, 33 bp, Homo sapien
ttctccacagttcttcaaattgctcccaaagac

SEQ ID NO: 703798 - DNA, 33 bp, Homo sapien
ttctccacagttcttcgaattgctcccaaagac

SEQ ID NO: 703799 - DNA, 33 bp, Homo sapien
atgaggaaatgctaaccacctggaaaagaatcc

SEQ ID NO: 703800 - DNA, 33 bp, Homo sapien
atgaggaaatgctaactacctggaaaagaatcc

SEQ ID NO: 703801 - DNA, 33 bp, Homo sapien
ttagtggttaaaagcacgagctatggagttggg

SEQ ID NO: 703802 - DNA, 33 bp, Homo sapien
ttagtggttaaaagcatgagctatggagttggg

SEQ ID NO: 703803 - DNA, 33 bp, Homo sapien
ttgttcaaaaacatcaactattgtgattctggt

SEQ ID NO: 703804 - DNA, 33 bp, Homo sapien
ttgttcaaaaacatcatctattgtgattctggt

SEQ ID NO: 703805 - DNA, 33 bp, Homo sapien
gatctgaagccacagtaacaaatggacttttca

SEQ ID NO: 703806 - DNA, 33 bp, Homo sapien
gatctgaagccacagtcacaaatggacttttca

SEQ ID NO: 703807 - DNA, 33 bp, Homo sapien
tctgtctgttcttgtgaaattaccatgcctttt

SEQ ID NO: 703808 - DNA, 33 bp, Homo sapien
tctgtctgttcttgtgcaattaccatgcctttt

SEQ ID NO: 703809 - DNA, 33 bp, Homo sapien
tgaattgcattaacaaacttcttgctcttgaac

SEQ ID NO: 703810 - DNA, 33 bp, Homo sapien
tgaattgcattaacaagcttcttgctcttgaac

SEQ ID NO: 703811 - DNA, 33 bp, Homo sapien
taaaatgtgtatggtaactctgtagacccttga

SEQ ID NO: 703812 - DNA, 33 bp, Homo sapien
taaaatgtgtatggtatctctgtagacccttga

SEQ ID NO: 703813 - DNA, 33 bp, Homo sapien
gggcattcacaatgaccatcaacttgataacat

SEQ ID NO: 703814 - DNA, 33 bp, Homo sapien
gggcattcacaatgacgatcaacttgataacat

SEQ ID NO: 703815 - DNA, 33 bp, Homo sapien
accatgctcagctaaaaatttcttctaaaaata

SEQ ID NO: 703816 - DNA, 33 bp, Homo sapien
accatgctcagctaaagatttcttctaaaaata

SEQ ID NO: 703817 - DNA, 33 bp, Homo sapien
agactatgggaaagacaaatgagatgtgttctt

SEQ ID NO: 703818 - DNA, 33 bp, Homo sapien
agactatgggaaagacgaatgagatgtgttctt

SEQ ID NO: 703819 - DNA, 33 bp, Homo sapien
tgaagtaggatttgcccattaactaagttatgt

SEQ ID NO: 703820 - DNA, 33 bp, Homo sapien
tgaagtaggatttgcctattaactaagttatgt

SEQ ID NO: 703821 - DNA, 33 bp, Homo sapien
tttaaaaaaaactgaaagataacattcaatcca

SEQ ID NO: 703822 - DNA, 33 bp, Homo sapien
tttaaaaaaaactgaaggataacattcaatcca

SEQ ID NO: 703823 - DNA, 33 bp, Homo sapien
ggagtaggatgcagccaaatgctctcatcttaa

SEQ ID NO: 703824 - DNA, 33 bp, Homo sapien
ggagtaggatgcagccgaatgctctcatcttaa

SEQ ID NO: 703825 - DNA, 33 bp, Homo sapien
tcacagtgtgcatgaaaagttatcctccattaa

SEQ ID NO: 703826 - DNA, 33 bp, Homo sapien
tcacagtgtgcatgaagagttatcctccattaa

SEQ ID NO: 703827 - DNA, 33 bp, Homo sapien
aaagactctgtatacacagggcatttgggtgat

SEQ ID NO: 703828 - DNA, 33 bp, Homo sapien
aaagactctgtatacatagggcatttgggtgat

SEQ ID NO: 703829 - DNA, 33 bp, Homo sapien
acctttcatcagccccccttctatctctgaaaa

SEQ ID NO: 703830 - DNA, 33 bp, Homo sapien
acctttcatcagccccgcttctatctctgaaaa

SEQ ID NO: 703831 - DNA, 33 bp, Homo sapien
ttgttgtttcatgtcacattctaacttcctaag

SEQ ID NO: 703832 - DNA, 33 bp, Homo sapien
ttgttgtttcatgtcagattctaacttcctaag

SEQ ID NO: 703833 - DNA, 33 bp, Homo sapien
atcaaccacctgatgcgacctctcccttctgtg

SEQ ID NO: 703834 - DNA, 33 bp, Homo sapien
atcaaccacctgatgctacctctcccttctgtg

SEQ ID NO: 703835 - DNA, 33 bp, Homo sapien
tatacaaccctttgagaccggctgctgctgctt

SEQ ID NO: 703836 - DNA, 33 bp, Homo sapien
tatacaaccctttgaggccggctgctgctgctt

SEQ ID NO: 703837 - DNA, 33 bp, Homo sapien
aaatgtgaagcgaaaacggatagaacctcaagg

SEQ ID NO: 703838 - DNA, 33 bp, Homo sapien
aaatgtgaagcgaaaatggatagaacctcaagg

SEQ ID NO: 703839 - DNA, 33 bp, Homo sapien
gaaggaagatcaggaaaggaaagatagatttgg

SEQ ID NO: 703840 - DNA, 33 bp, Homo sapien
gaaggaagatcaggaatggaaagatagatttgg

SEQ ID NO: 703841 - DNA, 33 bp, Homo sapien
gcattggctgccaaggaaaactactacagaagc

SEQ ID NO: 703842 - DNA, 33 bp, Homo sapien
gcattggctgccaaggcaaactactacagaagc

SEQ ID NO: 703843 - DNA, 33 bp, Homo sapien
tatttttccccaagcaagataattgcattctaa

SEQ ID NO: 703844 - DNA, 33 bp, Homo sapien
tatttttccccaagcaggataattgcattctaa

SEQ ID NO: 703845 - DNA, 33 bp, Homo sapien
tgagcctgctataaaaattgttaaacacttgta

SEQ ID NO: 703846 - DNA, 33 bp, Homo sapien
tgagcctgctataaaacttgttaaacacttgta

SEQ ID NO: 703847 - DNA, 33 bp, Homo sapien
ttttgtgtgaagactgaaacaaatcatgttgaa

SEQ ID NO: 703848 - DNA, 33 bp, Homo sapien
ttttgtgtgaagactggaacaaatcatgttgaa

SEQ ID NO: 703849 - DNA, 33 bp, Homo sapien
aacagattttatgttacagatttctgaatttca

SEQ ID NO: 703850 - DNA, 33 bp, Homo sapien
aacagattttatgttagagatttctgaatttca

SEQ ID NO: 703851 - DNA, 33 bp, Homo sapien
ttattggtaaggtttacggtcgacagtaggcta

SEQ ID NO: 703852 - DNA, 33 bp, Homo sapien
ttattggtaaggtttatggtcgacagtaggcta

SEQ ID NO: 703853 - DNA, 33 bp, Homo sapien
aaaggaggtccttaggaaatgatgccatccttg

SEQ ID NO: 703854 - DNA, 33 bp, Homo sapien
aaaggaggtccttagggaatgatgccatccttg

SEQ ID NO: 703855 - DNA, 33 bp, Homo sapien
tctaatcgcttcttaaactaaccaatccaatcc

SEQ ID NO: 703856 - DNA, 33 bp, Homo sapien
tctaatcgcttcttaagctaaccaatccaatcc

SEQ ID NO: 703857 - DNA, 33 bp, Homo sapien
aaggaatgatatataacttaccatgcttcagac

SEQ ID NO: 703858 - DNA, 33 bp, Homo sapien
aaggaatgatatataatttaccatgcttcagac

SEQ ID NO: 703859 - DNA, 33 bp, Homo sapien
attgagaggatttcaaaaatgtatatataatgg

SEQ ID NO: 703860 - DNA, 33 bp, Homo sapien
attgagaggatttcaacaatgtatatataatgg

SEQ ID NO: 703861 - DNA, 33 bp, Homo sapien
cactgtgcccacataacagagagtacttacaca

SEQ ID NO: 703862 - DNA, 33 bp, Homo sapien
cactgtgcccacataatagagagtacttacaca

SEQ ID NO: 703863 - DNA, 33 bp, Homo sapien
gtagtatgtaacatcacatacaggcaacttaca

SEQ ID NO: 703864 - DNA, 33 bp, Homo sapien
gtagtatgtaacatcatatacaggcaacttaca

SEQ ID NO: 703865 - DNA, 33 bp, Homo sapien
tcattgcttggcacacagtataagcattcaata

SEQ ID NO: 703866 - DNA, 33 bp, Homo sapien
tcattgcttggcacacggtataagcattcaata

SEQ ID NO: 703867 - DNA, 33 bp, Homo sapien
gtcagcttggcattcacaactgtgcgatttgta

SEQ ID NO: 703868 - DNA, 33 bp, Homo sapien
gtcagcttggcattcataactgtgcgatttgta

SEQ ID NO: 703869 - DNA, 33 bp, Homo sapien
acagccacatcaggtacgaaaaaatgtttaggt

SEQ ID NO: 703870 - DNA, 33 bp, Homo sapien
acagccacatcaggtatgaaaaaatgtttaggt

SEQ ID NO: 703871 - DNA, 33 bp, Homo sapien
ttattcatagaattcaagaaagtcttaccccat

SEQ ID NO: 703872 - DNA, 33 bp, Homo sapien
ttattcatagaattcaggaaagtcttaccccat

SEQ ID NO: 703873 - DNA, 33 bp, Homo sapien
ggtgctttggttagaccagagcaattatttcaa

SEQ ID NO: 703874 - DNA, 33 bp, Homo sapien
ggtgctttggttagacgagagcaattatttcaa

SEQ ID NO: 703875 - DNA, 33 bp, Homo sapien
tctggcatcttggttaaaaaacatttctgtaat

SEQ ID NO: 703876 - DNA, 33 bp, Homo sapien
tctggcatcttggttagaaaacatttctgtaat

SEQ ID NO: 703877 - DNA, 33 bp, Homo sapien
atttcaaatgtctggactagtataatcaatata

SEQ ID NO: 703878 - DNA, 33 bp, Homo sapien
atttcaaatgtctggagtagtataatcaatata

SEQ ID NO: 703879 - DNA, 33 bp, Homo sapien
tagcatttctgtttccaaaagcctactgtccca

SEQ ID NO: 703880 - DNA, 33 bp, Homo sapien
tagcatttctgtttccgaaagcctactgtccca

SEQ ID NO: 703881 - DNA, 33 bp, Homo sapien
gaagcatttgagtataacagacactataccaaa

SEQ ID NO: 703882 - DNA, 33 bp, Homo sapien
gaagcatttgagtataccagacactataccaaa

SEQ ID NO: 703883 - DNA, 33 bp, Homo sapien
atgcagaatcttgggccacacaaaacctattga

SEQ ID NO: 703884 - DNA, 33 bp, Homo sapien
atgcagaatcttgggcgacacaaaacctattga

SEQ ID NO: 703885 - DNA, 33 bp, Homo sapien
cattcagaggcacaaacgatgtaactttacact

SEQ ID NO: 703886 - DNA, 33 bp, Homo sapien
cattcagaggcacaaatgatgtaactttacact

SEQ ID NO: 703887 - DNA, 33 bp, Homo sapien
aaattcaggtaaatgccaagaaggaaaagaata

SEQ ID NO: 703888 - DNA, 33 bp, Homo sapien
aaattcaggtaaatgctaagaaggaaaagaata

SEQ ID NO: 703889 - DNA, 33 bp, Homo sapien
catgttcctgccttataaaaagcaaagttctcc

SEQ ID NO: 703890 - DNA, 33 bp, Homo sapien
catgttcctgccttatgaaaagcaaagttctcc

SEQ ID NO: 703891 - DNA, 33 bp, Homo sapien
atagtccctttgttaacgagtccagccttcttc

SEQ ID NO: 703892 - DNA, 33 bp, Homo sapien
atagtccctttgttaatgagtccagccttcttc

SEQ ID NO: 703893 - DNA, 33 bp, Homo sapien
acaatcctgctaaataaatttaaaaatcaatga

SEQ ID NO: 703894 - DNA, 33 bp, Homo sapien
acaatcctgctaaatacatttaaaaatcaatga

SEQ ID NO: 703895 - DNA, 33 bp, Homo sapien
cctcaatgaatagtgaagagaatcgagtaaata

SEQ ID NO: 703896 - DNA, 33 bp, Homo sapien
cctcaatgaatagtgaggagaatcgagtaaata

SEQ ID NO: 703897 - DNA, 33 bp, Homo sapien
aaaggagaatatcccaccacagaaagataagct

SEQ ID NO: 703898 - DNA, 33 bp, Homo sapien
aaaggagaatatcccatcacagaaagataagct

SEQ ID NO: 703899 - DNA, 33 bp, Homo sapien
tggtaagttgatgtcacgttgaattgccagcat

SEQ ID NO: 703900 - DNA, 33 bp, Homo sapien
tggtaagttgatgtcatgttgaattgccagcat

SEQ ID NO: 703901 - DNA, 33 bp, Homo sapien
gaaacgagtggctgcagaggaatgggtcaaagt

SEQ ID NO: 703902 - DNA, 33 bp, Homo sapien
gaaacgagtggctgcataggaatgggtcaaagt

SEQ ID NO: 703903 - DNA, 33 bp, Homo sapien
taaagtgcaggcatgaaagaggatagtaggtaa

SEQ ID NO: 703904 - DNA, 33 bp, Homo sapien
taaagtgcaggcatgatagaggatagtaggtaa

SEQ ID NO: 703905 - DNA, 33 bp, Homo sapien
taaaacattcctccagactaactgaaactatgc

SEQ ID NO: 703906 - DNA, 33 bp, Homo sapien
taaaacattcctccagtctaactgaaactatgc

SEQ ID NO: 703907 - DNA, 33 bp, Homo sapien
ttctgggatgcagttaaattatatggaagtagc

SEQ ID NO: 703908 - DNA, 33 bp, Homo sapien
ttctgggatgcagttagattatatggaagtagc

SEQ ID NO: 703909 - DNA, 33 bp, Homo sapien
ctgaaaaagcctcaacagaagatgtgaataaac

SEQ ID NO: 703910 - DNA, 33 bp, Homo sapien
ctgaaaaagcctcaacggaagatgtgaataaac

SEQ ID NO: 703911 - DNA, 33 bp, Homo sapien
aattcgattctgtcaccgtctgctcagaggttt

SEQ ID NO: 703912 - DNA, 33 bp, Homo sapien
aattcgattctgtcactgtctgctcagaggttt

SEQ ID NO: 703913 - DNA, 33 bp, Homo sapien
gtgcttggtgttcactcacttgcagacatatca

SEQ ID NO: 703914 - DNA, 33 bp, Homo sapien
gtgcttggtgttcactgacttgcagacatatca

SEQ ID NO: 703915 - DNA, 33 bp, Homo sapien
acacgatgtttctcccaagtcagtctcctaaat

SEQ ID NO: 703916 - DNA, 33 bp, Homo sapien
acacgatgtttctcccgagtcagtctcctaaat

SEQ ID NO: 703917 - DNA, 33 bp, Homo sapien
tcactgctgctacctacggcttacttttttgtt

SEQ ID NO: 703918 - DNA, 33 bp, Homo sapien
tcactgctgctacctatggcttacttttttgtt

SEQ ID NO: 703919 - DNA, 33 bp, Homo sapien
agcaatgtgagaaacaactaatgcaggtactta

SEQ ID NO: 703920 - DNA, 33 bp, Homo sapien
agcaatgtgagaaacagctaatgcaggtactta

SEQ ID NO: 703921 - DNA, 33 bp, Homo sapien
tgatgtctggtgaaggaccatttcctggcttat

SEQ ID NO: 703922 - DNA, 33 bp, Homo sapien
tgatgtctggtgaaggtccatttcctggcttat

SEQ ID NO: 703923 - DNA, 33 bp, Homo sapien
tattctccatgttagcgctctactttgaatgat

SEQ ID NO: 703924 - DNA, 33 bp, Homo sapien
tattctccatgttagctctctactttgaatgat

SEQ ID NO: 703925 - DNA, 33 bp, Homo sapien
ccagggaggagactccacaagaaggagcagaca

SEQ ID NO: 703926 - DNA, 33 bp, Homo sapien
ccagggaggagactccgcaagaaggagcagaca

SEQ ID NO: 703927 - DNA, 33 bp, Homo sapien
ccagggaaggcatcaccgaggaggaaacttttc

SEQ ID NO: 703928 - DNA, 33 bp, Homo sapien
ccagggaaggcatcactgaggaggaaacttttc

SEQ ID NO: 703929 - DNA, 33 bp, Homo sapien
tagtcactgaggacaccactaagtatagaaccc

SEQ ID NO: 703930 - DNA, 33 bp, Homo sapien
tagtcactgaggacactactaagtatagaaccc

SEQ ID NO: 703931 - DNA, 33 bp, Homo sapien
aacttaacagtgacttaaacaagtaaggacttt

SEQ ID NO: 703932 - DNA, 33 bp, Homo sapien
aacttaacagtgacttgaacaagtaaggacttt

SEQ ID NO: 703933 - DNA, 33 bp, Homo sapien
ctagctttaattggacacttgcagatagttgtc

SEQ ID NO: 703934 - DNA, 33 bp, Homo sapien
ctagctttaattggacgcttgcagatagttgtc

SEQ ID NO: 703935 - DNA, 33 bp, Homo sapien
agtcaggatccacctaataacagtgcataatgc

SEQ ID NO: 703936 - DNA, 33 bp, Homo sapien
agtcaggatccacctagtaacagtgcataatgc

SEQ ID NO: 703937 - DNA, 33 bp, Homo sapien
aagaagccagttcacacgaggccctaaggcttt

SEQ ID NO: 703938 - DNA, 33 bp, Homo sapien
aagaagccagttcacatgaggccctaaggcttt

SEQ ID NO: 703939 - DNA, 33 bp, Homo sapien
aaactgaacaataaagaaacaatttgaaatcct

SEQ ID NO: 703940 - DNA, 33 bp, Homo sapien
aaactgaacaataaaggaacaatttgaaatcct

SEQ ID NO: 703941 - DNA, 33 bp, Homo sapien
tttcatatcctcacaaatagttggtattggtca

SEQ ID NO: 703942 - DNA, 33 bp, Homo sapien
tttcatatcctcacaagtagttggtattggtca

SEQ ID NO: 703943 - DNA, 33 bp, Homo sapien
tgttttttgttggctgcattatgaatgtatagg

SEQ ID NO: 703944 - DNA, 33 bp, Homo sapien
tgttttttgttggctggattatgaatgtatagg

SEQ ID NO: 703945 - DNA, 33 bp, Homo sapien
cacctgtcaaggagttcaaattctagtaacagt

SEQ ID NO: 703946 - DNA, 33 bp, Homo sapien
cacctgtcaaggagtttaaattctagtaacagt

SEQ ID NO: 703947 - DNA, 33 bp, Homo sapien
atttagaaataatcagccaaaatgttgtttaat

SEQ ID NO: 703948 - DNA, 33 bp, Homo sapien
atttagaaataatcaggcaaaatgttgtttaat

SEQ ID NO: 703949 - DNA, 33 bp, Homo sapien
ttgctgagtgcataccacagtgttcctgaatta

SEQ ID NO: 703950 - DNA, 33 bp, Homo sapien
ttgctgagtgcataccgcagtgttcctgaatta

SEQ ID NO: 703951 - DNA, 33 bp, Homo sapien
gctcctccactgataaatattcacagtaagtat

SEQ ID NO: 703952 - DNA, 33 bp, Homo sapien
gctcctccactgataactattcacagtaagtat

SEQ ID NO: 703953 - DNA, 33 bp, Homo sapien
gtaaggcacctgtgaagatgtttccatgtgctc

SEQ ID NO: 703954 - DNA, 33 bp, Homo sapien
gtaaggcacctgtgaatatgtttccatgtgctc

SEQ ID NO: 703955 - DNA, 33 bp, Homo sapien
cctccatgcagaattaggttcccatcaagatgg

SEQ ID NO: 703956 - DNA, 33 bp, Homo sapien
cctccatgcagaattatgttcccatcaagatgg

SEQ ID NO: 703957 - DNA, 33 bp, Homo sapien
gatacccatgaactataagagtgtaattcattg

SEQ ID NO: 703958 - DNA, 33 bp, Homo sapien
gatacccatgaactatgagagtgtaattcattg

SEQ ID NO: 703959 - DNA, 33 bp, Homo sapien
cagagcacccagggtccatcatgaaaagaggaa

SEQ ID NO: 703960 - DNA, 33 bp, Homo sapien
cagagcacccagggtcgatcatgaaaagaggaa

SEQ ID NO: 703961 - DNA, 33 bp, Homo sapien
tttcacagtaggaacacatacagggttttaaag

SEQ ID NO: 703962 - DNA, 33 bp, Homo sapien
tttcacagtaggaacatatacagggttttaaag

SEQ ID NO: 703963 - DNA, 33 bp, Homo sapien
atacatgagagtggcactaaagccttcagtttt

SEQ ID NO: 703964 - DNA, 33 bp, Homo sapien
atacatgagagtggcagtaaagccttcagtttt

SEQ ID NO: 703965 - DNA, 33 bp, Homo sapien
ctcaaatacacctttaactcatctaactggcaa

SEQ ID NO: 703966 - DNA, 33 bp, Homo sapien
ctcaaatacacctttatctcatctaactggcaa

SEQ ID NO: 703967 - DNA, 33 bp, Homo sapien
taagacaagaaattcaaagcaaggagaaaatta

SEQ ID NO: 703968 - DNA, 33 bp, Homo sapien
taagacaagaaattcacagcaaggagaaaatta

SEQ ID NO: 703969 - DNA, 33 bp, Homo sapien
atttattgcactatagacctctggagtccctaa

SEQ ID NO: 703970 - DNA, 33 bp, Homo sapien
atttattgcactatagtcctctggagtccctaa

SEQ ID NO: 703971 - DNA, 33 bp, Homo sapien
catacttcttacacagcctgcagatctgtgagc

SEQ ID NO: 703972 - DNA, 33 bp, Homo sapien
catacttcttacacaggctgcagatctgtgagc

SEQ ID NO: 703973 - DNA, 33 bp, Homo sapien
taagttgagataaataagcggattcacacaagg

SEQ ID NO: 703974 - DNA, 33 bp, Homo sapien
taagttgagataaatatgcggattcacacaagg

SEQ ID NO: 703975 - DNA, 33 bp, Homo sapien
tacctttgttcaaagaaagcaattcaactactc

SEQ ID NO: 703976 - DNA, 33 bp, Homo sapien
tacctttgttcaaagagagcaattcaactactc

SEQ ID NO: 703977 - DNA, 33 bp, Homo sapien
aagaggatgtgaaggccacgtgaagagactgga

SEQ ID NO: 703978 - DNA, 33 bp, Homo sapien
aagaggatgtgaaggctacgtgaagagactgga

SEQ ID NO: 703979 - DNA, 33 bp, Homo sapien
gaactaaagcctttgggacgttcagttgtgttt

SEQ ID NO: 703980 - DNA, 33 bp, Homo sapien
gaactaaagcctttggtacgttcagttgtgttt

SEQ ID NO: 703981 - DNA, 33 bp, Homo sapien
ggacaaatgccagacaatccttctttataaaac

SEQ ID NO: 703982 - DNA, 33 bp, Homo sapien
ggacaaatgccagacattccttctttataaaac

SEQ ID NO: 703983 - DNA, 33 bp, Homo sapien
ttcagaggatagaaaaatggcaactcaaggaag

SEQ ID NO: 703984 - DNA, 33 bp, Homo sapien
ttcagaggatagaaaactggcaactcaaggaag

SEQ ID NO: 703985 - DNA, 33 bp, Homo sapien
tggctagccatagtcccagatctgtactgaata

SEQ ID NO: 703986 - DNA, 33 bp, Homo sapien
tggctagccatagtccgagatctgtactgaata

SEQ ID NO: 703987 - DNA, 33 bp, Homo sapien
gaacaagagtgtgagcaactgaatctgcatttt

SEQ ID NO: 703988 - DNA, 33 bp, Homo sapien
gaacaagagtgtgagcgactgaatctgcatttt

SEQ ID NO: 703989 - DNA, 33 bp, Homo sapien
tgataagtggataacaaagggaagaaaacaaaa

SEQ ID NO: 703990 - DNA, 33 bp, Homo sapien
tgataagtggataacagagggaagaaaacaaaa

SEQ ID NO: 703991 - DNA, 33 bp, Homo sapien
tgtattctctcaggaaagcctctgctctgcttt

SEQ ID NO: 703992 - DNA, 33 bp, Homo sapien
tgtattctctcaggaaggcctctgctctgcttt

SEQ ID NO: 703993 - DNA, 33 bp, Homo sapien
aagctgctgtccaaagacggaatgtattctctc

SEQ ID NO: 703994 - DNA, 33 bp, Homo sapien
aagctgctgtccaaaggcggaatgtattctctc

SEQ ID NO: 703995 - DNA, 33 bp, Homo sapien
tgatgtatttcttaaccatctgacgtgtacaaa

SEQ ID NO: 703996 - DNA, 33 bp, Homo sapien
tgatgtatttcttaactatctgacgtgtacaaa

SEQ ID NO: 703997 - DNA, 33 bp, Homo sapien
tatcttctttcctccacgcttcccccagaaaaa

SEQ ID NO: 703998 - DNA, 33 bp, Homo sapien
tatcttctttcctccatgcttcccccagaaaaa

SEQ ID NO: 703999 - DNA, 33 bp, Homo sapien
aaaactaaggctagcaagtaatttgcctaaggt

SEQ ID NO: 704000 - DNA, 33 bp, Homo sapien
aaaactaaggctagcaggtaatttgcctaaggt

SEQ ID NO: 704001 - DNA, 33 bp, Homo sapien
aagagtgcattcttaaacatccactactgtgcc

SEQ ID NO: 704002 - DNA, 33 bp, Homo sapien
aagagtgcattcttaagcatccactactgtgcc

SEQ ID NO: 704003 - DNA, 33 bp, Homo sapien
cacccagtgtttgttacatcatgcataagtaca

SEQ ID NO: 704004 - DNA, 33 bp, Homo sapien
cacccagtgtttgttatatcatgcataagtaca

SEQ ID NO: 704005 - DNA, 33 bp, Homo sapien
acttcatcctctgaaaagcagcaaggtcaggtg

SEQ ID NO: 704006 - DNA, 33 bp, Homo sapien
acttcatcctctgaaacgcagcaaggtcaggtg

SEQ ID NO: 704007 - DNA, 33 bp, Homo sapien
aagatagcatctatgcaaaaggaacaatgaaaa

SEQ ID NO: 704008 - DNA, 33 bp, Homo sapien
aagatagcatctatgcgaaaggaacaatgaaaa

SEQ ID NO: 704009 - DNA, 33 bp, Homo sapien
gtgcctgcttcctaggacagaaatcaaaaggat

SEQ ID NO: 704010 - DNA, 33 bp, Homo sapien
gtgcctgcttcctagggcagaaatcaaaaggat

SEQ ID NO: 704011 - DNA, 33 bp, Homo sapien
cctggtttaagttgaaaagaagtctcaaaagaa

SEQ ID NO: 704012 - DNA, 33 bp, Homo sapien
cctggtttaagttgaagagaagtctcaaaagaa

SEQ ID NO: 704013 - DNA, 33 bp, Homo sapien
attacagtaaccgtaacgtcaaacagcatgaga

SEQ ID NO: 704014 - DNA, 33 bp, Homo sapien
attacagtaaccgtaaggtcaaacagcatgaga

SEQ ID NO: 704015 - DNA, 33 bp, Homo sapien
gtcacccagatagtgaagaaagtacccaatagg

SEQ ID NO: 704016 - DNA, 33 bp, Homo sapien
gtcacccagatagtgacgaaagtacccaatagg

SEQ ID NO: 704017 - DNA, 33 bp, Homo sapien
atgtgagcctcctggccatgtgatcttaggcaa

SEQ ID NO: 704018 - DNA, 33 bp, Homo sapien
atgtgagcctcctggctatgtgatcttaggcaa

SEQ ID NO: 704019 - DNA, 33 bp, Homo sapien
taaattacaggcagcacggtgtaaaagtgtgcg

SEQ ID NO: 704020 - DNA, 33 bp, Homo sapien
taaattacaggcagcatggtgtaaaagtgtgcg

SEQ ID NO: 704021 - DNA, 33 bp, Homo sapien
tggatcccctttctaacaggaatgacttacaga

SEQ ID NO: 704022 - DNA, 33 bp, Homo sapien
tggatcccctttctaagaggaatgacttacaga

SEQ ID NO: 704023 - DNA, 33 bp, Homo sapien
ccctacagccatctgggatgagacagtggaccc

SEQ ID NO: 704024 - DNA, 33 bp, Homo sapien
ccctacagccatctggtatgagacagtggaccc

SEQ ID NO: 704025 - DNA, 33 bp, Homo sapien
ttccatgatcaatactaaaaccctataaaggat

SEQ ID NO: 704026 - DNA, 33 bp, Homo sapien
ttccatgatcaatactgaaaccctataaaggat

SEQ ID NO: 704027 - DNA, 33 bp, Homo sapien
ggagactatgctaataaccaaactccaccagca

SEQ ID NO: 704028 - DNA, 33 bp, Homo sapien
ggagactatgctaatatccaaactccaccagca

SEQ ID NO: 704029 - DNA, 33 bp, Homo sapien
agtcatcctttgtgcgacatcatttacaaagtt

SEQ ID NO: 704030 - DNA, 33 bp, Homo sapien
agtcatcctttgtgcgtcatcatttacaaagtt

SEQ ID NO: 704031 - DNA, 33 bp, Homo sapien
gaactgaggtaagtccacagttaagttcattgc

SEQ ID NO: 704032 - DNA, 33 bp, Homo sapien
gaactgaggtaagtccgcagttaagttcattgc

SEQ ID NO: 704033 - DNA, 33 bp, Homo sapien
catgtacgctcaaccacggcttccggtgagggg

SEQ ID NO: 704034 - DNA, 33 bp, Homo sapien
catgtacgctcaaccatggcttccggtgagggg

SEQ ID NO: 704035 - DNA, 33 bp, Homo sapien
tgccagaagagaagagacccgagactgcagtgt

SEQ ID NO: 704036 - DNA, 33 bp, Homo sapien
tgccagaagagaagaggcccgagactgcagtgt

SEQ ID NO: 704037 - DNA, 33 bp, Homo sapien
gaaaggatcatatctacctaaaagcaagaacac

SEQ ID NO: 704038 - DNA, 33 bp, Homo sapien
gaaaggatcatatctagctaaaagcaagaacac

SEQ ID NO: 704039 - DNA, 33 bp, Homo sapien
aactcatgaaaactaacatgggcacagttgggt

SEQ ID NO: 704040 - DNA, 33 bp, Homo sapien
aactcatgaaaactaagatgggcacagttgggt

SEQ ID NO: 704041 - DNA, 33 bp, Homo sapien
tgtagtgaagaaagacaattctagatcagagct

SEQ ID NO: 704042 - DNA, 33 bp, Homo sapien
tgtagtgaagaaagaccattctagatcagagct

SEQ ID NO: 704043 - DNA, 33 bp, Homo sapien
ttcgaagtctgaaaaactagattgcattaggat

SEQ ID NO: 704044 - DNA, 33 bp, Homo sapien
ttcgaagtctgaaaaattagattgcattaggat

SEQ ID NO: 704045 - DNA, 33 bp, Homo sapien
gaagaaagggcagtcacaatacttacttctaac

SEQ ID NO: 704046 - DNA, 33 bp, Homo sapien
gaagaaagggcagtcataatacttacttctaac

SEQ ID NO: 704047 - DNA, 33 bp, Homo sapien
tgacctagcgttccaaattccataccatcattt

SEQ ID NO: 704048 - DNA, 33 bp, Homo sapien
tgacctagcgttccaagttccataccatcattt

SEQ ID NO: 704049 - DNA, 33 bp, Homo sapien
actgtctggtggcagaataatcgggattttttt

SEQ ID NO: 704050 - DNA, 33 bp, Homo sapien
actgtctggtggcagagtaatcgggattttttt

SEQ ID NO: 704051 - DNA, 33 bp, Homo sapien
ttttgcccacttccaacctaaatacataaataa

SEQ ID NO: 704052 - DNA, 33 bp, Homo sapien
ttttgcccacttccaatctaaatacataaataa

SEQ ID NO: 704053 - DNA, 33 bp, Homo sapien
ctgggtttgccaagaacgtaaggtcctaactgc

SEQ ID NO: 704054 - DNA, 33 bp, Homo sapien
ctgggtttgccaagaatgtaaggtcctaactgc

SEQ ID NO: 704055 - DNA, 33 bp, Homo sapien
tgctttatggtaaacagcatggagacaacttcc

SEQ ID NO: 704056 - DNA, 33 bp, Homo sapien
tgctttatggtaaacatcatggagacaacttcc

SEQ ID NO: 704057 - DNA, 33 bp, Homo sapien
caaaaactacagaaaacgcaaagtaaaatcaga

SEQ ID NO: 704058 - DNA, 33 bp, Homo sapien
caaaaactacagaaaatgcaaagtaaaatcaga

SEQ ID NO: 704059 - DNA, 33 bp, Homo sapien
attagaagtttaagatcacttgaccccaaacct

SEQ ID NO: 704060 - DNA, 33 bp, Homo sapien
attagaagtttaagatgacttgaccccaaacct

SEQ ID NO: 704061 - DNA, 33 bp, Homo sapien; identical to SEQ ID NO: 704059

SEQ ID NO: 704062 - DNA, 33 bp, Homo sapien; identical to SEQ ID NO: 704060

SEQ ID NO: 704063 - DNA, 33 bp, Homo sapien
atattaaacagcaatcacattattttattcaat

SEQ ID NO: 704064 - DNA, 33 bp, Homo sapien
atattaaacagcaatcgcattattttattcaat

SEQ ID NO: 704065 - DNA, 33 bp, Homo sapien
tgggtgccaatatctcaacttcttaaagggatc

SEQ ID NO: 704066 - DNA, 33 bp, Homo sapien
tgggtgccaatatctctacttcttaaagggatc

SEQ ID NO: 704067 - DNA, 33 bp, Homo sapien
ctcgcgctcgcgacagactcttccttcccgagg

SEQ ID NO: 704068 - DNA, 33 bp, Homo sapien
ctcgcgctcgcgacaggctcttccttcccgagg

SEQ ID NO: 704069 - DNA, 33 bp, Homo sapien
aatctgaagaatcatcaaaatttagccaaagga

SEQ ID NO: 704070 - DNA, 33 bp, Homo sapien
aatctgaagaatcatcgaaatttagccaaagga

SEQ ID NO: 704071 - DNA, 33 bp, Homo sapien
ttgatgtaaccaccaaagaaattgttcttgctg

SEQ ID NO: 704072 - DNA, 33 bp, Homo sapien
ttgatgtaaccaccaacgaaattgttcttgctg

SEQ ID NO: 704073 - DNA, 33 bp, Homo sapien; identical to SEQ ID NO: 704071

SEQ ID NO: 704074 - DNA, 33 bp, Homo sapien; identical to SEQ ID NO: 704072

SEQ ID NO: 704075 - DNA, 33 bp, Homo sapien
cttgcctctgagttgacaagataccataagata

SEQ ID NO: 704076 - DNA, 33 bp, Homo sapien
cttgcctctgagttgataagataccataagata

SEQ ID NO: 704077 - DNA, 33 bp, Homo sapien
cattaatatgcttcaaacttaatttcaatacat

SEQ ID NO: 704078 - DNA, 33 bp, Homo sapien
cattaatatgcttcaaccttaatttcaatacat

SEQ ID NO: 704079 - DNA, 33 bp, Homo sapien
atagacctacaatccacgaatttgtccaaatct

SEQ ID NO: 704080 - DNA, 33 bp, Homo sapien
atagacctacaatccatgaatttgtccaaatct

SEQ ID NO: 704081 - DNA, 33 bp, Homo sapien
gtcaattagtccattacgtatgacacaggctga

SEQ ID NO: 704082 - DNA, 33 bp, Homo sapien
gtcaattagtccattatgtatgacacaggctga

SEQ ID NO: 704083 - DNA, 33 bp, Homo sapien
ttatctgtaaatataacgtgcatataactttgt

SEQ ID NO: 704084 - DNA, 33 bp, Homo sapien
ttatctgtaaatataatgtgcatataactttgt

SEQ ID NO: 704085 - DNA, 33 bp, Homo sapien
aaaagagagagaaagacgacaggaacttggaga

SEQ ID NO: 704086 - DNA, 33 bp, Homo sapien
aaaagagagagaaagatgacaggaacttggaga

SEQ ID NO: 704087 - DNA, 33 bp, Homo sapien
catccagtactattttaaaaaagtcagaaatac

SEQ ID NO: 704088 - DNA, 33 bp, Homo sapien
catccagtactattttgaaaaagtcagaaatac

SEQ ID NO: 704089 - DNA, 33 bp, Homo sapien
gagcatacctttaagaaaaaaagtgagtgttga

SEQ ID NO: 704090 - DNA, 33 bp, Homo sapien
gagcatacctttaagagaaaaagtgagtgttga

SEQ ID NO: 704091 - DNA, 33 bp, Homo sapien
tcccagagcactgataaccctccactgctaaca

SEQ ID NO: 704092 - DNA, 33 bp, Homo sapien
tcccagagcactgatacccctccactgctaaca

SEQ ID NO: 704093 - DNA, 33 bp, Homo sapien
ccatgtccccatgaagaccgagatctcttgtcc

SEQ ID NO: 704094 - DNA, 33 bp, Homo sapien
ccatgtccccatgaagtccgagatctcttgtcc

SEQ ID NO: 704095 - DNA, 33 bp, Homo sapien
ttcattctaagatacacattccccccacattcc

SEQ ID NO: 704096 - DNA, 33 bp, Homo sapien
ttcattctaagatacatattccccccacattcc

SEQ ID NO: 704097 - DNA, 33 bp, Homo sapien
acaagaataaacaaaacgaccaaaggaacagac

SEQ ID NO: 704098 - DNA, 33 bp, Homo sapien
acaagaataaacaaaatgaccaaaggaacagac

SEQ ID NO: 704099 - DNA, 33 bp, Homo sapien
ttccgtgaagaatcagcaggatgaagtaatcaa

SEQ ID NO: 704100 - DNA, 33 bp, Homo sapien
ttccgtgaagaatcagtaggatgaagtaatcaa

SEQ ID NO: 704101 - DNA, 33 bp, Homo sapien
agcaaggatgtttataaccaagtcccatctgct

SEQ ID NO: 704102 - DNA, 33 bp, Homo sapien
agcaaggatgtttatacccaagtcccatctgct

SEQ ID NO: 704103 - DNA, 33 bp, Homo sapien
tgtaaatatcattctgaagcaaatatccacctc

SEQ ID NO: 704104 - DNA, 33 bp, Homo sapien
tgtaaatatcattctggagcaaatatccacctc

SEQ ID NO: 704105 - DNA, 33 bp, Homo sapien
atcaaatatttgcagcaattgtaggtaatcaga

SEQ ID NO: 704106 - DNA, 33 bp, Homo sapien
atcaaatatttgcagctattgtaggtaatcaga

SEQ ID NO: 704107 - DNA, 33 bp, Homo sapien
aattacatttgactcaaattgtggtgaaactaa

SEQ ID NO: 704108 - DNA, 33 bp, Homo sapien
aattacatttgactcacattgtggtgaaactaa

SEQ ID NO: 704109 - DNA, 33 bp, Homo sapien
tgcttaaaatgtttaactagtactttgttgtgt

SEQ ID NO: 704110 - DNA, 33 bp, Homo sapien
tgcttaaaatgtttaattagtactttgttgtgt

SEQ ID NO: 704111 - DNA, 33 bp, Homo sapien
aagaccatgtaatttgaacaaatttccacaatt

SEQ ID NO: 704112 - DNA, 33 bp, Homo sapien
aagaccatgtaatttggacaaatttccacaatt

SEQ ID NO: 704113 - DNA, 33 bp, Homo sapien
gagggtgagtgaccatcactacctgagttccac

SEQ ID NO: 704114 - DNA, 33 bp, Homo sapien
gagggtgagtgaccattactacctgagttccac

SEQ ID NO: 704115 - DNA, 33 bp, Homo sapien
tgtctgtgggtggcaacgggggtcaacaaaaaa

SEQ ID NO: 704116 - DNA, 33 bp, Homo sapien
tgtctgtgggtggcaatgggggtcaacaaaaaa

SEQ ID NO: 704117 - DNA, 33 bp, Homo sapien
gcaaggtatttcttacgccaatgggccccatgc

SEQ ID NO: 704118 - DNA, 33 bp, Homo sapien
gcaaggtatttcttactccaatgggccccatgc

SEQ ID NO: 704119 - DNA, 33 bp, Homo sapien
tcctcaatgtcagcaacttcctgccgaatgctg

SEQ ID NO: 704120 - DNA, 33 bp, Homo sapien
tcctcaatgtcagcaatttcctgccgaatgctg

SEQ ID NO: 704121 - DNA, 33 bp, Homo sapien
gaacaaattctggccaatgattgcccggattga

SEQ ID NO: 704122 - DNA, 33 bp, Homo sapien
gaacaaattctggccagtgattgcccggattga

SEQ ID NO: 704123 - DNA, 33 bp, Homo sapien
gagttggcttttgaagaaatagttctgacaaat

SEQ ID NO: 704124 - DNA, 33 bp, Homo sapien
gagttggcttttgaagtaatagttctgacaaat

SEQ ID NO: 704125 - DNA, 33 bp, Homo sapien
ccccatcagtagtcaactatgtggtaataatcc

SEQ ID NO: 704126 - DNA, 33 bp, Homo sapien
ccccatcagtagtcaattatgtggtaataatcc

SEQ ID NO: 704127 - DNA, 33 bp, Homo sapien
ataaaagaagccatacaagatcatacctcttat

SEQ ID NO: 704128 - DNA, 33 bp, Homo sapien
ataaaagaagccatacgagatcatacctcttat

SEQ ID NO: 704129 - DNA, 33 bp, Homo sapien
tgaaaagtcctcactacggtctacagccctggc

SEQ ID NO: 704130 - DNA, 33 bp, Homo sapien
tgaaaagtcctcactatggtctacagccctggc

SEQ ID NO: 704131 - DNA, 33 bp, Homo sapien
acagacaccttgcactaaacatctgagttggca

SEQ ID NO: 704132 - DNA, 33 bp, Homo sapien
acagacaccttgcactgaacatctgagttggca

SEQ ID NO: 704133 - DNA, 33 bp, Homo sapien
ttcttatttatcaccacgggttagctttgcctg

SEQ ID NO: 704134 - DNA, 33 bp, Homo sapien
ttcttatttatcaccatgggttagctttgcctg

SEQ ID NO: 704135 - DNA, 33 bp, Homo sapien
agagagggaggctgaccaggttcacagaaagaa

SEQ ID NO: 704136 - DNA, 33 bp, Homo sapien
agagagggaggctgacgaggttcacagaaagaa

SEQ ID NO: 704137 - DNA, 33 bp, Homo sapien
taactgcactaacaaaaaacctccagtcttagt

SEQ ID NO: 704138 - DNA, 33 bp, Homo sapien
taactgcactaacaaacaacctccagtcttagt

SEQ ID NO: 704139 - DNA, 33 bp, Homo sapien
gcttaggaactttaaaatatcaaatgttctatt

SEQ ID NO: 704140 - DNA, 33 bp, Homo sapien
gcttaggaactttaaactatcaaatgttctatt

SEQ ID NO: 704141 - DNA, 33 bp, Homo sapien
aagtcttcacaagaacccagaactctaagtttt

SEQ ID NO: 704142 - DNA, 33 bp, Homo sapien
aagtcttcacaagaacgcagaactctaagtttt

SEQ ID NO: 704143 - DNA, 33 bp, Homo sapien
tctacttcctaaataaatgtctttacctctcct

SEQ ID NO: 704144 - DNA, 33 bp, Homo sapien
tctacttcctaaataagtgtctttacctctcct

SEQ ID NO: 704145 - DNA, 33 bp, Homo sapien
taagagagaattgtgaaagaaatgaaaataact

SEQ ID NO: 704146 - DNA, 33 bp, Homo sapien
taagagagaattgtgagagaaatgaaaataact

SEQ ID NO: 704147 - DNA, 33 bp, Homo sapien
gacagctatacttgaagtcatgccattcccact

SEQ ID NO: 704148 - DNA, 33 bp, Homo sapien
gacagctatacttgaattcatgccattcccact

SEQ ID NO: 704149 - DNA, 33 bp, Homo sapien
ttaagagatggactaactactgagatatatacc

SEQ ID NO: 704150 - DNA, 33 bp, Homo sapien
ttaagagatggactaattactgagatatatacc

SEQ ID NO: 704151 - DNA, 33 bp, Homo sapien
aggacagaagtcacaaagacaaacttcacccac

SEQ ID NO: 704152 - DNA, 33 bp, Homo sapien
aggacagaagtcacaacgacaaacttcacccac

SEQ ID NO: 704153 - DNA, 33 bp, Homo sapien
atttagaaactgaacaaatggcacatatttatt

SEQ ID NO: 704154 - DNA, 33 bp, Homo sapien
atttagaaactgaacagatggcacatatttatt

SEQ ID NO: 704155 - DNA, 33 bp, Homo sapien
tccccaactccttccacagatgagtgatgcctg

SEQ ID NO: 704156 - DNA, 33 bp, Homo sapien
tccccaactccttccatagatgagtgatgcctg

SEQ ID NO: 704157 - DNA, 33 bp, Homo sapien
actgttgagaggagtaaacaagtgaatcgatgt

SEQ ID NO: 704158 - DNA, 33 bp, Homo sapien
actgttgagaggagtagacaagtgaatcgatgt

SEQ ID NO: 704159 - DNA, 33 bp, Homo sapien
cgatgtaaagcagttaaagcagtacctgtttca

SEQ ID NO: 704160 - DNA, 33 bp, Homo sapien
cgatgtaaagcagttagagcagtacctgtttca

SEQ ID NO: 704161 - DNA, 33 bp, Homo sapien
cgctctctttccctaactggcctgagataatct

SEQ ID NO: 704162 - DNA, 33 bp, Homo sapien
cgctctctttccctaagtggcctgagataatct

SEQ ID NO: 704163 - DNA, 33 bp, Homo sapien
cagtagagagaagaccaagaatggttagctcct

SEQ ID NO: 704164 - DNA, 33 bp, Homo sapien
cagtagagagaagaccgagaatggttagctcct

SEQ ID NO: 704165 - DNA, 33 bp, Homo sapien
tgtggtctttcagggaacccagacttaggggct

SEQ ID NO: 704166 - DNA, 33 bp, Homo sapien
tgtggtctttcagggagcccagacttaggggct

SEQ ID NO: 704167 - DNA, 33 bp, Homo sapien
ttctgttctctctttcgcttgggaaaatagaga

SEQ ID NO: 704168 - DNA, 33 bp, Homo sapien
ttctgttctctctttctcttgggaaaatagaga

SEQ ID NO: 704169 - DNA, 33 bp, Homo sapien
aggtgatccctcctcaatgagccacctgcaaca

SEQ ID NO: 704170 - DNA, 33 bp, Homo sapien
aggtgatccctcctcagtgagccacctgcaaca

SEQ ID NO: 704171 - DNA, 33 bp, Homo sapien
cacttgacatttttatcacagttcctgaaacca

SEQ ID NO: 704172 - DNA, 33 bp, Homo sapien
cacttgacatttttattacagttcctgaaacca

SEQ ID NO: 704173 - DNA, 33 bp, Homo sapien
tggctggctgtggacacataactaagttcacca

SEQ ID NO: 704174 - DNA, 33 bp, Homo sapien
tggctggctgtggacatataactaagttcacca

SEQ ID NO: 704175 - DNA, 33 bp, Homo sapien
atcagggctcagaaaaccagagctaatgaggac

SEQ ID NO: 704176 - DNA, 33 bp, Homo sapien
atcagggctcagaaaagcagagctaatgaggac

SEQ ID NO: 704177 - DNA, 33 bp, Homo sapien
tatttaagaaattttcaagactcattttggcaa

SEQ ID NO: 704178 - DNA, 33 bp, Homo sapien
tatttaagaaattttccagactcattttggcaa

SEQ ID NO: 704179 - DNA, 33 bp, Homo sapien
ccttcaagccaaccacaggctttgtgtattagt

SEQ ID NO: 704180 - DNA, 33 bp, Homo sapien
ccttcaagccaaccacgggctttgtgtattagt

SEQ ID NO: 704181 - DNA, 33 bp, Homo sapien
gctttttccacattcaacttcaaaaatttggtc

SEQ ID NO: 704182 - DNA, 33 bp, Homo sapien
gctttttccacattcagcttcaaaaatttggtc

SEQ ID NO: 704183 - DNA, 33 bp, Homo sapien; identical to SEQ ID NO: 704181

SEQ ID NO: 704184 - DNA, 33 bp, Homo sapien; identical to SEQ ID NO: 704182

SEQ ID NO: 704185 - DNA, 33 bp, Homo sapien
ctagtccccttagcagactcagtgtagctcaaa

SEQ ID NO: 704186 - DNA, 33 bp, Homo sapien
ctagtccccttagcagtctcagtgtagctcaaa

SEQ ID NO: 704187 - DNA, 33 bp, Homo sapien
ctagactggtctcaaacgtctagcctcaagcaa

SEQ ID NO: 704188 - DNA, 33 bp, Homo sapien
ctagactggtctcaaatgtctagcctcaagcaa

SEQ ID NO: 704189 - DNA, 33 bp, Homo sapien
ccccattttcagatacaaaaactgaaacacaag

SEQ ID NO: 704190 - DNA, 33 bp, Homo sapien
ccccattttcagatacgaaaactgaaacacaag

SEQ ID NO: 704191 - DNA, 33 bp, Homo sapien
tttgaataacagtcataaaatggtcatgggtca

SEQ ID NO: 704192 - DNA, 33 bp, Homo sapien
tttgaataacagtcatgaaatggtcatgggtca

SEQ ID NO: 704193 - DNA, 33 bp, Homo sapien
tttggcttaaggtcagcaaactaaggcccacag

SEQ ID NO: 704194 - DNA, 33 bp, Homo sapien
tttggcttaaggtcagtaaactaaggcccacag

SEQ ID NO: 704195 - DNA, 33 bp, Homo sapien
ctgggattagaacacccagccaaattctatgtt

SEQ ID NO: 704196 - DNA, 33 bp, Homo sapien
ctgggattagaacacctagccaaattctatgtt

SEQ ID NO: 704197 - DNA, 33 bp, Homo sapien
aaaagcatagccagaactggaatccaggaagtt

SEQ ID NO: 704198 - DNA, 33 bp, Homo sapien
aaaagcatagccagaattggaatccaggaagtt

SEQ ID NO: 704199 - DNA, 33 bp, Homo sapien
actggttgagaacataggccctagaattaaact

SEQ ID NO: 704200 - DNA, 33 bp, Homo sapien
actggttgagaacatatgccctagaattaaact

SEQ ID NO: 704201 - DNA, 33 bp, Homo sapien
agggtaattgaacaaagaatgattccttaaaaa

SEQ ID NO: 704202 - DNA, 33 bp, Homo sapien
agggtaattgaacaaataatgattccttaaaaa

SEQ ID NO: 704203 - DNA, 33 bp, Homo sapien
ccacccgattcaggaactgttctttaggctggg

SEQ ID NO: 704204 - DNA, 33 bp, Homo sapien
ccacccgattcaggaattgttctttaggctggg

SEQ ID NO: 704205 - DNA, 33 bp, Homo sapien
tactaagggtcctagtaaattaaactaagtttg

SEQ ID NO: 704206 - DNA, 33 bp, Homo sapien
tactaagggtcctagtgaattaaactaagtttg

SEQ ID NO: 704207 - DNA, 33 bp, Homo sapien
aaaggacatagagaaaattgtaacatcagttat

SEQ ID NO: 704208 - DNA, 33 bp, Homo sapien
aaaggacatagagaaagttgtaacatcagttat

SEQ ID NO: 704209 - DNA, 33 bp, Homo sapien
tacacttctttgtgcacggctcacaattcttct

SEQ ID NO: 704210 - DNA, 33 bp, Homo sapien
tacacttctttgtgcatggctcacaattcttct

SEQ ID NO: 704211 - DNA, 33 bp, Homo sapien
atccagaagaatcagcaactaaaattggacaga

SEQ ID NO: 704212 - DNA, 33 bp, Homo sapien
atccagaagaatcagcgactaaaattggacaga

SEQ ID NO: 704213 - DNA, 33 bp, Homo sapien
tgaaattttcatatcaactgaagcaatgctttg

SEQ ID NO: 704214 - DNA, 33 bp, Homo sapien
tgaaattttcatatcagctgaagcaatgctttg

SEQ ID NO: 704215 - DNA, 33 bp, Homo sapien
agacacggcctcaccacgttgccaaggctggtc

SEQ ID NO: 704216 - DNA, 33 bp, Homo sapien
agacacggcctcaccatgttgccaaggctggtc

SEQ ID NO: 704217 - DNA, 33 bp, Homo sapien
tgtgcttttgcctccaggaaccaacctttggct

SEQ ID NO: 704218 - DNA, 33 bp, Homo sapien
tgtgcttttgcctccatgaaccaacctttggct

SEQ ID NO: 704219 - DNA, 33 bp, Homo sapien
agaggctgaagcttgagaatcacttgagcctgg

SEQ ID NO: 704220 - DNA, 33 bp, Homo sapien
agaggctgaagcttgataatcacttgagcctgg

SEQ ID NO: 704221 - DNA, 33 bp, Homo sapien
atgttgtgagggtttaacacgaataacaatccc

SEQ ID NO: 704222 - DNA, 33 bp, Homo sapien
atgttgtgagggtttagcacgaataacaatccc

SEQ ID NO: 704223 - DNA, 33 bp, Homo sapien
tagacatgtttgattcacttagaaatgattgtc

SEQ ID NO: 704224 - DNA, 33 bp, Homo sapien
tagacatgtttgattcgcttagaaatgattgtc

SEQ ID NO: 704225 - DNA, 33 bp, Homo sapien
agaattctgtttcctaataaaaccctgactgac

SEQ ID NO: 704226 - DNA, 33 bp, Homo sapien
agaattctgtttcctagtaaaaccctgactgac

SEQ ID NO: 704227 - DNA, 33 bp, Homo sapien
ccaggctcaggctgaagtaccgtggggccatca

SEQ ID NO: 704228 - DNA, 33 bp, Homo sapien
ccaggctcaggctgaattaccgtggggccatca

SEQ ID NO: 704229 - DNA, 33 bp, Homo sapien
aaactaaactacttacagccaggcgaggtagct

SEQ ID NO: 704230 - DNA, 33 bp, Homo sapien
aaactaaactacttacggccaggcgaggtagct

SEQ ID NO: 704231 - DNA, 33 bp, Homo sapien
attattgaatgagtccagaatacacagctgtgg

SEQ ID NO: 704232 - DNA, 33 bp, Homo sapien
attattgaatgagtccggaatacacagctgtgg

SEQ ID NO: 704233 - DNA, 33 bp, Homo sapien
agtaagaccacggtaaaatctcttggctgttcc

SEQ ID NO: 704234 - DNA, 33 bp, Homo sapien
agtaagaccacggtaagatctcttggctgttcc

SEQ ID NO: 704235 - DNA, 33 bp, Homo sapien
tacattagcgtgacaaacacgtagggtcaagaa

SEQ ID NO: 704236 - DNA, 33 bp, Homo sapien
tacattagcgtgacaagcacgtagggtcaagaa

SEQ ID NO: 704237 - DNA, 33 bp, Homo sapien
ctgttttctttctgtaagcctccaacaaagtaa

SEQ ID NO: 704238 - DNA, 33 bp, Homo sapien
ctgttttctttctgtacgcctccaacaaagtaa

SEQ ID NO: 704239 - DNA, 33 bp, Homo sapien
agtgaggcattttccactgatcactctctcttc

SEQ ID NO: 704240 - DNA, 33 bp, Homo sapien
agtgaggcattttccattgatcactctctcttc

SEQ ID NO: 704241 - DNA, 33 bp, Homo sapien
tagtgtaagtgactaccgattcaaaagatgtcg

SEQ ID NO: 704242 - DNA, 33 bp, Homo sapien
tagtgtaagtgactactgattcaaaagatgtcg

SEQ ID NO: 704243 - DNA, 33 bp, Homo sapien
tcattatgcgatacataactgtacttctttatc

SEQ ID NO: 704244 - DNA, 33 bp, Homo sapien
tcattatgcgatacatgactgtacttctttatc

SEQ ID NO: 704245 - DNA, 33 bp, Homo sapien
cacacatcagtttacacagtccacaggtcaagt

SEQ ID NO: 704246 - DNA, 33 bp, Homo sapien
cacacatcagtttacatagtccacaggtcaagt

SEQ ID NO: 704247 - DNA, 33 bp, Homo sapien
aataaagcagccttaccgacaattttttttata

SEQ ID NO: 704248 - DNA, 33 bp, Homo sapien
aataaagcagccttactgacaattttttttata

SEQ ID NO: 704249 - DNA, 33 bp, Homo sapien
attcagctcagtacacccaatacaaagagaagg

SEQ ID NO: 704250 - DNA, 33 bp, Homo sapien
attcagctcagtacactcaatacaaagagaagg

SEQ ID NO: 704251 - DNA, 33 bp, Homo sapien
ggaacacagaacttgacggcatacagattcacc

SEQ ID NO: 704252 - DNA, 33 bp, Homo sapien
ggaacacagaacttgatggcatacagattcacc

SEQ ID NO: 704253 - DNA, 33 bp, Homo sapien
cactctccacactggccatagggatctttcaga

SEQ ID NO: 704254 - DNA, 33 bp, Homo sapien
cactctccacactggctatagggatctttcaga

SEQ ID NO: 704255 - DNA, 33 bp, Homo sapien
caagtatggccaccaaaattagaagttaggtcc

SEQ ID NO: 704256 - DNA, 33 bp, Homo sapien
caagtatggccaccaatattagaagttaggtcc

SEQ ID NO: 704257 - DNA, 33 bp, Homo sapien
gagtagaagctaagaaagtctcacagatataag

SEQ ID NO: 704258 - DNA, 33 bp, Homo sapien
gagtagaagctaagaaggtctcacagatataag

SEQ ID NO: 704259 - DNA, 33 bp, Homo sapien
gcaaagtacttacagcaccgtcaatcactttct

SEQ ID NO: 704260 - DNA, 33 bp, Homo sapien
gcaaagtacttacagcgccgtcaatcactttct

SEQ ID NO: 704261 - DNA, 33 bp, Homo sapien
aagagaaactgatcaggctagaaacaatgaact

SEQ ID NO: 704262 - DNA, 33 bp, Homo sapien
aagagaaactgatcagtctagaaacaatgaact

SEQ ID NO: 704263 - DNA, 33 bp, Homo sapien
ataccattctgacagcagcataaagagtagatt

SEQ ID NO: 704264 - DNA, 33 bp, Homo sapien
ataccattctgacagcggcataaagagtagatt

SEQ ID NO: 704265 - DNA, 33 bp, Homo sapien
tggatggtgggtaaaacggtgaagagaaatctg

SEQ ID NO: 704266 - DNA, 33 bp, Homo sapien
tggatggtgggtaaaatggtgaagagaaatctg

SEQ ID NO: 704267 - DNA, 33 bp, Homo sapien
caaatgtcttgatcccaggaacccaaaatgctt

SEQ ID NO: 704268 - DNA, 33 bp, Homo sapien
caaatgtcttgatcccgggaacccaaaatgctt

SEQ ID NO: 704269 - DNA, 33 bp, Homo sapien
gcttctgtgagattccgagttctaaataaggaa

SEQ ID NO: 704270 - DNA, 33 bp, Homo sapien
gcttctgtgagattcctagttctaaataaggaa

SEQ ID NO: 704271 - DNA, 33 bp, Homo sapien
agatacctgtgaaagaaaaaagatctagtattc

SEQ ID NO: 704272 - DNA, 33 bp, Homo sapien
agatacctgtgaaagagaaaagatctagtattc

SEQ ID NO: 704273 - DNA, 33 bp, Homo sapien
agggaaatagttcagtaaaatgctgggtttact

SEQ ID NO: 704274 - DNA, 33 bp, Homo sapien
agggaaatagttcagtgaaatgctgggtttact

SEQ ID NO: 704275 - DNA, 33 bp, Homo sapien
taaatgtatatgtatcaaggagctacaagtgaa

SEQ ID NO: 704276 - DNA, 33 bp, Homo sapien
taaatgtatatgtatcgaggagctacaagtgaa

SEQ ID NO: 704277 - DNA, 33 bp, Homo sapien
aggatttacaacctcaaatagctagtttccttt

SEQ ID NO: 704278 - DNA, 33 bp, Homo sapien
aggatttacaacctcagatagctagtttccttt

SEQ ID NO: 704279 - DNA, 33 bp, Homo sapien
tatgtttgtattcttaacagtctggttacaagg

SEQ ID NO: 704280 - DNA, 33 bp, Homo sapien
tatgtttgtattcttagcagtctggttacaagg

SEQ ID NO: 704281 - DNA, 33 bp, Homo sapien
gtgatgccttaacataagttctgttctattttt

SEQ ID NO: 704282 - DNA, 33 bp, Homo sapien
gtgatgccttaacataggttctgttctattttt

SEQ ID NO: 704283 - DNA, 33 bp, Homo sapien
catctcccagcacttaaggaatctgaaaaaata

SEQ ID NO: 704284 - DNA, 33 bp, Homo sapien
catctcccagcacttagggaatctgaaaaaata

SEQ ID NO: 704285 - DNA, 33 bp, Homo sapien
aacatttagctgataacttagatcctgtctgct

SEQ ID NO: 704286 - DNA, 33 bp, Homo sapien
aacatttagctgataatttagatcctgtctgct

SEQ ID NO: 704287 - DNA, 33 bp, Homo sapien
tagcagcatcctagaaactgagaaactggaaga

SEQ ID NO: 704288 - DNA, 33 bp, Homo sapien
tagcagcatcctagaatctgagaaactggaaga

SEQ ID NO: 704289 - DNA, 33 bp, Homo sapien
ataaaattttagttccaaaatgttcaatgtttt

SEQ ID NO: 704290 - DNA, 33 bp, Homo sapien
ataaaattttagttccgaaatgttcaatgtttt

SEQ ID NO: 704291 - DNA, 33 bp, Homo sapien
atatccaaaccacacaaggaatgcaagacaatt

SEQ ID NO: 704292 - DNA, 33 bp, Homo sapien
atatccaaaccacacagggaatgcaagacaatt

SEQ ID NO: 704293 - DNA, 33 bp, Homo sapien
gggagtgtcatgattcaagtggcatttcccaag

SEQ ID NO: 704294 - DNA, 33 bp, Homo sapien
gggagtgtcatgattcgagtggcatttcccaag

SEQ ID NO: 704295 - DNA, 33 bp, Homo sapien
caagatctcatcccaaaaaaagaaggagaaatt

SEQ ID NO: 704296 - DNA, 33 bp, Homo sapien
caagatctcatcccaagaaaagaaggagaaatt

SEQ ID NO: 704297 - DNA, 33 bp, Homo sapien
gtcagcgcagggcctacggatagagactaagct

SEQ ID NO: 704298 - DNA, 33 bp, Homo sapien
gtcagcgcagggcctatggatagagactaagct

SEQ ID NO: 704299 - DNA, 33 bp, Homo sapien
atgtagacaggtatcacggtagcatcggggagg

SEQ ID NO: 704300 - DNA, 33 bp, Homo sapien
atgtagacaggtatcatggtagcatcggggagg

SEQ ID NO: 704301 - DNA, 33 bp, Homo sapien
ggttggatcccttcagcctagtgatcttcccac

SEQ ID NO: 704302 - DNA, 33 bp, Homo sapien
ggttggatcccttcaggctagtgatcttcccac

SEQ ID NO: 704303 - DNA, 33 bp, Homo sapien
ttatttgggaacattacgagttgaccccaagaa

SEQ ID NO: 704304 - DNA, 33 bp, Homo sapien
ttatttgggaacattatgagttgaccccaagaa

SEQ ID NO: 704305 - DNA, 33 bp, Homo sapien
gatatccacatttttcactaccctatcaattat

SEQ ID NO: 704306 - DNA, 33 bp, Homo sapien
gatatccacatttttcgctaccctatcaattat

SEQ ID NO: 704307 - DNA, 33 bp, Homo sapien
attacttattgtcatcacttgtcactggctgcc

SEQ ID NO: 704308 - DNA, 33 bp, Homo sapien
attacttattgtcatcgcttgtcactggctgcc

SEQ ID NO: 704309 - DNA, 33 bp, Homo sapien
gcatgagcccatgttccaaatttaaacacaatc

SEQ ID NO: 704310 - DNA, 33 bp, Homo sapien
gcatgagcccatgttctaaatttaaacacaatc

SEQ ID NO: 704311 - DNA, 33 bp, Homo sapien
aagtcagttgcaaatcactcctctgcattatcc

SEQ ID NO: 704312 - DNA, 33 bp, Homo sapien
aagtcagttgcaaatcgctcctctgcattatcc

SEQ ID NO: 704313 - DNA, 33 bp, Homo sapien
atccaatgctcattacccctgcggccagtttgt

SEQ ID NO: 704314 - DNA, 33 bp, Homo sapien
atccaatgctcattactcctgcggccagtttgt

SEQ ID NO: 704315 - DNA, 33 bp, Homo sapien
attgctaattaaaaaggccaattcatttgaaga

SEQ ID NO: 704316 - DNA, 33 bp, Homo sapien
attgctaattaaaaagtccaattcatttgaaga

SEQ ID NO: 704317 - DNA, 33 bp, Homo sapien
agctctctgagaccgcaatttgggacccacact

SEQ ID NO: 704318 - DNA, 33 bp, Homo sapien
agctctctgagaccgcgatttgggacccacact

SEQ ID NO: 704319 - DNA, 33 bp, Homo sapien
tcactgtaacaattcaaatatacaaatatataa

SEQ ID NO: 704320 - DNA, 33 bp, Homo sapien
tcactgtaacaattcagatatacaaatatataa

SEQ ID NO: 704321 - DNA, 33 bp, Homo sapien
tttggctaagctgaacagggaaacattgtaggt

SEQ ID NO: 704322 - DNA, 33 bp, Homo sapien
tttggctaagctgaacggggaaacattgtaggt

SEQ ID NO: 704323 - DNA, 33 bp, Homo sapien
tgtgatcacatgactacaatccagcctgggcaa

SEQ ID NO: 704324 - DNA, 33 bp, Homo sapien
tgtgatcacatgactataatccagcctgggcaa

SEQ ID NO: 704325 - DNA, 33 bp, Homo sapien
tctagtgttttgcaacaggggactttgagaaga

SEQ ID NO: 704326 - DNA, 33 bp, Homo sapien
tctagtgttttgcaacgggggactttgagaaga

SEQ ID NO: 704327 - DNA, 33 bp, Homo sapien
gtttggcagaaaaagaacacaattaatgcccat

SEQ ID NO: 704328 - DNA, 33 bp, Homo sapien
gtttggcagaaaaagagcacaattaatgcccat

SEQ ID NO: 704329 - DNA, 33 bp, Homo sapien
acagtctaatgggaaccacccaggatgctggcc

SEQ ID NO: 704330 - DNA, 33 bp, Homo sapien
acagtctaatgggaactacccaggatgctggcc

SEQ ID NO: 704331 - DNA, 33 bp, Homo sapien
atgactgtgctagagccaccctctcactttagc

SEQ ID NO: 704332 - DNA, 33 bp, Homo sapien
atgactgtgctagagcgaccctctcactttagc

SEQ ID NO: 704333 - DNA, 33 bp, Homo sapien
ttatatacagatacacagtacacgtggaataaa

SEQ ID NO: 704334 - DNA, 33 bp, Homo sapien
ttatatacagatacacggtacacgtggaataaa

SEQ ID NO: 704335 - DNA, 33 bp, Homo sapien
tccctttctccgatgaagcagacccagtccaca

SEQ ID NO: 704336 - DNA, 33 bp, Homo sapien
tccctttctccgatgaggcagacccagtccaca

SEQ ID NO: 704337 - DNA, 33 bp, Homo sapien
atggttgctgcttcagaactactgagatttggg

SEQ ID NO: 704338 - DNA, 33 bp, Homo sapien
atggttgctgcttcaggactactgagatttggg

SEQ ID NO: 704339 - DNA, 33 bp, Homo sapien
atatatgtatagcatggatattgcttttaattt

SEQ ID NO: 704340 - DNA, 33 bp, Homo sapien
atatatgtatagcatgtatattgcttttaattt

SEQ ID NO: 704341 - DNA, 33 bp, Homo sapien
tctcttgagctcacaaattcaagagcaacctgg

SEQ ID NO: 704342 - DNA, 33 bp, Homo sapien
tctcttgagctcacaagttcaagagcaacctgg

SEQ ID NO: 704343 - DNA, 33 bp, Homo sapien
aaggaaactttgggagccctttgaattctaccc

SEQ ID NO: 704344 - DNA, 33 bp, Homo sapien
aaggaaactttgggagtcctttgaattctaccc

SEQ ID NO: 704345 - DNA, 33 bp, Homo sapien
tttgactaagatgaagacagctttgtactcttg

SEQ ID NO: 704346 - DNA, 33 bp, Homo sapien
tttgactaagatgaaggcagctttgtactcttg

SEQ ID NO: 704347 - DNA, 33 bp, Homo sapien
cagccaacaatcaatacgtattttcaggcaaag

SEQ ID NO: 704348 - DNA, 33 bp, Homo sapien
cagccaacaatcaatatgtattttcaggcaaag

SEQ ID NO: 704349 - DNA, 33 bp, Homo sapien
attcatttctgttatcagacaatctcaggcaga

SEQ ID NO: 704350 - DNA, 33 bp, Homo sapien
attcatttctgttatcggacaatctcaggcaga

SEQ ID NO: 704351 - DNA, 33 bp, Homo sapien
aggctgaactcctcagacatggaactaaattgg

SEQ ID NO: 704352 - DNA, 33 bp, Homo sapien
aggctgaactcctcaggcatggaactaaattgg

SEQ ID NO: 704353 - DNA, 33 bp, Homo sapien
gacttaggatggaaaaatgtctccttatgcctt

SEQ ID NO: 704354 - DNA, 33 bp, Homo sapien
gacttaggatggaaaagtgtctccttatgcctt

SEQ ID NO: 704355 - DNA, 33 bp, Homo sapien
tgctaggtgctttctacactttatctctaattc

SEQ ID NO: 704356 - DNA, 33 bp, Homo sapien
tgctaggtgctttctatactttatctctaattc

SEQ ID NO: 704357 - DNA, 33 bp, Homo sapien
ttgcctgtgactaacactcctgcctttggtcga

SEQ ID NO: 704358 - DNA, 33 bp, Homo sapien
ttgcctgtgactaacattcctgcctttggtcga

SEQ ID NO: 704359 - DNA, 33 bp, Homo sapien
tatgggacctacagaaacagaaattgtggtcct

SEQ ID NO: 704360 - DNA, 33 bp, Homo sapien
tatgggacctacagaagcagaaattgtggtcct

SEQ ID NO: 704361 - DNA, 33 bp, Homo sapien
gcagttacttggcgtaaagaacagtatgatttt

SEQ ID NO: 704362 - DNA, 33 bp, Homo sapien
gcagttacttggcgtatagaacagtatgatttt

SEQ ID NO: 704363 - DNA, 33 bp, Homo sapien
ttcaaataatgtagaaaagtcagagatcaatta

SEQ ID NO: 704364 - DNA, 33 bp, Homo sapien
ttcaaataatgtagaagagtcagagatcaatta

SEQ ID NO: 704365 - DNA, 33 bp, Homo sapien
cagacacggttattgacgttggggtatggaact

SEQ ID NO: 704366 - DNA, 33 bp, Homo sapien
cagacacggttattgatgttggggtatggaact

SEQ ID NO: 704367 - DNA, 33 bp, Homo sapien
atgggaatgaagatataatactgcaggtggggc

SEQ ID NO: 704368 - DNA, 33 bp, Homo sapien
atgggaatgaagatatgatactgcaggtggggc

SEQ ID NO: 704369 - DNA, 33 bp, Homo sapien
ggattgttgagctgaccgcaaataaggagaaac

SEQ ID NO: 704370 - DNA, 33 bp, Homo sapien
ggattgttgagctgacggcaaataaggagaaac

SEQ ID NO: 704371 - DNA, 33 bp, Homo sapien
taataggcctaatagacagcaccctatggaaac

SEQ ID NO: 704372 - DNA, 33 bp, Homo sapien
taataggcctaatagatagcaccctatggaaac

SEQ ID NO: 704373 - DNA, 33 bp, Homo sapien
gtgtaaagaatcttgacgtcaccttatggaaag

SEQ ID NO: 704374 - DNA, 33 bp, Homo sapien
gtgtaaagaatcttgatgtcaccttatggaaag

SEQ ID NO: 704375 - DNA, 33 bp, Homo sapien
aggttggctctaacgaaaaggtgtcattccgcc

SEQ ID NO: 704376 - DNA, 33 bp, Homo sapien
aggttggctctaacgagaaggtgtcattccgcc

SEQ ID NO: 704377 - DNA, 33 bp, Homo sapien
tctgttgtaataaataggccaacagacttctgt

SEQ ID NO: 704378 - DNA, 33 bp, Homo sapien
tctgttgtaataaatatgccaacagacttctgt

SEQ ID NO: 704379 - DNA, 33 bp, Homo sapien
gacttctgtaccttcaacaagggtggctagagc

SEQ ID NO: 704380 - DNA, 33 bp, Homo sapien
gacttctgtaccttcagcaagggtggctagagc

SEQ ID NO: 704381 - DNA, 33 bp, Homo sapien
aagccatttactaggcaagtctggatttcgatg

SEQ ID NO: 704382 - DNA, 33 bp, Homo sapien
aagccatttactaggccagtctggatttcgatg

SEQ ID NO: 704383 - DNA, 33 bp, Homo sapien
gacatttagttacaggaaagaccagaagtatca

SEQ ID NO: 704384 - DNA, 33 bp, Homo sapien
gacatttagttacagggaagaccagaagtatca

SEQ ID NO: 704385 - DNA, 33 bp, Homo sapien
caacttggggcaatcaataaaagactagtcaaa

SEQ ID NO: 704386 - DNA, 33 bp, Homo sapien
caacttggggcaatcagtaaaagactagtcaaa

SEQ ID NO: 704387 - DNA, 33 bp, Homo sapien
gctaaatctggtaagacgaagtcctgtgcagag

SEQ ID NO: 704388 - DNA, 33 bp, Homo sapien
gctaaatctggtaagatgaagtcctgtgcagag

SEQ ID NO: 704389 - DNA, 33 bp, Homo sapien
tcaggactattgataccgcccatgaggaactgg

SEQ ID NO: 704390 - DNA, 33 bp, Homo sapien
tcaggactattgatactgcccatgaggaactgg

SEQ ID NO: 704391 - DNA, 33 bp, Homo sapien
tggaaggtaaaacatacaagcaaagattccaga

SEQ ID NO: 704392 - DNA, 33 bp, Homo sapien
tggaaggtaaaacatataagcaaagattccaga

SEQ ID NO: 704393 - DNA, 33 bp, Homo sapien
gtcaccttgtctgcaaatcagagataccaacgt

SEQ ID NO: 704394 - DNA, 33 bp, Homo sapien
gtcaccttgtctgcaagtcagagataccaacgt

SEQ ID NO: 704395 - DNA, 33 bp, Homo sapien
accctaactcgataccaaaagtgttcacaggac

SEQ ID NO: 704396 - DNA, 33 bp, Homo sapien
accctaactcgataccgaaagtgttcacaggac

SEQ ID NO: 704397 - DNA, 33 bp, Homo sapien
ataaaggcaagtaaaacgaagagcacgactggg

SEQ ID NO: 704398 - DNA, 33 bp, Homo sapien
ataaaggcaagtaaaatgaagagcacgactggg

SEQ ID NO: 704399 - DNA, 33 bp, Homo sapien
caattcttaccaggaaacatgagttgaagaaag

SEQ ID NO: 704400 - DNA, 33 bp, Homo sapien
caattcttaccaggaaccatgagttgaagaaag

SEQ ID NO: 704401 - DNA, 33 bp, Homo sapien
acattaataaaaattgcacggatggtatgactt

SEQ ID NO: 704402 - DNA, 33 bp, Homo sapien
acattaataaaaattgtacggatggtatgactt

SEQ ID NO: 704403 - DNA, 33 bp, Homo sapien
ggccatttagggccaaagtggctgactcttgcc

SEQ ID NO: 704404 - DNA, 33 bp, Homo sapien
ggccatttagggccaaggtggctgactcttgcc

SEQ ID NO: 704405 - DNA, 33 bp, Homo sapien
aggggtgttaggaagaagttcatcaggtgtttc

SEQ ID NO: 704406 - DNA, 33 bp, Homo sapien
aggggtgttaggaagaggttcatcaggtgtttc

SEQ ID NO: 704407 - DNA, 33 bp, Homo sapien
tattttctcctattccacaggttgcaaacttac

SEQ ID NO: 704408 - DNA, 33 bp, Homo sapien
tattttctcctattccgcaggttgcaaacttac

SEQ ID NO: 704409 - DNA, 33 bp, Homo sapien
agtacgttccatcagcagataccaaaggaggac

SEQ ID NO: 704410 - DNA, 33 bp, Homo sapien
agtacgttccatcagcggataccaaaggaggac

SEQ ID NO: 704411 - DNA, 33 bp, Homo sapien
ctaaggcagatttggaaggagctaagcactgag

SEQ ID NO: 704412 - DNA, 33 bp, Homo sapien
ctaaggcagatttggagggagctaagcactgag

SEQ ID NO: 704413 - DNA, 33 bp, Homo sapien
ctaatgcctgggctgcacagtgatgtatgctgt

SEQ ID NO: 704414 - DNA, 33 bp, Homo sapien
ctaatgcctgggctgcgcagtgatgtatgctgt

SEQ ID NO: 704415 - DNA, 33 bp, Homo sapien
ccacttttgcactcaccggctgatcgtgtgtgt

SEQ ID NO: 704416 - DNA, 33 bp, Homo sapien
ccacttttgcactcactggctgatcgtgtgtgt

SEQ ID NO: 704417 - DNA, 33 bp, Homo sapien
agtcatcatacttaccaagagcagtattccatt

SEQ ID NO: 704418 - DNA, 33 bp, Homo sapien
agtcatcatacttaccgagagcagtattccatt

SEQ ID NO: 704419 - DNA, 33 bp, Homo sapien
gcaggacagctttgcacacaaaaggctaagatg

SEQ ID NO: 704420 - DNA, 33 bp, Homo sapien
gcaggacagctttgcagacaaaaggctaagatg

SEQ ID NO: 704421 - DNA, 33 bp, Homo sapien
ctcactgttgtatagaaacttagaggttctcag

SEQ ID NO: 704422 - DNA, 33 bp, Homo sapien
ctcactgttgtatagagacttagaggttctcag

SEQ ID NO: 704423 - DNA, 33 bp, Homo sapien
gtaaggactgtggcaccgactacattttaggtt

SEQ ID NO: 704424 - DNA, 33 bp, Homo sapien
gtaaggactgtggcactgactacattttaggtt

SEQ ID NO: 704425 - DNA, 33 bp, Homo sapien
tgtgacctctccccataatatgcctttatgctc

SEQ ID NO: 704426 - DNA, 33 bp, Homo sapien
tgtgacctctccccatcatatgcctttatgctc

SEQ ID NO: 704427 - DNA, 33 bp, Homo sapien
aggtccctgcacatgcaatcaataaggccagaa

SEQ ID NO: 704428 - DNA, 33 bp, Homo sapien
aggtccctgcacatgcgatcaataaggccagaa

SEQ ID NO: 704429 - DNA, 33 bp, Homo sapien
tgtcaatgaattctaccgtactttccaattacc

SEQ ID NO: 704430 - DNA, 33 bp, Homo sapien
tgtcaatgaattctactgtactttccaattacc

SEQ ID NO: 704431 - DNA, 33 bp, Homo sapien
catctgtgggtgagataaattgaagtcaaatag

SEQ ID NO: 704432 - DNA, 33 bp, Homo sapien
catctgtgggtgagattaattgaagtcaaatag

SEQ ID NO: 704433 - DNA, 33 bp, Homo sapien
cccttcagatgggtcaatatagcactggggatt

SEQ ID NO: 704434 - DNA, 33 bp, Homo sapien
cccttcagatgggtcagtatagcactggggatt

SEQ ID NO: 704435 - DNA, 33 bp, Homo sapien
ttccaggagtggtccacatcaaaggctggctgg

SEQ ID NO: 704436 - DNA, 33 bp, Homo sapien
ttccaggagtggtccatatcaaaggctggctgg

SEQ ID NO: 704437 - DNA, 33 bp, Homo sapien
actcaaattgcttttcaactccatggccttttt

SEQ ID NO: 704438 - DNA, 33 bp, Homo sapien
actcaaattgcttttcgactccatggccttttt

SEQ ID NO: 704439 - DNA, 33 bp, Homo sapien
taggctaaactgtttacgtgtagttatgtattt

SEQ ID NO: 704440 - DNA, 33 bp, Homo sapien
taggctaaactgtttatgtgtagttatgtattt

SEQ ID NO: 704441 - DNA, 33 bp, Homo sapien
gcactaaatgtcactgaaggccctgaaaaaaaa

SEQ ID NO: 704442 - DNA, 33 bp, Homo sapien
gcactaaatgtcactggaggccctgaaaaaaaa

SEQ ID NO: 704443 - DNA, 33 bp, Homo sapien
ctatctaagatgattccatttctgagtgcatga

SEQ ID NO: 704444 - DNA, 33 bp, Homo sapien
ctatctaagatgattcgatttctgagtgcatga

SEQ ID NO: 704445 - DNA, 33 bp, Homo sapien
ttggtcactggcttccagattaggacaccgtta

SEQ ID NO: 704446 - DNA, 33 bp, Homo sapien
ttggtcactggcttccggattaggacaccgtta

SEQ ID NO: 704447 - DNA, 33 bp, Homo sapien
aaggagattcccccgacaggaagcctgtgtctg

SEQ ID NO: 704448 - DNA, 33 bp, Homo sapien
aaggagattcccccgataggaagcctgtgtctg

SEQ ID NO: 704449 - DNA, 33 bp, Homo sapien
ccaagcagaaataaccgcaaatactcaactgtt

SEQ ID NO: 704450 - DNA, 33 bp, Homo sapien
ccaagcagaaataacctcaaatactcaactgtt

SEQ ID NO: 704451 - DNA, 33 bp, Homo sapien
gtctggtaatggataaatggattgaaggcttgg

SEQ ID NO: 704452 - DNA, 33 bp, Homo sapien
gtctggtaatggataagtggattgaaggcttgg

SEQ ID NO: 704453 - DNA, 33 bp, Homo sapien
aaatgattaagcaaatgaaattacatgtacata

SEQ ID NO: 704454 - DNA, 33 bp, Homo sapien
aaatgattaagcaaattaaattacatgtacata

SEQ ID NO: 704455 - DNA, 33 bp, Homo sapien
atatcctcatgtgaaacctttgtcagcattact

SEQ ID NO: 704456 - DNA, 33 bp, Homo sapien
atatcctcatgtgaaatctttgtcagcattact

SEQ ID NO: 704457 - DNA, 33 bp, Homo sapien
atttaaaacatgtgtacggtataacaactaatt

SEQ ID NO: 704458 - DNA, 33 bp, Homo sapien
atttaaaacatgtgtatggtataacaactaatt

SEQ ID NO: 704459 - DNA, 33 bp, Homo sapien
gtgatttactggttagaccctcacaacactaca

SEQ ID NO: 704460 - DNA, 33 bp, Homo sapien
gtgatttactggttaggccctcacaacactaca

SEQ ID NO: 704461 - DNA, 33 bp, Homo sapien
actgaatcctttctcagcattgaagacatattt

SEQ ID NO: 704462 - DNA, 33 bp, Homo sapien
actgaatcctttctcatcattgaagacatattt

SEQ ID NO: 704463 - DNA, 33 bp, Homo sapien
catagctaaagcagaaaattaaagtcaagtctc

SEQ ID NO: 704464 - DNA, 33 bp, Homo sapien
catagctaaagcagaagattaaagtcaagtctc

SEQ ID NO: 704465 - DNA, 33 bp, Homo sapien
cttaataaagaagcaaaagtaatgactacagta

SEQ ID NO: 704466 - DNA, 33 bp, Homo sapien
cttaataaagaagcaagagtaatgactacagta

SEQ ID NO: 704467 - DNA, 33 bp, Homo sapien
atatgacatactgtaccatctcccatctttaaa

SEQ ID NO: 704468 - DNA, 33 bp, Homo sapien
atatgacatactgtactatctcccatctttaaa

SEQ ID NO: 704469 - DNA, 33 bp, Homo sapien
aggacgtgaaggaagaaggagttcattgcatca

SEQ ID NO: 704470 - DNA, 33 bp, Homo sapien
aggacgtgaaggaagagggagttcattgcatca

SEQ ID NO: 704471 - DNA, 33 bp, Homo sapien
agatctgccctagatgcactctgcttgcattaa

SEQ ID NO: 704472 - DNA, 33 bp, Homo sapien
agatctgccctagatgtactctgcttgcattaa

SEQ ID NO: 704473 - DNA, 33 bp, Homo sapien
gaatacaactcaggaacggtgaaatagaggaga

SEQ ID NO: 704474 - DNA, 33 bp, Homo sapien
gaatacaactcaggaatggtgaaatagaggaga

SEQ ID NO: 704475 - DNA, 33 bp, Homo sapien
gctcttacagctaggaaatggacaaccataagg

SEQ ID NO: 704476 - DNA, 33 bp, Homo sapien
gctcttacagctaggatatggacaaccataagg

SEQ ID NO: 704477 - DNA, 33 bp, Homo sapien
ttctcactacagaacccaaagtgccaacataag

SEQ ID NO: 704478 - DNA, 33 bp, Homo sapien
ttctcactacagaaccgaaagtgccaacataag

SEQ ID NO: 704479 - DNA, 33 bp, Homo sapien
gtatacattcccttaactctgatccagtaacat

SEQ ID NO: 704480 - DNA, 33 bp, Homo sapien
gtatacattcccttaattctgatccagtaacat

SEQ ID NO: 704481 - DNA, 33 bp, Homo sapien
ttccagtggatagaacaagaaaacggggaattc

SEQ ID NO: 704482 - DNA, 33 bp, Homo sapien
ttccagtggatagaacgagaaaacggggaattc

SEQ ID NO: 704483 - DNA, 33 bp, Homo sapien
aagcacgtcgatgaaagaacttgttgatatatc

SEQ ID NO: 704484 - DNA, 33 bp, Homo sapien
aagcacgtcgatgaaataacttgttgatatatc

SEQ ID NO: 704485 - DNA, 33 bp, Homo sapien
tatccaaagctattgacgggaaactattggagg

SEQ ID NO: 704486 - DNA, 33 bp, Homo sapien
tatccaaagctattgatgggaaactattggagg

SEQ ID NO: 704487 - DNA, 33 bp, Homo sapien
ttccaacctgaaatacaggagatgtgaacaaaa

SEQ ID NO: 704488 - DNA, 33 bp, Homo sapien
ttccaacctgaaatacgggagatgtgaacaaaa

SEQ ID NO: 704489 - DNA, 33 bp, Homo sapien
atttgaaggtgtgtcactaaacataagcactca

SEQ ID NO: 704490 - DNA, 33 bp, Homo sapien
atttgaaggtgtgtcattaaacataagcactca

SEQ ID NO: 704491 - DNA, 33 bp, Homo sapien
gtaagaccatggttatcaacagcccagtgcatt

SEQ ID NO: 704492 - DNA, 33 bp, Homo sapien
gtaagaccatggttatgaacagcccagtgcatt

SEQ ID NO: 704493 - DNA, 33 bp, Homo sapien
ctgcttctctgatatacacaatgtagcaccgtg

SEQ ID NO: 704494 - DNA, 33 bp, Homo sapien
ctgcttctctgatatatacaatgtagcaccgtg

SEQ ID NO: 704495 - DNA, 33 bp, Homo sapien
cttgctttgccacgtaccaacttgtgtaacttt

SEQ ID NO: 704496 - DNA, 33 bp, Homo sapien
cttgctttgccacgtatcaacttgtgtaacttt

SEQ ID NO: 704497 - DNA, 33 bp, Homo sapien
cctggcctctagttgcccttcagctagtgtgct

SEQ ID NO: 704498 - DNA, 33 bp, Homo sapien
cctggcctctagttgctcttcagctagtgtgct

SEQ ID NO: 704499 - DNA, 33 bp, Homo sapien
tgatccatgcctagcagaagggacagtgatatc

SEQ ID NO: 704500 - DNA, 33 bp, Homo sapien
tgatccatgcctagcataagggacagtgatatc

SEQ ID NO: 704501 - DNA, 33 bp, Homo sapien
tcttattcagtcctcaaaactatctgataaggt

SEQ ID NO: 704502 - DNA, 33 bp, Homo sapien
tcttattcagtcctcacaactatctgataaggt

SEQ ID NO: 704503 - DNA, 33 bp, Homo sapien
cacggcacataaagagaacagagtagacctggg

SEQ ID NO: 704504 - DNA, 33 bp, Homo sapien
cacggcacataaagaggacagagtagacctggg

SEQ ID NO: 704505 - DNA, 33 bp, Homo sapien
tcgaaagggtctttgaagtggcttgtatattga

SEQ ID NO: 704506 - DNA, 33 bp, Homo sapien
tcgaaagggtctttgaggtggcttgtatattga

SEQ ID NO: 704507 - DNA, 33 bp, Homo sapien
ctgcaagtcttagaggacaccttgatgctttgg

SEQ ID NO: 704508 - DNA, 33 bp, Homo sapien
ctgcaagtcttagagggcaccttgatgctttgg

SEQ ID NO: 704509 - DNA, 33 bp, Homo sapien
attgctcaataagactcaatatttggattgatt

SEQ ID NO: 704510 - DNA, 33 bp, Homo sapien
attgctcaataagacttaatatttggattgatt

SEQ ID NO: 704511 - DNA, 33 bp, Homo sapien
actggggccaaatgtaaagattcagagcctgtg

SEQ ID NO: 704512 - DNA, 33 bp, Homo sapien
actggggccaaatgtagagattcagagcctgtg

SEQ ID NO: 704513 - DNA, 33 bp, Homo sapien
tccaaggcaagggagcccatcaaaacagtcaca

SEQ ID NO: 704514 - DNA, 33 bp, Homo sapien
tccaaggcaagggagcgcatcaaaacagtcaca

SEQ ID NO: 704515 - DNA, 33 bp, Homo sapien
tggtggtgtgaaggaacggagcactctccagcc

SEQ ID NO: 704516 - DNA, 33 bp, Homo sapien
tggtggtgtgaaggaagggagcactctccagcc

SEQ ID NO: 704517 - DNA, 33 bp, Homo sapien
aaggtcttgtccttgaacaatattctcccaggc

SEQ ID NO: 704518 - DNA, 33 bp, Homo sapien
aaggtcttgtccttgagcaatattctcccaggc

SEQ ID NO: 704519 - DNA, 33 bp, Homo sapien
acgctgtaacaggccacaaaattgctctaacct

SEQ ID NO: 704520 - DNA, 33 bp, Homo sapien
acgctgtaacaggccataaaattgctctaacct

SEQ ID NO: 704521 - DNA, 33 bp, Homo sapien
tgacatcaaagggggagaaatgacactaagtaa

SEQ ID NO: 704522 - DNA, 33 bp, Homo sapien
tgacatcaaagggggataaatgacactaagtaa

SEQ ID NO: 704523 - DNA, 33 bp, Homo sapien
tctcacagatctcttacccattccagcagtggt

SEQ ID NO: 704524 - DNA, 33 bp, Homo sapien
tctcacagatctcttatccattccagcagtggt

SEQ ID NO: 704525 - DNA, 33 bp, Homo sapien
tctgtggagtcagtgacgtatattgctatcccc

SEQ ID NO: 704526 - DNA, 33 bp, Homo sapien
tctgtggagtcagtgatgtatattgctatcccc

SEQ ID NO: 704527 - DNA, 33 bp, Homo sapien
gagccaatggtataaacctcagttcaagggcag

SEQ ID NO: 704528 - DNA, 33 bp, Homo sapien
gagccaatggtataaatctcagttcaagggcag

SEQ ID NO: 704529 - DNA, 33 bp, Homo sapien
ctcaagaagcaacggacgctggcaaggctgcag

SEQ ID NO: 704530 - DNA, 33 bp, Homo sapien
ctcaagaagcaacggatgctggcaaggctgcag

SEQ ID NO: 704531 - DNA, 33 bp, Homo sapien
acttttccgtggtcaaaaaatagcacattacct

SEQ ID NO: 704532 - DNA, 33 bp, Homo sapien
acttttccgtggtcaacaaatagcacattacct

SEQ ID NO: 704533 - DNA, 33 bp, Homo sapien
gtgatggccacttactaagagaatgcagatggc

SEQ ID NO: 704534 - DNA, 33 bp, Homo sapien
gtgatggccacttactgagagaatgcagatggc

SEQ ID NO: 704535 - DNA, 33 bp, Homo sapien
ccagctttaaaaagtaagttggcataaggcagc

SEQ ID NO: 704536 - DNA, 33 bp, Homo sapien
ccagctttaaaaagtacgttggcataaggcagc

SEQ ID NO: 704537 - DNA, 33 bp, Homo sapien
ctatttcctctctttaccatctagtgcagaaaa

SEQ ID NO: 704538 - DNA, 33 bp, Homo sapien
ctatttcctctctttatcatctagtgcagaaaa

SEQ ID NO: 704539 - DNA, 33 bp, Homo sapien
gagcaggactttcataagaagctttatctcttc

SEQ ID NO: 704540 - DNA, 33 bp, Homo sapien
gagcaggactttcatacgaagctttatctcttc

SEQ ID NO: 704541 - DNA, 33 bp, Homo sapien
tatgcaggcaaataaacgaacaaaatactcttc

SEQ ID NO: 704542 - DNA, 33 bp, Homo sapien
tatgcaggcaaataaatgaacaaaatactcttc

SEQ ID NO: 704543 - DNA, 33 bp, Homo sapien
tcatgttatccaactaaactgaaagatttttgc

SEQ ID NO: 704544 - DNA, 33 bp, Homo sapien
tcatgttatccaactagactgaaagatttttgc

SEQ ID NO: 704545 - DNA, 33 bp, Homo sapien
ctcttctctgatatcacagccttattctagaag

SEQ ID NO: 704546 - DNA, 33 bp, Homo sapien
ctcttctctgatatcatagccttattctagaag

SEQ ID NO: 704547 - DNA, 33 bp, Homo sapien
tttttcaatagttgtaaagttgtctacttgtct

SEQ ID NO: 704548 - DNA, 33 bp, Homo sapien
tttttcaatagttgtacagttgtctacttgtct

SEQ ID NO: 704549 - DNA, 33 bp, Homo sapien
taaacaccaaagcagaagggagagagaaaactt

SEQ ID NO: 704550 - DNA, 33 bp, Homo sapien
taaacaccaaagcagacgggagagagaaaactt

SEQ ID NO: 704551 - DNA, 33 bp, Homo sapien
ttcaaaccttatcagcactttaccttagagtca

SEQ ID NO: 704552 - DNA, 33 bp, Homo sapien
ttcaaaccttatcagcgctttaccttagagtca

SEQ ID NO: 704553 - DNA, 33 bp, Homo sapien
acaaaccataagcctgaaaagtctatatttatt

SEQ ID NO: 704554 - DNA, 33 bp, Homo sapien
acaaaccataagcctgtaaagtctatatttatt

SEQ ID NO: 704555 - DNA, 33 bp, Homo sapien
ccataagcacggccaaaggtttacacatttgca

SEQ ID NO: 704556 - DNA, 33 bp, Homo sapien
ccataagcacggccaagggtttacacatttgca

SEQ ID NO: 704557 - DNA, 33 bp, Homo sapien
cagacaaaaattctccaaaatctaaactgactc

SEQ ID NO: 704558 - DNA, 33 bp, Homo sapien
cagacaaaaattctccgaaatctaaactgactc

SEQ ID NO: 704559 - DNA, 33 bp, Homo sapien
atgcatcttgtagtgaaaagacaaatacttctc

SEQ ID NO: 704560 - DNA, 33 bp, Homo sapien
atgcatcttgtagtgagaagacaaatacttctc

SEQ ID NO: 704561 - DNA, 33 bp, Homo sapien
tttgtcaataggaagtaaattcttgcaccatta

SEQ ID NO: 704562 - DNA, 33 bp, Homo sapien
tttgtcaataggaagtcaattcttgcaccatta

SEQ ID NO: 704563 - DNA, 33 bp, Homo sapien
ttttttcctattccaaaaagtttcatttcatag

SEQ ID NO: 704564 - DNA, 33 bp, Homo sapien
ttttttcctattccaagaagtttcatttcatag

SEQ ID NO: 704565 - DNA, 33 bp, Homo sapien
ctgggggtcatctgaacgtcttttagagagtgg

SEQ ID NO: 704566 - DNA, 33 bp, Homo sapien
ctgggggtcatctgaatgtcttttagagagtgg

SEQ ID NO: 704567 - DNA, 33 bp, Homo sapien
atagcaaagactagaaggtactaaggccttaaa

SEQ ID NO: 704568 - DNA, 33 bp, Homo sapien
atagcaaagactagaatgtactaaggccttaaa

SEQ ID NO: 704569 - DNA, 33 bp, Homo sapien
tatttttcctcactaaatctaaatgtttgtata

SEQ ID NO: 704570 - DNA, 33 bp, Homo sapien
tatttttcctcactaagtctaaatgtttgtata

SEQ ID NO: 704571 - DNA, 33 bp, Homo sapien
tgtgtcttcagcaagacaaaagaaagaaataag

SEQ ID NO: 704572 - DNA, 33 bp, Homo sapien
tgtgtcttcagcaagataaaagaaagaaataag

SEQ ID NO: 704573 - DNA, 33 bp, Homo sapien
ggaatgattttgtgaaattaatccatgataaaa

SEQ ID NO: 704574 - DNA, 33 bp, Homo sapien
ggaatgattttgtgaagttaatccatgataaaa

SEQ ID NO: 704575 - DNA, 33 bp, Homo sapien
atcagtaggcacatcactatcccaaaccctagc

SEQ ID NO: 704576 - DNA, 33 bp, Homo sapien
atcagtaggcacatcagtatcccaaaccctagc

SEQ ID NO: 704577 - DNA, 33 bp, Homo sapien
acagcagtctccaccaaagaaataataaccctt

SEQ ID NO: 704578 - DNA, 33 bp, Homo sapien
acagcagtctccaccacagaaataataaccctt

SEQ ID NO: 704579 - DNA, 33 bp, Homo sapien
atatatcaatcctccacaaggccaggtgcacaa

SEQ ID NO: 704580 - DNA, 33 bp, Homo sapien
atatatcaatcctccataaggccaggtgcacaa

SEQ ID NO: 704581 - DNA, 33 bp, Homo sapien
ttggctttagctttgacgaagcaatttgttgtt

SEQ ID NO: 704582 - DNA, 33 bp, Homo sapien
ttggctttagctttgatgaagcaatttgttgtt

SEQ ID NO: 704583 - DNA, 33 bp, Homo sapien
tgcattagttaagaaaaaaaacagctataacac

SEQ ID NO: 704584 - DNA, 33 bp, Homo sapien
tgcattagttaagaaacaaaacagctataacac

SEQ ID NO: 704585 - DNA, 33 bp, Homo sapien
atagtatgtgcaatgaagggtacagagaagcta

SEQ ID NO: 704586 - DNA, 33 bp, Homo sapien
atagtatgtgcaatgaggggtacagagaagcta

SEQ ID NO: 704587 - DNA, 33 bp, Homo sapien
tgttacagtagtcaagaagagaggagtttacag

SEQ ID NO: 704588 - DNA, 33 bp, Homo sapien
tgttacagtagtcaaggagagaggagtttacag

SEQ ID NO: 704589 - DNA, 33 bp, Homo sapien
aatggagacaaccaaaatgaggtgaatacctgg

SEQ ID NO: 704590 - DNA, 33 bp, Homo sapien
aatggagacaaccaaagtgaggtgaatacctgg

SEQ ID NO: 704591 - DNA, 33 bp, Homo sapien
ctcttgttccactttacaaactggacttccctt

SEQ ID NO: 704592 - DNA, 33 bp, Homo sapien
ctcttgttccactttataaactggacttccctt

SEQ ID NO: 704593 - DNA, 33 bp, Homo sapien
taaatatgtcaaaatcaatatgtttaacacctt

SEQ ID NO: 704594 - DNA, 33 bp, Homo sapien
taaatatgtcaaaatccatatgtttaacacctt

SEQ ID NO: 704595 - DNA, 33 bp, Homo sapien
atttgcccaaagaagaccaatcctgggtaagtt

SEQ ID NO: 704596 - DNA, 33 bp, Homo sapien
atttgcccaaagaagatcaatcctgggtaagtt

SEQ ID NO: 704597 - DNA, 33 bp, Homo sapien
tctggactgcaaataaaaaaaactctgtagctc

SEQ ID NO: 704598 - DNA, 33 bp, Homo sapien
tctggactgcaaataacaaaaactctgtagctc

SEQ ID NO: 704599 - DNA, 33 bp, Homo sapien
tcttttctgcaggataagtaagatattgctaca

SEQ ID NO: 704600 - DNA, 33 bp, Homo sapien
tcttttctgcaggataggtaagatattgctaca

SEQ ID NO: 704601 - DNA, 33 bp, Homo sapien
cctgcaaaaaaagacaaaatgcagtaactcacc

SEQ ID NO: 704602 - DNA, 33 bp, Homo sapien
cctgcaaaaaaagacacaatgcagtaactcacc

SEQ ID NO: 704603 - DNA, 33 bp, Homo sapien
ttgcacttttgctcaaatctttaatagcgtgcc

SEQ ID NO: 704604 - DNA, 33 bp, Homo sapien
ttgcacttttgctcaagtctttaatagcgtgcc

SEQ ID NO: 704605 - DNA, 33 bp, Homo sapien
tatcaactttcatacaaaaaaactccagaaaaa

SEQ ID NO: 704606 - DNA, 33 bp, Homo sapien
tatcaactttcatacacaaaaactccagaaaaa

SEQ ID NO: 704607 - DNA, 33 bp, Homo sapien
ttctggatgtttccaacggttctggaagttttg

SEQ ID NO: 704608 - DNA, 33 bp, Homo sapien
ttctggatgtttccaatggttctggaagttttg

SEQ ID NO: 704609 - DNA, 33 bp, Homo sapien
agacagagaagttaaacgagatctcagagaggc

SEQ ID NO: 704610 - DNA, 33 bp, Homo sapien
agacagagaagttaaatgagatctcagagaggc

SEQ ID NO: 704611 - DNA, 33 bp, Homo sapien
gtatggtgaatttcaacatggtcttcctcattc

SEQ ID NO: 704612 - DNA, 33 bp, Homo sapien
gtatggtgaatttcaatatggtcttcctcattc

SEQ ID NO: 704613 - DNA, 33 bp, Homo sapien
ctgcaaaatgatggtccactttaattatctcta

SEQ ID NO: 704614 - DNA, 33 bp, Homo sapien
ctgcaaaatgatggtctactttaattatctcta

SEQ ID NO: 704615 - DNA, 33 bp, Homo sapien
gcatttccaaagtcacaaagacagaaatgtggt

SEQ ID NO: 704616 - DNA, 33 bp, Homo sapien
gcatttccaaagtcacgaagacagaaatgtggt

SEQ ID NO: 704617 - DNA, 33 bp, Homo sapien
ctcatgcactcccttccagtcagtcaaatcctg

SEQ ID NO: 704618 - DNA, 33 bp, Homo sapien
ctcatgcactcccttcgagtcagtcaaatcctg

SEQ ID NO: 704619 - DNA, 33 bp, Homo sapien
agtaattccaaaactacattctatacattctag

SEQ ID NO: 704620 - DNA, 33 bp, Homo sapien
agtaattccaaaactatattctatacattctag

SEQ ID NO: 704621 - DNA, 33 bp, Homo sapien
taggcttgaaaacattaaaacagatggtgatac

SEQ ID NO: 704622 - DNA, 33 bp, Homo sapien
taggcttgaaaacattgaaacagatggtgatac

SEQ ID NO: 704623 - DNA, 33 bp, Homo sapien
atatttttaaactttgaacttctagcaattcta

SEQ ID NO: 704624 - DNA, 33 bp, Homo sapien
atatttttaaactttggacttctagcaattcta

SEQ ID NO: 704625 - DNA, 33 bp, Homo sapien
tggagggtttgagataggctccctggagtgtgg

SEQ ID NO: 704626 - DNA, 33 bp, Homo sapien
tggagggtttgagatatgctccctggagtgtgg

SEQ ID NO: 704627 - DNA, 33 bp, Homo sapien
caatcacatttttgataaccgacattataaatt

SEQ ID NO: 704628 - DNA, 33 bp, Homo sapien
caatcacatttttgatcaccgacattataaatt

SEQ ID NO: 704629 - DNA, 33 bp, Homo sapien
atgttgtcaatttcacccatgtgtcaagctata

SEQ ID NO: 704630 - DNA, 33 bp, Homo sapien
atgttgtcaatttcacgcatgtgtcaagctata

SEQ ID NO: 704631 - DNA, 33 bp, Homo sapien
atgctgtgtacctatcaaaagcttgaattccca

SEQ ID NO: 704632 - DNA, 33 bp, Homo sapien
atgctgtgtacctatccaaagcttgaattccca

SEQ ID NO: 704633 - DNA, 33 bp, Homo sapien
tgttagcataatttcaaatattcagagcacacc

SEQ ID NO: 704634 - DNA, 33 bp, Homo sapien
tgttagcataatttcagatattcagagcacacc

SEQ ID NO: 704635 - DNA, 33 bp, Homo sapien
tttttttcttccacctaaagatgcaccaaaaag

SEQ ID NO: 704636 - DNA, 33 bp, Homo sapien
tttttttcttccacctgaagatgcaccaaaaag

SEQ ID NO: 704637 - DNA, 33 bp, Homo sapien
cattatacttctttgacgctggttacttaggga

SEQ ID NO: 704638 - DNA, 33 bp, Homo sapien
cattatacttctttgatgctggttacttaggga

SEQ ID NO: 704639 - DNA, 33 bp, Homo sapien
tttatacagtaagagagaactacaacaactaga

SEQ ID NO: 704640 - DNA, 33 bp, Homo sapien
tttatacagtaagagataactacaacaactaga

SEQ ID NO: 704641 - DNA, 33 bp, Homo sapien
atctatgcccttttacggaaacagacacaagaa

SEQ ID NO: 704642 - DNA, 33 bp, Homo sapien
atctatgcccttttactgaaacagacacaagaa

SEQ ID NO: 704643 - DNA, 33 bp, Homo sapien
taacaggactgtgaaaagatgacagatgtacaa

SEQ ID NO: 704644 - DNA, 33 bp, Homo sapien
taacaggactgtgaaaggatgacagatgtacaa

SEQ ID NO: 704645 - DNA, 33 bp, Homo sapien
cttaattggcctctcagtataagttgcaccctc

SEQ ID NO: 704646 - DNA, 33 bp, Homo sapien
cttaattggcctctcattataagttgcaccctc

SEQ ID NO: 704647 - DNA, 33 bp, Homo sapien
tgaagtctcagtaggaacctcagtagcaaatgt

SEQ ID NO: 704648 - DNA, 33 bp, Homo sapien
tgaagtctcagtaggaccctcagtagcaaatgt

SEQ ID NO: 704649 - DNA, 33 bp, Homo sapien
ccccaagattcagagacgataggcctcaacatg

SEQ ID NO: 704650 - DNA, 33 bp, Homo sapien
ccccaagattcagagatgataggcctcaacatg

SEQ ID NO: 704651 - DNA, 33 bp, Homo sapien
taccatgctcaaacagaaccttaggtcggttaa

SEQ ID NO: 704652 - DNA, 33 bp, Homo sapien
taccatgctcaaacagcaccttaggtcggttaa

SEQ ID NO: 704653 - DNA, 33 bp, Homo sapien
ggttctttgaaaggacaaacaagctcaatagac

SEQ ID NO: 704654 - DNA, 33 bp, Homo sapien
ggttctttgaaaggacgaacaagctcaatagac

SEQ ID NO: 704655 - DNA, 33 bp, Homo sapien
ggctttgcttccataaacctatactacattgag

SEQ ID NO: 704656 - DNA, 33 bp, Homo sapien
ggctttgcttccataaccctatactacattgag

SEQ ID NO: 704657 - DNA, 33 bp, Homo sapien
gagtaggtgctctagaagcctggagagctgcca

SEQ ID NO: 704658 - DNA, 33 bp, Homo sapien
gagtaggtgctctagatgcctggagagctgcca

SEQ ID NO: 704659 - DNA, 33 bp, Homo sapien
agcctgtgacaggagaaatcacaattctagcac

SEQ ID NO: 704660 - DNA, 33 bp, Homo sapien
agcctgtgacaggagagatcacaattctagcac

SEQ ID NO: 704661 - DNA, 33 bp, Homo sapien
aatgttgactgaacgtaaagtttcctggacagg

SEQ ID NO: 704662 - DNA, 33 bp, Homo sapien
aatgttgactgaacgtgaagtttcctggacagg

SEQ ID NO: 704663 - DNA, 33 bp, Homo sapien
tcaccccatcacccgaatcctgtccaggaaact

SEQ ID NO: 704664 - DNA, 33 bp, Homo sapien
tcaccccatcacccgagtcctgtccaggaaact

SEQ ID NO: 704665 - DNA, 33 bp, Homo sapien
atggattacgtttatcaatttgcatatgttgaa

SEQ ID NO: 704666 - DNA, 33 bp, Homo sapien
atggattacgtttatcgatttgcatatgttgaa

SEQ ID NO: 704667 - DNA, 33 bp, Homo sapien
agagaccatttcctaaccacaatatctgttagt

SEQ ID NO: 704668 - DNA, 33 bp, Homo sapien
agagaccatttcctaagcacaatatctgttagt

SEQ ID NO: 704669 - DNA, 33 bp, Homo sapien
tgaagtctaatcctacacaaaccaacagagatc

SEQ ID NO: 704670 - DNA, 33 bp, Homo sapien
tgaagtctaatcctacgcaaaccaacagagatc

SEQ ID NO: 704671 - DNA, 33 bp, Homo sapien
gaagttccggtaggtaagtaattcaagggctca

SEQ ID NO: 704672 - DNA, 33 bp, Homo sapien
gaagttccggtaggtaggtaattcaagggctca

SEQ ID NO: 704673 - DNA, 33 bp, Homo sapien
atgctttttactttgaagttccattttcctgaa

SEQ ID NO: 704674 - DNA, 33 bp, Homo sapien
atgctttttactttgacgttccattttcctgaa

SEQ ID NO: 704675 - DNA, 33 bp, Homo sapien
attcttaaacagtagtaaatttgaagactatac

SEQ ID NO: 704676 - DNA, 33 bp, Homo sapien
attcttaaacagtagttaatttgaagactatac

SEQ ID NO: 704677 - DNA, 33 bp, Homo sapien
ctcaagaactttataagaatttttgactacttc

SEQ ID NO: 704678 - DNA, 33 bp, Homo sapien
ctcaagaactttataataatttttgactacttc

SEQ ID NO: 704679 - DNA, 33 bp, Homo sapien
gtaagatttgaaacctaagccaataatctaaat

SEQ ID NO: 704680 - DNA, 33 bp, Homo sapien
gtaagatttgaaacctgagccaataatctaaat

SEQ ID NO: 704681 - DNA, 33 bp, Homo sapien
ttaatcatctcctcaaagaaaagacaaactaag

SEQ ID NO: 704682 - DNA, 33 bp, Homo sapien
ttaatcatctcctcaacgaaaagacaaactaag

SEQ ID NO: 704683 - DNA, 33 bp, Homo sapien
agttcaggcaaactgacgtcttctaattaactt

SEQ ID NO: 704684 - DNA, 33 bp, Homo sapien
agttcaggcaaactgatgtcttctaattaactt

SEQ ID NO: 704685 - DNA, 33 bp, Homo sapien
ctacttagatatgaaacagtttaggaattttaa

SEQ ID NO: 704686 - DNA, 33 bp, Homo sapien
ctacttagatatgaaagagtttaggaattttaa

SEQ ID NO: 704687 - DNA, 33 bp, Homo sapien
taatttctttacaaaaactgatagttactgata

SEQ ID NO: 704688 - DNA, 33 bp, Homo sapien
taatttctttacaaaacctgatagttactgata

SEQ ID NO: 704689 - DNA, 33 bp, Homo sapien
aaagcccattaataggcattgtttggttttgga

SEQ ID NO: 704690 - DNA, 33 bp, Homo sapien
aaagcccattaatagggattgtttggttttgga

SEQ ID NO: 704691 - DNA, 33 bp, Homo sapien
attttcttaatttctccgactttatcagctttc

SEQ ID NO: 704692 - DNA, 33 bp, Homo sapien
attttcttaatttctctgactttatcagctttc

SEQ ID NO: 704693 - DNA, 33 bp, Homo sapien
ttgcctaaggtaacaaacaattaatagtgaaaa

SEQ ID NO: 704694 - DNA, 33 bp, Homo sapien
ttgcctaaggtaacaagcaattaatagtgaaaa

SEQ ID NO: 704695 - DNA, 33 bp, Homo sapien
aaaattaaagtgagcacagcaaatagatccttt

SEQ ID NO: 704696 - DNA, 33 bp, Homo sapien
aaaattaaagtgagcatagcaaatagatccttt

SEQ ID NO: 704697 - DNA, 33 bp, Homo sapien
ttccttatcctaaacaacatcttcttttctatt

SEQ ID NO: 704698 - DNA, 33 bp, Homo sapien
ttccttatcctaaacagcatcttcttttctatt

SEQ ID NO: 704699 - DNA, 33 bp, Homo sapien
ttgagaaaaatctataacttttatgccattctg

SEQ ID NO: 704700 - DNA, 33 bp, Homo sapien
ttgagaaaaatctataccttttatgccattctg

SEQ ID NO: 704701 - DNA, 33 bp, Homo sapien
gaataaggttctattcaatattcacaccagcaa

SEQ ID NO: 704702 - DNA, 33 bp, Homo sapien
gaataaggttctattccatattcacaccagcaa

SEQ ID NO: 704703 - DNA, 33 bp, Homo sapien
catgtgctatgtaacaagtgctatgaaaaatac

SEQ ID NO: 704704 - DNA, 33 bp, Homo sapien
catgtgctatgtaacaggtgctatgaaaaatac

SEQ ID NO: 704705 - DNA, 33 bp, Homo sapien
aatttgttttaaggtacatatcacaactctatt

SEQ ID NO: 704706 - DNA, 33 bp, Homo sapien
aatttgttttaaggtatatatcacaactctatt

SEQ ID NO: 704707 - DNA, 33 bp, Homo sapien
tatgaacattgataaactgatatgagagcaatt

SEQ ID NO: 704708 - DNA, 33 bp, Homo sapien
tatgaacattgataaattgatatgagagcaatt

SEQ ID NO: 704709 - DNA, 33 bp, Homo sapien
actgaatttgcgagcaaaaatgtcaccacttgt

SEQ ID NO: 704710 - DNA, 33 bp, Homo sapien
actgaatttgcgagcacaaatgtcaccacttgt

SEQ ID NO: 704711 - DNA, 33 bp, Homo sapien
atttaagactatgaaacaggaagtgaattgctt

SEQ ID NO: 704712 - DNA, 33 bp, Homo sapien
atttaagactatgaaagaggaagtgaattgctt

SEQ ID NO: 704713 - DNA, 33 bp, Homo sapien
accaaccagtgccacaatgagaagggagaaaag

SEQ ID NO: 704714 - DNA, 33 bp, Homo sapien
accaaccagtgccacagtgagaagggagaaaag

SEQ ID NO: 704715 - DNA, 33 bp, Homo sapien
tgccattttgccaggtcaagtaatagtaatacg

SEQ ID NO: 704716 - DNA, 33 bp, Homo sapien
tgccattttgccaggtgaagtaatagtaatacg

SEQ ID NO: 704717 - DNA, 33 bp, Homo sapien
cctggtgctcagtgaaaagagtctaaccatctc

SEQ ID NO: 704718 - DNA, 33 bp, Homo sapien
cctggtgctcagtgaacagagtctaaccatctc

SEQ ID NO: 704719 - DNA, 33 bp, Homo sapien
tgaagaagccccttgaagctttgccctactgaa

SEQ ID NO: 704720 - DNA, 33 bp, Homo sapien
tgaagaagccccttgatgctttgccctactgaa

SEQ ID NO: 704721 - DNA, 33 bp, Homo sapien
caatctccacagccaaatagaaaggtggaatga

SEQ ID NO: 704722 - DNA, 33 bp, Homo sapien
caatctccacagccaagtagaaaggtggaatga

SEQ ID NO: 704723 - DNA, 33 bp, Homo sapien
gctgggtatatgagtacatggggagttgtatta

SEQ ID NO: 704724 - DNA, 33 bp, Homo sapien
gctgggtatatgagtagatggggagttgtatta

SEQ ID NO: 704725 - DNA, 33 bp, Homo sapien
tatgaaatttccaatgaatacctttaagcacac

SEQ ID NO: 704726 - DNA, 33 bp, Homo sapien
tatgaaatttccaatgtatacctttaagcacac

SEQ ID NO: 704727 - DNA, 33 bp, Homo sapien
gcaaaataaaatctcacatactgctttaaaaca

SEQ ID NO: 704728 - DNA, 33 bp, Homo sapien
gcaaaataaaatctcatatactgctttaaaaca

SEQ ID NO: 704729 - DNA, 33 bp, Homo sapien
ctgcccttaaatactcaaattaattggcctcag

SEQ ID NO: 704730 - DNA, 33 bp, Homo sapien
ctgcccttaaatactcgaattaattggcctcag

SEQ ID NO: 704731 - DNA, 33 bp, Homo sapien
tatataaaagaaacaaggtttttagcacaaaag

SEQ ID NO: 704732 - DNA, 33 bp, Homo sapien
tatataaaagaaacaatgtttttagcacaaaag

SEQ ID NO: 704733 - DNA, 33 bp, Homo sapien
atggtcaacaagtgtccaccaaatggatagata

SEQ ID NO: 704734 - DNA, 33 bp, Homo sapien
atggtcaacaagtgtctaccaaatggatagata

SEQ ID NO: 704735 - DNA, 33 bp, Homo sapien
cattttcatagtgaggaattacacaagatgcaa

SEQ ID NO: 704736 - DNA, 33 bp, Homo sapien
cattttcatagtgaggtattacacaagatgcaa

SEQ ID NO: 704737 - DNA, 33 bp, Homo sapien
ataattggacttaaatgagatcacatgatagca

SEQ ID NO: 704738 - DNA, 33 bp, Homo sapien
ataattggacttaaattagatcacatgatagca

SEQ ID NO: 704739 - DNA, 33 bp, Homo sapien
tgcatttcaggattgacgtctcacatacttgat

SEQ ID NO: 704740 - DNA, 33 bp, Homo sapien
tgcatttcaggattgatgtctcacatacttgat

SEQ ID NO: 704741 - DNA, 33 bp, Homo sapien
aggaccctaacattataaacaccgcaggccatt

SEQ ID NO: 704742 - DNA, 33 bp, Homo sapien
aggaccctaacattatgaacaccgcaggccatt

SEQ ID NO: 704743 - DNA, 33 bp, Homo sapien
cttgagacacaccgagcataaggcttgctggga

SEQ ID NO: 704744 - DNA, 33 bp, Homo sapien
cttgagacacaccgagtataaggcttgctggga

SEQ ID NO: 704745 - DNA, 33 bp, Homo sapien
aacctttattttggtacgatgaaatttattatt

SEQ ID NO: 704746 - DNA, 33 bp, Homo sapien
aacctttattttggtaggatgaaatttattatt

SEQ ID NO: 704747 - DNA, 33 bp, Homo sapien
cagaaaacctcctggaacacatctgaaatacag

SEQ ID NO: 704748 - DNA, 33 bp, Homo sapien
cagaaaacctcctggagcacatctgaaatacag

SEQ ID NO: 704749 - DNA, 33 bp, Homo sapien
aagctgtgttctgtagccatatgtaagcgtgaa

SEQ ID NO: 704750 - DNA, 33 bp, Homo sapien
aagctgtgttctgtaggcatatgtaagcgtgaa

SEQ ID NO: 704751 - DNA, 33 bp, Homo sapien
gagagagattgcaatgcaacagtagcaggtgcc

SEQ ID NO: 704752 - DNA, 33 bp, Homo sapien
gagagagattgcaatgtaacagtagcaggtgcc

SEQ ID NO: 704753 - DNA, 33 bp, Homo sapien
aaattctaactcaaaacaaaaaccgtagatatt

SEQ ID NO: 704754 - DNA, 33 bp, Homo sapien
aaattctaactcaaaagaaaaaccgtagatatt

SEQ ID NO: 704755 - DNA, 33 bp, Homo sapien
atatattttgaacctcagaatcttagcaagaga

SEQ ID NO: 704756 - DNA, 33 bp, Homo sapien
atatattttgaacctcggaatcttagcaagaga

SEQ ID NO: 704757 - DNA, 33 bp, Homo sapien
cagtttgcatttcccaacaactaataatgtgaa

SEQ ID NO: 704758 - DNA, 33 bp, Homo sapien
cagtttgcatttcccagcaactaataatgtgaa

SEQ ID NO: 704759 - DNA, 33 bp, Homo sapien
tgggactgggcaataagagggatttgggatgaa

SEQ ID NO: 704760 - DNA, 33 bp, Homo sapien
tgggactgggcaataatagggatttgggatgaa

SEQ ID NO: 704761 - DNA, 33 bp, Homo sapien
gatatatttattctcacggctcaagttgttcag

SEQ ID NO: 704762 - DNA, 33 bp, Homo sapien
gatatatttattctcatggctcaagttgttcag

SEQ ID NO: 704763 - DNA, 33 bp, Homo sapien
gagttaatttgggaacacaaagctgcttcaaca

SEQ ID NO: 704764 - DNA, 33 bp, Homo sapien
gagttaatttgggaactcaaagctgcttcaaca

SEQ ID NO: 704765 - DNA, 33 bp, Homo sapien
agtaagcagaagaaagcccaagtgactatgtta

SEQ ID NO: 704766 - DNA, 33 bp, Homo sapien
agtaagcagaagaaagtccaagtgactatgtta

SEQ ID NO: 704767 - DNA, 33 bp, Homo sapien
gggaatggagaacaaactcatgcttcttaattg

SEQ ID NO: 704768 - DNA, 33 bp, Homo sapien
gggaatggagaacaaattcatgcttcttaattg

SEQ ID NO: 704769 - DNA, 33 bp, Homo sapien
caaaccatatctgtccacaaagaagtgattaga

SEQ ID NO: 704770 - DNA, 33 bp, Homo sapien
caaaccatatctgtccgcaaagaagtgattaga

SEQ ID NO: 704771 - DNA, 33 bp, Homo sapien
aagatttttcccaaggaaccatgctttttaaaa

SEQ ID NO: 704772 - DNA, 33 bp, Homo sapien
aagatttttcccaagggaccatgctttttaaaa

SEQ ID NO: 704773 - DNA, 33 bp, Homo sapien
aaaaacacaaaaacaacgaggtacataggcctc

SEQ ID NO: 704774 - DNA, 33 bp, Homo sapien
aaaaacacaaaaacaatgaggtacataggcctc

SEQ ID NO: 704775 - DNA, 33 bp, Homo sapien
tcttttttggagaaagacaatagaggtatgcac

SEQ ID NO: 704776 - DNA, 33 bp, Homo sapien
tcttttttggagaaaggcaatagaggtatgcac

SEQ ID NO: 704777 - DNA, 33 bp, Homo sapien
cttggtgagaaataatcagggcttaatgacatg

SEQ ID NO: 704778 - DNA, 33 bp, Homo sapien
cttggtgagaaataatgagggcttaatgacatg

SEQ ID NO: 704779 - DNA, 33 bp, Homo sapien
cctaatgggccacagaacattactgatccttgc

SEQ ID NO: 704780 - DNA, 33 bp, Homo sapien
cctaatgggccacagaccattactgatccttgc

SEQ ID NO: 704781 - DNA, 33 bp, Homo sapien
tttttttctaataacacgaagcagatcttttaa

SEQ ID NO: 704782 - DNA, 33 bp, Homo sapien
tttttttctaataacatgaagcagatcttttaa

SEQ ID NO: 704783 - DNA, 33 bp, Homo sapien
ggaactttgcaagtaaccaaccacaggctacta

SEQ ID NO: 704784 - DNA, 33 bp, Homo sapien
ggaactttgcaagtaatcaaccacaggctacta

SEQ ID NO: 704785 - DNA, 33 bp, Homo sapien
accctggtaactaatcacgtcaaatgtacagta

SEQ ID NO: 704786 - DNA, 33 bp, Homo sapien
accctggtaactaatcgcgtcaaatgtacagta

SEQ ID NO: 704787 - DNA, 33 bp, Homo sapien
agatattttgagacaccgaaggattcatataaa

SEQ ID NO: 704788 - DNA, 33 bp, Homo sapien
agatattttgagacactgaaggattcatataaa

SEQ ID NO: 704789 - DNA, 33 bp, Homo sapien
tatgcatgtcgtggtaagttcttttgtaatatg

SEQ ID NO: 704790 - DNA, 33 bp, Homo sapien
tatgcatgtcgtggtaggttcttttgtaatatg

SEQ ID NO: 704791 - DNA, 33 bp, Homo sapien
gacaggtagattcacaaagaagctcttgtgact

SEQ ID NO: 704792 - DNA, 33 bp, Homo sapien
gacaggtagattcacacagaagctcttgtgact

SEQ ID NO: 704793 - DNA, 33 bp, Homo sapien
cccaaataaataaagaaatgtctgatcaaaaga

SEQ ID NO: 704794 - DNA, 33 bp, Homo sapien
cccaaataaataaagatatgtctgatcaaaaga

SEQ ID NO: 704795 - DNA, 33 bp, Homo sapien
gaataaaactaccaacccttatgagcttacatt

SEQ ID NO: 704796 - DNA, 33 bp, Homo sapien
gaataaaactaccaacgcttatgagcttacatt

SEQ ID NO: 704797 - DNA, 33 bp, Homo sapien
acagtggaatgagtaacgaaaatgtgttacata

SEQ ID NO: 704798 - DNA, 33 bp, Homo sapien
acagtggaatgagtaatgaaaatgtgttacata

SEQ ID NO: 704799 - DNA, 33 bp, Homo sapien
gggattctggaagacaagtagcttttctaaaga

SEQ ID NO: 704800 - DNA, 33 bp, Homo sapien
gggattctggaagacaggtagcttttctaaaga

SEQ ID NO: 704801 - DNA, 33 bp, Homo sapien
tttaagccatcctgcagaaaaaggatgaactgc

SEQ ID NO: 704802 - DNA, 33 bp, Homo sapien
tttaagccatcctgcataaaaaggatgaactgc

SEQ ID NO: 704803 - DNA, 33 bp, Homo sapien
tgcattatcatatgtccaaggttatagctctga

SEQ ID NO: 704804 - DNA, 33 bp, Homo sapien
tgcattatcatatgtctaaggttatagctctga

SEQ ID NO: 704805 - DNA, 33 bp, Homo sapien
cacctgactaagggcccctcaatccagagacta

SEQ ID NO: 704806 - DNA, 33 bp, Homo sapien
cacctgactaagggcctctcaatccagagacta

SEQ ID NO: 704807 - DNA, 33 bp, Homo sapien
gcattaggtagatctccaaaggccatccctccc

SEQ ID NO: 704808 - DNA, 33 bp, Homo sapien
gcattaggtagatctcgaaaggccatccctccc

SEQ ID NO: 704809 - DNA, 33 bp, Homo sapien
tactcagtttgtatcaatatctgagaacctaac

SEQ ID NO: 704810 - DNA, 33 bp, Homo sapien
tactcagtttgtatcagtatctgagaacctaac

SEQ ID NO: 704811 - DNA, 33 bp, Homo sapien
gcagctactatctcgaataaacagccatgtcct

SEQ ID NO: 704812 - DNA, 33 bp, Homo sapien
gcagctactatctcgactaaacagccatgtcct

SEQ ID NO: 704813 - DNA, 33 bp, Homo sapien
ggacttaggatctgacaggaaaatgagactgca

SEQ ID NO: 704814 - DNA, 33 bp, Homo sapien
ggacttaggatctgacgggaaaatgagactgca

SEQ ID NO: 704815 - DNA, 33 bp, Homo sapien
accagccgagagccaaaaatttagcttgagtta

SEQ ID NO: 704816 - DNA, 33 bp, Homo sapien
accagccgagagccaacaatttagcttgagtta

SEQ ID NO: 704817 - DNA, 33 bp, Homo sapien
ctgtctaagtaactaactccttcacgtattccc

SEQ ID NO: 704818 - DNA, 33 bp, Homo sapien
ctgtctaagtaactaattccttcacgtattccc

SEQ ID NO: 704819 - DNA, 33 bp, Homo sapien
tataattcagtatgtccgaaggcattgctcaag

SEQ ID NO: 704820 - DNA, 33 bp, Homo sapien
tataattcagtatgtctgaaggcattgctcaag

SEQ ID NO: 704821 - DNA, 33 bp, Homo sapien
ccctttctctctgcaacgatgatatttattaag

SEQ ID NO: 704822 - DNA, 33 bp, Homo sapien
ccctttctctctgcaatgatgatatttattaag

SEQ ID NO: 704823 - DNA, 33 bp, Homo sapien
tttggattatagtgtaaatgaagtgaaattgca

SEQ ID NO: 704824 - DNA, 33 bp, Homo sapien
tttggattatagtgtagatgaagtgaaattgca

SEQ ID NO: 704825 - DNA, 33 bp, Homo sapien
ttcttagagagtgggaagtcataggctggacgc

SEQ ID NO: 704826 - DNA, 33 bp, Homo sapien
ttcttagagagtgggatgtcataggctggacgc

SEQ ID NO: 704827 - DNA, 33 bp, Homo sapien
gttctaagaaagctaacgagtagcaagtagtac

SEQ ID NO: 704828 - DNA, 33 bp, Homo sapien
gttctaagaaagctaatgagtagcaagtagtac

SEQ ID NO: 704829 - DNA, 33 bp, Homo sapien
gaatttcacgacaggaaggttagagccagttgg

SEQ ID NO: 704830 - DNA, 33 bp, Homo sapien
gaatttcacgacaggacggttagagccagttgg

SEQ ID NO: 704831 - DNA, 33 bp, Homo sapien
catagagacaacactaaaatgcctctaaggagc

SEQ ID NO: 704832 - DNA, 33 bp, Homo sapien
catagagacaacactacaatgcctctaaggagc

SEQ ID NO: 704833 - DNA, 33 bp, Homo sapien
ttactggaaatcctagcatagtgtagaattcca

SEQ ID NO: 704834 - DNA, 33 bp, Homo sapien
ttactggaaatcctagtatagtgtagaattcca

SEQ ID NO: 704835 - DNA, 33 bp, Homo sapien
attctgtatcaactgcactcatatacacagaca

SEQ ID NO: 704836 - DNA, 33 bp, Homo sapien
attctgtatcaactgccctcatatacacagaca

SEQ ID NO: 704837 - DNA, 33 bp, Homo sapien
gctcaagaaacgctacgacaaagagattaattt

SEQ ID NO: 704838 - DNA, 33 bp, Homo sapien
gctcaagaaacgctactacaaagagattaattt

SEQ ID NO: 704839 - DNA, 33 bp, Homo sapien
acttgctgatcctaaggaaatgctgtaagtttt

SEQ ID NO: 704840 - DNA, 33 bp, Homo sapien
acttgctgatcctaagtaaatgctgtaagtttt

SEQ ID NO: 704841 - DNA, 33 bp, Homo sapien
gaaaagccttccttaacgtctgaagccttcttt

SEQ ID NO: 704842 - DNA, 33 bp, Homo sapien
gaaaagccttccttaatgtctgaagccttcttt

SEQ ID NO: 704843 - DNA, 33 bp, Homo sapien
gtaaatgggctctgtacggaaggataagagaat

SEQ ID NO: 704844 - DNA, 33 bp, Homo sapien
gtaaatgggctctgtatggaaggataagagaat

SEQ ID NO: 704845 - DNA, 33 bp, Homo sapien
caagtcccattattaactagacacaatccaacc

SEQ ID NO: 704846 - DNA, 33 bp, Homo sapien
caagtcccattattaagtagacacaatccaacc

SEQ ID NO: 704847 - DNA, 33 bp, Homo sapien
taatactcataacttgcaatctaacattttaaa

SEQ ID NO: 704848 - DNA, 33 bp, Homo sapien
taatactcataacttggaatctaacattttaaa

SEQ ID NO: 704849 - DNA, 33 bp, Homo sapien
aacatacaagggcataagtctttttggcagaag

SEQ ID NO: 704850 - DNA, 33 bp, Homo sapien
aacatacaagggcatacgtctttttggcagaag

SEQ ID NO: 704851 - DNA, 33 bp, Homo sapien
tttaataagttgaccaaaccagttcagtgaaat

SEQ ID NO: 704852 - DNA, 33 bp, Homo sapien
tttaataagttgaccagaccagttcagtgaaat

SEQ ID NO: 704853 - DNA, 33 bp, Homo sapien
cacactggcatccttacggtgctttgaatacaa

SEQ ID NO: 704854 - DNA, 33 bp, Homo sapien
cacactggcatccttatggtgctttgaatacaa

SEQ ID NO: 704855 - DNA, 33 bp, Homo sapien
ttttcaacagactccaatgagggacttttgttt

SEQ ID NO: 704856 - DNA, 33 bp, Homo sapien
ttttcaacagactccagtgagggacttttgttt

SEQ ID NO: 704857 - DNA, 33 bp, Homo sapien
ggaaacattcctggtaggctttatgtatagagt

SEQ ID NO: 704858 - DNA, 33 bp, Homo sapien
ggaaacattcctggtatgctttatgtatagagt

SEQ ID NO: 704859 - DNA, 33 bp, Homo sapien
tcatgtggtttgtaaacggtaggctaagatttg

SEQ ID NO: 704860 - DNA, 33 bp, Homo sapien
tcatgtggtttgtaaatggtaggctaagatttg

SEQ ID NO: 704861 - DNA, 33 bp, Homo sapien
gaaaaaattgctaagcgaatttgacacaaaaat

SEQ ID NO: 704862 - DNA, 33 bp, Homo sapien
gaaaaaattgctaagctaatttgacacaaaaat

SEQ ID NO: 704863 - DNA, 33 bp, Homo sapien
tgagttttaaaagagcaatattccatttttgtg

SEQ ID NO: 704864 - DNA, 33 bp, Homo sapien
tgagttttaaaagagcgatattccatttttgtg

SEQ ID NO: 704865 - DNA, 33 bp, Homo sapien
aataccattctagatacaggactgggcaaagac

SEQ ID NO: 704866 - DNA, 33 bp, Homo sapien
aataccattctagatataggactgggcaaagac

SEQ ID NO: 704867 - DNA, 33 bp, Homo sapien
aaaggtctaatgtctaacatacctaaggaactt

SEQ ID NO: 704868 - DNA, 33 bp, Homo sapien
aaaggtctaatgtctagcatacctaaggaactt

SEQ ID NO: 704869 - DNA, 33 bp, Homo sapien
tgtatgttcgtacttacgtgtcggagctaaaca

SEQ ID NO: 704870 - DNA, 33 bp, Homo sapien
tgtatgttcgtacttatgtgtcggagctaaaca

SEQ ID NO: 704871 - DNA, 33 bp, Homo sapien
gttctcattttgtgcccactaatataatctaat

SEQ ID NO: 704872 - DNA, 33 bp, Homo sapien
gttctcattttgtgccgactaatataatctaat

SEQ ID NO: 704873 - DNA, 33 bp, Homo sapien
attcttatacaaaaaaacggagccaggatgtcc

SEQ ID NO: 704874 - DNA, 33 bp, Homo sapien
attcttatacaaaaaaccggagccaggatgtcc

SEQ ID NO: 704875 - DNA, 33 bp, Homo sapien
aatatcagaagataaaatcagataatttgccta

SEQ ID NO: 704876 - DNA, 33 bp, Homo sapien
aatatcagaagataaagtcagataatttgccta

SEQ ID NO: 704877 - DNA, 33 bp, Homo sapien
acattaggtgtatctcagaaaattagagaggta

SEQ ID NO: 704878 - DNA, 33 bp, Homo sapien
acattaggtgtatctcggaaaattagagaggta

SEQ ID NO: 704879 - DNA, 33 bp, Homo sapien
gctttttgagttggcaagatgggaaagaagcct

SEQ ID NO: 704880 - DNA, 33 bp, Homo sapien
gctttttgagttggcatgatgggaaagaagcct

SEQ ID NO: 704881 - DNA, 33 bp, Homo sapien
tcttaaggcactgcaaaaatagccatgcccact

SEQ ID NO: 704882 - DNA, 33 bp, Homo sapien
tcttaaggcactgcaagaatagccatgcccact

SEQ ID NO: 704883 - DNA, 33 bp, Homo sapien
tttacatccaaaaataccatgtagcttgctcaa

SEQ ID NO: 704884 - DNA, 33 bp, Homo sapien
tttacatccaaaaatatcatgtagcttgctcaa

SEQ ID NO: 704885 - DNA, 33 bp, Homo sapien
atcttgttaactgtcccgatattctatcttgtt

SEQ ID NO: 704886 - DNA, 33 bp, Homo sapien
atcttgttaactgtcctgatattctatcttgtt

SEQ ID NO: 704887 - DNA, 33 bp, Homo sapien
atatttttggaagtcaatagtcaaccaaagaga

SEQ ID NO: 704888 - DNA, 33 bp, Homo sapien
atatttttggaagtcagtagtcaaccaaagaga

SEQ ID NO: 704889 - DNA, 33 bp, Homo sapien
ctccttttgctggaaaccatgtgttgacatttc

SEQ ID NO: 704890 - DNA, 33 bp, Homo sapien
ctccttttgctggaaatcatgtgttgacatttc

SEQ ID NO: 704891 - DNA, 33 bp, Homo sapien
ttcagacttctatacaacaactgtcacatacta

SEQ ID NO: 704892 - DNA, 33 bp, Homo sapien
ttcagacttctatacagcaactgtcacatacta

SEQ ID NO: 704893 - DNA, 33 bp, Homo sapien
atgcttggcacaggagcaaatgatggatgtggg

SEQ ID NO: 704894 - DNA, 33 bp, Homo sapien
atgcttggcacaggagtaaatgatggatgtggg

SEQ ID NO: 704895 - DNA, 33 bp, Homo sapien
tgtgtttaaaacttccaactcttgttcagacaa

SEQ ID NO: 704896 - DNA, 33 bp, Homo sapien
tgtgtttaaaacttcctactcttgttcagacaa

SEQ ID NO: 704897 - DNA, 33 bp, Homo sapien
agaaagtgttaactgccaagactggagaggtaa

SEQ ID NO: 704898 - DNA, 33 bp, Homo sapien
agaaagtgttaactgctaagactggagaggtaa

SEQ ID NO: 704899 - DNA, 33 bp, Homo sapien
aatattgatgctgtgccagattactattttgaa

SEQ ID NO: 704900 - DNA, 33 bp, Homo sapien
aatattgatgctgtgctagattactattttgaa

SEQ ID NO: 704901 - DNA, 33 bp, Homo sapien
ttattcacagtaactacaaggcatgtggcatga

SEQ ID NO: 704902 - DNA, 33 bp, Homo sapien
ttattcacagtaactataaggcatgtggcatga

SEQ ID NO: 704903 - DNA, 33 bp, Homo sapien
tcatattttttaaatgacagaatgagcagataa

SEQ ID NO: 704904 - DNA, 33 bp, Homo sapien
tcatattttttaaatggcagaatgagcagataa

SEQ ID NO: 704905 - DNA, 33 bp, Homo sapien
aaaagtttgataaagaatagagaatttggcttt

SEQ ID NO: 704906 - DNA, 33 bp, Homo sapien
aaaagtttgataaagagtagagaatttggcttt

SEQ ID NO: 704907 - DNA, 33 bp, Homo sapien
ctgtgtgttccatacaagacagttaaaaaaaaa

SEQ ID NO: 704908 - DNA, 33 bp, Homo sapien
ctgtgtgttccatacaggacagttaaaaaaaaa

SEQ ID NO: 704909 - DNA, 33 bp, Homo sapien
aactttgcttagggaaatagggagtgagaaata

SEQ ID NO: 704910 - DNA, 33 bp, Homo sapien
aactttgcttagggaagtagggagtgagaaata

SEQ ID NO: 704911 - DNA, 33 bp, Homo sapien
aaagactatagtttcactcatttctcctgagca

SEQ ID NO: 704912 - DNA, 33 bp, Homo sapien
aaagactatagtttcattcatttctcctgagca

SEQ ID NO: 704913 - DNA, 33 bp, Homo sapien
acttgctcagtagacaaccccaatatttaacaa

SEQ ID NO: 704914 - DNA, 33 bp, Homo sapien
acttgctcagtagacatccccaatatttaacaa

SEQ ID NO: 704915 - DNA, 33 bp, Homo sapien
atactaggatcccaagactgaattaatattctt

SEQ ID NO: 704916 - DNA, 33 bp, Homo sapien
atactaggatcccaaggctgaattaatattctt

SEQ ID NO: 704917 - DNA, 33 bp, Homo sapien
tttagaattaccgacaatgggtagcaccatcct

SEQ ID NO: 704918 - DNA, 33 bp, Homo sapien
tttagaattaccgacagtgggtagcaccatcct

SEQ ID NO: 704919 - DNA, 33 bp, Homo sapien
gacctagaagacattcaaagatttctaaaatat

SEQ ID NO: 704920 - DNA, 33 bp, Homo sapien
gacctagaagacattcgaagatttctaaaatat

SEQ ID NO: 704921 - DNA, 33 bp, Homo sapien
aactggttcagagtaagtaacttatatttcacc

SEQ ID NO: 704922 - DNA, 33 bp, Homo sapien
aactggttcagagtaattaacttatatttcacc

SEQ ID NO: 704923 - DNA, 33 bp, Homo sapien
ggaaatgttttatatcacgggagaatggtttaa

SEQ ID NO: 704924 - DNA, 33 bp, Homo sapien
ggaaatgttttatatcgcgggagaatggtttaa

SEQ ID NO: 704925 - DNA, 33 bp, Homo sapien
caggacagaaccactcactccgtgcaaaggggg

SEQ ID NO: 704926 - DNA, 33 bp, Homo sapien
caggacagaaccactctctccgtgcaaaggggg

SEQ ID NO: 704927 - DNA, 33 bp, Homo sapien
tttagactgaagtttaccttctcaatcatcctg

SEQ ID NO: 704928 - DNA, 33 bp, Homo sapien
tttagactgaagtttatcttctcaatcatcctg

SEQ ID NO: 704929 - DNA, 33 bp, Homo sapien
atgacaaaatcctacacctgaccctttttgcac

SEQ ID NO: 704930 - DNA, 33 bp, Homo sapien
atgacaaaatcctacatctgaccctttttgcac

SEQ ID NO: 704931 - DNA, 33 bp, Homo sapien
attgtgatagaagtaaagtcaccaaagaatgca

SEQ ID NO: 704932 - DNA, 33 bp, Homo sapien
attgtgatagaagtaaggtcaccaaagaatgca

SEQ ID NO: 704933 - DNA, 33 bp, Homo sapien
cccttttaaagtcctgaataaacacctgctggt

SEQ ID NO: 704934 - DNA, 33 bp, Homo sapien
cccttttaaagtcctggataaacacctgctggt

SEQ ID NO: 704935 - DNA, 33 bp, Homo sapien
aaatatctagggaactaaatgaaactaataagt

SEQ ID NO: 704936 - DNA, 33 bp, Homo sapien
aaatatctagggaacttaatgaaactaataagt

SEQ ID NO: 704937 - DNA, 33 bp, Homo sapien
aatgaccaattaagataaaaaaatgagacagct

SEQ ID NO: 704938 - DNA, 33 bp, Homo sapien
aatgaccaattaagatcaaaaaatgagacagct

SEQ ID NO: 704939 - DNA, 33 bp, Homo sapien
taatcatatgaatcgacgtggacccattcttct

SEQ ID NO: 704940 - DNA, 33 bp, Homo sapien
taatcatatgaatcgatgtggacccattcttct

SEQ ID NO: 704941 - DNA, 33 bp, Homo sapien
taggacatactggcctgaattcatagagcttaa

SEQ ID NO: 704942 - DNA, 33 bp, Homo sapien
taggacatactggccttaattcatagagcttaa

SEQ ID NO: 704943 - DNA, 33 bp, Homo sapien
atgactcacttaggagcattaatgatcacatcc

SEQ ID NO: 704944 - DNA, 33 bp, Homo sapien
atgactcacttaggagtattaatgatcacatcc

SEQ ID NO: 704945 - DNA, 33 bp, Homo sapien
catggaatgttagaacaccctgcattacatgga

SEQ ID NO: 704946 - DNA, 33 bp, Homo sapien
catggaatgttagaacgccctgcattacatgga

SEQ ID NO: 704947 - DNA, 33 bp, Homo sapien
atttggttgcctagtacgtatcagtgaaaaaag

SEQ ID NO: 704948 - DNA, 33 bp, Homo sapien
atttggttgcctagtatgtatcagtgaaaaaag

SEQ ID NO: 704949 - DNA, 33 bp, Homo sapien
ttctggctgaattgcactccattatgcatatgt

SEQ ID NO: 704950 - DNA, 33 bp, Homo sapien
ttctggctgaattgcagtccattatgcatatgt

SEQ ID NO: 704951 - DNA, 33 bp, Homo sapien
agaagttagaataggacgttcgatgggtccagg

SEQ ID NO: 704952 - DNA, 33 bp, Homo sapien
agaagttagaataggatgttcgatgggtccagg

SEQ ID NO: 704953 - DNA, 33 bp, Homo sapien
tcatataaacaagctaaccaaatataagaagcc

SEQ ID NO: 704954 - DNA, 33 bp, Homo sapien
tcatataaacaagctagccaaatataagaagcc

SEQ ID NO: 704955 - DNA, 33 bp, Homo sapien
cttttctttgggcaccacaagaagctccttgtt

SEQ ID NO: 704956 - DNA, 33 bp, Homo sapien
cttttctttgggcaccgcaagaagctccttgtt

SEQ ID NO: 704957 - DNA, 33 bp, Homo sapien
gggtggataaacataccactacatccacataat

SEQ ID NO: 704958 - DNA, 33 bp, Homo sapien
gggtggataaacatactactacatccacataat

SEQ ID NO: 704959 - DNA, 33 bp, Homo sapien
tttctgcccttatcccaatgtgacattagctat

SEQ ID NO: 704960 - DNA, 33 bp, Homo sapien
tttctgcccttatcccgatgtgacattagctat

SEQ ID NO: 704961 - DNA, 33 bp, Homo sapien
ttcgaaatacatactgaacacgcatatccaagt

SEQ ID NO: 704962 - DNA, 33 bp, Homo sapien
ttcgaaatacatactggacacgcatatccaagt

SEQ ID NO: 704963 - DNA, 33 bp, Homo sapien
ttgctcctctttacataataactcagaaagtga

SEQ ID NO: 704964 - DNA, 33 bp, Homo sapien
ttgctcctctttacatgataactcagaaagtga

SEQ ID NO: 704965 - DNA, 33 bp, Homo sapien
ggattttagtcaacaaagtttctcagcactgtg

SEQ ID NO: 704966 - DNA, 33 bp, Homo sapien
ggattttagtcaacaaggtttctcagcactgtg

SEQ ID NO: 704967 - DNA, 33 bp, Homo sapien
tgcactaacctaatgacatttgattgaccaaag

SEQ ID NO: 704968 - DNA, 33 bp, Homo sapien
tgcactaacctaatgatatttgattgaccaaag

SEQ ID NO: 704969 - DNA, 33 bp, Homo sapien
gagaatcttagattgcaaataatttctggaaag

SEQ ID NO: 704970 - DNA, 33 bp, Homo sapien
gagaatcttagattgccaataatttctggaaag

SEQ ID NO: 704971 - DNA, 33 bp, Homo sapien
gaaaaagagagaaaaacggaattgcagcaaatt

SEQ ID NO: 704972 - DNA, 33 bp, Homo sapien
gaaaaagagagaaaaatggaattgcagcaaatt

SEQ ID NO: 704973 - DNA, 33 bp, Homo sapien
tgaaattggtcaagctaactaggctgagattat

SEQ ID NO: 704974 - DNA, 33 bp, Homo sapien
tgaaattggtcaagctgactaggctgagattat

SEQ ID NO: 704975 - DNA, 33 bp, Homo sapien
tgctgctgattccacacagcttgtgccatgctt

SEQ ID NO: 704976 - DNA, 33 bp, Homo sapien
tgctgctgattccacatagcttgtgccatgctt

SEQ ID NO: 704977 - DNA, 33 bp, Homo sapien
ttgccactaaaaacacacagaaccagtgatatg

SEQ ID NO: 704978 - DNA, 33 bp, Homo sapien
ttgccactaaaaacacgcagaaccagtgatatg

SEQ ID NO: 704979 - DNA, 33 bp, Homo sapien
ttctctgcacagggaaaggtggccgtctaaact

SEQ ID NO: 704980 - DNA, 33 bp, Homo sapien
ttctctgcacagggaagggtggccgtctaaact

SEQ ID NO: 704981 - DNA, 33 bp, Homo sapien
gattcctcttttcctcaagaattcttattcact

SEQ ID NO: 704982 - DNA, 33 bp, Homo sapien
gattcctcttttcctcgagaattcttattcact

SEQ ID NO: 704983 - DNA, 33 bp, Homo sapien
agttaagttctggagacggattaagaaattgga

SEQ ID NO: 704984 - DNA, 33 bp, Homo sapien
agttaagttctggagatggattaagaaattgga

SEQ ID NO: 704985 - DNA, 33 bp, Homo sapien
cagcttgttcttcaaacataggcttaaaagaaa

SEQ ID NO: 704986 - DNA, 33 bp, Homo sapien
cagcttgttcttcaaatataggcttaaaagaaa

SEQ ID NO: 704987 - DNA, 33 bp, Homo sapien
actccactcaagtagcactgtctttattctact

SEQ ID NO: 704988 - DNA, 33 bp, Homo sapien
actccactcaagtagctctgtctttattctact

SEQ ID NO: 704989 - DNA, 33 bp, Homo sapien
ctgtgcttggtgaaaaaagacaatacaataaat

SEQ ID NO: 704990 - DNA, 33 bp, Homo sapien
ctgtgcttggtgaaaacagacaatacaataaat

SEQ ID NO: 704991 - DNA, 33 bp, Homo sapien
atttatttggtccaagacttaagattactattt

SEQ ID NO: 704992 - DNA, 33 bp, Homo sapien
atttatttggtccaagtcttaagattactattt

SEQ ID NO: 704993 - DNA, 33 bp, Homo sapien
ggtttcagaaattatcagagtagtacaatgtat

SEQ ID NO: 704994 - DNA, 33 bp, Homo sapien
ggtttcagaaattatccgagtagtacaatgtat

SEQ ID NO: 704995 - DNA, 33 bp, Homo sapien
tggataagaaattatcaaagtgaatatccttat

SEQ ID NO: 704996 - DNA, 33 bp, Homo sapien
tggataagaaattatcgaagtgaatatccttat

SEQ ID NO: 704997 - DNA, 33 bp, Homo sapien
agttttaattgacaaacgcttttcattcatagt

SEQ ID NO: 704998 - DNA, 33 bp, Homo sapien
agttttaattgacaaatgcttttcattcatagt

SEQ ID NO: 704999 - DNA, 33 bp, Homo sapien
acagcatgattgtaaaacctcttgcttttccta

SEQ ID NO: 705000 - DNA, 33 bp, Homo sapien
acagcatgattgtaaagcctcttgcttttccta

SEQ ID NO: 705001 - DNA, 33 bp, Homo sapien
ttgatcttgactagcaagggtaagaatatggga

SEQ ID NO: 705002 - DNA, 33 bp, Homo sapien
ttgatcttgactagcaggggtaagaatatggga

SEQ ID NO: 705003 - DNA, 33 bp, Homo sapien
gaggcttatcctgtgcggagtcctgagtggtat

SEQ ID NO: 705004 - DNA, 33 bp, Homo sapien
gaggcttatcctgtgctgagtcctgagtggtat

SEQ ID NO: 705005 - DNA, 33 bp, Homo sapien
tttcagataacttgaaataatacagaaacatgc

SEQ ID NO: 705006 - DNA, 33 bp, Homo sapien
tttcagataacttgaagtaatacagaaacatgc

SEQ ID NO: 705007 - DNA, 33 bp, Homo sapien
tgccaaacaaacttccgctcgcctgtcttctcc

SEQ ID NO: 705008 - DNA, 33 bp, Homo sapien
tgccaaacaaacttcctctcgcctgtcttctcc

SEQ ID NO: 705009 - DNA, 33 bp, Homo sapien
tctaattgtttcttctaaaggtagggtttgaac

SEQ ID NO: 705010 - DNA, 33 bp, Homo sapien
tctaattgtttcttcttaaggtagggtttgaac

SEQ ID NO: 705011 - DNA, 33 bp, Homo sapien
gctctattcattcctgcaggcttgacaaaggtt

SEQ ID NO: 705012 - DNA, 33 bp, Homo sapien
gctctattcattcctgtaggcttgacaaaggtt

SEQ ID NO: 705013 - DNA, 33 bp, Homo sapien
cccctccaaagcgtaccatgagatttttaagaa

SEQ ID NO: 705014 - DNA, 33 bp, Homo sapien
cccctccaaagcgtactatgagatttttaagaa

SEQ ID NO: 705015 - DNA, 33 bp, Homo sapien
atgcagagaaatggtgcattcaaggaaaaggga

SEQ ID NO: 705016 - DNA, 33 bp, Homo sapien
atgcagagaaatggtgtattcaaggaaaaggga

SEQ ID NO: 705017 - DNA, 33 bp, Homo sapien
aggttttcatagtttccaccattacgcattaca

SEQ ID NO: 705018 - DNA, 33 bp, Homo sapien
aggttttcatagtttctaccattacgcattaca

SEQ ID NO: 705019 - DNA, 33 bp, Homo sapien
atgtgcgggaaacggacgaatcaaggatgtcat

SEQ ID NO: 705020 - DNA, 33 bp, Homo sapien
atgtgcgggaaacggaggaatcaaggatgtcat

SEQ ID NO: 705021 - DNA, 33 bp, Homo sapien
cagaggaatgatacgacctaacatacattttaa

SEQ ID NO: 705022 - DNA, 33 bp, Homo sapien
cagaggaatgatacgatctaacatacattttaa

SEQ ID NO: 705023 - DNA, 33 bp, Homo sapien
cttactccgtaaaaagccaacattctttacagt

SEQ ID NO: 705024 - DNA, 33 bp, Homo sapien
cttactccgtaaaaagtcaacattctttacagt

SEQ ID NO: 705025 - DNA, 33 bp, Homo sapien
attacagtgtctattaacagggcaggctggatg

SEQ ID NO: 705026 - DNA, 33 bp, Homo sapien
attacagtgtctattatcagggcaggctggatg

SEQ ID NO: 705027 - DNA, 33 bp, Homo sapien
aatattgctcttagaacgtgtcatcagaataaa

SEQ ID NO: 705028 - DNA, 33 bp, Homo sapien
aatattgctcttagaatgtgtcatcagaataaa

SEQ ID NO: 705029 - DNA, 33 bp, Homo sapien
catctcaagtccaaaccatttatttatatagtg

SEQ ID NO: 705030 - DNA, 33 bp, Homo sapien
catctcaagtccaaacgatttatttatatagtg

SEQ ID NO: 705031 - DNA, 33 bp, Homo sapien
ttgcattgtgaccaatcaattaggctcaagatg

SEQ ID NO: 705032 - DNA, 33 bp, Homo sapien
ttgcattgtgaccaatgaattaggctcaagatg

SEQ ID NO: 705033 - DNA, 33 bp, Homo sapien
ttaacaaacatctctcaaaaccaacatattttt

SEQ ID NO: 705034 - DNA, 33 bp, Homo sapien
ttaacaaacatctctcgaaaccaacatattttt

SEQ ID NO: 705035 - DNA, 33 bp, Homo sapien
cttgccaggaccatgacggggagggagtagagg

SEQ ID NO: 705036 - DNA, 33 bp, Homo sapien
cttgccaggaccatgatggggagggagtagagg

SEQ ID NO: 705037 - DNA, 33 bp, Homo sapien
acttgtattccaagtaagcacatcttataaaca

SEQ ID NO: 705038 - DNA, 33 bp, Homo sapien
acttgtattccaagtaggcacatcttataaaca

SEQ ID NO: 705039 - DNA, 33 bp, Homo sapien
tccctttaacactagacataagtgaactattaa

SEQ ID NO: 705040 - DNA, 33 bp, Homo sapien
tccctttaacactagagataagtgaactattaa

SEQ ID NO: 705041 - DNA, 33 bp, Homo sapien
acttgctgactataccaagagaagtagactgga

SEQ ID NO: 705042 - DNA, 33 bp, Homo sapien
acttgctgactataccgagagaagtagactgga

SEQ ID NO: 705043 - DNA, 33 bp, Homo sapien
tggatttagggccaacacagcaattcagtatga

SEQ ID NO: 705044 - DNA, 33 bp, Homo sapien
tggatttagggccaacccagcaattcagtatga

SEQ ID NO: 705045 - DNA, 33 bp, Homo sapien
tttgatcttatttgcaacagccttgattttttt

SEQ ID NO: 705046 - DNA, 33 bp, Homo sapien
tttgatcttatttgcatcagccttgattttttt

SEQ ID NO: 705047 - DNA, 33 bp, Homo sapien
taatgtcactctatcacagagcaagttttcatc

SEQ ID NO: 705048 - DNA, 33 bp, Homo sapien
taatgtcactctatcatagagcaagttttcatc

SEQ ID NO: 705049 - DNA, 33 bp, Homo sapien
gaccctagaggttagcaaaaatgtactttgaaa

SEQ ID NO: 705050 - DNA, 33 bp, Homo sapien
gaccctagaggttagcgaaaatgtactttgaaa

SEQ ID NO: 705051 - DNA, 33 bp, Homo sapien
agataccattttggccacaaacccagggccatt

SEQ ID NO: 705052 - DNA, 33 bp, Homo sapien
agataccattttggccgcaaacccagggccatt

SEQ ID NO: 705053 - DNA, 33 bp, Homo sapien
gccttctcccttgttcgcatttacattattctc

SEQ ID NO: 705054 - DNA, 33 bp, Homo sapien
gccttctcccttgttctcatttacattattctc

SEQ ID NO: 705055 - DNA, 33 bp, Homo sapien
gatttttagctaaaagactcgtgaaaaggccaa

SEQ ID NO: 705056 - DNA, 33 bp, Homo sapien
gatttttagctaaaaggctcgtgaaaaggccaa

SEQ ID NO: 705057 - DNA, 33 bp, Homo sapien
tctttaataaggaaaactgattcactgaaattc

SEQ ID NO: 705058 - DNA, 33 bp, Homo sapien
tctttaataaggaaaattgattcactgaaattc

SEQ ID NO: 705059 - DNA, 33 bp, Homo sapien
catatttacagaaataacttcagaactttattt

SEQ ID NO: 705060 - DNA, 33 bp, Homo sapien
catatttacagaaatatcttcagaactttattt

SEQ ID NO: 705061 - DNA, 33 bp, Homo sapien
actcagagttctgttaggtccaagcattatgat

SEQ ID NO: 705062 - DNA, 33 bp, Homo sapien
actcagagttctgttatgtccaagcattatgat

SEQ ID NO: 705063 - DNA, 33 bp, Homo sapien
ggccctttatctctgaagttgacctaccatcct

SEQ ID NO: 705064 - DNA, 33 bp, Homo sapien
ggccctttatctctgatgttgacctaccatcct

SEQ ID NO: 705065 - DNA, 33 bp, Homo sapien
accagaaagaacaaagacagcttttatttgaga

SEQ ID NO: 705066 - DNA, 33 bp, Homo sapien
accagaaagaacaaagtcagcttttatttgaga

SEQ ID NO: 705067 - DNA, 33 bp, Homo sapien
atcagaggaaatcagacaatagaaatgttgtag

SEQ ID NO: 705068 - DNA, 33 bp, Homo sapien
atcagaggaaatcagagaatagaaatgttgtag

SEQ ID NO: 705069 - DNA, 33 bp, Homo sapien
atgtggtattgagcccaagagtgcaaagaagtc

SEQ ID NO: 705070 - DNA, 33 bp, Homo sapien
atgtggtattgagcccgagagtgcaaagaagtc

SEQ ID NO: 705071 - DNA, 33 bp, Homo sapien
cctattgttcttaggcgacaaacctatacagca

SEQ ID NO: 705072 - DNA, 33 bp, Homo sapien
cctattgttcttaggctacaaacctatacagca

SEQ ID NO: 705073 - DNA, 33 bp, Homo sapien
aaccacctttcaaacaagcaaaaccatgttttc

SEQ ID NO: 705074 - DNA, 33 bp, Homo sapien
aaccacctttcaaacacgcaaaaccatgttttc

SEQ ID NO: 705075 - DNA, 33 bp, Homo sapien
cacattctgaggtacaaggtattagaactttaa

SEQ ID NO: 705076 - DNA, 33 bp, Homo sapien
cacattctgaggtacatggtattagaactttaa

SEQ ID NO: 705077 - DNA, 33 bp, Homo sapien
ataaacattaagtgcaatccaactcctgagtca

SEQ ID NO: 705078 - DNA, 33 bp, Homo sapien
ataaacattaagtgcagtccaactcctgagtca

SEQ ID NO: 705079 - DNA, 33 bp, Homo sapien
ttgagtatctgaggaaacacattcttagaaaca

SEQ ID NO: 705080 - DNA, 33 bp, Homo sapien
ttgagtatctgaggaatcacattcttagaaaca

SEQ ID NO: 705081 - DNA, 33 bp, Homo sapien
caaaaacaaatacaacagtgtgaaatattttct

SEQ ID NO: 705082 - DNA, 33 bp, Homo sapien
caaaaacaaatacaaccgtgtgaaatattttct

SEQ ID NO: 705083 - DNA, 33 bp, Homo sapien
taaacttcacattgtacattgaattatgagagt

SEQ ID NO: 705084 - DNA, 33 bp, Homo sapien
taaacttcacattgtatattgaattatgagagt

SEQ ID NO: 705085 - DNA, 33 bp, Homo sapien
ccctaaacatttctataaacacaaatcacataa

SEQ ID NO: 705086 - DNA, 33 bp, Homo sapien
ccctaaacatttctattaacacaaatcacataa

SEQ ID NO: 705087 - DNA, 33 bp, Homo sapien
aaatcgtcatggatataaaattgaattgcatta

SEQ ID NO: 705088 - DNA, 33 bp, Homo sapien
aaatcgtcatggatatgaaattgaattgcatta

SEQ ID NO: 705089 - DNA, 33 bp, Homo sapien
acatttactagctatacggctttggataagtca

SEQ ID NO: 705090 - DNA, 33 bp, Homo sapien
acatttactagctatagggctttggataagtca

SEQ ID NO: 705091 - DNA, 33 bp, Homo sapien
ttagactgcacatgcaaatttgtcaatgaaggt

SEQ ID NO: 705092 - DNA, 33 bp, Homo sapien
ttagactgcacatgcacatttgtcaatgaaggt

SEQ ID NO: 705093 - DNA, 33 bp, Homo sapien
tgttgaagtacttatcactatttggtcaagttc

SEQ ID NO: 705094 - DNA, 33 bp, Homo sapien
tgttgaagtacttatcgctatttggtcaagttc

SEQ ID NO: 705095 - DNA, 33 bp, Homo sapien
gtcataaaatggcttacgcattcatggaatatt

SEQ ID NO: 705096 - DNA, 33 bp, Homo sapien
gtcataaaatggcttaggcattcatggaatatt

SEQ ID NO: 705097 - DNA, 33 bp, Homo sapien
tatagaaatgtcacaccatagaagacagttcaa

SEQ ID NO: 705098 - DNA, 33 bp, Homo sapien
tatagaaatgtcacactatagaagacagttcaa

SEQ ID NO: 705099 - DNA, 33 bp, Homo sapien
tattataccagctctgaattaaggtctcagtgg

SEQ ID NO: 705100 - DNA, 33 bp, Homo sapien
tattataccagctctggattaaggtctcagtgg

SEQ ID NO: 705101 - DNA, 33 bp, Homo sapien
atagaaatatgatgaccgaagaaaatgtggaga

SEQ ID NO: 705102 - DNA, 33 bp, Homo sapien
atagaaatatgatgactgaagaaaatgtggaga

SEQ ID NO: 705103 - DNA, 33 bp, Homo sapien
ttagttttcttatcaccgggaacttgatgaccc

SEQ ID NO: 705104 - DNA, 33 bp, Homo sapien
ttagttttcttatcactgggaacttgatgaccc

SEQ ID NO: 705105 - DNA, 33 bp, Homo sapien
atgacccagatctgacaactacttggatttcta

SEQ ID NO: 705106 - DNA, 33 bp, Homo sapien
atgacccagatctgaccactacttggatttcta

SEQ ID NO: 705107 - DNA, 33 bp, Homo sapien
acacaagatgatttagcaacatgatttaggtaa

SEQ ID NO: 705108 - DNA, 33 bp, Homo sapien
acacaagatgatttagtaacatgatttaggtaa

SEQ ID NO: 705109 - DNA, 33 bp, Homo sapien
atctacatggttataaatgatctgctcctactt

SEQ ID NO: 705110 - DNA, 33 bp, Homo sapien
atctacatggttataactgatctgctcctactt

SEQ ID NO: 705111 - DNA, 33 bp, Homo sapien
tcataatatattcaaccctctatccagattaac

SEQ ID NO: 705112 - DNA, 33 bp, Homo sapien
tcataatatattcaacgctctatccagattaac

SEQ ID NO: 705113 - DNA, 33 bp, Homo sapien
gagaaaaagctggacacagtgttttttggaatg

SEQ ID NO: 705114 - DNA, 33 bp, Homo sapien
gagaaaaagctggacatagtgttttttggaatg

SEQ ID NO: 705115 - DNA, 33 bp, Homo sapien
atggattaacataaaacctgacactgaaggcct

SEQ ID NO: 705116 - DNA, 33 bp, Homo sapien
atggattaacataaaagctgacactgaaggcct

SEQ ID NO: 705117 - DNA, 33 bp, Homo sapien
ttgcacttctgttttaagtatggttgtatattt

SEQ ID NO: 705118 - DNA, 33 bp, Homo sapien
ttgcacttctgttttaggtatggttgtatattt

SEQ ID NO: 705119 - DNA, 33 bp, Homo sapien
cagctcagaggagagtaaatgacaaagtatttt

SEQ ID NO: 705120 - DNA, 33 bp, Homo sapien
cagctcagaggagagttaatgacaaagtatttt

SEQ ID NO: 705121 - DNA, 33 bp, Homo sapien
aagatatggcagacaaagagttggtagatattc

SEQ ID NO: 705122 - DNA, 33 bp, Homo sapien
aagatatggcagacaacgagttggtagatattc

SEQ ID NO: 705123 - DNA, 33 bp, Homo sapien
cttatttatggacatgacatatcgttccattta

SEQ ID NO: 705124 - DNA, 33 bp, Homo sapien
cttatttatggacatggcatatcgttccattta

SEQ ID NO: 705125 - DNA, 33 bp, Homo sapien
ggaaggactgcttcgactagtgattttttcata

SEQ ID NO: 705126 - DNA, 33 bp, Homo sapien
ggaaggactgcttcgattagtgattttttcata

SEQ ID NO: 705127 - DNA, 33 bp, Homo sapien
tgaaagagttgtgaatcatgcaattgactttca

SEQ ID NO: 705128 - DNA, 33 bp, Homo sapien
tgaaagagttgtgaattatgcaattgactttca

SEQ ID NO: 705129 - DNA, 33 bp, Homo sapien
attttgcatatttgacagccttatgatgcagtc

SEQ ID NO: 705130 - DNA, 33 bp, Homo sapien
attttgcatatttgacggccttatgatgcagtc

SEQ ID NO: 705131 - DNA, 33 bp, Homo sapien
ggatatgaaagaagagcatttgcattttactta

SEQ ID NO: 705132 - DNA, 33 bp, Homo sapien
ggatatgaaagaagagtatttgcattttactta

SEQ ID NO: 705133 - DNA, 33 bp, Homo sapien
cacacaatggcaagaaagagaagtgcagagtga

SEQ ID NO: 705134 - DNA, 33 bp, Homo sapien
cacacaatggcaagaaggagaagtgcagagtga

SEQ ID NO: 705135 - DNA, 33 bp, Homo sapien
tatttgtatgtttgaaaatttttagtttgaagt

SEQ ID NO: 705136 - DNA, 33 bp, Homo sapien
tatttgtatgtttgaacatttttagtttgaagt

SEQ ID NO: 705137 - DNA, 33 bp, Homo sapien
aatatgtgctaatgtaagaaagcttttggaaag

SEQ ID NO: 705138 - DNA, 33 bp, Homo sapien
aatatgtgctaatgtaggaaagcttttggaaag

SEQ ID NO: 705139 - DNA, 33 bp, Homo sapien
agagtaaaatgtaatcccagtttagaggtatta

SEQ ID NO: 705140 - DNA, 33 bp, Homo sapien
agagtaaaatgtaatctcagtttagaggtatta

SEQ ID NO: 705141 - DNA, 33 bp, Homo sapien
tcccaattttctcactaaactttcaaatacagc

SEQ ID NO: 705142 - DNA, 33 bp, Homo sapien
tcccaattttctcacttaactttcaaatacagc

SEQ ID NO: 705143 - DNA, 33 bp, Homo sapien
tttccttgcctttcataactgaattgcatgggt

SEQ ID NO: 705144 - DNA, 33 bp, Homo sapien
tttccttgcctttcatgactgaattgcatgggt

SEQ ID NO: 705145 - DNA, 33 bp, Homo sapien
agattctaaggatgacaaaggaaagatgtgcac

SEQ ID NO: 705146 - DNA, 33 bp, Homo sapien
agattctaaggatgacgaaggaaagatgtgcac

SEQ ID NO: 705147 - DNA, 33 bp, Homo sapien
ttcagataatcatgtacgtcaaaataacatgat

SEQ ID NO: 705148 - DNA, 33 bp, Homo sapien
ttcagataatcatgtatgtcaaaataacatgat

SEQ ID NO: 705149 - DNA, 33 bp, Homo sapien
gcttggctaaagtagacagaaggcggtgccagt

SEQ ID NO: 705150 - DNA, 33 bp, Homo sapien
gcttggctaaagtagatagaaggcggtgccagt

SEQ ID NO: 705151 - DNA, 33 bp, Homo sapien
ttattcccctgaagcccaattttattgattatt

SEQ ID NO: 705152 - DNA, 33 bp, Homo sapien
ttattcccctgaagcctaattttattgattatt

SEQ ID NO: 705153 - DNA, 33 bp, Homo sapien
gaggaaggataaagaagaaaattactgggaact

SEQ ID NO: 705154 - DNA, 33 bp, Homo sapien
gaggaaggataaagaataaaattactgggaact

SEQ ID NO: 705155 - DNA, 33 bp, Homo sapien
acaagaagcaaatacaaactaaaacctctgtcc

SEQ ID NO: 705156 - DNA, 33 bp, Homo sapien
acaagaagcaaatacagactaaaacctctgtcc

SEQ ID NO: 705157 - DNA, 33 bp, Homo sapien
tgtttaccattgcaagactggaaaatcagttgt

SEQ ID NO: 705158 - DNA, 33 bp, Homo sapien
tgtttaccattgcaagcctggaaaatcagttgt

SEQ ID NO: 705159 - DNA, 33 bp, Homo sapien
tgtttccaggtttgcagactactccacatttac

SEQ ID NO: 705160 - DNA, 33 bp, Homo sapien
tgtttccaggtttgcatactactccacatttac

SEQ ID NO: 705161 - DNA, 33 bp, Homo sapien
accatgtcatcgaaaagtttatttttttgcatg

SEQ ID NO: 705162 - DNA, 33 bp, Homo sapien
accatgtcatcgaaaattttatttttttgcatg

SEQ ID NO: 705163 - DNA, 33 bp, Homo sapien
ttccttcttattctgacaaccattttgaataca

SEQ ID NO: 705164 - DNA, 33 bp, Homo sapien
ttccttcttattctgataaccattttgaataca

SEQ ID NO: 705165 - DNA, 33 bp, Homo sapien
gatacaataagactgacagctagcttcacaaga

SEQ ID NO: 705166 - DNA, 33 bp, Homo sapien
gatacaataagactgatagctagcttcacaaga

SEQ ID NO: 705167 - DNA, 33 bp, Homo sapien
agatgtagctgcaagaatatttccagataagaa

SEQ ID NO: 705168 - DNA, 33 bp, Homo sapien
agatgtagctgcaagattatttccagataagaa

SEQ ID NO: 705169 - DNA, 33 bp, Homo sapien
tacatctatgaagtaacggagcttaaatatgaa

SEQ ID NO: 705170 - DNA, 33 bp, Homo sapien
tacatctatgaagtaatggagcttaaatatgaa

SEQ ID NO: 705171 - DNA, 33 bp, Homo sapien
agccaatatttgtccacgtatttggtactataa

SEQ ID NO: 705172 - DNA, 33 bp, Homo sapien
agccaatatttgtccaggtatttggtactataa

SEQ ID NO: 705173 - DNA, 33 bp, Homo sapien
ctcccatagcactgtaagctggtcaatactatg

SEQ ID NO: 705174 - DNA, 33 bp, Homo sapien
ctcccatagcactgtatgctggtcaatactatg

SEQ ID NO: 705175 - DNA, 33 bp, Homo sapien
aacacaactaggaaaaaaatggctgcacacata

SEQ ID NO: 705176 - DNA, 33 bp, Homo sapien
aacacaactaggaaaagaatggctgcacacata

SEQ ID NO: 705177 - DNA, 33 bp, Homo sapien
aggactctatactaaaacagacttgcaaaagag

SEQ ID NO: 705178 - DNA, 33 bp, Homo sapien
aggactctatactaaaccagacttgcaaaagag

SEQ ID NO: 705179 - DNA, 33 bp, Homo sapien
atgtgagaaaaggctcaataaaatgtgtgggct

SEQ ID NO: 705180 - DNA, 33 bp, Homo sapien
atgtgagaaaaggctccataaaatgtgtgggct

SEQ ID NO: 705181 - DNA, 33 bp, Homo sapien
agcaggaagtttattcaaagtgataactataga

SEQ ID NO: 705182 - DNA, 33 bp, Homo sapien
agcaggaagtttattcgaagtgataactataga

SEQ ID NO: 705183 - DNA, 33 bp, Homo sapien
ggctaatcctccctcaaataaaatggaatttct

SEQ ID NO: 705184 - DNA, 33 bp, Homo sapien
ggctaatcctccctcacataaaatggaatttct

SEQ ID NO: 705185 - DNA, 33 bp, Homo sapien
gtttttgattttgtaacgattgtgtgtaacaat

SEQ ID NO: 705186 - DNA, 33 bp, Homo sapien
gtttttgattttgtaatgattgtgtgtaacaat

SEQ ID NO: 705187 - DNA, 33 bp, Homo sapien
tatatgacctaggagacataacctaatctgtct

SEQ ID NO: 705188 - DNA, 33 bp, Homo sapien
tatatgacctaggagatataacctaatctgtct

SEQ ID NO: 705189 - DNA, 33 bp, Homo sapien
atatctggacaagagaagccaggcagatggaac

SEQ ID NO: 705190 - DNA, 33 bp, Homo sapien
atatctggacaagagaggccaggcagatggaac

SEQ ID NO: 705191 - DNA, 33 bp, Homo sapien
tgtagggttcattttagcataaccttgcatatt

SEQ ID NO: 705192 - DNA, 33 bp, Homo sapien
tgtagggttcattttatcataaccttgcatatt

SEQ ID NO: 705193 - DNA, 33 bp, Homo sapien
gttgtttcctaaataagtaatgttgagaaagtc

SEQ ID NO: 705194 - DNA, 33 bp, Homo sapien
gttgtttcctaaataattaatgttgagaaagtc

SEQ ID NO: 705195 - DNA, 33 bp, Homo sapien
tcaaatgagcctgttcaagatttagcaacctct

SEQ ID NO: 705196 - DNA, 33 bp, Homo sapien
tcaaatgagcctgttccagatttagcaacctct

SEQ ID NO: 705197 - DNA, 33 bp, Homo sapien
ttgccaagttccattaaaactactttacaaata

SEQ ID NO: 705198 - DNA, 33 bp, Homo sapien
ttgccaagttccattataactactttacaaata

SEQ ID NO: 705199 - DNA, 33 bp, Homo sapien
attaatttctttcttaacaaaggctctgctatt

SEQ ID NO: 705200 - DNA, 33 bp, Homo sapien
attaatttctttcttaccaaaggctctgctatt

SEQ ID NO: 705201 - DNA, 33 bp, Homo sapien
atgaatcagaattatgcataggtttctcctcct

SEQ ID NO: 705202 - DNA, 33 bp, Homo sapien
atgaatcagaattatgtataggtttctcctcct

SEQ ID NO: 705203 - DNA, 33 bp, Homo sapien
agctggccttttgcagcattatgcttttttctg

SEQ ID NO: 705204 - DNA, 33 bp, Homo sapien
agctggccttttgcagtattatgcttttttctg

SEQ ID NO: 705205 - DNA, 33 bp, Homo sapien
acataaaagggccaaaaatgtaattcttccatg

SEQ ID NO: 705206 - DNA, 33 bp, Homo sapien
acataaaagggccaaagatgtaattcttccatg

SEQ ID NO: 705207 - DNA, 33 bp, Homo sapien
aagacaacaaacagaaaagtagtgaacattact

SEQ ID NO: 705208 - DNA, 33 bp, Homo sapien
aagacaacaaacagaagagtagtgaacattact

SEQ ID NO: 705209 - DNA, 33 bp, Homo sapien
gacagaaaatcacttacattgtatcttgtccta

SEQ ID NO: 705210 - DNA, 33 bp, Homo sapien
gacagaaaatcacttatattgtatcttgtccta

SEQ ID NO: 705211 - DNA, 33 bp, Homo sapien
attgtcctttcatggaagcatcactatttatca

SEQ ID NO: 705212 - DNA, 33 bp, Homo sapien
attgtcctttcatggacgcatcactatttatca

SEQ ID NO: 705213 - DNA, 33 bp, Homo sapien
aatacaacagataataccataggctaggaagtc

SEQ ID NO: 705214 - DNA, 33 bp, Homo sapien
aatacaacagataatagcataggctaggaagtc

SEQ ID NO: 705215 - DNA, 33 bp, Homo sapien
tttctgaaagatcatcaagtatctccctgatca

SEQ ID NO: 705216 - DNA, 33 bp, Homo sapien
tttctgaaagatcatcgagtatctccctgatca

SEQ ID NO: 705217 - DNA, 33 bp, Homo sapien
cttcttaacttttgccccaaatcagatttcttc

SEQ ID NO: 705218 - DNA, 33 bp, Homo sapien
cttcttaacttttgccgcaaatcagatttcttc

SEQ ID NO: 705219 - DNA, 33 bp, Homo sapien
ctccattgcttgcatccatttacttcttagctt

SEQ ID NO: 705220 - DNA, 33 bp, Homo sapien
ctccattgcttgcatctatttacttcttagctt

SEQ ID NO: 705221 - DNA, 33 bp, Homo sapien
acaattttagaagctaataaacactaataatat

SEQ ID NO: 705222 - DNA, 33 bp, Homo sapien
acaattttagaagctagtaaacactaataatat

SEQ ID NO: 705223 - DNA, 33 bp, Homo sapien
cccaagttcgtcatgccccgctaccaacaacaa

SEQ ID NO: 705224 - DNA, 33 bp, Homo sapien
cccaagttcgtcatgctccgctaccaacaacaa

SEQ ID NO: 705225 - DNA, 33 bp, Homo sapien
gtgttccctccagcaacgaatgtgagatcctgt

SEQ ID NO: 705226 - DNA, 33 bp, Homo sapien
gtgttccctccagcaatgaatgtgagatcctgt

SEQ ID NO: 705227 - DNA, 33 bp, Homo sapien
cagactacaagctacaccagggttctttggact

SEQ ID NO: 705228 - DNA, 33 bp, Homo sapien
cagactacaagctacatcagggttctttggact

SEQ ID NO: 705229 - DNA, 33 bp, Homo sapien
catccatgctgtgtccccttaaagaatatgctc

SEQ ID NO: 705230 - DNA, 33 bp, Homo sapien
catccatgctgtgtccgcttaaagaatatgctc

SEQ ID NO: 705231 - DNA, 33 bp, Homo sapien
tttagagagaagaagcacaaattccctccagct

SEQ ID NO: 705232 - DNA, 33 bp, Homo sapien
tttagagagaagaagcgcaaattccctccagct

SEQ ID NO: 705233 - DNA, 33 bp, Homo sapien
cttgcctgcagagtccactgtaaagaaacttac

SEQ ID NO: 705234 - DNA, 33 bp, Homo sapien
cttgcctgcagagtccgctgtaaagaaacttac

SEQ ID NO: 705235 - DNA, 33 bp, Homo sapien
acctgtgtgcttgtatcacagacctccttattt

SEQ ID NO: 705236 - DNA, 33 bp, Homo sapien
acctgtgtgcttgtattacagacctccttattt

SEQ ID NO: 705237 - DNA, 33 bp, Homo sapien
aattatttgaaatcccgggaacttgtattttat

SEQ ID NO: 705238 - DNA, 33 bp, Homo sapien
aattatttgaaatccctggaacttgtattttat

SEQ ID NO: 705239 - DNA, 33 bp, Homo sapien
ctggatttaaactcaaaccctctgactccagag

SEQ ID NO: 705240 - DNA, 33 bp, Homo sapien
ctggatttaaactcaagccctctgactccagag

SEQ ID NO: 705241 - DNA, 33 bp, Homo sapien
attcagcattaagtaccgacaaaggaacctgaa

SEQ ID NO: 705242 - DNA, 33 bp, Homo sapien
attcagcattaagtactgacaaaggaacctgaa

SEQ ID NO: 705243 - DNA, 33 bp, Homo sapien
cttgccaataaaatcccggaatcaataaatagg

SEQ ID NO: 705244 - DNA, 33 bp, Homo sapien
cttgccaataaaatcctggaatcaataaatagg

SEQ ID NO: 705245 - DNA, 33 bp, Homo sapien
gatattgtagcccttacaccaattatgaaatgt

SEQ ID NO: 705246 - DNA, 33 bp, Homo sapien
gatattgtagcccttagaccaattatgaaatgt

SEQ ID NO: 705247 - DNA, 33 bp, Homo sapien
ttacttagaatatgaactgacacaccatgagca

SEQ ID NO: 705248 - DNA, 33 bp, Homo sapien
ttacttagaatatgaagtgacacaccatgagca

SEQ ID NO: 705249 - DNA, 33 bp, Homo sapien
gggctataaactttccacttggcactgctttag

SEQ ID NO: 705250 - DNA, 33 bp, Homo sapien
gggctataaactttccgcttggcactgctttag

SEQ ID NO: 705251 - DNA, 33 bp, Homo sapien
tgtggctaacgtcttacctcctactgagagaaa

SEQ ID NO: 705252 - DNA, 33 bp, Homo sapien
tgtggctaacgtcttatctcctactgagagaaa

SEQ ID NO: 705253 - DNA, 33 bp, Homo sapien
cttcttgcctctgcaaatccctaataccaatta

SEQ ID NO: 705254 - DNA, 33 bp, Homo sapien
cttcttgcctctgcaattccctaataccaatta

SEQ ID NO: 705255 - DNA, 33 bp, Homo sapien
agccaagaattgggaacaaggtggcacaatgga

SEQ ID NO: 705256 - DNA, 33 bp, Homo sapien
agccaagaattgggaagaaggtggcacaatgga

SEQ ID NO: 705257 - DNA, 33 bp, Homo sapien
tgaaaacgagcacattaaaggcatataggaaat

SEQ ID NO: 705258 - DNA, 33 bp, Homo sapien
tgaaaacgagcacattgaaggcatataggaaat

SEQ ID NO: 705259 - DNA, 33 bp, Homo sapien
gagctgtatcagtggtaaaaggactcttccaat

SEQ ID NO: 705260 - DNA, 33 bp, Homo sapien
gagctgtatcagtggttaaaggactcttccaat

SEQ ID NO: 705261 - DNA, 33 bp, Homo sapien
tgtagagatctctaaaaccagttgtatagtaat

SEQ ID NO: 705262 - DNA, 33 bp, Homo sapien
tgtagagatctctaaacccagttgtatagtaat

SEQ ID NO: 705263 - DNA, 33 bp, Homo sapien
atcccatctctccagcaagctttgtttctgttc

SEQ ID NO: 705264 - DNA, 33 bp, Homo sapien
atcccatctctccagcgagctttgtttctgttc

SEQ ID NO: 705265 - DNA, 33 bp, Homo sapien
atggcaaaggcttttagaacaagatgcatataa

SEQ ID NO: 705266 - DNA, 33 bp, Homo sapien
atggcaaaggcttttataacaagatgcatataa

SEQ ID NO: 705267 - DNA, 33 bp, Homo sapien
agagcatgctcacaataacccattaagagaact

SEQ ID NO: 705268 - DNA, 33 bp, Homo sapien
agagcatgctcacaattacccattaagagaact

SEQ ID NO: 705269 - DNA, 33 bp, Homo sapien
taccaagatgcaagcacgggtggattccttaat

SEQ ID NO: 705270 - DNA, 33 bp, Homo sapien
taccaagatgcaagcatgggtggattccttaat

SEQ ID NO: 705271 - DNA, 33 bp, Homo sapien
atttacactgtttcacaatcctaaaaatatcac

SEQ ID NO: 705272 - DNA, 33 bp, Homo sapien
atttacactgtttcacgatcctaaaaatatcac

SEQ ID NO: 705273 - DNA, 33 bp, Homo sapien
gaggttcactgagtcacatggaatttacttcac

SEQ ID NO: 705274 - DNA, 33 bp, Homo sapien
gaggttcactgagtcatatggaatttacttcac

SEQ ID NO: 705275 - DNA, 33 bp, Homo sapien
tccttgtgcctgctccaatttaggggcaaagtg

SEQ ID NO: 705276 - DNA, 33 bp, Homo sapien
tccttgtgcctgctccgatttaggggcaaagtg

SEQ ID NO: 705277 - DNA, 33 bp, Homo sapien
tctccactgtagttaacatttttacccaattat

SEQ ID NO: 705278 - DNA, 33 bp, Homo sapien
tctccactgtagttaatatttttacccaattat

SEQ ID NO: 705279 - DNA, 33 bp, Homo sapien
ctaactcacttttctcactaatgtatcttccac

SEQ ID NO: 705280 - DNA, 33 bp, Homo sapien
ctaactcacttttctccctaatgtatcttccac

SEQ ID NO: 705281 - DNA, 33 bp, Homo sapien
ttacctggataatccactgatggggttggatgc

SEQ ID NO: 705282 - DNA, 33 bp, Homo sapien
ttacctggataatccattgatggggttggatgc

SEQ ID NO: 705283 - DNA, 33 bp, Homo sapien
aagcggaacatttcaacagcttcagatttaatg

SEQ ID NO: 705284 - DNA, 33 bp, Homo sapien
aagcggaacatttcaagagcttcagatttaatg

SEQ ID NO: 705285 - DNA, 33 bp, Homo sapien
tgataggtataacataaggtaaccagtgagcgc

SEQ ID NO: 705286 - DNA, 33 bp, Homo sapien
tgataggtataacatatggtaaccagtgagcgc

SEQ ID NO: 705287 - DNA, 33 bp, Homo sapien
gcaggagaaaagtggagaaatgtgcagggtgga

SEQ ID NO: 705288 - DNA, 33 bp, Homo sapien
gcaggagaaaagtggataaatgtgcagggtgga

SEQ ID NO: 705289 - DNA, 33 bp, Homo sapien
tgctaacactaggtgaatatcagggtttagaaa

SEQ ID NO: 705290 - DNA, 33 bp, Homo sapien
tgctaacactaggtgagtatcagggtttagaaa

SEQ ID NO: 705291 - DNA, 33 bp, Homo sapien
tggttttaatctggagaccttgataataaagca

SEQ ID NO: 705292 - DNA, 33 bp, Homo sapien
tggttttaatctggagcccttgataataaagca

SEQ ID NO: 705293 - DNA, 33 bp, Homo sapien
actgagagatgttttccactttaaaggaacaat

SEQ ID NO: 705294 - DNA, 33 bp, Homo sapien
actgagagatgttttctactttaaaggaacaat

SEQ ID NO: 705295 - DNA, 33 bp, Homo sapien
gtcaggggagacttccaacagggagatcaataa

SEQ ID NO: 705296 - DNA, 33 bp, Homo sapien
gtcaggggagacttccgacagggagatcaataa

SEQ ID NO: 705297 - DNA, 33 bp, Homo sapien
ggaggcatttcaggaacgataaggcagaaatat

SEQ ID NO: 705298 - DNA, 33 bp, Homo sapien
ggaggcatttcaggaatgataaggcagaaatat

SEQ ID NO: 705299 - DNA, 33 bp, Homo sapien
taagcaagagagaaacactagccatgtaaagaa

SEQ ID NO: 705300 - DNA, 33 bp, Homo sapien
taagcaagagagaaacgctagccatgtaaagaa

SEQ ID NO: 705301 - DNA, 33 bp, Homo sapien
tggaattctaataatccctggtatgctattgca

SEQ ID NO: 705302 - DNA, 33 bp, Homo sapien
tggaattctaataatctctggtatgctattgca

SEQ ID NO: 705303 - DNA, 33 bp, Homo sapien
aatatgaaaatcaaaacgcttgaggagtctaga

SEQ ID NO: 705304 - DNA, 33 bp, Homo sapien
aatatgaaaatcaaaaggcttgaggagtctaga

SEQ ID NO: 705305 - DNA, 33 bp, Homo sapien
aatcaaggaactgacaccattatatgtaggtgt

SEQ ID NO: 705306 - DNA, 33 bp, Homo sapien
aatcaaggaactgacagcattatatgtaggtgt

SEQ ID NO: 705307 - DNA, 33 bp, Homo sapien
cagcatgagcgacatacaggacgggtgatttct

SEQ ID NO: 705308 - DNA, 33 bp, Homo sapien
cagcatgagcgacatagaggacgggtgatttct

SEQ ID NO: 705309 - DNA, 33 bp, Homo sapien
acacctactagctagactaagcaagaaaagaag

SEQ ID NO: 705310 - DNA, 33 bp, Homo sapien
acacctactagctagattaagcaagaaaagaag

SEQ ID NO: 705311 - DNA, 33 bp, Homo sapien
tatgctccactgcagacactgccataccaaatc

SEQ ID NO: 705312 - DNA, 33 bp, Homo sapien
tatgctccactgcagatactgccataccaaatc

SEQ ID NO: 705313 - DNA, 33 bp, Homo sapien
tcacaatgggatatcaacttacaccagtgagaa

SEQ ID NO: 705314 - DNA, 33 bp, Homo sapien
tcacaatgggatatcatcttacaccagtgagaa

SEQ ID NO: 705315 - DNA, 33 bp, Homo sapien
ttgcaactgattatcactaatgttgtgagtggt

SEQ ID NO: 705316 - DNA, 33 bp, Homo sapien
ttgcaactgattatcagtaatgttgtgagtggt

SEQ ID NO: 705317 - DNA, 33 bp, Homo sapien
ttaaattaattttcaaggacttttctggagtta

SEQ ID NO: 705318 - DNA, 33 bp, Homo sapien
ttaaattaattttcaatgacttttctggagtta

SEQ ID NO: 705319 - DNA, 33 bp, Homo sapien
atggagaagctaccaccgtatgccatacttctg

SEQ ID NO: 705320 - DNA, 33 bp, Homo sapien
atggagaagctaccactgtatgccatacttctg

SEQ ID NO: 705321 - DNA, 33 bp, Homo sapien
tactatgtgcttagtccatgagggtggatatat

SEQ ID NO: 705322 - DNA, 33 bp, Homo sapien
tactatgtgcttagtctatgagggtggatatat

SEQ ID NO: 705323 - DNA, 33 bp, Homo sapien
cccaactctgccagataaatttttgtattattg

SEQ ID NO: 705324 - DNA, 33 bp, Homo sapien
cccaactctgccagatgaatttttgtattattg

SEQ ID NO: 705325 - DNA, 33 bp, Homo sapien
atcatatatgatatccaaattgtacttgttaaa

SEQ ID NO: 705326 - DNA, 33 bp, Homo sapien
atcatatatgatatccgaattgtacttgttaaa

SEQ ID NO: 705327 - DNA, 33 bp, Homo sapien
gagggaaagtctgtgcaatcgtgaaaaccccac

SEQ ID NO: 705328 - DNA, 33 bp, Homo sapien
gagggaaagtctgtgcgatcgtgaaaaccccac

SEQ ID NO: 705329 - DNA, 33 bp, Homo sapien
ctcacagatgtgtctcacttatcattcctgagt

SEQ ID NO: 705330 - DNA, 33 bp, Homo sapien
ctcacagatgtgtctcgcttatcattcctgagt

SEQ ID NO: 705331 - DNA, 33 bp, Homo sapien
atcatattttgctttcaacaaaaagtcaaagaa

SEQ ID NO: 705332 - DNA, 33 bp, Homo sapien
atcatattttgctttcgacaaaaagtcaaagaa

SEQ ID NO: 705333 - DNA, 33 bp, Homo sapien
aaagtaataaacgctaccggggatgaagactaa

SEQ ID NO: 705334 - DNA, 33 bp, Homo sapien
aaagtaataaacgctatcggggatgaagactaa

SEQ ID NO: 705335 - DNA, 33 bp, Homo sapien
attggctagagcccacaaattgatatataattg

SEQ ID NO: 705336 - DNA, 33 bp, Homo sapien
attggctagagcccacgaattgatatataattg

SEQ ID NO: 705337 - DNA, 33 bp, Homo sapien
cagctatagaaggcaacaaatgtcagacatcag

SEQ ID NO: 705338 - DNA, 33 bp, Homo sapien
cagctatagaaggcaataaatgtcagacatcag

SEQ ID NO: 705339 - DNA, 33 bp, Homo sapien
gtaatttgcattttaaaggttcaggcaatggag

SEQ ID NO: 705340 - DNA, 33 bp, Homo sapien
gtaatttgcattttaagggttcaggcaatggag

SEQ ID NO: 705341 - DNA, 33 bp, Homo sapien
ttttaaagggacattaacaagatgaaagagagt

SEQ ID NO: 705342 - DNA, 33 bp, Homo sapien
ttttaaagggacattagcaagatgaaagagagt

SEQ ID NO: 705343 - DNA, 33 bp, Homo sapien
cttctacagtcagagacacagtgtaaagaaaac

SEQ ID NO: 705344 - DNA, 33 bp, Homo sapien
cttctacagtcagagatacagtgtaaagaaaac

SEQ ID NO: 705345 - DNA, 33 bp, Homo sapien
ttgtggaagtattggaatatagatgtatatatt

SEQ ID NO: 705346 - DNA, 33 bp, Homo sapien
ttgtggaagtattggagtatagatgtatatatt

SEQ ID NO: 705347 - DNA, 33 bp, Homo sapien
tggtctcataatttcaagtaagagcctcaaatt

SEQ ID NO: 705348 - DNA, 33 bp, Homo sapien
tggtctcataatttcaggtaagagcctcaaatt

SEQ ID NO: 705349 - DNA, 33 bp, Homo sapien
ctaagttgcctagatcaaatgaaccaggcagcc

SEQ ID NO: 705350 - DNA, 33 bp, Homo sapien
ctaagttgcctagatcgaatgaaccaggcagcc

SEQ ID NO: 705351 - DNA, 33 bp, Homo sapien
ttggataataccgggaacatagggtggttatgt

SEQ ID NO: 705352 - DNA, 33 bp, Homo sapien
ttggataataccgggagcatagggtggttatgt

SEQ ID NO: 705353 - DNA, 33 bp, Homo sapien
atttttcaggagtcaaagttcatagtaaattta

SEQ ID NO: 705354 - DNA, 33 bp, Homo sapien
atttttcaggagtcaaggttcatagtaaattta

SEQ ID NO: 705355 - DNA, 33 bp, Homo sapien
agagttagagtgcaaacagtttttttgaaaagc

SEQ ID NO: 705356 - DNA, 33 bp, Homo sapien
agagttagagtgcaaatagtttttttgaaaagc

SEQ ID NO: 705357 - DNA, 33 bp, Homo sapien
tctaatttttcctgttgaaagttgtaatcttga

SEQ ID NO: 705358 - DNA, 33 bp, Homo sapien
tctaatttttcctgtttaaagttgtaatcttga

SEQ ID NO: 705359 - DNA, 33 bp, Homo sapien
tttctcagacttagcaagttttctaatttttcc

SEQ ID NO: 705360 - DNA, 33 bp, Homo sapien
tttctcagacttagcaggttttctaatttttcc

SEQ ID NO: 705361 - DNA, 33 bp, Homo sapien
ttgtcactgcggaagaaaaaaggtgccagtgct

SEQ ID NO: 705362 - DNA, 33 bp, Homo sapien
ttgtcactgcggaagagaaaaggtgccagtgct

SEQ ID NO: 705363 - DNA, 33 bp, Homo sapien
agtccacaatgtctaacgtttccatctttaagt

SEQ ID NO: 705364 - DNA, 33 bp, Homo sapien
agtccacaatgtctaatgtttccatctttaagt

SEQ ID NO: 705365 - DNA, 33 bp, Homo sapien
ccagtcctaaagagagaccatttttgggaatct

SEQ ID NO: 705366 - DNA, 33 bp, Homo sapien
ccagtcctaaagagaggccatttttgggaatct

SEQ ID NO: 705367 - DNA, 33 bp, Homo sapien
tattcacataaaataaaaggccagaactgaaat

SEQ ID NO: 705368 - DNA, 33 bp, Homo sapien
tattcacataaaataagaggccagaactgaaat

SEQ ID NO: 705369 - DNA, 33 bp, Homo sapien
ttcagctcatggtgccaaatgttgcaaaccgta

SEQ ID NO: 705370 - DNA, 33 bp, Homo sapien
ttcagctcatggtgccgaatgttgcaaaccgta

SEQ ID NO: 705371 - DNA, 33 bp, Homo sapien
gatgattaacacattaccaagaagacaaaaata

SEQ ID NO: 705372 - DNA, 33 bp, Homo sapien
gatgattaacacattatcaagaagacaaaaata

SEQ ID NO: 705373 - DNA, 33 bp, Homo sapien
atgtatctaggaaaagaccggatgggagatgac

SEQ ID NO: 705374 - DNA, 33 bp, Homo sapien
atgtatctaggaaaaggccggatgggagatgac

SEQ ID NO: 705375 - DNA, 33 bp, Homo sapien
tgcgacaataggtaaaagccaccacgaatgtgt

SEQ ID NO: 705376 - DNA, 33 bp, Homo sapien
tgcgacaataggtaaatgccaccacgaatgtgt

SEQ ID NO: 705377 - DNA, 33 bp, Homo sapien
gaatcagtcctcagaacggcctctctttcgtta

SEQ ID NO: 705378 - DNA, 33 bp, Homo sapien
gaatcagtcctcagaatggcctctctttcgtta

SEQ ID NO: 705379 - DNA, 33 bp, Homo sapien
acttgttttggagtcccgaatgcataaataaca

SEQ ID NO: 705380 - DNA, 33 bp, Homo sapien
acttgttttggagtcctgaatgcataaataaca

SEQ ID NO: 705381 - DNA, 33 bp, Homo sapien
tttgttgtataggtaaacacgcatcacaggggt

SEQ ID NO: 705382 - DNA, 33 bp, Homo sapien
tttgttgtataggtaagcacgcatcacaggggt

SEQ ID NO: 705383 - DNA, 33 bp, Homo sapien
gaggcaaagcaagtaactatagatggatcaaga

SEQ ID NO: 705384 - DNA, 33 bp, Homo sapien
gaggcaaagcaagtaattatagatggatcaaga

SEQ ID NO: 705385 - DNA, 33 bp, Homo sapien
catgggtttccagtgaagttattggtgatgcct

SEQ ID NO: 705386 - DNA, 33 bp, Homo sapien
catgggtttccagtgacgttattggtgatgcct

SEQ ID NO: 705387 - DNA, 33 bp, Homo sapien
tgcaaactacactacacatctgaccagagtttc

SEQ ID NO: 705388 - DNA, 33 bp, Homo sapien
tgcaaactacactacatatctgaccagagtttc

SEQ ID NO: 705389 - DNA, 33 bp, Homo sapien
ccagtccaattttatgaagtgtttctcctgtat

SEQ ID NO: 705390 - DNA, 33 bp, Homo sapien
ccagtccaattttatggagtgtttctcctgtat

SEQ ID NO: 705391 - DNA, 33 bp, Homo sapien
gtaaaataatacttaaagaatcttgctgagact

SEQ ID NO: 705392 - DNA, 33 bp, Homo sapien
gtaaaataatacttaaggaatcttgctgagact

SEQ ID NO: 705393 - DNA, 33 bp, Homo sapien
ccattgttcctggtctcaacaattgagctgctg

SEQ ID NO: 705394 - DNA, 33 bp, Homo sapien
ccattgttcctggtcttaacaattgagctgctg

SEQ ID NO: 705395 - DNA, 33 bp, Homo sapien
aaaagaataaatgtaaactttgctagtgtaatg

SEQ ID NO: 705396 - DNA, 33 bp, Homo sapien
aaaagaataaatgtaagctttgctagtgtaatg

SEQ ID NO: 705397 - DNA, 33 bp, Homo sapien
gggaagagtgagtgaaagtcttgaaattatgag

SEQ ID NO: 705398 - DNA, 33 bp, Homo sapien
gggaagagtgagtgaaggtcttgaaattatgag

SEQ ID NO: 705399 - DNA, 33 bp, Homo sapien
taaaactgttcaaaatcaagattatgaaattcc

SEQ ID NO: 705400 - DNA, 33 bp, Homo sapien
taaaactgttcaaaattaagattatgaaattcc

SEQ ID NO: 705401 - DNA, 33 bp, Homo sapien
attcaaattccggtcacatctaaggactgacga

SEQ ID NO: 705402 - DNA, 33 bp, Homo sapien
attcaaattccggtcatatctaaggactgacga

SEQ ID NO: 705403 - DNA, 33 bp, Homo sapien
agacatagtgtttacacatttagacatctctag

SEQ ID NO: 705404 - DNA, 33 bp, Homo sapien
agacatagtgtttacatatttagacatctctag

SEQ ID NO: 705405 - DNA, 33 bp, Homo sapien
gtgagaggtttggaaactttaagagcataatgg

SEQ ID NO: 705406 - DNA, 33 bp, Homo sapien
gtgagaggtttggaaagtttaagagcataatgg

SEQ ID NO: 705407 - DNA, 33 bp, Homo sapien
caaggagaggtctcgacactaatggtggctctg

SEQ ID NO: 705408 - DNA, 33 bp, Homo sapien
caaggagaggtctcgatactaatggtggctctg

SEQ ID NO: 705409 - DNA, 33 bp, Homo sapien
gtgaaaaacaaccaaccgtaaatcttggagctg

SEQ ID NO: 705410 - DNA, 33 bp, Homo sapien
gtgaaaaacaaccaactgtaaatcttggagctg

SEQ ID NO: 705411 - DNA, 33 bp, Homo sapien
tttcctaacatcaagacaagaaattttgaaact

SEQ ID NO: 705412 - DNA, 33 bp, Homo sapien
tttcctaacatcaagagaagaaattttgaaact

SEQ ID NO: 705413 - DNA, 33 bp, Homo sapien
taactgataacaaaaacaaagcaagggtggcta

SEQ ID NO: 705414 - DNA, 33 bp, Homo sapien
taactgataacaaaaagaaagcaagggtggcta

SEQ ID NO: 705415 - DNA, 33 bp, Homo sapien
tccatttgaaatgtaaccatcaagagagagtgc

SEQ ID NO: 705416 - DNA, 33 bp, Homo sapien
tccatttgaaatgtaatcatcaagagagagtgc

SEQ ID NO: 705417 - DNA, 33 bp, Homo sapien
gtagaatggatgcaaactattctgtcgaattga

SEQ ID NO: 705418 - DNA, 33 bp, Homo sapien
gtagaatggatgcaaagtattctgtcgaattga

SEQ ID NO: 705419 - DNA, 33 bp, Homo sapien
aaagctcaaaagtatacgtgaatgacagagcaa

SEQ ID NO: 705420 - DNA, 33 bp, Homo sapien
aaagctcaaaagtatatgtgaatgacagagcaa

SEQ ID NO: 705421 - DNA, 33 bp, Homo sapien
ttatccacattttctcaattggtatcaaagaga

SEQ ID NO: 705422 - DNA, 33 bp, Homo sapien
ttatccacattttctcgattggtatcaaagaga

SEQ ID NO: 705423 - DNA, 33 bp, Homo sapien
caccatacttctccccaccttatagatacacag

SEQ ID NO: 705424 - DNA, 33 bp, Homo sapien
caccatacttctccccgccttatagatacacag

SEQ ID NO: 705425 - DNA, 33 bp, Homo sapien
aactggtagaagttaccgaagacctctggggag

SEQ ID NO: 705426 - DNA, 33 bp, Homo sapien
aactggtagaagttactgaagacctctggggag

SEQ ID NO: 705427 - DNA, 33 bp, Homo sapien
gaaatccctttacacccaattacatagttgcat

SEQ ID NO: 705428 - DNA, 33 bp, Homo sapien
gaaatccctttacaccgaattacatagttgcat

SEQ ID NO: 705429 - DNA, 33 bp, Homo sapien
ttgatatggaagccaactagtggacttgatgga

SEQ ID NO: 705430 - DNA, 33 bp, Homo sapien
ttgatatggaagccaattagtggacttgatgga

SEQ ID NO: 705431 - DNA, 33 bp, Homo sapien
aatactgagttcatgaagatatgattaatgttt

SEQ ID NO: 705432 - DNA, 33 bp, Homo sapien
aatactgagttcatgaggatatgattaatgttt

SEQ ID NO: 705433 - DNA, 33 bp, Homo sapien
gatatgcatagcagcagcgtggtaaacacaaaa

SEQ ID NO: 705434 - DNA, 33 bp, Homo sapien
gatatgcatagcagcatcgtggtaaacacaaaa

SEQ ID NO: 705435 - DNA, 33 bp, Homo sapien
gctttgtgtatgaagacagaatgagaattgaag

SEQ ID NO: 705436 - DNA, 33 bp, Homo sapien
gctttgtgtatgaagatagaatgagaattgaag

SEQ ID NO: 705437 - DNA, 33 bp, Homo sapien
atgtcaacccatatcacggcaatctaaattaag

SEQ ID NO: 705438 - DNA, 33 bp, Homo sapien
atgtcaacccatatcatggcaatctaaattaag

SEQ ID NO: 705439 - DNA, 33 bp, Homo sapien
aagcagaataaagtatcaatacctgaagcacac

SEQ ID NO: 705440 - DNA, 33 bp, Homo sapien
aagcagaataaagtatgaatacctgaagcacac

SEQ ID NO: 705441 - DNA, 33 bp, Homo sapien
atttcagactggtgtacgaaagtaatgataagg

SEQ ID NO: 705442 - DNA, 33 bp, Homo sapien
atttcagactggtgtatgaaagtaatgataagg

SEQ ID NO: 705443 - DNA, 33 bp, Homo sapien
aggttatgaaatagaacgtgcaacacaaatcct

SEQ ID NO: 705444 - DNA, 33 bp, Homo sapien
aggttatgaaatagaatgtgcaacacaaatcct

SEQ ID NO: 705445 - DNA, 33 bp, Homo sapien
atctctttgatttaaactaaagttgcaatgatg

SEQ ID NO: 705446 - DNA, 33 bp, Homo sapien
atctctttgatttaaattaaagttgcaatgatg

SEQ ID NO: 705447 - DNA, 33 bp, Homo sapien
tataacactgtcaataaagctgactgacatagc

SEQ ID NO: 705448 - DNA, 33 bp, Homo sapien
tataacactgtcaatatagctgactgacatagc

SEQ ID NO: 705449 - DNA, 33 bp, Homo sapien
cctaaaaaagtgaaaaggcctccatacctgtaa

SEQ ID NO: 705450 - DNA, 33 bp, Homo sapien
cctaaaaaagtgaaaatgcctccatacctgtaa

SEQ ID NO: 705451 - DNA, 33 bp, Homo sapien
ttactcttttctttcccagtatggatgatttct

SEQ ID NO: 705452 - DNA, 33 bp, Homo sapien
ttactcttttctttccgagtatggatgatttct

SEQ ID NO: 705453 - DNA, 33 bp, Homo sapien
gtgaattaggaggacacagaaatacaagaggag

SEQ ID NO: 705454 - DNA, 33 bp, Homo sapien
gtgaattaggaggacagagaaatacaagaggag

SEQ ID NO: 705455 - DNA, 33 bp, Homo sapien
actgcctttctattagccaagagtcaaagttgg

SEQ ID NO: 705456 - DNA, 33 bp, Homo sapien
actgcctttctattagtcaagagtcaaagttgg

SEQ ID NO: 705457 - DNA, 33 bp, Homo sapien
ccttctgtttgctaccgaagatttgaggaaaga

SEQ ID NO: 705458 - DNA, 33 bp, Homo sapien
ccttctgtttgctacctaagatttgaggaaaga

SEQ ID NO: 705459 - DNA, 33 bp, Homo sapien
cggagaggagtgttgaatattgagtttaacttt

SEQ ID NO: 705460 - DNA, 33 bp, Homo sapien
cggagaggagtgttgagtattgagtttaacttt

SEQ ID NO: 705461 - DNA, 33 bp, Homo sapien
tcctcctaaacctctaggtctgtggtggaaggg

SEQ ID NO: 705462 - DNA, 33 bp, Homo sapien
tcctcctaaacctctatgtctgtggtggaaggg

SEQ ID NO: 705463 - DNA, 33 bp, Homo sapien
agggtgagaagaaaaagaggtttcatggactta

SEQ ID NO: 705464 - DNA, 33 bp, Homo sapien
agggtgagaagaaaaataggtttcatggactta

SEQ ID NO: 705465 - DNA, 33 bp, Homo sapien
gtgtgtgatttagtaccgagattcctgcttact

SEQ ID NO: 705466 - DNA, 33 bp, Homo sapien
gtgtgtgatttagtactgagattcctgcttact

SEQ ID NO: 705467 - DNA, 33 bp, Homo sapien
gttttagttaaaagaaaatggtcactgtgtttg

SEQ ID NO: 705468 - DNA, 33 bp, Homo sapien
gttttagttaaaagaagatggtcactgtgtttg

SEQ ID NO: 705469 - DNA, 33 bp, Homo sapien
ttattatactgttggaaaaattcattccctagc

SEQ ID NO: 705470 - DNA, 33 bp, Homo sapien
ttattatactgttggataaattcattccctagc

SEQ ID NO: 705471 - DNA, 33 bp, Homo sapien
cctctcttgccaagtaacttcattaaaaagtaa

SEQ ID NO: 705472 - DNA, 33 bp, Homo sapien
cctctcttgccaagtagcttcattaaaaagtaa

SEQ ID NO: 705473 - DNA, 33 bp, Homo sapien
gatgtctttgaaagtacatatggaatcccttca

SEQ ID NO: 705474 - DNA, 33 bp, Homo sapien
gatgtctttgaaagtatatatggaatcccttca

SEQ ID NO: 705475 - DNA, 33 bp, Homo sapien
ttttatgagggtaaaaagtaatcgattttactt

SEQ ID NO: 705476 - DNA, 33 bp, Homo sapien
ttttatgagggtaaaaggtaatcgattttactt

SEQ ID NO: 705477 - DNA, 33 bp, Homo sapien
atgtatgggtttactacgaggaaatcaaataaa

SEQ ID NO: 705478 - DNA, 33 bp, Homo sapien
atgtatgggtttactatgaggaaatcaaataaa

SEQ ID NO: 705479 - DNA, 33 bp, Homo sapien
agcagactggcttctacgcaaaaagagaagaaa

SEQ ID NO: 705480 - DNA, 33 bp, Homo sapien
agcagactggcttctatgcaaaaagagaagaaa

SEQ ID NO: 705481 - DNA, 33 bp, Homo sapien
tagaaactctcttagagcaaccatgtaaaaatg

SEQ ID NO: 705482 - DNA, 33 bp, Homo sapien
tagaaactctcttagatcaaccatgtaaaaatg

SEQ ID NO: 705483 - DNA, 33 bp, Homo sapien
ctatgttgttgacaaaccaatgaatgaatgaac

SEQ ID NO: 705484 - DNA, 33 bp, Homo sapien
ctatgttgttgacaaatcaatgaatgaatgaac

SEQ ID NO: 705485 - DNA, 33 bp, Homo sapien
agaacatatgcaattaacaaacttaaacattag

SEQ ID NO: 705486 - DNA, 33 bp, Homo sapien
agaacatatgcaattagcaaacttaaacattag

SEQ ID NO: 705487 - DNA, 33 bp, Homo sapien
tttaggaagcttgataaaactggcaagtaataa

SEQ ID NO: 705488 - DNA, 33 bp, Homo sapien
tttaggaagcttgatataactggcaagtaataa

SEQ ID NO: 705489 - DNA, 33 bp, Homo sapien
tattcacatttttgacaggagaatatttatctg

SEQ ID NO: 705490 - DNA, 33 bp, Homo sapien
tattcacatttttgacgggagaatatttatctg

SEQ ID NO: 705491 - DNA, 33 bp, Homo sapien
tcagatcagtggcttaaaacacattaacaaaaa

SEQ ID NO: 705492 - DNA, 33 bp, Homo sapien
tcagatcagtggcttacaacacattaacaaaaa

SEQ ID NO: 705493 - DNA, 33 bp, Homo sapien
gtctgtgtttactctacggtaagctgaagacca

SEQ ID NO: 705494 - DNA, 33 bp, Homo sapien
gtctgtgtttactctagggtaagctgaagacca

SEQ ID NO: 705495 - DNA, 33 bp, Homo sapien
tacacagatgatggaaagaaccacaccaactta

SEQ ID NO: 705496 - DNA, 33 bp, Homo sapien
tacacagatgatggaaggaaccacaccaactta

SEQ ID NO: 705497 - DNA, 33 bp, Homo sapien
gatattttccactcaagcattgtgaactacagt

SEQ ID NO: 705498 - DNA, 33 bp, Homo sapien
gatattttccactcaatcattgtgaactacagt

SEQ ID NO: 705499 - DNA, 33 bp, Homo sapien
aatttaaggcagacctcaaagttttgttgtctt

SEQ ID NO: 705500 - DNA, 33 bp, Homo sapien
aatttaaggcagacctgaaagttttgttgtctt

SEQ ID NO: 705501 - DNA, 33 bp, Homo sapien
gataattgaaggtgaacactagaaagagtgagg

SEQ ID NO: 705502 - DNA, 33 bp, Homo sapien
gataattgaaggtgaatactagaaagagtgagg

SEQ ID NO: 705503 - DNA, 33 bp, Homo sapien
aagtaggagagaaaacagtaggtaagaaagcaa

SEQ ID NO: 705504 - DNA, 33 bp, Homo sapien
aagtaggagagaaaacggtaggtaagaaagcaa

SEQ ID NO: 705505 - DNA, 33 bp, Homo sapien
tttatggtgtctctatcactcgctacagtgtca

SEQ ID NO: 705506 - DNA, 33 bp, Homo sapien
tttatggtgtctctattactcgctacagtgtca

SEQ ID NO: 705507 - DNA, 33 bp, Homo sapien
catttctccatttgtaacgtctggttatattca

SEQ ID NO: 705508 - DNA, 33 bp, Homo sapien
catttctccatttgtaccgtctggttatattca

SEQ ID NO: 705509 - DNA, 33 bp, Homo sapien
cttgtttacaggcatacgttgagtgttgaacat

SEQ ID NO: 705510 - DNA, 33 bp, Homo sapien
cttgtttacaggcatatgttgagtgttgaacat

SEQ ID NO: 705511 - DNA, 33 bp, Homo sapien
aacaaagagatcaatgaaatctgtaatggatga

SEQ ID NO: 705512 - DNA, 33 bp, Homo sapien
aacaaagagatcaatggaatctgtaatggatga

SEQ ID NO: 705513 - DNA, 33 bp, Homo sapien
ctcagaataatgacaaccaaggaataaggaaat

SEQ ID NO: 705514 - DNA, 33 bp, Homo sapien
ctcagaataatgacaagcaaggaataaggaaat

SEQ ID NO: 705515 - DNA, 33 bp, Homo sapien
ttatccttcattctaaatggagcttttcacaac

SEQ ID NO: 705516 - DNA, 33 bp, Homo sapien
ttatccttcattctaagtggagcttttcacaac

SEQ ID NO: 705517 - DNA, 33 bp, Homo sapien
aatctgctagataacacaaagaattattttaaa

SEQ ID NO: 705518 - DNA, 33 bp, Homo sapien
aatctgctagataacataaagaattattttaaa

SEQ ID NO: 705519 - DNA, 33 bp, Homo sapien
ctgaggacactctgaacgtctggtacagattta

SEQ ID NO: 705520 - DNA, 33 bp, Homo sapien
ctgaggacactctgaatgtctggtacagattta

SEQ ID NO: 705521 - DNA, 33 bp, Homo sapien
ccagtgagatgtggcacattaattacaatattt

SEQ ID NO: 705522 - DNA, 33 bp, Homo sapien
ccagtgagatgtggcatattaattacaatattt

SEQ ID NO: 705523 - DNA, 33 bp, Homo sapien
tatttgttaaacatgaagtgacatatattttag

SEQ ID NO: 705524 - DNA, 33 bp, Homo sapien
tatttgttaaacatgacgtgacatatattttag

SEQ ID NO: 705525 - DNA, 33 bp, Homo sapien
tacaactgcgtttatccctgtgcataaattaaa

SEQ ID NO: 705526 - DNA, 33 bp, Homo sapien
tacaactgcgtttatctctgtgcataaattaaa

SEQ ID NO: 705527 - DNA, 33 bp, Homo sapien
aatgtgtttgcctctacagcattaaacatcctt

SEQ ID NO: 705528 - DNA, 33 bp, Homo sapien
aatgtgtttgcctctatagcattaaacatcctt

SEQ ID NO: 705529 - DNA, 33 bp, Homo sapien
ctggcttggccatctagcaattttctattctct

SEQ ID NO: 705530 - DNA, 33 bp, Homo sapien
ctggcttggccatctatcaattttctattctct

SEQ ID NO: 705531 - DNA, 33 bp, Homo sapien
taatccacagtttttaactctcaaagcacttat

SEQ ID NO: 705532 - DNA, 33 bp, Homo sapien
taatccacagtttttacctctcaaagcacttat

SEQ ID NO: 705533 - DNA, 33 bp, Homo sapien
tcacagttctcacttacaagctaatttaagcaa

SEQ ID NO: 705534 - DNA, 33 bp, Homo sapien
tcacagttctcacttataagctaatttaagcaa

SEQ ID NO: 705535 - DNA, 33 bp, Homo sapien; identical to SEQ ID NO: 705533

SEQ ID NO: 705536 - DNA, 33 bp, Homo sapien; identical to SEQ ID NO: 705534

SEQ ID NO: 705537 - DNA, 33 bp, Homo sapien
ccttttaaacaagatacgatgtttgctgtagaa

SEQ ID NO: 705538 - DNA, 33 bp, Homo sapien
ccttttaaacaagatatgatgtttgctgtagaa

SEQ ID NO: 705539 - DNA, 33 bp, Homo sapien
ttgctgccagaattcacctagtacgcttgctat

SEQ ID NO: 705540 - DNA, 33 bp, Homo sapien
ttgctgccagaattcatctagtacgcttgctat

SEQ ID NO: 705541 - DNA, 33 bp, Homo sapien
gttaatgatattaagacgttggaacacagtttg

SEQ ID NO: 705542 - DNA, 33 bp, Homo sapien
gttaatgatattaagatgttggaacacagtttg

SEQ ID NO: 705543 - DNA, 33 bp, Homo sapien
ccagtactgttcctgtaaatgcagagtaatatt

SEQ ID NO: 705544 - DNA, 33 bp, Homo sapien
ccagtactgttcctgttaatgcagagtaatatt

SEQ ID NO: 705545 - DNA, 33 bp, Homo sapien
actaaaattttggcaacggtagagtcagtgaca

SEQ ID NO: 705546 - DNA, 33 bp, Homo sapien
actaaaattttggcaatggtagagtcagtgaca

SEQ ID NO: 705547 - DNA, 33 bp, Homo sapien
aggaagaaacagagaaagataagccatttgttt

SEQ ID NO: 705548 - DNA, 33 bp, Homo sapien
aggaagaaacagagaacgataagccatttgttt

SEQ ID NO: 705549 - DNA, 33 bp, Homo sapien
ctagtaattaatgtgaaggtagaggtagtacat

SEQ ID NO: 705550 - DNA, 33 bp, Homo sapien
ctagtaattaatgtgagggtagaggtagtacat

SEQ ID NO: 705551 - DNA, 33 bp, Homo sapien
tttcttttaacctttaagcctttggaattgttt

SEQ ID NO: 705552 - DNA, 33 bp, Homo sapien
tttcttttaacctttacgcctttggaattgttt

SEQ ID NO: 705553 - DNA, 33 bp, Homo sapien
tatcacgttttctttacgcatcaatccagttac

SEQ ID NO: 705554 - DNA, 33 bp, Homo sapien
tatcacgttttctttatgcatcaatccagttac

SEQ ID NO: 705555 - DNA, 33 bp, Homo sapien
aaaatgtttattcagaagccatgttatatacaa

SEQ ID NO: 705556 - DNA, 33 bp, Homo sapien
aaaatgtttattcagatgccatgttatatacaa

SEQ ID NO: 705557 - DNA, 33 bp, Homo sapien
cctgtcactactgaggccattagccggcaactc

SEQ ID NO: 705558 - DNA, 33 bp, Homo sapien
cctgtcactactgaggtcattagccggcaactc

SEQ ID NO: 705559 - DNA, 33 bp, Homo sapien
aattaacaaaaccataaagcagttaaatagcat

SEQ ID NO: 705560 - DNA, 33 bp, Homo sapien
aattaacaaaaccatagagcagttaaatagcat

SEQ ID NO: 705561 - DNA, 33 bp, Homo sapien
gttgtagggacattctaaaataactacagttgt

SEQ ID NO: 705562 - DNA, 33 bp, Homo sapien
gttgtagggacattctgaaataactacagttgt

SEQ ID NO: 705563 - DNA, 33 bp, Homo sapien
agcaatctacagtcaaaataccaatgatattct

SEQ ID NO: 705564 - DNA, 33 bp, Homo sapien
agcaatctacagtcaagataccaatgatattct

SEQ ID NO: 705565 - DNA, 33 bp, Homo sapien
tcaccatttgcccatcacctatgtcttatttaa

SEQ ID NO: 705566 - DNA, 33 bp, Homo sapien
tcaccatttgcccatctcctatgtcttatttaa

SEQ ID NO: 705567 - DNA, 33 bp, Homo sapien
tttggaagatatagatgaagctgattggtgaga

SEQ ID NO: 705568 - DNA, 33 bp, Homo sapien
tttggaagatatagattaagctgattggtgaga

SEQ ID NO: 705569 - DNA, 33 bp, Homo sapien
taagccttttccagacagcttattatgtggttc

SEQ ID NO: 705570 - DNA, 33 bp, Homo sapien
taagccttttccagactgcttattatgtggttc

SEQ ID NO: 705571 - DNA, 33 bp, Homo sapien
actgattttgtagctacggacttttttatgttg

SEQ ID NO: 705572 - DNA, 33 bp, Homo sapien
actgattttgtagctatggacttttttatgttg

SEQ ID NO: 705573 - DNA, 33 bp, Homo sapien
ttctctctgtaatccaatatttggtcagctatg

SEQ ID NO: 705574 - DNA, 33 bp, Homo sapien
ttctctctgtaatccagtatttggtcagctatg

SEQ ID NO: 705575 - DNA, 33 bp, Homo sapien
ccatccggataaataaataattcatgtggggtt

SEQ ID NO: 705576 - DNA, 33 bp, Homo sapien
ccatccggataaataactaattcatgtggggtt

SEQ ID NO: 705577 - DNA, 33 bp, Homo sapien
acaagggcattcctatcactcagacatctccaa

SEQ ID NO: 705578 - DNA, 33 bp, Homo sapien
acaagggcattcctattactcagacatctccaa

SEQ ID NO: 705579 - DNA, 33 bp, Homo sapien
ttcttgctataaaagacattgttggtacaattg

SEQ ID NO: 705580 - DNA, 33 bp, Homo sapien
ttcttgctataaaagatattgttggtacaattg

SEQ ID NO: 705581 - DNA, 33 bp, Homo sapien
tcaaaatcatacgttacatttagctgcatttat

SEQ ID NO: 705582 - DNA, 33 bp, Homo sapien
tcaaaatcatacgttatatttagctgcatttat

SEQ ID NO: 705583 - DNA, 33 bp, Homo sapien
catttatagtccatcaatataaataggttttta

SEQ ID NO: 705584 - DNA, 33 bp, Homo sapien
catttatagtccatcagtataaataggttttta

SEQ ID NO: 705585 - DNA, 33 bp, Homo sapien
tctgccactgtgaacccccttctcacctcactc

SEQ ID NO: 705586 - DNA, 33 bp, Homo sapien
tctgccactgtgaacctccttctcacctcactc

SEQ ID NO: 705587 - DNA, 33 bp, Homo sapien
ataaacaaattgtttaaggttaacagagttata

SEQ ID NO: 705588 - DNA, 33 bp, Homo sapien
ataaacaaattgtttagggttaacagagttata

SEQ ID NO: 705589 - DNA, 33 bp, Homo sapien
acagaatgattggatcaaatgctaattaaaaac

SEQ ID NO: 705590 - DNA, 33 bp, Homo sapien
acagaatgattggatctaatgctaattaaaaac

SEQ ID NO: 705591 - DNA, 33 bp, Homo sapien
tgcaggctctagctcccagtcgatgtttctaga

SEQ ID NO: 705592 - DNA, 33 bp, Homo sapien
tgcaggctctagctcctagtcgatgtttctaga

SEQ ID NO: 705593 - DNA, 33 bp, Homo sapien
agttctaatcaatgaaaatccaatatttgcctg

SEQ ID NO: 705594 - DNA, 33 bp, Homo sapien
agttctaatcaatgaatatccaatatttgcctg

SEQ ID NO: 705595 - DNA, 33 bp, Homo sapien
atgccatattttggggaaatttttttctgagac

SEQ ID NO: 705596 - DNA, 33 bp, Homo sapien
atgccatattttggggcaatttttttctgagac

SEQ ID NO: 705597 - DNA, 33 bp, Homo sapien
atactttaaaacattaccagctatcatatcttc

SEQ ID NO: 705598 - DNA, 33 bp, Homo sapien
atactttaaaacattatcagctatcatatcttc

SEQ ID NO: 705599 - DNA, 33 bp, Homo sapien
ggtatgaatttgttcacgacagtggagatcaca

SEQ ID NO: 705600 - DNA, 33 bp, Homo sapien
ggtatgaatttgttcatgacagtggagatcaca

SEQ ID NO: 705601 - DNA, 33 bp, Homo sapien
caactggattgaaaacaacaatatccttttgta

SEQ ID NO: 705602 - DNA, 33 bp, Homo sapien
caactggattgaaaacgacaatatccttttgta

SEQ ID NO: 705603 - DNA, 33 bp, Homo sapien
ggtcgtaatccccagaatcaattgggtgccaaa

SEQ ID NO: 705604 - DNA, 33 bp, Homo sapien
ggtcgtaatccccagagtcaattgggtgccaaa

SEQ ID NO: 705605 - DNA, 33 bp, Homo sapien
gattacgaccttgagaatcagttctttgaattg

SEQ ID NO: 705606 - DNA, 33 bp, Homo sapien
gattacgaccttgagagtcagttctttgaattg

SEQ ID NO: 705607 - DNA, 33 bp, Homo sapien
ctgcaatcaagtgctacagaaaagaaatctttg

SEQ ID NO: 705608 - DNA, 33 bp, Homo sapien
ctgcaatcaagtgctatagaaaagaaatctttg

SEQ ID NO: 705609 - DNA, 33 bp, Homo sapien
tcaggccagaacatgtaaacccaaacatataat

SEQ ID NO: 705610 - DNA, 33 bp, Homo sapien
tcaggccagaacatgtcaacccaaacatataat

SEQ ID NO: 705611 - DNA, 33 bp, Homo sapien
aaacagattctggattcaacatattaccatgaa

SEQ ID NO: 705612 - DNA, 33 bp, Homo sapien
aaacagattctggatttaacatattaccatgaa

SEQ ID NO: 705613 - DNA, 33 bp, Homo sapien
gacagtagacaaaaaaagtttcgtgaaagaaat

SEQ ID NO: 705614 - DNA, 33 bp, Homo sapien
gacagtagacaaaaaacgtttcgtgaaagaaat

SEQ ID NO: 705615 - DNA, 33 bp, Homo sapien
cccaggcagaaaagaaagttgtctgaataataa

SEQ ID NO: 705616 - DNA, 33 bp, Homo sapien
cccaggcagaaaagaacgttgtctgaataataa

SEQ ID NO: 705617 - DNA, 33 bp, Homo sapien
taattgatcaaccaaactcaggcgctagctgtg

SEQ ID NO: 705618 - DNA, 33 bp, Homo sapien
taattgatcaaccaaattcaggcgctagctgtg

SEQ ID NO: 705619 - DNA, 33 bp, Homo sapien
atcttgtacagaggaaaagatatctaacacata

SEQ ID NO: 705620 - DNA, 33 bp, Homo sapien
atcttgtacagaggaagagatatctaacacata

SEQ ID NO: 705621 - DNA, 33 bp, Homo sapien
gaaagactgtgtcttacggttctgaattgagtg

SEQ ID NO: 705622 - DNA, 33 bp, Homo sapien
gaaagactgtgtcttatggttctgaattgagtg

SEQ ID NO: 705623 - DNA, 33 bp, Homo sapien
tgtaaaattctttcaaatctggtcaagttaatt

SEQ ID NO: 705624 - DNA, 33 bp, Homo sapien
tgtaaaattctttcaactctggtcaagttaatt

SEQ ID NO: 705625 - DNA, 33 bp, Homo sapien
aaaataatatttcctgaagatctgacaagatgg

SEQ ID NO: 705626 - DNA, 33 bp, Homo sapien
aaaataatatttcctggagatctgacaagatgg

SEQ ID NO: 705627 - DNA, 33 bp, Homo sapien
gttgcatatgaataacacagggtgagaacagtg

SEQ ID NO: 705628 - DNA, 33 bp, Homo sapien
gttgcatatgaataacgcagggtgagaacagtg

SEQ ID NO: 705629 - DNA, 33 bp, Homo sapien
ttgactacatgagctaagtattgtacagaattt

SEQ ID NO: 705630 - DNA, 33 bp, Homo sapien
ttgactacatgagctaggtattgtacagaattt

SEQ ID NO: 705631 - DNA, 33 bp, Homo sapien
cagagttatcaataaacaacttgaggaaaagaa

SEQ ID NO: 705632 - DNA, 33 bp, Homo sapien
cagagttatcaataaagaacttgaggaaaagaa

SEQ ID NO: 705633 - DNA, 33 bp, Homo sapien
cacactttcattttgccgatagaattatgtcca

SEQ ID NO: 705634 - DNA, 33 bp, Homo sapien
cacactttcattttgctgatagaattatgtcca

SEQ ID NO: 705635 - DNA, 33 bp, Homo sapien
aatgtttgcttaatgtaaacatccacatacact

SEQ ID NO: 705636 - DNA, 33 bp, Homo sapien
aatgtttgcttaatgttaacatccacatacact

SEQ ID NO: 705637 - DNA, 33 bp, Homo sapien
actgtataattagagaaccagaagcagaggaaa

SEQ ID NO: 705638 - DNA, 33 bp, Homo sapien
actgtataattagagacccagaagcagaggaaa

SEQ ID NO: 705639 - DNA, 33 bp, Homo sapien
gtcaccttctttaccaataatttgcaactgacc

SEQ ID NO: 705640 - DNA, 33 bp, Homo sapien
gtcaccttctttaccattaatttgcaactgacc

SEQ ID NO: 705641 - DNA, 33 bp, Homo sapien
atggtatctggaaagaaagacttctgatgcgac

SEQ ID NO: 705642 - DNA, 33 bp, Homo sapien
atggtatctggaaagagagacttctgatgcgac

SEQ ID NO: 705643 - DNA, 33 bp, Homo sapien
tattagacaacagagactataatgatgatgatg

SEQ ID NO: 705644 - DNA, 33 bp, Homo sapien
tattagacaacagagattataatgatgatgatg

SEQ ID NO: 705645 - DNA, 33 bp, Homo sapien
gactttccttttaacacggcattcttacaggca

SEQ ID NO: 705646 - DNA, 33 bp, Homo sapien
gactttccttttaacatggcattcttacaggca

SEQ ID NO: 705647 - DNA, 33 bp, Homo sapien
cttcacatattcttaagtctacggaaactccta

SEQ ID NO: 705648 - DNA, 33 bp, Homo sapien
cttcacatattcttaattctacggaaactccta

SEQ ID NO: 705649 - DNA, 33 bp, Homo sapien
gtatagttctgcaaaaatagccaacactatata

SEQ ID NO: 705650 - DNA, 33 bp, Homo sapien
gtatagttctgcaaaagtagccaacactatata

SEQ ID NO: 705651 - DNA, 33 bp, Homo sapien
aattgacagttaaaaacgaattcaatgtattgc

SEQ ID NO: 705652 - DNA, 33 bp, Homo sapien
aattgacagttaaaaatgaattcaatgtattgc

SEQ ID NO: 705653 - DNA, 33 bp, Homo sapien
gagttctttgattttaagagtcaggtgtaaatg

SEQ ID NO: 705654 - DNA, 33 bp, Homo sapien
gagttctttgattttaggagtcaggtgtaaatg

SEQ ID NO: 705655 - DNA, 33 bp, Homo sapien
gaggccacagataaaagggagaaggagtgagat

SEQ ID NO: 705656 - DNA, 33 bp, Homo sapien
gaggccacagataaaatggagaaggagtgagat

SEQ ID NO: 705657 - DNA, 33 bp, Homo sapien
catcataggctaacaaacactggggaaagataa

SEQ ID NO: 705658 - DNA, 33 bp, Homo sapien
catcataggctaacaatcactggggaaagataa

SEQ ID NO: 705659 - DNA, 33 bp, Homo sapien
tttgaaaaaggtgaacagaagttgaggatttaa

SEQ ID NO: 705660 - DNA, 33 bp, Homo sapien
tttgaaaaaggtgaacggaagttgaggatttaa

SEQ ID NO: 705661 - DNA, 33 bp, Homo sapien
tgattaaccatgacgaaagatcaacaagcaaag

SEQ ID NO: 705662 - DNA, 33 bp, Homo sapien
tgattaaccatgacgacagatcaacaagcaaag

SEQ ID NO: 705663 - DNA, 33 bp, Homo sapien
accactctccaaagataaaatgttagactaata

SEQ ID NO: 705664 - DNA, 33 bp, Homo sapien
accactctccaaagatcaaatgttagactaata

SEQ ID NO: 705665 - DNA, 33 bp, Homo sapien
caagcatgatcttgaacgtaatgggattgtgag

SEQ ID NO: 705666 - DNA, 33 bp, Homo sapien
caagcatgatcttgaatgtaatgggattgtgag

SEQ ID NO: 705667 - DNA, 33 bp, Homo sapien
tcatttctctatagcaagttcaaagagacagct

SEQ ID NO: 705668 - DNA, 33 bp, Homo sapien
tcatttctctatagcacgttcaaagagacagct

SEQ ID NO: 705669 - DNA, 33 bp, Homo sapien
gaaatcatggctctgaacatcacttttactgaa

SEQ ID NO: 705670 - DNA, 33 bp, Homo sapien
gaaatcatggctctgatcatcacttttactgaa

SEQ ID NO: 705671 - DNA, 33 bp, Homo sapien
tttgcaaacataatctcaagttaatggcaattt

SEQ ID NO: 705672 - DNA, 33 bp, Homo sapien
tttgcaaacataatctgaagttaatggcaattt

SEQ ID NO: 705673 - DNA, 33 bp, Homo sapien
gcatacagaaataatgacaactttattgttttt

SEQ ID NO: 705674 - DNA, 33 bp, Homo sapien
gcatacagaaataatgccaactttattgttttt

SEQ ID NO: 705675 - DNA, 33 bp, Homo sapien
tcttgccaatatttatcacttaggccctgcagt

SEQ ID NO: 705676 - DNA, 33 bp, Homo sapien
tcttgccaatatttattacttaggccctgcagt

SEQ ID NO: 705677 - DNA, 33 bp, Homo sapien
ggcatattcgtaattacactgttgtatctgtta

SEQ ID NO: 705678 - DNA, 33 bp, Homo sapien
ggcatattcgtaattatactgttgtatctgtta

SEQ ID NO: 705679 - DNA, 33 bp, Homo sapien
gagctgttatttatacaaaagcaatgcaccaga

SEQ ID NO: 705680 - DNA, 33 bp, Homo sapien
gagctgttatttataccaaagcaatgcaccaga

SEQ ID NO: 705681 - DNA, 33 bp, Homo sapien
atgtcagagaccttcaaggcatttccttctatc

SEQ ID NO: 705682 - DNA, 33 bp, Homo sapien
atgtcagagaccttcacggcatttccttctatc

SEQ ID NO: 705683 - DNA, 33 bp, Homo sapien
ccagatattcttttggacaccaggttacttact

SEQ ID NO: 705684 - DNA, 33 bp, Homo sapien
ccagatattcttttgggcaccaggttacttact

SEQ ID NO: 705685 - DNA, 33 bp, Homo sapien
tacagcaccctggttaaactatggataagacat

SEQ ID NO: 705686 - DNA, 33 bp, Homo sapien
tacagcaccctggttacactatggataagacat

SEQ ID NO: 705687 - DNA, 33 bp, Homo sapien
agatcatgagggagcccgacttctaccatcacc

SEQ ID NO: 705688 - DNA, 33 bp, Homo sapien
agatcatgagggagcctgacttctaccatcacc

SEQ ID NO: 705689 - DNA, 33 bp, Homo sapien
aatgtagcactgcagaatatgtgaaacaaagat

SEQ ID NO: 705690 - DNA, 33 bp, Homo sapien
aatgtagcactgcagagtatgtgaaacaaagat

SEQ ID NO: 705691 - DNA, 33 bp, Homo sapien
gggagacactgaacctcaacggattaacagtgg

SEQ ID NO: 705692 - DNA, 33 bp, Homo sapien
gggagacactgaaccttaacggattaacagtgg

SEQ ID NO: 705693 - DNA, 33 bp, Homo sapien
tgttgacttgttgtccaatgcatcttgacttat

SEQ ID NO: 705694 - DNA, 33 bp, Homo sapien
tgttgacttgttgtccgatgcatcttgacttat

SEQ ID NO: 705695 - DNA, 33 bp, Homo sapien
agaatggttgaggggaagtgttcgagaaaactg

SEQ ID NO: 705696 - DNA, 33 bp, Homo sapien
agaatggttgaggggaggtgttcgagaaaactg

SEQ ID NO: 705697 - DNA, 33 bp, Homo sapien
actcttttaatgaatacgtttacagtgacaact

SEQ ID NO: 705698 - DNA, 33 bp, Homo sapien
actcttttaatgaatatgtttacagtgacaact

SEQ ID NO: 705699 - DNA, 33 bp, Homo sapien
gcattttacttttgccaaatccaagttgtactt

SEQ ID NO: 705700 - DNA, 33 bp, Homo sapien
gcattttacttttgcccaatccaagttgtactt

SEQ ID NO: 705701 - DNA, 33 bp, Homo sapien
actattgagagataataatagcaattcaagaaa

SEQ ID NO: 705702 - DNA, 33 bp, Homo sapien
actattgagagataatgatagcaattcaagaaa

SEQ ID NO: 705703 - DNA, 33 bp, Homo sapien
ggtggacattcaaaaccaaagcctctctttaaa

SEQ ID NO: 705704 - DNA, 33 bp, Homo sapien
ggtggacattcaaaacgaaagcctctctttaaa

SEQ ID NO: 705705 - DNA, 33 bp, Homo sapien
agatattgggagaaacactgaggtcaaataaat

SEQ ID NO: 705706 - DNA, 33 bp, Homo sapien
agatattgggagaaaccctgaggtcaaataaat

SEQ ID NO: 705707 - DNA, 33 bp, Homo sapien
ttcatctgctcaggtcaccctatatactgtgag

SEQ ID NO: 705708 - DNA, 33 bp, Homo sapien
ttcatctgctcaggtccccctatatactgtgag

SEQ ID NO: 705709 - DNA, 33 bp, Homo sapien
gccctctcgtcacatacgtcagtaacattccaa

SEQ ID NO: 705710 - DNA, 33 bp, Homo sapien
gccctctcgtcacatatgtcagtaacattccaa

SEQ ID NO: 705711 - DNA, 33 bp, Homo sapien
taacattccaagctgacgaccacttgttcaggc

SEQ ID NO: 705712 - DNA, 33 bp, Homo sapien
taacattccaagctgatgaccacttgttcaggc

SEQ ID NO: 705713 - DNA, 33 bp, Homo sapien
tcatacatctcggaaacgaccaaattaaaaaag

SEQ ID NO: 705714 - DNA, 33 bp, Homo sapien
tcatacatctcggaaatgaccaaattaaaaaag

SEQ ID NO: 705715 - DNA, 33 bp, Homo sapien
cataaagtgaaacccacattagcaagtacttgg

SEQ ID NO: 705716 - DNA, 33 bp, Homo sapien
cataaagtgaaacccatattagcaagtacttgg

SEQ ID NO: 705717 - DNA, 33 bp, Homo sapien
cttagccactctaatacatggatagtggtatgt

SEQ ID NO: 705718 - DNA, 33 bp, Homo sapien
cttagccactctaatatatggatagtggtatgt

SEQ ID NO: 705719 - DNA, 33 bp, Homo sapien
atttgctcgtgggacacaatgaacctctgcacc

SEQ ID NO: 705720 - DNA, 33 bp, Homo sapien
atttgctcgtgggacagaatgaacctctgcacc

SEQ ID NO: 705721 - DNA, 33 bp, Homo sapien
ccaagaaattgaacagaaaaggaagatacacat

SEQ ID NO: 705722 - DNA, 33 bp, Homo sapien
ccaagaaattgaacaggaaaggaagatacacat

SEQ ID NO: 705723 - DNA, 33 bp, Homo sapien
aattcttttcatcccggaaatctgaaactctgt

SEQ ID NO: 705724 - DNA, 33 bp, Homo sapien
aattcttttcatcccgtaaatctgaaactctgt

SEQ ID NO: 705725 - DNA, 33 bp, Homo sapien
tgctgagtattaaataactagtctagagatacc

SEQ ID NO: 705726 - DNA, 33 bp, Homo sapien
tgctgagtattaaatagctagtctagagatacc

SEQ ID NO: 705727 - DNA, 33 bp, Homo sapien
ttaaataattgattcactagccctttccagtga

SEQ ID NO: 705728 - DNA, 33 bp, Homo sapien
ttaaataattgattcagtagccctttccagtga

SEQ ID NO: 705729 - DNA, 33 bp, Homo sapien
actcatgaaatgctcaaataaattaaggaaagg

SEQ ID NO: 705730 - DNA, 33 bp, Homo sapien
actcatgaaatgctcagataaattaaggaaagg

SEQ ID NO: 705731 - DNA, 33 bp, Homo sapien
ttgggagaggcaaccaaatagactataacccat

SEQ ID NO: 705732 - DNA, 33 bp, Homo sapien
ttgggagaggcaaccacatagactataacccat

SEQ ID NO: 705733 - DNA, 33 bp, Homo sapien
atgttaagtctgcaaactgtatgtactaatttt

SEQ ID NO: 705734 - DNA, 33 bp, Homo sapien
atgttaagtctgcaaattgtatgtactaatttt

SEQ ID NO: 705735 - DNA, 33 bp, Homo sapien
tttggagtaaccaggacccccagtaagagattc

SEQ ID NO: 705736 - DNA, 33 bp, Homo sapien
tttggagtaaccaggatccccagtaagagattc

SEQ ID NO: 705737 - DNA, 33 bp, Homo sapien
tcaacaaagggaagccaatcagaataacagcag

SEQ ID NO: 705738 - DNA, 33 bp, Homo sapien
tcaacaaagggaagcccatcagaataacagcag

SEQ ID NO: 705739 - DNA, 33 bp, Homo sapien
tttcatccacactgataaatttggtagtaggta

SEQ ID NO: 705740 - DNA, 33 bp, Homo sapien
tttcatccacactgatcaatttggtagtaggta

SEQ ID NO: 705741 - DNA, 33 bp, Homo sapien
tagacttttcatataaaccaccaaagcaagaag

SEQ ID NO: 705742 - DNA, 33 bp, Homo sapien
tagacttttcatataagccaccaaagcaagaag

SEQ ID NO: 705743 - DNA, 33 bp, Homo sapien
gggcaagacataacaaagcatcagagttagact

SEQ ID NO: 705744 - DNA, 33 bp, Homo sapien
gggcaagacataacaaggcatcagagttagact

SEQ ID NO: 705745 - DNA, 33 bp, Homo sapien
tatggtgataggcaaccccttgtgtttttattt

SEQ ID NO: 705746 - DNA, 33 bp, Homo sapien
tatggtgataggcaactccttgtgtttttattt

SEQ ID NO: 705747 - DNA, 33 bp, Homo sapien
taaataatgggcagaaaacctaaatagacattt

SEQ ID NO: 705748 - DNA, 33 bp, Homo sapien
taaataatgggcagaagacctaaatagacattt

SEQ ID NO: 705749 - DNA, 33 bp, Homo sapien
caacagggtgaagagacaacctaccagatggga

SEQ ID NO: 705750 - DNA, 33 bp, Homo sapien
caacagggtgaagagataacctaccagatggga

SEQ ID NO: 705751 - DNA, 33 bp, Homo sapien
gattcttatgtgttaaacaatccttacattcaa

SEQ ID NO: 705752 - DNA, 33 bp, Homo sapien
gattcttatgtgttaagcaatccttacattcaa

SEQ ID NO: 705753 - DNA, 33 bp, Homo sapien
gataaaacagtacaaagtaagcccaaagttaat

SEQ ID NO: 705754 - DNA, 33 bp, Homo sapien
gataaaacagtacaaattaagcccaaagttaat

SEQ ID NO: 705755 - DNA, 33 bp, Homo sapien
tgttataaaaatgtgaaatgaattaatcaatac

SEQ ID NO: 705756 - DNA, 33 bp, Homo sapien
tgttataaaaatgtgacatgaattaatcaatac

SEQ ID NO: 705757 - DNA, 33 bp, Homo sapien
cctctataaacaattccgaaacttgttgagagg

SEQ ID NO: 705758 - DNA, 33 bp, Homo sapien
cctctataaacaattcggaaacttgttgagagg

SEQ ID NO: 705759 - DNA, 33 bp, Homo sapien
gggttggaaaaagttgaactgcattttcaattt

SEQ ID NO: 705760 - DNA, 33 bp, Homo sapien
gggttggaaaaagttggactgcattttcaattt

SEQ ID NO: 705761 - DNA, 33 bp, Homo sapien
accaaaaaacactgcaaatagccaaagtaatcc

SEQ ID NO: 705762 - DNA, 33 bp, Homo sapien
accaaaaaacactgcagatagccaaagtaatcc

SEQ ID NO: 705763 - DNA, 33 bp, Homo sapien
tggctagccatatggcaaagaatgaagctggac

SEQ ID NO: 705764 - DNA, 33 bp, Homo sapien
tggctagccatatggcgaagaatgaagctggac

SEQ ID NO: 705765 - DNA, 33 bp, Homo sapien
attgaattaggctgtaggtgaaagagttttata

SEQ ID NO: 705766 - DNA, 33 bp, Homo sapien
attgaattaggctgtatgtgaaagagttttata

SEQ ID NO: 705767 - DNA, 33 bp, Homo sapien
agcatcatgtttaaaaactgttcatataactca

SEQ ID NO: 705768 - DNA, 33 bp, Homo sapien
agcatcatgtttaaaagctgttcatataactca

SEQ ID NO: 705769 - DNA, 33 bp, Homo sapien
taaaaatgtacaaacaactctttgacaagtttc

SEQ ID NO: 705770 - DNA, 33 bp, Homo sapien
taaaaatgtacaaacacctctttgacaagtttc

SEQ ID NO: 705771 - DNA, 33 bp, Homo sapien
tagaatgtctaacccacaataggcatactagag

SEQ ID NO: 705772 - DNA, 33 bp, Homo sapien
tagaatgtctaacccataataggcatactagag

SEQ ID NO: 705773 - DNA, 33 bp, Homo sapien
tagttccccacagaataaggcattgtagaatga

SEQ ID NO: 705774 - DNA, 33 bp, Homo sapien
tagttccccacagaatgaggcattgtagaatga

SEQ ID NO: 705775 - DNA, 33 bp, Homo sapien
atgcctggccttcattcaatcacacagttttac

SEQ ID NO: 705776 - DNA, 33 bp, Homo sapien
atgcctggccttcattgaatcacacagttttac

SEQ ID NO: 705777 - DNA, 33 bp, Homo sapien
tacctatgcaacaaatcataagtactaagcatt

SEQ ID NO: 705778 - DNA, 33 bp, Homo sapien
tacctatgcaacaaattataagtactaagcatt

SEQ ID NO: 705779 - DNA, 33 bp, Homo sapien
aaactttgcttattcaacatcattccttgaagt

SEQ ID NO: 705780 - DNA, 33 bp, Homo sapien
aaactttgcttattcaccatcattccttgaagt

SEQ ID NO: 705781 - DNA, 33 bp, Homo sapien
ccattctggagtctagaaaggtcaaggcaccag

SEQ ID NO: 705782 - DNA, 33 bp, Homo sapien
ccattctggagtctaggaaggtcaaggcaccag

SEQ ID NO: 705783 - DNA, 33 bp, Homo sapien
atgagggcccacctaaactttacctggggcagc

SEQ ID NO: 705784 - DNA, 33 bp, Homo sapien
atgagggcccacctaagctttacctggggcagc

SEQ ID NO: 705785 - DNA, 33 bp, Homo sapien
tgaaatctaagtggagacaactctgctcccggg

SEQ ID NO: 705786 - DNA, 33 bp, Homo sapien
tgaaatctaagtggaggcaactctgctcccggg

SEQ ID NO: 705787 - DNA, 33 bp, Homo sapien
tagtgttaagacttacaacaatatgaataggag

SEQ ID NO: 705788 - DNA, 33 bp, Homo sapien
tagtgttaagacttacgacaatatgaataggag

SEQ ID NO: 705789 - DNA, 33 bp, Homo sapien
actttggacttcattaagtactcttctgaaaaa

SEQ ID NO: 705790 - DNA, 33 bp, Homo sapien
actttggacttcattatgtactcttctgaaaaa

SEQ ID NO: 705791 - DNA, 33 bp, Homo sapien
ttcatgttatctaaccagattctcaaggtaaaa

SEQ ID NO: 705792 - DNA, 33 bp, Homo sapien
ttcatgttatctaaccggattctcaaggtaaaa

SEQ ID NO: 705793 - DNA, 33 bp, Homo sapien
tttagtttcctttcaacaggcccgatagtctgc

SEQ ID NO: 705794 - DNA, 33 bp, Homo sapien
tttagtttcctttcaataggcccgatagtctgc

SEQ ID NO: 705795 - DNA, 33 bp, Homo sapien
atacgtgttatttaccagctctatcttttaaac

SEQ ID NO: 705796 - DNA, 33 bp, Homo sapien
atacgtgttatttaccggctctatcttttaaac

SEQ ID NO: 705797 - DNA, 33 bp, Homo sapien
tggacaaaagttttcacgcttattaaatctatc

SEQ ID NO: 705798 - DNA, 33 bp, Homo sapien
tggacaaaagttttcatgcttattaaatctatc

SEQ ID NO: 705799 - DNA, 33 bp, Homo sapien
acttgaggtgaatagaaggaagagtcagaggat

SEQ ID NO: 705800 - DNA, 33 bp, Homo sapien
acttgaggtgaatagagggaagagtcagaggat

SEQ ID NO: 705801 - DNA, 33 bp, Homo sapien
actcactgctctggaaagaaagaaacaagccta

SEQ ID NO: 705802 - DNA, 33 bp, Homo sapien
actcactgctctggaaggaaagaaacaagccta

SEQ ID NO: 705803 - DNA, 33 bp, Homo sapien
ggttgaggtactatgaactcacatttaggattt

SEQ ID NO: 705804 - DNA, 33 bp, Homo sapien
ggttgaggtactatgagctcacatttaggattt

SEQ ID NO: 705805 - DNA, 33 bp, Homo sapien
gcacatttacagatgccattattagagtaagtg

SEQ ID NO: 705806 - DNA, 33 bp, Homo sapien
gcacatttacagatgctattattagagtaagtg

SEQ ID NO: 705807 - DNA, 33 bp, Homo sapien
tttgcacagtagtataacgaataagggaaatca

SEQ ID NO: 705808 - DNA, 33 bp, Homo sapien
tttgcacagtagtatagcgaataagggaaatca

SEQ ID NO: 705809 - DNA, 33 bp, Homo sapien
aagggatacatgggaaacaactagcttttcact

SEQ ID NO: 705810 - DNA, 33 bp, Homo sapien
aagggatacatgggaagcaactagcttttcact

SEQ ID NO: 705811 - DNA, 33 bp, Homo sapien
atgactgtgatacaaacttatttaaaccatgca

SEQ ID NO: 705812 - DNA, 33 bp, Homo sapien
atgactgtgatacaaagttatttaaaccatgca

SEQ ID NO: 705813 - DNA, 33 bp, Homo sapien
gctgaaatcttgacaaaaaaattgagaagtgtc

SEQ ID NO: 705814 - DNA, 33 bp, Homo sapien
gctgaaatcttgacaagaaaattgagaagtgtc

SEQ ID NO: 705815 - DNA, 33 bp, Homo sapien
gaaatcaaacaactagacggcaaagctgaaatc

SEQ ID NO: 705816 - DNA, 33 bp, Homo sapien
gaaatcaaacaactaggcggcaaagctgaaatc

SEQ ID NO: 705817 - DNA, 33 bp, Homo sapien
aagagattccaatatacgcctctggtatgctca

SEQ ID NO: 705818 - DNA, 33 bp, Homo sapien
aagagattccaatatatgcctctggtatgctca

SEQ ID NO: 705819 - DNA, 33 bp, Homo sapien
acatcaaaaagatcaaagagaaacaatgtagta

SEQ ID NO: 705820 - DNA, 33 bp, Homo sapien
acatcaaaaagatcaaggagaaacaatgtagta

SEQ ID NO: 705821 - DNA, 33 bp, Homo sapien
tgggtaaccagttgaacgactcgctgtgtcttc

SEQ ID NO: 705822 - DNA, 33 bp, Homo sapien
tgggtaaccagttgaatgactcgctgtgtcttc

SEQ ID NO: 705823 - DNA, 33 bp, Homo sapien
gtgactagctgtataacagacatcacagtgccc

SEQ ID NO: 705824 - DNA, 33 bp, Homo sapien
gtgactagctgtataatagacatcacagtgccc

SEQ ID NO: 705825 - DNA, 33 bp, Homo sapien
taaggtccatcagaacaagtctcaagattatat

SEQ ID NO: 705826 - DNA, 33 bp, Homo sapien
taaggtccatcagaaccagtctcaagattatat

SEQ ID NO: 705827 - DNA, 33 bp, Homo sapien
atctcaggaagttataaaaaagatgtcaccttt

SEQ ID NO: 705828 - DNA, 33 bp, Homo sapien
atctcaggaagttatagaaaagatgtcaccttt

SEQ ID NO: 705829 - DNA, 33 bp, Homo sapien
ggagaactgggaggaaaatgatctcaggaagtt

SEQ ID NO: 705830 - DNA, 33 bp, Homo sapien
ggagaactgggaggaagatgatctcaggaagtt

SEQ ID NO: 705831 - DNA, 33 bp, Homo sapien
tttaaaacatctgcaccgtaatgctgaaaaaaa

SEQ ID NO: 705832 - DNA, 33 bp, Homo sapien
tttaaaacatctgcactgtaatgctgaaaaaaa

SEQ ID NO: 705833 - DNA, 33 bp, Homo sapien
ttttgtacttgatcagccaagccctcataatca

SEQ ID NO: 705834 - DNA, 33 bp, Homo sapien
ttttgtacttgatcaggcaagccctcataatca

SEQ ID NO: 705835 - DNA, 33 bp, Homo sapien
taagccaggacagataaagattgatatgtagca

SEQ ID NO: 705836 - DNA, 33 bp, Homo sapien
taagccaggacagatagagattgatatgtagca

SEQ ID NO: 705837 - DNA, 33 bp, Homo sapien
tctttttagaattgttaaaatacctgagaggtc

SEQ ID NO: 705838 - DNA, 33 bp, Homo sapien
tctttttagaattgtttaaatacctgagaggtc

SEQ ID NO: 705839 - DNA, 33 bp, Homo sapien
caaaatggtcccattccattgatggttgttcct

SEQ ID NO: 705840 - DNA, 33 bp, Homo sapien
caaaatggtcccattctattgatggttgttcct

SEQ ID NO: 705841 - DNA, 33 bp, Homo sapien
tttctactgctaagatcaaaatagcattcttca

SEQ ID NO: 705842 - DNA, 33 bp, Homo sapien
tttctactgctaagattaaaatagcattcttca

SEQ ID NO: 705843 - DNA, 33 bp, Homo sapien
aagtagtggatgataaacacaaagttgatttga

SEQ ID NO: 705844 - DNA, 33 bp, Homo sapien
aagtagtggatgataatcacaaagttgatttga

SEQ ID NO: 705845 - DNA, 33 bp, Homo sapien
ttcaagtttcaagaacactacatggtctgctca

SEQ ID NO: 705846 - DNA, 33 bp, Homo sapien
ttcaagtttcaagaacgctacatggtctgctca

SEQ ID NO: 705847 - DNA, 33 bp, Homo sapien
cagaccatatcctaaaacaatgttataatcctt

SEQ ID NO: 705848 - DNA, 33 bp, Homo sapien
cagaccatatcctaaagcaatgttataatcctt

SEQ ID NO: 705849 - DNA, 33 bp, Homo sapien
agtctctaaatgagcaggtacttgaattataat

SEQ ID NO: 705850 - DNA, 33 bp, Homo sapien
agtctctaaatgagcatgtacttgaattataat

SEQ ID NO: 705851 - DNA, 33 bp, Homo sapien
tcaaattgtttgcatacgttgtaattaaaatct

SEQ ID NO: 705852 - DNA, 33 bp, Homo sapien
tcaaattgtttgcatatgttgtaattaaaatct

SEQ ID NO: 705853 - DNA, 33 bp, Homo sapien
ggagccgcattcctgaaaaaagttaagctagta

SEQ ID NO: 705854 - DNA, 33 bp, Homo sapien
ggagccgcattcctgagaaaagttaagctagta

SEQ ID NO: 705855 - DNA, 33 bp, Homo sapien
attcctatttcactagactagattttacctatt

SEQ ID NO: 705856 - DNA, 33 bp, Homo sapien
attcctatttcactagtctagattttacctatt

SEQ ID NO: 705857 - DNA, 33 bp, Homo sapien
gtgcaagaaaggaatacggtcactttgatgaaa

SEQ ID NO: 705858 - DNA, 33 bp, Homo sapien
gtgcaagaaaggaatatggtcactttgatgaaa

SEQ ID NO: 705859 - DNA, 33 bp, Homo sapien
caaggaaattgagatacatgacctactgctaag

SEQ ID NO: 705860 - DNA, 33 bp, Homo sapien
caaggaaattgagatagatgacctactgctaag

SEQ ID NO: 705861 - DNA, 33 bp, Homo sapien
gatataagagaaaacacaaaggagcccacaatg

SEQ ID NO: 705862 - DNA, 33 bp, Homo sapien
gatataagagaaaacagaaaggagcccacaatg

SEQ ID NO: 705863 - DNA, 33 bp, Homo sapien
agaatctctggtctccaatctctagatgtgtaa

SEQ ID NO: 705864 - DNA, 33 bp, Homo sapien
agaatctctggtctccgatctctagatgtgtaa

SEQ ID NO: 705865 - DNA, 33 bp, Homo sapien
catgaataactcttgagaagtgacttcaactag

SEQ ID NO: 705866 - DNA, 33 bp, Homo sapien
catgaataactcttgataagtgacttcaactag

SEQ ID NO: 705867 - DNA, 33 bp, Homo sapien
ggcagccattactaaaaatgatagaatggaggg

SEQ ID NO: 705868 - DNA, 33 bp, Homo sapien
ggcagccattactaaagatgatagaatggaggg

SEQ ID NO: 705869 - DNA, 33 bp, Homo sapien
tttaaaatcaccctgaagtgttaagactgcata

SEQ ID NO: 705870 - DNA, 33 bp, Homo sapien
tttaaaatcaccctgacgtgttaagactgcata

SEQ ID NO: 705871 - DNA, 33 bp, Homo sapien
caaatcaagaagacaaatagaatgatgatggcc

SEQ ID NO: 705872 - DNA, 33 bp, Homo sapien
caaatcaagaagacaagtagaatgatgatggcc

SEQ ID NO: 705873 - DNA, 33 bp, Homo sapien
acaaaaggaaagaaggcataatgcgaagagaaa

SEQ ID NO: 705874 - DNA, 33 bp, Homo sapien
acaaaaggaaagaaggtataatgcgaagagaaa

SEQ ID NO: 705875 - DNA, 33 bp, Homo sapien
caataaagtcttcctacatccatgttaacttct

SEQ ID NO: 705876 - DNA, 33 bp, Homo sapien
caataaagtcttcctatatccatgttaacttct

SEQ ID NO: 705877 - DNA, 33 bp, Homo sapien
tatgaagttacaaacactcttggctgtagacac

SEQ ID NO: 705878 - DNA, 33 bp, Homo sapien
tatgaagttacaaacattcttggctgtagacac

SEQ ID NO: 705879 - DNA, 33 bp, Homo sapien
gcaatataatttgttcagaaaaatgtcataagg

SEQ ID NO: 705880 - DNA, 33 bp, Homo sapien
gcaatataatttgttctgaaaaatgtcataagg

SEQ ID NO: 705881 - DNA, 33 bp, Homo sapien
agggcatcaatttgtaaaaaggatcagagctaa

SEQ ID NO: 705882 - DNA, 33 bp, Homo sapien
agggcatcaatttgtataaaggatcagagctaa

SEQ ID NO: 705883 - DNA, 33 bp, Homo sapien
aacccagagagtctgccaaccggctcctagaac

SEQ ID NO: 705884 - DNA, 33 bp, Homo sapien
aacccagagagtctgctaaccggctcctagaac

SEQ ID NO: 705885 - DNA, 33 bp, Homo sapien
gtgttgccaagtgccaagactcatttctggccc

SEQ ID NO: 705886 - DNA, 33 bp, Homo sapien
gtgttgccaagtgccaggactcatttctggccc

SEQ ID NO: 705887 - DNA, 33 bp, Homo sapien
tgaattacaacaaaaaccttttctgcatttatg

SEQ ID NO: 705888 - DNA, 33 bp, Homo sapien
tgaattacaacaaaaatcttttctgcatttatg

SEQ ID NO: 705889 - DNA, 33 bp, Homo sapien
gtatcagaatttgaaaacgtagatcaatttgaa

SEQ ID NO: 705890 - DNA, 33 bp, Homo sapien
gtatcagaatttgaaaccgtagatcaatttgaa

SEQ ID NO: 705891 - DNA, 33 bp, Homo sapien
acaggtcctactatgacgttagattcattcata

SEQ ID NO: 705892 - DNA, 33 bp, Homo sapien
acaggtcctactatgatgttagattcattcata

SEQ ID NO: 705893 - DNA, 33 bp, Homo sapien
cttgtcatgcacaacactcttgtcatgcacaac

SEQ ID NO: 705894 - DNA, 33 bp, Homo sapien
cttgtcatgcacaacattcttgtcatgcacaac

SEQ ID NO: 705895 - DNA, 33 bp, Homo sapien
tccaatcataagttgacactgggggaagtagaa

SEQ ID NO: 705896 - DNA, 33 bp, Homo sapien
tccaatcataagttgatactgggggaagtagaa

SEQ ID NO: 705897 - DNA, 33 bp, Homo sapien
ttccccatgtgaggtaaaactagagtgggactc

SEQ ID NO: 705898 - DNA, 33 bp, Homo sapien
ttccccatgtgaggtataactagagtgggactc

SEQ ID NO: 705899 - DNA, 33 bp, Homo sapien
tattgtagtattgtagacagccttaacagaaag

SEQ ID NO: 705900 - DNA, 33 bp, Homo sapien
tattgtagtattgtagtcagccttaacagaaag

SEQ ID NO: 705901 - DNA, 33 bp, Homo sapien
ttattttcacaaccataaagaagtagagcagta

SEQ ID NO: 705902 - DNA, 33 bp, Homo sapien
ttattttcacaaccatgaagaagtagagcagta

SEQ ID NO: 705903 - DNA, 33 bp, Homo sapien
tgcatctttttagagcccatgacagagcagagc

SEQ ID NO: 705904 - DNA, 33 bp, Homo sapien
tgcatctttttagagcgcatgacagagcagagc

SEQ ID NO: 705905 - DNA, 33 bp, Homo sapien
cctgagttagaatggaagcaagaaagagaatga

SEQ ID NO: 705906 - DNA, 33 bp, Homo sapien
cctgagttagaatggaggcaagaaagagaatga

SEQ ID NO: 705907 - DNA, 33 bp, Homo sapien
ttaatatgtttcttccagctttctagactcaga

SEQ ID NO: 705908 - DNA, 33 bp, Homo sapien
ttaatatgtttcttccggctttctagactcaga

SEQ ID NO: 705909 - DNA, 33 bp, Homo sapien
gacataagaaagataacggaactgctttgccag

SEQ ID NO: 705910 - DNA, 33 bp, Homo sapien
gacataagaaagataatggaactgctttgccag

SEQ ID NO: 705911 - DNA, 33 bp, Homo sapien
aggctacctagaagcaggacatgtgattggttt

SEQ ID NO: 705912 - DNA, 33 bp, Homo sapien
aggctacctagaagcatgacatgtgattggttt

SEQ ID NO: 705913 - DNA, 33 bp, Homo sapien
tggcggcaaaagcttcaataagagtcaaagtcc

SEQ ID NO: 705914 - DNA, 33 bp, Homo sapien
tggcggcaaaagcttcgataagagtcaaagtcc

SEQ ID NO: 705915 - DNA, 33 bp, Homo sapien
ggtcccagaacaagtgaattatctctgcttttc

SEQ ID NO: 705916 - DNA, 33 bp, Homo sapien
ggtcccagaacaagtggattatctctgcttttc

SEQ ID NO: 705917 - DNA, 33 bp, Homo sapien
agcagatgatgagggaaagactctgtgaaaagc

SEQ ID NO: 705918 - DNA, 33 bp, Homo sapien
agcagatgatgagggacagactctgtgaaaagc

SEQ ID NO: 705919 - DNA, 33 bp, Homo sapien
acttttgttctttgaccctcaatctttttattc

SEQ ID NO: 705920 - DNA, 33 bp, Homo sapien
acttttgttctttgactctcaatctttttattc

SEQ ID NO: 705921 - DNA, 33 bp, Homo sapien
tccacaacagagatacaggtcggatatcgtttt

SEQ ID NO: 705922 - DNA, 33 bp, Homo sapien
tccacaacagagatacgggtcggatatcgtttt

SEQ ID NO: 705923 - DNA, 33 bp, Homo sapien
tgagaaaggcaatgcaagcaatgtagaaaatgc

SEQ ID NO: 705924 - DNA, 33 bp, Homo sapien
tgagaaaggcaatgcaggcaatgtagaaaatgc

SEQ ID NO: 705925 - DNA, 33 bp, Homo sapien
tgtgagttggttcttgaaatatatgaagaggaa

SEQ ID NO: 705926 - DNA, 33 bp, Homo sapien
tgtgagttggttcttgtaatatatgaagaggaa

SEQ ID NO: 705927 - DNA, 33 bp, Homo sapien
agggaattggctcatacgattacaaaggctgag

SEQ ID NO: 705928 - DNA, 33 bp, Homo sapien
agggaattggctcatatgattacaaaggctgag

SEQ ID NO: 705929 - DNA, 33 bp, Homo sapien
ctgcccctggacttgacgtatgaaaaagcaaag

SEQ ID NO: 705930 - DNA, 33 bp, Homo sapien
ctgcccctggacttgatgtatgaaaaagcaaag

SEQ ID NO: 705931 - DNA, 33 bp, Homo sapien
ctgtctcagctcaaaagaatcacgaacctcaaa

SEQ ID NO: 705932 - DNA, 33 bp, Homo sapien
ctgtctcagctcaaaataatcacgaacctcaaa

SEQ ID NO: 705933 - DNA, 33 bp, Homo sapien
tttcctgactagcatacgaagccatttcttatg

SEQ ID NO: 705934 - DNA, 33 bp, Homo sapien
tttcctgactagcatatgaagccatttcttatg

SEQ ID NO: 705935 - DNA, 33 bp, Homo sapien
tgttggttgaaatgtaaattggtacaaccctta

SEQ ID NO: 705936 - DNA, 33 bp, Homo sapien
tgttggttgaaatgtagattggtacaaccctta

SEQ ID NO: 705937 - DNA, 33 bp, Homo sapien
cttctttggttctgcaaaatatctgtgggattt

SEQ ID NO: 705938 - DNA, 33 bp, Homo sapien
cttctttggttctgcataatatctgtgggattt

SEQ ID NO: 705939 - DNA, 33 bp, Homo sapien
tctctgtttgtaaaataagtaagtgctcattgt

SEQ ID NO: 705940 - DNA, 33 bp, Homo sapien
tctctgtttgtaaaatcagtaagtgctcattgt

SEQ ID NO: 705941 - DNA, 33 bp, Homo sapien
ttaatggagaatgcaacagtagaacaatactca

SEQ ID NO: 705942 - DNA, 33 bp, Homo sapien
ttaatggagaatgcaagagtagaacaatactca

SEQ ID NO: 705943 - DNA, 33 bp, Homo sapien
gattaattaacaacgtcaaggtcaaattcacac

SEQ ID NO: 705944 - DNA, 33 bp, Homo sapien
gattaattaacaacgtgaaggtcaaattcacac

SEQ ID NO: 705945 - DNA, 33 bp, Homo sapien
gaactggaagaccaccaataatcaaacaaatag

SEQ ID NO: 705946 - DNA, 33 bp, Homo sapien
gaactggaagaccacccataatcaaacaaatag

SEQ ID NO: 705947 - DNA, 33 bp, Homo sapien
agtcaagattgggtaaactatgctacagaaagt

SEQ ID NO: 705948 - DNA, 33 bp, Homo sapien
agtcaagattgggtaagctatgctacagaaagt

SEQ ID NO: 705949 - DNA, 33 bp, Homo sapien
gtgtcatgggaccatacaggaaggggaattaaa

SEQ ID NO: 705950 - DNA, 33 bp, Homo sapien
gtgtcatgggaccatataggaaggggaattaaa

SEQ ID NO: 705951 - DNA, 33 bp, Homo sapien
agaagacaaaaaaagcaatgtaatggtgttaag

SEQ ID NO: 705952 - DNA, 33 bp, Homo sapien
agaagacaaaaaaagcgatgtaatggtgttaag

SEQ ID NO: 705953 - DNA, 33 bp, Homo sapien
agaattagctgatatacctcccatttgtttatt

SEQ ID NO: 705954 - DNA, 33 bp, Homo sapien
agaattagctgatatagctcccatttgtttatt

SEQ ID NO: 705955 - DNA, 33 bp, Homo sapien
aagttgaagacacagacggaataaaatagtggt

SEQ ID NO: 705956 - DNA, 33 bp, Homo sapien
aagttgaagacacagatggaataaaatagtggt

SEQ ID NO: 705957 - DNA, 33 bp, Homo sapien
cagtatcctacagctgcaacatagtctcaggag

SEQ ID NO: 705958 - DNA, 33 bp, Homo sapien
cagtatcctacagctggaacatagtctcaggag

SEQ ID NO: 705959 - DNA, 33 bp, Homo sapien
tctttgaatgagaaaaaattgtaactgtagtaa

SEQ ID NO: 705960 - DNA, 33 bp, Homo sapien
tctttgaatgagaaaagattgtaactgtagtaa

SEQ ID NO: 705961 - DNA, 33 bp, Homo sapien
aatataatgtaagtaactgatggtggctttggt

SEQ ID NO: 705962 - DNA, 33 bp, Homo sapien
aatataatgtaagtaattgatggtggctttggt

SEQ ID NO: 705963 - DNA, 33 bp, Homo sapien
ggtagaagcaaattgacgatggtgaaatgtggc

SEQ ID NO: 705964 - DNA, 33 bp, Homo sapien
ggtagaagcaaattgatgatggtgaaatgtggc

SEQ ID NO: 705965 - DNA, 33 bp, Homo sapien
aataaaatttcaacagaaaaactataggcagaa

SEQ ID NO: 705966 - DNA, 33 bp, Homo sapien
aataaaatttcaacaggaaaactataggcagaa

SEQ ID NO: 705967 - DNA, 33 bp, Homo sapien
cacagtaataggctgacatatgtttgcattgtt

SEQ ID NO: 705968 - DNA, 33 bp, Homo sapien
cacagtaataggctgatatatgtttgcattgtt

SEQ ID NO: 705969 - DNA, 33 bp, Homo sapien
ttgatagtaatttgtaacacagtgctgtggctg

SEQ ID NO: 705970 - DNA, 33 bp, Homo sapien
ttgatagtaatttgtatcacagtgctgtggctg

SEQ ID NO: 705971 - DNA, 33 bp, Homo sapien
agacacacttctcctagctttgaggataaagac

SEQ ID NO: 705972 - DNA, 33 bp, Homo sapien
agacacacttctcctatctttgaggataaagac

SEQ ID NO: 705973 - DNA, 33 bp, Homo sapien
gaagtgtgtctctctaaattttttgtcacctac

SEQ ID NO: 705974 - DNA, 33 bp, Homo sapien
gaagtgtgtctctctacattttttgtcacctac

SEQ ID NO: 705975 - DNA, 33 bp, Homo sapien
tcctcatgaatgtgtacgaaacttgtgaatatc

SEQ ID NO: 705976 - DNA, 33 bp, Homo sapien
tcctcatgaatgtgtatgaaacttgtgaatatc

SEQ ID NO: 705977 - DNA, 33 bp, Homo sapien
gacaaaattttattgcactagattaactcaaat

SEQ ID NO: 705978 - DNA, 33 bp, Homo sapien
gacaaaattttattgcgctagattaactcaaat

SEQ ID NO: 705979 - DNA, 33 bp, Homo sapien
atgatatgtaataaaaggtatgtggcttggtgt

SEQ ID NO: 705980 - DNA, 33 bp, Homo sapien
atgatatgtaataaaatgtatgtggcttggtgt

SEQ ID NO: 705981 - DNA, 33 bp, Homo sapien
ttaaagaatatggaagactgtactaggattttg

SEQ ID NO: 705982 - DNA, 33 bp, Homo sapien
ttaaagaatatggaaggctgtactaggattttg

SEQ ID NO: 705983 - DNA, 33 bp, Homo sapien
taaagcagctggataaagatttggtatttttaa

SEQ ID NO: 705984 - DNA, 33 bp, Homo sapien
taaagcagctggataaggatttggtatttttaa

SEQ ID NO: 705985 - DNA, 33 bp, Homo sapien
aaaatacaccctgttccagacatgcctttggtg

SEQ ID NO: 705986 - DNA, 33 bp, Homo sapien
aaaatacaccctgttctagacatgcctttggtg

SEQ ID NO: 705987 - DNA, 33 bp, Homo sapien
gtgaattctccgtgtccacttttcaggatagca

SEQ ID NO: 705988 - DNA, 33 bp, Homo sapien
gtgaattctccgtgtctacttttcaggatagca

SEQ ID NO: 705989 - DNA, 33 bp, Homo sapien
aacagcaatgataagaaagctaaagtggctata

SEQ ID NO: 705990 - DNA, 33 bp, Homo sapien
aacagcaatgataagagagctaaagtggctata

SEQ ID NO: 705991 - DNA, 33 bp, Homo sapien
agatgtcctttaggcactccagtttctacaggc

SEQ ID NO: 705992 - DNA, 33 bp, Homo sapien
agatgtcctttaggcattccagtttctacaggc

SEQ ID NO: 705993 - DNA, 33 bp, Homo sapien
tctgtaaacaatgacaacctaaatcttacttcg

SEQ ID NO: 705994 - DNA, 33 bp, Homo sapien
tctgtaaacaatgacaccctaaatcttacttcg

SEQ ID NO: 705995 - DNA, 33 bp, Homo sapien
tataagtgcctaactacgagttttctgaccctt

SEQ ID NO: 705996 - DNA, 33 bp, Homo sapien
tataagtgcctaactatgagttttctgaccctt

SEQ ID NO: 705997 - DNA, 33 bp, Homo sapien
gaaaatcttataagagcagcagtaatggcagag

SEQ ID NO: 705998 - DNA, 33 bp, Homo sapien
gaaaatcttataagagtagcagtaatggcagag

SEQ ID NO: 705999 - DNA, 33 bp, Homo sapien
gttaggaagagccagtcaagatgtgctgtggca

SEQ ID NO: 706000 - DNA, 33 bp, Homo sapien
gttaggaagagccagtgaagatgtgctgtggca

SEQ ID NO: 706001 - DNA, 33 bp, Homo sapien
tttcattggaaactgcaaaagccagatcacatt

SEQ ID NO: 706002 - DNA, 33 bp, Homo sapien
tttcattggaaactgcgaaagccagatcacatt

SEQ ID NO: 706003 - DNA, 33 bp, Homo sapien
caaggtggcacaggtaagggaatcaggaactgg

SEQ ID NO: 706004 - DNA, 33 bp, Homo sapien
caaggtggcacaggtaggggaatcaggaactgg

SEQ ID NO: 706005 - DNA, 33 bp, Homo sapien
aacaagaagtataacaatcattctgctacacct

SEQ ID NO: 706006 - DNA, 33 bp, Homo sapien
aacaagaagtataacattcattctgctacacct

SEQ ID NO: 706007 - DNA, 33 bp, Homo sapien
cagagttgggtacaaaattctaaatctagagtc

SEQ ID NO: 706008 - DNA, 33 bp, Homo sapien
cagagttgggtacaaagttctaaatctagagtc

SEQ ID NO: 706009 - DNA, 33 bp, Homo sapien
atgaaacaatgcttcacatcactaattatcatg

SEQ ID NO: 706010 - DNA, 33 bp, Homo sapien
atgaaacaatgcttcatatcactaattatcatg

SEQ ID NO: 706011 - DNA, 33 bp, Homo sapien
aggaaattgagaaaagcctgaagaaaagtctga

SEQ ID NO: 706012 - DNA, 33 bp, Homo sapien
aggaaattgagaaaagtctgaagaaaagtctga

SEQ ID NO: 706013 - DNA, 33 bp, Homo sapien
attgtaaattcagtaactgaacaagatttcagg

SEQ ID NO: 706014 - DNA, 33 bp, Homo sapien
attgtaaattcagtaattgaacaagatttcagg

SEQ ID NO: 706015 - DNA, 33 bp, Homo sapien
actattgtatgagaataagagatggcttctagg

SEQ ID NO: 706016 - DNA, 33 bp, Homo sapien
actattgtatgagaattagagatggcttctagg

SEQ ID NO: 706017 - DNA, 33 bp, Homo sapien
ctctcacacttaaagacacaaggtaggtgactc

SEQ ID NO: 706018 - DNA, 33 bp, Homo sapien
ctctcacacttaaagatacaaggtaggtgactc

SEQ ID NO: 706019 - DNA, 33 bp, Homo sapien
atgtagtgtcaagagaatacagtggataacaaa

SEQ ID NO: 706020 - DNA, 33 bp, Homo sapien
atgtagtgtcaagagagtacagtggataacaaa

SEQ ID NO: 706021 - DNA, 33 bp, Homo sapien
tcttcctaaatcacaactacgattatctctctc

SEQ ID NO: 706022 - DNA, 33 bp, Homo sapien
tcttcctaaatcacaagtacgattatctctctc

SEQ ID NO: 706023 - DNA, 33 bp, Homo sapien
ggcatcagggacaaagaagattagagaaaagac

SEQ ID NO: 706024 - DNA, 33 bp, Homo sapien
ggcatcagggacaaaggagattagagaaaagac

SEQ ID NO: 706025 - DNA, 33 bp, Homo sapien
tgccttctagacttaaagttagctccttctgcc

SEQ ID NO: 706026 - DNA, 33 bp, Homo sapien
tgccttctagacttaaggttagctccttctgcc

SEQ ID NO: 706027 - DNA, 33 bp, Homo sapien
atttttctccttcacaatattttactctaagat

SEQ ID NO: 706028 - DNA, 33 bp, Homo sapien
atttttctccttcacagtattttactctaagat

SEQ ID NO: 706029 - DNA, 33 bp, Homo sapien
catatagggaactttcaatcatattagctctat

SEQ ID NO: 706030 - DNA, 33 bp, Homo sapien
catatagggaactttcgatcatattagctctat

SEQ ID NO: 706031 - DNA, 33 bp, Homo sapien
gaaaccaaactggctacctactgacataaatgt

SEQ ID NO: 706032 - DNA, 33 bp, Homo sapien
gaaaccaaactggctatctactgacataaatgt

SEQ ID NO: 706033 - DNA, 33 bp, Homo sapien
actataactctctcagacattttgtgttcccat

SEQ ID NO: 706034 - DNA, 33 bp, Homo sapien
actataactctctcaggcattttgtgttcccat

SEQ ID NO: 706035 - DNA, 33 bp, Homo sapien
tttgctggtactgtcagatctactttttccaaa

SEQ ID NO: 706036 - DNA, 33 bp, Homo sapien
tttgctggtactgtcatatctactttttccaaa

SEQ ID NO: 706037 - DNA, 33 bp, Homo sapien
ctttgtcaccaaataacgtggaacacagtaaga

SEQ ID NO: 706038 - DNA, 33 bp, Homo sapien
ctttgtcaccaaataatgtggaacacagtaaga

SEQ ID NO: 706039 - DNA, 33 bp, Homo sapien
taaaaagcaatattcaatatctgaagaggaaaa

SEQ ID NO: 706040 - DNA, 33 bp, Homo sapien
taaaaagcaatattcagtatctgaagaggaaaa

SEQ ID NO: 706041 - DNA, 33 bp, Homo sapien
aaaaacagaactggtaaggatttagaatgatga

SEQ ID NO: 706042 - DNA, 33 bp, Homo sapien
aaaaacagaactggtatggatttagaatgatga

SEQ ID NO: 706043 - DNA, 33 bp, Homo sapien
tgggtagtggaaaggaactcaataaggaaaaaa

SEQ ID NO: 706044 - DNA, 33 bp, Homo sapien
tgggtagtggaaaggagctcaataaggaaaaaa

SEQ ID NO: 706045 - DNA, 33 bp, Homo sapien
atgaaattatgcacataaacacttcgctgtgca

SEQ ID NO: 706046 - DNA, 33 bp, Homo sapien
atgaaattatgcacatcaacacttcgctgtgca

SEQ ID NO: 706047 - DNA, 33 bp, Homo sapien
agaagtattggtgaaacagactgaactgcctat

SEQ ID NO: 706048 - DNA, 33 bp, Homo sapien
agaagtattggtgaaagagactgaactgcctat

SEQ ID NO: 706049 - DNA, 33 bp, Homo sapien
atgagaaaaatgttcacgagtacagattttgtt

SEQ ID NO: 706050 - DNA, 33 bp, Homo sapien
atgagaaaaatgttcatgagtacagattttgtt

SEQ ID NO: 706051 - DNA, 33 bp, Homo sapien
atccacagagcaaagacaagaacttcagtaaaa

SEQ ID NO: 706052 - DNA, 33 bp, Homo sapien
atccacagagcaaagataagaacttcagtaaaa

SEQ ID NO: 706053 - DNA, 33 bp, Homo sapien
tcattgttctaaaggacagaaagtccaggagca

SEQ ID NO: 706054 - DNA, 33 bp, Homo sapien
tcattgttctaaaggatagaaagtccaggagca

SEQ ID NO: 706055 - DNA, 33 bp, Homo sapien
ttagaaatttcccatacgctgtggtgctgtggt

SEQ ID NO: 706056 - DNA, 33 bp, Homo sapien
ttagaaatttcccatatgctgtggtgctgtggt

SEQ ID NO: 706057 - DNA, 33 bp, Homo sapien
catctacttcaattgaactgataatgaggttta

SEQ ID NO: 706058 - DNA, 33 bp, Homo sapien
catctacttcaattgatctgataatgaggttta

SEQ ID NO: 706059 - DNA, 33 bp, Homo sapien
ggaatttccaggataacatcagttacatgaaag

SEQ ID NO: 706060 - DNA, 33 bp, Homo sapien
ggaatttccaggataatatcagttacatgaaag

SEQ ID NO: 706061 - DNA, 33 bp, Homo sapien
acaggatctatcactcacaatagctaataatac

SEQ ID NO: 706062 - DNA, 33 bp, Homo sapien
acaggatctatcactcgcaatagctaataatac

SEQ ID NO: 706063 - DNA, 33 bp, Homo sapien
atgaagaaatgcattcacatgaaataagaagac

SEQ ID NO: 706064 - DNA, 33 bp, Homo sapien
atgaagaaatgcattcgcatgaaataagaagac

SEQ ID NO: 706065 - DNA, 33 bp, Homo sapien
atttcaaagaccccaagtgaatatttatatatc

SEQ ID NO: 706066 - DNA, 33 bp, Homo sapien
atttcaaagaccccaattgaatatttatatatc

SEQ ID NO: 706067 - DNA, 33 bp, Homo sapien
caacaaccataagccactgacaaatcaagaaca

SEQ ID NO: 706068 - DNA, 33 bp, Homo sapien
caacaaccataagccattgacaaatcaagaaca

SEQ ID NO: 706069 - DNA, 33 bp, Homo sapien
ttgtggtaagtgctacagaagacaagtccagga

SEQ ID NO: 706070 - DNA, 33 bp, Homo sapien
ttgtggtaagtgctacggaagacaagtccagga

SEQ ID NO: 706071 - DNA, 33 bp, Homo sapien
attgacatcatattacaagcccacctttgaagg

SEQ ID NO: 706072 - DNA, 33 bp, Homo sapien
attgacatcatattacgagcccacctttgaagg

SEQ ID NO: 706073 - DNA, 33 bp, Homo sapien
tccctcgggtcctgccaaggatttctgaatggc

SEQ ID NO: 706074 - DNA, 33 bp, Homo sapien
tccctcgggtcctgccgaggatttctgaatggc

SEQ ID NO: 706075 - DNA, 33 bp, Homo sapien
tctaagtaaaagtatgcatgtggaagctcttaa

SEQ ID NO: 706076 - DNA, 33 bp, Homo sapien
tctaagtaaaagtatgtatgtggaagctcttaa

SEQ ID NO: 706077 - DNA, 33 bp, Homo sapien
cctcattcggtcatcaacctactgcagtcgtct

SEQ ID NO: 706078 - DNA, 33 bp, Homo sapien
cctcattcggtcatcatcctactgcagtcgtct

SEQ ID NO: 706079 - DNA, 33 bp, Homo sapien
gtttgtctagtagagcaatgagtagatgacact

SEQ ID NO: 706080 - DNA, 33 bp, Homo sapien
gtttgtctagtagagcgatgagtagatgacact

SEQ ID NO: 706081 - DNA, 33 bp, Homo sapien
gatttgataaaggtaacgaaggtgtttgtgata

SEQ ID NO: 706082 - DNA, 33 bp, Homo sapien
gatttgataaaggtaatgaaggtgtttgtgata

SEQ ID NO: 706083 - DNA, 33 bp, Homo sapien
ttaaaagacataagaaggaaggaagccattggt

SEQ ID NO: 706084 - DNA, 33 bp, Homo sapien
ttaaaagacataagaatgaaggaagccattggt

SEQ ID NO: 706085 - DNA, 33 bp, Homo sapien
gcaatgtggaagataacgtccaactggttttaa

SEQ ID NO: 706086 - DNA, 33 bp, Homo sapien
gcaatgtggaagataatgtccaactggttttaa

SEQ ID NO: 706087 - DNA, 33 bp, Homo sapien
acatcaatgttacgaaattccattattattatt

SEQ ID NO: 706088 - DNA, 33 bp, Homo sapien
acatcaatgttacgaagttccattattattatt

SEQ ID NO: 706089 - DNA, 33 bp, Homo sapien
ccctgcctacactaaccgtgagctatttcaaat

SEQ ID NO: 706090 - DNA, 33 bp, Homo sapien
ccctgcctacactaactgtgagctatttcaaat

SEQ ID NO: 706091 - DNA, 33 bp, Homo sapien
ccattcagagctagcaagcaagatctcttgtga

SEQ ID NO: 706092 - DNA, 33 bp, Homo sapien
ccattcagagctagcaggcaagatctcttgtga

SEQ ID NO: 706093 - DNA, 33 bp, Homo sapien
caacggtaatcacttcactcatatatatcacaa

SEQ ID NO: 706094 - DNA, 33 bp, Homo sapien
caacggtaatcacttcgctcatatatatcacaa

SEQ ID NO: 706095 - DNA, 33 bp, Homo sapien
cctagcatttttcagaagtcaatttagatgtta

SEQ ID NO: 706096 - DNA, 33 bp, Homo sapien
cctagcatttttcagaggtcaatttagatgtta

SEQ ID NO: 706097 - DNA, 33 bp, Homo sapien
ctcaacttccttaaccactgagacaacttattt

SEQ ID NO: 706098 - DNA, 33 bp, Homo sapien
ctcaacttccttaaccgctgagacaacttattt

SEQ ID NO: 706099 - DNA, 33 bp, Homo sapien
taataaggaaccataacggcataggcagtaatc

SEQ ID NO: 706100 - DNA, 33 bp, Homo sapien
taataaggaaccataatggcataggcagtaatc

SEQ ID NO: 706101 - DNA, 33 bp, Homo sapien
ttcatcgctgcactccaacacaagtctccctca

SEQ ID NO: 706102 - DNA, 33 bp, Homo sapien
ttcatcgctgcactccgacacaagtctccctca

SEQ ID NO: 706103 - DNA, 33 bp, Homo sapien
tctttactcagaacaaatctctcaggttaactg

SEQ ID NO: 706104 - DNA, 33 bp, Homo sapien
tctttactcagaacaagtctctcaggttaactg

SEQ ID NO: 706105 - DNA, 33 bp, Homo sapien
tctcccctgcatgggcacacacaaagttccctc

SEQ ID NO: 706106 - DNA, 33 bp, Homo sapien
tctcccctgcatgggcgcacacaaagttccctc

SEQ ID NO: 706107 - DNA, 33 bp, Homo sapien
tcaatggatacttaccagataactgctataatt

SEQ ID NO: 706108 - DNA, 33 bp, Homo sapien
tcaatggatacttaccggataactgctataatt

SEQ ID NO: 706109 - DNA, 33 bp, Homo sapien
gagtcttcaaagcaaaatgaacactccctatgg

SEQ ID NO: 706110 - DNA, 33 bp, Homo sapien
gagtcttcaaagcaaagtgaacactccctatgg

SEQ ID NO: 706111 - DNA, 33 bp, Homo sapien
aggtaatccaggcctcaaggtttttaaaagaat

SEQ ID NO: 706112 - DNA, 33 bp, Homo sapien
aggtaatccaggcctcgaggtttttaaaagaat

SEQ ID NO: 706113 - DNA, 33 bp, Homo sapien
acagttgaaaaattgcactactgaagcaatcat

SEQ ID NO: 706114 - DNA, 33 bp, Homo sapien
acagttgaaaaattgccctactgaagcaatcat

SEQ ID NO: 706115 - DNA, 33 bp, Homo sapien
tgataagtaactgcaacgaaaatttttatgttt

SEQ ID NO: 706116 - DNA, 33 bp, Homo sapien
tgataagtaactgcaaggaaaatttttatgttt

SEQ ID NO: 706117 - DNA, 33 bp, Homo sapien
tgataaacccagaggacggcatatattatttat

SEQ ID NO: 706118 - DNA, 33 bp, Homo sapien
tgataaacccagaggatggcatatattatttat

SEQ ID NO: 706119 - DNA, 33 bp, Homo sapien
cagttggaatgttcccaaaacactttggcagag

SEQ ID NO: 706120 - DNA, 33 bp, Homo sapien
cagttggaatgttcccgaaacactttggcagag

SEQ ID NO: 706121 - DNA, 33 bp, Homo sapien
aatctcacaaaaatccaatatgccagaatcctt

SEQ ID NO: 706122 - DNA, 33 bp, Homo sapien
aatctcacaaaaatccgatatgccagaatcctt

SEQ ID NO: 706123 - DNA, 33 bp, Homo sapien
agcattctgctgtagacaggaaaataagaagct

SEQ ID NO: 706124 - DNA, 33 bp, Homo sapien
agcattctgctgtagataggaaaataagaagct

SEQ ID NO: 706125 - DNA, 33 bp, Homo sapien
ctgaagtctcatcctcagaaaaaattaggctca

SEQ ID NO: 706126 - DNA, 33 bp, Homo sapien
ctgaagtctcatcctccgaaaaaattaggctca

SEQ ID NO: 706127 - DNA, 33 bp, Homo sapien
aatatccagagccagacgttaattttcatctct

SEQ ID NO: 706128 - DNA, 33 bp, Homo sapien
aatatccagagccagatgttaattttcatctct

SEQ ID NO: 706129 - DNA, 33 bp, Homo sapien
tttggtaggttcaataagtagcactgttttaac

SEQ ID NO: 706130 - DNA, 33 bp, Homo sapien
tttggtaggttcaataggtagcactgttttaac

SEQ ID NO: 706131 - DNA, 33 bp, Homo sapien
tgttctaaagaaaggaaacattttgggagcatg

SEQ ID NO: 706132 - DNA, 33 bp, Homo sapien
tgttctaaagaaaggagacattttgggagcatg

SEQ ID NO: 706133 - DNA, 33 bp, Homo sapien
aagcttctcaacataagaatttggcaaagttag

SEQ ID NO: 706134 - DNA, 33 bp, Homo sapien
aagcttctcaacataataatttggcaaagttag

SEQ ID NO: 706135 - DNA, 33 bp, Homo sapien
ggtaggtttagcagtacagtgacaaccagatgt

SEQ ID NO: 706136 - DNA, 33 bp, Homo sapien
ggtaggtttagcagtatagtgacaaccagatgt

SEQ ID NO: 706137 - DNA, 33 bp, Homo sapien
gcatacacagacagtaaatatatagggcgctct

SEQ ID NO: 706138 - DNA, 33 bp, Homo sapien
gcatacacagacagtagatatatagggcgctct

SEQ ID NO: 706139 - DNA, 33 bp, Homo sapien
taagtcatttaacctacgaaatttaacacccaa

SEQ ID NO: 706140 - DNA, 33 bp, Homo sapien
taagtcatttaacctatgaaatttaacacccaa

SEQ ID NO: 706141 - DNA, 33 bp, Homo sapien
aattaatggtaaagtacgtacatttcatatgag

SEQ ID NO: 706142 - DNA, 33 bp, Homo sapien
aattaatggtaaagtatgtacatttcatatgag

SEQ ID NO: 706143 - DNA, 33 bp, Homo sapien
ctgtatgtaaaacaaacgtaagaagatgctgaa

SEQ ID NO: 706144 - DNA, 33 bp, Homo sapien
ctgtatgtaaaacaaatgtaagaagatgctgaa

SEQ ID NO: 706145 - DNA, 33 bp, Homo sapien
tttgattgttattttcacagatttaaacatatt

SEQ ID NO: 706146 - DNA, 33 bp, Homo sapien
tttgattgttattttcgcagatttaaacatatt

SEQ ID NO: 706147 - DNA, 33 bp, Homo sapien
ctaggtggaggccaacagattagggccagtaat

SEQ ID NO: 706148 - DNA, 33 bp, Homo sapien
ctaggtggaggccaacggattagggccagtaat

SEQ ID NO: 706149 - DNA, 33 bp, Homo sapien
ctttcagcaggctttaaaagtctgaaacctctc

SEQ ID NO: 706150 - DNA, 33 bp, Homo sapien
ctttcagcaggctttacaagtctgaaacctctc

SEQ ID NO: 706151 - DNA, 33 bp, Homo sapien
ttgagagccttactaacgaccccccacagagat

SEQ ID NO: 706152 - DNA, 33 bp, Homo sapien
ttgagagccttactaatgaccccccacagagat

SEQ ID NO: 706153 - DNA, 33 bp, Homo sapien
tctgtatctgtaactgaatggaggcagtggccc

SEQ ID NO: 706154 - DNA, 33 bp, Homo sapien
tctgtatctgtaactggatggaggcagtggccc

SEQ ID NO: 706155 - DNA, 33 bp, Homo sapien
gtagtcatctcatgtacgcagtgccccatgtac

SEQ ID NO: 706156 - DNA, 33 bp, Homo sapien
gtagtcatctcatgtatgcagtgccccatgtac

SEQ ID NO: 706157 - DNA, 33 bp, Homo sapien
tttcacaaattcctaaatgtattgtccaatatg

SEQ ID NO: 706158 - DNA, 33 bp, Homo sapien
tttcacaaattcctaagtgtattgtccaatatg

SEQ ID NO: 706159 - DNA, 33 bp, Homo sapien
ttattctattctcaagaagctcatagtctagta

SEQ ID NO: 706160 - DNA, 33 bp, Homo sapien
ttattctattctcaaggagctcatagtctagta

SEQ ID NO: 706161 - DNA, 33 bp, Homo sapien
atgggggcttgaaagacaatatttgagaagagc

SEQ ID NO: 706162 - DNA, 33 bp, Homo sapien
atgggggcttgaaagataatatttgagaagagc

SEQ ID NO: 706163 - DNA, 33 bp, Homo sapien
gcttttttatctccagcaaagacagtccctttg

SEQ ID NO: 706164 - DNA, 33 bp, Homo sapien
gcttttttatctccaggaaagacagtccctttg

SEQ ID NO: 706165 - DNA, 33 bp, Homo sapien
aattatgaaaacatgacacttatgggtgggatt

SEQ ID NO: 706166 - DNA, 33 bp, Homo sapien
aattatgaaaacatgatacttatgggtgggatt

SEQ ID NO: 706167 - DNA, 33 bp, Homo sapien
ctgttatccaaaaatccgaatataccaaacctg

SEQ ID NO: 706168 - DNA, 33 bp, Homo sapien
ctgttatccaaaaatctgaatataccaaacctg

SEQ ID NO: 706169 - DNA, 33 bp, Homo sapien
ttggataacagactgacagttttatttgcataa

SEQ ID NO: 706170 - DNA, 33 bp, Homo sapien
ttggataacagactgatagttttatttgcataa

SEQ ID NO: 706171 - DNA, 33 bp, Homo sapien
aagtagaatatgaaaccgaatttgtagctagta

SEQ ID NO: 706172 - DNA, 33 bp, Homo sapien
aagtagaatatgaaactgaatttgtagctagta

SEQ ID NO: 706173 - DNA, 33 bp, Homo sapien; identical to SEQ ID NO: 706171

SEQ ID NO: 706174 - DNA, 33 bp, Homo sapien; identical to SEQ ID NO: 706172

SEQ ID NO: 706175 - DNA, 33 bp, Homo sapien
aagcctagttaatgcaacagtttaaagtatttt

SEQ ID NO: 706176 - DNA, 33 bp, Homo sapien
aagcctagttaatgcagcagtttaaagtatttt

SEQ ID NO: 706177 - DNA, 33 bp, Homo sapien
agaaaaccagagatcacatccacttcagagtgt

SEQ ID NO: 706178 - DNA, 33 bp, Homo sapien
agaaaaccagagatcatatccacttcagagtgt

SEQ ID NO: 706179 - DNA, 33 bp, Homo sapien
caattaaaccattttaagctaatctaacaacta

SEQ ID NO: 706180 - DNA, 33 bp, Homo sapien
caattaaaccattttaggctaatctaacaacta

SEQ ID NO: 706181 - DNA, 33 bp, Homo sapien
taaagagatgtttagacgtatgtaatgtttaaa

SEQ ID NO: 706182 - DNA, 33 bp, Homo sapien
taaagagatgtttagatgtatgtaatgtttaaa

SEQ ID NO: 706183 - DNA, 33 bp, Homo sapien
tgaccatggagtatacaagagtcaaaagttggt

SEQ ID NO: 706184 - DNA, 33 bp, Homo sapien
tgaccatggagtatacgagagtcaaaagttggt

SEQ ID NO: 706185 - DNA, 33 bp, Homo sapien
gttttctcttacccaactctgactcacaagaaa

SEQ ID NO: 706186 - DNA, 33 bp, Homo sapien
gttttctcttacccaagtctgactcacaagaaa

SEQ ID NO: 706187 - DNA, 33 bp, Homo sapien
atattgtcattttaggcaatgaagagagggata

SEQ ID NO: 706188 - DNA, 33 bp, Homo sapien
atattgtcattttaggtaatgaagagagggata

SEQ ID NO: 706189 - DNA, 33 bp, Homo sapien
ctctgtctcctaagtcacatcgttcaatctctc

SEQ ID NO: 706190 - DNA, 33 bp, Homo sapien
ctctgtctcctaagtctcatcgttcaatctctc

SEQ ID NO: 706191 - DNA, 33 bp, Homo sapien
acagacagtggtgccaaaccagtacaacttttc

SEQ ID NO: 706192 - DNA, 33 bp, Homo sapien
acagacagtggtgccagaccagtacaacttttc

SEQ ID NO: 706193 - DNA, 33 bp, Homo sapien
aatttcaaactcctcacagtgttataccattgt

SEQ ID NO: 706194 - DNA, 33 bp, Homo sapien
aatttcaaactcctcatagtgttataccattgt

SEQ ID NO: 706195 - DNA, 33 bp, Homo sapien
tctttcaagaggacaaatatatggaccaatttc

SEQ ID NO: 706196 - DNA, 33 bp, Homo sapien
tctttcaagaggacaactatatggaccaatttc

SEQ ID NO: 706197 - DNA, 33 bp, Homo sapien
ttttcaaaattaatgcagcactatagagagctg

SEQ ID NO: 706198 - DNA, 33 bp, Homo sapien
ttttcaaaattaatgcggcactatagagagctg

SEQ ID NO: 706199 - DNA, 33 bp, Homo sapien
gtttcaccattacttaactcagtaactagaaga

SEQ ID NO: 706200 - DNA, 33 bp, Homo sapien
gtttcaccattacttacctcagtaactagaaga

SEQ ID NO: 706201 - DNA, 33 bp, Homo sapien
gttgctactaagaaagccagaaggtagaaatag

SEQ ID NO: 706202 - DNA, 33 bp, Homo sapien
gttgctactaagaaagtcagaaggtagaaatag

SEQ ID NO: 706203 - DNA, 33 bp, Homo sapien
tattcttatttgtgaaatgaattgatttggaga

SEQ ID NO: 706204 - DNA, 33 bp, Homo sapien
tattcttatttgtgaagtgaattgatttggaga

SEQ ID NO: 706205 - DNA, 33 bp, Homo sapien
agggagctggccaactaagtaattaccctgttt

SEQ ID NO: 706206 - DNA, 33 bp, Homo sapien
agggagctggccaactgagtaattaccctgttt

SEQ ID NO: 706207 - DNA, 33 bp, Homo sapien
ggtctgacacactgtaaggccttcataaatatt

SEQ ID NO: 706208 - DNA, 33 bp, Homo sapien
ggtctgacacactgtagggccttcataaatatt

SEQ ID NO: 706209 - DNA, 33 bp, Homo sapien
ggtacagagatgcttacgttgaatagaaatgct

SEQ ID NO: 706210 - DNA, 33 bp, Homo sapien
ggtacagagatgcttatgttgaatagaaatgct

SEQ ID NO: 706211 - DNA, 33 bp, Homo sapien
atgcattatcttatgaaccagttttttattgca

SEQ ID NO: 706212 - DNA, 33 bp, Homo sapien
atgcattatcttatgagccagttttttattgca

SEQ ID NO: 706213 - DNA, 33 bp, Homo sapien
ctgggggccttaagtacacacaggtatctaata

SEQ ID NO: 706214 - DNA, 33 bp, Homo sapien
ctgggggccttaagtagacacaggtatctaata

SEQ ID NO: 706215 - DNA, 33 bp, Homo sapien
tagggccaatataagcaacatacacattatatt

SEQ ID NO: 706216 - DNA, 33 bp, Homo sapien
tagggccaatataagcgacatacacattatatt

SEQ ID NO: 706217 - DNA, 33 bp, Homo sapien
tttgtgctgttaagaaaaaaagttcctgccaag

SEQ ID NO: 706218 - DNA, 33 bp, Homo sapien
tttgtgctgttaagaagaaaagttcctgccaag

SEQ ID NO: 706219 - DNA, 33 bp, Homo sapien
tacctgaggattgcctaaaaaagcagcaagtgt

SEQ ID NO: 706220 - DNA, 33 bp, Homo sapien
tacctgaggattgcctgaaaaagcagcaagtgt

SEQ ID NO: 706221 - DNA, 33 bp, Homo sapien
atgtaacacagattgacgttgaaggtttatatt

SEQ ID NO: 706222 - DNA, 33 bp, Homo sapien
atgtaacacagattgatgttgaaggtttatatt

SEQ ID NO: 706223 - DNA, 33 bp, Homo sapien
agttcctaacatgaggaattgtttctgatctgt

SEQ ID NO: 706224 - DNA, 33 bp, Homo sapien
agttcctaacatgaggtattgtttctgatctgt

SEQ ID NO: 706225 - DNA, 33 bp, Homo sapien
tttattcatttaatcacgtagtaagcatttatt

SEQ ID NO: 706226 - DNA, 33 bp, Homo sapien
tttattcatttaatcatgtagtaagcatttatt

SEQ ID NO: 706227 - DNA, 33 bp, Homo sapien
caaagatcactacatacgtatctggtaacattt

SEQ ID NO: 706228 - DNA, 33 bp, Homo sapien
caaagatcactacatatgtatctggtaacattt

SEQ ID NO: 706229 - DNA, 33 bp, Homo sapien
gctttgttgataatagccaaaatcagggagtag

SEQ ID NO: 706230 - DNA, 33 bp, Homo sapien
gctttgttgataatagtcaaaatcagggagtag

SEQ ID NO: 706231 - DNA, 33 bp, Homo sapien
agaaagggaattgacaaaggatggtaacgtagt

SEQ ID NO: 706232 - DNA, 33 bp, Homo sapien
agaaagggaattgacacaggatggtaacgtagt

SEQ ID NO: 706233 - DNA, 33 bp, Homo sapien
taaaatccttattaagactgacaaatggtagcc

SEQ ID NO: 706234 - DNA, 33 bp, Homo sapien
taaaatccttattaagcctgacaaatggtagcc

SEQ ID NO: 706235 - DNA, 33 bp, Homo sapien
caacgtatttttacaccaaatcaaagtgagttc

SEQ ID NO: 706236 - DNA, 33 bp, Homo sapien
caacgtatttttacactaaatcaaagtgagttc

SEQ ID NO: 706237 - DNA, 33 bp, Homo sapien
tctgcttggacctggagaattggtataacactc

SEQ ID NO: 706238 - DNA, 33 bp, Homo sapien
tctgcttggacctggataattggtataacactc

SEQ ID NO: 706239 - DNA, 33 bp, Homo sapien
gtcaaatggcttctccaaaagtactgcattcat

SEQ ID NO: 706240 - DNA, 33 bp, Homo sapien
gtcaaatggcttctccgaaagtactgcattcat

SEQ ID NO: 706241 - DNA, 33 bp, Homo sapien
tatgactctcctactcaattttctcttctttgt

SEQ ID NO: 706242 - DNA, 33 bp, Homo sapien
tatgactctcctactcgattttctcttctttgt

SEQ ID NO: 706243 - DNA, 33 bp, Homo sapien
gtagatagtctttaccaaatttcacaagatgct

SEQ ID NO: 706244 - DNA, 33 bp, Homo sapien
gtagatagtctttacccaatttcacaagatgct

SEQ ID NO: 706245 - DNA, 33 bp, Homo sapien
aatccaataaagcagcaccaagtgacccacaaa

SEQ ID NO: 706246 - DNA, 33 bp, Homo sapien
aatccaataaagcagcgccaagtgacccacaaa

SEQ ID NO: 706247 - DNA, 33 bp, Homo sapien
gcaggcattctcattaccccaacttttcaaatg

SEQ ID NO: 706248 - DNA, 33 bp, Homo sapien
gcaggcattctcattatcccaacttttcaaatg

SEQ ID NO: 706249 - DNA, 33 bp, Homo sapien
aatgtcaacaaataccaaactcttcacttactc

SEQ ID NO: 706250 - DNA, 33 bp, Homo sapien
aatgtcaacaaataccgaactcttcacttactc

SEQ ID NO: 706251 - DNA, 33 bp, Homo sapien
catttgagtttcttataaaatgcttcaggagaa

SEQ ID NO: 706252 - DNA, 33 bp, Homo sapien
catttgagtttcttatgaaatgcttcaggagaa

SEQ ID NO: 706253 - DNA, 33 bp, Homo sapien
ggccagcaaatacatactagttgactcactttt

SEQ ID NO: 706254 - DNA, 33 bp, Homo sapien
ggccagcaaatacatattagttgactcactttt

SEQ ID NO: 706255 - DNA, 33 bp, Homo sapien
tgtaactgcaattagcacacaagtcttgcatct

SEQ ID NO: 706256 - DNA, 33 bp, Homo sapien
tgtaactgcaattagcgcacaagtcttgcatct

SEQ ID NO: 706257 - DNA, 33 bp, Homo sapien
agaatgacctaagtataaagagaacagattggc

SEQ ID NO: 706258 - DNA, 33 bp, Homo sapien
agaatgacctaagtatgaagagaacagattggc

SEQ ID NO: 706259 - DNA, 33 bp, Homo sapien
ttctttgaacactggaaccatactggagatatt

SEQ ID NO: 706260 - DNA, 33 bp, Homo sapien
ttctttgaacactggagccatactggagatatt

SEQ ID NO: 706261 - DNA, 33 bp, Homo sapien
tgacagtgaaggtgacagcctagatcctgaagg

SEQ ID NO: 706262 - DNA, 33 bp, Homo sapien
tgacagtgaaggtgaccgcctagatcctgaagg

SEQ ID NO: 706263 - DNA, 33 bp, Homo sapien
actagagagatgtaacaaggcagattgtgatgg

SEQ ID NO: 706264 - DNA, 33 bp, Homo sapien
actagagagatgtaacgaggcagattgtgatgg

SEQ ID NO: 706265 - DNA, 33 bp, Homo sapien
actccatgagaatagaaatcttgacagatttgt

SEQ ID NO: 706266 - DNA, 33 bp, Homo sapien
actccatgagaatagacatcttgacagatttgt

SEQ ID NO: 706267 - DNA, 33 bp, Homo sapien
gaatgacttagagagaagtaaatccaatcatat

SEQ ID NO: 706268 - DNA, 33 bp, Homo sapien
gaatgacttagagagaggtaaatccaatcatat

SEQ ID NO: 706269 - DNA, 33 bp, Homo sapien
tccaacaattctaaacaatcaaggaggtctatt

SEQ ID NO: 706270 - DNA, 33 bp, Homo sapien
tccaacaattctaaacgatcaaggaggtctatt

SEQ ID NO: 706271 - DNA, 33 bp, Homo sapien
ttaagctgatgtttaaccatagtgctctttaaa

SEQ ID NO: 706272 - DNA, 33 bp, Homo sapien
ttaagctgatgtttaatcatagtgctctttaaa

SEQ ID NO: 706273 - DNA, 33 bp, Homo sapien
aaaagtataccacagaaagcaatacatatttaa

SEQ ID NO: 706274 - DNA, 33 bp, Homo sapien
aaaagtataccacagatagcaatacatatttaa

SEQ ID NO: 706275 - DNA, 33 bp, Homo sapien
gctcttactaaggacaactaaagccaaatttcg

SEQ ID NO: 706276 - DNA, 33 bp, Homo sapien
gctcttactaaggacagctaaagccaaatttcg

SEQ ID NO: 706277 - DNA, 33 bp, Homo sapien
tctttagtgtctctacaggggaaatgttcttca

SEQ ID NO: 706278 - DNA, 33 bp, Homo sapien
tctttagtgtctctacgggggaaatgttcttca

SEQ ID NO: 706279 - DNA, 33 bp, Homo sapien
aaaagtgggccatgccagctgaaacatcgttcc

SEQ ID NO: 706280 - DNA, 33 bp, Homo sapien
aaaagtgggccatgccggctgaaacatcgttcc

SEQ ID NO: 706281 - DNA, 33 bp, Homo sapien
gtccaagtactaccacaatggacccaagatcta

SEQ ID NO: 706282 - DNA, 33 bp, Homo sapien
gtccaagtactaccacgatggacccaagatcta

SEQ ID NO: 706283 - DNA, 33 bp, Homo sapien
atgtcagttagtaccacgtttgagaactcttgc

SEQ ID NO: 706284 - DNA, 33 bp, Homo sapien
atgtcagttagtaccatgtttgagaactcttgc

SEQ ID NO: 706285 - DNA, 33 bp, Homo sapien
gactgatcttcacacaagggaatgtaaaaaatt

SEQ ID NO: 706286 - DNA, 33 bp, Homo sapien
gactgatcttcacacaggggaatgtaaaaaatt

SEQ ID NO: 706287 - DNA, 33 bp, Homo sapien
cttatgattggcttcacagccttacactcagtt

SEQ ID NO: 706288 - DNA, 33 bp, Homo sapien
cttatgattggcttcatagccttacactcagtt

SEQ ID NO: 706289 - DNA, 33 bp, Homo sapien
gaggaaggagatgagaaaagggatgaattctat

SEQ ID NO: 706290 - DNA, 33 bp, Homo sapien
gaggaaggagatgagagaagggatgaattctat

SEQ ID NO: 706291 - DNA, 33 bp, Homo sapien
tggaaatctatcagtaacttgtatacaaacaga

SEQ ID NO: 706292 - DNA, 33 bp, Homo sapien
tggaaatctatcagtagcttgtatacaaacaga

SEQ ID NO: 706293 - DNA, 33 bp, Homo sapien
atagatttccagataccgcgaggttattcctgt

SEQ ID NO: 706294 - DNA, 33 bp, Homo sapien
atagatttccagatactgcgaggttattcctgt

SEQ ID NO: 706295 - DNA, 33 bp, Homo sapien
ttacaacgtttgacaacgagtcagttatttccc

SEQ ID NO: 706296 - DNA, 33 bp, Homo sapien
ttacaacgtttgacaatgagtcagttatttccc

SEQ ID NO: 706297 - DNA, 33 bp, Homo sapien
tataagtaaggatttcccttttcattataggta

SEQ ID NO: 706298 - DNA, 33 bp, Homo sapien
tataagtaaggatttctcttttcattataggta

SEQ ID NO: 706299 - DNA, 33 bp, Homo sapien
gtctgaatttagcataacagaataactgccatg

SEQ ID NO: 706300 - DNA, 33 bp, Homo sapien
gtctgaatttagcataccagaataactgccatg

SEQ ID NO: 706301 - DNA, 33 bp, Homo sapien
taactgcagcaacaggaagtacttttagcagct

SEQ ID NO: 706302 - DNA, 33 bp, Homo sapien
taactgcagcaacagggagtacttttagcagct

SEQ ID NO: 706303 - DNA, 33 bp, Homo sapien
tctcgaccattgcctacaagaggatgaaaagaa

SEQ ID NO: 706304 - DNA, 33 bp, Homo sapien
tctcgaccattgcctataagaggatgaaaagaa

SEQ ID NO: 706305 - DNA, 33 bp, Homo sapien
ctgaagaacttattagaactgtggccatgaagg

SEQ ID NO: 706306 - DNA, 33 bp, Homo sapien
ctgaagaacttattaggactgtggccatgaagg

SEQ ID NO: 706307 - DNA, 33 bp, Homo sapien
aataatctgtctaacactgcaacataaactggt

SEQ ID NO: 706308 - DNA, 33 bp, Homo sapien
aataatctgtctaacattgcaacataaactggt

SEQ ID NO: 706309 - DNA, 33 bp, Homo sapien
tgtattactctggctccgagattctacattcta

SEQ ID NO: 706310 - DNA, 33 bp, Homo sapien
tgtattactctggctctgagattctacattcta

SEQ ID NO: 706311 - DNA, 33 bp, Homo sapien
taacatttgtgaaacactgaaaacgatactttt

SEQ ID NO: 706312 - DNA, 33 bp, Homo sapien
taacatttgtgaaacattgaaaacgatactttt

SEQ ID NO: 706313 - DNA, 33 bp, Homo sapien
agagagagtcagaatacggaaaaggggtctgta

SEQ ID NO: 706314 - DNA, 33 bp, Homo sapien
agagagagtcagaatatggaaaaggggtctgta

SEQ ID NO: 706315 - DNA, 33 bp, Homo sapien
ttccttggttgtcaatgacttcatttctgtcct

SEQ ID NO: 706316 - DNA, 33 bp, Homo sapien
ttccttggttgtcaattacttcatttctgtcct

SEQ ID NO: 706317 - DNA, 33 bp, Homo sapien
ggaaggggtaaagcccagagaattgtctaggag

SEQ ID NO: 706318 - DNA, 33 bp, Homo sapien
ggaaggggtaaagcccggagaattgtctaggag

SEQ ID NO: 706319 - DNA, 33 bp, Homo sapien
gtgacaagctagcctacggtcagaatgaagaca

SEQ ID NO: 706320 - DNA, 33 bp, Homo sapien
gtgacaagctagcctatggtcagaatgaagaca

SEQ ID NO: 706321 - DNA, 33 bp, Homo sapien
attgataaagtattgcaaacatgtatttttgag

SEQ ID NO: 706322 - DNA, 33 bp, Homo sapien
attgataaagtattgcgaacatgtatttttgag

SEQ ID NO: 706323 - DNA, 33 bp, Homo sapien
gtcctcatttattgtaacatcagaatttaaaca

SEQ ID NO: 706324 - DNA, 33 bp, Homo sapien
gtcctcatttattgtagcatcagaatttaaaca

SEQ ID NO: 706325 - DNA, 33 bp, Homo sapien
actagatttataggtaagcaatttgatgtgaca

SEQ ID NO: 706326 - DNA, 33 bp, Homo sapien
actagatttataggtatgcaatttgatgtgaca

SEQ ID NO: 706327 - DNA, 33 bp, Homo sapien
catcaggaatatttcacaattccaaacctcttt

SEQ ID NO: 706328 - DNA, 33 bp, Homo sapien
catcaggaatatttcagaattccaaacctcttt

SEQ ID NO: 706329 - DNA, 33 bp, Homo sapien
gtatttgatttggatcacaattgagcaggtccc

SEQ ID NO: 706330 - DNA, 33 bp, Homo sapien
gtatttgatttggatcgcaattgagcaggtccc

SEQ ID NO: 706331 - DNA, 33 bp, Homo sapien
tgcaggtcaaatcttaacttgagctgtttatct

SEQ ID NO: 706332 - DNA, 33 bp, Homo sapien
tgcaggtcaaatcttatcttgagctgtttatct

SEQ ID NO: 706333 - DNA, 33 bp, Homo sapien
tcataatttgtcataacaaggaatgtggccgct

SEQ ID NO: 706334 - DNA, 33 bp, Homo sapien
tcataatttgtcataataaggaatgtggccgct

SEQ ID NO: 706335 - DNA, 33 bp, Homo sapien
gagcagagtcaccaacagcagcaaagaaggata

SEQ ID NO: 706336 - DNA, 33 bp, Homo sapien
gagcagagtcaccaacggcagcaaagaaggata

SEQ ID NO: 706337 - DNA, 33 bp, Homo sapien
agaaaagaaagatgtacgttgctatcaagtttt

SEQ ID NO: 706338 - DNA, 33 bp, Homo sapien
agaaaagaaagatgtatgttgctatcaagtttt

SEQ ID NO: 706339 - DNA, 33 bp, Homo sapien
aaaatgtgtgtatatacgcttgtaaatatatat

SEQ ID NO: 706340 - DNA, 33 bp, Homo sapien
aaaatgtgtgtatatatgcttgtaaatatatat

SEQ ID NO: 706341 - DNA, 33 bp, Homo sapien
gatgattggagaataaatgactatccatatgga

SEQ ID NO: 706342 - DNA, 33 bp, Homo sapien
gatgattggagaataagtgactatccatatgga

SEQ ID NO: 706343 - DNA, 33 bp, Homo sapien
attactgtagtatacaacttgactctaaagctt

SEQ ID NO: 706344 - DNA, 33 bp, Homo sapien
attactgtagtatacatcttgactctaaagctt

SEQ ID NO: 706345 - DNA, 33 bp, Homo sapien
caggctcatatataacactagtcctggctccca

SEQ ID NO: 706346 - DNA, 33 bp, Homo sapien
caggctcatatataactctagtcctggctccca

SEQ ID NO: 706347 - DNA, 33 bp, Homo sapien
aagaactacaaagcaccagtgagaaaaactgta

SEQ ID NO: 706348 - DNA, 33 bp, Homo sapien
aagaactacaaagcacgagtgagaaaaactgta

SEQ ID NO: 706349 - DNA, 33 bp, Homo sapien
ttattgagcttactaaattaaatcattggaatg

SEQ ID NO: 706350 - DNA, 33 bp, Homo sapien
ttattgagcttactaagttaaatcattggaatg

SEQ ID NO: 706351 - DNA, 33 bp, Homo sapien
ttcttaaagtgattagacataaaaatgctaagg

SEQ ID NO: 706352 - DNA, 33 bp, Homo sapien
ttcttaaagtgattagccataaaaatgctaagg

SEQ ID NO: 706353 - DNA, 33 bp, Homo sapien
accatcatcaaggtaacgtgcttaaattatgcc

SEQ ID NO: 706354 - DNA, 33 bp, Homo sapien
accatcatcaaggtaatgtgcttaaattatgcc

SEQ ID NO: 706355 - DNA, 33 bp, Homo sapien
tgtcccttgcaaaatactacagagtttctggct

SEQ ID NO: 706356 - DNA, 33 bp, Homo sapien
tgtcccttgcaaaatattacagagtttctggct

SEQ ID NO: 706357 - DNA, 33 bp, Homo sapien
aagcaaatggcctcaaccttaaaaaacaaagag

SEQ ID NO: 706358 - DNA, 33 bp, Homo sapien
aagcaaatggcctcaatcttaaaaaacaaagag

SEQ ID NO: 706359 - DNA, 33 bp, Homo sapien
aagcttacgtaggttcaaatcctgactctaaca

SEQ ID NO: 706360 - DNA, 33 bp, Homo sapien
aagcttacgtaggttcgaatcctgactctaaca

SEQ ID NO: 706361 - DNA, 33 bp, Homo sapien
cagcaaaactcttccactaacatcgattcatat

SEQ ID NO: 706362 - DNA, 33 bp, Homo sapien
cagcaaaactcttccagtaacatcgattcatat

SEQ ID NO: 706363 - DNA, 33 bp, Homo sapien
gttgaccagaaccttcacaaagacagtacaatg

SEQ ID NO: 706364 - DNA, 33 bp, Homo sapien
gttgaccagaaccttcgcaaagacagtacaatg

SEQ ID NO: 706365 - DNA, 33 bp, Homo sapien
accgggagttatgggacgaatcaaatgggaagg

SEQ ID NO: 706366 - DNA, 33 bp, Homo sapien
accgggagttatgggatgaatcaaatgggaagg

SEQ ID NO: 706367 - DNA, 33 bp, Homo sapien
taggctctagccagaaaaacattctaaaacata

SEQ ID NO: 706368 - DNA, 33 bp, Homo sapien
taggctctagccagaagaacattctaaaacata

SEQ ID NO: 706369 - DNA, 33 bp, Homo sapien
atattagagcccagaaagaatcacgaaatctcc

SEQ ID NO: 706370 - DNA, 33 bp, Homo sapien
atattagagcccagaatgaatcacgaaatctcc

SEQ ID NO: 706371 - DNA, 33 bp, Homo sapien
attatgtgatcctttaagtttctccacaagaat

SEQ ID NO: 706372 - DNA, 33 bp, Homo sapien
attatgtgatcctttaggtttctccacaagaat

SEQ ID NO: 706373 - DNA, 33 bp, Homo sapien
tcagagcagacagttacgggttttcgtgtgtgt

SEQ ID NO: 706374 - DNA, 33 bp, Homo sapien
tcagagcagacagttatgggttttcgtgtgtgt

SEQ ID NO: 706375 - DNA, 33 bp, Homo sapien
actactgtcacaatacagaggttcatgttcttt

SEQ ID NO: 706376 - DNA, 33 bp, Homo sapien
actactgtcacaatacggaggttcatgttcttt

SEQ ID NO: 706377 - DNA, 33 bp, Homo sapien
acaaagagattgaaagccagaatttcacgtgtc

SEQ ID NO: 706378 - DNA, 33 bp, Homo sapien
acaaagagattgaaaggcagaatttcacgtgtc

SEQ ID NO: 706379 - DNA, 33 bp, Homo sapien
gcaagtgttttggcgactataaatagcaaaata

SEQ ID NO: 706380 - DNA, 33 bp, Homo sapien
gcaagtgttttggcgattataaatagcaaaata

SEQ ID NO: 706381 - DNA, 33 bp, Homo sapien
ttcaaaatccataagcgcttaataatatatatt

SEQ ID NO: 706382 - DNA, 33 bp, Homo sapien
ttcaaaatccataagctcttaataatatatatt

SEQ ID NO: 706383 - DNA, 33 bp, Homo sapien
attgacatgaggcctacgcatattgtttgcctg

SEQ ID NO: 706384 - DNA, 33 bp, Homo sapien
attgacatgaggcctatgcatattgtttgcctg

SEQ ID NO: 706385 - DNA, 33 bp, Homo sapien
ggaggctcaggtaggaagatcgcttaagggagg

SEQ ID NO: 706386 - DNA, 33 bp, Homo sapien
ggaggctcaggtaggaggatcgcttaagggagg

SEQ ID NO: 706387 - DNA, 33 bp, Homo sapien
tcaggtatctacctccaaatgtgactatatttg

SEQ ID NO: 706388 - DNA, 33 bp, Homo sapien
tcaggtatctacctcccaatgtgactatatttg

SEQ ID NO: 706389 - DNA, 33 bp, Homo sapien
agctccccgctacttaggtacccttgccctctg

SEQ ID NO: 706390 - DNA, 33 bp, Homo sapien
agctccccgctacttatgtacccttgccctctg

SEQ ID NO: 706391 - DNA, 33 bp, Homo sapien
tctggttgtgcagaaaattctgatacgtggaga

SEQ ID NO: 706392 - DNA, 33 bp, Homo sapien
tctggttgtgcagaaacttctgatacgtggaga

SEQ ID NO: 706393 - DNA, 33 bp, Homo sapien
taaagcatttgtaaaggctgaaacccagtcatg

SEQ ID NO: 706394 - DNA, 33 bp, Homo sapien
taaagcatttgtaaagtctgaaacccagtcatg

SEQ ID NO: 706395 - DNA, 33 bp, Homo sapien
aatctttaactatcccaagatgccatcaatttt

SEQ ID NO: 706396 - DNA, 33 bp, Homo sapien
aatctttaactatcccgagatgccatcaatttt

SEQ ID NO: 706397 - DNA, 33 bp, Homo sapien
tgtggctcaaatgggcacttgtatggagttaca

SEQ ID NO: 706398 - DNA, 33 bp, Homo sapien
tgtggctcaaatgggcgcttgtatggagttaca

SEQ ID NO: 706399 - DNA, 33 bp, Homo sapien
ggctcagggttgacaaatcagagcacaaagcct

SEQ ID NO: 706400 - DNA, 33 bp, Homo sapien
ggctcagggttgacaagtcagagcacaaagcct

SEQ ID NO: 706401 - DNA, 33 bp, Homo sapien
aaagtgaagaggagtacatgacatctgtataca

SEQ ID NO: 706402 - DNA, 33 bp, Homo sapien
aaagtgaagaggagtatatgacatctgtataca

SEQ ID NO: 706403 - DNA, 33 bp, Homo sapien
ggccagcttcacggtacaggaacttgaagcttt

SEQ ID NO: 706404 - DNA, 33 bp, Homo sapien
ggccagcttcacggtataggaacttgaagcttt

SEQ ID NO: 706405 - DNA, 33 bp, Homo sapien
tgaagctggccaaaacagtataatctcaatatt

SEQ ID NO: 706406 - DNA, 33 bp, Homo sapien
tgaagctggccaaaacggtataatctcaatatt

SEQ ID NO: 706407 - DNA, 33 bp, Homo sapien
aaccaactcctacatacagcagtccaaataagt

SEQ ID NO: 706408 - DNA, 33 bp, Homo sapien
aaccaactcctacatagagcagtccaaataagt

SEQ ID NO: 706409 - DNA, 33 bp, Homo sapien
tacgtagtccatttctcaaaatcacaataatgt

SEQ ID NO: 706410 - DNA, 33 bp, Homo sapien
tacgtagtccatttctgaaaatcacaataatgt

SEQ ID NO: 706411 - DNA, 33 bp, Homo sapien
tgtttggttttgatgccatggtagtttaaaatg

SEQ ID NO: 706412 - DNA, 33 bp, Homo sapien
tgtttggttttgatgctatggtagtttaaaatg

SEQ ID NO: 706413 - DNA, 33 bp, Homo sapien
aaagtcatcactatacacaaggttatatagatt

SEQ ID NO: 706414 - DNA, 33 bp, Homo sapien
aaagtcatcactatacgcaaggttatatagatt

SEQ ID NO: 706415 - DNA, 33 bp, Homo sapien
gtaagaaactactaaactgttccaaagtggctg

SEQ ID NO: 706416 - DNA, 33 bp, Homo sapien
gtaagaaactactaaattgttccaaagtggctg

SEQ ID NO: 706417 - DNA, 33 bp, Homo sapien
gccttgataatagaggaaagtggactgatgaat

SEQ ID NO: 706418 - DNA, 33 bp, Homo sapien
gccttgataatagaggcaagtggactgatgaat

SEQ ID NO: 706419 - DNA, 33 bp, Homo sapien
tttagaaacatagagcaacatcattaaatcttt

SEQ ID NO: 706420 - DNA, 33 bp, Homo sapien
tttagaaacatagagcgacatcattaaatcttt

SEQ ID NO: 706421 - DNA, 33 bp, Homo sapien
aaatgagacaatgaagcctggggtagataatag

SEQ ID NO: 706422 - DNA, 33 bp, Homo sapien
aaatgagacaatgaaggctggggtagataatag

SEQ ID NO: 706423 - DNA, 33 bp, Homo sapien
agattacaaggtgctacgagaacatgtatgaaa

SEQ ID NO: 706424 - DNA, 33 bp, Homo sapien
agattacaaggtgctatgagaacatgtatgaaa

SEQ ID NO: 706425 - DNA, 33 bp, Homo sapien
gttaagataatccaaagatttgctgtttttcct

SEQ ID NO: 706426 - DNA, 33 bp, Homo sapien
gttaagataatccaaatatttgctgtttttcct

SEQ ID NO: 706427 - DNA, 33 bp, Homo sapien
aaactttgaagttatcccacaaaagaaaatact

SEQ ID NO: 706428 - DNA, 33 bp, Homo sapien
aaactttgaagttatctcacaaaagaaaatact

SEQ ID NO: 706429 - DNA, 33 bp, Homo sapien
tattgataatggctaacgctgtgattaaacagt

SEQ ID NO: 706430 - DNA, 33 bp, Homo sapien
tattgataatggctaatgctgtgattaaacagt

SEQ ID NO: 706431 - DNA, 33 bp, Homo sapien
cttcattcaagtggccgcgggtctataaactga

SEQ ID NO: 706432 - DNA, 33 bp, Homo sapien
cttcattcaagtggcctcgggtctataaactga

SEQ ID NO: 706433 - DNA, 33 bp, Homo sapien
aactcagttgggcaagaacaataattcaagttt

SEQ ID NO: 706434 - DNA, 33 bp, Homo sapien
aactcagttgggcaagtacaataattcaagttt

SEQ ID NO: 706435 - DNA, 33 bp, Homo sapien
aacactcaccaaaaaggcaacttggaataaaag

SEQ ID NO: 706436 - DNA, 33 bp, Homo sapien
aacactcaccaaaaagtcaacttggaataaaag

SEQ ID NO: 706437 - DNA, 33 bp, Homo sapien
tcattcttttgctttccaaatagtagtgtcttt

SEQ ID NO: 706438 - DNA, 33 bp, Homo sapien
tcattcttttgctttctaaatagtagtgtcttt

SEQ ID NO: 706439 - DNA, 33 bp, Homo sapien
cttcagaaggccttccaatcagttctatcaatc

SEQ ID NO: 706440 - DNA, 33 bp, Homo sapien
cttcagaaggccttccgatcagttctatcaatc

SEQ ID NO: 706441 - DNA, 33 bp, Homo sapien
ttgccctcactggaataaacatttactgcagat

SEQ ID NO: 706442 - DNA, 33 bp, Homo sapien
ttgccctcactggaatgaacatttactgcagat

SEQ ID NO: 706443 - DNA, 33 bp, Homo sapien
tacacaaaatatgcacaaacttttaaaactcaa

SEQ ID NO: 706444 - DNA, 33 bp, Homo sapien
tacacaaaatatgcacgaacttttaaaactcaa

SEQ ID NO: 706445 - DNA, 33 bp, Homo sapien
atacaaaatggggtgaagaaatgctctttcata

SEQ ID NO: 706446 - DNA, 33 bp, Homo sapien
atacaaaatggggtgaggaaatgctctttcata

SEQ ID NO: 706447 - DNA, 33 bp, Homo sapien
aggagtagattgactacaaaagtgagttttttt

SEQ ID NO: 706448 - DNA, 33 bp, Homo sapien
aggagtagattgactataaaagtgagttttttt

SEQ ID NO: 706449 - DNA, 33 bp, Homo sapien
tatatgatcattcagccagtacttttaaagatc

SEQ ID NO: 706450 - DNA, 33 bp, Homo sapien
tatatgatcattcagctagtacttttaaagatc

SEQ ID NO: 706451 - DNA, 33 bp, Homo sapien
cataattcaagtcatcgatatttctcaatggct

SEQ ID NO: 706452 - DNA, 33 bp, Homo sapien
cataattcaagtcatctatatttctcaatggct

SEQ ID NO: 706453 - DNA, 33 bp, Homo sapien
tttaaggatcctccaggaatataagttaaagcc

SEQ ID NO: 706454 - DNA, 33 bp, Homo sapien
tttaaggatcctccagtaatataagttaaagcc

SEQ ID NO: 706455 - DNA, 33 bp, Homo sapien
gaagactcacggaccaaaaaattgagctgaaca

SEQ ID NO: 706456 - DNA, 33 bp, Homo sapien
gaagactcacggaccagaaaattgagctgaaca

SEQ ID NO: 706457 - DNA, 33 bp, Homo sapien
gttagttaaatatttgaagacaaccaagccaat

SEQ ID NO: 706458 - DNA, 33 bp, Homo sapien
gttagttaaatatttgcagacaaccaagccaat

SEQ ID NO: 706459 - DNA, 33 bp, Homo sapien
accaggtgtccaaatcaaagggctatagttaac

SEQ ID NO: 706460 - DNA, 33 bp, Homo sapien
accaggtgtccaaatccaagggctatagttaac

SEQ ID NO: 706461 - DNA, 33 bp, Homo sapien
actaatagacttatcaatgaacaacttaagaat

SEQ ID NO: 706462 - DNA, 33 bp, Homo sapien
actaatagacttatcattgaacaacttaagaat

SEQ ID NO: 706463 - DNA, 33 bp, Homo sapien
tgtttaaaagtttcaaatgctatcccaaatgaa

SEQ ID NO: 706464 - DNA, 33 bp, Homo sapien
tgtttaaaagtttcaagtgctatcccaaatgaa

SEQ ID NO: 706465 - DNA, 33 bp, Homo sapien
gctgaacaatacctccactccattggtttgaat

SEQ ID NO: 706466 - DNA, 33 bp, Homo sapien
gctgaacaatacctccgctccattggtttgaat

SEQ ID NO: 706467 - DNA, 33 bp, Homo sapien
cttttaatggcaacaccgtagcttacaacatga

SEQ ID NO: 706468 - DNA, 33 bp, Homo sapien
cttttaatggcaacactgtagcttacaacatga

SEQ ID NO: 706469 - DNA, 33 bp, Homo sapien
atgtagctatatgaatcagtcctggccaaaggg

SEQ ID NO: 706470 - DNA, 33 bp, Homo sapien
atgtagctatatgaattagtcctggccaaaggg

SEQ ID NO: 706471 - DNA, 33 bp, Homo sapien
gagtgactgcacctggaactctctctatatttt

SEQ ID NO: 706472 - DNA, 33 bp, Homo sapien
gagtgactgcacctgggactctctctatatttt

SEQ ID NO: 706473 - DNA, 33 bp, Homo sapien
tctaagagatagcctaacaatagtgtcaataaa

SEQ ID NO: 706474 - DNA, 33 bp, Homo sapien
tctaagagatagcctatcaatagtgtcaataaa

SEQ ID NO: 706475 - DNA, 33 bp, Homo sapien
aaaattataaattttcaccaaactgtacctggt

SEQ ID NO: 706476 - DNA, 33 bp, Homo sapien
aaaattataaattttctccaaactgtacctggt

SEQ ID NO: 706477 - DNA, 33 bp, Homo sapien
agtccattgtgaaaaacaaaaacgaagcacaat

SEQ ID NO: 706478 - DNA, 33 bp, Homo sapien
agtccattgtgaaaaagaaaaacgaagcacaat

SEQ ID NO: 706479 - DNA, 33 bp, Homo sapien
ttatgacagaaaatcactgaagggtgtatagga

SEQ ID NO: 706480 - DNA, 33 bp, Homo sapien
ttatgacagaaaatcattgaagggtgtatagga

SEQ ID NO: 706481 - DNA, 33 bp, Homo sapien
agagctcaggaagtaacgtttactcgcctctca

SEQ ID NO: 706482 - DNA, 33 bp, Homo sapien
agagctcaggaagtaatgtttactcgcctctca

SEQ ID NO: 706483 - DNA, 33 bp, Homo sapien
ccaggatctctgaatcaaccattttctttcttc

SEQ ID NO: 706484 - DNA, 33 bp, Homo sapien
ccaggatctctgaatcgaccattttctttcttc

SEQ ID NO: 706485 - DNA, 33 bp, Homo sapien
ctaaaagccacaaggtaaagtcacacacaatgc

SEQ ID NO: 706486 - DNA, 33 bp, Homo sapien
ctaaaagccacaaggtgaagtcacacacaatgc

SEQ ID NO: 706487 - DNA, 33 bp, Homo sapien
ctacattgaaggtatccatattccccagtctag

SEQ ID NO: 706488 - DNA, 33 bp, Homo sapien
ctacattgaaggtatctatattccccagtctag

SEQ ID NO: 706489 - DNA, 33 bp, Homo sapien
atacatccgtcataaaatggtggaatattcacc

SEQ ID NO: 706490 - DNA, 33 bp, Homo sapien
atacatccgtcataaagtggtggaatattcacc

SEQ ID NO: 706491 - DNA, 33 bp, Homo sapien
gaccaactcaaaattccaatgttttccagagct

SEQ ID NO: 706492 - DNA, 33 bp, Homo sapien
gaccaactcaaaattctaatgttttccagagct

SEQ ID NO: 706493 - DNA, 33 bp, Homo sapien
tgtgaattgctacacactatttgttcttccaag

SEQ ID NO: 706494 - DNA, 33 bp, Homo sapien
tgtgaattgctacacattatttgttcttccaag

SEQ ID NO: 706495 - DNA, 33 bp, Homo sapien
caaataaaaataaaaccgctcattgtccaagaa

SEQ ID NO: 706496 - DNA, 33 bp, Homo sapien
caaataaaaataaaactgctcattgtccaagaa

SEQ ID NO: 706497 - DNA, 33 bp, Homo sapien
gttagaagtggaaaagaaaagatagcaggaata

SEQ ID NO: 706498 - DNA, 33 bp, Homo sapien
gttagaagtggaaaagcaaagatagcaggaata

SEQ ID NO: 706499 - DNA, 33 bp, Homo sapien
taccatacacaaattaaaatatcctatggaata

SEQ ID NO: 706500 - DNA, 33 bp, Homo sapien
taccatacacaaattacaatatcctatggaata

SEQ ID NO: 706501 - DNA, 33 bp, Homo sapien
tgtagacttttcctgagcaattccattactagg

SEQ ID NO: 706502 - DNA, 33 bp, Homo sapien
tgtagacttttcctgatcaattccattactagg

SEQ ID NO: 706503 - DNA, 33 bp, Homo sapien
ttattaagttgaggtaacacaagacaaagtttg

SEQ ID NO: 706504 - DNA, 33 bp, Homo sapien
ttattaagttgaggtagcacaagacaaagtttg

SEQ ID NO: 706505 - DNA, 33 bp, Homo sapien
tttagataatccatgaataaccaattgctacag

SEQ ID NO: 706506 - DNA, 33 bp, Homo sapien
tttagataatccatgagtaaccaattgctacag

SEQ ID NO: 706507 - DNA, 33 bp, Homo sapien
ttctgtatacagtgggaaacaattgcatatttt

SEQ ID NO: 706508 - DNA, 33 bp, Homo sapien
ttctgtatacagtggggaacaattgcatatttt

SEQ ID NO: 706509 - DNA, 33 bp, Homo sapien
gcagaggatccaaagtaaacccaagctattctc

SEQ ID NO: 706510 - DNA, 33 bp, Homo sapien
gcagaggatccaaagtgaacccaagctattctc

SEQ ID NO: 706511 - DNA, 33 bp, Homo sapien
gttgttctacattttcaataataaaagcagaaa

SEQ ID NO: 706512 - DNA, 33 bp, Homo sapien
gttgttctacattttccataataaaagcagaaa

SEQ ID NO: 706513 - DNA, 33 bp, Homo sapien
aactgcttaaaatgtacgtcacttttcttgttc

SEQ ID NO: 706514 - DNA, 33 bp, Homo sapien
aactgcttaaaatgtatgtcacttttcttgttc

SEQ ID NO: 706515 - DNA, 33 bp, Homo sapien
tttgacgtccaacaatgacaacagcaaaataaa

SEQ ID NO: 706516 - DNA, 33 bp, Homo sapien
tttgacgtccaacaattacaacagcaaaataaa

SEQ ID NO: 706517 - DNA, 33 bp, Homo sapien
ttctaataagctaacaagtgcagtatctctaaa

SEQ ID NO: 706518 - DNA, 33 bp, Homo sapien
ttctaataagctaacatgtgcagtatctctaaa

SEQ ID NO: 706519 - DNA, 33 bp, Homo sapien
cgtttgctacattccaactgaacttcttggcag

SEQ ID NO: 706520 - DNA, 33 bp, Homo sapien
cgtttgctacattccacctgaacttcttggcag

SEQ ID NO: 706521 - DNA, 33 bp, Homo sapien
taaagatattgctttcaactggatgtggctgtt

SEQ ID NO: 706522 - DNA, 33 bp, Homo sapien
taaagatattgctttccactggatgtggctgtt

SEQ ID NO: 706523 - DNA, 33 bp, Homo sapien
gtgttttacaggaaaaaaatttgcattttagca

SEQ ID NO: 706524 - DNA, 33 bp, Homo sapien
gtgttttacaggaaaataatttgcattttagca

SEQ ID NO: 706525 - DNA, 33 bp, Homo sapien
gggatgtggttgtatgaaatgaagtccaaacaa

SEQ ID NO: 706526 - DNA, 33 bp, Homo sapien
gggatgtggttgtatggaatgaagtccaaacaa

SEQ ID NO: 706527 - DNA, 33 bp, Homo sapien
tagtcacacttaaaacaaaaacaactattgaat

SEQ ID NO: 706528 - DNA, 33 bp, Homo sapien
tagtcacacttaaaacgaaaacaactattgaat

SEQ ID NO: 706529 - DNA, 33 bp, Homo sapien
tgctaaccaagtaaaaagtcctgaaagaagcag

SEQ ID NO: 706530 - DNA, 33 bp, Homo sapien
tgctaaccaagtaaaaggtcctgaaagaagcag

SEQ ID NO: 706531 - DNA, 33 bp, Homo sapien
ccaaattgagattgccacaaaaaaataaaatac

SEQ ID NO: 706532 - DNA, 33 bp, Homo sapien
ccaaattgagattgccgcaaaaaaataaaatac

SEQ ID NO: 706533 - DNA, 33 bp, Homo sapien
atacaccaataatgttaaaagtgagaagctgag

SEQ ID NO: 706534 - DNA, 33 bp, Homo sapien
atacaccaataatgttcaaagtgagaagctgag

SEQ ID NO: 706535 - DNA, 33 bp, Homo sapien
ggcattatgaaattgaaagggtgcagctttaaa

SEQ ID NO: 706536 - DNA, 33 bp, Homo sapien
ggcattatgaaattgagagggtgcagctttaaa

SEQ ID NO: 706537 - DNA, 33 bp, Homo sapien
aaagagacactgtatgaagcccttaggattttg

SEQ ID NO: 706538 - DNA, 33 bp, Homo sapien
aaagagacactgtatggagcccttaggattttg

SEQ ID NO: 706539 - DNA, 33 bp, Homo sapien
tacaatgatcaaaaaaaggaattgggaattgag

SEQ ID NO: 706540 - DNA, 33 bp, Homo sapien
tacaatgatcaaaaaatggaattgggaattgag

SEQ ID NO: 706541 - DNA, 33 bp, Homo sapien
ttcaccatattttgacactgaagagaagggcaa

SEQ ID NO: 706542 - DNA, 33 bp, Homo sapien
ttcaccatattttgaccctgaagagaagggcaa

SEQ ID NO: 706543 - DNA, 33 bp, Homo sapien
acagaatgctttgtaactctggactttggataa

SEQ ID NO: 706544 - DNA, 33 bp, Homo sapien
acagaatgctttgtaagtctggactttggataa

SEQ ID NO: 706545 - DNA, 33 bp, Homo sapien
gaattcttttaacaacaactgtctgaaccatat

SEQ ID NO: 706546 - DNA, 33 bp, Homo sapien
gaattcttttaacaactactgtctgaaccatat

SEQ ID NO: 706547 - DNA, 33 bp, Homo sapien
aacaagtttagtcttaagtaatgaggcagaatc

SEQ ID NO: 706548 - DNA, 33 bp, Homo sapien
aacaagtttagtcttacgtaatgaggcagaatc

SEQ ID NO: 706549 - DNA, 33 bp, Homo sapien
ttgaacctcagcagaacggactgaactccttgt

SEQ ID NO: 706550 - DNA, 33 bp, Homo sapien
ttgaacctcagcagaatggactgaactccttgt

SEQ ID NO: 706551 - DNA, 33 bp, Homo sapien
tgtgaatcaaaacctaaaaaggccatattgacc

SEQ ID NO: 706552 - DNA, 33 bp, Homo sapien
tgtgaatcaaaacctacaaaggccatattgacc

SEQ ID NO: 706553 - DNA, 33 bp, Homo sapien
actctagctaaaggtacgttatttggtgatata

SEQ ID NO: 706554 - DNA, 33 bp, Homo sapien
actctagctaaaggtatgttatttggtgatata

SEQ ID NO: 706555 - DNA, 33 bp, Homo sapien
agcagagcattaaatgaagtgtaggatccttct

SEQ ID NO: 706556 - DNA, 33 bp, Homo sapien
agcagagcattaaatgtagtgtaggatccttct

SEQ ID NO: 706557 - DNA, 33 bp, Homo sapien
ccctgagcaggtgtatcagacttctacaaggct

SEQ ID NO: 706558 - DNA, 33 bp, Homo sapien
ccctgagcaggtgtattagacttctacaaggct

SEQ ID NO: 706559 - DNA, 33 bp, Homo sapien
gaattaatctttctgacggccacaatatactca

SEQ ID NO: 706560 - DNA, 33 bp, Homo sapien
gaattaatctttctgatggccacaatatactca

SEQ ID NO: 706561 - DNA, 33 bp, Homo sapien
cacaccctctaaaatccaagatatcagtattgt

SEQ ID NO: 706562 - DNA, 33 bp, Homo sapien
cacaccctctaaaatctaagatatcagtattgt

SEQ ID NO: 706563 - DNA, 33 bp, Homo sapien
agttttgaaaggtatacgtgcatgggaatctag

SEQ ID NO: 706564 - DNA, 33 bp, Homo sapien
agttttgaaaggtatatgtgcatgggaatctag

SEQ ID NO: 706565 - DNA, 33 bp, Homo sapien
tttttgccaatgctgaaaacaattaggttactt

SEQ ID NO: 706566 - DNA, 33 bp, Homo sapien
tttttgccaatgctgagaacaattaggttactt

SEQ ID NO: 706567 - DNA, 33 bp, Homo sapien
tcataccttttatttgcaaacctttgctttgta

SEQ ID NO: 706568 - DNA, 33 bp, Homo sapien
tcataccttttatttgtaaacctttgctttgta

SEQ ID NO: 706569 - DNA, 33 bp, Homo sapien
atctaagagattaacaatagacagaagagctaa

SEQ ID NO: 706570 - DNA, 33 bp, Homo sapien
atctaagagattaacattagacagaagagctaa

SEQ ID NO: 706571 - DNA, 33 bp, Homo sapien
gagagttgtctttgtaaaacatgaatctaatca

SEQ ID NO: 706572 - DNA, 33 bp, Homo sapien
gagagttgtctttgtagaacatgaatctaatca

SEQ ID NO: 706573 - DNA, 33 bp, Homo sapien
gttatgaccctgattgaaatgctatcttactga

SEQ ID NO: 706574 - DNA, 33 bp, Homo sapien
gttatgaccctgattggaatgctatcttactga

SEQ ID NO: 706575 - DNA, 33 bp, Homo sapien
tattcagaattaaaaaaaggtgctgtgtgcatt

SEQ ID NO: 706576 - DNA, 33 bp, Homo sapien
tattcagaattaaaaacaggtgctgtgtgcatt

SEQ ID NO: 706577 - DNA, 33 bp, Homo sapien
cttcttctcatagatacacagttgaccctagaa

SEQ ID NO: 706578 - DNA, 33 bp, Homo sapien
cttcttctcatagatatacagttgaccctagaa

SEQ ID NO: 706579 - DNA, 33 bp, Homo sapien
caactcttaggggaccccagtgaatcaacaagg

SEQ ID NO: 706580 - DNA, 33 bp, Homo sapien
caactcttaggggacctcagtgaatcaacaagg

SEQ ID NO: 706581 - DNA, 33 bp, Homo sapien
aaaagctcttttccagaatattagagccacaca

SEQ ID NO: 706582 - DNA, 33 bp, Homo sapien
aaaagctcttttccagcatattagagccacaca

SEQ ID NO: 706583 - DNA, 33 bp, Homo sapien
gtgaaatgttacaagcccagtatgtattcaaag

SEQ ID NO: 706584 - DNA, 33 bp, Homo sapien
gtgaaatgttacaagctcagtatgtattcaaag

SEQ ID NO: 706585 - DNA, 33 bp, Homo sapien
agttgagtatcagtagaaggaaagaaataataa

SEQ ID NO: 706586 - DNA, 33 bp, Homo sapien
agttgagtatcagtaggaggaaagaaataataa

SEQ ID NO: 706587 - DNA, 33 bp, Homo sapien
ttacttgtctaggacagcaagtaaaatacttaa

SEQ ID NO: 706588 - DNA, 33 bp, Homo sapien
ttacttgtctaggacatcaagtaaaatacttaa

SEQ ID NO: 706589 - DNA, 33 bp, Homo sapien
ccttgatcattccaaccatgtcctgctaaaaca

SEQ ID NO: 706590 - DNA, 33 bp, Homo sapien
ccttgatcattccaactatgtcctgctaaaaca

SEQ ID NO: 706591 - DNA, 33 bp, Homo sapien
tggcctagagttaaaaaaggaagagagatgagt

SEQ ID NO: 706592 - DNA, 33 bp, Homo sapien
tggcctagagttaaaagaggaagagagatgagt

SEQ ID NO: 706593 - DNA, 33 bp, Homo sapien
tgatgttactaaatgaagtgacaactaataaag

SEQ ID NO: 706594 - DNA, 33 bp, Homo sapien
tgatgttactaaatgatgtgacaactaataaag

SEQ ID NO: 706595 - DNA, 33 bp, Homo sapien
caaaaggagctgagcaatatagtctacttggaa

SEQ ID NO: 706596 - DNA, 33 bp, Homo sapien
caaaaggagctgagcagtatagtctacttggaa

SEQ ID NO: 706597 - DNA, 33 bp, Homo sapien
gtacatcatgactaaacagtattgattccagat

SEQ ID NO: 706598 - DNA, 33 bp, Homo sapien
gtacatcatgactaaagagtattgattccagat

SEQ ID NO: 706599 - DNA, 33 bp, Homo sapien
tatgagcctgtgaaatcaaaagcaacttagtta

SEQ ID NO: 706600 - DNA, 33 bp, Homo sapien
tatgagcctgtgaaatgaaaagcaacttagtta

SEQ ID NO: 706601 - DNA, 33 bp, Homo sapien
accccgagatgagaaaactatccaccattaagg

SEQ ID NO: 706602 - DNA, 33 bp, Homo sapien
accccgagatgagaaacctatccaccattaagg

SEQ ID NO: 706603 - DNA, 33 bp, Homo sapien
catgggcaaaggaataagccataggagatgagt

SEQ ID NO: 706604 - DNA, 33 bp, Homo sapien
catgggcaaaggaataggccataggagatgagt

SEQ ID NO: 706605 - DNA, 33 bp, Homo sapien
aaaaggtcgtctataaagcatttcatatggact

SEQ ID NO: 706606 - DNA, 33 bp, Homo sapien
aaaaggtcgtctataatgcatttcatatggact

SEQ ID NO: 706607 - DNA, 33 bp, Homo sapien
atgacccaaaatagcaaacgcaacattcagaga

SEQ ID NO: 706608 - DNA, 33 bp, Homo sapien
atgacccaaaatagcagacgcaacattcagaga

SEQ ID NO: 706609 - DNA, 33 bp, Homo sapien
ctgtcagccaatagtcaaggactgcatactgtg

SEQ ID NO: 706610 - DNA, 33 bp, Homo sapien
ctgtcagccaatagtcgaggactgcatactgtg

SEQ ID NO: 706611 - DNA, 33 bp, Homo sapien
gcaaatgagaatgcaacaatcatgtttatcatg

SEQ ID NO: 706612 - DNA, 33 bp, Homo sapien
gcaaatgagaatgcaataatcatgtttatcatg

SEQ ID NO: 706613 - DNA, 33 bp, Homo sapien
gaaactgcctgtcagaatcattccatatacttc

SEQ ID NO: 706614 - DNA, 33 bp, Homo sapien
gaaactgcctgtcagagtcattccatatacttc

SEQ ID NO: 706615 - DNA, 33 bp, Homo sapien
aaagtaatctaggaccaatttgttttatttcca

SEQ ID NO: 706616 - DNA, 33 bp, Homo sapien
aaagtaatctaggaccgatttgttttatttcca

SEQ ID NO: 706617 - DNA, 33 bp, Homo sapien
actagtgcctctattaaccctgaaaccattgaa

SEQ ID NO: 706618 - DNA, 33 bp, Homo sapien
actagtgcctctattatccctgaaaccattgaa

SEQ ID NO: 706619 - DNA, 33 bp, Homo sapien
cttgctctctgttccaatcatgtgaaaaaagca

SEQ ID NO: 706620 - DNA, 33 bp, Homo sapien
cttgctctctgttccagtcatgtgaaaaaagca

SEQ ID NO: 706621 - DNA, 33 bp, Homo sapien
tactaaaactagagacagatgtcagacaatatt

SEQ ID NO: 706622 - DNA, 33 bp, Homo sapien
tactaaaactagagactgatgtcagacaatatt

SEQ ID NO: 706623 - DNA, 33 bp, Homo sapien
agagattttcttctccactacatttccaaaacc

SEQ ID NO: 706624 - DNA, 33 bp, Homo sapien
agagattttcttctccgctacatttccaaaacc

SEQ ID NO: 706625 - DNA, 33 bp, Homo sapien
gaggtagggaacattaggaaatattttgacaat

SEQ ID NO: 706626 - DNA, 33 bp, Homo sapien
gaggtagggaacattatgaaatattttgacaat

SEQ ID NO: 706627 - DNA, 33 bp, Homo sapien
gaggaaattaatgcaaaagcagaaaatcagacg

SEQ ID NO: 706628 - DNA, 33 bp, Homo sapien
gaggaaattaatgcaagagcagaaaatcagacg

SEQ ID NO: 706629 - DNA, 33 bp, Homo sapien
tttgtattattttctcaaaagtccattctctac

SEQ ID NO: 706630 - DNA, 33 bp, Homo sapien
tttgtattattttctcgaaagtccattctctac

SEQ ID NO: 706631 - DNA, 33 bp, Homo sapien
aatgaagtgttgaatacctcatataccgttaca

SEQ ID NO: 706632 - DNA, 33 bp, Homo sapien
aatgaagtgttgaatatctcatataccgttaca

SEQ ID NO: 706633 - DNA, 33 bp, Homo sapien
aatttagctaagtagaagacagattaaataaac

SEQ ID NO: 706634 - DNA, 33 bp, Homo sapien
aatttagctaagtagatgacagattaaataaac

SEQ ID NO: 706635 - DNA, 33 bp, Homo sapien
ctacattcaaaatacccagaaacaattccatgt

SEQ ID NO: 706636 - DNA, 33 bp, Homo sapien
ctacattcaaaatacctagaaacaattccatgt

SEQ ID NO: 706637 - DNA, 33 bp, Homo sapien
aatgctagctaggctcaattcattaaaaagatt

SEQ ID NO: 706638 - DNA, 33 bp, Homo sapien
aatgctagctaggctccattcattaaaaagatt

SEQ ID NO: 706639 - DNA, 33 bp, Homo sapien
gaatggaccatttccgcatacatttctacatag

SEQ ID NO: 706640 - DNA, 33 bp, Homo sapien
gaatggaccatttccgtatacatttctacatag

SEQ ID NO: 706641 - DNA, 33 bp, Homo sapien
ctctctacaatttgggaatattagcagcattca

SEQ ID NO: 706642 - DNA, 33 bp, Homo sapien
ctctctacaatttggggatattagcagcattca

SEQ ID NO: 706643 - DNA, 33 bp, Homo sapien
caagtgataacaagaaactcaaggataaattat

SEQ ID NO: 706644 - DNA, 33 bp, Homo sapien
caagtgataacaagaatctcaaggataaattat

SEQ ID NO: 706645 - DNA, 33 bp, Homo sapien
ctttcaagcaaaaggaagaccaattcagaaggc

SEQ ID NO: 706646 - DNA, 33 bp, Homo sapien
ctttcaagcaaaaggaggaccaattcagaaggc

SEQ ID NO: 706647 - DNA, 33 bp, Homo sapien
tctaatccttagctagcacttctgggggtctgt

SEQ ID NO: 706648 - DNA, 33 bp, Homo sapien
tctaatccttagctaggacttctgggggtctgt

SEQ ID NO: 706649 - DNA, 33 bp, Homo sapien
ccattttctttaataaggaatcgtgagaagtac

SEQ ID NO: 706650 - DNA, 33 bp, Homo sapien
ccattttctttaataatgaatcgtgagaagtac

SEQ ID NO: 706651 - DNA, 33 bp, Homo sapien
agcactacaagaggaacactagataatgcccag

SEQ ID NO: 706652 - DNA, 33 bp, Homo sapien
agcactacaagaggaagactagataatgcccag

SEQ ID NO: 706653 - DNA, 33 bp, Homo sapien
ggcagtactctcagcacgaacacgttagagggt

SEQ ID NO: 706654 - DNA, 33 bp, Homo sapien
ggcagtactctcagcatgaacacgttagagggt

SEQ ID NO: 706655 - DNA, 33 bp, Homo sapien
tctgtgaggaaattgacgtaatagcaatcacct

SEQ ID NO: 706656 - DNA, 33 bp, Homo sapien
tctgtgaggaaattgatgtaatagcaatcacct

SEQ ID NO: 706657 - DNA, 33 bp, Homo sapien
tgttttcttagttaaacgtttgcataactcttg

SEQ ID NO: 706658 - DNA, 33 bp, Homo sapien
tgttttcttagttaaatgtttgcataactcttg

SEQ ID NO: 706659 - DNA, 33 bp, Homo sapien
catctatattcctgcaaaagacgttctccttca

SEQ ID NO: 706660 - DNA, 33 bp, Homo sapien
catctatattcctgcagaagacgttctccttca

SEQ ID NO: 706661 - DNA, 33 bp, Homo sapien
ataatgagaactcaaacacaaagaagggaacaa

SEQ ID NO: 706662 - DNA, 33 bp, Homo sapien
ataatgagaactcaaatacaaagaagggaacaa

SEQ ID NO: 706663 - DNA, 33 bp, Homo sapien
ccagggagtcaagcaacgtcattcagcagaacc

SEQ ID NO: 706664 - DNA, 33 bp, Homo sapien
ccagggagtcaagcaatgtcattcagcagaacc

SEQ ID NO: 706665 - DNA, 33 bp, Homo sapien
ttagacaaaatgagggaatgcagaatgttatta

SEQ ID NO: 706666 - DNA, 33 bp, Homo sapien
ttagacaaaatgaggggatgcagaatgttatta

SEQ ID NO: 706667 - DNA, 33 bp, Homo sapien
ttcgtattttctaagacagctggaaatatcttt

SEQ ID NO: 706668 - DNA, 33 bp, Homo sapien
ttcgtattttctaagagagctggaaatatcttt

SEQ ID NO: 706669 - DNA, 33 bp, Homo sapien
gaaacatttgaattgacgatatagatacagata

SEQ ID NO: 706670 - DNA, 33 bp, Homo sapien
gaaacatttgaattgatgatatagatacagata

SEQ ID NO: 706671 - DNA, 33 bp, Homo sapien
atgctggtataggcataagtagaccgtcccatt

SEQ ID NO: 706672 - DNA, 33 bp, Homo sapien
atgctggtataggcatgagtagaccgtcccatt

SEQ ID NO: 706673 - DNA, 33 bp, Homo sapien
cttttttttcttgtgacgtgaggattcatgaat

SEQ ID NO: 706674 - DNA, 33 bp, Homo sapien
cttttttttcttgtgatgtgaggattcatgaat

SEQ ID NO: 706675 - DNA, 33 bp, Homo sapien
accatgcaacttggtaaatacctgactataaat

SEQ ID NO: 706676 - DNA, 33 bp, Homo sapien
accatgcaacttggtacatacctgactataaat

SEQ ID NO: 706677 - DNA, 33 bp, Homo sapien
ctacaataataaaagtaacatgtgccatctggt

SEQ ID NO: 706678 - DNA, 33 bp, Homo sapien
ctacaataataaaagtgacatgtgccatctggt

SEQ ID NO: 706679 - DNA, 33 bp, Homo sapien
tttatgtttgctcaagcagagatgtcaggactt

SEQ ID NO: 706680 - DNA, 33 bp, Homo sapien
tttatgtttgctcaagtagagatgtcaggactt

SEQ ID NO: 706681 - DNA, 33 bp, Homo sapien
caagattaagtcattaaagtagctacagaaaaa

SEQ ID NO: 706682 - DNA, 33 bp, Homo sapien
caagattaagtcattacagtagctacagaaaaa

SEQ ID NO: 706683 - DNA, 33 bp, Homo sapien
tttttctagccatagaaataccaccttagatca

SEQ ID NO: 706684 - DNA, 33 bp, Homo sapien
tttttctagccatagagataccaccttagatca

SEQ ID NO: 706685 - DNA, 33 bp, Homo sapien
tactaaatgctctatcgctacctgaaatgatac

SEQ ID NO: 706686 - DNA, 33 bp, Homo sapien
tactaaatgctctatctctacctgaaatgatac

SEQ ID NO: 706687 - DNA, 33 bp, Homo sapien
aatactataatttcaaacaaaattgcaatactt

SEQ ID NO: 706688 - DNA, 33 bp, Homo sapien
aatactataatttcaagcaaaattgcaatactt

SEQ ID NO: 706689 - DNA, 33 bp, Homo sapien
aaatttaatgtgtgataatatgcagaataaatt

SEQ ID NO: 706690 - DNA, 33 bp, Homo sapien
aaatttaatgtgtgattatatgcagaataaatt

SEQ ID NO: 706691 - DNA, 33 bp, Homo sapien
aaaattaattgcaagacaaacaaaaatttacaa

SEQ ID NO: 706692 - DNA, 33 bp, Homo sapien
aaaattaattgcaagagaaacaaaaatttacaa

SEQ ID NO: 706693 - DNA, 33 bp, Homo sapien
gcttgttgaaataagacgttatctgttattcag

SEQ ID NO: 706694 - DNA, 33 bp, Homo sapien
gcttgttgaaataagaggttatctgttattcag

SEQ ID NO: 706695 - DNA, 33 bp, Homo sapien
agtgtggtgtctattaactttatgaggcaattc

SEQ ID NO: 706696 - DNA, 33 bp, Homo sapien
agtgtggtgtctattagctttatgaggcaattc

SEQ ID NO: 706697 - DNA, 33 bp, Homo sapien
tttttaactctacaaaaagcatcataataaatt

SEQ ID NO: 706698 - DNA, 33 bp, Homo sapien
tttttaactctacaaagagcatcataataaatt

SEQ ID NO: 706699 - DNA, 33 bp, Homo sapien
agctttttcagtcaaaacataaattatctgtat

SEQ ID NO: 706700 - DNA, 33 bp, Homo sapien
agctttttcagtcaaagcataaattatctgtat

SEQ ID NO: 706701 - DNA, 33 bp, Homo sapien
tattctttcatgaaaaatgctatcaataaatta

SEQ ID NO: 706702 - DNA, 33 bp, Homo sapien
tattctttcatgaaaactgctatcaataaatta

SEQ ID NO: 706703 - DNA, 33 bp, Homo sapien
gctttcataattttgaaggaaccgaactctgcc

SEQ ID NO: 706704 - DNA, 33 bp, Homo sapien
gctttcataattttgagggaaccgaactctgcc

SEQ ID NO: 706705 - DNA, 33 bp, Homo sapien
catgaagtaattctgcccttaacaacagtttag

SEQ ID NO: 706706 - DNA, 33 bp, Homo sapien
catgaagtaattctgcgcttaacaacagtttag

SEQ ID NO: 706707 - DNA, 33 bp, Homo sapien
tccattcacggtcaaaattcaataatatacttg

SEQ ID NO: 706708 - DNA, 33 bp, Homo sapien
tccattcacggtcaaatttcaataatatacttg

SEQ ID NO: 706709 - DNA, 33 bp, Homo sapien
actcttacaacagaagacaggttaacaagagga

SEQ ID NO: 706710 - DNA, 33 bp, Homo sapien
actcttacaacagaaggcaggttaacaagagga

SEQ ID NO: 706711 - DNA, 33 bp, Homo sapien
taggtggtttagaaggcaaggtattctcttgtt

SEQ ID NO: 706712 - DNA, 33 bp, Homo sapien
taggtggtttagaaggtaaggtattctcttgtt

SEQ ID NO: 706713 - DNA, 33 bp, Homo sapien
tgtacatattactccacattactgttatccatg

SEQ ID NO: 706714 - DNA, 33 bp, Homo sapien
tgtacatattactccatattactgttatccatg

SEQ ID NO: 706715 - DNA, 33 bp, Homo sapien
tattaattacagctgaatatcctgttactgact

SEQ ID NO: 706716 - DNA, 33 bp, Homo sapien
tattaattacagctgagtatcctgttactgact

SEQ ID NO: 706717 - DNA, 33 bp, Homo sapien
aattttatgtcacacaagaggttaaaatcctaa

SEQ ID NO: 706718 - DNA, 33 bp, Homo sapien
aattttatgtcacacaggaggttaaaatcctaa

SEQ ID NO: 706719 - DNA, 33 bp, Homo sapien
ttcttattggtataaacgccatctatcaataaa

SEQ ID NO: 706720 - DNA, 33 bp, Homo sapien
ttcttattggtataaatgccatctatcaataaa

SEQ ID NO: 706721 - DNA, 33 bp, Homo sapien
cattctaccattgataaagagttgaattgtttc

SEQ ID NO: 706722 - DNA, 33 bp, Homo sapien
cattctaccattgatatagagttgaattgtttc

SEQ ID NO: 706723 - DNA, 33 bp, Homo sapien
accagaaatctccacagctggtggcacttctcc

SEQ ID NO: 706724 - DNA, 33 bp, Homo sapien
accagaaatctccacatctggtggcacttctcc

SEQ ID NO: 706725 - DNA, 33 bp, Homo sapien
agtgctggtattctcacgtcaaattctctatat

SEQ ID NO: 706726 - DNA, 33 bp, Homo sapien
agtgctggtattctcatgtcaaattctctatat

SEQ ID NO: 706727 - DNA, 33 bp, Homo sapien
cgctgggtaccaaaacaaggtactacagagtaa

SEQ ID NO: 706728 - DNA, 33 bp, Homo sapien
cgctgggtaccaaaactaggtactacagagtaa

SEQ ID NO: 706729 - DNA, 33 bp, Homo sapien
tataatatctcttgtaccctcatctctctgaaa

SEQ ID NO: 706730 - DNA, 33 bp, Homo sapien
tataatatctcttgtatcctcatctctctgaaa

SEQ ID NO: 706731 - DNA, 33 bp, Homo sapien
ttcatgcttacctctcccttcagatgaagtcag

SEQ ID NO: 706732 - DNA, 33 bp, Homo sapien
ttcatgcttacctctctcttcagatgaagtcag

SEQ ID NO: 706733 - DNA, 33 bp, Homo sapien
aacaactgcaaaagtgaaaatcctccaagtggg

SEQ ID NO: 706734 - DNA, 33 bp, Homo sapien
aacaactgcaaaagtgtaaatcctccaagtggg

SEQ ID NO: 706735 - DNA, 33 bp, Homo sapien
cagaagccaaggtaagcaataggaagttctgtt

SEQ ID NO: 706736 - DNA, 33 bp, Homo sapien
cagaagccaaggtaaggaataggaagttctgtt

SEQ ID NO: 706737 - DNA, 33 bp, Homo sapien
atatatatccacttggccatatcattgaggaat

SEQ ID NO: 706738 - DNA, 33 bp, Homo sapien
atatatatccacttggtcatatcattgaggaat

SEQ ID NO: 706739 - DNA, 33 bp, Homo sapien
ttggtgtcactgcagacgtccagctaacataga

SEQ ID NO: 706740 - DNA, 33 bp, Homo sapien
ttggtgtcactgcagatgtccagctaacataga

SEQ ID NO: 706741 - DNA, 33 bp, Homo sapien
gttttggaaacatcagaagtacagttgtagcaa

SEQ ID NO: 706742 - DNA, 33 bp, Homo sapien
gttttggaaacatcagtagtacagttgtagcaa

SEQ ID NO: 706743 - DNA, 33 bp, Homo sapien
ggcactgacttccctaaacactcaaaactttgt

SEQ ID NO: 706744 - DNA, 33 bp, Homo sapien
ggcactgacttccctatacactcaaaactttgt

SEQ ID NO: 706745 - DNA, 33 bp, Homo sapien
agagaaaaaatatgtacagtatattcaactgtg

SEQ ID NO: 706746 - DNA, 33 bp, Homo sapien
agagaaaaaatatgtagagtatattcaactgtg

SEQ ID NO: 706747 - DNA, 33 bp, Homo sapien
ttattttgtgcgaccacataatcctttattgtt

SEQ ID NO: 706748 - DNA, 33 bp, Homo sapien
ttattttgtgcgaccatataatcctttattgtt

SEQ ID NO: 706749 - DNA, 33 bp, Homo sapien
ggagagtcttatttacagatgacggcatgagaa

SEQ ID NO: 706750 - DNA, 33 bp, Homo sapien
ggagagtcttatttacggatgacggcatgagaa

SEQ ID NO: 706751 - DNA, 33 bp, Homo sapien
tccaatccttagaagaaatccacagttaattgt

SEQ ID NO: 706752 - DNA, 33 bp, Homo sapien
tccaatccttagaagagatccacagttaattgt

SEQ ID NO: 706753 - DNA, 33 bp, Homo sapien
caggattcttggagtgaagttagttcttagccc

SEQ ID NO: 706754 - DNA, 33 bp, Homo sapien
caggattcttggagtgcagttagttcttagccc

SEQ ID NO: 706755 - DNA, 33 bp, Homo sapien
ctttcaaaactgtaaaccaaagagagtgaagat

SEQ ID NO: 706756 - DNA, 33 bp, Homo sapien
ctttcaaaactgtaaagcaaagagagtgaagat

SEQ ID NO: 706757 - DNA, 33 bp, Homo sapien
tccaccccatgattcaatctggtcactcctcta

SEQ ID NO: 706758 - DNA, 33 bp, Homo sapien
tccaccccatgattcagtctggtcactcctcta

SEQ ID NO: 706759 - DNA, 33 bp, Homo sapien
tacattggagtatttgaaagatacattggagta

SEQ ID NO: 706760 - DNA, 33 bp, Homo sapien
tacattggagtatttggaagatacattggagta

SEQ ID NO: 706761 - DNA, 33 bp, Homo sapien
tagagtatgatgcttacgtgcagtttcttttac

SEQ ID NO: 706762 - DNA, 33 bp, Homo sapien
tagagtatgatgcttatgtgcagtttcttttac

SEQ ID NO: 706763 - DNA, 33 bp, Homo sapien
taccaacataccaaataactattctcctgctca

SEQ ID NO: 706764 - DNA, 33 bp, Homo sapien
taccaacataccaaatgactattctcctgctca

SEQ ID NO: 706765 - DNA, 33 bp, Homo sapien
cacgtttgcattgtacaaaaatactgatggatg

SEQ ID NO: 706766 - DNA, 33 bp, Homo sapien
cacgtttgcattgtaccaaaatactgatggatg

SEQ ID NO: 706767 - DNA, 33 bp, Homo sapien
tttgattctcaaccaacgagttttgtgttaaac

SEQ ID NO: 706768 - DNA, 33 bp, Homo sapien
tttgattctcaaccaatgagttttgtgttaaac

SEQ ID NO: 706769 - DNA, 33 bp, Homo sapien
aagatataaaatgggacactatgtcttcctacc

SEQ ID NO: 706770 - DNA, 33 bp, Homo sapien
aagatataaaatgggatactatgtcttcctacc

SEQ ID NO: 706771 - DNA, 33 bp, Homo sapien
taataaactgataagcagcacattgaattcctt

SEQ ID NO: 706772 - DNA, 33 bp, Homo sapien
taataaactgataagcggcacattgaattcctt

SEQ ID NO: 706773 - DNA, 33 bp, Homo sapien
cttaaaaagcagggcggcaaagaagaagtataa

SEQ ID NO: 706774 - DNA, 33 bp, Homo sapien
cttaaaaagcagggcgtcaaagaagaagtataa

SEQ ID NO: 706775 - DNA, 33 bp, Homo sapien
gttaattctggatctacaacccttgtgtcactt

SEQ ID NO: 706776 - DNA, 33 bp, Homo sapien
gttaattctggatctataacccttgtgtcactt

SEQ ID NO: 706777 - DNA, 33 bp, Homo sapien
acagagcctccaattacagtctgcacaaaactg

SEQ ID NO: 706778 - DNA, 33 bp, Homo sapien
acagagcctccaattatagtctgcacaaaactg

SEQ ID NO: 706779 - DNA, 33 bp, Homo sapien
ccagaagttctgccaaatatccaccagtgtttt

SEQ ID NO: 706780 - DNA, 33 bp, Homo sapien
ccagaagttctgccaagtatccaccagtgtttt

SEQ ID NO: 706781 - DNA, 33 bp, Homo sapien
agcacagctaccttcgcattgcagtgctatgga

SEQ ID NO: 706782 - DNA, 33 bp, Homo sapien
agcacagctaccttcgtattgcagtgctatgga

SEQ ID NO: 706783 - DNA, 33 bp, Homo sapien
gattactgagtggaaaagtagttctgcttttag

SEQ ID NO: 706784 - DNA, 33 bp, Homo sapien
gattactgagtggaaaggtagttctgcttttag

SEQ ID NO: 706785 - DNA, 33 bp, Homo sapien
ttgagcctctttgcaaacttgactctaagatta

SEQ ID NO: 706786 - DNA, 33 bp, Homo sapien
ttgagcctctttgcaatcttgactctaagatta

SEQ ID NO: 706787 - DNA, 33 bp, Homo sapien
aaatatctgagacaggaatttttccaatacttt

SEQ ID NO: 706788 - DNA, 33 bp, Homo sapien
aaatatctgagacagggatttttccaatacttt

SEQ ID NO: 706789 - DNA, 33 bp, Homo sapien
agggttggaaactgcaacaattcttccttaatt

SEQ ID NO: 706790 - DNA, 33 bp, Homo sapien
agggttggaaactgcagcaattcttccttaatt

SEQ ID NO: 706791 - DNA, 33 bp, Homo sapien
taaagagagtagatgaagcaattagccataaac

SEQ ID NO: 706792 - DNA, 33 bp, Homo sapien
taaagagagtagatgaggcaattagccataaac

SEQ ID NO: 706793 - DNA, 33 bp, Homo sapien
tactaattaattgcaactgtgttttagagcaaa

SEQ ID NO: 706794 - DNA, 33 bp, Homo sapien
tactaattaattgcaattgtgttttagagcaaa

SEQ ID NO: 706795 - DNA, 33 bp, Homo sapien
gtgaatgacttcaatgaaaactaggtatataat

SEQ ID NO: 706796 - DNA, 33 bp, Homo sapien
gtgaatgacttcaatggaaactaggtatataat

SEQ ID NO: 706797 - DNA, 33 bp, Homo sapien
gtttggctttcaaagaactagctatacattcca

SEQ ID NO: 706798 - DNA, 33 bp, Homo sapien
gtttggctttcaaagatctagctatacattcca

SEQ ID NO: 706799 - DNA, 33 bp, Homo sapien
tcagatgggtcttttgaagacagcatacaattt

SEQ ID NO: 706800 - DNA, 33 bp, Homo sapien
tcagatgggtcttttggagacagcatacaattt

SEQ ID NO: 706801 - DNA, 33 bp, Homo sapien
ttacaaaatacacttaagtacacagtccagtga

SEQ ID NO: 706802 - DNA, 33 bp, Homo sapien
ttacaaaatacacttatgtacacagtccagtga

SEQ ID NO: 706803 - DNA, 33 bp, Homo sapien
acattgactgatctacaaagcttgtcatttgag

SEQ ID NO: 706804 - DNA, 33 bp, Homo sapien
acattgactgatctacgaagcttgtcatttgag

SEQ ID NO: 706805 - DNA, 33 bp, Homo sapien
tagtgttctatattcacgctgttgcaaatcaat

SEQ ID NO: 706806 - DNA, 33 bp, Homo sapien
tagtgttctatattcaggctgttgcaaatcaat

SEQ ID NO: 706807 - DNA, 33 bp, Homo sapien
atgtaagacaagggaaatgattttcaagctatt

SEQ ID NO: 706808 - DNA, 33 bp, Homo sapien
atgtaagacaagggaagtgattttcaagctatt

SEQ ID NO: 706809 - DNA, 33 bp, Homo sapien
aatatgagccttcaagcatccaaagtggagaag

SEQ ID NO: 706810 - DNA, 33 bp, Homo sapien
aatatgagccttcaaggatccaaagtggagaag

SEQ ID NO: 706811 - DNA, 33 bp, Homo sapien
gactttggcatagtacaatgtaaattaatgtta

SEQ ID NO: 706812 - DNA, 33 bp, Homo sapien
gactttggcatagtacgatgtaaattaatgtta

SEQ ID NO: 706813 - DNA, 33 bp, Homo sapien
agctgacacatttgcaaggaaaaaaaaagttgc

SEQ ID NO: 706814 - DNA, 33 bp, Homo sapien
agctgacacatttgcagggaaaaaaaaagttgc

SEQ ID NO: 706815 - DNA, 33 bp, Homo sapien
aaaataaagatgaaagacaatgccgttattaat

SEQ ID NO: 706816 - DNA, 33 bp, Homo sapien
aaaataaagatgaaagtcaatgccgttattaat

SEQ ID NO: 706817 - DNA, 33 bp, Homo sapien
tcaagttcctgacacaaaaatgctaatagtaca

SEQ ID NO: 706818 - DNA, 33 bp, Homo sapien
tcaagttcctgacacagaaatgctaatagtaca

SEQ ID NO: 706819 - DNA, 33 bp, Homo sapien
atatgtttctatctcacaagccttgattccaga

SEQ ID NO: 706820 - DNA, 33 bp, Homo sapien
atatgtttctatctcataagccttgattccaga

SEQ ID NO: 706821 - DNA, 33 bp, Homo sapien
aaaagaattcaacaagcctgctgaacaacttgc

SEQ ID NO: 706822 - DNA, 33 bp, Homo sapien
aaaagaattcaacaaggctgctgaacaacttgc

SEQ ID NO: 706823 - DNA, 33 bp, Homo sapien
cccttggcgagtattaaaaagtgattattaggt

SEQ ID NO: 706824 - DNA, 33 bp, Homo sapien
cccttggcgagtattagaaagtgattattaggt

SEQ ID NO: 706825 - DNA, 33 bp, Homo sapien
ataggcatcatatatgaattaaaacaagtacat

SEQ ID NO: 706826 - DNA, 33 bp, Homo sapien
ataggcatcatatatgcattaaaacaagtacat

SEQ ID NO: 706827 - DNA, 33 bp, Homo sapien
ctgagttaccgtcaacagagaaatttgtgtatt

SEQ ID NO: 706828 - DNA, 33 bp, Homo sapien
ctgagttaccgtcaacggagaaatttgtgtatt

SEQ ID NO: 706829 - DNA, 33 bp, Homo sapien
attgatgtctaaacaaaacttgcctaagtcata

SEQ ID NO: 706830 - DNA, 33 bp, Homo sapien
attgatgtctaaacaatacttgcctaagtcata

SEQ ID NO: 706831 - DNA, 33 bp, Homo sapien
aaatatagatgctcttcaaattatgatggggtc

SEQ ID NO: 706832 - DNA, 33 bp, Homo sapien
aaatatagatgctctttaaattatgatggggtc

SEQ ID NO: 706833 - DNA, 33 bp, Homo sapien
aaaaaataatgtataccctttgactttcagaag

SEQ ID NO: 706834 - DNA, 33 bp, Homo sapien
aaaaaataatgtatacgctttgactttcagaag

SEQ ID NO: 706835 - DNA, 33 bp, Homo sapien
ggcttttcacagaagaaatcttgtcccccagga

SEQ ID NO: 706836 - DNA, 33 bp, Homo sapien
ggcttttcacagaagatatcttgtcccccagga

SEQ ID NO: 706837 - DNA, 33 bp, Homo sapien
cccaggagttcttgcagatagccttccagaagt

SEQ ID NO: 706838 - DNA, 33 bp, Homo sapien
cccaggagttcttgcatatagccttccagaagt

SEQ ID NO: 706839 - DNA, 33 bp, Homo sapien
cccaagccagtacagacatacatctagaacagt

SEQ ID NO: 706840 - DNA, 33 bp, Homo sapien
cccaagccagtacagagatacatctagaacagt

SEQ ID NO: 706841 - DNA, 33 bp, Homo sapien
atgaagtatcaatagtcaaaatgttagagattt

SEQ ID NO: 706842 - DNA, 33 bp, Homo sapien
atgaagtatcaatagtgaaaatgttagagattt

SEQ ID NO: 706843 - DNA, 33 bp, Homo sapien
cctccaggtttatccacgttgctgtgatggaca

SEQ ID NO: 706844 - DNA, 33 bp, Homo sapien
cctccaggtttatccatgttgctgtgatggaca

SEQ ID NO: 706845 - DNA, 33 bp, Homo sapien
agtgcatttttcttcccctagaattctggctga

SEQ ID NO: 706846 - DNA, 33 bp, Homo sapien
agtgcatttttcttcctctagaattctggctga

SEQ ID NO: 706847 - DNA, 33 bp, Homo sapien
aaaaagttccttcatgcaagccccatccaaata

SEQ ID NO: 706848 - DNA, 33 bp, Homo sapien
aaaaagttccttcatgtaagccccatccaaata

SEQ ID NO: 706849 - DNA, 33 bp, Homo sapien
taccttatcttcaagccaatatggtatggtcca

SEQ ID NO: 706850 - DNA, 33 bp, Homo sapien
taccttatcttcaagctaatatggtatggtcca

SEQ ID NO: 706851 - DNA, 33 bp, Homo sapien
gaaaaacacaagtggccactcaacacactctaa

SEQ ID NO: 706852 - DNA, 33 bp, Homo sapien
gaaaaacacaagtggctactcaacacactctaa

SEQ ID NO: 706853 - DNA, 33 bp, Homo sapien
acttgtgtttttctatcagacatgaaagtcatt

SEQ ID NO: 706854 - DNA, 33 bp, Homo sapien
acttgtgtttttctattagacatgaaagtcatt

SEQ ID NO: 706855 - DNA, 33 bp, Homo sapien
agagcaaaatcaggaacgtactccgcttcacaa

SEQ ID NO: 706856 - DNA, 33 bp, Homo sapien
agagcaaaatcaggaatgtactccgcttcacaa

SEQ ID NO: 706857 - DNA, 33 bp, Homo sapien
gcccctgggaacataactccattggcttggggc

SEQ ID NO: 706858 - DNA, 33 bp, Homo sapien
gcccctgggaacataattccattggcttggggc

SEQ ID NO: 706859 - DNA, 33 bp, Homo sapien
gtcttctcttttctcacagctagcaattattat

SEQ ID NO: 706860 - DNA, 33 bp, Homo sapien
gtcttctcttttctcagagctagcaattattat

SEQ ID NO: 706861 - DNA, 33 bp, Homo sapien
gagtgatagtttgatacgccaatcatgtaactt

SEQ ID NO: 706862 - DNA, 33 bp, Homo sapien
gagtgatagtttgatatgccaatcatgtaactt

SEQ ID NO: 706863 - DNA, 33 bp, Homo sapien
acagtgtggagtcataagccaactagtgagagg

SEQ ID NO: 706864 - DNA, 33 bp, Homo sapien
acagtgtggagtcataggccaactagtgagagg

SEQ ID NO: 706865 - DNA, 33 bp, Homo sapien
caatgcttaacaaaaaataaccaatcaacacta

SEQ ID NO: 706866 - DNA, 33 bp, Homo sapien
caatgcttaacaaaaactaaccaatcaacacta

SEQ ID NO: 706867 - DNA, 33 bp, Homo sapien
tttctgaaggcaaaggaaatattgaataagtag

SEQ ID NO: 706868 - DNA, 33 bp, Homo sapien
tttctgaaggcaaagggaatattgaataagtag

SEQ ID NO: 706869 - DNA, 33 bp, Homo sapien
cgtgactccgggcttagcctacagctgatctgg

SEQ ID NO: 706870 - DNA, 33 bp, Homo sapien
cgtgactccgggcttatcctacagctgatctgg

SEQ ID NO: 706871 - DNA, 33 bp, Homo sapien
agaaatacaaaatggaacaatattaggcagtga

SEQ ID NO: 706872 - DNA, 33 bp, Homo sapien
agaaatacaaaatggatcaatattaggcagtga

SEQ ID NO: 706873 - DNA, 33 bp, Homo sapien
tatggctagagcctaacaaaaaactgacagttc

SEQ ID NO: 706874 - DNA, 33 bp, Homo sapien
tatggctagagcctaataaaaaactgacagttc

SEQ ID NO: 706875 - DNA, 33 bp, Homo sapien
cttctcctccagtgacacttgtaagtcctcctg

SEQ ID NO: 706876 - DNA, 33 bp, Homo sapien
cttctcctccagtgactcttgtaagtcctcctg

SEQ ID NO: 706877 - DNA, 33 bp, Homo sapien
ttattagcaggttaacaagaagcttattagcat

SEQ ID NO: 706878 - DNA, 33 bp, Homo sapien
ttattagcaggttaacgagaagcttattagcat

SEQ ID NO: 706879 - DNA, 33 bp, Homo sapien
gatgaaaatgtcatggccagaagcttgtagaac

SEQ ID NO: 706880 - DNA, 33 bp, Homo sapien
gatgaaaatgtcatggtcagaagcttgtagaac

SEQ ID NO: 706881 - DNA, 33 bp, Homo sapien
ccctatcagggtctctcaatggttgtgctagtg

SEQ ID NO: 706882 - DNA, 33 bp, Homo sapien
ccctatcagggtctctgaatggttgtgctagtg

SEQ ID NO: 706883 - DNA, 33 bp, Homo sapien
caataagacaattaccaactaagtgtcaaatga

SEQ ID NO: 706884 - DNA, 33 bp, Homo sapien
caataagacaattacctactaagtgtcaaatga

SEQ ID NO: 706885 - DNA, 33 bp, Homo sapien
tgacagaaatccttggcaaacattgtcctatag

SEQ ID NO: 706886 - DNA, 33 bp, Homo sapien
tgacagaaatccttggtaaacattgtcctatag

SEQ ID NO: 706887 - DNA, 33 bp, Homo sapien
gagatcagctttatccaatagttactgaaactt

SEQ ID NO: 706888 - DNA, 33 bp, Homo sapien
gagatcagctttatcctatagttactgaaactt

SEQ ID NO: 706889 - DNA, 33 bp, Homo sapien
gtctggtagaacagtaaaagatatgcctgaaac

SEQ ID NO: 706890 - DNA, 33 bp, Homo sapien
gtctggtagaacagtacaagatatgcctgaaac

SEQ ID NO: 706891 - DNA, 33 bp, Homo sapien
ttccctttgacagtccaaaataaaaaccactga

SEQ ID NO: 706892 - DNA, 33 bp, Homo sapien
ttccctttgacagtccgaaataaaaaccactga

SEQ ID NO: 706893 - DNA, 33 bp, Homo sapien
ggaacctaaacatcaaggcatagacctaattca

SEQ ID NO: 706894 - DNA, 33 bp, Homo sapien
ggaacctaaacatcaatgcatagacctaattca

SEQ ID NO: 706895 - DNA, 33 bp, Homo sapien
gaagcatcatacattactaaacttcagagatat

SEQ ID NO: 706896 - DNA, 33 bp, Homo sapien
gaagcatcatacattattaaacttcagagatat

SEQ ID NO: 706897 - DNA, 33 bp, Homo sapien
ccatgtttgtgtaaagccaattaacgaaggaca

SEQ ID NO: 706898 - DNA, 33 bp, Homo sapien
ccatgtttgtgtaaaggcaattaacgaaggaca

SEQ ID NO: 706899 - DNA, 33 bp, Homo sapien
tcaacatctattatgaactagacaatgaattga

SEQ ID NO: 706900 - DNA, 33 bp, Homo sapien
tcaacatctattatgacctagacaatgaattga

SEQ ID NO: 706901 - DNA, 33 bp, Homo sapien
tgctgaaggtccacccaaaaccaactgaatcag

SEQ ID NO: 706902 - DNA, 33 bp, Homo sapien
tgctgaaggtccaccccaaaccaactgaatcag

SEQ ID NO: 706903 - DNA, 33 bp, Homo sapien
cacctgatcaaaccaaactgtgggctctacata

SEQ ID NO: 706904 - DNA, 33 bp, Homo sapien
cacctgatcaaaccaatctgtgggctctacata

SEQ ID NO: 706905 - DNA, 33 bp, Homo sapien
acaggattatgcaccacattaaaagtagagggg

SEQ ID NO: 706906 - DNA, 33 bp, Homo sapien
acaggattatgcaccagattaaaagtagagggg

SEQ ID NO: 706907 - DNA, 33 bp, Homo sapien
gcaccactgggagcacaatgatgaaatctcaca

SEQ ID NO: 706908 - DNA, 33 bp, Homo sapien
gcaccactgggagcaccatgatgaaatctcaca

SEQ ID NO: 706909 - DNA, 33 bp, Homo sapien
taccacatttaccaccagaagtatatcttgcac

SEQ ID NO: 706910 - DNA, 33 bp, Homo sapien
taccacatttaccaccggaagtatatcttgcac

SEQ ID NO: 706911 - DNA, 33 bp, Homo sapien
aggcatatgagtatacagagaattgaagcaaaa

SEQ ID NO: 706912 - DNA, 33 bp, Homo sapien
aggcatatgagtatacggagaattgaagcaaaa

SEQ ID NO: 706913 - DNA, 33 bp, Homo sapien
tttttcagacattttacataatgcacttttgtc

SEQ ID NO: 706914 - DNA, 33 bp, Homo sapien
tttttcagacattttagataatgcacttttgtc

SEQ ID NO: 706915 - DNA, 33 bp, Homo sapien
ggtaacagagcacaacaaaatagagcattggaa

SEQ ID NO: 706916 - DNA, 33 bp, Homo sapien
ggtaacagagcacaaccaaatagagcattggaa

SEQ ID NO: 706917 - DNA, 33 bp, Homo sapien
tggtggccaacaaaataaaaatgagagtcaagt

SEQ ID NO: 706918 - DNA, 33 bp, Homo sapien
tggtggccaacaaaattaaaatgagagtcaagt

SEQ ID NO: 706919 - DNA, 33 bp, Homo sapien
tatagctataatttccacaagaatttgaactaa

SEQ ID NO: 706920 - DNA, 33 bp, Homo sapien
tatagctataatttccgcaagaatttgaactaa

SEQ ID NO: 706921 - DNA, 33 bp, Homo sapien
atgcagccataaaaaccgaattcctgtcattca

SEQ ID NO: 706922 - DNA, 33 bp, Homo sapien
atgcagccataaaaactgaattcctgtcattca

SEQ ID NO: 706923 - DNA, 33 bp, Homo sapien
gtaatttttgaagaaactccatgttgttctcca

SEQ ID NO: 706924 - DNA, 33 bp, Homo sapien
gtaatttttgaagaaagtccatgttgttctcca

SEQ ID NO: 706925 - DNA, 33 bp, Homo sapien
aagattggtcatcataactatgtccccatttac

SEQ ID NO: 706926 - DNA, 33 bp, Homo sapien
aagattggtcatcatacctatgtccccatttac

SEQ ID NO: 706927 - DNA, 33 bp, Homo sapien
tgtcaacttctactcactacccagttccaaagt

SEQ ID NO: 706928 - DNA, 33 bp, Homo sapien
tgtcaacttctactcattacccagttccaaagt

SEQ ID NO: 706929 - DNA, 33 bp, Homo sapien
tttattattcttgacaccaggaaacagctagct

SEQ ID NO: 706930 - DNA, 33 bp, Homo sapien
tttattattcttgacatcaggaaacagctagct

SEQ ID NO: 706931 - DNA, 33 bp, Homo sapien
cttgatgctagaggtaataaagaatggataaaa

SEQ ID NO: 706932 - DNA, 33 bp, Homo sapien
cttgatgctagaggtactaaagaatggataaaa

SEQ ID NO: 706933 - DNA, 33 bp, Homo sapien
tcaaatactccatcttcaaacctgtgtatcatt

SEQ ID NO: 706934 - DNA, 33 bp, Homo sapien
tcaaatactccatcttgaaacctgtgtatcatt

SEQ ID NO: 706935 - DNA, 33 bp, Homo sapien
ctatacacaaaattcaacttgatttggtgaatt

SEQ ID NO: 706936 - DNA, 33 bp, Homo sapien
ctatacacaaaattcagcttgatttggtgaatt

SEQ ID NO: 706937 - DNA, 33 bp, Homo sapien
gagagtacagattgaaagagtgaggaaaatttt

SEQ ID NO: 706938 - DNA, 33 bp, Homo sapien
gagagtacagattgaaggagtgaggaaaatttt

SEQ ID NO: 706939 - DNA, 33 bp, Homo sapien
gcctctgagtaccacacagacaatacggatgct

SEQ ID NO: 706940 - DNA, 33 bp, Homo sapien
gcctctgagtaccacatagacaatacggatgct

SEQ ID NO: 706941 - DNA, 33 bp, Homo sapien
cagccttcacctacaaatgcagcctaagcctct

SEQ ID NO: 706942 - DNA, 33 bp, Homo sapien
cagccttcacctacaagtgcagcctaagcctct

SEQ ID NO: 706943 - DNA, 33 bp, Homo sapien
accattgacctccctagcaacaggctgctccaa

SEQ ID NO: 706944 - DNA, 33 bp, Homo sapien
accattgacctccctatcaacaggctgctccaa

SEQ ID NO: 706945 - DNA, 33 bp, Homo sapien
tggtacattttttacaacggatatatctacaat

SEQ ID NO: 706946 - DNA, 33 bp, Homo sapien
tggtacattttttacagcggatatatctacaat

SEQ ID NO: 706947 - DNA, 33 bp, Homo sapien
tttgccttcccagaaaatcatatggttgaaatc

SEQ ID NO: 706948 - DNA, 33 bp, Homo sapien
tttgccttcccagaaagtcatatggttgaaatc

SEQ ID NO: 706949 - DNA, 33 bp, Homo sapien
aactatagaactcttaaggtataacaacaaaat

SEQ ID NO: 706950 - DNA, 33 bp, Homo sapien
aactatagaactcttatggtataacaacaaaat

SEQ ID NO: 706951 - DNA, 33 bp, Homo sapien
ccttgggtttttccagaccaattatttcagata

SEQ ID NO: 706952 - DNA, 33 bp, Homo sapien
ccttgggtttttccaggccaattatttcagata

SEQ ID NO: 706953 - DNA, 33 bp, Homo sapien
agaataaatctactgaagtaaagaaacctcaca

SEQ ID NO: 706954 - DNA, 33 bp, Homo sapien
agaataaatctactgacgtaaagaaacctcaca

SEQ ID NO: 706955 - DNA, 33 bp, Homo sapien
ttttctcactactcacaaatgaacaattaagcc

SEQ ID NO: 706956 - DNA, 33 bp, Homo sapien
ttttctcactactcaccaatgaacaattaagcc

SEQ ID NO: 706957 - DNA, 33 bp, Homo sapien
cacagattttggtaacagaaacagactgaacta

SEQ ID NO: 706958 - DNA, 33 bp, Homo sapien
cacagattttggtaacggaaacagactgaacta

SEQ ID NO: 706959 - DNA, 33 bp, Homo sapien
gagatgtataaagttgaaaaatgaagggtaagt

SEQ ID NO: 706960 - DNA, 33 bp, Homo sapien
gagatgtataaagttgcaaaatgaagggtaagt

SEQ ID NO: 706961 - DNA, 33 bp, Homo sapien
atgtatttgttttcagaataagctggggagaat

SEQ ID NO: 706962 - DNA, 33 bp, Homo sapien
atgtatttgttttcaggataagctggggagaat

SEQ ID NO: 706963 - DNA, 33 bp, Homo sapien
tagtgcccgtctttcaatacttactatgctgta

SEQ ID NO: 706964 - DNA, 33 bp, Homo sapien
tagtgcccgtctttcattacttactatgctgta

SEQ ID NO: 706965 - DNA, 33 bp, Homo sapien
agccaggtacaatgaaaggcacttaatatgatc

SEQ ID NO: 706966 - DNA, 33 bp, Homo sapien
agccaggtacaatgaagggcacttaatatgatc

SEQ ID NO: 706967 - DNA, 33 bp, Homo sapien
ctttatgggtgaagagactaatgtacttgaaga

SEQ ID NO: 706968 - DNA, 33 bp, Homo sapien
ctttatgggtgaagaggctaatgtacttgaaga

SEQ ID NO: 706969 - DNA, 33 bp, Homo sapien
cccagggctccatcgaagcccacaataggggct

SEQ ID NO: 706970 - DNA, 33 bp, Homo sapien
cccagggctccatcgaggcccacaataggggct

SEQ ID NO: 706971 - DNA, 33 bp, Homo sapien
agatgtcatgtaaacgaaagttgagcaggaagc

SEQ ID NO: 706972 - DNA, 33 bp, Homo sapien
agatgtcatgtaaacggaagttgagcaggaagc

SEQ ID NO: 706973 - DNA, 33 bp, Homo sapien
aagctggcaatatttacagtctagccactctga

SEQ ID NO: 706974 - DNA, 33 bp, Homo sapien
aagctggcaatatttagagtctagccactctga

SEQ ID NO: 706975 - DNA, 33 bp, Homo sapien
gctctggaatcttgcaaataactagatcagaca

SEQ ID NO: 706976 - DNA, 33 bp, Homo sapien
gctctggaatcttgcatataactagatcagaca

SEQ ID NO: 706977 - DNA, 33 bp, Homo sapien
aaacacaacactagacgaacattttctatcctt

SEQ ID NO: 706978 - DNA, 33 bp, Homo sapien
aaacacaacactagactaacattttctatcctt

SEQ ID NO: 706979 - DNA, 33 bp, Homo sapien
gaattttcactgatgacagactgtttggcaaga

SEQ ID NO: 706980 - DNA, 33 bp, Homo sapien
gaattttcactgatgatagactgtttggcaaga

SEQ ID NO: 706981 - DNA, 33 bp, Homo sapien
aaataaaatggtcataccttataaacggacttt

SEQ ID NO: 706982 - DNA, 33 bp, Homo sapien
aaataaaatggtcatatcttataaacggacttt

SEQ ID NO: 706983 - DNA, 33 bp, Homo sapien
gtttccacgtgatgttaaacaagcaggtgcaca

SEQ ID NO: 706984 - DNA, 33 bp, Homo sapien
gtttccacgtgatgttgaacaagcaggtgcaca

SEQ ID NO: 706985 - DNA, 33 bp, Homo sapien
tgctggctccatgcaaagctacagttgaaccag

SEQ ID NO: 706986 - DNA, 33 bp, Homo sapien
tgctggctccatgcaaggctacagttgaaccag

SEQ ID NO: 706987 - DNA, 33 bp, Homo sapien
ttaaattagtgagaaccgcttaataatatcaac

SEQ ID NO: 706988 - DNA, 33 bp, Homo sapien
ttaaattagtgagaactgcttaataatatcaac

SEQ ID NO: 706989 - DNA, 33 bp, Homo sapien
agaaattgacactcaaataagtttattacacaa

SEQ ID NO: 706990 - DNA, 33 bp, Homo sapien
agaaattgacactcaactaagtttattacacaa

SEQ ID NO: 706991 - DNA, 33 bp, Homo sapien
accagtggaaggtatccgacttaccagcagcaa

SEQ ID NO: 706992 - DNA, 33 bp, Homo sapien
accagtggaaggtatctgacttaccagcagcaa

SEQ ID NO: 706993 - DNA, 33 bp, Homo sapien
ctgagaaataattccacacatcactgttatgaa

SEQ ID NO: 706994 - DNA, 33 bp, Homo sapien
ctgagaaataattccagacatcactgttatgaa

SEQ ID NO: 706995 - DNA, 33 bp, Homo sapien
tgcagcaagggtatagaaaacacacatatctat

SEQ ID NO: 706996 - DNA, 33 bp, Homo sapien
tgcagcaagggtatagtaaacacacatatctat

SEQ ID NO: 706997 - DNA, 33 bp, Homo sapien
tttttacacgtggaaacatagtacagcttgaga

SEQ ID NO: 706998 - DNA, 33 bp, Homo sapien
tttttacacgtggaaatatagtacagcttgaga

SEQ ID NO: 706999 - DNA, 33 bp, Homo sapien
aagatgtagaggataaaattgattatgcatttt

SEQ ID NO: 707000 - DNA, 33 bp, Homo sapien
aagatgtagaggataacattgattatgcatttt

SEQ ID NO: 707001 - DNA, 33 bp, Homo sapien
tgttctcaatggttcaaagttctcaatgacttg

SEQ ID NO: 707002 - DNA, 33 bp, Homo sapien
tgttctcaatggttcatagttctcaatgacttg

SEQ ID NO: 707003 - DNA, 33 bp, Homo sapien
tccaggatggtaaagaagccaatgtctgcctct

SEQ ID NO: 707004 - DNA, 33 bp, Homo sapien
tccaggatggtaaagatgccaatgtctgcctct

SEQ ID NO: 707005 - DNA, 33 bp, Homo sapien
tgaattaatgcataaacggaaaaacaaacaatg

SEQ ID NO: 707006 - DNA, 33 bp, Homo sapien
tgaattaatgcataaatggaaaaacaaacaatg

SEQ ID NO: 707007 - DNA, 33 bp, Homo sapien
gtaagggatagagtaaaataaaatacacagaaa

SEQ ID NO: 707008 - DNA, 33 bp, Homo sapien
gtaagggatagagtaacataaaatacacagaaa

SEQ ID NO: 707009 - DNA, 33 bp, Homo sapien
tttttcttcccagtctcaatatggttaccccgt

SEQ ID NO: 707010 - DNA, 33 bp, Homo sapien
tttttcttcccagtcttaatatggttaccccgt

SEQ ID NO: 707011 - DNA, 33 bp, Homo sapien
tgttttgtattcagagcaagagaagagtactat

SEQ ID NO: 707012 - DNA, 33 bp, Homo sapien
tgttttgtattcagagtaagagaagagtactat

SEQ ID NO: 707013 - DNA, 33 bp, Homo sapien
aattctgctaaagctacctttaccagaatttag

SEQ ID NO: 707014 - DNA, 33 bp, Homo sapien
aattctgctaaagctatctttaccagaatttag

SEQ ID NO: 707015 - DNA, 33 bp, Homo sapien
gtggtttcatcaagtgcaaaataatgtgttatc

SEQ ID NO: 707016 - DNA, 33 bp, Homo sapien
gtggtttcatcaagtggaaaataatgtgttatc

SEQ ID NO: 707017 - DNA, 33 bp, Homo sapien
caaacattggtttgctcaatccatgcagagaga

SEQ ID NO: 707018 - DNA, 33 bp, Homo sapien
caaacattggtttgctgaatccatgcagagaga

SEQ ID NO: 707019 - DNA, 33 bp, Homo sapien
ccttacaatctgttcgcacaaatgatttcaaaa

SEQ ID NO: 707020 - DNA, 33 bp, Homo sapien
ccttacaatctgttcgtacaaatgatttcaaaa

SEQ ID NO: 707021 - DNA, 33 bp, Homo sapien
gatatagtgacacttcaacctcaaatgatatgg

SEQ ID NO: 707022 - DNA, 33 bp, Homo sapien
gatatagtgacacttcgacctcaaatgatatgg

SEQ ID NO: 707023 - DNA, 33 bp, Homo sapien
aacacttggaggctccacggtttcaatgatgat

SEQ ID NO: 707024 - DNA, 33 bp, Homo sapien
aacacttggaggctccgcggtttcaatgatgat

SEQ ID NO: 707025 - DNA, 33 bp, Homo sapien
gcagttttatcacaataagctacttctcgtagg

SEQ ID NO: 707026 - DNA, 33 bp, Homo sapien
gcagttttatcacaatgagctacttctcgtagg

SEQ ID NO: 707027 - DNA, 33 bp, Homo sapien
gctggtcttggcactaagtaaataaacagacaa

SEQ ID NO: 707028 - DNA, 33 bp, Homo sapien
gctggtcttggcactatgtaaataaacagacaa

SEQ ID NO: 707029 - DNA, 33 bp, Homo sapien
ccttgtatgagctgacaatagaaattacatgat

SEQ ID NO: 707030 - DNA, 33 bp, Homo sapien
ccttgtatgagctgacgatagaaattacatgat

SEQ ID NO: 707031 - DNA, 33 bp, Homo sapien
gatgtaggaatcttgaagcctgtcttagaattc

SEQ ID NO: 707032 - DNA, 33 bp, Homo sapien
gatgtaggaatcttgaggcctgtcttagaattc

SEQ ID NO: 707033 - DNA, 33 bp, Homo sapien
ctttctggttgaatgaccttgggtaaattacga

SEQ ID NO: 707034 - DNA, 33 bp, Homo sapien
ctttctggttgaatgatcttgggtaaattacga

SEQ ID NO: 707035 - DNA, 33 bp, Homo sapien
ataatacataccggccacataattcagtgtctg

SEQ ID NO: 707036 - DNA, 33 bp, Homo sapien
ataatacataccggccgcataattcagtgtctg

SEQ ID NO: 707037 - DNA, 33 bp, Homo sapien
tgttcttctagacaaaaagcgtgctgaaatctt

SEQ ID NO: 707038 - DNA, 33 bp, Homo sapien
tgttcttctagacaaagagcgtgctgaaatctt

SEQ ID NO: 707039 - DNA, 33 bp, Homo sapien
gaatactgtccagacacgaataggcctgtaatg

SEQ ID NO: 707040 - DNA, 33 bp, Homo sapien
gaatactgtccagacaggaataggcctgtaatg

SEQ ID NO: 707041 - DNA, 33 bp, Homo sapien
tgcaggtttctactctaaagacctcatcatcga

SEQ ID NO: 707042 - DNA, 33 bp, Homo sapien
tgcaggtttctactctgaagacctcatcatcga

SEQ ID NO: 707043 - DNA, 33 bp, Homo sapien
ctcttttgtatctttacctggtaacagtggggc

SEQ ID NO: 707044 - DNA, 33 bp, Homo sapien
ctcttttgtatctttatctggtaacagtggggc

SEQ ID NO: 707045 - DNA, 33 bp, Homo sapien
ggtacaagggttcaaaaataaactgttgggtat

SEQ ID NO: 707046 - DNA, 33 bp, Homo sapien
ggtacaagggttcaaacataaactgttgggtat

SEQ ID NO: 707047 - DNA, 33 bp, Homo sapien
gacacatatttaggcactgaattcctatataag

SEQ ID NO: 707048 - DNA, 33 bp, Homo sapien
gacacatatttaggcattgaattcctatataag

SEQ ID NO: 707049 - DNA, 33 bp, Homo sapien
actaacattacagcttaaactaaatatcatctt

SEQ ID NO: 707050 - DNA, 33 bp, Homo sapien
actaacattacagcttgaactaaatatcatctt

SEQ ID NO: 707051 - DNA, 33 bp, Homo sapien
tgaagattttaatgtaccacccagcacaaatga

SEQ ID NO: 707052 - DNA, 33 bp, Homo sapien
tgaagattttaatgtagcacccagcacaaatga

SEQ ID NO: 707053 - DNA, 33 bp, Homo sapien
agcctaatatggcccaaactaatacaactcaat

SEQ ID NO: 707054 - DNA, 33 bp, Homo sapien
agcctaatatggcccacactaatacaactcaat

SEQ ID NO: 707055 - DNA, 33 bp, Homo sapien
gtactacaaacaagacaccagtggaatcaaaga

SEQ ID NO: 707056 - DNA, 33 bp, Homo sapien
gtactacaaacaagaccccagtggaatcaaaga

SEQ ID NO: 707057 - DNA, 33 bp, Homo sapien
tgaaggttatgtggtaaaagttcagtttcttca

SEQ ID NO: 707058 - DNA, 33 bp, Homo sapien
tgaaggttatgtggtacaagttcagtttcttca

SEQ ID NO: 707059 - DNA, 33 bp, Homo sapien
gaccttgtgatcatataagttaagccagcaaag

SEQ ID NO: 707060 - DNA, 33 bp, Homo sapien
gaccttgtgatcatatgagttaagccagcaaag

SEQ ID NO: 707061 - DNA, 33 bp, Homo sapien
aggtaggtggctaagccaaaatatgtgcaatgg

SEQ ID NO: 707062 - DNA, 33 bp, Homo sapien
aggtaggtggctaagctaaaatatgtgcaatgg

SEQ ID NO: 707063 - DNA, 33 bp, Homo sapien
taagagattcaagtaacataggcataagaaatt

SEQ ID NO: 707064 - DNA, 33 bp, Homo sapien
taagagattcaagtaagataggcataagaaatt

SEQ ID NO: 707065 - DNA, 33 bp, Homo sapien; identical to SEQ ID NO: 707063

SEQ ID NO: 707066 - DNA, 33 bp, Homo sapien; identical to SEQ ID NO: 707064

SEQ ID NO: 707067 - DNA, 33 bp, Homo sapien
gttctttctattttccacagctttggctggctg

SEQ ID NO: 707068 - DNA, 33 bp, Homo sapien
gttctttctattttcctcagctttggctggctg

SEQ ID NO: 707069 - DNA, 33 bp, Homo sapien
tgttctctgaagaacaactagcctaatgacttg

SEQ ID NO: 707070 - DNA, 33 bp, Homo sapien
tgttctctgaagaacagctagcctaatgacttg

SEQ ID NO: 707071 - DNA, 33 bp, Homo sapien
ggatgaggctccaaaaattatctgatttctcca

SEQ ID NO: 707072 - DNA, 33 bp, Homo sapien
ggatgaggctccaaaacttatctgatttctcca

SEQ ID NO: 707073 - DNA, 33 bp, Homo sapien
aatataatcttattggaacaaagccatgtacat

SEQ ID NO: 707074 - DNA, 33 bp, Homo sapien
aatataatcttattgggacaaagccatgtacat

SEQ ID NO: 707075 - DNA, 33 bp, Homo sapien
agctaagtgtaaatgacaatggagtatttcatg

SEQ ID NO: 707076 - DNA, 33 bp, Homo sapien
agctaagtgtaaatgataatggagtatttcatg

SEQ ID NO: 707077 - DNA, 33 bp, Homo sapien
tcccactttcaccttaacatctttaattaccac

SEQ ID NO: 707078 - DNA, 33 bp, Homo sapien
tcccactttcaccttatcatctttaattaccac

SEQ ID NO: 707079 - DNA, 33 bp, Homo sapien
agaactggtttgtagccattggtggtacttata

SEQ ID NO: 707080 - DNA, 33 bp, Homo sapien
agaactggtttgtagctattggtggtacttata

SEQ ID NO: 707081 - DNA, 33 bp, Homo sapien
tcatgatactcaactcactaaggaacaaaaagg

SEQ ID NO: 707082 - DNA, 33 bp, Homo sapien
tcatgatactcaactcgctaaggaacaaaaagg

SEQ ID NO: 707083 - DNA, 33 bp, Homo sapien
aaacatataggaatgcgccaataatcacagaac

SEQ ID NO: 707084 - DNA, 33 bp, Homo sapien
aaacatataggaatgctccaataatcacagaac

SEQ ID NO: 707085 - DNA, 33 bp, Homo sapien
cattattgtattgatactaaaggttcttgtaaa

SEQ ID NO: 707086 - DNA, 33 bp, Homo sapien
cattattgtattgatattaaaggttcttgtaaa

SEQ ID NO: 707087 - DNA, 33 bp, Homo sapien
gacaattaacaaagacgggcccagattttgata

SEQ ID NO: 707088 - DNA, 33 bp, Homo sapien
gacaattaacaaagactggcccagattttgata

SEQ ID NO: 707089 - DNA, 33 bp, Homo sapien
tatataaaatgaccaaatatctggagaatacct

SEQ ID NO: 707090 - DNA, 33 bp, Homo sapien
tatataaaatgaccaagtatctggagaatacct

SEQ ID NO: 707091 - DNA, 33 bp, Homo sapien
gaggatatatggaaaaacctcgatgtccaggca

SEQ ID NO: 707092 - DNA, 33 bp, Homo sapien
gaggatatatggaaaagcctcgatgtccaggca

SEQ ID NO: 707093 - DNA, 33 bp, Homo sapien
aggaatctttcagtcacggtggaagacaacaga

SEQ ID NO: 707094 - DNA, 33 bp, Homo sapien
aggaatctttcagtcatggtggaagacaacaga

SEQ ID NO: 707095 - DNA, 33 bp, Homo sapien
gctgcagagaggaataccttatctgctgagagt

SEQ ID NO: 707096 - DNA, 33 bp, Homo sapien
gctgcagagaggaatatcttatctgctgagagt

SEQ ID NO: 707097 - DNA, 33 bp, Homo sapien
tgttttccatggagagccacaagagaggcataa

SEQ ID NO: 707098 - DNA, 33 bp, Homo sapien
tgttttccatggagagtcacaagagaggcataa

SEQ ID NO: 707099 - DNA, 33 bp, Homo sapien
cgagatatttgcaaagacagtagagatcctctt

SEQ ID NO: 707100 - DNA, 33 bp, Homo sapien
cgagatatttgcaaaggcagtagagatcctctt

SEQ ID NO: 707101 - DNA, 33 bp, Homo sapien
actgttcaaaagttcaccaattaaattacagat

SEQ ID NO: 707102 - DNA, 33 bp, Homo sapien
actgttcaaaagttcagcaattaaattacagat

SEQ ID NO: 707103 - DNA, 33 bp, Homo sapien
gttaactaccttatgcagaagattggtttgcta

SEQ ID NO: 707104 - DNA, 33 bp, Homo sapien
gttaactaccttatgccgaagattggtttgcta

SEQ ID NO: 707105 - DNA, 33 bp, Homo sapien
tggaacagatgtggaacggagtaaaccaggtat

SEQ ID NO: 707106 - DNA, 33 bp, Homo sapien
tggaacagatgtggaatggagtaaaccaggtat

SEQ ID NO: 707107 - DNA, 33 bp, Homo sapien
aatctgactaataaacaactgtagaactgctga

SEQ ID NO: 707108 - DNA, 33 bp, Homo sapien
aatctgactaataaacgactgtagaactgctga

SEQ ID NO: 707109 - DNA, 33 bp, Homo sapien
gactcaaaggggaaaccgagttggtgatatatt

SEQ ID NO: 707110 - DNA, 33 bp, Homo sapien
gactcaaaggggaaactgagttggtgatatatt

SEQ ID NO: 707111 - DNA, 33 bp, Homo sapien
atctttccttattccaatctggccttttcccag

SEQ ID NO: 707112 - DNA, 33 bp, Homo sapien
atctttccttattccattctggccttttcccag

SEQ ID NO: 707113 - DNA, 33 bp, Homo sapien
tattgaattttctcaaaataagccaagttgaaa

SEQ ID NO: 707114 - DNA, 33 bp, Homo sapien
tattgaattttctcaatataagccaagttgaaa

SEQ ID NO: 707115 - DNA, 33 bp, Homo sapien
tgaacaagttggtcataaagttttgtcaaacac

SEQ ID NO: 707116 - DNA, 33 bp, Homo sapien
tgaacaagttggtcatcaagttttgtcaaacac

SEQ ID NO: 707117 - DNA, 33 bp, Homo sapien
aaagacgtatatgataaaggactgtcattcaaa

SEQ ID NO: 707118 - DNA, 33 bp, Homo sapien
aaagacgtatatgatacaggactgtcattcaaa

SEQ ID NO: 707119 - DNA, 33 bp, Homo sapien
gtagaggaaatacttgaagatgtggtaaaaagg

SEQ ID NO: 707120 - DNA, 33 bp, Homo sapien
gtagaggaaatacttgcagatgtggtaaaaagg

SEQ ID NO: 707121 - DNA, 33 bp, Homo sapien
gagatgccatttttaacactttcgtagccagaa

SEQ ID NO: 707122 - DNA, 33 bp, Homo sapien
gagatgccatttttaatactttcgtagccagaa

SEQ ID NO: 707123 - DNA, 33 bp, Homo sapien
ggccctcgctctcttaaattctatgacgcctgt

SEQ ID NO: 707124 - DNA, 33 bp, Homo sapien
ggccctcgctctcttatattctatgacgcctgt

SEQ ID NO: 707125 - DNA, 33 bp, Homo sapien
ttaatcatgctagaacggaattttctcacttat

SEQ ID NO: 707126 - DNA, 33 bp, Homo sapien
ttaatcatgctagaactgaattttctcacttat

SEQ ID NO: 707127 - DNA, 33 bp, Homo sapien
cacatattggatcagaaaaagaatgctgtatca

SEQ ID NO: 707128 - DNA, 33 bp, Homo sapien
cacatattggatcagagaaagaatgctgtatca

SEQ ID NO: 707129 - DNA, 33 bp, Homo sapien
cattttattttttgccgaccttacattccttac

SEQ ID NO: 707130 - DNA, 33 bp, Homo sapien
cattttattttttgcctaccttacattccttac

SEQ ID NO: 707131 - DNA, 33 bp, Homo sapien
attgaaagaaaactgacagtactgctctcacct

SEQ ID NO: 707132 - DNA, 33 bp, Homo sapien
attgaaagaaaactgagagtactgctctcacct

SEQ ID NO: 707133 - DNA, 33 bp, Homo sapien
atatggagtttccaacactacattctacacaat

SEQ ID NO: 707134 - DNA, 33 bp, Homo sapien
atatggagtttccaacgctacattctacacaat

SEQ ID NO: 707135 - DNA, 33 bp, Homo sapien
catgctgcatggtaatcaaaacaaatcaaatgt

SEQ ID NO: 707136 - DNA, 33 bp, Homo sapien
catgctgcatggtaattaaaacaaatcaaatgt

SEQ ID NO: 707137 - DNA, 33 bp, Homo sapien
aattttggagttagaaagaactgagttgacaac

SEQ ID NO: 707138 - DNA, 33 bp, Homo sapien
aattttggagttagaaggaactgagttgacaac

SEQ ID NO: 707139 - DNA, 33 bp, Homo sapien
aattacattgccatcaaaagagcaagaatgcta

SEQ ID NO: 707140 - DNA, 33 bp, Homo sapien
aattacattgccatcacaagagcaagaatgcta

SEQ ID NO: 707141 - DNA, 33 bp, Homo sapien
gagaaatcagaagaaaccaaggagtaacaggtc

SEQ ID NO: 707142 - DNA, 33 bp, Homo sapien
gagaaatcagaagaaagcaaggagtaacaggtc

SEQ ID NO: 707143 - DNA, 33 bp, Homo sapien
caaggcagcattaaatcagttttcccttgcaca

SEQ ID NO: 707144 - DNA, 33 bp, Homo sapien
caaggcagcattaaattagttttcccttgcaca

SEQ ID NO: 707145 - DNA, 33 bp, Homo sapien
ttactcatctgaaaacaaaatcccttatcacag

SEQ ID NO: 707146 - DNA, 33 bp, Homo sapien
ttactcatctgaaaacgaaatcccttatcacag

SEQ ID NO: 707147 - DNA, 33 bp, Homo sapien
atttctcagcacctacacatgaacttccttgcc

SEQ ID NO: 707148 - DNA, 33 bp, Homo sapien
atttctcagcacctacgcatgaacttccttgcc

SEQ ID NO: 707149 - DNA, 33 bp, Homo sapien
gtaatttatggcaagacgaatagcacagtaacc

SEQ ID NO: 707150 - DNA, 33 bp, Homo sapien
gtaatttatggcaagatgaatagcacagtaacc

SEQ ID NO: 707151 - DNA, 33 bp, Homo sapien
gtgcttaccaatagccacagtttcaattatttt

SEQ ID NO: 707152 - DNA, 33 bp, Homo sapien
gtgcttaccaatagccgcagtttcaattatttt

SEQ ID NO: 707153 - DNA, 33 bp, Homo sapien
ctggacctaattcaaaataaaaacaagaggagg

SEQ ID NO: 707154 - DNA, 33 bp, Homo sapien
ctggacctaattcaaagtaaaaacaagaggagg

SEQ ID NO: 707155 - DNA, 33 bp, Homo sapien
ggtttcttctactgaacgtatccaaatcatggg

SEQ ID NO: 707156 - DNA, 33 bp, Homo sapien
ggtttcttctactgaatgtatccaaatcatggg

SEQ ID NO: 707157 - DNA, 33 bp, Homo sapien
acacagctgtaaattacgtagactttccacagt

SEQ ID NO: 707158 - DNA, 33 bp, Homo sapien
acacagctgtaaattaggtagactttccacagt

SEQ ID NO: 707159 - DNA, 33 bp, Homo sapien
tcaaagtgtgaaattaccttccccacatacttc

SEQ ID NO: 707160 - DNA, 33 bp, Homo sapien
tcaaagtgtgaaattagcttccccacatacttc

SEQ ID NO: 707161 - DNA, 33 bp, Homo sapien
tgctagcaaggagacaactcaatgaggaagtaa

SEQ ID NO: 707162 - DNA, 33 bp, Homo sapien
tgctagcaaggagacatctcaatgaggaagtaa

SEQ ID NO: 707163 - DNA, 33 bp, Homo sapien
ttcttatcactaaacagcattcaattttatgca

SEQ ID NO: 707164 - DNA, 33 bp, Homo sapien
ttcttatcactaaacatcattcaattttatgca

SEQ ID NO: 707165 - DNA, 33 bp, Homo sapien
tgtaactaagtagcaactatagcattaggcaat

SEQ ID NO: 707166 - DNA, 33 bp, Homo sapien
tgtaactaagtagcaagtatagcattaggcaat

SEQ ID NO: 707167 - DNA, 33 bp, Homo sapien
aaaatctttgttgtgccaattccaacatctgag

SEQ ID NO: 707168 - DNA, 33 bp, Homo sapien
aaaatctttgttgtgctaattccaacatctgag

SEQ ID NO: 707169 - DNA, 33 bp, Homo sapien
tgatattaaatcttaacgctactctcatgactt

SEQ ID NO: 707170 - DNA, 33 bp, Homo sapien
tgatattaaatcttaatgctactctcatgactt

SEQ ID NO: 707171 - DNA, 33 bp, Homo sapien
gaatggtagaggaaagaccatcattatcataaa

SEQ ID NO: 707172 - DNA, 33 bp, Homo sapien
gaatggtagaggaaaggccatcattatcataaa

SEQ ID NO: 707173 - DNA, 33 bp, Homo sapien
tagtgttggtgaaaaaacctgcttttcagcatg

SEQ ID NO: 707174 - DNA, 33 bp, Homo sapien
tagtgttggtgaaaaatcctgcttttcagcatg

SEQ ID NO: 707175 - DNA, 33 bp, Homo sapien
ttataacctgggaatagaatcaagggtggaaag

SEQ ID NO: 707176 - DNA, 33 bp, Homo sapien
ttataacctgggaatataatcaagggtggaaag

SEQ ID NO: 707177 - DNA, 33 bp, Homo sapien
ctcattctgctaccataagccctgctactgtga

SEQ ID NO: 707178 - DNA, 33 bp, Homo sapien
ctcattctgctaccatgagccctgctactgtga

SEQ ID NO: 707179 - DNA, 33 bp, Homo sapien
actgaggagacaataaccaactagtctctgaga

SEQ ID NO: 707180 - DNA, 33 bp, Homo sapien
actgaggagacaataatcaactagtctctgaga

SEQ ID NO: 707181 - DNA, 33 bp, Homo sapien
taagttttttcatcctcagacttctaaggttag

SEQ ID NO: 707182 - DNA, 33 bp, Homo sapien
taagttttttcatcctgagacttctaaggttag

SEQ ID NO: 707183 - DNA, 33 bp, Homo sapien
aaagctggttcgcaaccacaagccaacacagcc

SEQ ID NO: 707184 - DNA, 33 bp, Homo sapien
aaagctggttcgcaacgacaagccaacacagcc

SEQ ID NO: 707185 - DNA, 33 bp, Homo sapien
gcatgtctgtatggtacctagcaaacttctaag

SEQ ID NO: 707186 - DNA, 33 bp, Homo sapien
gcatgtctgtatggtatctagcaaacttctaag

SEQ ID NO: 707187 - DNA, 33 bp, Homo sapien
tagcaatcctgccttaaggaataagtttctttc

SEQ ID NO: 707188 - DNA, 33 bp, Homo sapien
tagcaatcctgccttagggaataagtttctttc

SEQ ID NO: 707189 - DNA, 33 bp, Homo sapien
ctgtaaactgagcattaaaatcaaaacacaaca

SEQ ID NO: 707190 - DNA, 33 bp, Homo sapien
ctgtaaactgagcattgaaatcaaaacacaaca

SEQ ID NO: 707191 - DNA, 33 bp, Homo sapien
ggaagcagagggtagaacagttattctgatgag

SEQ ID NO: 707192 - DNA, 33 bp, Homo sapien
ggaagcagagggtagaccagttattctgatgag

SEQ ID NO: 707193 - DNA, 33 bp, Homo sapien
gaagagttttcagacaaaggatagtatacattt

SEQ ID NO: 707194 - DNA, 33 bp, Homo sapien
gaagagttttcagacataggatagtatacattt

SEQ ID NO: 707195 - DNA, 33 bp, Homo sapien
cagtgaaacagtctaccataatctacttgaccc

SEQ ID NO: 707196 - DNA, 33 bp, Homo sapien
cagtgaaacagtctactataatctacttgaccc

SEQ ID NO: 707197 - DNA, 33 bp, Homo sapien
ttgtattcaaagcaagaccaaagcaagttactt

SEQ ID NO: 707198 - DNA, 33 bp, Homo sapien
ttgtattcaaagcaagtccaaagcaagttactt

SEQ ID NO: 707199 - DNA, 33 bp, Homo sapien
ttttccagaggattcaaggaacagagtaactca

SEQ ID NO: 707200 - DNA, 33 bp, Homo sapien
ttttccagaggattcagggaacagagtaactca

SEQ ID NO: 707201 - DNA, 33 bp, Homo sapien
tccacatgaaaacacaaagtaggtgaaaaagat

SEQ ID NO: 707202 - DNA, 33 bp, Homo sapien
tccacatgaaaacacagagtaggtgaaaaagat

SEQ ID NO: 707203 - DNA, 33 bp, Homo sapien
gaattgaatattgaggaagaaacaacttatata

SEQ ID NO: 707204 - DNA, 33 bp, Homo sapien
gaattgaatattgagggagaaacaacttatata

SEQ ID NO: 707205 - DNA, 33 bp, Homo sapien
gttgtgcaatcactgccagtagttccaaaacat

SEQ ID NO: 707206 - DNA, 33 bp, Homo sapien
gttgtgcaatcactgctagtagttccaaaacat

SEQ ID NO: 707207 - DNA, 33 bp, Homo sapien
gatttgtagattctgacgaattttactaaaaag

SEQ ID NO: 707208 - DNA, 33 bp, Homo sapien
gatttgtagattctgatgaattttactaaaaag

SEQ ID NO: 707209 - DNA, 33 bp, Homo sapien
agaattcatgatattcaaaagtttcaccgttaa

SEQ ID NO: 707210 - DNA, 33 bp, Homo sapien
agaattcatgatattccaaagtttcaccgttaa

SEQ ID NO: 707211 - DNA, 33 bp, Homo sapien
gaaatgaagacatagaaaaaaaccacatcatta

SEQ ID NO: 707212 - DNA, 33 bp, Homo sapien
gaaatgaagacatagagaaaaaccacatcatta

SEQ ID NO: 707213 - DNA, 33 bp, Homo sapien
attttatggggcagaaagcatagtagggtttaa

SEQ ID NO: 707214 - DNA, 33 bp, Homo sapien
attttatggggcagaacgcatagtagggtttaa

SEQ ID NO: 707215 - DNA, 33 bp, Homo sapien
ctgactcaagtgccaaagactaattttatgggg

SEQ ID NO: 707216 - DNA, 33 bp, Homo sapien
ctgactcaagtgccaacgactaattttatgggg

SEQ ID NO: 707217 - DNA, 33 bp, Homo sapien
aaacagagacattataacgactgattcatgaac

SEQ ID NO: 707218 - DNA, 33 bp, Homo sapien
aaacagagacattatagcgactgattcatgaac

SEQ ID NO: 707219 - DNA, 33 bp, Homo sapien
aagcactaaacagataagctcaaaggtatttta

SEQ ID NO: 707220 - DNA, 33 bp, Homo sapien
aagcactaaacagataggctcaaaggtatttta

SEQ ID NO: 707221 - DNA, 33 bp, Homo sapien
aagaaacaggcctaccaacaacttgaatttagc

SEQ ID NO: 707222 - DNA, 33 bp, Homo sapien
aagaaacaggcctaccgacaacttgaatttagc

SEQ ID NO: 707223 - DNA, 33 bp, Homo sapien
tgccttttggctttcacaatcatgtaaatataa

SEQ ID NO: 707224 - DNA, 33 bp, Homo sapien
tgccttttggctttcataatcatgtaaatataa

SEQ ID NO: 707225 - DNA, 33 bp, Homo sapien
ggattgattgttactaacctcactgtattatac

SEQ ID NO: 707226 - DNA, 33 bp, Homo sapien
ggattgattgttactatcctcactgtattatac

SEQ ID NO: 707227 - DNA, 33 bp, Homo sapien
cctctgaacatagacaatcctattaatcatttc

SEQ ID NO: 707228 - DNA, 33 bp, Homo sapien
cctctgaacatagacagtcctattaatcatttc

SEQ ID NO: 707229 - DNA, 33 bp, Homo sapien
taaaatgtctgataaacccaattgcagaaatta

SEQ ID NO: 707230 - DNA, 33 bp, Homo sapien
taaaatgtctgataaatccaattgcagaaatta

SEQ ID NO: 707231 - DNA, 33 bp, Homo sapien
atgtgtatctccctgaagatttagcataggaag

SEQ ID NO: 707232 - DNA, 33 bp, Homo sapien
atgtgtatctccctgaggatttagcataggaag

SEQ ID NO: 707233 - DNA, 33 bp, Homo sapien
aacatttatctttcaccgagtgtcataattcag

SEQ ID NO: 707234 - DNA, 33 bp, Homo sapien
aacatttatctttcactgagtgtcataattcag

SEQ ID NO: 707235 - DNA, 33 bp, Homo sapien
catggctcttcaggacaggctaattgatcagga

SEQ ID NO: 707236 - DNA, 33 bp, Homo sapien
catggctcttcaggacgggctaattgatcagga

SEQ ID NO: 707237 - DNA, 33 bp, Homo sapien
attaatgctcatgctgcagaaaagatgcaaagg

SEQ ID NO: 707238 - DNA, 33 bp, Homo sapien
attaatgctcatgctgtagaaaagatgcaaagg

SEQ ID NO: 707239 - DNA, 33 bp, Homo sapien
ttataaaacatcaacactctgtttaccattgca

SEQ ID NO: 707240 - DNA, 33 bp, Homo sapien
ttataaaacatcaacattctgtttaccattgca

SEQ ID NO: 707241 - DNA, 33 bp, Homo sapien
gtcctccattaaaagaaaaattgagtggaaatc

SEQ ID NO: 707242 - DNA, 33 bp, Homo sapien
gtcctccattaaaagacaaattgagtggaaatc

SEQ ID NO: 707243 - DNA, 33 bp, Homo sapien
atagtaagtaatttcccctgaaagacactgata

SEQ ID NO: 707244 - DNA, 33 bp, Homo sapien
atagtaagtaatttcctctgaaagacactgata

SEQ ID NO: 707245 - DNA, 33 bp, Homo sapien
tacttttggatggactaaatccctgaagatgtc

SEQ ID NO: 707246 - DNA, 33 bp, Homo sapien
tacttttggatggacttaatccctgaagatgtc

SEQ ID NO: 707247 - DNA, 33 bp, Homo sapien
ctttactggtcataccacttctgctcttccctt

SEQ ID NO: 707248 - DNA, 33 bp, Homo sapien
ctttactggtcataccgcttctgctcttccctt

SEQ ID NO: 707249 - DNA, 33 bp, Homo sapien
caagcttttgctggtacatttttctatttcata

SEQ ID NO: 707250 - DNA, 33 bp, Homo sapien
caagcttttgctggtatatttttctatttcata

SEQ ID NO: 707251 - DNA, 33 bp, Homo sapien
cattccatcaagccaacaacttctgcatcttat

SEQ ID NO: 707252 - DNA, 33 bp, Homo sapien
cattccatcaagccaagaacttctgcatcttat

SEQ ID NO: 707253 - DNA, 33 bp, Homo sapien
acaccgtcatgttaaacgcaggaaattacagca

SEQ ID NO: 707254 - DNA, 33 bp, Homo sapien
acaccgtcatgttaaatgcaggaaattacagca

SEQ ID NO: 707255 - DNA, 33 bp, Homo sapien
ctgaaactctgatttgaagagggagaagaaaga

SEQ ID NO: 707256 - DNA, 33 bp, Homo sapien
ctgaaactctgatttggagagggagaagaaaga

SEQ ID NO: 707257 - DNA, 33 bp, Homo sapien
cttctggtaacatttacagtagaagagcttttt

SEQ ID NO: 707258 - DNA, 33 bp, Homo sapien
cttctggtaacatttatagtagaagagcttttt

SEQ ID NO: 707259 - DNA, 33 bp, Homo sapien
tagttcagagaaggctaaaccaagggtgaaatc

SEQ ID NO: 707260 - DNA, 33 bp, Homo sapien
tagttcagagaaggctgaaccaagggtgaaatc

SEQ ID NO: 707261 - DNA, 33 bp, Homo sapien
actaattcatagcgaaaccatactcactacagc

SEQ ID NO: 707262 - DNA, 33 bp, Homo sapien
actaattcatagcgaacccatactcactacagc

SEQ ID NO: 707263 - DNA, 33 bp, Homo sapien
tacattccaaccaataaagtatgagttcccttt

SEQ ID NO: 707264 - DNA, 33 bp, Homo sapien
tacattccaaccaatagagtatgagttcccttt

SEQ ID NO: 707265 - DNA, 33 bp, Homo sapien
aaagtcatttaggataccttttccatggtcagc

SEQ ID NO: 707266 - DNA, 33 bp, Homo sapien
aaagtcatttaggatatcttttccatggtcagc

SEQ ID NO: 707267 - DNA, 33 bp, Homo sapien
gcactccagaagaaggaaggagattgacagctc

SEQ ID NO: 707268 - DNA, 33 bp, Homo sapien
gcactccagaagaagggaggagattgacagctc

SEQ ID NO: 707269 - DNA, 33 bp, Homo sapien
agctgcaatgttatgacggcttcagtgtcacta

SEQ ID NO: 707270 - DNA, 33 bp, Homo sapien
agctgcaatgttatgatggcttcagtgtcacta

SEQ ID NO: 707271 - DNA, 33 bp, Homo sapien
tctaaattcagtcaaactgacatctaaaagtaa

SEQ ID NO: 707272 - DNA, 33 bp, Homo sapien
tctaaattcagtcaaattgacatctaaaagtaa

SEQ ID NO: 707273 - DNA, 33 bp, Homo sapien
tagaaaatatatatcaccataaaacatgataaa

SEQ ID NO: 707274 - DNA, 33 bp, Homo sapien
tagaaaatatatatcagcataaaacatgataaa

SEQ ID NO: 707275 - DNA, 33 bp, Homo sapien
ttccattagtgttgacaatagagtgattctctc

SEQ ID NO: 707276 - DNA, 33 bp, Homo sapien
ttccattagtgttgacgatagagtgattctctc

SEQ ID NO: 707277 - DNA, 33 bp, Homo sapien
acggctgcagaggaccagaagtggacagctcct

SEQ ID NO: 707278 - DNA, 33 bp, Homo sapien
acggctgcagaggaccggaagtggacagctcct

SEQ ID NO: 707279 - DNA, 33 bp, Homo sapien
aagacatttccctaagcctaatctatcctattt

SEQ ID NO: 707280 - DNA, 33 bp, Homo sapien
aagacatttccctaaggctaatctatcctattt

SEQ ID NO: 707281 - DNA, 33 bp, Homo sapien
caaaaaaaggttcacaaattagtgagttacaac

SEQ ID NO: 707282 - DNA, 33 bp, Homo sapien
caaaaaaaggttcacagattagtgagttacaac

SEQ ID NO: 707283 - DNA, 33 bp, Homo sapien
taataaatggattcaaagagcttaggaaacgca

SEQ ID NO: 707284 - DNA, 33 bp, Homo sapien
taataaatggattcaaggagcttaggaaacgca

SEQ ID NO: 707285 - DNA, 33 bp, Homo sapien
tcagagaagatcatcacggcaacttagaaaaga

SEQ ID NO: 707286 - DNA, 33 bp, Homo sapien
tcagagaagatcatcatggcaacttagaaaaga

SEQ ID NO: 707287 - DNA, 33 bp, Homo sapien
tttattgcgcccagaaacttttagctccacaga

SEQ ID NO: 707288 - DNA, 33 bp, Homo sapien
tttattgcgcccagaatcttttagctccacaga

SEQ ID NO: 707289 - DNA, 33 bp, Homo sapien
tgaagaatgaccttacaagatctactttgcaga

SEQ ID NO: 707290 - DNA, 33 bp, Homo sapien
tgaagaatgaccttacgagatctactttgcaga

SEQ ID NO: 707291 - DNA, 33 bp, Homo sapien
cgtacagtaaaagcgaaatcagagcctggagaa

SEQ ID NO: 707292 - DNA, 33 bp, Homo sapien
cgtacagtaaaagcgagatcagagcctggagaa

SEQ ID NO: 707293 - DNA, 33 bp, Homo sapien
gatggggaaggcaagaaaaggagaagctacaaa

SEQ ID NO: 707294 - DNA, 33 bp, Homo sapien
gatggggaaggcaagagaaggagaagctacaaa

SEQ ID NO: 707295 - DNA, 33 bp, Homo sapien
ggaataatgatgggaaatctacgtatgaacaga

SEQ ID NO: 707296 - DNA, 33 bp, Homo sapien
ggaataatgatgggaattctacgtatgaacaga

SEQ ID NO: 707297 - DNA, 33 bp, Homo sapien
ctacataacatcaagaaggtagataatggaaaa

SEQ ID NO: 707298 - DNA, 33 bp, Homo sapien
ctacataacatcaagagggtagataatggaaaa

SEQ ID NO: 707299 - DNA, 33 bp, Homo sapien
ggaagttaacacatcaaaaagcaatcctcagcc

SEQ ID NO: 707300 - DNA, 33 bp, Homo sapien
ggaagttaacacatcagaaagcaatcctcagcc

SEQ ID NO: 707301 - DNA, 33 bp, Homo sapien
tatctcatacttatctcggtctgagtcagtatc

SEQ ID NO: 707302 - DNA, 33 bp, Homo sapien
tatctcatacttatcttggtctgagtcagtatc

SEQ ID NO: 707303 - DNA, 33 bp, Homo sapien
agaaagaatctcttcacggagtttacattccac

SEQ ID NO: 707304 - DNA, 33 bp, Homo sapien
agaaagaatctcttcatggagtttacattccac

SEQ ID NO: 707305 - DNA, 33 bp, Homo sapien
ttaatagtacatatgacgtgggcccaatgaatg

SEQ ID NO: 707306 - DNA, 33 bp, Homo sapien
ttaatagtacatatgatgtgggcccaatgaatg

SEQ ID NO: 707307 - DNA, 33 bp, Homo sapien
ataagaagttgaaacaatgttattagaagtaac

SEQ ID NO: 707308 - DNA, 33 bp, Homo sapien
ataagaagttgaaacattgttattagaagtaac

SEQ ID NO: 707309 - DNA, 33 bp, Homo sapien
agttttggacaatttccaatacactgcataatt

SEQ ID NO: 707310 - DNA, 33 bp, Homo sapien
agttttggacaatttctaatacactgcataatt

SEQ ID NO: 707311 - DNA, 33 bp, Homo sapien
cattttggctctctacaatgaatatcaaggtaa

SEQ ID NO: 707312 - DNA, 33 bp, Homo sapien
cattttggctctctacgatgaatatcaaggtaa

SEQ ID NO: 707313 - DNA, 33 bp, Homo sapien
aaataaactgtaagcaaaattggtgtggctagt

SEQ ID NO: 707314 - DNA, 33 bp, Homo sapien
aaataaactgtaagcacaattggtgtggctagt

SEQ ID NO: 707315 - DNA, 33 bp, Homo sapien
aaatgaactatagccacattcaggtagcataaa

SEQ ID NO: 707316 - DNA, 33 bp, Homo sapien
aaatgaactatagccatattcaggtagcataaa

SEQ ID NO: 707317 - DNA, 33 bp, Homo sapien
tctccatgcttccatacgtttgcacatattggt

SEQ ID NO: 707318 - DNA, 33 bp, Homo sapien
tctccatgcttccataggtttgcacatattggt

SEQ ID NO: 707319 - DNA, 33 bp, Homo sapien
tgtttagattaaagcactaggaagaaaataatc

SEQ ID NO: 707320 - DNA, 33 bp, Homo sapien
tgtttagattaaagcattaggaagaaaataatc

SEQ ID NO: 707321 - DNA, 33 bp, Homo sapien
tcacagatgtattggaactcctacacaatggga

SEQ ID NO: 707322 - DNA, 33 bp, Homo sapien
tcacagatgtattggatctcctacacaatggga

SEQ ID NO: 707323 - DNA, 33 bp, Homo sapien
ctgatgtaaattttgaaggaatttctgaggaga

SEQ ID NO: 707324 - DNA, 33 bp, Homo sapien
ctgatgtaaattttgagggaatttctgaggaga

SEQ ID NO: 707325 - DNA, 33 bp, Homo sapien
aataacaggttagaaacagttatgttcactcct

SEQ ID NO: 707326 - DNA, 33 bp, Homo sapien
aataacaggttagaaagagttatgttcactcct

SEQ ID NO: 707327 - DNA, 33 bp, Homo sapien
ggccatcagagaaacaccagattttggtcagga

SEQ ID NO: 707328 - DNA, 33 bp, Homo sapien
ggccatcagagaaacatcagattttggtcagga

SEQ ID NO: 707329 - DNA, 33 bp, Homo sapien
gctgcttgacgtcaccaggtacatcatgacaat

SEQ ID NO: 707330 - DNA, 33 bp, Homo sapien
gctgcttgacgtcaccgggtacatcatgacaat

SEQ ID NO: 707331 - DNA, 33 bp, Homo sapien
atcatttgcaagcaaagaaatccaagacaacaa

SEQ ID NO: 707332 - DNA, 33 bp, Homo sapien
atcatttgcaagcaaataaatccaagacaacaa

SEQ ID NO: 707333 - DNA, 33 bp, Homo sapien
ggagtttaagactattaaaaatgtgcttcaaac

SEQ ID NO: 707334 - DNA, 33 bp, Homo sapien
ggagtttaagactattgaaaatgtgcttcaaac

SEQ ID NO: 707335 - DNA, 33 bp, Homo sapien
agtcagccaatactataacagaggctatcataa

SEQ ID NO: 707336 - DNA, 33 bp, Homo sapien
agtcagccaatactatgacagaggctatcataa

SEQ ID NO: 707337 - DNA, 33 bp, Homo sapien
tataactgtcaggtcacctgaatactttacaat

SEQ ID NO: 707338 - DNA, 33 bp, Homo sapien
tataactgtcaggtcatctgaatactttacaat

SEQ ID NO: 707339 - DNA, 33 bp, Homo sapien
ccagcttctttgcaaccgcttctccagacaggc

SEQ ID NO: 707340 - DNA, 33 bp, Homo sapien
ccagcttctttgcaactgcttctccagacaggc

SEQ ID NO: 707341 - DNA, 33 bp, Homo sapien
atagttcagaggctgacgaaaagcttaaagtaa

SEQ ID NO: 707342 - DNA, 33 bp, Homo sapien
atagttcagaggctgatgaaaagcttaaagtaa

SEQ ID NO: 707343 - DNA, 33 bp, Homo sapien
cattaaatataactcaccctgcagtacctagat

SEQ ID NO: 707344 - DNA, 33 bp, Homo sapien
cattaaatataactcatcctgcagtacctagat

SEQ ID NO: 707345 - DNA, 33 bp, Homo sapien
gtaattacttttaaaaacagcaacatcttagca

SEQ ID NO: 707346 - DNA, 33 bp, Homo sapien
gtaattacttttaaaagcagcaacatcttagca

SEQ ID NO: 707347 - DNA, 33 bp, Homo sapien
tgccccactgatttcaactctctgaagtcacct

SEQ ID NO: 707348 - DNA, 33 bp, Homo sapien
tgccccactgatttcatctctctgaagtcacct

SEQ ID NO: 707349 - DNA, 33 bp, Homo sapien
cttcatagagagggacagagtaaaacagcttgt

SEQ ID NO: 707350 - DNA, 33 bp, Homo sapien
cttcatagagagggacggagtaaaacagcttgt

SEQ ID NO: 707351 - DNA, 33 bp, Homo sapien
ggatacagaaatcacacgctcaaatataacggg

SEQ ID NO: 707352 - DNA, 33 bp, Homo sapien
ggatacagaaatcacatgctcaaatataacggg

SEQ ID NO: 707353 - DNA, 33 bp, Homo sapien
caagcaagtctctacccagttttactgataagg

SEQ ID NO: 707354 - DNA, 33 bp, Homo sapien
caagcaagtctctacctagttttactgataagg

SEQ ID NO: 707355 - DNA, 33 bp, Homo sapien
ctgctgctccttgaaacaaggtgtgatctaata

SEQ ID NO: 707356 - DNA, 33 bp, Homo sapien
ctgctgctccttgaaataaggtgtgatctaata

SEQ ID NO: 707357 - DNA, 33 bp, Homo sapien
tcacacacgatggtccaggaattaatactttta

SEQ ID NO: 707358 - DNA, 33 bp, Homo sapien
tcacacacgatggtccgggaattaatactttta

SEQ ID NO: 707359 - DNA, 33 bp, Homo sapien
acatccagtcaccaaaaactgtatatttgacta

SEQ ID NO: 707360 - DNA, 33 bp, Homo sapien
acatccagtcaccaaacactgtatatttgacta

SEQ ID NO: 707361 - DNA, 33 bp, Homo sapien
agataagtaaggtgtgaaagctagaattattta

SEQ ID NO: 707362 - DNA, 33 bp, Homo sapien
agataagtaaggtgtgtaagctagaattattta

SEQ ID NO: 707363 - DNA, 33 bp, Homo sapien
aaattcatcattgaaaacttcttaaacaatttt

SEQ ID NO: 707364 - DNA, 33 bp, Homo sapien
aaattcatcattgaaagcttcttaaacaatttt

SEQ ID NO: 707365 - DNA, 33 bp, Homo sapien
aagacttgaataaagtcaagggcaatttagagg

SEQ ID NO: 707366 - DNA, 33 bp, Homo sapien
aagacttgaataaagtgaagggcaatttagagg

SEQ ID NO: 707367 - DNA, 33 bp, Homo sapien
gtcatattttcagaatgaacttcctgactgatt

SEQ ID NO: 707368 - DNA, 33 bp, Homo sapien
gtcatattttcagaattaacttcctgactgatt

SEQ ID NO: 707369 - DNA, 33 bp, Homo sapien
atctttgtatcctctacagctagaaaaagaaca

SEQ ID NO: 707370 - DNA, 33 bp, Homo sapien
atctttgtatcctctatagctagaaaaagaaca

SEQ ID NO: 707371 - DNA, 33 bp, Homo sapien
cagactgtgttttaatcagctagcgatgccata

SEQ ID NO: 707372 - DNA, 33 bp, Homo sapien
cagactgtgttttaattagctagcgatgccata

SEQ ID NO: 707373 - DNA, 33 bp, Homo sapien
ttccttagagctagtaacaaaacatttttgaag

SEQ ID NO: 707374 - DNA, 33 bp, Homo sapien
ttccttagagctagtagcaaaacatttttgaag

SEQ ID NO: 707375 - DNA, 33 bp, Homo sapien
gtctgtgttgatttccaaattatcatcttttga

SEQ ID NO: 707376 - DNA, 33 bp, Homo sapien
gtctgtgttgatttccgaattatcatcttttga

SEQ ID NO: 707377 - DNA, 33 bp, Homo sapien
tagaacctagaaaggacagtaaatgaattatgc

SEQ ID NO: 707378 - DNA, 33 bp, Homo sapien
tagaacctagaaaggatagtaaatgaattatgc

SEQ ID NO: 707379 - DNA, 33 bp, Homo sapien
aagccagctgaggaaacatggaacacctaatag

SEQ ID NO: 707380 - DNA, 33 bp, Homo sapien
aagccagctgaggaaagatggaacacctaatag

SEQ ID NO: 707381 - DNA, 33 bp, Homo sapien
agatagtgcttaccacaaaacctatcactgtga

SEQ ID NO: 707382 - DNA, 33 bp, Homo sapien
agatagtgcttaccacgaaacctatcactgtga

SEQ ID NO: 707383 - DNA, 33 bp, Homo sapien
ctattaactagggtgcaaaataggtattcaagt

SEQ ID NO: 707384 - DNA, 33 bp, Homo sapien
ctattaactagggtgcgaaataggtattcaagt

SEQ ID NO: 707385 - DNA, 33 bp, Homo sapien
tctattaactgagaaaatcatcaaacattcgtg

SEQ ID NO: 707386 - DNA, 33 bp, Homo sapien
tctattaactgagaaattcatcaaacattcgtg

SEQ ID NO: 707387 - DNA, 33 bp, Homo sapien
tctaaaccaattcttacactagagccagaatgc

SEQ ID NO: 707388 - DNA, 33 bp, Homo sapien
tctaaaccaattcttatactagagccagaatgc

SEQ ID NO: 707389 - DNA, 33 bp, Homo sapien
gtaagtgcaaaactgaataagacataagccatc

SEQ ID NO: 707390 - DNA, 33 bp, Homo sapien
gtaagtgcaaaactgagtaagacataagccatc

SEQ ID NO: 707391 - DNA, 33 bp, Homo sapien
ttacagtcactcttacaattttccactaagtca

SEQ ID NO: 707392 - DNA, 33 bp, Homo sapien
ttacagtcactcttacgattttccactaagtca

SEQ ID NO: 707393 - DNA, 33 bp, Homo sapien
aaaatgtcataaactgcaattattcatcacctt

SEQ ID NO: 707394 - DNA, 33 bp, Homo sapien
aaaatgtcataaactgtaattattcatcacctt

SEQ ID NO: 707395 - DNA, 33 bp, Homo sapien
agcctactcaacatcaagagagcaacgatgaag

SEQ ID NO: 707396 - DNA, 33 bp, Homo sapien
agcctactcaacatcaggagagcaacgatgaag

SEQ ID NO: 707397 - DNA, 33 bp, Homo sapien
ttgcaatcaccaactaaatccaaattgggcagt

SEQ ID NO: 707398 - DNA, 33 bp, Homo sapien
ttgcaatcaccaactacatccaaattgggcagt

SEQ ID NO: 707399 - DNA, 33 bp, Homo sapien
gatgaaaatcctagaaataattcaaaacaatga

SEQ ID NO: 707400 - DNA, 33 bp, Homo sapien
gatgaaaatcctagaagtaattcaaaacaatga

SEQ ID NO: 707401 - DNA, 33 bp, Homo sapien
cagaagggtgactgcccgcacgtagttgaacaa

SEQ ID NO: 707402 - DNA, 33 bp, Homo sapien
cagaagggtgactgcctgcacgtagttgaacaa

SEQ ID NO: 707403 - DNA, 33 bp, Homo sapien
ttgttaataggcagaaatccagaaagaaaaaaa

SEQ ID NO: 707404 - DNA, 33 bp, Homo sapien
ttgttaataggcagaagtccagaaagaaaaaaa

SEQ ID NO: 707405 - DNA, 33 bp, Homo sapien
catgaattcatttccactataccaaagttgtct

SEQ ID NO: 707406 - DNA, 33 bp, Homo sapien
catgaattcatttccagtataccaaagttgtct

SEQ ID NO: 707407 - DNA, 33 bp, Homo sapien
ggtgaacgatatttgcacattccacctactgca

SEQ ID NO: 707408 - DNA, 33 bp, Homo sapien
ggtgaacgatatttgcgcattccacctactgca

SEQ ID NO: 707409 - DNA, 33 bp, Homo sapien
atcagcaacagtgttagaaagttttgtacctgt

SEQ ID NO: 707410 - DNA, 33 bp, Homo sapien
atcagcaacagtgttataaagttttgtacctgt

SEQ ID NO: 707411 - DNA, 33 bp, Homo sapien
aaaaatctaaagatccaaccaggtccatgaggt

SEQ ID NO: 707412 - DNA, 33 bp, Homo sapien
aaaaatctaaagatcccaccaggtccatgaggt

SEQ ID NO: 707413 - DNA, 33 bp, Homo sapien
aatcttctgagacctccatgggcttgccaactg

SEQ ID NO: 707414 - DNA, 33 bp, Homo sapien
aatcttctgagacctctatgggcttgccaactg

SEQ ID NO: 707415 - DNA, 33 bp, Homo sapien
cagagttcatttctgcaacgaattttacagtaa

SEQ ID NO: 707416 - DNA, 33 bp, Homo sapien
cagagttcatttctgctacgaattttacagtaa

SEQ ID NO: 707417 - DNA, 33 bp, Homo sapien
tatcctccagctggtgcatattgtcaaaacagg

SEQ ID NO: 707418 - DNA, 33 bp, Homo sapien
tatcctccagctggtgtatattgtcaaaacagg

SEQ ID NO: 707419 - DNA, 33 bp, Homo sapien
atggaattcaagctagacattaagcatacactg

SEQ ID NO: 707420 - DNA, 33 bp, Homo sapien
atggaattcaagctagtcattaagcatacactg

SEQ ID NO: 707421 - DNA, 33 bp, Homo sapien
ttcagtaggaagcaaagccaaaataaggttctg

SEQ ID NO: 707422 - DNA, 33 bp, Homo sapien
ttcagtaggaagcaaatccaaaataaggttctg

SEQ ID NO: 707423 - DNA, 33 bp, Homo sapien
tccctgtcttcaatatgaacatctggtacacta

SEQ ID NO: 707424 - DNA, 33 bp, Homo sapien
tccctgtcttcaatattaacatctggtacacta

SEQ ID NO: 707425 - DNA, 33 bp, Homo sapien
gataaagtagtggagtaaaagtgatacagaaca

SEQ ID NO: 707426 - DNA, 33 bp, Homo sapien
gataaagtagtggagtcaaagtgatacagaaca

SEQ ID NO: 707427 - DNA, 33 bp, Homo sapien
aactggattgtttatacactagagtaacagaaa

SEQ ID NO: 707428 - DNA, 33 bp, Homo sapien
aactggattgtttatatactagagtaacagaaa

SEQ ID NO: 707429 - DNA, 33 bp, Homo sapien
ctctatagaaaatgtgcatatgaattccttttc

SEQ ID NO: 707430 - DNA, 33 bp, Homo sapien
ctctatagaaaatgtgtatatgaattccttttc

SEQ ID NO: 707431 - DNA, 33 bp, Homo sapien
ctctcacacactcacacattctaattttacatt

SEQ ID NO: 707432 - DNA, 33 bp, Homo sapien
ctctcacacactcacatattctaattttacatt

SEQ ID NO: 707433 - DNA, 33 bp, Homo sapien
atagttaaggtaaaaacgtcacataatgcttta

SEQ ID NO: 707434 - DNA, 33 bp, Homo sapien
atagttaaggtaaaaatgtcacataatgcttta

SEQ ID NO: 707435 - DNA, 33 bp, Homo sapien
tctaaaagcgattttcaaaataggtagtatagg

SEQ ID NO: 707436 - DNA, 33 bp, Homo sapien
tctaaaagcgattttccaaataggtagtatagg

SEQ ID NO: 707437 - DNA, 33 bp, Homo sapien
gtcatgtttcaaggacagactggtaaaaaatta

SEQ ID NO: 707438 - DNA, 33 bp, Homo sapien
gtcatgtttcaaggactgactggtaaaaaatta

SEQ ID NO: 707439 - DNA, 33 bp, Homo sapien
gtgtgcagttgtcccacggcttttggtcaagta

SEQ ID NO: 707440 - DNA, 33 bp, Homo sapien
gtgtgcagttgtcccatggcttttggtcaagta

SEQ ID NO: 707441 - DNA, 33 bp, Homo sapien
ttaatgttacacattaagtaacctctaggaata

SEQ ID NO: 707442 - DNA, 33 bp, Homo sapien
ttaatgttacacattaggtaacctctaggaata

SEQ ID NO: 707443 - DNA, 33 bp, Homo sapien
tgctacaatggcagaccctagtagttgcagtgt

SEQ ID NO: 707444 - DNA, 33 bp, Homo sapien
tgctacaatggcagactctagtagttgcagtgt

SEQ ID NO: 707445 - DNA, 33 bp, Homo sapien
tccttgctttacacaactaagatgagtgtgaac

SEQ ID NO: 707446 - DNA, 33 bp, Homo sapien
tccttgctttacacaattaagatgagtgtgaac

SEQ ID NO: 707447 - DNA, 33 bp, Homo sapien
taaaagcagcataaaaaaggagtaggaaggtct

SEQ ID NO: 707448 - DNA, 33 bp, Homo sapien
taaaagcagcataaaagaggagtaggaaggtct

SEQ ID NO: 707449 - DNA, 33 bp, Homo sapien
cagctatttgttagaaagtaatggtgaaaaaat

SEQ ID NO: 707450 - DNA, 33 bp, Homo sapien
cagctatttgttagaaggtaatggtgaaaaaat

SEQ ID NO: 707451 - DNA, 33 bp, Homo sapien
ggttgtattgtaggtgcaaaaatatttagcatt

SEQ ID NO: 707452 - DNA, 33 bp, Homo sapien
ggttgtattgtaggtgtaaaaatatttagcatt

SEQ ID NO: 707453 - DNA, 33 bp, Homo sapien
ctataaagaaaaaggagagaaagactggcaggg

SEQ ID NO: 707454 - DNA, 33 bp, Homo sapien
ctataaagaaaaaggatagaaagactggcaggg

SEQ ID NO: 707455 - DNA, 33 bp, Homo sapien
caatagtggattatataacagtaaggttggcac

SEQ ID NO: 707456 - DNA, 33 bp, Homo sapien
caatagtggattatattacagtaaggttggcac

SEQ ID NO: 707457 - DNA, 33 bp, Homo sapien
ataatcataagtctaccatgtttataatataac

SEQ ID NO: 707458 - DNA, 33 bp, Homo sapien
ataatcataagtctacgatgtttataatataac

SEQ ID NO: 707459 - DNA, 33 bp, Homo sapien
ttaggcagcaataatgcaaagatggatgatgtg

SEQ ID NO: 707460 - DNA, 33 bp, Homo sapien
ttaggcagcaataatgtaaagatggatgatgtg

SEQ ID NO: 707461 - DNA, 33 bp, Homo sapien
tatatacttatcctaaacattgtgaggctgtat

SEQ ID NO: 707462 - DNA, 33 bp, Homo sapien
tatatacttatcctaagcattgtgaggctgtat

SEQ ID NO: 707463 - DNA, 33 bp, Homo sapien
ttaacctcattctgtaaactatggaattgaata

SEQ ID NO: 707464 - DNA, 33 bp, Homo sapien
ttaacctcattctgtacactatggaattgaata

SEQ ID NO: 707465 - DNA, 33 bp, Homo sapien
gggattcacaggaaaaagtagtggtgcagagag

SEQ ID NO: 707466 - DNA, 33 bp, Homo sapien
gggattcacaggaaaaggtagtggtgcagagag

SEQ ID NO: 707467 - DNA, 33 bp, Homo sapien
tctcacagttcacaggcatttgctttctgccat

SEQ ID NO: 707468 - DNA, 33 bp, Homo sapien
tctcacagttcacaggtatttgctttctgccat

SEQ ID NO: 707469 - DNA, 33 bp, Homo sapien
tattatttagcataaaatcttacaatgaaagtc

SEQ ID NO: 707470 - DNA, 33 bp, Homo sapien
tattatttagcataaagtcttacaatgaaagtc

SEQ ID NO: 707471 - DNA, 33 bp, Homo sapien
agcaaatttctgactaaaagtacccgctggata

SEQ ID NO: 707472 - DNA, 33 bp, Homo sapien
agcaaatttctgactacaagtacccgctggata

SEQ ID NO: 707473 - DNA, 33 bp, Homo sapien
gaatactgttggtgaacagccacaactatgctg

SEQ ID NO: 707474 - DNA, 33 bp, Homo sapien
gaatactgttggtgaatagccacaactatgctg

SEQ ID NO: 707475 - DNA, 33 bp, Homo sapien
atccaaactgatcaaacagagatagaaggacat

SEQ ID NO: 707476 - DNA, 33 bp, Homo sapien
atccaaactgatcaaatagagatagaaggacat

SEQ ID NO: 707477 - DNA, 33 bp, Homo sapien
cacacctcctggctgaataagtgtaataccttt

SEQ ID NO: 707478 - DNA, 33 bp, Homo sapien
cacacctcctggctgagtaagtgtaataccttt

SEQ ID NO: 707479 - DNA, 33 bp, Homo sapien
gtaataccttttgctcccatctgccattagcaa

SEQ ID NO: 707480 - DNA, 33 bp, Homo sapien
gtaataccttttgctctcatctgccattagcaa

SEQ ID NO: 707481 - DNA, 33 bp, Homo sapien
gaagtgttcagataagcaaatccctaaagatag

SEQ ID NO: 707482 - DNA, 33 bp, Homo sapien
gaagtgttcagataaggaaatccctaaagatag

SEQ ID NO: 707483 - DNA, 33 bp, Homo sapien
ggaaatacgttacacagatacaagttcccagga

SEQ ID NO: 707484 - DNA, 33 bp, Homo sapien
ggaaatacgttacacatatacaagttcccagga

SEQ ID NO: 707485 - DNA, 33 bp, Homo sapien
cgtgatagggctcaagaaagtcctgaaggcaca

SEQ ID NO: 707486 - DNA, 33 bp, Homo sapien
cgtgatagggctcaagcaagtcctgaaggcaca

SEQ ID NO: 707487 - DNA, 33 bp, Homo sapien
agtgcaggtgttttgaaatttttcaactcttta

SEQ ID NO: 707488 - DNA, 33 bp, Homo sapien
agtgcaggtgttttgatatttttcaactcttta

SEQ ID NO: 707489 - DNA, 33 bp, Homo sapien
cattacatattttttcacatctctttggttatc

SEQ ID NO: 707490 - DNA, 33 bp, Homo sapien
cattacatattttttcgcatctctttggttatc

SEQ ID NO: 707491 - DNA, 33 bp, Homo sapien
ctgttggagttaggaagatcaagaaacattaca

SEQ ID NO: 707492 - DNA, 33 bp, Homo sapien
ctgttggagttaggaatatcaagaaacattaca

SEQ ID NO: 707493 - DNA, 33 bp, Homo sapien
gaaatataatgacaaccggagcaaggacttctg

SEQ ID NO: 707494 - DNA, 33 bp, Homo sapien
gaaatataatgacaactggagcaaggacttctg

SEQ ID NO: 707495 - DNA, 33 bp, Homo sapien
agagtcaccaggtcaccgcttattcttttttct

SEQ ID NO: 707496 - DNA, 33 bp, Homo sapien
agagtcaccaggtcactgcttattcttttttct

SEQ ID NO: 707497 - DNA, 33 bp, Homo sapien
ctaacttgaactctgaagacgtgtatctagcac

SEQ ID NO: 707498 - DNA, 33 bp, Homo sapien
ctaacttgaactctgatgacgtgtatctagcac

SEQ ID NO: 707499 - DNA, 33 bp, Homo sapien
tgtcattatgacaggaaatatacgtatgaaata

SEQ ID NO: 707500 - DNA, 33 bp, Homo sapien
tgtcattatgacaggagatatacgtatgaaata

SEQ ID NO: 707501 - DNA, 33 bp, Homo sapien
ttactttatttataccggctctatcattatata

SEQ ID NO: 707502 - DNA, 33 bp, Homo sapien
ttactttatttatacctgctctatcattatata

SEQ ID NO: 707503 - DNA, 33 bp, Homo sapien
tcaaaacacttaaccaagcatttcactatggac

SEQ ID NO: 707504 - DNA, 33 bp, Homo sapien
tcaaaacacttaaccaggcatttcactatggac

SEQ ID NO: 707505 - DNA, 33 bp, Homo sapien
gtgatagaactgttgacatactaacattttgaa

SEQ ID NO: 707506 - DNA, 33 bp, Homo sapien
gtgatagaactgttgagatactaacattttgaa

SEQ ID NO: 707507 - DNA, 33 bp, Homo sapien
tctcaaccaagcaggccagcatcatacccaaca

SEQ ID NO: 707508 - DNA, 33 bp, Homo sapien
tctcaaccaagcaggcgagcatcatacccaaca

SEQ ID NO: 707509 - DNA, 33 bp, Homo sapien
agattggtattcaaaacgtaggaattgagtaac

SEQ ID NO: 707510 - DNA, 33 bp, Homo sapien
agattggtattcaaaatgtaggaattgagtaac

SEQ ID NO: 707511 - DNA, 33 bp, Homo sapien
ggatgtatggtgcctgaagaatactgatgcgct

SEQ ID NO: 707512 - DNA, 33 bp, Homo sapien
ggatgtatggtgcctgcagaatactgatgcgct

SEQ ID NO: 707513 - DNA, 33 bp, Homo sapien
ttagaaattggctgaaactagaaatcctttaac

SEQ ID NO: 707514 - DNA, 33 bp, Homo sapien
ttagaaattggctgaacctagaaatcctttaac

SEQ ID NO: 707515 - DNA, 33 bp, Homo sapien
gttgatttgacccaaaaaattaataatggttta

SEQ ID NO: 707516 - DNA, 33 bp, Homo sapien
gttgatttgacccaaacaattaataatggttta

SEQ ID NO: 707517 - DNA, 33 bp, Homo sapien
tttttgaagaaggtgacaataaaatcttccaga

SEQ ID NO: 707518 - DNA, 33 bp, Homo sapien
tttttgaagaaggtgagaataaaatcttccaga

SEQ ID NO: 707519 - DNA, 33 bp, Homo sapien
tttatggatgacttaaatgtcctcagaaataca

SEQ ID NO: 707520 - DNA, 33 bp, Homo sapien
tttatggatgacttaagtgtcctcagaaataca

SEQ ID NO: 707521 - DNA, 33 bp, Homo sapien
ttgacattttaatcagactgactgcaagcgaac

SEQ ID NO: 707522 - DNA, 33 bp, Homo sapien
ttgacattttaatcaggctgactgcaagcgaac

SEQ ID NO: 707523 - DNA, 33 bp, Homo sapien
ggtattataaatattgcaacagtgacttatatg

SEQ ID NO: 707524 - DNA, 33 bp, Homo sapien
ggtattataaatattggaacagtgacttatatg

SEQ ID NO: 707525 - DNA, 33 bp, Homo sapien
ttgttcaaatcatagcacctcaaagaacttaga

SEQ ID NO: 707526 - DNA, 33 bp, Homo sapien
ttgttcaaatcatagcccctcaaagaacttaga

SEQ ID NO: 707527 - DNA, 33 bp, Homo sapien
aggtgcttacttaacccgacagctagcaaagtg

SEQ ID NO: 707528 - DNA, 33 bp, Homo sapien
aggtgcttacttaacctgacagctagcaaagtg

SEQ ID NO: 707529 - DNA, 33 bp, Homo sapien
gcttcctggttattcaaatatctagaacaagtg

SEQ ID NO: 707530 - DNA, 33 bp, Homo sapien
gcttcctggttattcacatatctagaacaagtg

SEQ ID NO: 707531 - DNA, 33 bp, Homo sapien
gtgtgagcacacgtggaagccccaatggaactc

SEQ ID NO: 707532 - DNA, 33 bp, Homo sapien
gtgtgagcacacgtgggagccccaatggaactc

SEQ ID NO: 707533 - DNA, 33 bp, Homo sapien
aactatctttaatacaaaagtgagagagtttta

SEQ ID NO: 707534 - DNA, 33 bp, Homo sapien
aactatctttaatacataagtgagagagtttta

SEQ ID NO: 707535 - DNA, 33 bp, Homo sapien
aatgagcaacgatgaaaacattgttatcgaaaa

SEQ ID NO: 707536 - DNA, 33 bp, Homo sapien
aatgagcaacgatgaagacattgttatcgaaaa

SEQ ID NO: 707537 - DNA, 33 bp, Homo sapien
tattcttcacacagaaatgtcttcctttttctg

SEQ ID NO: 707538 - DNA, 33 bp, Homo sapien
tattcttcacacagaagtgtcttcctttttctg

SEQ ID NO: 707539 - DNA, 33 bp, Homo sapien
gcacctatataacaaaccatgtatacctatgta

SEQ ID NO: 707540 - DNA, 33 bp, Homo sapien
gcacctatataacaaatcatgtatacctatgta

SEQ ID NO: 707541 - DNA, 33 bp, Homo sapien
cagatgaaaaggtacacagagcgaggtccaaaa

SEQ ID NO: 707542 - DNA, 33 bp, Homo sapien
cagatgaaaaggtacatagagcgaggtccaaaa

SEQ ID NO: 707543 - DNA, 33 bp, Homo sapien
atgtaacagagaatgcactactctttctttggg

SEQ ID NO: 707544 - DNA, 33 bp, Homo sapien
atgtaacagagaatgcgctactctttctttggg

SEQ ID NO: 707545 - DNA, 33 bp, Homo sapien
tttgtcaaaggacaccaagccagtaatttgaga

SEQ ID NO: 707546 - DNA, 33 bp, Homo sapien
tttgtcaaaggacaccgagccagtaatttgaga

SEQ ID NO: 707547 - DNA, 33 bp, Homo sapien
agaacactatcaagaaagtgagaaggcaaccca

SEQ ID NO: 707548 - DNA, 33 bp, Homo sapien
agaacactatcaagaacgtgagaaggcaaccca

SEQ ID NO: 707549 - DNA, 33 bp, Homo sapien
ttcaaaacatatttcaagtgataatgctagtct

SEQ ID NO: 707550 - DNA, 33 bp, Homo sapien
ttcaaaacatatttcaggtgataatgctagtct

SEQ ID NO: 707551 - DNA, 33 bp, Homo sapien
actggtcatttctaagaagattgcagattttga

SEQ ID NO: 707552 - DNA, 33 bp, Homo sapien
actggtcatttctaagcagattgcagattttga

SEQ ID NO: 707553 - DNA, 33 bp, Homo sapien
atgcctggtatctaatcaaagtttaccacacat

SEQ ID NO: 707554 - DNA, 33 bp, Homo sapien
atgcctggtatctaattaaagtttaccacacat

SEQ ID NO: 707555 - DNA, 33 bp, Homo sapien
attgtattacttggcaactttaattaaaaggac

SEQ ID NO: 707556 - DNA, 33 bp, Homo sapien
attgtattacttggcacctttaattaaaaggac

SEQ ID NO: 707557 - DNA, 33 bp, Homo sapien
cagataatgttgaaaacaaaagacaaagatgag

SEQ ID NO: 707558 - DNA, 33 bp, Homo sapien
cagataatgttgaaaataaaagacaaagatgag

SEQ ID NO: 707559 - DNA, 33 bp, Homo sapien
ataatgtccattatggaatttttaccaattaga

SEQ ID NO: 707560 - DNA, 33 bp, Homo sapien
ataatgtccattatgggatttttaccaattaga

SEQ ID NO: 707561 - DNA, 33 bp, Homo sapien
gaatgtaatttgcctcaagaccatattcatttc

SEQ ID NO: 707562 - DNA, 33 bp, Homo sapien
gaatgtaatttgcctcgagaccatattcatttc

SEQ ID NO: 707563 - DNA, 33 bp, Homo sapien
ggatatttttgtagaacgtgaaatttagatgga

SEQ ID NO: 707564 - DNA, 33 bp, Homo sapien
ggatatttttgtagaatgtgaaatttagatgga

SEQ ID NO: 707565 - DNA, 33 bp, Homo sapien
caaggttttaaagcacaagacatgataaatttg

SEQ ID NO: 707566 - DNA, 33 bp, Homo sapien
caaggttttaaagcaccagacatgataaatttg

SEQ ID NO: 707567 - DNA, 33 bp, Homo sapien
tcacattaaaacatccaagaatcgcataggtaa

SEQ ID NO: 707568 - DNA, 33 bp, Homo sapien
tcacattaaaacatcccagaatcgcataggtaa

SEQ ID NO: 707569 - DNA, 33 bp, Homo sapien
ttctgcaaagacatacacagaacagttaccttt

SEQ ID NO: 707570 - DNA, 33 bp, Homo sapien
ttctgcaaagacatacgcagaacagttaccttt

SEQ ID NO: 707571 - DNA, 33 bp, Homo sapien
ggagaaagcagaacaacgattggttcacaacaa

SEQ ID NO: 707572 - DNA, 33 bp, Homo sapien
ggagaaagcagaacaatgattggttcacaacaa

SEQ ID NO: 707573 - DNA, 33 bp, Homo sapien
ttggcttgagagaataaatggagaatcagggtc

SEQ ID NO: 707574 - DNA, 33 bp, Homo sapien
ttggcttgagagaatacatggagaatcagggtc

SEQ ID NO: 707575 - DNA, 33 bp, Homo sapien
atattccaaacccacaagataattcactcaccg

SEQ ID NO: 707576 - DNA, 33 bp, Homo sapien
atattccaaacccacacgataattcactcaccg

SEQ ID NO: 707577 - DNA, 33 bp, Homo sapien
attacatacatagggaagtttcagtagagaaga

SEQ ID NO: 707578 - DNA, 33 bp, Homo sapien
attacatacatagggaggtttcagtagagaaga

SEQ ID NO: 707579 - DNA, 33 bp, Homo sapien
ctgatgctgcagatatcacagctagagtcagaa

SEQ ID NO: 707580 - DNA, 33 bp, Homo sapien
ctgatgctgcagatattacagctagagtcagaa

SEQ ID NO: 707581 - DNA, 33 bp, Homo sapien
tatactaccagctagacgcataaataaaaaatt

SEQ ID NO: 707582 - DNA, 33 bp, Homo sapien
tatactaccagctagatgcataaataaaaaatt

SEQ ID NO: 707583 - DNA, 33 bp, Homo sapien
aataatgtaccgataagtgcctacatcaaaaat

SEQ ID NO: 707584 - DNA, 33 bp, Homo sapien
aataatgtaccgataattgcctacatcaaaaat

SEQ ID NO: 707585 - DNA, 33 bp, Homo sapien
aatagtgaaaagtggacggtaagacaatcaatc

SEQ ID NO: 707586 - DNA, 33 bp, Homo sapien
aatagtgaaaagtggatggtaagacaatcaatc

SEQ ID NO: 707587 - DNA, 33 bp, Homo sapien
agatttattcagttaacatgagtaatgacttaa

SEQ ID NO: 707588 - DNA, 33 bp, Homo sapien
agatttattcagttaagatgagtaatgacttaa

SEQ ID NO: 707589 - DNA, 33 bp, Homo sapien
ttaagaaagtagaatacgtatgcagagattcaa

SEQ ID NO: 707590 - DNA, 33 bp, Homo sapien
ttaagaaagtagaatatgtatgcagagattcaa

SEQ ID NO: 707591 - DNA, 33 bp, Homo sapien
ctggtcttagagtctacgtgctaattattatgc

SEQ ID NO: 707592 - DNA, 33 bp, Homo sapien
ctggtcttagagtctatgtgctaattattatgc

SEQ ID NO: 707593 - DNA, 33 bp, Homo sapien
aaccaatgactttataagccctcattttggcta

SEQ ID NO: 707594 - DNA, 33 bp, Homo sapien
aaccaatgactttataggccctcattttggcta

SEQ ID NO: 707595 - DNA, 33 bp, Homo sapien
aaaggctggtgataaaagaaataaaatctccaa

SEQ ID NO: 707596 - DNA, 33 bp, Homo sapien
aaaggctggtgataaaggaaataaaatctccaa

SEQ ID NO: 707597 - DNA, 33 bp, Homo sapien
aaagaggtccccaggtaaagagaatgactttct

SEQ ID NO: 707598 - DNA, 33 bp, Homo sapien
aaagaggtccccaggttaagagaatgactttct

SEQ ID NO: 707599 - DNA, 33 bp, Homo sapien
ttgaaataatatcagaacactttggtgcctttc

SEQ ID NO: 707600 - DNA, 33 bp, Homo sapien
ttgaaataatatcagaccactttggtgcctttc

SEQ ID NO: 707601 - DNA, 33 bp, Homo sapien
gaaatagagttgttcacatctttcattactata

SEQ ID NO: 707602 - DNA, 33 bp, Homo sapien
gaaatagagttgttcatatctttcattactata

SEQ ID NO: 707603 - DNA, 33 bp, Homo sapien
taagcatttctaagcaacttccctctataagca

SEQ ID NO: 707604 - DNA, 33 bp, Homo sapien
taagcatttctaagcagcttccctctataagca

SEQ ID NO: 707605 - DNA, 33 bp, Homo sapien
atgattgccattgtaactcgtgtgagatggtat

SEQ ID NO: 707606 - DNA, 33 bp, Homo sapien
atgattgccattgtaagtcgtgtgagatggtat

SEQ ID NO: 707607 - DNA, 33 bp, Homo sapien
ttggtgtagatgaaaaatattaaatgatgccaa

SEQ ID NO: 707608 - DNA, 33 bp, Homo sapien
ttggtgtagatgaaaagtattaaatgatgccaa

SEQ ID NO: 707609 - DNA, 33 bp, Homo sapien
accagggcactacctaccatcattagcaccatt

SEQ ID NO: 707610 - DNA, 33 bp, Homo sapien
accagggcactacctatcatcattagcaccatt

SEQ ID NO: 707611 - DNA, 33 bp, Homo sapien
accagtggcaatagtaacatctaggacttggta

SEQ ID NO: 707612 - DNA, 33 bp, Homo sapien
accagtggcaatagtaccatctaggacttggta

SEQ ID NO: 707613 - DNA, 33 bp, Homo sapien
tactcagatgacaaaagttggggttccaagatt

SEQ ID NO: 707614 - DNA, 33 bp, Homo sapien
tactcagatgacaaaatttggggttccaagatt

SEQ ID NO: 707615 - DNA, 33 bp, Homo sapien
agacaaattggtagagaatctgacttgaagaaa

SEQ ID NO: 707616 - DNA, 33 bp, Homo sapien
agacaaattggtagaggatctgacttgaagaaa

SEQ ID NO: 707617 - DNA, 33 bp, Homo sapien
agacaatgttcaaaacgcttgataataatgtga

SEQ ID NO: 707618 - DNA, 33 bp, Homo sapien
agacaatgttcaaaactcttgataataatgtga

SEQ ID NO: 707619 - DNA, 33 bp, Homo sapien
gggagctgagcaacaacgcacttggatgtattt

SEQ ID NO: 707620 - DNA, 33 bp, Homo sapien
gggagctgagcaacaatgcacttggatgtattt

SEQ ID NO: 707621 - DNA, 33 bp, Homo sapien
ttgcaaaggtcaatgcacatctctaataatttg

SEQ ID NO: 707622 - DNA, 33 bp, Homo sapien
ttgcaaaggtcaatgcgcatctctaataatttg

SEQ ID NO: 707623 - DNA, 33 bp, Homo sapien
tgtagaatgcacagaaacttacttggtatctac

SEQ ID NO: 707624 - DNA, 33 bp, Homo sapien
tgtagaatgcacagaagcttacttggtatctac

SEQ ID NO: 707625 - DNA, 33 bp, Homo sapien
agcaggggcaacatcacaaactttacaattgct

SEQ ID NO: 707626 - DNA, 33 bp, Homo sapien
agcaggggcaacatcataaactttacaattgct

SEQ ID NO: 707627 - DNA, 33 bp, Homo sapien
tatacccatactttgccacattgaaataagaat

SEQ ID NO: 707628 - DNA, 33 bp, Homo sapien
tatacccatactttgctacattgaaataagaat

SEQ ID NO: 707629 - DNA, 33 bp, Homo sapien
ctatcttgcattcaaaattcttagttttcatac

SEQ ID NO: 707630 - DNA, 33 bp, Homo sapien
ctatcttgcattcaaagttcttagttttcatac

SEQ ID NO: 707631 - DNA, 33 bp, Homo sapien
cagggcaggaaaaacactcttctgtcctcagcc

SEQ ID NO: 707632 - DNA, 33 bp, Homo sapien
cagggcaggaaaaacagtcttctgtcctcagcc

SEQ ID NO: 707633 - DNA, 33 bp, Homo sapien
agcttagaaaaaaacactgttctcactagaagg

SEQ ID NO: 707634 - DNA, 33 bp, Homo sapien
agcttagaaaaaaacattgttctcactagaagg

SEQ ID NO: 707635 - DNA, 33 bp, Homo sapien
atttgccattggtgtggacttagaatgtttcca

SEQ ID NO: 707636 - DNA, 33 bp, Homo sapien
atttgccattggtgtgtacttagaatgtttcca

SEQ ID NO: 707637 - DNA, 33 bp, Homo sapien
atttttcccaattctcactctctggctactgtg

SEQ ID NO: 707638 - DNA, 33 bp, Homo sapien
atttttcccaattctccctctctggctactgtg

SEQ ID NO: 707639 - DNA, 33 bp, Homo sapien
tataattaacccataagtgtgttcatttcaggc

SEQ ID NO: 707640 - DNA, 33 bp, Homo sapien
tataattaacccataattgtgttcatttcaggc

SEQ ID NO: 707641 - DNA, 33 bp, Homo sapien
tgatctttctcctgagactatgggctagctcag

SEQ ID NO: 707642 - DNA, 33 bp, Homo sapien
tgatctttctcctgaggctatgggctagctcag

SEQ ID NO: 707643 - DNA, 33 bp, Homo sapien
ctttcctaacaaagtaacctatcataatgattc

SEQ ID NO: 707644 - DNA, 33 bp, Homo sapien
ctttcctaacaaagtaccctatcataatgattc

SEQ ID NO: 707645 - DNA, 33 bp, Homo sapien
tgaatgcaaataaatacgtttgttaatgggcac

SEQ ID NO: 707646 - DNA, 33 bp, Homo sapien
tgaatgcaaataaatatgtttgttaatgggcac

SEQ ID NO: 707647 - DNA, 33 bp, Homo sapien
tttctaagtctctcatgacattgttatatcctt

SEQ ID NO: 707648 - DNA, 33 bp, Homo sapien
tttctaagtctctcattacattgttatatcctt

SEQ ID NO: 707649 - DNA, 33 bp, Homo sapien
tctgtactgctgatcactgaaagccttgcattc

SEQ ID NO: 707650 - DNA, 33 bp, Homo sapien
tctgtactgctgatcattgaaagccttgcattc

SEQ ID NO: 707651 - DNA, 33 bp, Homo sapien
attcagagcagtaaaaaatagctacagatagta

SEQ ID NO: 707652 - DNA, 33 bp, Homo sapien
attcagagcagtaaaatatagctacagatagta

SEQ ID NO: 707653 - DNA, 33 bp, Homo sapien
gcaaactaatgagggaatagaaaatcagatacc

SEQ ID NO: 707654 - DNA, 33 bp, Homo sapien
gcaaactaatgagggagtagaaaatcagatacc

SEQ ID NO: 707655 - DNA, 33 bp, Homo sapien
acaaatttccagaggagcttagccaataagtaa

SEQ ID NO: 707656 - DNA, 33 bp, Homo sapien
acaaatttccagaggatcttagccaataagtaa

SEQ ID NO: 707657 - DNA, 33 bp, Homo sapien
ttgagagtacattttacaatgagaagagtggat

SEQ ID NO: 707658 - DNA, 33 bp, Homo sapien
ttgagagtacattttagaatgagaagagtggat

SEQ ID NO: 707659 - DNA, 33 bp, Homo sapien
aatgaattagtcttaaatcagaagcttttattt

SEQ ID NO: 707660 - DNA, 33 bp, Homo sapien
aatgaattagtcttaagtcagaagcttttattt

SEQ ID NO: 707661 - DNA, 33 bp, Homo sapien
aacaaaagactatcaactgaaaccactgaaact

SEQ ID NO: 707662 - DNA, 33 bp, Homo sapien
aacaaaagactatcaattgaaaccactgaaact

SEQ ID NO: 707663 - DNA, 33 bp, Homo sapien
gagggacactgtcagaaactaaacgctgaaaga

SEQ ID NO: 707664 - DNA, 33 bp, Homo sapien
gagggacactgtcagacactaaacgctgaaaga

SEQ ID NO: 707665 - DNA, 33 bp, Homo sapien
gcactttggactaatccgagtcaggtaaatgtt

SEQ ID NO: 707666 - DNA, 33 bp, Homo sapien
gcactttggactaatctgagtcaggtaaatgtt

SEQ ID NO: 707667 - DNA, 33 bp, Homo sapien
ccacattgttgcgcacacagtttcctctgctgc

SEQ ID NO: 707668 - DNA, 33 bp, Homo sapien
ccacattgttgcgcacgcagtttcctctgctgc

SEQ ID NO: 707669 - DNA, 33 bp, Homo sapien
tacttgccatagaaacaaggaaaaatgattcca

SEQ ID NO: 707670 - DNA, 33 bp, Homo sapien
tacttgccatagaaactaggaaaaatgattcca

SEQ ID NO: 707671 - DNA, 33 bp, Homo sapien
ataatctcttgctacaatagtgctaaagttaat

SEQ ID NO: 707672 - DNA, 33 bp, Homo sapien
ataatctcttgctacagtagtgctaaagttaat

SEQ ID NO: 707673 - DNA, 33 bp, Homo sapien
gtaaaacaccaagccacgaattgttaaatatat

SEQ ID NO: 707674 - DNA, 33 bp, Homo sapien
gtaaaacaccaagccatgaattgttaaatatat

SEQ ID NO: 707675 - DNA, 33 bp, Homo sapien
ttaccatttgacatgaaaacaggtgtcctcaat

SEQ ID NO: 707676 - DNA, 33 bp, Homo sapien
ttaccatttgacatgacaacaggtgtcctcaat

SEQ ID NO: 707677 - DNA, 33 bp, Homo sapien
ttatttaatgcacagaaagtttggtattcagac

SEQ ID NO: 707678 - DNA, 33 bp, Homo sapien
ttatttaatgcacagatagtttggtattcagac

SEQ ID NO: 707679 - DNA, 33 bp, Homo sapien
tttgtttctgatcacacacaataagttacttta

SEQ ID NO: 707680 - DNA, 33 bp, Homo sapien
tttgtttctgatcacatacaataagttacttta

SEQ ID NO: 707681 - DNA, 33 bp, Homo sapien
aagtgtgacacaacaaattacatatgatagcgc

SEQ ID NO: 707682 - DNA, 33 bp, Homo sapien
aagtgtgacacaacaatttacatatgatagcgc

SEQ ID NO: 707683 - DNA, 33 bp, Homo sapien
ctaaaaatgatgtttacaaaaaaggataagctg

SEQ ID NO: 707684 - DNA, 33 bp, Homo sapien
ctaaaaatgatgtttagaaaaaaggataagctg

SEQ ID NO: 707685 - DNA, 33 bp, Homo sapien
agctatgtgttaaaaaatctggctttgcaaaga

SEQ ID NO: 707686 - DNA, 33 bp, Homo sapien
agctatgtgttaaaaagtctggctttgcaaaga

SEQ ID NO: 707687 - DNA, 33 bp, Homo sapien
tggctactatcaggagaagaagtaggtatgtat

SEQ ID NO: 707688 - DNA, 33 bp, Homo sapien
tggctactatcaggaggagaagtaggtatgtat

SEQ ID NO: 707689 - DNA, 33 bp, Homo sapien
agaccagaaagcacaacaccagcttctgaaaca

SEQ ID NO: 707690 - DNA, 33 bp, Homo sapien
agaccagaaagcacaagaccagcttctgaaaca

SEQ ID NO: 707691 - DNA, 33 bp, Homo sapien
acttgtgattgtagcaaaaatagtcccaagtaa

SEQ ID NO: 707692 - DNA, 33 bp, Homo sapien
acttgtgattgtagcagaaatagtcccaagtaa

SEQ ID NO: 707693 - DNA, 33 bp, Homo sapien
agatattgacacagagaaagctattagatgaat

SEQ ID NO: 707694 - DNA, 33 bp, Homo sapien
agatattgacacagagtaagctattagatgaat

SEQ ID NO: 707695 - DNA, 33 bp, Homo sapien
tctctgaaattttgtaaatctccattttgaaag

SEQ ID NO: 707696 - DNA, 33 bp, Homo sapien
tctctgaaattttgtatatctccattttgaaag

SEQ ID NO: 707697 - DNA, 33 bp, Homo sapien
gttagtattctcttcccatgcttcttaaatact

SEQ ID NO: 707698 - DNA, 33 bp, Homo sapien
gttagtattctcttccgatgcttcttaaatact

SEQ ID NO: 707699 - DNA, 33 bp, Homo sapien
tggactgattgcagtcaatgcttttaactaata

SEQ ID NO: 707700 - DNA, 33 bp, Homo sapien
tggactgattgcagtcgatgcttttaactaata

SEQ ID NO: 707701 - DNA, 33 bp, Homo sapien
ggatatagagaaattcaaacccttgcacacact

SEQ ID NO: 707702 - DNA, 33 bp, Homo sapien
ggatatagagaaattctaacccttgcacacact

SEQ ID NO: 707703 - DNA, 33 bp, Homo sapien
gtcattagcactaaacaaatagcagttaataac

SEQ ID NO: 707704 - DNA, 33 bp, Homo sapien
gtcattagcactaaacgaatagcagttaataac

SEQ ID NO: 707705 - DNA, 33 bp, Homo sapien
ttagacagataacatcaccttaagaccaaacat

SEQ ID NO: 707706 - DNA, 33 bp, Homo sapien
ttagacagataacatcgccttaagaccaaacat

SEQ ID NO: 707707 - DNA, 33 bp, Homo sapien
cataaaacagatgtgacgttgtctcaaaggaat

SEQ ID NO: 707708 - DNA, 33 bp, Homo sapien
cataaaacagatgtgatgttgtctcaaaggaat

SEQ ID NO: 707709 - DNA, 33 bp, Homo sapien
agggcagaattagagactacctggtctaacatc

SEQ ID NO: 707710 - DNA, 33 bp, Homo sapien
agggcagaattagagattacctggtctaacatc

SEQ ID NO: 707711 - DNA, 33 bp, Homo sapien
aggtaattgaaaatggacagaatatgtattgga

SEQ ID NO: 707712 - DNA, 33 bp, Homo sapien
aggtaattgaaaatgggcagaatatgtattgga

SEQ ID NO: 707713 - DNA, 33 bp, Homo sapien
tagatttattgactcaaatgtcattctcctctc

SEQ ID NO: 707714 - DNA, 33 bp, Homo sapien
tagatttattgactcagatgtcattctcctctc

SEQ ID NO: 707715 - DNA, 33 bp, Homo sapien
aagggacattacttaacatttcagtgcctatat

SEQ ID NO: 707716 - DNA, 33 bp, Homo sapien
aagggacattacttaatatttcagtgcctatat

SEQ ID NO: 707717 - DNA, 33 bp, Homo sapien
agagagaagaagagaaaatacgtccaattaaaa

SEQ ID NO: 707718 - DNA, 33 bp, Homo sapien
agagagaagaagagaagatacgtccaattaaaa

SEQ ID NO: 707719 - DNA, 33 bp, Homo sapien
catggctaacaatctccaattcttaaaacaaaa

SEQ ID NO: 707720 - DNA, 33 bp, Homo sapien
catggctaacaatctctaattcttaaaacaaaa

SEQ ID NO: 707721 - DNA, 33 bp, Homo sapien
atggaagtcaaactggaccagttaccataataa

SEQ ID NO: 707722 - DNA, 33 bp, Homo sapien
atggaagtcaaactgggccagttaccataataa

SEQ ID NO: 707723 - DNA, 33 bp, Homo sapien
gggtccctgattccaaaatgtgactcttagcat

SEQ ID NO: 707724 - DNA, 33 bp, Homo sapien
gggtccctgattccaagatgtgactcttagcat

SEQ ID NO: 707725 - DNA, 33 bp, Homo sapien
tttaatttgcagatgacaggtaaaaatttttag

SEQ ID NO: 707726 - DNA, 33 bp, Homo sapien
tttaatttgcagatgataggtaaaaatttttag

SEQ ID NO: 707727 - DNA, 33 bp, Homo sapien
cttagcactaaatcaccggtattcaaagtttta

SEQ ID NO: 707728 - DNA, 33 bp, Homo sapien
cttagcactaaatcactggtattcaaagtttta

SEQ ID NO: 707729 - DNA, 33 bp, Homo sapien
ttattaagtccaatagcagtcaaaccagttctt

SEQ ID NO: 707730 - DNA, 33 bp, Homo sapien
ttattaagtccaatagtagtcaaaccagttctt

SEQ ID NO: 707731 - DNA, 33 bp, Homo sapien
gtatcttggtgctctgacaaagcattcaatctc

SEQ ID NO: 707732 - DNA, 33 bp, Homo sapien
gtatcttggtgctctgccaaagcattcaatctc

SEQ ID NO: 707733 - DNA, 33 bp, Homo sapien
ccgctgtcaccattgacattgattacagcagac

SEQ ID NO: 707734 - DNA, 33 bp, Homo sapien
ccgctgtcaccattgatattgattacagcagac

SEQ ID NO: 707735 - DNA, 33 bp, Homo sapien
cctattgagccccgccagaatcaaaaccgaagc

SEQ ID NO: 707736 - DNA, 33 bp, Homo sapien
cctattgagccccgccggaatcaaaaccgaagc

SEQ ID NO: 707737 - DNA, 33 bp, Homo sapien
aacatcacctactttcaaattaagtttaacctt

SEQ ID NO: 707738 - DNA, 33 bp, Homo sapien
aacatcacctactttccaattaagtttaacctt

SEQ ID NO: 707739 - DNA, 33 bp, Homo sapien
ggtgggacccagccaactatatttttcaaagct

SEQ ID NO: 707740 - DNA, 33 bp, Homo sapien
ggtgggacccagccaagtatatttttcaaagct

SEQ ID NO: 707741 - DNA, 33 bp, Homo sapien
taaggttttaattctaccatgaaggtgtaagct

SEQ ID NO: 707742 - DNA, 33 bp, Homo sapien
taaggttttaattctatcatgaaggtgtaagct

SEQ ID NO: 707743 - DNA, 33 bp, Homo sapien
atgaagcttatttttgcaggatatgaaattcgt

SEQ ID NO: 707744 - DNA, 33 bp, Homo sapien
atgaagcttatttttgtaggatatgaaattcgt

SEQ ID NO: 707745 - DNA, 33 bp, Homo sapien
acagtgaacttatcagcagaaaatctgaaatgt

SEQ ID NO: 707746 - DNA, 33 bp, Homo sapien
acagtgaacttatcaggagaaaatctgaaatgt

SEQ ID NO: 707747 - DNA, 33 bp, Homo sapien
actattgcatacataaaactttcatttgataat

SEQ ID NO: 707748 - DNA, 33 bp, Homo sapien
actattgcatacataacactttcatttgataat

SEQ ID NO: 707749 - DNA, 33 bp, Homo sapien
gtagacatttgtcaatcatctaggcctatcact

SEQ ID NO: 707750 - DNA, 33 bp, Homo sapien
gtagacatttgtcaattatctaggcctatcact

SEQ ID NO: 707751 - DNA, 33 bp, Homo sapien
cctctggacttgaagagaaatagatcttgttta

SEQ ID NO: 707752 - DNA, 33 bp, Homo sapien
cctctggacttgaagataaatagatcttgttta

SEQ ID NO: 707753 - DNA, 33 bp, Homo sapien
aagaagtgaattaaacagagaagactagaaaac

SEQ ID NO: 707754 - DNA, 33 bp, Homo sapien
aagaagtgaattaaacggagaagactagaaaac

SEQ ID NO: 707755 - DNA, 33 bp, Homo sapien
tcaaagggtttattaaagcatgtaccagagggc

SEQ ID NO: 707756 - DNA, 33 bp, Homo sapien
tcaaagggtttattaaggcatgtaccagagggc

SEQ ID NO: 707757 - DNA, 33 bp, Homo sapien
cctttactacctcacactcaaattacagcaata

SEQ ID NO: 707758 - DNA, 33 bp, Homo sapien
cctttactacctcacattcaaattacagcaata

SEQ ID NO: 707759 - DNA, 33 bp, Homo sapien
agattgagtaatttacaatcaaatgtcctgttt

SEQ ID NO: 707760 - DNA, 33 bp, Homo sapien
agattgagtaatttaccatcaaatgtcctgttt

SEQ ID NO: 707761 - DNA, 33 bp, Homo sapien
gtatattaaatgccaaatgagtcataggccttg

SEQ ID NO: 707762 - DNA, 33 bp, Homo sapien
gtatattaaatgccaagtgagtcataggccttg

SEQ ID NO: 707763 - DNA, 33 bp, Homo sapien
ttctctttctagagaaccaaaatgcacattgcg

SEQ ID NO: 707764 - DNA, 33 bp, Homo sapien
ttctctttctagagaatcaaaatgcacattgcg

SEQ ID NO: 707765 - DNA, 33 bp, Homo sapien
aagttattgttaggaaaggcaatgcatattttt

SEQ ID NO: 707766 - DNA, 33 bp, Homo sapien
aagttattgttaggaacggcaatgcatattttt

SEQ ID NO: 707767 - DNA, 33 bp, Homo sapien
tgaaggctgtgtctaacaggaaggactaaagtg

SEQ ID NO: 707768 - DNA, 33 bp, Homo sapien
tgaaggctgtgtctaataggaaggactaaagtg

SEQ ID NO: 707769 - DNA, 33 bp, Homo sapien
tagtttaaaactaaacccaaggcttcagcaagg

SEQ ID NO: 707770 - DNA, 33 bp, Homo sapien
tagtttaaaactaaactcaaggcttcagcaagg

SEQ ID NO: 707771 - DNA, 33 bp, Homo sapien
aacagtgatattattgaaagccattgaaagcca

SEQ ID NO: 707772 - DNA, 33 bp, Homo sapien
aacagtgatattattggaagccattgaaagcca

SEQ ID NO: 707773 - DNA, 33 bp, Homo sapien
atgggtgtggttggtaagagaaaaaagagctta

SEQ ID NO: 707774 - DNA, 33 bp, Homo sapien
atgggtgtggttggtaggagaaaaaagagctta

SEQ ID NO: 707775 - DNA, 33 bp, Homo sapien
ttaagtgcttggcagcaaatattactaggatca

SEQ ID NO: 707776 - DNA, 33 bp, Homo sapien
ttaagtgcttggcagcgaatattactaggatca

SEQ ID NO: 707777 - DNA, 33 bp, Homo sapien
ccatcctcttaccctccatcctttatgtgtccc

SEQ ID NO: 707778 - DNA, 33 bp, Homo sapien
ccatcctcttaccctctatcctttatgtgtccc

SEQ ID NO: 707779 - DNA, 33 bp, Homo sapien
aagttagaactagtccaaataaagatagataag

SEQ ID NO: 707780 - DNA, 33 bp, Homo sapien
aagttagaactagtccgaataaagatagataag

SEQ ID NO: 707781 - DNA, 33 bp, Homo sapien
gaaagagtatgtgcaaaattggaattaatgtct

SEQ ID NO: 707782 - DNA, 33 bp, Homo sapien
gaaagagtatgtgcaagattggaattaatgtct

SEQ ID NO: 707783 - DNA, 33 bp, Homo sapien
ggtttgtaatagtccaaaagtaacagaatgcag

SEQ ID NO: 707784 - DNA, 33 bp, Homo sapien
ggtttgtaatagtccagaagtaacagaatgcag

SEQ ID NO: 707785 - DNA, 33 bp, Homo sapien
gacatggttctactaaaagaggagacttaattg

SEQ ID NO: 707786 - DNA, 33 bp, Homo sapien
gacatggttctactaagagaggagacttaattg

SEQ ID NO: 707787 - DNA, 33 bp, Homo sapien
aagcctttggcagggggattgggagagtagcca

SEQ ID NO: 707788 - DNA, 33 bp, Homo sapien
aagcctttggcaggggtattgggagagtagcca

SEQ ID NO: 707789 - DNA, 33 bp, Homo sapien
gttactttaaggcaacactatccttttatgtta

SEQ ID NO: 707790 - DNA, 33 bp, Homo sapien
gttactttaaggcaacgctatccttttatgtta

SEQ ID NO: 707791 - DNA, 33 bp, Homo sapien
ttcctgaattagatccaacactttacaatttaa

SEQ ID NO: 707792 - DNA, 33 bp, Homo sapien
ttcctgaattagatccgacactttacaatttaa

SEQ ID NO: 707793 - DNA, 33 bp, Homo sapien
ccagatgtttggcataccaattgacattctagt

SEQ ID NO: 707794 - DNA, 33 bp, Homo sapien
ccagatgtttggcatatcaattgacattctagt

SEQ ID NO: 707795 - DNA, 33 bp, Homo sapien
ataacacagggaaaaacgttatcatatctcaaa

SEQ ID NO: 707796 - DNA, 33 bp, Homo sapien
ataacacagggaaaaatgttatcatatctcaaa

SEQ ID NO: 707797 - DNA, 33 bp, Homo sapien
gaatgcgctctccaggaacttatcaaacaacca

SEQ ID NO: 707798 - DNA, 33 bp, Homo sapien
gaatgcgctctccaggcacttatcaaacaacca

SEQ ID NO: 707799 - DNA, 33 bp, Homo sapien
tcgaaaagttgactgacgtggaggaagtaggga

SEQ ID NO: 707800 - DNA, 33 bp, Homo sapien
tcgaaaagttgactgatgtggaggaagtaggga

SEQ ID NO: 707801 - DNA, 33 bp, Homo sapien
tacttcacttaaaaaaatgtaatgtttcttgca

SEQ ID NO: 707802 - DNA, 33 bp, Homo sapien
tacttcacttaaaaaattgtaatgtttcttgca

SEQ ID NO: 707803 - DNA, 33 bp, Homo sapien
tctaatgtacagcatgacaactctagttaataa

SEQ ID NO: 707804 - DNA, 33 bp, Homo sapien
tctaatgtacagcatggcaactctagttaataa

SEQ ID NO: 707805 - DNA, 33 bp, Homo sapien
cacccacaaaccataacaaatgatggctatgtt

SEQ ID NO: 707806 - DNA, 33 bp, Homo sapien
cacccacaaaccataagaaatgatggctatgtt

SEQ ID NO: 707807 - DNA, 33 bp, Homo sapien
aagaaggctggaaaaacatgacccctcaaaaaa

SEQ ID NO: 707808 - DNA, 33 bp, Homo sapien
aagaaggctggaaaaatatgacccctcaaaaaa

SEQ ID NO: 707809 - DNA, 33 bp, Homo sapien
gaatctctgtaattagaaaccaacattaactag

SEQ ID NO: 707810 - DNA, 33 bp, Homo sapien
gaatctctgtaattagcaaccaacattaactag

SEQ ID NO: 707811 - DNA, 33 bp, Homo sapien
ctaatgttgtattaaaatgttgtatagaaaatg

SEQ ID NO: 707812 - DNA, 33 bp, Homo sapien
ctaatgttgtattaaagtgttgtatagaaaatg

SEQ ID NO: 707813 - DNA, 33 bp, Homo sapien
attacttccaagaataaagacaggaatagtatg

SEQ ID NO: 707814 - DNA, 33 bp, Homo sapien
attacttccaagaatagagacaggaatagtatg

SEQ ID NO: 707815 - DNA, 33 bp, Homo sapien
gattttgttcttatacaggcagcatagcacctt

SEQ ID NO: 707816 - DNA, 33 bp, Homo sapien
gattttgttcttatacgggcagcatagcacctt

SEQ ID NO: 707817 - DNA, 33 bp, Homo sapien
caatattgaacactaaactctttcttcagggac

SEQ ID NO: 707818 - DNA, 33 bp, Homo sapien
caatattgaacactaacctctttcttcagggac

SEQ ID NO: 707819 - DNA, 33 bp, Homo sapien
ttcctctagatgtacaatccctacccaagcaaa

SEQ ID NO: 707820 - DNA, 33 bp, Homo sapien
ttcctctagatgtacattccctacccaagcaaa

SEQ ID NO: 707821 - DNA, 33 bp, Homo sapien
taatggtgtgttaaaacgctgcaatgaagaata

SEQ ID NO: 707822 - DNA, 33 bp, Homo sapien
taatggtgtgttaaaatgctgcaatgaagaata

SEQ ID NO: 707823 - DNA, 33 bp, Homo sapien
aactgtcaaaattagtaacagaaaagtgatgtc

SEQ ID NO: 707824 - DNA, 33 bp, Homo sapien
aactgtcaaaattagtgacagaaaagtgatgtc

SEQ ID NO: 707825 - DNA, 33 bp, Homo sapien
taaaaaaaggacaaaagtcactaaaatcactcg

SEQ ID NO: 707826 - DNA, 33 bp, Homo sapien
taaaaaaaggacaaaattcactaaaatcactcg

SEQ ID NO: 707827 - DNA, 33 bp, Homo sapien
aataaaagtaaaacacaatgttcaggttatggc

SEQ ID NO: 707828 - DNA, 33 bp, Homo sapien
aataaaagtaaaacaccatgttcaggttatggc

SEQ ID NO: 707829 - DNA, 33 bp, Homo sapien
aattaccaatgttacacacaatattcccaccca

SEQ ID NO: 707830 - DNA, 33 bp, Homo sapien
aattaccaatgttacatacaatattcccaccca

SEQ ID NO: 707831 - DNA, 33 bp, Homo sapien
caacattgtgcttcaggatggtttacctgtgga

SEQ ID NO: 707832 - DNA, 33 bp, Homo sapien
caacattgtgcttcagtatggtttacctgtgga

SEQ ID NO: 707833 - DNA, 33 bp, Homo sapien
ctagaactaatatgaaagttcggtaaattttag

SEQ ID NO: 707834 - DNA, 33 bp, Homo sapien
ctagaactaatatgaaggttcggtaaattttag

SEQ ID NO: 707835 - DNA, 33 bp, Homo sapien
tttagttgaatgtgaaaacttatctcatcgctt

SEQ ID NO: 707836 - DNA, 33 bp, Homo sapien
tttagttgaatgtgaatacttatctcatcgctt

SEQ ID NO: 707837 - DNA, 33 bp, Homo sapien
aaatatttgttttggaagcatttatggtaatat

SEQ ID NO: 707838 - DNA, 33 bp, Homo sapien
aaatatttgttttggaggcatttatggtaatat

SEQ ID NO: 707839 - DNA, 33 bp, Homo sapien
acagagatgctttaggcagaataatttaatttt

SEQ ID NO: 707840 - DNA, 33 bp, Homo sapien
acagagatgctttaggtagaataatttaatttt

SEQ ID NO: 707841 - DNA, 33 bp, Homo sapien
ccatggaatgttgacaatgatgctaccagagag

SEQ ID NO: 707842 - DNA, 33 bp, Homo sapien
ccatggaatgttgacagtgatgctaccagagag

SEQ ID NO: 707843 - DNA, 33 bp, Homo sapien
atggaaacctgtagaacgctagaatttaagggg

SEQ ID NO: 707844 - DNA, 33 bp, Homo sapien
atggaaacctgtagaatgctagaatttaagggg

SEQ ID NO: 707845 - DNA, 33 bp, Homo sapien
acatacgtgaaatcaaactcacctttttcagat

SEQ ID NO: 707846 - DNA, 33 bp, Homo sapien
acatacgtgaaatcaatctcacctttttcagat

SEQ ID NO: 707847 - DNA, 33 bp, Homo sapien
gttcttgctcctcaacaatgggaagcccttgat

SEQ ID NO: 707848 - DNA, 33 bp, Homo sapien
gttcttgctcctcaacgatgggaagcccttgat

SEQ ID NO: 707849 - DNA, 33 bp, Homo sapien
acaatatacacagcataatacaggatgatatga

SEQ ID NO: 707850 - DNA, 33 bp, Homo sapien
acaatatacacagcatgatacaggatgatatga

SEQ ID NO: 707851 - DNA, 33 bp, Homo sapien
aatctatttgactggaagaatgttatacgtaaa

SEQ ID NO: 707852 - DNA, 33 bp, Homo sapien
aatctatttgactggatgaatgttatacgtaaa

SEQ ID NO: 707853 - DNA, 33 bp, Homo sapien
acctgccccttgacaaaccatacaagttgcccc

SEQ ID NO: 707854 - DNA, 33 bp, Homo sapien
acctgccccttgacaagccatacaagttgcccc

SEQ ID NO: 707855 - DNA, 33 bp, Homo sapien
gaaccaaccatgaaaaccaaattatactggtgg

SEQ ID NO: 707856 - DNA, 33 bp, Homo sapien
gaaccaaccatgaaaatcaaattatactggtgg

SEQ ID NO: 707857 - DNA, 33 bp, Homo sapien
gtgaagaaaagaaagaactcaaggaatattcct

SEQ ID NO: 707858 - DNA, 33 bp, Homo sapien
gtgaagaaaagaaagagctcaaggaatattcct

SEQ ID NO: 707859 - DNA, 33 bp, Homo sapien
cagagatgtcaagtagacaatgaggcatacacg

SEQ ID NO: 707860 - DNA, 33 bp, Homo sapien
cagagatgtcaagtagccaatgaggcatacacg

SEQ ID NO: 707861 - DNA, 33 bp, Homo sapien
taatgttaagaagagaagaggtgggacaggtga

SEQ ID NO: 707862 - DNA, 33 bp, Homo sapien
taatgttaagaagagacgaggtgggacaggtga

SEQ ID NO: 707863 - DNA, 33 bp, Homo sapien
aagagaggattgatacaggcctcatgttcttgc

SEQ ID NO: 707864 - DNA, 33 bp, Homo sapien
aagagaggattgatacgggcctcatgttcttgc

SEQ ID NO: 707865 - DNA, 33 bp, Homo sapien
ctgagagcttagaaaacagggtatgacttatac

SEQ ID NO: 707866 - DNA, 33 bp, Homo sapien
ctgagagcttagaaaatagggtatgacttatac

SEQ ID NO: 707867 - DNA, 33 bp, Homo sapien
aaaaactcattaacaccggcataaacaaaaggt

SEQ ID NO: 707868 - DNA, 33 bp, Homo sapien
aaaaactcattaacactggcataaacaaaaggt

SEQ ID NO: 707869 - DNA, 33 bp, Homo sapien
gatgtgatatcagtaactgacgatggctacatg

SEQ ID NO: 707870 - DNA, 33 bp, Homo sapien
gatgtgatatcagtaattgacgatggctacatg

SEQ ID NO: 707871 - DNA, 33 bp, Homo sapien
actgtgcctgactcaacttcagcctcataatac

SEQ ID NO: 707872 - DNA, 33 bp, Homo sapien
actgtgcctgactcaatttcagcctcataatac

SEQ ID NO: 707873 - DNA, 33 bp, Homo sapien
ctgctcttcataaaaaaacagcctatgttaatc

SEQ ID NO: 707874 - DNA, 33 bp, Homo sapien
ctgctcttcataaaaatacagcctatgttaatc

SEQ ID NO: 707875 - DNA, 33 bp, Homo sapien
attcagacctctactcacatatgacctctccac

SEQ ID NO: 707876 - DNA, 33 bp, Homo sapien
attcagacctctactcgcatatgacctctccac

SEQ ID NO: 707877 - DNA, 33 bp, Homo sapien
gcagtgtgagggaagcgaaggaacacaccatca

SEQ ID NO: 707878 - DNA, 33 bp, Homo sapien
gcagtgtgagggaagctaaggaacacaccatca

SEQ ID NO: 707879 - DNA, 33 bp, Homo sapien
gtctcgtctcctgcaaccattcaagggctacca

SEQ ID NO: 707880 - DNA, 33 bp, Homo sapien
gtctcgtctcctgcaagcattcaagggctacca

SEQ ID NO: 707881 - DNA, 33 bp, Homo sapien
accaaacagggactaaaaagcattacttttatt

SEQ ID NO: 707882 - DNA, 33 bp, Homo sapien
accaaacagggactaataagcattacttttatt

SEQ ID NO: 707883 - DNA, 33 bp, Homo sapien
aaagggtgccaggaaacatagcactagctgggt

SEQ ID NO: 707884 - DNA, 33 bp, Homo sapien
aaagggtgccaggaaatatagcactagctgggt

SEQ ID NO: 707885 - DNA, 33 bp, Homo sapien
tccttttataaacctaaaaatctgatgggaatg

SEQ ID NO: 707886 - DNA, 33 bp, Homo sapien
tccttttataaacctacaaatctgatgggaatg

SEQ ID NO: 707887 - DNA, 33 bp, Homo sapien
gatataaaaagccttccaactctaccaaaatgt

SEQ ID NO: 707888 - DNA, 33 bp, Homo sapien
gatataaaaagccttctaactctaccaaaatgt

SEQ ID NO: 707889 - DNA, 33 bp, Homo sapien
gtaacaaattctgcccaaacacaagggtcccca

SEQ ID NO: 707890 - DNA, 33 bp, Homo sapien
gtaacaaattctgcccgaacacaagggtcccca

SEQ ID NO: 707891 - DNA, 33 bp, Homo sapien
tgaattgaaatggagcaaaagtcactcttgtta

SEQ ID NO: 707892 - DNA, 33 bp, Homo sapien
tgaattgaaatggagcgaaagtcactcttgtta

SEQ ID NO: 707893 - DNA, 33 bp, Homo sapien
gcttctacaggcttcccgcattccatcattcct

SEQ ID NO: 707894 - DNA, 33 bp, Homo sapien
gcttctacaggcttcctgcattccatcattcct

SEQ ID NO: 707895 - DNA, 33 bp, Homo sapien
tgtatacggtctaagacagttgccaaactagtt

SEQ ID NO: 707896 - DNA, 33 bp, Homo sapien
tgtatacggtctaagatagttgccaaactagtt

SEQ ID NO: 707897 - DNA, 33 bp, Homo sapien
aagaatctggtagtaaaaacattatatatatgt

SEQ ID NO: 707898 - DNA, 33 bp, Homo sapien
aagaatctggtagtaacaacattatatatatgt

SEQ ID NO: 707899 - DNA, 33 bp, Homo sapien
tggacttattaagctaaaagagaaacaggaagt

SEQ ID NO: 707900 - DNA, 33 bp, Homo sapien
tggacttattaagctagaagagaaacaggaagt

SEQ ID NO: 707901 - DNA, 33 bp, Homo sapien
tctgtctttaagctagcatggctcttataattt

SEQ ID NO: 707902 - DNA, 33 bp, Homo sapien
tctgtctttaagctagtatggctcttataattt

SEQ ID NO: 707903 - DNA, 33 bp, Homo sapien
attcagtctcttccttaaagctttctctgataa

SEQ ID NO: 707904 - DNA, 33 bp, Homo sapien
attcagtctcttccttgaagctttctctgataa

SEQ ID NO: 707905 - DNA, 33 bp, Homo sapien
ttactgtgcctaaggacgaatcagaaaaatcaa

SEQ ID NO: 707906 - DNA, 33 bp, Homo sapien
ttactgtgcctaaggatgaatcagaaaaatcaa

SEQ ID NO: 707907 - DNA, 33 bp, Homo sapien
ctttattatggacaaccggtcagtcattaaaga

SEQ ID NO: 707908 - DNA, 33 bp, Homo sapien
ctttattatggacaactggtcagtcattaaaga

SEQ ID NO: 707909 - DNA, 33 bp, Homo sapien
cctctattctatcaacactgaatttaagatttc

SEQ ID NO: 707910 - DNA, 33 bp, Homo sapien
cctctattctatcaacgctgaatttaagatttc

SEQ ID NO: 707911 - DNA, 33 bp, Homo sapien
ttgagtgaaagaagtcagaagaagtttgtttga

SEQ ID NO: 707912 - DNA, 33 bp, Homo sapien
ttgagtgaaagaagtcggaagaagtttgtttga

SEQ ID NO: 707913 - DNA, 33 bp, Homo sapien
agataaatatgaggcaaaaagtaacataagtag

SEQ ID NO: 707914 - DNA, 33 bp, Homo sapien
agataaatatgaggcagaaagtaacataagtag

SEQ ID NO: 707915 - DNA, 33 bp, Homo sapien
cacagaggaagagcaacctgagaaaaagacttg

SEQ ID NO: 707916 - DNA, 33 bp, Homo sapien
cacagaggaagagcaatctgagaaaaagacttg

SEQ ID NO: 707917 - DNA, 33 bp, Homo sapien
tcttctaagtcaatacagagctgaacacaatgt

SEQ ID NO: 707918 - DNA, 33 bp, Homo sapien
tcttctaagtcaatacggagctgaacacaatgt

SEQ ID NO: 707919 - DNA, 33 bp, Homo sapien
gtttaaattgctttgactacttcaaccagattg

SEQ ID NO: 707920 - DNA, 33 bp, Homo sapien
gtttaaattgctttgagtacttcaaccagattg

SEQ ID NO: 707921 - DNA, 33 bp, Homo sapien
attattcaaacaagccaatcacaacctacctca

SEQ ID NO: 707922 - DNA, 33 bp, Homo sapien
attattcaaacaagcctatcacaacctacctca

SEQ ID NO: 707923 - DNA, 33 bp, Homo sapien
atggtgattagaatcaactgtgtgcaatgtgca

SEQ ID NO: 707924 - DNA, 33 bp, Homo sapien
atggtgattagaatcatctgtgtgcaatgtgca

SEQ ID NO: 707925 - DNA, 33 bp, Homo sapien
aacagtctgcaccacaactaaaggaatcacaaa

SEQ ID NO: 707926 - DNA, 33 bp, Homo sapien
aacagtctgcaccacagctaaaggaatcacaaa

SEQ ID NO: 707927 - DNA, 33 bp, Homo sapien
catatgtatatactgaggacaaagaggaagaga

SEQ ID NO: 707928 - DNA, 33 bp, Homo sapien
catatgtatatactgatgacaaagaggaagaga

SEQ ID NO: 707929 - DNA, 33 bp, Homo sapien
atccttttggccaagagcgggttacatgactct

SEQ ID NO: 707930 - DNA, 33 bp, Homo sapien
atccttttggccaagatcgggttacatgactct

SEQ ID NO: 707931 - DNA, 33 bp, Homo sapien
agattttgtatcagacaatggcataattagaga

SEQ ID NO: 707932 - DNA, 33 bp, Homo sapien
agattttgtatcagactatggcataattagaga

SEQ ID NO: 707933 - DNA, 33 bp, Homo sapien
gtttagtttagtggcaagtgattaataaggcca

SEQ ID NO: 707934 - DNA, 33 bp, Homo sapien
gtttagtttagtggcacgtgattaataaggcca

SEQ ID NO: 707935 - DNA, 33 bp, Homo sapien
aatccacagggagtaaaaagaggcctctgaatt

SEQ ID NO: 707936 - DNA, 33 bp, Homo sapien
aatccacagggagtaagaagaggcctctgaatt

SEQ ID NO: 707937 - DNA, 33 bp, Homo sapien
cccggtggaatgggcaaccatgcagcaacaagc

SEQ ID NO: 707938 - DNA, 33 bp, Homo sapien
cccggtggaatgggcagccatgcagcaacaagc

SEQ ID NO: 707939 - DNA, 33 bp, Homo sapien
tgaaatcagaatggaaccacattatagcaatta

SEQ ID NO: 707940 - DNA, 33 bp, Homo sapien
tgaaatcagaatggaagcacattatagcaatta

SEQ ID NO: 707941 - DNA, 33 bp, Homo sapien
taatcccaggacagaaagtactagctggggaaa

SEQ ID NO: 707942 - DNA, 33 bp, Homo sapien
taatcccaggacagaaggtactagctggggaaa

SEQ ID NO: 707943 - DNA, 33 bp, Homo sapien
agggcgttgaaggtgaaagctgagagggagacg

SEQ ID NO: 707944 - DNA, 33 bp, Homo sapien
agggcgttgaaggtgagagctgagagggagacg

SEQ ID NO: 707945 - DNA, 33 bp, Homo sapien
cagatgtacagtgactaaaatagctaaaagtga

SEQ ID NO: 707946 - DNA, 33 bp, Homo sapien
cagatgtacagtgactgaaatagctaaaagtga

SEQ ID NO: 707947 - DNA, 33 bp, Homo sapien
atggaacacacggagacgatggaactgcagggc

SEQ ID NO: 707948 - DNA, 33 bp, Homo sapien
atggaacacacggagatgatggaactgcagggc

SEQ ID NO: 707949 - DNA, 33 bp, Homo sapien
tctgttaccaatgctaagaaatagacaatcagt

SEQ ID NO: 707950 - DNA, 33 bp, Homo sapien
tctgttaccaatgctaggaaatagacaatcagt

SEQ ID NO: 707951 - DNA, 33 bp, Homo sapien
gcacggaatattcagaaaagagaaagtagctag

SEQ ID NO: 707952 - DNA, 33 bp, Homo sapien
gcacggaatattcagagaagagaaagtagctag

SEQ ID NO: 707953 - DNA, 33 bp, Homo sapien
ctgaggtacacattagaagttaaacagctctac

SEQ ID NO: 707954 - DNA, 33 bp, Homo sapien
ctgaggtacacattaggagttaaacagctctac

SEQ ID NO: 707955 - DNA, 33 bp, Homo sapien
actataaatgaataggaccaacataaaacgata

SEQ ID NO: 707956 - DNA, 33 bp, Homo sapien
actataaatgaatagggccaacataaaacgata

SEQ ID NO: 707957 - DNA, 33 bp, Homo sapien
gtcttcccaagctaaactgcgagactctttttc

SEQ ID NO: 707958 - DNA, 33 bp, Homo sapien
gtcttcccaagctaaattgcgagactctttttc

SEQ ID NO: 707959 - DNA, 33 bp, Homo sapien
tggtgggagtccagaacagctgtccttttttgt

SEQ ID NO: 707960 - DNA, 33 bp, Homo sapien
tggtgggagtccagaatagctgtccttttttgt

SEQ ID NO: 707961 - DNA, 33 bp, Homo sapien
ttctgatctctcaatgaaaatactgtgattaaa

SEQ ID NO: 707962 - DNA, 33 bp, Homo sapien
ttctgatctctcaatgcaaatactgtgattaaa

SEQ ID NO: 707963 - DNA, 33 bp, Homo sapien
ttgggcaatgcaatgcaattaccaaatagtaat

SEQ ID NO: 707964 - DNA, 33 bp, Homo sapien
ttgggcaatgcaatgcgattaccaaatagtaat

SEQ ID NO: 707965 - DNA, 33 bp, Homo sapien
aatatatccacatatcactttattttgtttgat

SEQ ID NO: 707966 - DNA, 33 bp, Homo sapien
aatatatccacatatctctttattttgtttgat

SEQ ID NO: 707967 - DNA, 33 bp, Homo sapien
gatctgagaaagtgaaggaggaacgtttacatt

SEQ ID NO: 707968 - DNA, 33 bp, Homo sapien
gatctgagaaagtgaatgaggaacgtttacatt

SEQ ID NO: 707969 - DNA, 33 bp, Homo sapien
gttgtggtagagtgaccatggttgaggtctggc

SEQ ID NO: 707970 - DNA, 33 bp, Homo sapien
gttgtggtagagtgactatggttgaggtctggc

SEQ ID NO: 707971 - DNA, 33 bp, Homo sapien
gtcacacatgctgtaaacaaatatgaccaatat

SEQ ID NO: 707972 - DNA, 33 bp, Homo sapien
gtcacacatgctgtaaccaaatatgaccaatat

SEQ ID NO: 707973 - DNA, 33 bp, Homo sapien
tgggtattcgtacttaagtctctggaactgctg

SEQ ID NO: 707974 - DNA, 33 bp, Homo sapien
tgggtattcgtacttatgtctctggaactgctg

SEQ ID NO: 707975 - DNA, 33 bp, Homo sapien
tggagaaatatgaaccagaaactagtataatac

SEQ ID NO: 707976 - DNA, 33 bp, Homo sapien
tggagaaatatgaacctgaaactagtataatac

SEQ ID NO: 707977 - DNA, 33 bp, Homo sapien
cttctaactagttgaacacagcaaaggtgatgg

SEQ ID NO: 707978 - DNA, 33 bp, Homo sapien
cttctaactagttgaatacagcaaaggtgatgg

SEQ ID NO: 707979 - DNA, 33 bp, Homo sapien
agcacgctgtgttgaaatatggctatcagtatt

SEQ ID NO: 707980 - DNA, 33 bp, Homo sapien
agcacgctgtgttgaagtatggctatcagtatt

SEQ ID NO: 707981 - DNA, 33 bp, Homo sapien
atcttggaaaggcattaaaattgctggtacata

SEQ ID NO: 707982 - DNA, 33 bp, Homo sapien
atcttggaaaggcattcaaattgctggtacata

SEQ ID NO: 707983 - DNA, 33 bp, Homo sapien
tgcagaagggaaagcaaatatgttcttcttcac

SEQ ID NO: 707984 - DNA, 33 bp, Homo sapien
tgcagaagggaaagcagatatgttcttcttcac

SEQ ID NO: 707985 - DNA, 33 bp, Homo sapien
tataattggtaagtctcactttgaagggacaga

SEQ ID NO: 707986 - DNA, 33 bp, Homo sapien
tataattggtaagtcttactttgaagggacaga

SEQ ID NO: 707987 - DNA, 33 bp, Homo sapien
aagttgtgtgatataaactagtacaaatcatta

SEQ ID NO: 707988 - DNA, 33 bp, Homo sapien
aagttgtgtgatataatctagtacaaatcatta

SEQ ID NO: 707989 - DNA, 33 bp, Homo sapien
ctggggacttttggacacatcatagttcacaca

SEQ ID NO: 707990 - DNA, 33 bp, Homo sapien
ctggggacttttggacgcatcatagttcacaca

SEQ ID NO: 707991 - DNA, 33 bp, Homo sapien
aggtgattggatactacacacataaaaggaagt

SEQ ID NO: 707992 - DNA, 33 bp, Homo sapien
aggtgattggatactatacacataaaaggaagt

SEQ ID NO: 707993 - DNA, 33 bp, Homo sapien
ttataggtgaaaaacccgaaaataagagatatg

SEQ ID NO: 707994 - DNA, 33 bp, Homo sapien
ttataggtgaaaaacctgaaaataagagatatg

SEQ ID NO: 707995 - DNA, 33 bp, Homo sapien
ccttataagatagctcacactctgtctttctcc

SEQ ID NO: 707996 - DNA, 33 bp, Homo sapien
ccttataagatagctcgcactctgtctttctcc

SEQ ID NO: 707997 - DNA, 33 bp, Homo sapien
ctaaactctgaaacacaaaactagggtacagca

SEQ ID NO: 707998 - DNA, 33 bp, Homo sapien
ctaaactctgaaacaccaaactagggtacagca

SEQ ID NO: 707999 - DNA, 33 bp, Homo sapien
agagaagagtgtatctaacaacttgtcctaaat

SEQ ID NO: 708000 - DNA, 33 bp, Homo sapien
agagaagagtgtatctcacaacttgtcctaaat

SEQ ID NO: 708001 - DNA, 33 bp, Homo sapien
ctctctcagcaacacacacaaagagaaaaatac

SEQ ID NO: 708002 - DNA, 33 bp, Homo sapien
ctctctcagcaacacatacaaagagaaaaatac

SEQ ID NO: 708003 - DNA, 33 bp, Homo sapien
gagggaagagaggaaacttacaagcaaagagaa

SEQ ID NO: 708004 - DNA, 33 bp, Homo sapien
gagggaagagaggaaagttacaagcaaagagaa

SEQ ID NO: 708005 - DNA, 33 bp, Homo sapien
gagggttccaggattaacaatgagctctccttg

SEQ ID NO: 708006 - DNA, 33 bp, Homo sapien
gagggttccaggattaccaatgagctctccttg

SEQ ID NO: 708007 - DNA, 33 bp, Homo sapien
aagacctgtgatacataaacacattctctaatc

SEQ ID NO: 708008 - DNA, 33 bp, Homo sapien
aagacctgtgatacatgaacacattctctaatc

SEQ ID NO: 708009 - DNA, 33 bp, Homo sapien
tataatttaagaaaaacgtaggatgatctatgt

SEQ ID NO: 708010 - DNA, 33 bp, Homo sapien
tataatttaagaaaaatgtaggatgatctatgt

SEQ ID NO: 708011 - DNA, 33 bp, Homo sapien
ctcagtgaagatgtcaactaggtggttagaata

SEQ ID NO: 708012 - DNA, 33 bp, Homo sapien
ctcagtgaagatgtcagctaggtggttagaata

SEQ ID NO: 708013 - DNA, 33 bp, Homo sapien
atttgatttgcatttaaaagttaagatgtagtc

SEQ ID NO: 708014 - DNA, 33 bp, Homo sapien
atttgatttgcatttagaagttaagatgtagtc

SEQ ID NO: 708015 - DNA, 33 bp, Homo sapien
tcacactgggatggaactatggaacctatgccc

SEQ ID NO: 708016 - DNA, 33 bp, Homo sapien
tcacactgggatggaattatggaacctatgccc

SEQ ID NO: 708017 - DNA, 33 bp, Homo sapien
aatcaaggctcttggacgatatttgaagtaact

SEQ ID NO: 708018 - DNA, 33 bp, Homo sapien
aatcaaggctcttggaggatatttgaagtaact

SEQ ID NO: 708019 - DNA, 33 bp, Homo sapien
attggtgtaatgggataaaaagatttaggtgac

SEQ ID NO: 708020 - DNA, 33 bp, Homo sapien
attggtgtaatgggatgaaaagatttaggtgac

SEQ ID NO: 708021 - DNA, 33 bp, Homo sapien
gacttacaaacacttacaagctatgacaaaaga

SEQ ID NO: 708022 - DNA, 33 bp, Homo sapien
gacttacaaacacttataagctatgacaaaaga

SEQ ID NO: 708023 - DNA, 33 bp, Homo sapien
gaggatggttcagataggatgtgaaggagggtc

SEQ ID NO: 708024 - DNA, 33 bp, Homo sapien
gaggatggttcagatatgatgtgaaggagggtc

SEQ ID NO: 708025 - DNA, 33 bp, Homo sapien
agttctggggtttttaagaaggttgcaaggttc

SEQ ID NO: 708026 - DNA, 33 bp, Homo sapien
agttctggggtttttatgaaggttgcaaggttc

SEQ ID NO: 708027 - DNA, 33 bp, Homo sapien
agacaaggaggtatcactaagggctggtaattc

SEQ ID NO: 708028 - DNA, 33 bp, Homo sapien
agacaaggaggtatcagtaagggctggtaattc

SEQ ID NO: 708029 - DNA, 33 bp, Homo sapien
ggggcagagagaggaaagattgcagttcatgat

SEQ ID NO: 708030 - DNA, 33 bp, Homo sapien
ggggcagagagaggaacgattgcagttcatgat

SEQ ID NO: 708031 - DNA, 33 bp, Homo sapien
aaactgtgttcttaaggagatttgtagattttc

SEQ ID NO: 708032 - DNA, 33 bp, Homo sapien
aaactgtgttcttaagtagatttgtagattttc

SEQ ID NO: 708033 - DNA, 33 bp, Homo sapien
tatccaattttatagacatcagtttcttgaaaa

SEQ ID NO: 708034 - DNA, 33 bp, Homo sapien
tatccaattttatagagatcagtttcttgaaaa

SEQ ID NO: 708035 - DNA, 33 bp, Homo sapien
gccatatttttttccaatcatgttcagtgggta

SEQ ID NO: 708036 - DNA, 33 bp, Homo sapien
gccatatttttttccagtcatgttcagtgggta

SEQ ID NO: 708037 - DNA, 33 bp, Homo sapien
ttaggcaaagagaataaaactggaactggtaaa

SEQ ID NO: 708038 - DNA, 33 bp, Homo sapien
ttaggcaaagagaatagaactggaactggtaaa

SEQ ID NO: 708039 - DNA, 33 bp, Homo sapien
attaagtagcataaaaacaataggaattcattg

SEQ ID NO: 708040 - DNA, 33 bp, Homo sapien
attaagtagcataaaagcaataggaattcattg

SEQ ID NO: 708041 - DNA, 33 bp, Homo sapien
agaaagagaaaaacaacgatgttcaaaagaatg

SEQ ID NO: 708042 - DNA, 33 bp, Homo sapien
agaaagagaaaaacaaggatgttcaaaagaatg

SEQ ID NO: 708043 - DNA, 33 bp, Homo sapien
gattagttgagggagaatagaaaagacaattta

SEQ ID NO: 708044 - DNA, 33 bp, Homo sapien
gattagttgagggagactagaaaagacaattta

SEQ ID NO: 708045 - DNA, 33 bp, Homo sapien
agtccttaccagtctacgtcaacaataatcttt

SEQ ID NO: 708046 - DNA, 33 bp, Homo sapien
agtccttaccagtctatgtcaacaataatcttt

SEQ ID NO: 708047 - DNA, 33 bp, Homo sapien
gtaggtatctttgtaactgaggatccatttatg

SEQ ID NO: 708048 - DNA, 33 bp, Homo sapien
gtaggtatctttgtaattgaggatccatttatg

SEQ ID NO: 708049 - DNA, 33 bp, Homo sapien
caagccaggttttctaaaagattggtgcaaaag

SEQ ID NO: 708050 - DNA, 33 bp, Homo sapien
caagccaggttttctataagattggtgcaaaag

SEQ ID NO: 708051 - DNA, 33 bp, Homo sapien
atacaatttgactactaaacttgaagacaaagt

SEQ ID NO: 708052 - DNA, 33 bp, Homo sapien
atacaatttgactacttaacttgaagacaaagt

SEQ ID NO: 708053 - DNA, 33 bp, Homo sapien
aagatcagaagaatcaaccagctgagcctagcc

SEQ ID NO: 708054 - DNA, 33 bp, Homo sapien
aagatcagaagaatcacccagctgagcctagcc

SEQ ID NO: 708055 - DNA, 33 bp, Homo sapien
agaatccagaaataaaactatacatctgttgtc

SEQ ID NO: 708056 - DNA, 33 bp, Homo sapien
agaatccagaaataaatctatacatctgttgtc

SEQ ID NO: 708057 - DNA, 33 bp, Homo sapien
gggacctattatagaagagccagaacaagtgtg

SEQ ID NO: 708058 - DNA, 33 bp, Homo sapien
gggacctattatagaatagccagaacaagtgtg

SEQ ID NO: 708059 - DNA, 33 bp, Homo sapien
attctttgctcaaaaacttgcagggccatttaa

SEQ ID NO: 708060 - DNA, 33 bp, Homo sapien
attctttgctcaaaaatttgcagggccatttaa

SEQ ID NO: 708061 - DNA, 33 bp, Homo sapien
tggagtctaagagtgacgtttgagctgaaaata

SEQ ID NO: 708062 - DNA, 33 bp, Homo sapien
tggagtctaagagtgatgtttgagctgaaaata

SEQ ID NO: 708063 - DNA, 33 bp, Homo sapien
tggcctatgttggatagataagagccaagtgtt

SEQ ID NO: 708064 - DNA, 33 bp, Homo sapien
tggcctatgttggatatataagagccaagtgtt

SEQ ID NO: 708065 - DNA, 33 bp, Homo sapien
cttaacttttccatcacgtttctcatctattta

SEQ ID NO: 708066 - DNA, 33 bp, Homo sapien
cttaacttttccatcatgtttctcatctattta

SEQ ID NO: 708067 - DNA, 33 bp, Homo sapien
aaatactcaactccgaatagctctagtgtttca

SEQ ID NO: 708068 - DNA, 33 bp, Homo sapien
aaatactcaactccgactagctctagtgtttca

SEQ ID NO: 708069 - DNA, 33 bp, Homo sapien
agaattgaaaagcgaacagaacaaagactgaaa

SEQ ID NO: 708070 - DNA, 33 bp, Homo sapien
agaattgaaaagcgaagagaacaaagactgaaa

SEQ ID NO: 708071 - DNA, 33 bp, Homo sapien
acaaaaaactaaaatacagtccatttggtccag

SEQ ID NO: 708072 - DNA, 33 bp, Homo sapien
acaaaaaactaaaatagagtccatttggtccag

SEQ ID NO: 708073 - DNA, 33 bp, Homo sapien
gcctaacaacagagtacacatgagccaaaatct

SEQ ID NO: 708074 - DNA, 33 bp, Homo sapien
gcctaacaacagagtatacatgagccaaaatct

SEQ ID NO: 708075 - DNA, 33 bp, Homo sapien
tttttgtatttggaaaactttgggtattgaaag

SEQ ID NO: 708076 - DNA, 33 bp, Homo sapien
tttttgtatttggaaagctttgggtattgaaag

SEQ ID NO: 708077 - DNA, 33 bp, Homo sapien
cccactactgaaggaaaggggagtataccgtat

SEQ ID NO: 708078 - DNA, 33 bp, Homo sapien
cccactactgaaggaagggggagtataccgtat

SEQ ID NO: 708079 - DNA, 33 bp, Homo sapien
tcatttgttggacttacggtttgcacatatttt

SEQ ID NO: 708080 - DNA, 33 bp, Homo sapien
tcatttgttggacttatggtttgcacatatttt

SEQ ID NO: 708081 - DNA, 33 bp, Homo sapien
caaatacaagtctacacaaaactgaataaaatt

SEQ ID NO: 708082 - DNA, 33 bp, Homo sapien
caaatacaagtctacagaaaactgaataaaatt

SEQ ID NO: 708083 - DNA, 33 bp, Homo sapien
ggaatgaaataatggacggtatttgcagcaacc

SEQ ID NO: 708084 - DNA, 33 bp, Homo sapien
ggaatgaaataatggatggtatttgcagcaacc

SEQ ID NO: 708085 - DNA, 33 bp, Homo sapien
tacaaaaatagaatgaagaactctcatgaatac

SEQ ID NO: 708086 - DNA, 33 bp, Homo sapien
tacaaaaatagaatgatgaactctcatgaatac

SEQ ID NO: 708087 - DNA, 33 bp, Homo sapien
atggacaatagactaactcaagtggcttgtggt

SEQ ID NO: 708088 - DNA, 33 bp, Homo sapien
atggacaatagactaattcaagtggcttgtggt

SEQ ID NO: 708089 - DNA, 33 bp, Homo sapien
tttctgtctctggcgacaagtggaaaagaggga

SEQ ID NO: 708090 - DNA, 33 bp, Homo sapien
tttctgtctctggcgataagtggaaaagaggga

SEQ ID NO: 708091 - DNA, 33 bp, Homo sapien
cagctgaaagaaaatccagtgaccaaatctatc

SEQ ID NO: 708092 - DNA, 33 bp, Homo sapien
cagctgaaagaaaatcgagtgaccaaatctatc

SEQ ID NO: 708093 - DNA, 33 bp, Homo sapien
cttgaattatcagccactaatgatggtaccaca

SEQ ID NO: 708094 - DNA, 33 bp, Homo sapien
cttgaattatcagccagtaatgatggtaccaca

SEQ ID NO: 708095 - DNA, 33 bp, Homo sapien
tatatgtgaaatacccaaacttggaatgcattt

SEQ ID NO: 708096 - DNA, 33 bp, Homo sapien
tatatgtgaaatacccgaacttggaatgcattt

SEQ ID NO: 708097 - DNA, 33 bp, Homo sapien
agaacaaagtcaatacaaatactacaatgaatg

SEQ ID NO: 708098 - DNA, 33 bp, Homo sapien
agaacaaagtcaatacgaatactacaatgaatg

SEQ ID NO: 708099 - DNA, 33 bp, Homo sapien
gaataatgaatagttacatttgactacaacaat

SEQ ID NO: 708100 - DNA, 33 bp, Homo sapien
gaataatgaatagttatatttgactacaacaat

SEQ ID NO: 708101 - DNA, 33 bp, Homo sapien
ccaccaataggtgaaaaacagggtggaggctgg

SEQ ID NO: 708102 - DNA, 33 bp, Homo sapien
ccaccaataggtgaaagacagggtggaggctgg

SEQ ID NO: 708103 - DNA, 33 bp, Homo sapien
gatttttcttctctgaactgttgatatggtggc

SEQ ID NO: 708104 - DNA, 33 bp, Homo sapien
gatttttcttctctgatctgttgatatggtggc

SEQ ID NO: 708105 - DNA, 33 bp, Homo sapien
tatgcaaaaaatgcataacaaaatccacattac

SEQ ID NO: 708106 - DNA, 33 bp, Homo sapien
tatgcaaaaaatgcatgacaaaatccacattac

SEQ ID NO: 708107 - DNA, 33 bp, Homo sapien
ctaagagcaggaacaacgctagaattttcaccc

SEQ ID NO: 708108 - DNA, 33 bp, Homo sapien
ctaagagcaggaacaaggctagaattttcaccc

SEQ ID NO: 708109 - DNA, 33 bp, Homo sapien
tagacacgtaaaacaccgtagtattgagattca

SEQ ID NO: 708110 - DNA, 33 bp, Homo sapien
tagacacgtaaaacactgtagtattgagattca

SEQ ID NO: 708111 - DNA, 33 bp, Homo sapien
tatttctctactgtgccgatactgtgtccacac

SEQ ID NO: 708112 - DNA, 33 bp, Homo sapien
tatttctctactgtgctgatactgtgtccacac

SEQ ID NO: 708113 - DNA, 33 bp, Homo sapien
ctcgcaaagagaaaacgcctatgaattccatca

SEQ ID NO: 708114 - DNA, 33 bp, Homo sapien
ctcgcaaagagaaaactcctatgaattccatca

SEQ ID NO: 708115 - DNA, 33 bp, Homo sapien
ttaacaaatgctgtcaactatgaaggccaattt

SEQ ID NO: 708116 - DNA, 33 bp, Homo sapien
ttaacaaatgctgtcacctatgaaggccaattt

SEQ ID NO: 708117 - DNA, 33 bp, Homo sapien
gaagggtttggaatgacggtaagcaccaatcca

SEQ ID NO: 708118 - DNA, 33 bp, Homo sapien
gaagggtttggaatgatggtaagcaccaatcca

SEQ ID NO: 708119 - DNA, 33 bp, Homo sapien
tttctcaaataatgacaactctataactcaatt

SEQ ID NO: 708120 - DNA, 33 bp, Homo sapien
tttctcaaataatgacgactctataactcaatt

SEQ ID NO: 708121 - DNA, 33 bp, Homo sapien
tataatagtaagtaaacatgttgagctgattcc

SEQ ID NO: 708122 - DNA, 33 bp, Homo sapien
tataatagtaagtaaatatgttgagctgattcc

SEQ ID NO: 708123 - DNA, 33 bp, Homo sapien
acatactgcaaagataaaggaagatcacattac

SEQ ID NO: 708124 - DNA, 33 bp, Homo sapien
acatactgcaaagatagaggaagatcacattac

SEQ ID NO: 708125 - DNA, 33 bp, Homo sapien
gaggcttcattcttacagtaacagaggtaggaa

SEQ ID NO: 708126 - DNA, 33 bp, Homo sapien
gaggcttcattcttacggtaacagaggtaggaa

SEQ ID NO: 708127 - DNA, 33 bp, Homo sapien
atgctgtattagctacaaatatcagaatataca

SEQ ID NO: 708128 - DNA, 33 bp, Homo sapien
atgctgtattagctaccaatatcagaatataca

SEQ ID NO: 708129 - DNA, 33 bp, Homo sapien
tctgaaataagcactgaactttaccaagttgat

SEQ ID NO: 708130 - DNA, 33 bp, Homo sapien
tctgaaataagcactgcactttaccaagttgat

SEQ ID NO: 708131 - DNA, 33 bp, Homo sapien
aatatcttaccattcaaactataccttctaaga

SEQ ID NO: 708132 - DNA, 33 bp, Homo sapien
aatatcttaccattcacactataccttctaaga

SEQ ID NO: 708133 - DNA, 33 bp, Homo sapien
tatttcagattgactcacctatatatgtccttc

SEQ ID NO: 708134 - DNA, 33 bp, Homo sapien
tatttcagattgactcgcctatatatgtccttc

SEQ ID NO: 708135 - DNA, 33 bp, Homo sapien
cataagttatctgaaaagatttcccccagccat

SEQ ID NO: 708136 - DNA, 33 bp, Homo sapien
cataagttatctgaaatgatttcccccagccat

SEQ ID NO: 708137 - DNA, 33 bp, Homo sapien
tgtcagttccccaaaacgtgtcactcctacctg

SEQ ID NO: 708138 - DNA, 33 bp, Homo sapien
tgtcagttccccaaaatgtgtcactcctacctg

SEQ ID NO: 708139 - DNA, 33 bp, Homo sapien
gccagcgtaagtgcacaatgaactgcagtttat

SEQ ID NO: 708140 - DNA, 33 bp, Homo sapien
gccagcgtaagtgcacgatgaactgcagtttat

SEQ ID NO: 708141 - DNA, 33 bp, Homo sapien
tttacattaagtcgtacagtataacaagctaaa

SEQ ID NO: 708142 - DNA, 33 bp, Homo sapien
tttacattaagtcgtagagtataacaagctaaa

SEQ ID NO: 708143 - DNA, 33 bp, Homo sapien
gacattttgaatattacgttgtgagcctctggg

SEQ ID NO: 708144 - DNA, 33 bp, Homo sapien
gacattttgaatattatgttgtgagcctctggg

SEQ ID NO: 708145 - DNA, 33 bp, Homo sapien
taaaggagctcacaccaaagtttcaggtatggt

SEQ ID NO: 708146 - DNA, 33 bp, Homo sapien
taaaggagctcacaccgaagtttcaggtatggt

SEQ ID NO: 708147 - DNA, 33 bp, Homo sapien
aagaagtttgttcagaatagaagaagcaagaaa

SEQ ID NO: 708148 - DNA, 33 bp, Homo sapien
aagaagtttgttcagagtagaagaagcaagaaa

SEQ ID NO: 708149 - DNA, 33 bp, Homo sapien
tataatatgtaacacactccatttcacgagtaa

SEQ ID NO: 708150 - DNA, 33 bp, Homo sapien
tataatatgtaacacattccatttcacgagtaa

SEQ ID NO: 708151 - DNA, 33 bp, Homo sapien
agtcagagtactgttgcagaaggtttttgcttt

SEQ ID NO: 708152 - DNA, 33 bp, Homo sapien
agtcagagtactgttggagaaggtttttgcttt

SEQ ID NO: 708153 - DNA, 33 bp, Homo sapien
agaacattaaaaatcgaccaacatttactgagt

SEQ ID NO: 708154 - DNA, 33 bp, Homo sapien
agaacattaaaaatcggccaacatttactgagt

SEQ ID NO: 708155 - DNA, 33 bp, Homo sapien
gaaaagccttccttacgacatggttttaaagga

SEQ ID NO: 708156 - DNA, 33 bp, Homo sapien
gaaaagccttccttactacatggttttaaagga

SEQ ID NO: 708157 - DNA, 33 bp, Homo sapien
ttactcttatttttagacaaatcctggcattgt

SEQ ID NO: 708158 - DNA, 33 bp, Homo sapien
ttactcttatttttaggcaaatcctggcattgt

SEQ ID NO: 708159 - DNA, 33 bp, Homo sapien
ttgagggatgaggtaacgtcttcctcagggaca

SEQ ID NO: 708160 - DNA, 33 bp, Homo sapien
ttgagggatgaggtaaggtcttcctcagggaca

SEQ ID NO: 708161 - DNA, 33 bp, Homo sapien
gttctgtttctcaatacactaggttaaattagt

SEQ ID NO: 708162 - DNA, 33 bp, Homo sapien
gttctgtttctcaatatactaggttaaattagt

SEQ ID NO: 708163 - DNA, 33 bp, Homo sapien
aagttcataatgttaacaggtagtaaagatggg

SEQ ID NO: 708164 - DNA, 33 bp, Homo sapien
aagttcataatgttaataggtagtaaagatggg

SEQ ID NO: 708165 - DNA, 33 bp, Homo sapien
acttaggcaacgtacccagtcttaggttccaga

SEQ ID NO: 708166 - DNA, 33 bp, Homo sapien
acttaggcaacgtacctagtcttaggttccaga

SEQ ID NO: 708167 - DNA, 33 bp, Homo sapien
aagagcattacaggaaaagacagttgaggtaaa

SEQ ID NO: 708168 - DNA, 33 bp, Homo sapien
aagagcattacaggaacagacagttgaggtaaa

SEQ ID NO: 708169 - DNA, 33 bp, Homo sapien
aacatgggtttcaaacacacaggtccatttata

SEQ ID NO: 708170 - DNA, 33 bp, Homo sapien
aacatgggtttcaaacgcacaggtccatttata

SEQ ID NO: 708171 - DNA, 33 bp, Homo sapien
gccagtccatccgggagcttggagggtcagcct

SEQ ID NO: 708172 - DNA, 33 bp, Homo sapien
gccagtccatccgggatcttggagggtcagcct

SEQ ID NO: 708173 - DNA, 33 bp, Homo sapien; identical to SEQ ID NO: 708171

SEQ ID NO: 708174 - DNA, 33 bp, Homo sapien; identical to SEQ ID NO: 708172

SEQ ID NO: 708175 - DNA, 33 bp, Homo sapien
agaagcccaatatcatcaacaataccatcaagg

SEQ ID NO: 708176 - DNA, 33 bp, Homo sapien
agaagcccaatatcatgaacaataccatcaagg

SEQ ID NO: 708177 - DNA, 33 bp, Homo sapien
tgctgactgcccagaacgcgctcttggaggaca

SEQ ID NO: 708178 - DNA, 33 bp, Homo sapien
tgctgactgcccagaatgcgctcttggaggaca

SEQ ID NO: 708179 - DNA, 33 bp, Homo sapien
acatttgaaagtaaagacaatctaatcagacac

SEQ ID NO: 708180 - DNA, 33 bp, Homo sapien
acatttgaaagtaaagtcaatctaatcagacac

SEQ ID NO: 708181 - DNA, 33 bp, Homo sapien
tattttcatcagtctacaccgtgaggagtggtg

SEQ ID NO: 708182 - DNA, 33 bp, Homo sapien
tattttcatcagtctataccgtgaggagtggtg

SEQ ID NO: 708183 - DNA, 33 bp, Homo sapien
ctggtgttaacaactcgagaaattttctgtgaa

SEQ ID NO: 708184 - DNA, 33 bp, Homo sapien
ctggtgttaacaactctagaaattttctgtgaa

SEQ ID NO: 708185 - DNA, 33 bp, Homo sapien
ctgaaagaaacctttcaaagctatcaatgtata

SEQ ID NO: 708186 - DNA, 33 bp, Homo sapien
ctgaaagaaacctttcgaagctatcaatgtata

SEQ ID NO: 708187 - DNA, 33 bp, Homo sapien
ttcacattaaaatagaagtcatactatgcatag

SEQ ID NO: 708188 - DNA, 33 bp, Homo sapien
ttcacattaaaatagaggtcatactatgcatag

SEQ ID NO: 708189 - DNA, 33 bp, Homo sapien
actttcaattagcaatgactttgaaacatagta

SEQ ID NO: 708190 - DNA, 33 bp, Homo sapien
actttcaattagcaattactttgaaacatagta

SEQ ID NO: 708191 - DNA, 33 bp, Homo sapien
actgaagcacacatctaaagataattacctgtg

SEQ ID NO: 708192 - DNA, 33 bp, Homo sapien
actgaagcacacatctgaagataattacctgtg

SEQ ID NO: 708193 - DNA, 33 bp, Homo sapien
atagcaataatgttgacgatgataaataatgct

SEQ ID NO: 708194 - DNA, 33 bp, Homo sapien
atagcaataatgttgatgatgataaataatgct

SEQ ID NO: 708195 - DNA, 33 bp, Homo sapien
aacccaagaatcctggacattatgcctacagtt

SEQ ID NO: 708196 - DNA, 33 bp, Homo sapien
aacccaagaatcctggccattatgcctacagtt

SEQ ID NO: 708197 - DNA, 33 bp, Homo sapien
gctgagaacagctagaagaaatcatgccttctt

SEQ ID NO: 708198 - DNA, 33 bp, Homo sapien
gctgagaacagctagacgaaatcatgccttctt

SEQ ID NO: 708199 - DNA, 33 bp, Homo sapien
taatgcatgaatacaaattagattagagttctg

SEQ ID NO: 708200 - DNA, 33 bp, Homo sapien
taatgcatgaatacaacttagattagagttctg

SEQ ID NO: 708201 - DNA, 33 bp, Homo sapien
aagtagatatggtaagcaggtttatggtcttct

SEQ ID NO: 708202 - DNA, 33 bp, Homo sapien
aagtagatatggtaagtaggtttatggtcttct

SEQ ID NO: 708203 - DNA, 33 bp, Homo sapien
cttgaatgaattcccaatctgtttctccacttt

SEQ ID NO: 708204 - DNA, 33 bp, Homo sapien
cttgaatgaattcccagtctgtttctccacttt

SEQ ID NO: 708205 - DNA, 33 bp, Homo sapien
tcattcctcagtatcaatcagttcaatgatcct

SEQ ID NO: 708206 - DNA, 33 bp, Homo sapien
tcattcctcagtatcagtcagttcaatgatcct

SEQ ID NO: 708207 - DNA, 33 bp, Homo sapien
catatgtggagcactacatgaacatagaagtga

SEQ ID NO: 708208 - DNA, 33 bp, Homo sapien
catatgtggagcactatatgaacatagaagtga

SEQ ID NO: 708209 - DNA, 33 bp, Homo sapien
tcctgctagtcctgagaaatctgtgtagcccag

SEQ ID NO: 708210 - DNA, 33 bp, Homo sapien
tcctgctagtcctgaggaatctgtgtagcccag

SEQ ID NO: 708211 - DNA, 33 bp, Homo sapien; identical to SEQ ID NO: 708209

SEQ ID NO: 708212 - DNA, 33 bp, Homo sapien; identical to SEQ ID NO: 708210

SEQ ID NO: 708213 - DNA, 33 bp, Homo sapien
agggctattttcacaacatggattcttcctgag

SEQ ID NO: 708214 - DNA, 33 bp, Homo sapien
agggctattttcacaatatggattcttcctgag

SEQ ID NO: 708215 - DNA, 33 bp, Homo sapien
tcaatagtttttgctcacttgccatgtgccaga

SEQ ID NO: 708216 - DNA, 33 bp, Homo sapien
tcaatagtttttgctcgcttgccatgtgccaga

SEQ ID NO: 708217 - DNA, 33 bp, Homo sapien
ctgaatagctgactaacttagaagcacacttgg

SEQ ID NO: 708218 - DNA, 33 bp, Homo sapien
ctgaatagctgactaatttagaagcacacttgg

SEQ ID NO: 708219 - DNA, 33 bp, Homo sapien
taacttcattggaatacaaaaacaccaagatca

SEQ ID NO: 708220 - DNA, 33 bp, Homo sapien
taacttcattggaatagaaaaacaccaagatca

SEQ ID NO: 708221 - DNA, 33 bp, Homo sapien
ttcaccataaatttgacgtttttttgcttcaat

SEQ ID NO: 708222 - DNA, 33 bp, Homo sapien
ttcaccataaatttgatgtttttttgcttcaat

SEQ ID NO: 708223 - DNA, 33 bp, Homo sapien
gttgtctattgtttctcacagttaattgttggt

SEQ ID NO: 708224 - DNA, 33 bp, Homo sapien
gttgtctattgtttctgacagttaattgttggt

SEQ ID NO: 708225 - DNA, 33 bp, Homo sapien
cttatacaattctgacggaaaaactaaagttga

SEQ ID NO: 708226 - DNA, 33 bp, Homo sapien
cttatacaattctgactgaaaaactaaagttga

SEQ ID NO: 708227 - DNA, 33 bp, Homo sapien
atgaaagtttcagcaagaaatcactaggcatcc

SEQ ID NO: 708228 - DNA, 33 bp, Homo sapien
atgaaagtttcagcaataaatcactaggcatcc

SEQ ID NO: 708229 - DNA, 33 bp, Homo sapien
accctagtgttggcaacagtttagtcacctcaa

SEQ ID NO: 708230 - DNA, 33 bp, Homo sapien
accctagtgttggcaatagtttagtcacctcaa

SEQ ID NO: 708231 - DNA, 33 bp, Homo sapien
agcatgaaaaggcaaacagtctgtactgaacgc

SEQ ID NO: 708232 - DNA, 33 bp, Homo sapien
agcatgaaaaggcaaatagtctgtactgaacgc

SEQ ID NO: 708233 - DNA, 33 bp, Homo sapien
gacaatatggtgatacaatggtcacagaatagc

SEQ ID NO: 708234 - DNA, 33 bp, Homo sapien
gacaatatggtgatacgatggtcacagaatagc

SEQ ID NO: 708235 - DNA, 33 bp, Homo sapien
cggagctataaagaaccgccggagactgggtaa

SEQ ID NO: 708236 - DNA, 33 bp, Homo sapien
cggagctataaagaactgccggagactgggtaa

SEQ ID NO: 708237 - DNA, 33 bp, Homo sapien
ctttcatcacgtctatcaaacacattatgtgaa

SEQ ID NO: 708238 - DNA, 33 bp, Homo sapien
ctttcatcacgtctattaaacacattatgtgaa

SEQ ID NO: 708239 - DNA, 33 bp, Homo sapien
acaaattgcttgccatcaatactaacacactcc

SEQ ID NO: 708240 - DNA, 33 bp, Homo sapien
acaaattgcttgccattaatactaacacactcc

SEQ ID NO: 708241 - DNA, 33 bp, Homo sapien
aaaagcctagagaaaacttcatgtttaacctca

SEQ ID NO: 708242 - DNA, 33 bp, Homo sapien
aaaagcctagagaaaagttcatgtttaacctca

SEQ ID NO: 708243 - DNA, 33 bp, Homo sapien
gctgtaagggaacctaaagttatccaatccaat

SEQ ID NO: 708244 - DNA, 33 bp, Homo sapien
gctgtaagggaacctacagttatccaatccaat

SEQ ID NO: 708245 - DNA, 33 bp, Homo sapien
gccttctggaagacaacttggcagtggcatggg

SEQ ID NO: 708246 - DNA, 33 bp, Homo sapien
gccttctggaagacaagttggcagtggcatggg

SEQ ID NO: 708247 - DNA, 33 bp, Homo sapien
ccccgactcatccccaagttctgttgtgaatag

SEQ ID NO: 708248 - DNA, 33 bp, Homo sapien
ccccgactcatccccacgttctgttgtgaatag

SEQ ID NO: 708249 - DNA, 33 bp, Homo sapien
ttaaccacactctctccccatcagcaggcaaaa

SEQ ID NO: 708250 - DNA, 33 bp, Homo sapien
ttaaccacactctctctccatcagcaggcaaaa

SEQ ID NO: 708251 - DNA, 33 bp, Homo sapien
ccatagtttaaaccacacaaagtattcagtaag

SEQ ID NO: 708252 - DNA, 33 bp, Homo sapien
ccatagtttaaaccacgcaaagtattcagtaag

SEQ ID NO: 708253 - DNA, 33 bp, Homo sapien
cagcaaaccttgaggaaaccttcaaaggagcca

SEQ ID NO: 708254 - DNA, 33 bp, Homo sapien
cagcaaaccttgaggagaccttcaaaggagcca

SEQ ID NO: 708255 - DNA, 33 bp, Homo sapien
gcagttaggaagaaaaagttcaagagatctctc

SEQ ID NO: 708256 - DNA, 33 bp, Homo sapien
gcagttaggaagaaaatgttcaagagatctctc

SEQ ID NO: 708257 - DNA, 33 bp, Homo sapien
ttgtgtccaataactagcttttaccactattca

SEQ ID NO: 708258 - DNA, 33 bp, Homo sapien
ttgtgtccaataactatcttttaccactattca

SEQ ID NO: 708259 - DNA, 33 bp, Homo sapien
aagatacaggtaagaccgaaggacaattccagg

SEQ ID NO: 708260 - DNA, 33 bp, Homo sapien
aagatacaggtaagactgaaggacaattccagg

SEQ ID NO: 708261 - DNA, 33 bp, Homo sapien
caccagtactttcaggcatggccctcattttcc

SEQ ID NO: 708262 - DNA, 33 bp, Homo sapien
caccagtactttcaggtatggccctcattttcc

SEQ ID NO: 708263 - DNA, 33 bp, Homo sapien
gtgaggaagaacaggacgtgcaacctgtcttcc

SEQ ID NO: 708264 - DNA, 33 bp, Homo sapien
gtgaggaagaacaggatgtgcaacctgtcttcc

SEQ ID NO: 708265 - DNA, 33 bp, Homo sapien
ggaagatacacactatcaattagcagctaacag

SEQ ID NO: 708266 - DNA, 33 bp, Homo sapien
ggaagatacacactatgaattagcagctaacag

SEQ ID NO: 708267 - DNA, 33 bp, Homo sapien
atgcaataggtcttaaaagaagtgagagaaatg

SEQ ID NO: 708268 - DNA, 33 bp, Homo sapien
atgcaataggtcttaagagaagtgagagaaatg

SEQ ID NO: 708269 - DNA, 33 bp, Homo sapien
tactgaagtaaacggacaagaatgcaataggtc

SEQ ID NO: 708270 - DNA, 33 bp, Homo sapien
tactgaagtaaacggagaagaatgcaataggtc

SEQ ID NO: 708271 - DNA, 33 bp, Homo sapien
tgttgtaagttaactaagcaattctgtctttac

SEQ ID NO: 708272 - DNA, 33 bp, Homo sapien
tgttgtaagttaactaggcaattctgtctttac

SEQ ID NO: 708273 - DNA, 33 bp, Homo sapien
tattacaaggtccagacatttcccacttaagac

SEQ ID NO: 708274 - DNA, 33 bp, Homo sapien
tattacaaggtccagagatttcccacttaagac

SEQ ID NO: 708275 - DNA, 33 bp, Homo sapien
agagtaaggtttgttaacagtatggattatatg

SEQ ID NO: 708276 - DNA, 33 bp, Homo sapien
agagtaaggtttgttagcagtatggattatatg

SEQ ID NO: 708277 - DNA, 33 bp, Homo sapien
ttcgggtgccaaatcccactgtcctgagaaaag

SEQ ID NO: 708278 - DNA, 33 bp, Homo sapien
ttcgggtgccaaatcctactgtcctgagaaaag

SEQ ID NO: 708279 - DNA, 33 bp, Homo sapien
taattgtctataataacgatttggtaaaaagtc

SEQ ID NO: 708280 - DNA, 33 bp, Homo sapien
taattgtctataataatgatttggtaaaaagtc

SEQ ID NO: 708281 - DNA, 33 bp, Homo sapien
gattatgactacttggaactctgcagtctttgg

SEQ ID NO: 708282 - DNA, 33 bp, Homo sapien
gattatgactacttggcactctgcagtctttgg

SEQ ID NO: 708283 - DNA, 33 bp, Homo sapien
acttggagcttagagacaaaatgacaaaagcat

SEQ ID NO: 708284 - DNA, 33 bp, Homo sapien
acttggagcttagagataaaatgacaaaagcat

SEQ ID NO: 708285 - DNA, 33 bp, Homo sapien
atggctggtaaattcacagaagtagtttgtgaa

SEQ ID NO: 708286 - DNA, 33 bp, Homo sapien
atggctggtaaattcatagaagtagtttgtgaa

SEQ ID NO: 708287 - DNA, 33 bp, Homo sapien
cgagattggccactaaattagtgaacttcacta

SEQ ID NO: 708288 - DNA, 33 bp, Homo sapien
cgagattggccactaagttagtgaacttcacta

SEQ ID NO: 708289 - DNA, 33 bp, Homo sapien
tgcattataagcattaacaccccttctcctaac

SEQ ID NO: 708290 - DNA, 33 bp, Homo sapien
tgcattataagcattatcaccccttctcctaac

SEQ ID NO: 708291 - DNA, 33 bp, Homo sapien
gtgatgggaacaaagaagtaaactagtatgatt

SEQ ID NO: 708292 - DNA, 33 bp, Homo sapien
gtgatgggaacaaagatgtaaactagtatgatt

SEQ ID NO: 708293 - DNA, 33 bp, Homo sapien
ctgcattaatttgctacgaatatggcttccaac

SEQ ID NO: 708294 - DNA, 33 bp, Homo sapien
ctgcattaatttgctatgaatatggcttccaac

SEQ ID NO: 708295 - DNA, 33 bp, Homo sapien
tggaaaagtcaactgacagaaagtcaatgagtg

SEQ ID NO: 708296 - DNA, 33 bp, Homo sapien
tggaaaagtcaactgatagaaagtcaatgagtg

SEQ ID NO: 708297 - DNA, 33 bp, Homo sapien
cttttaattttaatgcaacagccctggagatgt

SEQ ID NO: 708298 - DNA, 33 bp, Homo sapien
cttttaattttaatgctacagccctggagatgt

SEQ ID NO: 708299 - DNA, 33 bp, Homo sapien
agcagctaattagtgccaccttttccagaaact

SEQ ID NO: 708300 - DNA, 33 bp, Homo sapien
agcagctaattagtgctaccttttccagaaact

SEQ ID NO: 708301 - DNA, 33 bp, Homo sapien
tccacatacagtcagaagagttcaatttacatc

SEQ ID NO: 708302 - DNA, 33 bp, Homo sapien
tccacatacagtcagatgagttcaatttacatc

SEQ ID NO: 708303 - DNA, 33 bp, Homo sapien
gtttctggttataagaccattggcttagagaag

SEQ ID NO: 708304 - DNA, 33 bp, Homo sapien
gtttctggttataagatcattggcttagagaag

SEQ ID NO: 708305 - DNA, 33 bp, Homo sapien
ccacagcttgttacaaaatatgtggtcttataa

SEQ ID NO: 708306 - DNA, 33 bp, Homo sapien
ccacagcttgttacaacatatgtggtcttataa

SEQ ID NO: 708307 - DNA, 33 bp, Homo sapien
gctgacttgtcagaaaaaagactgactatatat

SEQ ID NO: 708308 - DNA, 33 bp, Homo sapien
gctgacttgtcagaaagaagactgactatatat

SEQ ID NO: 708309 - DNA, 33 bp, Homo sapien
ctctgcctgatgcacacacgacccttgccaatt

SEQ ID NO: 708310 - DNA, 33 bp, Homo sapien
ctctgcctgatgcacagacgacccttgccaatt

SEQ ID NO: 708311 - DNA, 33 bp, Homo sapien
cttgacattgattatccccttttgaactcttat

SEQ ID NO: 708312 - DNA, 33 bp, Homo sapien
cttgacattgattatctccttttgaactcttat

SEQ ID NO: 708313 - DNA, 33 bp, Homo sapien
aaagatgtttgaagacaatgcagtgatatacta

SEQ ID NO: 708314 - DNA, 33 bp, Homo sapien
aaagatgtttgaagacgatgcagtgatatacta

SEQ ID NO: 708315 - DNA, 33 bp, Homo sapien
tgtgagatatgcagaactggctggaagaggtga

SEQ ID NO: 708316 - DNA, 33 bp, Homo sapien
tgtgagatatgcagaattggctggaagaggtga

SEQ ID NO: 708317 - DNA, 33 bp, Homo sapien
gcattatgagaaagaaaagattggaagtactca

SEQ ID NO: 708318 - DNA, 33 bp, Homo sapien
gcattatgagaaagaagagattggaagtactca

SEQ ID NO: 708319 - DNA, 33 bp, Homo sapien
tcatcggtgatcatgacaggaagaggaacagag

SEQ ID NO: 708320 - DNA, 33 bp, Homo sapien
tcatcggtgatcatgataggaagaggaacagag

SEQ ID NO: 708321 - DNA, 33 bp, Homo sapien
tgattgatgaattagacgacatttccttcagct

SEQ ID NO: 708322 - DNA, 33 bp, Homo sapien
tgattgatgaattagatgacatttccttcagct

SEQ ID NO: 708323 - DNA, 33 bp, Homo sapien
aatttgtcatttaaataagagactaccttcatc

SEQ ID NO: 708324 - DNA, 33 bp, Homo sapien
aatttgtcatttaaatgagagactaccttcatc

SEQ ID NO: 708325 - DNA, 33 bp, Homo sapien
acaagttgtgtcacctcaaagcctttgtcatta

SEQ ID NO: 708326 - DNA, 33 bp, Homo sapien
acaagttgtgtcaccttaaagcctttgtcatta

SEQ ID NO: 708327 - DNA, 33 bp, Homo sapien
tatagcttaattggaaagaaacagcagaaagag

SEQ ID NO: 708328 - DNA, 33 bp, Homo sapien
tatagcttaattggaaggaaacagcagaaagag

SEQ ID NO: 708329 - DNA, 33 bp, Homo sapien
aattaattcaaccatacgtattaacaccatagt

SEQ ID NO: 708330 - DNA, 33 bp, Homo sapien
aattaattcaaccataggtattaacaccatagt

SEQ ID NO: 708331 - DNA, 33 bp, Homo sapien
aatacagagcactatcactaacctcaacagttg

SEQ ID NO: 708332 - DNA, 33 bp, Homo sapien
aatacagagcactatctctaacctcaacagttg

SEQ ID NO: 708333 - DNA, 33 bp, Homo sapien
agcgacagctgaaacaagttttctttccattcc

SEQ ID NO: 708334 - DNA, 33 bp, Homo sapien
agcgacagctgaaacaggttttctttccattcc

SEQ ID NO: 708335 - DNA, 33 bp, Homo sapien
aaagcagacaaattacacttcacttcaacgatc

SEQ ID NO: 708336 - DNA, 33 bp, Homo sapien
aaagcagacaaattacgcttcacttcaacgatc

SEQ ID NO: 708337 - DNA, 33 bp, Homo sapien
agaagagtccagtctcgccagtttaacctttgc

SEQ ID NO: 708338 - DNA, 33 bp, Homo sapien
agaagagtccagtctctccagtttaacctttgc

SEQ ID NO: 708339 - DNA, 33 bp, Homo sapien
atgaggactgtgaaaaaaaggctcacagcagcc

SEQ ID NO: 708340 - DNA, 33 bp, Homo sapien
atgaggactgtgaaaagaaggctcacagcagcc

SEQ ID NO: 708341 - DNA, 33 bp, Homo sapien
gggtgttttcttccatcagttgtgtgatctggc

SEQ ID NO: 708342 - DNA, 33 bp, Homo sapien
gggtgttttcttccattagttgtgtgatctggc

SEQ ID NO: 708343 - DNA, 33 bp, Homo sapien
acctatgatccactggcattccagatatacaag

SEQ ID NO: 708344 - DNA, 33 bp, Homo sapien
acctatgatccactggtattccagatatacaag

SEQ ID NO: 708345 - DNA, 33 bp, Homo sapien
caaaaagcagcaagaacggtaaagaaggaaaaa

SEQ ID NO: 708346 - DNA, 33 bp, Homo sapien
caaaaagcagcaagaatggtaaagaaggaaaaa

SEQ ID NO: 708347 - DNA, 33 bp, Homo sapien
taccactatgtctgctaaaatccttatttctat

SEQ ID NO: 708348 - DNA, 33 bp, Homo sapien
taccactatgtctgctgaaatccttatttctat

SEQ ID NO: 708349 - DNA, 33 bp, Homo sapien
agggaaacaacagaggacaagttatttctaaaa

SEQ ID NO: 708350 - DNA, 33 bp, Homo sapien
agggaaacaacagagggcaagttatttctaaaa

SEQ ID NO: 708351 - DNA, 33 bp, Homo sapien
ccattctacttgtttaacttttgtcatggtcta

SEQ ID NO: 708352 - DNA, 33 bp, Homo sapien
ccattctacttgtttagcttttgtcatggtcta

SEQ ID NO: 708353 - DNA, 33 bp, Homo sapien
ttggttgtagaaatgacagaaagagaagagtta

SEQ ID NO: 708354 - DNA, 33 bp, Homo sapien
ttggttgtagaaatgagagaaagagaagagtta

SEQ ID NO: 708355 - DNA, 33 bp, Homo sapien
aggaggcaacctgttaaataggacaaaatacgt

SEQ ID NO: 708356 - DNA, 33 bp, Homo sapien
aggaggcaacctgttacataggacaaaatacgt

SEQ ID NO: 708357 - DNA, 33 bp, Homo sapien
acgtgcaaaatattcacctgacaagacactaat

SEQ ID NO: 708358 - DNA, 33 bp, Homo sapien
acgtgcaaaatattcatctgacaagacactaat

SEQ ID NO: 708359 - DNA, 33 bp, Homo sapien
aagattttagtttgcaaagattgactttttcta

SEQ ID NO: 708360 - DNA, 33 bp, Homo sapien
aagattttagtttgcagagattgactttttcta

SEQ ID NO: 708361 - DNA, 33 bp, Homo sapien
gtagtatcagggattacgtctggcttctgctgt

SEQ ID NO: 708362 - DNA, 33 bp, Homo sapien
gtagtatcagggattatgtctggcttctgctgt

SEQ ID NO: 708363 - DNA, 33 bp, Homo sapien
caaatttagttgagacagattaaagacttaaat

SEQ ID NO: 708364 - DNA, 33 bp, Homo sapien
caaatttagttgagacggattaaagacttaaat

SEQ ID NO: 708365 - DNA, 33 bp, Homo sapien; identical to SEQ ID NO: 708363

SEQ ID NO: 708366 - DNA, 33 bp, Homo sapien; identical to SEQ ID NO: 708364

SEQ ID NO: 708367 - DNA, 33 bp, Homo sapien
aacccacagaataggggaaaatatttgccatct

SEQ ID NO: 708368 - DNA, 33 bp, Homo sapien
aacccacagaatagggtaaaatatttgccatct

SEQ ID NO: 708369 - DNA, 33 bp, Homo sapien
caggctcatttataacagtaagtacacagactc

SEQ ID NO: 708370 - DNA, 33 bp, Homo sapien
caggctcatttataaccgtaagtacacagactc

SEQ ID NO: 708371 - DNA, 33 bp, Homo sapien
agagagtgtgtatgaacgctaaagatgggtcct

SEQ ID NO: 708372 - DNA, 33 bp, Homo sapien
agagagtgtgtatgaaggctaaagatgggtcct

SEQ ID NO: 708373 - DNA, 33 bp, Homo sapien
aagacaaaataagacacctcaagtttggtccag

SEQ ID NO: 708374 - DNA, 33 bp, Homo sapien
aagacaaaataagacatctcaagtttggtccag

SEQ ID NO: 708375 - DNA, 33 bp, Homo sapien
ctggactgtggtgctgaacagcctaggtttgta

SEQ ID NO: 708376 - DNA, 33 bp, Homo sapien
ctggactgtggtgctggacagcctaggtttgta

SEQ ID NO: 708377 - DNA, 33 bp, Homo sapien
tggaaggaaatatagacgcctgccaggtaattc

SEQ ID NO: 708378 - DNA, 33 bp, Homo sapien
tggaaggaaatatagatgcctgccaggtaattc

SEQ ID NO: 708379 - DNA, 33 bp, Homo sapien
gaggaagtgtaagaaacacgatcacgatgttat

SEQ ID NO: 708380 - DNA, 33 bp, Homo sapien
gaggaagtgtaagaaatacgatcacgatgttat

SEQ ID NO: 708381 - DNA, 33 bp, Homo sapien
tggaaatgatgattggaaaaaatattagcctga

SEQ ID NO: 708382 - DNA, 33 bp, Homo sapien
tggaaatgatgattgggaaaaatattagcctga

SEQ ID NO: 708383 - DNA, 33 bp, Homo sapien
atgtatgaataaggaccatggggcatttgcacc

SEQ ID NO: 708384 - DNA, 33 bp, Homo sapien
atgtatgaataaggactatggggcatttgcacc

SEQ ID NO: 708385 - DNA, 33 bp, Homo sapien
atctctaaaatttccacgtgaaaatctaatagg

SEQ ID NO: 708386 - DNA, 33 bp, Homo sapien
atctctaaaatttccatgtgaaaatctaatagg

SEQ ID NO: 708387 - DNA, 33 bp, Homo sapien
agactaagaaagaaaaagatgcataaaaataac

SEQ ID NO: 708388 - DNA, 33 bp, Homo sapien
agactaagaaagaaaatgatgcataaaaataac

SEQ ID NO: 708389 - DNA, 33 bp, Homo sapien
acaaataaaggttaataatgctgaaatctattg

SEQ ID NO: 708390 - DNA, 33 bp, Homo sapien
acaaataaaggttaattatgctgaaatctattg

SEQ ID NO: 708391 - DNA, 33 bp, Homo sapien
tgaccttgtaaagacacggtagcactttctctt

SEQ ID NO: 708392 - DNA, 33 bp, Homo sapien
tgaccttgtaaagacatggtagcactttctctt

SEQ ID NO: 708393 - DNA, 33 bp, Homo sapien
aagatttaattagtgcagagttgggtttcagac

SEQ ID NO: 708394 - DNA, 33 bp, Homo sapien
aagatttaattagtgccgagttgggtttcagac

SEQ ID NO: 708395 - DNA, 33 bp, Homo sapien
actgctctttgagaaacagtccctcctaggtca

SEQ ID NO: 708396 - DNA, 33 bp, Homo sapien
actgctctttgagaaatagtccctcctaggtca

SEQ ID NO: 708397 - DNA, 33 bp, Homo sapien
gtcattctactctttgaaactaccaggattcag

SEQ ID NO: 708398 - DNA, 33 bp, Homo sapien
gtcattctactctttggaactaccaggattcag

SEQ ID NO: 708399 - DNA, 33 bp, Homo sapien
tatgtttgtaagtcaacgtatgcatctatgttc

SEQ ID NO: 708400 - DNA, 33 bp, Homo sapien
tatgtttgtaagtcaatgtatgcatctatgttc

SEQ ID NO: 708401 - DNA, 33 bp, Homo sapien
ctgaccggatttctaaactcggaatgactgaat

SEQ ID NO: 708402 - DNA, 33 bp, Homo sapien
ctgaccggatttctaacctcggaatgactgaat

SEQ ID NO: 708403 - DNA, 33 bp, Homo sapien
tgattatgtgagccaacagaattgtttagaata

SEQ ID NO: 708404 - DNA, 33 bp, Homo sapien
tgattatgtgagccaagagaattgtttagaata

SEQ ID NO: 708405 - DNA, 33 bp, Homo sapien
gctttttttgaggcacactttagcagaaatgat

SEQ ID NO: 708406 - DNA, 33 bp, Homo sapien
gctttttttgaggcacgctttagcagaaatgat

SEQ ID NO: 708407 - DNA, 33 bp, Homo sapien
agagtatgatgattgacggaccattgcatattc

SEQ ID NO: 708408 - DNA, 33 bp, Homo sapien
agagtatgatgattgatggaccattgcatattc

SEQ ID NO: 708409 - DNA, 33 bp, Homo sapien
tccccagtaacatgaccactcaaatgtttttac

SEQ ID NO: 708410 - DNA, 33 bp, Homo sapien
tccccagtaacatgactactcaaatgtttttac

SEQ ID NO: 708411 - DNA, 33 bp, Homo sapien
atacattagatttaccacaaaggcagaccaatc

SEQ ID NO: 708412 - DNA, 33 bp, Homo sapien
atacattagatttaccgcaaaggcagaccaatc

SEQ ID NO: 708413 - DNA, 33 bp, Homo sapien
aaagtgttataaggtcacaatgctaaggaaaca

SEQ ID NO: 708414 - DNA, 33 bp, Homo sapien
aaagtgttataaggtcgcaatgctaaggaaaca

SEQ ID NO: 708415 - DNA, 33 bp, Homo sapien
acttttgtgcttcaatgaacaccattaagaaag

SEQ ID NO: 708416 - DNA, 33 bp, Homo sapien
acttttgtgcttcaattaacaccattaagaaag

SEQ ID NO: 708417 - DNA, 33 bp, Homo sapien
tcaatgcaatccgtatcaaaatcccagattgct

SEQ ID NO: 708418 - DNA, 33 bp, Homo sapien
tcaatgcaatccgtatgaaaatcccagattgct

SEQ ID NO: 708419 - DNA, 33 bp, Homo sapien
agtagaaggtatgaagcaattacagagaacagg

SEQ ID NO: 708420 - DNA, 33 bp, Homo sapien
agtagaaggtatgaagtaattacagagaacagg

SEQ ID NO: 708421 - DNA, 33 bp, Homo sapien
acaggcaacctacagaatcggcaaacatttttg

SEQ ID NO: 708422 - DNA, 33 bp, Homo sapien
acaggcaacctacagagtcggcaaacatttttg

SEQ ID NO: 708423 - DNA, 33 bp, Homo sapien
cataattttaaccttaagacatcagttttaata

SEQ ID NO: 708424 - DNA, 33 bp, Homo sapien
cataattttaaccttatgacatcagttttaata

SEQ ID NO: 708425 - DNA, 33 bp, Homo sapien
cactggaaactacagaataggggacaagtagag

SEQ ID NO: 708426 - DNA, 33 bp, Homo sapien
cactggaaactacagagtaggggacaagtagag

SEQ ID NO: 708427 - DNA, 33 bp, Homo sapien
aaccatatgtgcagtaaagaagcagcaacatgg

SEQ ID NO: 708428 - DNA, 33 bp, Homo sapien
aaccatatgtgcagtacagaagcagcaacatgg

SEQ ID NO: 708429 - DNA, 33 bp, Homo sapien
aacaaaattgatcgacagctaacaagactaata

SEQ ID NO: 708430 - DNA, 33 bp, Homo sapien
aacaaaattgatcgacggctaacaagactaata

SEQ ID NO: 708431 - DNA, 33 bp, Homo sapien
catctaagatgagaaactcaggagctattggag

SEQ ID NO: 708432 - DNA, 33 bp, Homo sapien
catctaagatgagaaagtcaggagctattggag

SEQ ID NO: 708433 - DNA, 33 bp, Homo sapien; identical to SEQ ID NO: 708431

SEQ ID NO: 708434 - DNA, 33 bp, Homo sapien; identical to SEQ ID NO: 708432

SEQ ID NO: 708435 - DNA, 33 bp, Homo sapien
ttttaattatggtttacgatggcgaatacactg

SEQ ID NO: 708436 - DNA, 33 bp, Homo sapien
ttttaattatggtttatgatggcgaatacactg

SEQ ID NO: 708437 - DNA, 33 bp, Homo sapien
tgtgatacaaataaaaatgctctgaaactgatt

SEQ ID NO: 708438 - DNA, 33 bp, Homo sapien
tgtgatacaaataaaagtgctctgaaactgatt

SEQ ID NO: 708439 - DNA, 33 bp, Homo sapien
gaattctgagtatttgaaaaatggtattaatat

SEQ ID NO: 708440 - DNA, 33 bp, Homo sapien
gaattctgagtatttgcaaaatggtattaatat

SEQ ID NO: 708441 - DNA, 33 bp, Homo sapien
gagtttgtcatgcagcacaaaggagccaagcac

SEQ ID NO: 708442 - DNA, 33 bp, Homo sapien
gagtttgtcatgcagcgcaaaggagccaagcac

SEQ ID NO: 708443 - DNA, 33 bp, Homo sapien
gaggcttgcttctataactttttgaggcttccc

SEQ ID NO: 708444 - DNA, 33 bp, Homo sapien
gaggcttgcttctatatctttttgaggcttccc

SEQ ID NO: 708445 - DNA, 33 bp, Homo sapien
ttctttctctgaaatccgaaagcaattctaatg

SEQ ID NO: 708446 - DNA, 33 bp, Homo sapien
ttctttctctgaaatctgaaagcaattctaatg

SEQ ID NO: 708447 - DNA, 33 bp, Homo sapien
agcaatggaataatgaaagctgtggattgtaac

SEQ ID NO: 708448 - DNA, 33 bp, Homo sapien
agcaatggaataatgatagctgtggattgtaac

SEQ ID NO: 708449 - DNA, 33 bp, Homo sapien
tgaaagcttcaggtacaactttaacatctgctt

SEQ ID NO: 708450 - DNA, 33 bp, Homo sapien
tgaaagcttcaggtacgactttaacatctgctt

SEQ ID NO: 708451 - DNA, 33 bp, Homo sapien
gatatgcaaaacagcactcccatttattaatgg

SEQ ID NO: 708452 - DNA, 33 bp, Homo sapien
gatatgcaaaacagcattcccatttattaatgg

SEQ ID NO: 708453 - DNA, 33 bp, Homo sapien
tgattagtaactgcaccagaaatattaatagag

SEQ ID NO: 708454 - DNA, 33 bp, Homo sapien
tgattagtaactgcactagaaatattaatagag

SEQ ID NO: 708455 - DNA, 33 bp, Homo sapien
atatatgtgccacgcaaccatgtatacaaatgt

SEQ ID NO: 708456 - DNA, 33 bp, Homo sapien
atatatgtgccacgcagccatgtatacaaatgt

SEQ ID NO: 708457 - DNA, 33 bp, Homo sapien
gtaaacatttttgatcgatgcctatccatagtt

SEQ ID NO: 708458 - DNA, 33 bp, Homo sapien
gtaaacatttttgatctatgcctatccatagtt

SEQ ID NO: 708459 - DNA, 33 bp, Homo sapien
atagacaagtttgtaacggtaatagaatggctt

SEQ ID NO: 708460 - DNA, 33 bp, Homo sapien
atagacaagtttgtaatggtaatagaatggctt

SEQ ID NO: 708461 - DNA, 33 bp, Homo sapien
ataaatgggcccaaaagtcctattggagagtag

SEQ ID NO: 708462 - DNA, 33 bp, Homo sapien
ataaatgggcccaaaattcctattggagagtag

SEQ ID NO: 708463 - DNA, 33 bp, Homo sapien
ttagttcaggaggatacaaaattgttggttgga

SEQ ID NO: 708464 - DNA, 33 bp, Homo sapien
ttagttcaggaggatataaaattgttggttgga

SEQ ID NO: 708465 - DNA, 33 bp, Homo sapien
aaaagaaatacaccacaatcatttcaatagatg

SEQ ID NO: 708466 - DNA, 33 bp, Homo sapien
aaaagaaatacaccacgatcatttcaatagatg

SEQ ID NO: 708467 - DNA, 33 bp, Homo sapien
agaagtcacaagccacaggattccaagaattgt

SEQ ID NO: 708468 - DNA, 33 bp, Homo sapien
agaagtcacaagccacgggattccaagaattgt

SEQ ID NO: 708469 - DNA, 33 bp, Homo sapien
aaatgtctgtactcctaacagtgattaatagat

SEQ ID NO: 708470 - DNA, 33 bp, Homo sapien
aaatgtctgtactcctgacagtgattaatagat

SEQ ID NO: 708471 - DNA, 33 bp, Homo sapien
aaatcatgtttgcataataacagtcttttgtgt

SEQ ID NO: 708472 - DNA, 33 bp, Homo sapien
aaatcatgtttgcatattaacagtcttttgtgt

SEQ ID NO: 708473 - DNA, 33 bp, Homo sapien
gagaaattatactaaccgaacttgtgaaaataa

SEQ ID NO: 708474 - DNA, 33 bp, Homo sapien
gagaaattatactaactgaacttgtgaaaataa

SEQ ID NO: 708475 - DNA, 33 bp, Homo sapien
tctccatagtaagctaaagggtcagcaaaacaa

SEQ ID NO: 708476 - DNA, 33 bp, Homo sapien
tctccatagtaagctagagggtcagcaaaacaa

SEQ ID NO: 708477 - DNA, 33 bp, Homo sapien
aacttgatggatatgacataaccatgttagcac

SEQ ID NO: 708478 - DNA, 33 bp, Homo sapien
aacttgatggatatgagataaccatgttagcac

SEQ ID NO: 708479 - DNA, 33 bp, Homo sapien
tgtttctttgactctgcaaagtttgggaaagta

SEQ ID NO: 708480 - DNA, 33 bp, Homo sapien
tgtttctttgactctggaaagtttgggaaagta

SEQ ID NO: 708481 - DNA, 33 bp, Homo sapien
ttgcaattgacatttaactcttaaaaactctaa

SEQ ID NO: 708482 - DNA, 33 bp, Homo sapien
ttgcaattgacatttacctcttaaaaactctaa

SEQ ID NO: 708483 - DNA, 33 bp, Homo sapien
tgtaccatatactctcaatagatccttctctag

SEQ ID NO: 708484 - DNA, 33 bp, Homo sapien
tgtaccatatactctcgatagatccttctctag

SEQ ID NO: 708485 - DNA, 33 bp, Homo sapien
tctcgactaaaaaaaacagtgaatagttgtata

SEQ ID NO: 708486 - DNA, 33 bp, Homo sapien
tctcgactaaaaaaaatagtgaatagttgtata

SEQ ID NO: 708487 - DNA, 33 bp, Homo sapien
ccattaagtactggtcaaagaatataaagagcc

SEQ ID NO: 708488 - DNA, 33 bp, Homo sapien
ccattaagtactggtcgaagaatataaagagcc

SEQ ID NO: 708489 - DNA, 33 bp, Homo sapien
ctgctgctagaacatcaattaaagaaaacatat

SEQ ID NO: 708490 - DNA, 33 bp, Homo sapien
ctgctgctagaacatccattaaagaaaacatat

SEQ ID NO: 708491 - DNA, 33 bp, Homo sapien
ggtattttttgtcaaaccttggcaactgaatta

SEQ ID NO: 708492 - DNA, 33 bp, Homo sapien
ggtattttttgtcaaatcttggcaactgaatta

SEQ ID NO: 708493 - DNA, 33 bp, Homo sapien
taaaattgagaaggccacgccagtgcccaggag

SEQ ID NO: 708494 - DNA, 33 bp, Homo sapien
taaaattgagaaggccgcgccagtgcccaggag

SEQ ID NO: 708495 - DNA, 33 bp, Homo sapien
ttatattgtcttggaaagtcatagatgacagat

SEQ ID NO: 708496 - DNA, 33 bp, Homo sapien
ttatattgtcttggaatgtcatagatgacagat

SEQ ID NO: 708497 - DNA, 33 bp, Homo sapien; identical to SEQ ID NO: 708495

SEQ ID NO: 708498 - DNA, 33 bp, Homo sapien; identical to SEQ ID NO: 708496

SEQ ID NO: 708499 - DNA, 33 bp, Homo sapien
ttttttcgtattgaaactaagggcactattcag

SEQ ID NO: 708500 - DNA, 33 bp, Homo sapien
ttttttcgtattgaaattaagggcactattcag

SEQ ID NO: 708501 - DNA, 33 bp, Homo sapien
aaggaggaagagagtaagacaatgtagaaggac

SEQ ID NO: 708502 - DNA, 33 bp, Homo sapien
aaggaggaagagagtaggacaatgtagaaggac

SEQ ID NO: 708503 - DNA, 33 bp, Homo sapien; identical to SEQ ID NO: 708501

SEQ ID NO: 708504 - DNA, 33 bp, Homo sapien; identical to SEQ ID NO: 708502

SEQ ID NO: 708505 - DNA, 33 bp, Homo sapien
actcttacctgatcccaataacatgataatatc

SEQ ID NO: 708506 - DNA, 33 bp, Homo sapien
actcttacctgatccctataacatgataatatc

SEQ ID NO: 708507 - DNA, 33 bp, Homo sapien; identical to SEQ ID NO: 708505

SEQ ID NO: 708508 - DNA, 33 bp, Homo sapien; identical to SEQ ID NO: 708506

SEQ ID NO: 708509 - DNA, 33 bp, Homo sapien
actggccacaatctgacggaacctctaggattt

SEQ ID NO: 708510 - DNA, 33 bp, Homo sapien
actggccacaatctgatggaacctctaggattt

SEQ ID NO: 708511 - DNA, 33 bp, Homo sapien; identical to SEQ ID NO: 708509

SEQ ID NO: 708512 - DNA, 33 bp, Homo sapien; identical to SEQ ID NO: 708510

SEQ ID NO: 708513 - DNA, 33 bp, Homo sapien
tgtaccttttcatcttaaaataagttgacattt

SEQ ID NO: 708514 - DNA, 33 bp, Homo sapien
tgtaccttttcatctttaaataagttgacattt

SEQ ID NO: 708515 - DNA, 33 bp, Homo sapien
ctcaagacagttaccagaactcctctggagaaa

SEQ ID NO: 708516 - DNA, 33 bp, Homo sapien
ctcaagacagttaccataactcctctggagaaa

SEQ ID NO: 708517 - DNA, 33 bp, Homo sapien
tggaacataggagaggccaataagagaataaaa

SEQ ID NO: 708518 - DNA, 33 bp, Homo sapien
tggaacataggagaggtcaataagagaataaaa

SEQ ID NO: 708519 - DNA, 33 bp, Homo sapien
gtttgttttctcatcccagtccttgtactcagg

SEQ ID NO: 708520 - DNA, 33 bp, Homo sapien
gtttgttttctcatcctagtccttgtactcagg

SEQ ID NO: 708521 - DNA, 33 bp, Homo sapien
ggtgctgatgctaccacagggctctcactcttc

SEQ ID NO: 708522 - DNA, 33 bp, Homo sapien
ggtgctgatgctaccatagggctctcactcttc

SEQ ID NO: 708523 - DNA, 33 bp, Homo sapien
gttagtgaatctttaaaatccttgttcttcagt

SEQ ID NO: 708524 - DNA, 33 bp, Homo sapien
gttagtgaatctttaatatccttgttcttcagt

SEQ ID NO: 708525 - DNA, 33 bp, Homo sapien
cagacatacaaaggcaaatgttgggaacaggcc

SEQ ID NO: 708526 - DNA, 33 bp, Homo sapien
cagacatacaaaggcagatgttgggaacaggcc

SEQ ID NO: 708527 - DNA, 33 bp, Homo sapien
gggtaatcaaaccttacggtggcaattattcag

SEQ ID NO: 708528 - DNA, 33 bp, Homo sapien
gggtaatcaaaccttatggtggcaattattcag

SEQ ID NO: 708529 - DNA, 33 bp, Homo sapien
agcaaaatagaaaaaccaaactgctttggtgac

SEQ ID NO: 708530 - DNA, 33 bp, Homo sapien
agcaaaatagaaaaactaaactgctttggtgac

SEQ ID NO: 708531 - DNA, 33 bp, Homo sapien
atacctacaaagacacagctcaggcaaatgcaa

SEQ ID NO: 708532 - DNA, 33 bp, Homo sapien
atacctacaaagacacggctcaggcaaatgcaa

SEQ ID NO: 708533 - DNA, 33 bp, Homo sapien
aaggcatatgctgcaaaagctaaattcctccag

SEQ ID NO: 708534 - DNA, 33 bp, Homo sapien
aaggcatatgctgcaagagctaaattcctccag

SEQ ID NO: 708535 - DNA, 33 bp, Homo sapien
ctaggaggccatccaaatgccacagaatctaat

SEQ ID NO: 708536 - DNA, 33 bp, Homo sapien
ctaggaggccatccaagtgccacagaatctaat

SEQ ID NO: 708537 - DNA, 33 bp, Homo sapien
agccaagagaaatcaactgtgctgccagctaca

SEQ ID NO: 708538 - DNA, 33 bp, Homo sapien
agccaagagaaatcaattgtgctgccagctaca

SEQ ID NO: 708539 - DNA, 33 bp, Homo sapien
ttggaggacagtcagagaattcagaccaaattt

SEQ ID NO: 708540 - DNA, 33 bp, Homo sapien
ttggaggacagtcagataattcagaccaaattt

SEQ ID NO: 708541 - DNA, 33 bp, Homo sapien
aagagtctgtgtcccacattttttaacagtatc

SEQ ID NO: 708542 - DNA, 33 bp, Homo sapien
aagagtctgtgtcccatattttttaacagtatc

SEQ ID NO: 708543 - DNA, 33 bp, Homo sapien
aagatgctatggtgagaatacttttgggaactt

SEQ ID NO: 708544 - DNA, 33 bp, Homo sapien
aagatgctatggtgaggatacttttgggaactt

SEQ ID NO: 708545 - DNA, 33 bp, Homo sapien
cccattcatgttcaagcccgttatgggaggggg

SEQ ID NO: 708546 - DNA, 33 bp, Homo sapien
cccattcatgttcaagtccgttatgggaggggg

SEQ ID NO: 708547 - DNA, 33 bp, Homo sapien
aagtgcagtcatagaacgtgatatgtgagatgt

SEQ ID NO: 708548 - DNA, 33 bp, Homo sapien
aagtgcagtcatagaatgtgatatgtgagatgt

SEQ ID NO: 708549 - DNA, 33 bp, Homo sapien; identical to SEQ ID NO: 708547

SEQ ID NO: 708550 - DNA, 33 bp, Homo sapien; identical to SEQ ID NO: 708548

SEQ ID NO: 708551 - DNA, 33 bp, Homo sapien
atgtagaggaagtatacgaggccggattacatg

SEQ ID NO: 708552 - DNA, 33 bp, Homo sapien
atgtagaggaagtatatgaggccggattacatg

SEQ ID NO: 708553 - DNA, 33 bp, Homo sapien
catcttttctctgtaactaaacacagtaattta

SEQ ID NO: 708554 - DNA, 33 bp, Homo sapien
catcttttctctgtaattaaacacagtaattta

SEQ ID NO: 708555 - DNA, 33 bp, Homo sapien
gttttcataaaagacacgtagataaaccgtagt

SEQ ID NO: 708556 - DNA, 33 bp, Homo sapien
gttttcataaaagacaggtagataaaccgtagt

SEQ ID NO: 708557 - DNA, 33 bp, Homo sapien
agtcaatgttagatcactctgtacaagcagtag

SEQ ID NO: 708558 - DNA, 33 bp, Homo sapien
agtcaatgttagatcagtctgtacaagcagtag

SEQ ID NO: 708559 - DNA, 33 bp, Homo sapien
aaaaatatgaactagacgaggaaaaaatgaata

SEQ ID NO: 708560 - DNA, 33 bp, Homo sapien
aaaaatatgaactagatgaggaaaaaatgaata

SEQ ID NO: 708561 - DNA, 33 bp, Homo sapien; identical to SEQ ID NO: 708559

SEQ ID NO: 708562 - DNA, 33 bp, Homo sapien; identical to SEQ ID NO: 708560

SEQ ID NO: 708563 - DNA, 33 bp, Homo sapien
gttttttgtagcttcaaagacaagcattgactt

SEQ ID NO: 708564 - DNA, 33 bp, Homo sapien
gttttttgtagcttcagagacaagcattgactt

SEQ ID NO: 708565 - DNA, 33 bp, Homo sapien
tattcaattgcatgaaacctcagagaggagagg

SEQ ID NO: 708566 - DNA, 33 bp, Homo sapien
tattcaattgcatgaagcctcagagaggagagg

SEQ ID NO: 708567 - DNA, 33 bp, Homo sapien
tttttgaaaaccttgaatcaagctaatcaattt

SEQ ID NO: 708568 - DNA, 33 bp, Homo sapien
tttttgaaaaccttgagtcaagctaatcaattt

SEQ ID NO: 708569 - DNA, 33 bp, Homo sapien
tttgtatgcttctatcgattgtgaaatgcttcc

SEQ ID NO: 708570 - DNA, 33 bp, Homo sapien
tttgtatgcttctatctattgtgaaatgcttcc

SEQ ID NO: 708571 - DNA, 33 bp, Homo sapien
tgtaacgtcctgctctaaactttctctgtgacc

SEQ ID NO: 708572 - DNA, 33 bp, Homo sapien
tgtaacgtcctgctctgaactttctctgtgacc

SEQ ID NO: 708573 - DNA, 33 bp, Homo sapien
tcaaggactatataccaaaaggagatccaggac

SEQ ID NO: 708574 - DNA, 33 bp, Homo sapien
tcaaggactatataccgaaaggagatccaggac

SEQ ID NO: 708575 - DNA, 33 bp, Homo sapien
tttgtatatatgcaaagaagacatccaatccta

SEQ ID NO: 708576 - DNA, 33 bp, Homo sapien
tttgtatatatgcaaataagacatccaatccta

SEQ ID NO: 708577 - DNA, 33 bp, Homo sapien
agtcatgctacctatacaccctgtggaatgtga

SEQ ID NO: 708578 - DNA, 33 bp, Homo sapien
agtcatgctacctatataccctgtggaatgtga

SEQ ID NO: 708579 - DNA, 33 bp, Homo sapien
tcaaatgagttccaaacattttctcagcttcct

SEQ ID NO: 708580 - DNA, 33 bp, Homo sapien
tcaaatgagttccaaatattttctcagcttcct

SEQ ID NO: 708581 - DNA, 33 bp, Homo sapien
ggtgacccacttctcacacctccagtagacagt

SEQ ID NO: 708582 - DNA, 33 bp, Homo sapien
ggtgacccacttctcatacctccagtagacagt

SEQ ID NO: 708583 - DNA, 33 bp, Homo sapien
caaataatcttgcttaggttgaggtttaaattt

SEQ ID NO: 708584 - DNA, 33 bp, Homo sapien
caaataatcttgcttatgttgaggtttaaattt

SEQ ID NO: 708585 - DNA, 33 bp, Homo sapien
atattacagatttgaacagaaatagaaaacttt

SEQ ID NO: 708586 - DNA, 33 bp, Homo sapien
atattacagatttgaagagaaatagaaaacttt

SEQ ID NO: 708587 - DNA, 33 bp, Homo sapien
gattgtcaagtggacaaatagagcacactgtgg

SEQ ID NO: 708588 - DNA, 33 bp, Homo sapien
gattgtcaagtggacatatagagcacactgtgg

SEQ ID NO: 708589 - DNA, 33 bp, Homo sapien
agaaggccgcccccccagaagtggccatttcag

SEQ ID NO: 708590 - DNA, 33 bp, Homo sapien
agaaggccgcccccccggaagtggccatttcag

SEQ ID NO: 708591 - DNA, 33 bp, Homo sapien
aagactgaagtgaacaaaacatctatatttcct

SEQ ID NO: 708592 - DNA, 33 bp, Homo sapien
aagactgaagtgaacagaacatctatatttcct

SEQ ID NO: 708593 - DNA, 33 bp, Homo sapien
aaccaccccagtcaaactccgtgttgttctgcc

SEQ ID NO: 708594 - DNA, 33 bp, Homo sapien
aaccaccccagtcaaattccgtgttgttctgcc

SEQ ID NO: 708595 - DNA, 33 bp, Homo sapien
aaccgacataatggaaacatcaaggtggaagtc

SEQ ID NO: 708596 - DNA, 33 bp, Homo sapien
aaccgacataatggaagcatcaaggtggaagtc

SEQ ID NO: 708597 - DNA, 33 bp, Homo sapien
gaaaatgttgttgatacacttgtccttgcagat

SEQ ID NO: 708598 - DNA, 33 bp, Homo sapien
gaaaatgttgttgatatacttgtccttgcagat

SEQ ID NO: 708599 - DNA, 33 bp, Homo sapien
aaaaactggggatggaagtaccagcagatttat

SEQ ID NO: 708600 - DNA, 33 bp, Homo sapien
aaaaactggggatggaggtaccagcagatttat

SEQ ID NO: 708601 - DNA, 33 bp, Homo sapien
aacaactgctcaagaacgatgttaacaaaaatt

SEQ ID NO: 708602 - DNA, 33 bp, Homo sapien
aacaactgctcaagaatgatgttaacaaaaatt

SEQ ID NO: 708603 - DNA, 33 bp, Homo sapien
taaacagctaacatccaaatcatccattttaga

SEQ ID NO: 708604 - DNA, 33 bp, Homo sapien
taaacagctaacatccgaatcatccattttaga

SEQ ID NO: 708605 - DNA, 33 bp, Homo sapien
tcacactgaaaatgaaacagatttgcttcagcc

SEQ ID NO: 708606 - DNA, 33 bp, Homo sapien
tcacactgaaaatgaatcagatttgcttcagcc

SEQ ID NO: 708607 - DNA, 33 bp, Homo sapien
gattctctctgattctcaccgtgaagaatgtga

SEQ ID NO: 708608 - DNA, 33 bp, Homo sapien
gattctctctgattctgaccgtgaagaatgtga

SEQ ID NO: 708609 - DNA, 33 bp, Homo sapien; identical to SEQ ID NO: 708607

SEQ ID NO: 708610 - DNA, 33 bp, Homo sapien; identical to SEQ ID NO: 708608

SEQ ID NO: 708611 - DNA, 33 bp, Homo sapien
tagaataaaccagtgaactttgtgtatctgtca

SEQ ID NO: 708612 - DNA, 33 bp, Homo sapien
tagaataaaccagtgacctttgtgtatctgtca

SEQ ID NO: 708613 - DNA, 33 bp, Homo sapien
gaggctggataacatgacaagcctcaactgcat

SEQ ID NO: 708614 - DNA, 33 bp, Homo sapien
gaggctggataacatggcaagcctcaactgcat

SEQ ID NO: 708615 - DNA, 33 bp, Homo sapien
gaactcgtcttgacatcataggtgactgacaga

SEQ ID NO: 708616 - DNA, 33 bp, Homo sapien
gaactcgtcttgacatgataggtgactgacaga

SEQ ID NO: 708617 - DNA, 33 bp, Homo sapien
ttatgctctaaaatgtaaaattctgggatctca

SEQ ID NO: 708618 - DNA, 33 bp, Homo sapien
ttatgctctaaaatgtgaaattctgggatctca

SEQ ID NO: 708619 - DNA, 33 bp, Homo sapien
ctagaatgttctgtatgagcaatggccacaggg

SEQ ID NO: 708620 - DNA, 33 bp, Homo sapien
ctagaatgttctgtattagcaatggccacaggg

SEQ ID NO: 708621 - DNA, 33 bp, Homo sapien
tagcacaataacaataacaggtatttcaaaatg

SEQ ID NO: 708622 - DNA, 33 bp, Homo sapien
tagcacaataacaatagcaggtatttcaaaatg

SEQ ID NO: 708623 - DNA, 33 bp, Homo sapien
gtccaggaaaagcctaacttagaggtaacactt

SEQ ID NO: 708624 - DNA, 33 bp, Homo sapien
gtccaggaaaagcctatcttagaggtaacactt

SEQ ID NO: 708625 - DNA, 33 bp, Homo sapien
ttgggatgagaattcacgttggacttctcatcc

SEQ ID NO: 708626 - DNA, 33 bp, Homo sapien
ttgggatgagaattcaggttggacttctcatcc

SEQ ID NO: 708627 - DNA, 33 bp, Homo sapien
cctgcttatggacttcaccgaattgccccaagc

SEQ ID NO: 708628 - DNA, 33 bp, Homo sapien
cctgcttatggacttctccgaattgccccaagc

SEQ ID NO: 708629 - DNA, 33 bp, Homo sapien
caaaatctcattgggcaaatacccagtgtggtt

SEQ ID NO: 708630 - DNA, 33 bp, Homo sapien
caaaatctcattgggcgaatacccagtgtggtt

SEQ ID NO: 708631 - DNA, 33 bp, Homo sapien
atactcagtgacttcaccatttctctaagagaa

SEQ ID NO: 708632 - DNA, 33 bp, Homo sapien
atactcagtgacttcatcatttctctaagagaa

SEQ ID NO: 708633 - DNA, 33 bp, Homo sapien
acacacaaagtcctgacgataaaggacaatttc

SEQ ID NO: 708634 - DNA, 33 bp, Homo sapien
acacacaaagtcctgatgataaaggacaatttc

SEQ ID NO: 708635 - DNA, 33 bp, Homo sapien
aaggatgatagcaatacaagttgattcttaatt

SEQ ID NO: 708636 - DNA, 33 bp, Homo sapien
aaggatgatagcaatataagttgattcttaatt

SEQ ID NO: 708637 - DNA, 33 bp, Homo sapien
tcatagctgcctgacacagaagcacagagataa

SEQ ID NO: 708638 - DNA, 33 bp, Homo sapien
tcatagctgcctgacagagaagcacagagataa

SEQ ID NO: 708639 - DNA, 33 bp, Homo sapien
tattcacaaaaggcaacttgagacccacagtta

SEQ ID NO: 708640 - DNA, 33 bp, Homo sapien
tattcacaaaaggcaatttgagacccacagtta

SEQ ID NO: 708641 - DNA, 33 bp, Homo sapien; identical to SEQ ID NO: 708639

SEQ ID NO: 708642 - DNA, 33 bp, Homo sapien; identical to SEQ ID NO: 708640

SEQ ID NO: 708643 - DNA, 33 bp, Homo sapien
atgcttgtataaaatacgtgacaacaaatggag

SEQ ID NO: 708644 - DNA, 33 bp, Homo sapien
atgcttgtataaaatatgtgacaacaaatggag

SEQ ID NO: 708645 - DNA, 33 bp, Homo sapien
tcaggtttcagcaaaacttggaagaggtcatta

SEQ ID NO: 708646 - DNA, 33 bp, Homo sapien
tcaggtttcagcaaaagttggaagaggtcatta

SEQ ID NO: 708647 - DNA, 33 bp, Homo sapien; identical to SEQ ID NO: 708645

SEQ ID NO: 708648 - DNA, 33 bp, Homo sapien; identical to SEQ ID NO: 708646

SEQ ID NO: 708649 - DNA, 33 bp, Homo sapien; identical to SEQ ID NO: 708645

SEQ ID NO: 708650 - DNA, 33 bp, Homo sapien; identical to SEQ ID NO: 708646

SEQ ID NO: 708651 - DNA, 33 bp, Homo sapien
ccaataggctatagaacgatgccaacacataat

SEQ ID NO: 708652 - DNA, 33 bp, Homo sapien
ccaataggctatagaatgatgccaacacataat

SEQ ID NO: 708653 - DNA, 33 bp, Homo sapien
ctgaggatacacaaaccggaaatatatataatc

SEQ ID NO: 708654 - DNA, 33 bp, Homo sapien
ctgaggatacacaaactggaaatatatataatc

SEQ ID NO: 708655 - DNA, 33 bp, Homo sapien
gtgtaattatcacttccatctagatccaaaatt

SEQ ID NO: 708656 - DNA, 33 bp, Homo sapien
gtgtaattatcacttctatctagatccaaaatt

SEQ ID NO: 708657 - DNA, 33 bp, Homo sapien
tcacattgctgtacaaaaagtctctataatttt

SEQ ID NO: 708658 - DNA, 33 bp, Homo sapien
tcacattgctgtacaacaagtctctataatttt

SEQ ID NO: 708659 - DNA, 33 bp, Homo sapien
agaaaaacgatgcaataacaacccgagagaaag

SEQ ID NO: 708660 - DNA, 33 bp, Homo sapien
agaaaaacgatgcaatcacaacccgagagaaag

SEQ ID NO: 708661 - DNA, 33 bp, Homo sapien
ataattaggccatggaagttttacactcataaa

SEQ ID NO: 708662 - DNA, 33 bp, Homo sapien
ataattaggccatggaggttttacactcataaa

SEQ ID NO: 708663 - DNA, 33 bp, Homo sapien
gttgtgagtgaatatacagaaaatcagtttttt

SEQ ID NO: 708664 - DNA, 33 bp, Homo sapien
gttgtgagtgaatatatagaaaatcagtttttt

SEQ ID NO: 708665 - DNA, 33 bp, Homo sapien
ctatttctttatggcactgaagaacaagcattt

SEQ ID NO: 708666 - DNA, 33 bp, Homo sapien
ctatttctttatggcagtgaagaacaagcattt

SEQ ID NO: 708667 - DNA, 33 bp, Homo sapien
tctgtgtcactgcggacgtgtgtggttctgtgt

SEQ ID NO: 708668 - DNA, 33 bp, Homo sapien
tctgtgtcactgcggatgtgtgtggttctgtgt

SEQ ID NO: 708669 - DNA, 33 bp, Homo sapien; identical to SEQ ID NO: 708667

SEQ ID NO: 708670 - DNA, 33 bp, Homo sapien; identical to SEQ ID NO: 708668

SEQ ID NO: 708671 - DNA, 33 bp, Homo sapien
gactaatgtctctctaaattgcataaaactaag

SEQ ID NO: 708672 - DNA, 33 bp, Homo sapien
gactaatgtctctctacattgcataaaactaag

SEQ ID NO: 708673 - DNA, 33 bp, Homo sapien
gtgttaaaggtgcatcagaaagagaacttaaac

SEQ ID NO: 708674 - DNA, 33 bp, Homo sapien
gtgttaaaggtgcatcggaaagagaacttaaac

SEQ ID NO: 708675 - DNA, 33 bp, Homo sapien
cacagatgtttcaaaccacttaacagataattt

SEQ ID NO: 708676 - DNA, 33 bp, Homo sapien
cacagatgtttcaaactacttaacagataattt

SEQ ID NO: 708677 - DNA, 33 bp, Homo sapien
tgaattagcgacaggaggtttagtaagcttaaa

SEQ ID NO: 708678 - DNA, 33 bp, Homo sapien
tgaattagcgacaggatgtttagtaagcttaaa

SEQ ID NO: 708679 - DNA, 33 bp, Homo sapien
tgacagtaaaatgagccagttgaaattctaaaa

SEQ ID NO: 708680 - DNA, 33 bp, Homo sapien
tgacagtaaaatgagctagttgaaattctaaaa

SEQ ID NO: 708681 - DNA, 33 bp, Homo sapien
tgtttaggagatgtaactgaagtctccgtggtg

SEQ ID NO: 708682 - DNA, 33 bp, Homo sapien
tgtttaggagatgtaattgaagtctccgtggtg

SEQ ID NO: 708683 - DNA, 33 bp, Homo sapien
tagcctgacttcgaataacaacattagttttgc

SEQ ID NO: 708684 - DNA, 33 bp, Homo sapien
tagcctgacttcgaatcacaacattagttttgc

SEQ ID NO: 708685 - DNA, 33 bp, Homo sapien
ctatattaggtaatgaaactataggcacttatt

SEQ ID NO: 708686 - DNA, 33 bp, Homo sapien
ctatattaggtaatgagactataggcacttatt

SEQ ID NO: 708687 - DNA, 33 bp, Homo sapien
agtcccactggagaagaagctcaaaattggaga

SEQ ID NO: 708688 - DNA, 33 bp, Homo sapien
agtcccactggagaaggagctcaaaattggaga

SEQ ID NO: 708689 - DNA, 33 bp, Homo sapien
caaggtacccattggtaaaacatatttcagggc

SEQ ID NO: 708690 - DNA, 33 bp, Homo sapien
caaggtacccattggttaaacatatttcagggc

SEQ ID NO: 708691 - DNA, 33 bp, Homo sapien
ttattttgttggcttcaaagtttcagtagaaat

SEQ ID NO: 708692 - DNA, 33 bp, Homo sapien
ttattttgttggcttcgaagtttcagtagaaat

SEQ ID NO: 708693 - DNA, 33 bp, Homo sapien; identical to SEQ ID NO: 708691

SEQ ID NO: 708694 - DNA, 33 bp, Homo sapien; identical to SEQ ID NO: 708692

SEQ ID NO: 708695 - DNA, 33 bp, Homo sapien
agctggactccgcaagaaattgttcacattgtt

SEQ ID NO: 708696 - DNA, 33 bp, Homo sapien
agctggactccgcaaggaattgttcacattgtt

SEQ ID NO: 708697 - DNA, 33 bp, Homo sapien; identical to SEQ ID NO: 708695

SEQ ID NO: 708698 - DNA, 33 bp, Homo sapien; identical to SEQ ID NO: 708696

SEQ ID NO: 708699 - DNA, 33 bp, Homo sapien
ttgtgaaataagcacagccatttaagacagaaa

SEQ ID NO: 708700 - DNA, 33 bp, Homo sapien
ttgtgaaataagcacatccatttaagacagaaa

SEQ ID NO: 708701 - DNA, 33 bp, Homo sapien
tttcctaggcttctccacaggagttgaggaatg

SEQ ID NO: 708702 - DNA, 33 bp, Homo sapien
tttcctaggcttctccgcaggagttgaggaatg

SEQ ID NO: 708703 - DNA, 33 bp, Homo sapien
ctaccaatccagaagcagctaggtcacatttct

SEQ ID NO: 708704 - DNA, 33 bp, Homo sapien
ctaccaatccagaagcggctaggtcacatttct

SEQ ID NO: 708705 - DNA, 33 bp, Homo sapien
atggagatcatctactaaaatgctttccatatg

SEQ ID NO: 708706 - DNA, 33 bp, Homo sapien
atggagatcatctactgaaatgctttccatatg

SEQ ID NO: 708707 - DNA, 33 bp, Homo sapien
ttgaggaaatcttcaacgggtgttgctttctgc

SEQ ID NO: 708708 - DNA, 33 bp, Homo sapien
ttgaggaaatcttcaatgggtgttgctttctgc

SEQ ID NO: 708709 - DNA, 33 bp, Homo sapien
gttgtgctcacataaactaccataatactttcc

SEQ ID NO: 708710 - DNA, 33 bp, Homo sapien
gttgtgctcacataaattaccataatactttcc

SEQ ID NO: 708711 - DNA, 33 bp, Homo sapien
actgtagttacctcttaaacaataaaagttcaa

SEQ ID NO: 708712 - DNA, 33 bp, Homo sapien
actgtagttacctcttcaacaataaaagttcaa

SEQ ID NO: 708713 - DNA, 33 bp, Homo sapien
aggagtgatttagaagcaaggtttgggaaattc

SEQ ID NO: 708714 - DNA, 33 bp, Homo sapien
aggagtgatttagaaggaaggtttgggaaattc

SEQ ID NO: 708715 - DNA, 33 bp, Homo sapien
agtaggattttgaggacgagttcacagaaattc

SEQ ID NO: 708716 - DNA, 33 bp, Homo sapien
agtaggattttgaggatgagttcacagaaattc

SEQ ID NO: 708717 - DNA, 33 bp, Homo sapien
actctgtgatctcggacgataatttaattatgg

SEQ ID NO: 708718 - DNA, 33 bp, Homo sapien
actctgtgatctcggatgataatttaattatgg

SEQ ID NO: 708719 - DNA, 33 bp, Homo sapien
acactagttctcaacaatgtaaatgtgttgccc

SEQ ID NO: 708720 - DNA, 33 bp, Homo sapien
acactagttctcaacagtgtaaatgtgttgccc

SEQ ID NO: 708721 - DNA, 33 bp, Homo sapien
aggagtactcagtctacgtttctactatttagc

SEQ ID NO: 708722 - DNA, 33 bp, Homo sapien
aggagtactcagtctatgtttctactatttagc

SEQ ID NO: 708723 - DNA, 33 bp, Homo sapien
tcaaaaatcagttgaccctatgtgtggctgtat

SEQ ID NO: 708724 - DNA, 33 bp, Homo sapien
tcaaaaatcagttgacgctatgtgtggctgtat

SEQ ID NO: 708725 - DNA, 33 bp, Homo sapien
caggttacatgaaaaaaaatttactaagcttaa

SEQ ID NO: 708726 - DNA, 33 bp, Homo sapien
caggttacatgaaaaacaatttactaagcttaa

SEQ ID NO: 708727 - DNA, 33 bp, Homo sapien
ccaaatatatttagtaggcttacagtcatgaag

SEQ ID NO: 708728 - DNA, 33 bp, Homo sapien
ccaaatatatttagtatgcttacagtcatgaag

SEQ ID NO: 708729 - DNA, 33 bp, Homo sapien
gagcaggatccatctccaccctttctctttcat

SEQ ID NO: 708730 - DNA, 33 bp, Homo sapien
gagcaggatccatctctaccctttctctttcat

SEQ ID NO: 708731 - DNA, 33 bp, Homo sapien
actagtgtaaggatccacagagctaggcagatt

SEQ ID NO: 708732 - DNA, 33 bp, Homo sapien
actagtgtaaggatccgcagagctaggcagatt

SEQ ID NO: 708733 - DNA, 33 bp, Homo sapien
tagcaatttcaacttggaggctttgaacagtcc

SEQ ID NO: 708734 - DNA, 33 bp, Homo sapien
tagcaatttcaacttgtaggctttgaacagtcc

SEQ ID NO: 708735 - DNA, 33 bp, Homo sapien
actaaccctatacctgaaaactctgtcagctaa

SEQ ID NO: 708736 - DNA, 33 bp, Homo sapien
actaaccctatacctggaaactctgtcagctaa

SEQ ID NO: 708737 - DNA, 33 bp, Homo sapien
agggagtttccaagtcactaatagctcaatagt

SEQ ID NO: 708738 - DNA, 33 bp, Homo sapien
agggagtttccaagtcgctaatagctcaatagt

SEQ ID NO: 708739 - DNA, 33 bp, Homo sapien
tgggaaacttaattccacagcatattaagaggt

SEQ ID NO: 708740 - DNA, 33 bp, Homo sapien
tgggaaacttaattccgcagcatattaagaggt

SEQ ID NO: 708741 - DNA, 33 bp, Homo sapien
gttttgccattatgaacagtgcggcagtgaaca

SEQ ID NO: 708742 - DNA, 33 bp, Homo sapien
gttttgccattatgaatagtgcggcagtgaaca

SEQ ID NO: 708743 - DNA, 33 bp, Homo sapien
gtttatttatcaggaaatctaacagcccttgag

SEQ ID NO: 708744 - DNA, 33 bp, Homo sapien
gtttatttatcaggaagtctaacagcccttgag

SEQ ID NO: 708745 - DNA, 33 bp, Homo sapien
atatgtgaagcctgaaatatgttgaggaagctg

SEQ ID NO: 708746 - DNA, 33 bp, Homo sapien
atatgtgaagcctgaactatgttgaggaagctg

SEQ ID NO: 708747 - DNA, 33 bp, Homo sapien
ggcaggtgcatagataactgagtagataatcta

SEQ ID NO: 708748 - DNA, 33 bp, Homo sapien
ggcaggtgcatagatacctgagtagataatcta

SEQ ID NO: 708749 - DNA, 33 bp, Homo sapien
taaacactcttcactacggactatctctattgg

SEQ ID NO: 708750 - DNA, 33 bp, Homo sapien
taaacactcttcactatggactatctctattgg

SEQ ID NO: 708751 - DNA, 33 bp, Homo sapien
atttgtgtgtttcataaaagtgatacagccata

SEQ ID NO: 708752 - DNA, 33 bp, Homo sapien
atttgtgtgtttcatagaagtgatacagccata

SEQ ID NO: 708753 - DNA, 33 bp, Homo sapien
cacattagagattgtaagtggataattctaaga

SEQ ID NO: 708754 - DNA, 33 bp, Homo sapien
cacattagagattgtacgtggataattctaaga

SEQ ID NO: 708755 - DNA, 33 bp, Homo sapien
tttcacctttccgtcacgccagatgcttccttc

SEQ ID NO: 708756 - DNA, 33 bp, Homo sapien
tttcacctttccgtcatgccagatgcttccttc

SEQ ID NO: 708757 - DNA, 33 bp, Homo sapien
gctagtgtggatttatcactttagacctactca

SEQ ID NO: 708758 - DNA, 33 bp, Homo sapien
gctagtgtggatttatgactttagacctactca

SEQ ID NO: 708759 - DNA, 33 bp, Homo sapien
ataacttggtgactcacattcaaacattcagtt

SEQ ID NO: 708760 - DNA, 33 bp, Homo sapien
ataacttggtgactcatattcaaacattcagtt

SEQ ID NO: 708761 - DNA, 33 bp, Homo sapien
aaattcatatctgcagaaagtgtctattttagt

SEQ ID NO: 708762 - DNA, 33 bp, Homo sapien
aaattcatatctgcaggaagtgtctattttagt

SEQ ID NO: 708763 - DNA, 33 bp, Homo sapien
ggcagcataccttgtcaactgtcatcatattcc

SEQ ID NO: 708764 - DNA, 33 bp, Homo sapien
ggcagcataccttgtccactgtcatcatattcc

SEQ ID NO: 708765 - DNA, 33 bp, Homo sapien
caaatgtaccagggacaacttatagacatatga

SEQ ID NO: 708766 - DNA, 33 bp, Homo sapien
caaatgtaccagggactacttatagacatatga

SEQ ID NO: 708767 - DNA, 33 bp, Homo sapien
atggacttctctcctacatgagtgtaaggaaaa

SEQ ID NO: 708768 - DNA, 33 bp, Homo sapien
atggacttctctcctatatgagtgtaaggaaaa

SEQ ID NO: 708769 - DNA, 33 bp, Homo sapien
ccaagtagagataataaaaagacccacctaatt

SEQ ID NO: 708770 - DNA, 33 bp, Homo sapien
ccaagtagagataatacaaagacccacctaatt

SEQ ID NO: 708771 - DNA, 33 bp, Homo sapien
cattgaagaagttagacataggacatttttaaa

SEQ ID NO: 708772 - DNA, 33 bp, Homo sapien
cattgaagaagttagatataggacatttttaaa

SEQ ID NO: 708773 - DNA, 33 bp, Homo sapien
acatacagatttcaataattagccagagatggg

SEQ ID NO: 708774 - DNA, 33 bp, Homo sapien
acatacagatttcaatcattagccagagatggg

SEQ ID NO: 708775 - DNA, 33 bp, Homo sapien
tgtgcctctttgatcagcattataacaagcaag

SEQ ID NO: 708776 - DNA, 33 bp, Homo sapien
tgtgcctctttgatcatcattataacaagcaag

SEQ ID NO: 708777 - DNA, 33 bp, Homo sapien
tggcctgtgttacagaactacagaatcataggt

SEQ ID NO: 708778 - DNA, 33 bp, Homo sapien
tggcctgtgttacagatctacagaatcataggt

SEQ ID NO: 708779 - DNA, 33 bp, Homo sapien
caataaggtggattgaataagcagtcctatgga

SEQ ID NO: 708780 - DNA, 33 bp, Homo sapien
caataaggtggattgactaagcagtcctatgga

SEQ ID NO: 708781 - DNA, 33 bp, Homo sapien
taggaaggagcacctaagcaagtgagtatgggg

SEQ ID NO: 708782 - DNA, 33 bp, Homo sapien
taggaaggagcacctaggcaagtgagtatgggg

SEQ ID NO: 708783 - DNA, 33 bp, Homo sapien
aagaggctctacctaccacctgaattcccacag

SEQ ID NO: 708784 - DNA, 33 bp, Homo sapien
aagaggctctacctactacctgaattcccacag

SEQ ID NO: 708785 - DNA, 33 bp, Homo sapien
tggctgaatttgctgggcagcatatcctgctac

SEQ ID NO: 708786 - DNA, 33 bp, Homo sapien
tggctgaatttgctggtcagcatatcctgctac

SEQ ID NO: 708787 - DNA, 33 bp, Homo sapien
tatatgcagaatgaaacggggacacttcctttc

SEQ ID NO: 708788 - DNA, 33 bp, Homo sapien
tatatgcagaatgaaatggggacacttcctttc

SEQ ID NO: 708789 - DNA, 33 bp, Homo sapien
gtaattgttttttcaagattcaagttaagcata

SEQ ID NO: 708790 - DNA, 33 bp, Homo sapien
gtaattgttttttcaatattcaagttaagcata

SEQ ID NO: 708791 - DNA, 33 bp, Homo sapien
tcatttctgcttgaaaatatatctcccatggtt

SEQ ID NO: 708792 - DNA, 33 bp, Homo sapien
tcatttctgcttgaaagtatatctcccatggtt

SEQ ID NO: 708793 - DNA, 33 bp, Homo sapien
tgggcactaaggttcagaagaacgcaacctcag

SEQ ID NO: 708794 - DNA, 33 bp, Homo sapien
tgggcactaaggttcataagaacgcaacctcag

SEQ ID NO: 708795 - DNA, 33 bp, Homo sapien
gtgccctttccagatgaaagttaaaacattgtg

SEQ ID NO: 708796 - DNA, 33 bp, Homo sapien
gtgccctttccagatggaagttaaaacattgtg

SEQ ID NO: 708797 - DNA, 33 bp, Homo sapien
tcttctgtgaatttgagcaagggcttagaaaat

SEQ ID NO: 708798 - DNA, 33 bp, Homo sapien
tcttctgtgaatttgatcaagggcttagaaaat

SEQ ID NO: 708799 - DNA, 33 bp, Homo sapien
ccagcaggtttcttccaagacacgtgggaatta

SEQ ID NO: 708800 - DNA, 33 bp, Homo sapien
ccagcaggtttcttccgagacacgtgggaatta

SEQ ID NO: 708801 - DNA, 33 bp, Homo sapien
ctgataaaagcttcaacaaaatgagagtacaag

SEQ ID NO: 708802 - DNA, 33 bp, Homo sapien
ctgataaaagcttcaataaaatgagagtacaag

SEQ ID NO: 708803 - DNA, 33 bp, Homo sapien
tatgacgctaagagaactatagagtttacaata

SEQ ID NO: 708804 - DNA, 33 bp, Homo sapien
tatgacgctaagagaattatagagtttacaata

SEQ ID NO: 708805 - DNA, 33 bp, Homo sapien
attagtaagaagaccgccattcaaattgcacaa

SEQ ID NO: 708806 - DNA, 33 bp, Homo sapien
attagtaagaagaccgtcattcaaattgcacaa

SEQ ID NO: 708807 - DNA, 33 bp, Homo sapien
tcgtatgcatccaacaaattctagtccataaat

SEQ ID NO: 708808 - DNA, 33 bp, Homo sapien
tcgtatgcatccaacatattctagtccataaat

SEQ ID NO: 708809 - DNA, 33 bp, Homo sapien
gttgtctcttaagttccctcttcacatcttgaa

SEQ ID NO: 708810 - DNA, 33 bp, Homo sapien
gttgtctcttaagttctctcttcacatcttgaa

SEQ ID NO: 708811 - DNA, 33 bp, Homo sapien
aacttcttccactctccaggctggaaatacttg

SEQ ID NO: 708812 - DNA, 33 bp, Homo sapien
aacttcttccactctctaggctggaaatacttg

SEQ ID NO: 708813 - DNA, 33 bp, Homo sapien
accaaaaagtgctatagagaagaagcctcatat

SEQ ID NO: 708814 - DNA, 33 bp, Homo sapien
accaaaaagtgctatatagaagaagcctcatat

SEQ ID NO: 708815 - DNA, 33 bp, Homo sapien
aaaaagtcaagtttgaaagctctggtagtttac

SEQ ID NO: 708816 - DNA, 33 bp, Homo sapien
aaaaagtcaagtttgagagctctggtagtttac

SEQ ID NO: 708817 - DNA, 33 bp, Homo sapien
tgatgagctctaatgcggaaagacctgcataaa

SEQ ID NO: 708818 - DNA, 33 bp, Homo sapien
tgatgagctctaatgctgaaagacctgcataaa

SEQ ID NO: 708819 - DNA, 33 bp, Homo sapien
tttactccctttgtcaagctcacagttcttttt

SEQ ID NO: 708820 - DNA, 33 bp, Homo sapien
tttactccctttgtcacgctcacagttcttttt

SEQ ID NO: 708821 - DNA, 33 bp, Homo sapien
atagggaaatgataaactgcctctatatggcaa

SEQ ID NO: 708822 - DNA, 33 bp, Homo sapien
atagggaaatgataaagtgcctctatatggcaa

SEQ ID NO: 708823 - DNA, 33 bp, Homo sapien
tttttgaccattgatcccagagaaaacaccaca

SEQ ID NO: 708824 - DNA, 33 bp, Homo sapien
tttttgaccattgatctcagagaaaacaccaca

SEQ ID NO: 708825 - DNA, 33 bp, Homo sapien
tattagatataactggaatgctaacaattttaa

SEQ ID NO: 708826 - DNA, 33 bp, Homo sapien
tattagatataactggcatgctaacaattttaa

SEQ ID NO: 708827 - DNA, 33 bp, Homo sapien
tttttcttagacctatgaatcaaaggaggcata

SEQ ID NO: 708828 - DNA, 33 bp, Homo sapien
tttttcttagacctattaatcaaaggaggcata

SEQ ID NO: 708829 - DNA, 33 bp, Homo sapien
ctagtttatactttcacgagtagggtgttatat

SEQ ID NO: 708830 - DNA, 33 bp, Homo sapien
ctagtttatactttcatgagtagggtgttatat

SEQ ID NO: 708831 - DNA, 33 bp, Homo sapien
ttatatcctgtaaataaaattgttcttctggaa

SEQ ID NO: 708832 - DNA, 33 bp, Homo sapien
ttatatcctgtaaatacaattgttcttctggaa

SEQ ID NO: 708833 - DNA, 33 bp, Homo sapien
gcagctcctgtttaccaagaaacaagacttcat

SEQ ID NO: 708834 - DNA, 33 bp, Homo sapien
gcagctcctgtttaccgagaaacaagacttcat

SEQ ID NO: 708835 - DNA, 33 bp, Homo sapien
ctatcttccaactcacaatagtatatggaataa

SEQ ID NO: 708836 - DNA, 33 bp, Homo sapien
ctatcttccaactcacgatagtatatggaataa

SEQ ID NO: 708837 - DNA, 33 bp, Homo sapien
taataatttggactcaccatacttattcagcac

SEQ ID NO: 708838 - DNA, 33 bp, Homo sapien
taataatttggactcatcatacttattcagcac

SEQ ID NO: 708839 - DNA, 33 bp, Homo sapien
ctcacctttgagcctcgagaccaagaactggca

SEQ ID NO: 708840 - DNA, 33 bp, Homo sapien
ctcacctttgagcctctagaccaagaactggca

SEQ ID NO: 708841 - DNA, 33 bp, Homo sapien
aattatgtagctgttagctgtgtttattgcctt

SEQ ID NO: 708842 - DNA, 33 bp, Homo sapien
aattatgtagctgttatctgtgtttattgcctt

SEQ ID NO: 708843 - DNA, 33 bp, Homo sapien
attgcttccacacttcccaattgttgatttggc

SEQ ID NO: 708844 - DNA, 33 bp, Homo sapien
attgcttccacacttctcaattgttgatttggc

SEQ ID NO: 708845 - DNA, 33 bp, Homo sapien
tcttcagatggctatcaaatatattaggattca

SEQ ID NO: 708846 - DNA, 33 bp, Homo sapien
tcttcagatggctatcgaatatattaggattca

SEQ ID NO: 708847 - DNA, 33 bp, Homo sapien
gtaattatgtttgaccacaggagagctaacaac

SEQ ID NO: 708848 - DNA, 33 bp, Homo sapien
gtaattatgtttgaccgcaggagagctaacaac

SEQ ID NO: 708849 - DNA, 33 bp, Homo sapien
aaggctttgtaaaacagcaagttctcaacttct

SEQ ID NO: 708850 - DNA, 33 bp, Homo sapien
aaggctttgtaaaacatcaagttctcaacttct

SEQ ID NO: 708851 - DNA, 33 bp, Homo sapien
taaatggaaagtagccaaaaaaatctacaaaaa

SEQ ID NO: 708852 - DNA, 33 bp, Homo sapien
taaatggaaagtagcccaaaaaatctacaaaaa

SEQ ID NO: 708853 - DNA, 33 bp, Homo sapien
ttttgataagcttttacgtgctattgcagctac

SEQ ID NO: 708854 - DNA, 33 bp, Homo sapien
ttttgataagcttttatgtgctattgcagctac

SEQ ID NO: 708855 - DNA, 33 bp, Homo sapien
ttagaacagagatctgcagaaaagaagctaatg

SEQ ID NO: 708856 - DNA, 33 bp, Homo sapien
ttagaacagagatctgtagaaaagaagctaatg

SEQ ID NO: 708857 - DNA, 33 bp, Homo sapien
agagtgatccttttcaagttaataaatcttctg

SEQ ID NO: 708858 - DNA, 33 bp, Homo sapien
agagtgatccttttcatgttaataaatcttctg

SEQ ID NO: 708859 - DNA, 33 bp, Homo sapien
ctcttctaagctctcccatcaccaaagataatc

SEQ ID NO: 708860 - DNA, 33 bp, Homo sapien
ctcttctaagctctccgatcaccaaagataatc

SEQ ID NO: 708861 - DNA, 33 bp, Homo sapien
catcttctgcagagaaacttcaatggaaataca

SEQ ID NO: 708862 - DNA, 33 bp, Homo sapien
catcttctgcagagaaccttcaatggaaataca

SEQ ID NO: 708863 - DNA, 33 bp, Homo sapien
acttttttagagttgcacaccttcattatgcac

SEQ ID NO: 708864 - DNA, 33 bp, Homo sapien
acttttttagagttgctcaccttcattatgcac

SEQ ID NO: 708865 - DNA, 33 bp, Homo sapien
tgtaaaattaatcacaagaagagagaatcattc

SEQ ID NO: 708866 - DNA, 33 bp, Homo sapien
tgtaaaattaatcacaggaagagagaatcattc

SEQ ID NO: 708867 - DNA, 33 bp, Homo sapien
ggggaacagcaccaacgccaattgcaggatccc

SEQ ID NO: 708868 - DNA, 33 bp, Homo sapien
ggggaacagcaccaactccaattgcaggatccc

SEQ ID NO: 708869 - DNA, 33 bp, Homo sapien
ataatttactttttcaccaacagtgtacaaggg

SEQ ID NO: 708870 - DNA, 33 bp, Homo sapien
ataatttactttttcagcaacagtgtacaaggg

SEQ ID NO: 708871 - DNA, 33 bp, Homo sapien
aatgcccttacaaaagcccagacaatgatttca

SEQ ID NO: 708872 - DNA, 33 bp, Homo sapien
aatgcccttacaaaagtccagacaatgatttca

SEQ ID NO: 708873 - DNA, 33 bp, Homo sapien
ctacttctaatgccaacctggagttaagatcag

SEQ ID NO: 708874 - DNA, 33 bp, Homo sapien
ctacttctaatgccaagctggagttaagatcag

SEQ ID NO: 708875 - DNA, 33 bp, Homo sapien
aatagataatataataacacctgtggcaaaagt

SEQ ID NO: 708876 - DNA, 33 bp, Homo sapien
aatagataatataataccacctgtggcaaaagt

SEQ ID NO: 708877 - DNA, 33 bp, Homo sapien
cattacttccatttaaatagtctgtttattgtg

SEQ ID NO: 708878 - DNA, 33 bp, Homo sapien
cattacttccatttaagtagtctgtttattgtg

SEQ ID NO: 708879 - DNA, 33 bp, Homo sapien
tgtatttggcaatttaagtagaagagttccata

SEQ ID NO: 708880 - DNA, 33 bp, Homo sapien
tgtatttggcaatttaggtagaagagttccata

SEQ ID NO: 708881 - DNA, 33 bp, Homo sapien
atgggagggaccatggaagaatgatatggctta

SEQ ID NO: 708882 - DNA, 33 bp, Homo sapien
atgggagggaccatggcagaatgatatggctta

SEQ ID NO: 708883 - DNA, 33 bp, Homo sapien
ctccatgtgcgcagaacgttaaaggccaatttt

SEQ ID NO: 708884 - DNA, 33 bp, Homo sapien
ctccatgtgcgcagaatgttaaaggccaatttt

SEQ ID NO: 708885 - DNA, 33 bp, Homo sapien
atacaatgtgtaataaacttttgcaacccagaa

SEQ ID NO: 708886 - DNA, 33 bp, Homo sapien
atacaatgtgtaataatcttttgcaacccagaa

SEQ ID NO: 708887 - DNA, 33 bp, Homo sapien
cagcatgaagcctcaccattttcttccctatga

SEQ ID NO: 708888 - DNA, 33 bp, Homo sapien
cagcatgaagcctcacgattttcttccctatga

SEQ ID NO: 708889 - DNA, 33 bp, Homo sapien
aggagaccccgacccaaaggaaagaagatagga

SEQ ID NO: 708890 - DNA, 33 bp, Homo sapien
aggagaccccgacccagaggaaagaagatagga

SEQ ID NO: 708891 - DNA, 33 bp, Homo sapien
cccactgaatggcaaggctaaaagaagtgctgt

SEQ ID NO: 708892 - DNA, 33 bp, Homo sapien
cccactgaatggcaagtctaaaagaagtgctgt

SEQ ID NO: 708893 - DNA, 33 bp, Homo sapien
gtgcattctccaatgtaaaatcaaatgtcctac

SEQ ID NO: 708894 - DNA, 33 bp, Homo sapien
gtgcattctccaatgttaaatcaaatgtcctac

SEQ ID NO: 708895 - DNA, 33 bp, Homo sapien
ctacttatttggagaagcgctggtttcagggat

SEQ ID NO: 708896 - DNA, 33 bp, Homo sapien
ctacttatttggagaatcgctggtttcagggat

SEQ ID NO: 708897 - DNA, 33 bp, Homo sapien
aatttctcttaagtctcacagtgacctaaaatt

SEQ ID NO: 708898 - DNA, 33 bp, Homo sapien
aatttctcttaagtctgacagtgacctaaaatt

SEQ ID NO: 708899 - DNA, 33 bp, Homo sapien
aggcttagagtttacccctagtgctgaaacaac

SEQ ID NO: 708900 - DNA, 33 bp, Homo sapien
aggcttagagtttaccgctagtgctgaaacaac

SEQ ID NO: 708901 - DNA, 33 bp, Homo sapien
aaactgtgtatgcataagttaagagatgtgaaa

SEQ ID NO: 708902 - DNA, 33 bp, Homo sapien
aaactgtgtatgcataggttaagagatgtgaaa

SEQ ID NO: 708903 - DNA, 33 bp, Homo sapien
cactgttacctggatacgtgacatggagttaaa

SEQ ID NO: 708904 - DNA, 33 bp, Homo sapien
cactgttacctggatatgtgacatggagttaaa

SEQ ID NO: 708905 - DNA, 33 bp, Homo sapien
atgcagtctcctcaataagtgaaaacacacctg

SEQ ID NO: 708906 - DNA, 33 bp, Homo sapien
atgcagtctcctcaattagtgaaaacacacctg

SEQ ID NO: 708907 - DNA, 33 bp, Homo sapien
agaaggagatcatcaacgtactggagcaagaca

SEQ ID NO: 708908 - DNA, 33 bp, Homo sapien
agaaggagatcatcaatgtactggagcaagaca

SEQ ID NO: 708909 - DNA, 33 bp, Homo sapien
cagggcaatattaggtaaacattgcagaagatg

SEQ ID NO: 708910 - DNA, 33 bp, Homo sapien
cagggcaatattaggtgaacattgcagaagatg

SEQ ID NO: 708911 - DNA, 33 bp, Homo sapien; identical to SEQ ID NO: 708909

SEQ ID NO: 708912 - DNA, 33 bp, Homo sapien; identical to SEQ ID NO: 708910

SEQ ID NO: 708913 - DNA, 33 bp, Homo sapien
tcaagactgactaggaagaagagttttagtata

SEQ ID NO: 708914 - DNA, 33 bp, Homo sapien
tcaagactgactaggaggaagagttttagtata

SEQ ID NO: 708915 - DNA, 33 bp, Homo sapien
gtttctccactccaaaattactcttcccctcat

SEQ ID NO: 708916 - DNA, 33 bp, Homo sapien
gtttctccactccaaagttactcttcccctcat

SEQ ID NO: 708917 - DNA, 33 bp, Homo sapien
tgactctcactgacagaatggttcaaagagcaa

SEQ ID NO: 708918 - DNA, 33 bp, Homo sapien
tgactctcactgacagtatggttcaaagagcaa

SEQ ID NO: 708919 - DNA, 33 bp, Homo sapien
aagcacagtattttgcaaagggaggatattcaa

SEQ ID NO: 708920 - DNA, 33 bp, Homo sapien
aagcacagtattttgcgaagggaggatattcaa

SEQ ID NO: 708921 - DNA, 33 bp, Homo sapien
acaggcaaatgcttacaaatggatctggaagta

SEQ ID NO: 708922 - DNA, 33 bp, Homo sapien
acaggcaaatgcttactaatggatctggaagta

SEQ ID NO: 708923 - DNA, 33 bp, Homo sapien
tattgccaaattgttcaagacctaagaagttaa

SEQ ID NO: 708924 - DNA, 33 bp, Homo sapien
tattgccaaattgttcgagacctaagaagttaa

SEQ ID NO: 708925 - DNA, 33 bp, Homo sapien
cagtcaaataggagaaattcaagaagaaaagca

SEQ ID NO: 708926 - DNA, 33 bp, Homo sapien
cagtcaaataggagaatttcaagaagaaaagca

SEQ ID NO: 708927 - DNA, 33 bp, Homo sapien
ttattgttgaatgaacaaatacataaatagacc

SEQ ID NO: 708928 - DNA, 33 bp, Homo sapien
ttattgttgaatgaacgaatacataaatagacc

SEQ ID NO: 708929 - DNA, 33 bp, Homo sapien
ttggcacaaattccaacgtatgcactatacctg

SEQ ID NO: 708930 - DNA, 33 bp, Homo sapien
ttggcacaaattccaatgtatgcactatacctg

SEQ ID NO: 708931 - DNA, 33 bp, Homo sapien
cattagagggttgacaagacaataaacagttca

SEQ ID NO: 708932 - DNA, 33 bp, Homo sapien
cattagagggttgacatgacaataaacagttca

SEQ ID NO: 708933 - DNA, 33 bp, Homo sapien
gaaagagctagaggaacgtgaggtggggtgaga

SEQ ID NO: 708934 - DNA, 33 bp, Homo sapien
gaaagagctagaggaatgtgaggtggggtgaga

SEQ ID NO: 708935 - DNA, 33 bp, Homo sapien
tttcacaaaacagacaacatgtgatgggacgcg

SEQ ID NO: 708936 - DNA, 33 bp, Homo sapien
tttcacaaaacagacagcatgtgatgggacgcg

SEQ ID NO: 708937 - DNA, 33 bp, Homo sapien
catggatgtttaaaatcagagtcccacagaaca

SEQ ID NO: 708938 - DNA, 33 bp, Homo sapien
catggatgtttaaaatgagagtcccacagaaca

SEQ ID NO: 708939 - DNA, 33 bp, Homo sapien
cactgttcttttcaaacactagagttttggggc

SEQ ID NO: 708940 - DNA, 33 bp, Homo sapien
cactgttcttttcaaatactagagttttggggc

SEQ ID NO: 708941 - DNA, 33 bp, Homo sapien
ttgatactaaatctccaccatcttgccatacaa

SEQ ID NO: 708942 - DNA, 33 bp, Homo sapien
ttgatactaaatctccgccatcttgccatacaa

SEQ ID NO: 708943 - DNA, 33 bp, Homo sapien
acctggcctaagaagagaccaattttgagaagt

SEQ ID NO: 708944 - DNA, 33 bp, Homo sapien
acctggcctaagaagataccaattttgagaagt

SEQ ID NO: 708945 - DNA, 33 bp, Homo sapien
ccagaaatatcaatgccgacagttaaaagagga

SEQ ID NO: 708946 - DNA, 33 bp, Homo sapien
ccagaaatatcaatgctgacagttaaaagagga

SEQ ID NO: 708947 - DNA, 33 bp, Homo sapien
attatgccagttaccacgagttatcagagaaca

SEQ ID NO: 708948 - DNA, 33 bp, Homo sapien
attatgccagttaccatgagttatcagagaaca

SEQ ID NO: 708949 - DNA, 33 bp, Homo sapien
acaattgaaaaggcaaatatcctgaaacaaaga

SEQ ID NO: 708950 - DNA, 33 bp, Homo sapien
acaattgaaaaggcaagtatcctgaaacaaaga

SEQ ID NO: 708951 - DNA, 33 bp, Homo sapien
ttttgaataggaagaaacatcatgagtacagaa

SEQ ID NO: 708952 - DNA, 33 bp, Homo sapien
ttttgaataggaagaatcatcatgagtacagaa

SEQ ID NO: 708953 - DNA, 33 bp, Homo sapien
aatggttacataaataacttgtgggaaagcacc

SEQ ID NO: 708954 - DNA, 33 bp, Homo sapien
aatggttacataaataccttgtgggaaagcacc

SEQ ID NO: 708955 - DNA, 33 bp, Homo sapien
gacaggcattttgtgaagaatgattatcagaaa

SEQ ID NO: 708956 - DNA, 33 bp, Homo sapien
gacaggcattttgtgacgaatgattatcagaaa

SEQ ID NO: 708957 - DNA, 33 bp, Homo sapien
atatgccagatctgaagtgtggtatcatattta

SEQ ID NO: 708958 - DNA, 33 bp, Homo sapien
atatgccagatctgaattgtggtatcatattta

SEQ ID NO: 708959 - DNA, 33 bp, Homo sapien
catacttatgggtctcaacaacaactgtatcct

SEQ ID NO: 708960 - DNA, 33 bp, Homo sapien
catacttatgggtctccacaacaactgtatcct

SEQ ID NO: 708961 - DNA, 33 bp, Homo sapien
cattttaatcattggaaaaagacaacaaacaag

SEQ ID NO: 708962 - DNA, 33 bp, Homo sapien
cattttaatcattggagaaagacaacaaacaag

SEQ ID NO: 708963 - DNA, 33 bp, Homo sapien
tgcttaaggcaaattgaaagaccaagataatct

SEQ ID NO: 708964 - DNA, 33 bp, Homo sapien
tgcttaaggcaaattgcaagaccaagataatct

SEQ ID NO: 708965 - DNA, 33 bp, Homo sapien
cttacactaatgagaaaagttagagtttagaga

SEQ ID NO: 708966 - DNA, 33 bp, Homo sapien
cttacactaatgagaagagttagagtttagaga

SEQ ID NO: 708967 - DNA, 33 bp, Homo sapien
attaattcaaaccctagaagagactgaattttg

SEQ ID NO: 708968 - DNA, 33 bp, Homo sapien
attaattcaaaccctataagagactgaattttg

SEQ ID NO: 708969 - DNA, 33 bp, Homo sapien
tacttttatctgctccccttgccctggcttcat

SEQ ID NO: 708970 - DNA, 33 bp, Homo sapien
tacttttatctgctccgcttgccctggcttcat

SEQ ID NO: 708971 - DNA, 33 bp, Homo sapien
ttttacatttaaggacactctgttagcttgtca

SEQ ID NO: 708972 - DNA, 33 bp, Homo sapien
ttttacatttaaggaccctctgttagcttgtca

SEQ ID NO: 708973 - DNA, 33 bp, Homo sapien
gccactaaccatgtgcgaatttcacggtaacta

SEQ ID NO: 708974 - DNA, 33 bp, Homo sapien
gccactaaccatgtgctaatttcacggtaacta

SEQ ID NO: 708975 - DNA, 33 bp, Homo sapien
tcaaagttgaaagctgaaaatgattatagatat

SEQ ID NO: 708976 - DNA, 33 bp, Homo sapien
tcaaagttgaaagctgcaaatgattatagatat

SEQ ID NO: 708977 - DNA, 33 bp, Homo sapien
accagtccttgatgtcaaaaagttggggactcc

SEQ ID NO: 708978 - DNA, 33 bp, Homo sapien
accagtccttgatgtccaaaagttggggactcc

SEQ ID NO: 708979 - DNA, 33 bp, Homo sapien
atttttatttgtttcaacttctacttgagttta

SEQ ID NO: 708980 - DNA, 33 bp, Homo sapien
atttttatttgtttcagcttctacttgagttta

SEQ ID NO: 708981 - DNA, 33 bp, Homo sapien
taccaaagtaaagtagaagcagttaattcaaga

SEQ ID NO: 708982 - DNA, 33 bp, Homo sapien
taccaaagtaaagtaggagcagttaattcaaga

SEQ ID NO: 708983 - DNA, 33 bp, Homo sapien
tattgcttaaattctaaggggaaaggcacttac

SEQ ID NO: 708984 - DNA, 33 bp, Homo sapien
tattgcttaaattctagggggaaaggcacttac

SEQ ID NO: 708985 - DNA, 33 bp, Homo sapien
tgatggagtcaatacaatctatgaggtagaagg

SEQ ID NO: 708986 - DNA, 33 bp, Homo sapien
tgatggagtcaatacagtctatgaggtagaagg

SEQ ID NO: 708987 - DNA, 33 bp, Homo sapien
tggacataagtttgagaactcagaataatttga

SEQ ID NO: 708988 - DNA, 33 bp, Homo sapien
tggacataagtttgagcactcagaataatttga

SEQ ID NO: 708989 - DNA, 33 bp, Homo sapien
aagtttgtgtgtataactccctggcttttttct

SEQ ID NO: 708990 - DNA, 33 bp, Homo sapien
aagtttgtgtgtataattccctggcttttttct

SEQ ID NO: 708991 - DNA, 33 bp, Homo sapien
acatatgtcgataagtcacaaaatccatatatg

SEQ ID NO: 708992 - DNA, 33 bp, Homo sapien
acatatgtcgataagttacaaaatccatatatg

SEQ ID NO: 708993 - DNA, 33 bp, Homo sapien
gtcagaattggaaaagccaatcaataaatccct

SEQ ID NO: 708994 - DNA, 33 bp, Homo sapien
gtcagaattggaaaagtcaatcaataaatccct

SEQ ID NO: 708995 - DNA, 33 bp, Homo sapien
attctaataggagataacaaggtttagcaaaat

SEQ ID NO: 708996 - DNA, 33 bp, Homo sapien
attctaataggagataccaaggtttagcaaaat

SEQ ID NO: 708997 - DNA, 33 bp, Homo sapien
tgaaaaagcctccaaaacagattcacatatatg

SEQ ID NO: 708998 - DNA, 33 bp, Homo sapien
tgaaaaagcctccaaagcagattcacatatatg

SEQ ID NO: 708999 - DNA, 33 bp, Homo sapien
tcatctaatctttgaacctaaaagtcagttctc

SEQ ID NO: 709000 - DNA, 33 bp, Homo sapien
tcatctaatctttgaatctaaaagtcagttctc

SEQ ID NO: 709001 - DNA, 33 bp, Homo sapien
agataggaaaacttcaataataggcagtttatg

SEQ ID NO: 709002 - DNA, 33 bp, Homo sapien
agataggaaaacttcagtaataggcagtttatg

SEQ ID NO: 709003 - DNA, 33 bp, Homo sapien
aataggatgagtcttaaatcgattgcttggata

SEQ ID NO: 709004 - DNA, 33 bp, Homo sapien
aataggatgagtcttagatcgattgcttggata

SEQ ID NO: 709005 - DNA, 33 bp, Homo sapien; identical to SEQ ID NO: 709003

SEQ ID NO: 709006 - DNA, 33 bp, Homo sapien; identical to SEQ ID NO: 709004

SEQ ID NO: 709007 - DNA, 33 bp, Homo sapien
ggacagggactctaaaaaggaggctactgtaac

SEQ ID NO: 709008 - DNA, 33 bp, Homo sapien
ggacagggactctaaataggaggctactgtaac

SEQ ID NO: 709009 - DNA, 33 bp, Homo sapien
ccatagaatgagtatcaaagttaggcaggtcaa

SEQ ID NO: 709010 - DNA, 33 bp, Homo sapien
ccatagaatgagtatccaagttaggcaggtcaa

SEQ ID NO: 709011 - DNA, 33 bp, Homo sapien
taaataattttttatgcagatcaatgttttgga

SEQ ID NO: 709012 - DNA, 33 bp, Homo sapien
taaataattttttatgtagatcaatgttttgga

SEQ ID NO: 709013 - DNA, 33 bp, Homo sapien
atagcctcttacccagccccagtgtgtgaatgg

SEQ ID NO: 709014 - DNA, 33 bp, Homo sapien
atagcctcttacccagtcccagtgtgtgaatgg

SEQ ID NO: 709015 - DNA, 33 bp, Homo sapien
atcttggtgggagaaaagattactagcactctc

SEQ ID NO: 709016 - DNA, 33 bp, Homo sapien
atcttggtgggagaaatgattactagcactctc

SEQ ID NO: 709017 - DNA, 33 bp, Homo sapien
aaggcatctataatacaattgacctttgcagaa

SEQ ID NO: 709018 - DNA, 33 bp, Homo sapien
aaggcatctataatacgattgacctttgcagaa

SEQ ID NO: 709019 - DNA, 33 bp, Homo sapien
tctgtaaaatgtcatgcattggaaaagataaag

SEQ ID NO: 709020 - DNA, 33 bp, Homo sapien
tctgtaaaatgtcatgtattggaaaagataaag

SEQ ID NO: 709021 - DNA, 33 bp, Homo sapien
ttccctgtttttcagcaagttagacagcccata

SEQ ID NO: 709022 - DNA, 33 bp, Homo sapien
ttccctgtttttcagcgagttagacagcccata

SEQ ID NO: 709023 - DNA, 33 bp, Homo sapien
gttctctttttcttaacggatatcctgttgaac

SEQ ID NO: 709024 - DNA, 33 bp, Homo sapien
gttctctttttcttaatggatatcctgttgaac

SEQ ID NO: 709025 - DNA, 33 bp, Homo sapien
ctctgaaactttgaaacgctatgacaaatttag

SEQ ID NO: 709026 - DNA, 33 bp, Homo sapien
ctctgaaactttgaaatgctatgacaaatttag

SEQ ID NO: 709027 - DNA, 33 bp, Homo sapien
atctataattttgcaacgtatctgtgtttgtag

SEQ ID NO: 709028 - DNA, 33 bp, Homo sapien
atctataattttgcaatgtatctgtgtttgtag

SEQ ID NO: 709029 - DNA, 33 bp, Homo sapien
ccttgattgtagtaaccatatcactatgtatat

SEQ ID NO: 709030 - DNA, 33 bp, Homo sapien
ccttgattgtagtaacgatatcactatgtatat

SEQ ID NO: 709031 - DNA, 33 bp, Homo sapien
tacttctgtcgattaccagtctattgcccactg

SEQ ID NO: 709032 - DNA, 33 bp, Homo sapien
tacttctgtcgattactagtctattgcccactg

SEQ ID NO: 709033 - DNA, 33 bp, Homo sapien
gtgatggtatagctataaagcagtgtgagaagt

SEQ ID NO: 709034 - DNA, 33 bp, Homo sapien
gtgatggtatagctatgaagcagtgtgagaagt

SEQ ID NO: 709035 - DNA, 33 bp, Homo sapien
ttttgaacatctactaatagcaagtccctctgc

SEQ ID NO: 709036 - DNA, 33 bp, Homo sapien
ttttgaacatctactagtagcaagtccctctgc

SEQ ID NO: 709037 - DNA, 33 bp, Homo sapien
tggactaatggacttcacagtaaaagaggaatc

SEQ ID NO: 709038 - DNA, 33 bp, Homo sapien
tggactaatggacttctcagtaaaagaggaatc

SEQ ID NO: 709039 - DNA, 33 bp, Homo sapien
ctctcagtctgtaagacgcctccttttctattt

SEQ ID NO: 709040 - DNA, 33 bp, Homo sapien
ctctcagtctgtaagatgcctccttttctattt

SEQ ID NO: 709041 - DNA, 33 bp, Homo sapien
agtcctagctacttgggatatttgagtggcagg

SEQ ID NO: 709042 - DNA, 33 bp, Homo sapien
agtcctagctacttggtatatttgagtggcagg

SEQ ID NO: 709043 - DNA, 33 bp, Homo sapien
ttgcagcacacatccactcaagtgccatctttt

SEQ ID NO: 709044 - DNA, 33 bp, Homo sapien
ttgcagcacacatccattcaagtgccatctttt

SEQ ID NO: 709045 - DNA, 33 bp, Homo sapien
atgcttatcaaagaacagtcactttatttttcc

SEQ ID NO: 709046 - DNA, 33 bp, Homo sapien
atgcttatcaaagaactgtcactttatttttcc

SEQ ID NO: 709047 - DNA, 33 bp, Homo sapien
ttcatgttctttcaggcccaaataaaatattct

SEQ ID NO: 709048 - DNA, 33 bp, Homo sapien
ttcatgttctttcaggtccaaataaaatattct

SEQ ID NO: 709049 - DNA, 33 bp, Homo sapien
ctttctttcgcatctaagttttccatttgcttc

SEQ ID NO: 709050 - DNA, 33 bp, Homo sapien
ctttctttcgcatctaggttttccatttgcttc

SEQ ID NO: 709051 - DNA, 33 bp, Homo sapien
aatacatacacaaatacagactttagagcgaga

SEQ ID NO: 709052 - DNA, 33 bp, Homo sapien
aatacatacacaaatatagactttagagcgaga

SEQ ID NO: 709053 - DNA, 33 bp, Homo sapien
ctattgctgcatgacaatagatgcttgatggcc

SEQ ID NO: 709054 - DNA, 33 bp, Homo sapien
ctattgctgcatgacagtagatgcttgatggcc

SEQ ID NO: 709055 - DNA, 33 bp, Homo sapien
tggcttccaaagttcaaattaaaggcactgtcg

SEQ ID NO: 709056 - DNA, 33 bp, Homo sapien
tggcttccaaagttcacattaaaggcactgtcg

SEQ ID NO: 709057 - DNA, 33 bp, Homo sapien
atatgtatatagtgtacattgatgtctacaaaa

SEQ ID NO: 709058 - DNA, 33 bp, Homo sapien
atatgtatatagtgtatattgatgtctacaaaa

SEQ ID NO: 709059 - DNA, 33 bp, Homo sapien
accaacctccacaagaagatatcaaaggaatga

SEQ ID NO: 709060 - DNA, 33 bp, Homo sapien
accaacctccacaagaggatatcaaaggaatga

SEQ ID NO: 709061 - DNA, 33 bp, Homo sapien
catgataatgtatagcacttagtacatacgagc

SEQ ID NO: 709062 - DNA, 33 bp, Homo sapien
catgataatgtatagcgcttagtacatacgagc

SEQ ID NO: 709063 - DNA, 33 bp, Homo sapien
aaaaaaagaaaaggcgaacacaatcataggtgc

SEQ ID NO: 709064 - DNA, 33 bp, Homo sapien
aaaaaaagaaaaggcggacacaatcataggtgc

SEQ ID NO: 709065 - DNA, 33 bp, Homo sapien
gcttttgaacagaacacgtccacgtagatacca

SEQ ID NO: 709066 - DNA, 33 bp, Homo sapien
gcttttgaacagaacatgtccacgtagatacca

SEQ ID NO: 709067 - DNA, 33 bp, Homo sapien
ttttaatacatgaaaacgcactggtgttaacct

SEQ ID NO: 709068 - DNA, 33 bp, Homo sapien
ttttaatacatgaaaatgcactggtgttaacct

SEQ ID NO: 709069 - DNA, 33 bp, Homo sapien
ctgaagtcactaccaaagaagggaccattatag

SEQ ID NO: 709070 - DNA, 33 bp, Homo sapien
ctgaagtcactaccaatgaagggaccattatag

SEQ ID NO: 709071 - DNA, 33 bp, Homo sapien
ccatagtcactaataactccaatgcacttgagt

SEQ ID NO: 709072 - DNA, 33 bp, Homo sapien
ccatagtcactaataattccaatgcacttgagt

SEQ ID NO: 709073 - DNA, 33 bp, Homo sapien
catatcggccagatttaatccaaataaactgaa

SEQ ID NO: 709074 - DNA, 33 bp, Homo sapien
catatcggccagatttgatccaaataaactgaa

SEQ ID NO: 709075 - DNA, 33 bp, Homo sapien
agcactgtggtggattccactgttccttccact

SEQ ID NO: 709076 - DNA, 33 bp, Homo sapien
agcactgtggtggatttcactgttccttccact

SEQ ID NO: 709077 - DNA, 33 bp, Homo sapien
accaacatgctccttcctgattccttaaatgaa

SEQ ID NO: 709078 - DNA, 33 bp, Homo sapien
accaacatgctccttcttgattccttaaatgaa

SEQ ID NO: 709079 - DNA, 33 bp, Homo sapien
gagttagaaagagcaactgaatatgttggtgcc

SEQ ID NO: 709080 - DNA, 33 bp, Homo sapien
gagttagaaagagcaattgaatatgttggtgcc

SEQ ID NO: 709081 - DNA, 33 bp, Homo sapien
gttacactaggacagaaggaactttggacagag

SEQ ID NO: 709082 - DNA, 33 bp, Homo sapien
gttacactaggacagagggaactttggacagag

SEQ ID NO: 709083 - DNA, 33 bp, Homo sapien
cctgtgacttggaggagagtgctgtgccccagg

SEQ ID NO: 709084 - DNA, 33 bp, Homo sapien
cctgtgacttggaggatagtgctgtgccccagg

SEQ ID NO: 709085 - DNA, 33 bp, Homo sapien
gctgcatagataagcacggtttccattgtggtg

SEQ ID NO: 709086 - DNA, 33 bp, Homo sapien
gctgcatagataagcagggtttccattgtggtg

SEQ ID NO: 709087 - DNA, 33 bp, Homo sapien
agccaaaaatgaacataaaagaagctatcattt

SEQ ID NO: 709088 - DNA, 33 bp, Homo sapien
agccaaaaatgaacatcaaagaagctatcattt

SEQ ID NO: 709089 - DNA, 33 bp, Homo sapien
gactggaggtggaatgaacagaaggatgtgtta

SEQ ID NO: 709090 - DNA, 33 bp, Homo sapien
gactggaggtggaatgcacagaaggatgtgtta

SEQ ID NO: 709091 - DNA, 33 bp, Homo sapien
atcaaactttgagcacagtagggacacagttta

SEQ ID NO: 709092 - DNA, 33 bp, Homo sapien
atcaaactttgagcacggtagggacacagttta

SEQ ID NO: 709093 - DNA, 33 bp, Homo sapien
ctaagacagatcctcacgcaaaggtatgtacct

SEQ ID NO: 709094 - DNA, 33 bp, Homo sapien
ctaagacagatcctcatgcaaaggtatgtacct

SEQ ID NO: 709095 - DNA, 33 bp, Homo sapien
ctgaaagtaagcacaacaggtgatcagtatgat

SEQ ID NO: 709096 - DNA, 33 bp, Homo sapien
ctgaaagtaagcacaataggtgatcagtatgat

SEQ ID NO: 709097 - DNA, 33 bp, Homo sapien; identical to SEQ ID NO: 709095

SEQ ID NO: 709098 - DNA, 33 bp, Homo sapien; identical to SEQ ID NO: 709096

SEQ ID NO: 709099 - DNA, 33 bp, Homo sapien
gtctgtaatatcagacggcattaaacagataag

SEQ ID NO: 709100 - DNA, 33 bp, Homo sapien
gtctgtaatatcagactgcattaaacagataag

SEQ ID NO: 709101 - DNA, 33 bp, Homo sapien
ttatatcaaatgggaaaatatgaaagctgattt

SEQ ID NO: 709102 - DNA, 33 bp, Homo sapien
ttatatcaaatgggaagatatgaaagctgattt

SEQ ID NO: 709103 - DNA, 33 bp, Homo sapien
tagtcaggttatgtggaagttcaggatttgatt

SEQ ID NO: 709104 - DNA, 33 bp, Homo sapien
tagtcaggttatgtggtagttcaggatttgatt

SEQ ID NO: 709105 - DNA, 33 bp, Homo sapien
agctagtgatggttcaagttgttatgcagggtg

SEQ ID NO: 709106 - DNA, 33 bp, Homo sapien
agctagtgatggttcacgttgttatgcagggtg

SEQ ID NO: 709107 - DNA, 33 bp, Homo sapien
ggaagtgggaagagataatctaaggtaagatac

SEQ ID NO: 709108 - DNA, 33 bp, Homo sapien
ggaagtgggaagagatgatctaaggtaagatac

SEQ ID NO: 709109 - DNA, 33 bp, Homo sapien
ggagaaagatggtttaccgtaatactaaagttt

SEQ ID NO: 709110 - DNA, 33 bp, Homo sapien
ggagaaagatggtttatcgtaatactaaagttt

SEQ ID NO: 709111 - DNA, 33 bp, Homo sapien
agatgtgacaacaaccacaggagatgggtactt

SEQ ID NO: 709112 - DNA, 33 bp, Homo sapien
agatgtgacaacaaccgcaggagatgggtactt

SEQ ID NO: 709113 - DNA, 33 bp, Homo sapien
gcaatgagctaatgaaagagctggttcattcat

SEQ ID NO: 709114 - DNA, 33 bp, Homo sapien
gcaatgagctaatgaaggagctggttcattcat

SEQ ID NO: 709115 - DNA, 33 bp, Homo sapien
ctgtcattccaaattccaaatggaaataaatgc

SEQ ID NO: 709116 - DNA, 33 bp, Homo sapien
ctgtcattccaaattctaaatggaaataaatgc

SEQ ID NO: 709117 - DNA, 33 bp, Homo sapien
cagcaattgaattgccaccaatttttacaacaa

SEQ ID NO: 709118 - DNA, 33 bp, Homo sapien
cagcaattgaattgcccccaatttttacaacaa

SEQ ID NO: 709119 - DNA, 33 bp, Homo sapien
ggttaaaatgcctgcaagtaatgaggtgaggtg

SEQ ID NO: 709120 - DNA, 33 bp, Homo sapien
ggttaaaatgcctgcaggtaatgaggtgaggtg

SEQ ID NO: 709121 - DNA, 33 bp, Homo sapien
acagttcctgcaccaacatctttctgttgcttt

SEQ ID NO: 709122 - DNA, 33 bp, Homo sapien
acagttcctgcaccaatatctttctgttgcttt

SEQ ID NO: 709123 - DNA, 33 bp, Homo sapien
cagtccatctaagacacggatactttgaaccta

SEQ ID NO: 709124 - DNA, 33 bp, Homo sapien
cagtccatctaagacatggatactttgaaccta

SEQ ID NO: 709125 - DNA, 33 bp, Homo sapien
aagtggaagtaagagaaatgataagaagtggtt

SEQ ID NO: 709126 - DNA, 33 bp, Homo sapien
aagtggaagtaagagatatgataagaagtggtt

SEQ ID NO: 709127 - DNA, 33 bp, Homo sapien
actgcatcctgtaaaacagaacctcattcttgc

SEQ ID NO: 709128 - DNA, 33 bp, Homo sapien
actgcatcctgtaaaatagaacctcattcttgc

SEQ ID NO: 709129 - DNA, 33 bp, Homo sapien
atggaacaatagcccagaaataacccaaataaa

SEQ ID NO: 709130 - DNA, 33 bp, Homo sapien
atggaacaatagcccataaataacccaaataaa

SEQ ID NO: 709131 - DNA, 33 bp, Homo sapien
cagtaaccagataaaacggaaattgagaagtgg

SEQ ID NO: 709132 - DNA, 33 bp, Homo sapien
cagtaaccagataaaagggaaattgagaagtgg

SEQ ID NO: 709133 - DNA, 33 bp, Homo sapien
ttcatagaactgaagacagttaggactttgctc

SEQ ID NO: 709134 - DNA, 33 bp, Homo sapien
ttcatagaactgaagagagttaggactttgctc

SEQ ID NO: 709135 - DNA, 33 bp, Homo sapien
gctacatctgctaccaactcttcatcagatgcc

SEQ ID NO: 709136 - DNA, 33 bp, Homo sapien
gctacatctgctaccagctcttcatcagatgcc

SEQ ID NO: 709137 - DNA, 33 bp, Homo sapien
ggttcatatgtagataaaacgttaaatgttgaa

SEQ ID NO: 709138 - DNA, 33 bp, Homo sapien
ggttcatatgtagatagaacgttaaatgttgaa

SEQ ID NO: 709139 - DNA, 33 bp, Homo sapien
gtattgggtgtgtatacatttagtacagttagc

SEQ ID NO: 709140 - DNA, 33 bp, Homo sapien
gtattgggtgtgtatatatttagtacagttagc

SEQ ID NO: 709141 - DNA, 33 bp, Homo sapien
tctaatgccaaataacagttactgctgatcaca

SEQ ID NO: 709142 - DNA, 33 bp, Homo sapien
tctaatgccaaataacggttactgctgatcaca

SEQ ID NO: 709143 - DNA, 33 bp, Homo sapien
ggtatcaaaacgtgtaacaagattaaattggga

SEQ ID NO: 709144 - DNA, 33 bp, Homo sapien
ggtatcaaaacgtgtagcaagattaaattggga

SEQ ID NO: 709145 - DNA, 33 bp, Homo sapien
ggaactcgagctttacaaaaagatgtcacacgc

SEQ ID NO: 709146 - DNA, 33 bp, Homo sapien
ggaactcgagctttacgaaaagatgtcacacgc

SEQ ID NO: 709147 - DNA, 33 bp, Homo sapien
aaatgatgaactaggaatagtgcacaggtgata

SEQ ID NO: 709148 - DNA, 33 bp, Homo sapien
aaatgatgaactaggagtagtgcacaggtgata

SEQ ID NO: 709149 - DNA, 33 bp, Homo sapien
ctgaaaagaaggctaaagtcaaggaaccaagtg

SEQ ID NO: 709150 - DNA, 33 bp, Homo sapien
ctgaaaagaaggctaacgtcaaggaaccaagtg

SEQ ID NO: 709151 - DNA, 33 bp, Homo sapien
ttatcctcagtcctaaataatgcctggagataa

SEQ ID NO: 709152 - DNA, 33 bp, Homo sapien
ttatcctcagtcctaactaatgcctggagataa

SEQ ID NO: 709153 - DNA, 33 bp, Homo sapien
aggtttcatggcttcaagtatgttttaaatata

SEQ ID NO: 709154 - DNA, 33 bp, Homo sapien
aggtttcatggcttcacgtatgttttaaatata

SEQ ID NO: 709155 - DNA, 33 bp, Homo sapien
aattaaattccagatccaaagtctaattttatt

SEQ ID NO: 709156 - DNA, 33 bp, Homo sapien
aattaaattccagatcgaaagtctaattttatt

SEQ ID NO: 709157 - DNA, 33 bp, Homo sapien
tagctcaactctgatcaattaattttgccaccg

SEQ ID NO: 709158 - DNA, 33 bp, Homo sapien
tagctcaactctgatcgattaattttgccaccg

SEQ ID NO: 709159 - DNA, 33 bp, Homo sapien
gaaagacaccaagaacaataagtttctatcaac

SEQ ID NO: 709160 - DNA, 33 bp, Homo sapien
gaaagacaccaagaaccataagtttctatcaac

SEQ ID NO: 709161 - DNA, 33 bp, Homo sapien
aagccaatctgacaaaagcttctaccaggataa

SEQ ID NO: 709162 - DNA, 33 bp, Homo sapien
aagccaatctgacaaaggcttctaccaggataa

SEQ ID NO: 709163 - DNA, 33 bp, Homo sapien
gaaaaatgctaggaaacattaattgcagccaat

SEQ ID NO: 709164 - DNA, 33 bp, Homo sapien
gaaaaatgctaggaaatattaattgcagccaat

SEQ ID NO: 709165 - DNA, 33 bp, Homo sapien
cccaaaataactgtcgccgaatacaaaatacaa

SEQ ID NO: 709166 - DNA, 33 bp, Homo sapien
cccaaaataactgtcgtcgaatacaaaatacaa

SEQ ID NO: 709167 - DNA, 33 bp, Homo sapien
gacagtggttaacaggaaagtggttgagataaa

SEQ ID NO: 709168 - DNA, 33 bp, Homo sapien
gacagtggttaacagggaagtggttgagataaa

SEQ ID NO: 709169 - DNA, 33 bp, Homo sapien
acttattcaagggagaagttcaagatagtgtgc

SEQ ID NO: 709170 - DNA, 33 bp, Homo sapien
acttattcaagggagaggttcaagatagtgtgc

SEQ ID NO: 709171 - DNA, 33 bp, Homo sapien
accttggtcaccacccagagtttcatggcagaa

SEQ ID NO: 709172 - DNA, 33 bp, Homo sapien
accttggtcaccaccccgagtttcatggcagaa

SEQ ID NO: 709173 - DNA, 33 bp, Homo sapien
ctgtaatcaagaactgaagaaccaagaagctat

SEQ ID NO: 709174 - DNA, 33 bp, Homo sapien
ctgtaatcaagaactggagaaccaagaagctat

SEQ ID NO: 709175 - DNA, 33 bp, Homo sapien
tctaattctaattacaatgctgtttccaccaca

SEQ ID NO: 709176 - DNA, 33 bp, Homo sapien
tctaattctaattacagtgctgtttccaccaca

SEQ ID NO: 709177 - DNA, 33 bp, Homo sapien
attgttttatcccagacactgacacaatgttgg

SEQ ID NO: 709178 - DNA, 33 bp, Homo sapien
attgttttatcccagagactgacacaatgttgg

SEQ ID NO: 709179 - DNA, 33 bp, Homo sapien
gctgtaggggcattaaagaaggtatggtggagg

SEQ ID NO: 709180 - DNA, 33 bp, Homo sapien
gctgtaggggcattaaggaaggtatggtggagg

SEQ ID NO: 709181 - DNA, 33 bp, Homo sapien
ataatcaaacactgtcaacattctagagtatgt

SEQ ID NO: 709182 - DNA, 33 bp, Homo sapien
ataatcaaacactgtccacattctagagtatgt

SEQ ID NO: 709183 - DNA, 33 bp, Homo sapien
ctgtggtggcttcctcaatggcatgtgtgctcc

SEQ ID NO: 709184 - DNA, 33 bp, Homo sapien
ctgtggtggcttcctcgatggcatgtgtgctcc

SEQ ID NO: 709185 - DNA, 33 bp, Homo sapien
ttatgacaacagagaaaaaagagtacaaaatta

SEQ ID NO: 709186 - DNA, 33 bp, Homo sapien
ttatgacaacagagaagaaagagtacaaaatta

SEQ ID NO: 709187 - DNA, 33 bp, Homo sapien
aaataagaattagttacaggctcagataaacaa

SEQ ID NO: 709188 - DNA, 33 bp, Homo sapien
aaataagaattagttataggctcagataaacaa

SEQ ID NO: 709189 - DNA, 33 bp, Homo sapien
gagaaacggaatcagaaacccactttaaaaagc

SEQ ID NO: 709190 - DNA, 33 bp, Homo sapien
gagaaacggaatcagagacccactttaaaaagc

SEQ ID NO: 709191 - DNA, 33 bp, Homo sapien
caaggccagtgttctacggcctacctgggatgg

SEQ ID NO: 709192 - DNA, 33 bp, Homo sapien
caaggccagtgttctagggcctacctgggatgg

SEQ ID NO: 709193 - DNA, 33 bp, Homo sapien
tggatgatgcccactcacattggagagggcaat

SEQ ID NO: 709194 - DNA, 33 bp, Homo sapien
tggatgatgcccactcgcattggagagggcaat

SEQ ID NO: 709195 - DNA, 33 bp, Homo sapien
gcattcctgggtctccagattgcaaactgcaca

SEQ ID NO: 709196 - DNA, 33 bp, Homo sapien
gcattcctgggtctccggattgcaaactgcaca

SEQ ID NO: 709197 - DNA, 33 bp, Homo sapien
agaatatatttcaaagacaagctaacaaagttc

SEQ ID NO: 709198 - DNA, 33 bp, Homo sapien
agaatatatttcaaaggcaagctaacaaagttc

SEQ ID NO: 709199 - DNA, 33 bp, Homo sapien
cagacatagggagtacaaaattgaatgaaaaga

SEQ ID NO: 709200 - DNA, 33 bp, Homo sapien
cagacatagggagtaccaaattgaatgaaaaga

SEQ ID NO: 709201 - DNA, 33 bp, Homo sapien
attgaaacttcttccactgacacatttattcct

SEQ ID NO: 709202 - DNA, 33 bp, Homo sapien
attgaaacttcttccattgacacatttattcct

SEQ ID NO: 709203 - DNA, 33 bp, Homo sapien
cctggatcttccttaaaaggtggagagatttct

SEQ ID NO: 709204 - DNA, 33 bp, Homo sapien
cctggatcttccttaagaggtggagagatttct

SEQ ID NO: 709205 - DNA, 33 bp, Homo sapien
gagaaaaagatgaggaatagaaagctaaataca

SEQ ID NO: 709206 - DNA, 33 bp, Homo sapien
gagaaaaagatgaggattagaaagctaaataca

SEQ ID NO: 709207 - DNA, 33 bp, Homo sapien
gtttccccaacattgaccttaggatatattaca

SEQ ID NO: 709208 - DNA, 33 bp, Homo sapien
gtttccccaacattgatcttaggatatattaca

SEQ ID NO: 709209 - DNA, 33 bp, Homo sapien
tacacagcaaaaagggaagtaaagaggcaggtg

SEQ ID NO: 709210 - DNA, 33 bp, Homo sapien
tacacagcaaaaaggggagtaaagaggcaggtg

SEQ ID NO: 709211 - DNA, 33 bp, Homo sapien
gcacttcttcagagtacgtattgaaagtctgta

SEQ ID NO: 709212 - DNA, 33 bp, Homo sapien
gcacttcttcagagtatgtattgaaagtctgta

SEQ ID NO: 709213 - DNA, 33 bp, Homo sapien
tttagctttagaatgactaagattgattctgaa

SEQ ID NO: 709214 - DNA, 33 bp, Homo sapien
tttagctttagaatgattaagattgattctgaa

SEQ ID NO: 709215 - DNA, 33 bp, Homo sapien
acatctctgtgaaggaacctgatgagaatataa

SEQ ID NO: 709216 - DNA, 33 bp, Homo sapien
acatctctgtgaaggaccctgatgagaatataa

SEQ ID NO: 709217 - DNA, 33 bp, Homo sapien
gaggataaagccaccacgaaatataaaaacata

SEQ ID NO: 709218 - DNA, 33 bp, Homo sapien
gaggataaagccaccatgaaatataaaaacata

SEQ ID NO: 709219 - DNA, 33 bp, Homo sapien
caagacgatctctaacagcaggatggaaaagga

SEQ ID NO: 709220 - DNA, 33 bp, Homo sapien
caagacgatctctaacggcaggatggaaaagga

SEQ ID NO: 709221 - DNA, 33 bp, Homo sapien
catttcaaacagtacacagtgagctggcccagc

SEQ ID NO: 709222 - DNA, 33 bp, Homo sapien
catttcaaacagtacatagtgagctggcccagc

SEQ ID NO: 709223 - DNA, 33 bp, Homo sapien
gtgcttttgttagtcacaatctattaagcatca

SEQ ID NO: 709224 - DNA, 33 bp, Homo sapien
gtgcttttgttagtcataatctattaagcatca

SEQ ID NO: 709225 - DNA, 33 bp, Homo sapien
tcagtctccactttaaaagatggcaatcactgg

SEQ ID NO: 709226 - DNA, 33 bp, Homo sapien
tcagtctccactttaacagatggcaatcactgg

SEQ ID NO: 709227 - DNA, 33 bp, Homo sapien
caaagttttctggacaaggttcatcccttcttg

SEQ ID NO: 709228 - DNA, 33 bp, Homo sapien
caaagttttctggacacggttcatcccttcttg

SEQ ID NO: 709229 - DNA, 33 bp, Homo sapien
ctcaatgtcaactttaaacttacaactggattt

SEQ ID NO: 709230 - DNA, 33 bp, Homo sapien
ctcaatgtcaactttacacttacaactggattt

SEQ ID NO: 709231 - DNA, 33 bp, Homo sapien
ctaggagagtgatctaagccagtgcttctcaaa

SEQ ID NO: 709232 - DNA, 33 bp, Homo sapien
ctaggagagtgatctaggccagtgcttctcaaa

SEQ ID NO: 709233 - DNA, 33 bp, Homo sapien
tctactctctggtctcagaacatcaacactggc

SEQ ID NO: 709234 - DNA, 33 bp, Homo sapien
tctactctctggtctcggaacatcaacactggc

SEQ ID NO: 709235 - DNA, 33 bp, Homo sapien
aaaagtaacctcagacaacataacaacaaacca

SEQ ID NO: 709236 - DNA, 33 bp, Homo sapien
aaaagtaacctcagacgacataacaacaaacca

SEQ ID NO: 709237 - DNA, 33 bp, Homo sapien
aatgtgaaggtgcctgcatgaggccgagaggaa

SEQ ID NO: 709238 - DNA, 33 bp, Homo sapien
aatgtgaaggtgcctgtatgaggccgagaggaa

SEQ ID NO: 709239 - DNA, 33 bp, Homo sapien
gaactattactgtgataacactgcatataacaa

SEQ ID NO: 709240 - DNA, 33 bp, Homo sapien
gaactattactgtgatcacactgcatataacaa

SEQ ID NO: 709241 - DNA, 33 bp, Homo sapien
cagaaatgtacgcttaaaaatggttaaaacagc

SEQ ID NO: 709242 - DNA, 33 bp, Homo sapien
cagaaatgtacgcttacaaatggttaaaacagc

SEQ ID NO: 709243 - DNA, 33 bp, Homo sapien
acccaggctggagttacagtgacgtgatcccag

SEQ ID NO: 709244 - DNA, 33 bp, Homo sapien
acccaggctggagttatagtgacgtgatcccag

SEQ ID NO: 709245 - DNA, 33 bp, Homo sapien
ttaacctttacagggaaagtagcttcgaaatga

SEQ ID NO: 709246 - DNA, 33 bp, Homo sapien
ttaacctttacagggagagtagcttcgaaatga

SEQ ID NO: 709247 - DNA, 33 bp, Homo sapien
gagagtaggatttccacaggagtccaaacagct

SEQ ID NO: 709248 - DNA, 33 bp, Homo sapien
gagagtaggatttccataggagtccaaacagct

SEQ ID NO: 709249 - DNA, 33 bp, Homo sapien
atactgcaagataaagcagggcgttgtggctca

SEQ ID NO: 709250 - DNA, 33 bp, Homo sapien
atactgcaagataaagtagggcgttgtggctca

SEQ ID NO: 709251 - DNA, 33 bp, Homo sapien
aattaaaatttgacacggattaatatcattagc

SEQ ID NO: 709252 - DNA, 33 bp, Homo sapien
aattaaaatttgacactgattaatatcattagc

SEQ ID NO: 709253 - DNA, 33 bp, Homo sapien
gcccacccatctccacaaggtcctttagcatga

SEQ ID NO: 709254 - DNA, 33 bp, Homo sapien
gcccacccatctccacgaggtcctttagcatga

SEQ ID NO: 709255 - DNA, 33 bp, Homo sapien
acaaagccaggcattacaaaagacaattttggg

SEQ ID NO: 709256 - DNA, 33 bp, Homo sapien
acaaagccaggcattagaaaagacaattttggg

SEQ ID NO: 709257 - DNA, 33 bp, Homo sapien
tggattcaatataacaccagttctgtctttgag

SEQ ID NO: 709258 - DNA, 33 bp, Homo sapien
tggattcaatataacatcagttctgtctttgag

SEQ ID NO: 709259 - DNA, 33 bp, Homo sapien
cttagggaagttcttagccagtaagttagaaag

SEQ ID NO: 709260 - DNA, 33 bp, Homo sapien
cttagggaagttcttatccagtaagttagaaag

SEQ ID NO: 709261 - DNA, 33 bp, Homo sapien
acctcggctttacaagcaggtggaattcaggtg

SEQ ID NO: 709262 - DNA, 33 bp, Homo sapien
acctcggctttacaagtaggtggaattcaggtg

SEQ ID NO: 709263 - DNA, 33 bp, Homo sapien
atgtttatgggatgggacattttctttccatat

SEQ ID NO: 709264 - DNA, 33 bp, Homo sapien
atgtttatgggatggggcattttctttccatat

SEQ ID NO: 709265 - DNA, 33 bp, Homo sapien
atcacatactttgcaacgtcagtgtgtgcagaa

SEQ ID NO: 709266 - DNA, 33 bp, Homo sapien
atcacatactttgcaatgtcagtgtgtgcagaa

SEQ ID NO: 709267 - DNA, 33 bp, Homo sapien
atatgtgcttcagaaacatgacaaatctactac

SEQ ID NO: 709268 - DNA, 33 bp, Homo sapien
atatgtgcttcagaaatatgacaaatctactac

SEQ ID NO: 709269 - DNA, 33 bp, Homo sapien
tgcatagacttctaagaaactcattacacttac

SEQ ID NO: 709270 - DNA, 33 bp, Homo sapien
tgcatagacttctaagcaactcattacacttac

SEQ ID NO: 709271 - DNA, 33 bp, Homo sapien
tctctcagggaagaagccatgattcctgatatg

SEQ ID NO: 709272 - DNA, 33 bp, Homo sapien
tctctcagggaagaaggcatgattcctgatatg

SEQ ID NO: 709273 - DNA, 33 bp, Homo sapien
aacaatcagaaaattacgttgagagaaactatt

SEQ ID NO: 709274 - DNA, 33 bp, Homo sapien
aacaatcagaaaattatgttgagagaaactatt

SEQ ID NO: 709275 - DNA, 33 bp, Homo sapien
gcagtttatcaattcaaaacaagtcaggatatt

SEQ ID NO: 709276 - DNA, 33 bp, Homo sapien
gcagtttatcaattcagaacaagtcaggatatt

SEQ ID NO: 709277 - DNA, 33 bp, Homo sapien
gcatttttctaacaatcagtgacatagagcttt

SEQ ID NO: 709278 - DNA, 33 bp, Homo sapien
gcatttttctaacaattagtgacatagagcttt

SEQ ID NO: 709279 - DNA, 33 bp, Homo sapien
ttagatagatcattgacgcagaacattaacaaa

SEQ ID NO: 709280 - DNA, 33 bp, Homo sapien
ttagatagatcattgaggcagaacattaacaaa

SEQ ID NO: 709281 - DNA, 33 bp, Homo sapien
ccctggaagttgcaaaccttcaatagactacag

SEQ ID NO: 709282 - DNA, 33 bp, Homo sapien
ccctggaagttgcaaatcttcaatagactacag

SEQ ID NO: 709283 - DNA, 33 bp, Homo sapien
gctaatccaaaaaaaacgcagtaccaatgctat

SEQ ID NO: 709284 - DNA, 33 bp, Homo sapien
gctaatccaaaaaaaatgcagtaccaatgctat

SEQ ID NO: 709285 - DNA, 33 bp, Homo sapien
agtaattccaggcacaatgctgcttattctgag

SEQ ID NO: 709286 - DNA, 33 bp, Homo sapien
agtaattccaggcacagtgctgcttattctgag

SEQ ID NO: 709287 - DNA, 33 bp, Homo sapien
tgaagataatatgaaccgagtgagatgtaacag

SEQ ID NO: 709288 - DNA, 33 bp, Homo sapien
tgaagataatatgaacggagtgagatgtaacag

SEQ ID NO: 709289 - DNA, 33 bp, Homo sapien
tgaaagtaagccaacaaatcgtcatatgatgag

SEQ ID NO: 709290 - DNA, 33 bp, Homo sapien
tgaaagtaagccaacagatcgtcatatgatgag

SEQ ID NO: 709291 - DNA, 33 bp, Homo sapien
atggctggattactcacagattgtttaattatt

SEQ ID NO: 709292 - DNA, 33 bp, Homo sapien
atggctggattactcatagattgtttaattatt

SEQ ID NO: 709293 - DNA, 33 bp, Homo sapien
ctggcacacaatattagacctacagcatttaat

SEQ ID NO: 709294 - DNA, 33 bp, Homo sapien
ctggcacacaatattatacctacagcatttaat

SEQ ID NO: 709295 - DNA, 33 bp, Homo sapien
aggaatctgaagctcaaacataaattgggcact

SEQ ID NO: 709296 - DNA, 33 bp, Homo sapien
aggaatctgaagctcagacataaattgggcact

SEQ ID NO: 709297 - DNA, 33 bp, Homo sapien
gaatctgtgaacataacaaaatgcttattgttg

SEQ ID NO: 709298 - DNA, 33 bp, Homo sapien
gaatctgtgaacataataaaatgcttattgttg

SEQ ID NO: 709299 - DNA, 33 bp, Homo sapien
ttcctggtaaaatacacggcatgagcaagggac

SEQ ID NO: 709300 - DNA, 33 bp, Homo sapien
ttcctggtaaaatacatggcatgagcaagggac

SEQ ID NO: 709301 - DNA, 33 bp, Homo sapien
tcgttacttgggaaaagatactggataaaaact

SEQ ID NO: 709302 - DNA, 33 bp, Homo sapien
tcgttacttgggaaaatatactggataaaaact

SEQ ID NO: 709303 - DNA, 33 bp, Homo sapien
ggtcattgggcaatacaacattacaagatgctc

SEQ ID NO: 709304 - DNA, 33 bp, Homo sapien
ggtcattgggcaatacgacattacaagatgctc

SEQ ID NO: 709305 - DNA, 33 bp, Homo sapien
attcaatataattttccctcttgttcatctgtt

SEQ ID NO: 709306 - DNA, 33 bp, Homo sapien
attcaatataattttcgctcttgttcatctgtt

SEQ ID NO: 709307 - DNA, 33 bp, Homo sapien
acttgtactgagggacactacctgttggggagt

SEQ ID NO: 709308 - DNA, 33 bp, Homo sapien
acttgtactgagggacgctacctgttggggagt

SEQ ID NO: 709309 - DNA, 33 bp, Homo sapien
gccttctgcaagccagaaaggaaggtctcacca

SEQ ID NO: 709310 - DNA, 33 bp, Homo sapien
gccttctgcaagccaggaaggaaggtctcacca

SEQ ID NO: 709311 - DNA, 33 bp, Homo sapien
tcaagaatcaaatgaacagtgcttgaaatggtg

SEQ ID NO: 709312 - DNA, 33 bp, Homo sapien
tcaagaatcaaatgaatagtgcttgaaatggtg

SEQ ID NO: 709313 - DNA, 33 bp, Homo sapien
tgctctccttactgaacgtgaaagtgcctggca

SEQ ID NO: 709314 - DNA, 33 bp, Homo sapien
tgctctccttactgaatgtgaaagtgcctggca

SEQ ID NO: 709315 - DNA, 33 bp, Homo sapien
aagtgcgtttcctgaactatttcccttgatttt

SEQ ID NO: 709316 - DNA, 33 bp, Homo sapien
aagtgcgtttcctgaagtatttcccttgatttt

SEQ ID NO: 709317 - DNA, 33 bp, Homo sapien
aagaagcagtaggtaaatatggttaggaaggca

SEQ ID NO: 709318 - DNA, 33 bp, Homo sapien
aagaagcagtaggtaagtatggttaggaaggca

SEQ ID NO: 709319 - DNA, 33 bp, Homo sapien
tacacatgctgtcagaaaaaatccacctgtgag

SEQ ID NO: 709320 - DNA, 33 bp, Homo sapien
tacacatgctgtcagacaaaatccacctgtgag

SEQ ID NO: 709321 - DNA, 33 bp, Homo sapien
ttgacacttttatttaacaagaaatggacaagt

SEQ ID NO: 709322 - DNA, 33 bp, Homo sapien
ttgacacttttatttagcaagaaatggacaagt

SEQ ID NO: 709323 - DNA, 33 bp, Homo sapien
tcaaatctggaacatccctcagtgtttaattag

SEQ ID NO: 709324 - DNA, 33 bp, Homo sapien
tcaaatctggaacatctctcagtgtttaattag

SEQ ID NO: 709325 - DNA, 33 bp, Homo sapien
cttcatacaaagttaaatggttataatgtcctt

SEQ ID NO: 709326 - DNA, 33 bp, Homo sapien
cttcatacaaagttaactggttataatgtcctt

SEQ ID NO: 709327 - DNA, 33 bp, Homo sapien
acttacaagcatgccaagcactgcgaggtgttt

SEQ ID NO: 709328 - DNA, 33 bp, Homo sapien
acttacaagcatgccaggcactgcgaggtgttt

SEQ ID NO: 709329 - DNA, 33 bp, Homo sapien
ttctgaaggaaacataaggcgttgggaaagaat

SEQ ID NO: 709330 - DNA, 33 bp, Homo sapien
ttctgaaggaaacatacggcgttgggaaagaat

SEQ ID NO: 709331 - DNA, 33 bp, Homo sapien
attcaaactcaagtaacctggctcaaatatgca

SEQ ID NO: 709332 - DNA, 33 bp, Homo sapien
attcaaactcaagtaatctggctcaaatatgca

SEQ ID NO: 709333 - DNA, 33 bp, Homo sapien
catttgaagcattacagatctaagtatcagatt

SEQ ID NO: 709334 - DNA, 33 bp, Homo sapien
catttgaagcattacatatctaagtatcagatt

SEQ ID NO: 709335 - DNA, 33 bp, Homo sapien
tgcaaacaatagctcacaaaactttccgccaca

SEQ ID NO: 709336 - DNA, 33 bp, Homo sapien
tgcaaacaatagctcagaaaactttccgccaca

SEQ ID NO: 709337 - DNA, 33 bp, Homo sapien
gggctaacatcttaccccctcaaaatagagctc

SEQ ID NO: 709338 - DNA, 33 bp, Homo sapien
gggctaacatcttacctcctcaaaatagagctc

SEQ ID NO: 709339 - DNA, 33 bp, Homo sapien
tactaaggtgaattaaatactagatatagcaat

SEQ ID NO: 709340 - DNA, 33 bp, Homo sapien
tactaaggtgaattaagtactagatatagcaat

SEQ ID NO: 709341 - DNA, 33 bp, Homo sapien
ctctacatatatagtgaatcagataaagatata

SEQ ID NO: 709342 - DNA, 33 bp, Homo sapien
ctctacatatatagtggatcagataaagatata

SEQ ID NO: 709343 - DNA, 33 bp, Homo sapien
aattcttgcagtgggacaaatgtaaaaagactg

SEQ ID NO: 709344 - DNA, 33 bp, Homo sapien
aattcttgcagtgggagaaatgtaaaaagactg

SEQ ID NO: 709345 - DNA, 33 bp, Homo sapien
agttaaagtttggaaaaggtcagtctcatgaca

SEQ ID NO: 709346 - DNA, 33 bp, Homo sapien
agttaaagtttggaaagggtcagtctcatgaca

SEQ ID NO: 709347 - DNA, 33 bp, Homo sapien
gtacgtttggttttgaaggaaagcataataata

SEQ ID NO: 709348 - DNA, 33 bp, Homo sapien
gtacgtttggttttgacggaaagcataataata

SEQ ID NO: 709349 - DNA, 33 bp, Homo sapien
gagaaaatgaagatcaaaccagagtccatttta

SEQ ID NO: 709350 - DNA, 33 bp, Homo sapien
gagaaaatgaagatcacaccagagtccatttta

SEQ ID NO: 709351 - DNA, 33 bp, Homo sapien
tcattggcaatactaacgtatcactatatttag

SEQ ID NO: 709352 - DNA, 33 bp, Homo sapien
tcattggcaatactaatgtatcactatatttag

SEQ ID NO: 709353 - DNA, 33 bp, Homo sapien
tgcaaacagccaaaaaaatgtaaaaacagagtt

SEQ ID NO: 709354 - DNA, 33 bp, Homo sapien
tgcaaacagccaaaaagatgtaaaaacagagtt

SEQ ID NO: 709355 - DNA, 33 bp, Homo sapien
gtagtctcaggtgtcaagtgcctcagtgtgaca

SEQ ID NO: 709356 - DNA, 33 bp, Homo sapien
gtagtctcaggtgtcaggtgcctcagtgtgaca

SEQ ID NO: 709357 - DNA, 33 bp, Homo sapien
ctctcctccttcgttacccaattcaaaattcag

SEQ ID NO: 709358 - DNA, 33 bp, Homo sapien
ctctcctccttcgttatccaattcaaaattcag

SEQ ID NO: 709359 - DNA, 33 bp, Homo sapien
agatgttgctgcctaaataattaccagtatctg

SEQ ID NO: 709360 - DNA, 33 bp, Homo sapien
agatgttgctgcctaagtaattaccagtatctg

SEQ ID NO: 709361 - DNA, 33 bp, Homo sapien
tatacatcccacaatgaaagtaccagtccaggg

SEQ ID NO: 709362 - DNA, 33 bp, Homo sapien
tatacatcccacaatgcaagtaccagtccaggg

SEQ ID NO: 709363 - DNA, 33 bp, Homo sapien
taattgagaactcacaaaaatgataagggttaa

SEQ ID NO: 709364 - DNA, 33 bp, Homo sapien
taattgagaactcacagaaatgataagggttaa

SEQ ID NO: 709365 - DNA, 33 bp, Homo sapien
ataaagttatcaagctaaacagtaactatctga

SEQ ID NO: 709366 - DNA, 33 bp, Homo sapien
ataaagttatcaagctgaacagtaactatctga

SEQ ID NO: 709367 - DNA, 33 bp, Homo sapien
ttttgaactatataatgactttggcttgagttg

SEQ ID NO: 709368 - DNA, 33 bp, Homo sapien
ttttgaactatataattactttggcttgagttg

SEQ ID NO: 709369 - DNA, 33 bp, Homo sapien
tactttaaaacacaccaaaggggctatttaaga

SEQ ID NO: 709370 - DNA, 33 bp, Homo sapien
tactttaaaacacaccgaaggggctatttaaga

SEQ ID NO: 709371 - DNA, 33 bp, Homo sapien
cagggcctggagccggaaactttaggaatctat

SEQ ID NO: 709372 - DNA, 33 bp, Homo sapien
cagggcctggagccgggaactttaggaatctat

SEQ ID NO: 709373 - DNA, 33 bp, Homo sapien
caaaagagaacatgcacaggaagctacatgcac

SEQ ID NO: 709374 - DNA, 33 bp, Homo sapien
caaaagagaacatgcagaggaagctacatgcac

SEQ ID NO: 709375 - DNA, 33 bp, Homo sapien
tacagtgtcttcagggccacttgggtgaaagag

SEQ ID NO: 709376 - DNA, 33 bp, Homo sapien
tacagtgtcttcagggtcacttgggtgaaagag

SEQ ID NO: 709377 - DNA, 33 bp, Homo sapien
atggttgttccttccacaacctttctttcctaa

SEQ ID NO: 709378 - DNA, 33 bp, Homo sapien
atggttgttccttccataacctttctttcctaa

SEQ ID NO: 709379 - DNA, 33 bp, Homo sapien
aacgagaaagtatactcaagtttagatgatgtt

SEQ ID NO: 709380 - DNA, 33 bp, Homo sapien
aacgagaaagtatactgaagtttagatgatgtt

SEQ ID NO: 709381 - DNA, 33 bp, Homo sapien
ttttggtgatagaaaagatgtgtctgattccct

SEQ ID NO: 709382 - DNA, 33 bp, Homo sapien
ttttggtgatagaaaatatgtgtctgattccct

SEQ ID NO: 709383 - DNA, 33 bp, Homo sapien
tcaggctacaaatagacatgggtgctgggtaga

SEQ ID NO: 709384 - DNA, 33 bp, Homo sapien
tcaggctacaaatagatatgggtgctgggtaga

SEQ ID NO: 709385 - DNA, 33 bp, Homo sapien
ctataaaattctaccactaggcaattccaatct

SEQ ID NO: 709386 - DNA, 33 bp, Homo sapien
ctataaaattctaccagtaggcaattccaatct

SEQ ID NO: 709387 - DNA, 33 bp, Homo sapien
aagacttcttcaccaacgtagcagagaagaatg

SEQ ID NO: 709388 - DNA, 33 bp, Homo sapien
aagacttcttcaccaatgtagcagagaagaatg

SEQ ID NO: 709389 - DNA, 33 bp, Homo sapien
aagtttatttatttacaacttcttaggcaggtt

SEQ ID NO: 709390 - DNA, 33 bp, Homo sapien
aagtttatttatttacgacttcttaggcaggtt

SEQ ID NO: 709391 - DNA, 33 bp, Homo sapien
gaacttgctgaaagtcacacatttggcctgagc

SEQ ID NO: 709392 - DNA, 33 bp, Homo sapien
gaacttgctgaaagtctcacatttggcctgagc

SEQ ID NO: 709393 - DNA, 33 bp, Homo sapien
attgacctagaaattaaaagcatacatatttaa

SEQ ID NO: 709394 - DNA, 33 bp, Homo sapien
attgacctagaaattagaagcatacatatttaa

SEQ ID NO: 709395 - DNA, 33 bp, Homo sapien
catagctgtaaccctaagaagccatgttgaggg

SEQ ID NO: 709396 - DNA, 33 bp, Homo sapien
catagctgtaaccctacgaagccatgttgaggg

SEQ ID NO: 709397 - DNA, 33 bp, Homo sapien
ttccctcattccagaaaatcagctaaaatctga

SEQ ID NO: 709398 - DNA, 33 bp, Homo sapien
ttccctcattccagaagatcagctaaaatctga

SEQ ID NO: 709399 - DNA, 33 bp, Homo sapien
cacacctgtagggttacagtgagctacaatcat

SEQ ID NO: 709400 - DNA, 33 bp, Homo sapien
cacacctgtagggttatagtgagctacaatcat

SEQ ID NO: 709401 - DNA, 33 bp, Homo sapien
agttaagggtctcctgcattaaggccagaggag

SEQ ID NO: 709402 - DNA, 33 bp, Homo sapien
agttaagggtctcctgtattaaggccagaggag

SEQ ID NO: 709403 - DNA, 33 bp, Homo sapien
taaacattacacttcaatctttgttcatgtgca

SEQ ID NO: 709404 - DNA, 33 bp, Homo sapien
taaacattacacttcagtctttgttcatgtgca

SEQ ID NO: 709405 - DNA, 33 bp, Homo sapien
cttcagtaggaggtccaaaaaaagaatatttat

SEQ ID NO: 709406 - DNA, 33 bp, Homo sapien
cttcagtaggaggtccgaaaaaagaatatttat

SEQ ID NO: 709407 - DNA, 33 bp, Homo sapien
tcatgacaatgtaaaaatagaataatgatagca

SEQ ID NO: 709408 - DNA, 33 bp, Homo sapien
tcatgacaatgtaaaactagaataatgatagca

SEQ ID NO: 709409 - DNA, 33 bp, Homo sapien
tctcctttagtgatagcagagtcgtttgctttg

SEQ ID NO: 709410 - DNA, 33 bp, Homo sapien
tctcctttagtgatagtagagtcgtttgctttg

SEQ ID NO: 709411 - DNA, 33 bp, Homo sapien
cagcctacaatgcacaagaaagctaccaccaac

SEQ ID NO: 709412 - DNA, 33 bp, Homo sapien
cagcctacaatgcacaggaaagctaccaccaac

SEQ ID NO: 709413 - DNA, 33 bp, Homo sapien
ttcttagccaagcctgaactaggtgaatacatg

SEQ ID NO: 709414 - DNA, 33 bp, Homo sapien
ttcttagccaagcctggactaggtgaatacatg

SEQ ID NO: 709415 - DNA, 33 bp, Homo sapien
ttcacccctggctcacacacatggatctaatca

SEQ ID NO: 709416 - DNA, 33 bp, Homo sapien
ttcacccctggctcacgcacatggatctaatca

SEQ ID NO: 709417 - DNA, 33 bp, Homo sapien
gcatcataaaagaaaactggaaacttcatgaag

SEQ ID NO: 709418 - DNA, 33 bp, Homo sapien
gcatcataaaagaaaattggaaacttcatgaag

SEQ ID NO: 709419 - DNA, 33 bp, Homo sapien
tattgccctttcagcaataacaactatattcag

SEQ ID NO: 709420 - DNA, 33 bp, Homo sapien
tattgccctttcagcagtaacaactatattcag

SEQ ID NO: 709421 - DNA, 33 bp, Homo sapien
actgctgagcatgaaccagggccagtatctgaa

SEQ ID NO: 709422 - DNA, 33 bp, Homo sapien
actgctgagcatgaacgagggccagtatctgaa

SEQ ID NO: 709423 - DNA, 33 bp, Homo sapien
tgtcatatagagagcacgatgctgataaagaca

SEQ ID NO: 709424 - DNA, 33 bp, Homo sapien
tgtcatatagagagcatgatgctgataaagaca

SEQ ID NO: 709425 - DNA, 33 bp, Homo sapien
gatgtggcaggaaaacagtgtctggaggcaggg

SEQ ID NO: 709426 - DNA, 33 bp, Homo sapien
gatgtggcaggaaaacggtgtctggaggcaggg

SEQ ID NO: 709427 - DNA, 33 bp, Homo sapien
atcccagaaaacctaaagtaaaagagatgaagt

SEQ ID NO: 709428 - DNA, 33 bp, Homo sapien
atcccagaaaacctaacgtaaaagagatgaagt

SEQ ID NO: 709429 - DNA, 33 bp, Homo sapien
gataaaaagtggttgaccatcaatggttggatt

SEQ ID NO: 709430 - DNA, 33 bp, Homo sapien
gataaaaagtggttgatcatcaatggttggatt

SEQ ID NO: 709431 - DNA, 33 bp, Homo sapien
tagtccattttcacaccgctaataaacatacct

SEQ ID NO: 709432 - DNA, 33 bp, Homo sapien
tagtccattttcacactgctaataaacatacct

SEQ ID NO: 709433 - DNA, 33 bp, Homo sapien
caccactgctggtttaacttttatttttctcaa

SEQ ID NO: 709434 - DNA, 33 bp, Homo sapien
caccactgctggtttaccttttatttttctcaa

SEQ ID NO: 709435 - DNA, 33 bp, Homo sapien
ctgctgtttagtggaacgtactgtatatgcttg

SEQ ID NO: 709436 - DNA, 33 bp, Homo sapien
ctgctgtttagtggaatgtactgtatatgcttg

SEQ ID NO: 709437 - DNA, 33 bp, Homo sapien
agttttcctgtcttaaagggctgttctatggat

SEQ ID NO: 709438 - DNA, 33 bp, Homo sapien
agttttcctgtcttaacgggctgttctatggat

SEQ ID NO: 709439 - DNA, 33 bp, Homo sapien
tcaacaaatcttagaaaaatcagcactgaaaga

SEQ ID NO: 709440 - DNA, 33 bp, Homo sapien
tcaacaaatcttagaacaatcagcactgaaaga

SEQ ID NO: 709441 - DNA, 33 bp, Homo sapien
cccaaaatagatttaccgccagaatcagttaga

SEQ ID NO: 709442 - DNA, 33 bp, Homo sapien
cccaaaatagatttactgccagaatcagttaga

SEQ ID NO: 709443 - DNA, 33 bp, Homo sapien
ttcagtaaatgtttagccattgaatgtggaaat

SEQ ID NO: 709444 - DNA, 33 bp, Homo sapien
ttcagtaaatgtttagtcattgaatgtggaaat

SEQ ID NO: 709445 - DNA, 33 bp, Homo sapien
tggatacaattaatgacaatgtgagggatgtgt

SEQ ID NO: 709446 - DNA, 33 bp, Homo sapien
tggatacaattaatgataatgtgagggatgtgt

SEQ ID NO: 709447 - DNA, 33 bp, Homo sapien
tagaacctccttaaagaatctcacaagacctat

SEQ ID NO: 709448 - DNA, 33 bp, Homo sapien
tagaacctccttaaagcatctcacaagacctat

SEQ ID NO: 709449 - DNA, 33 bp, Homo sapien
gaagtttaactacacagctgtcagacttccagt

SEQ ID NO: 709450 - DNA, 33 bp, Homo sapien
gaagtttaactacacatctgtcagacttccagt

SEQ ID NO: 709451 - DNA, 33 bp, Homo sapien
taattggcccataggtaacaattcccagaatat

SEQ ID NO: 709452 - DNA, 33 bp, Homo sapien
taattggcccataggtgacaattcccagaatat

SEQ ID NO: 709453 - DNA, 33 bp, Homo sapien
atcgatgtcagaaatacctagtagaaatccttc

SEQ ID NO: 709454 - DNA, 33 bp, Homo sapien
atcgatgtcagaaatatctagtagaaatccttc

SEQ ID NO: 709455 - DNA, 33 bp, Homo sapien
agcaatcaagtggagagaaattatcgatgtcag

SEQ ID NO: 709456 - DNA, 33 bp, Homo sapien
agcaatcaagtggagataaattatcgatgtcag

SEQ ID NO: 709457 - DNA, 33 bp, Homo sapien
attcatcatcttattcacacagttattatgtat

SEQ ID NO: 709458 - DNA, 33 bp, Homo sapien
attcatcatcttattcgcacagttattatgtat

SEQ ID NO: 709459 - DNA, 33 bp, Homo sapien
ggtaacggatccaaaaagtggggaactgatatt

SEQ ID NO: 709460 - DNA, 33 bp, Homo sapien
ggtaacggatccaaaaggtggggaactgatatt

SEQ ID NO: 709461 - DNA, 33 bp, Homo sapien
gctcttcaaaatcgataagtcactttattcatc

SEQ ID NO: 709462 - DNA, 33 bp, Homo sapien
gctcttcaaaatcgatgagtcactttattcatc

SEQ ID NO: 709463 - DNA, 33 bp, Homo sapien
aactgaaactccaatcaaaatttttgccactct

SEQ ID NO: 709464 - DNA, 33 bp, Homo sapien
aactgaaactccaatcgaaatttttgccactct

SEQ ID NO: 709465 - DNA, 33 bp, Homo sapien
tgcaaccttgccttccacataagtcgactaatc

SEQ ID NO: 709466 - DNA, 33 bp, Homo sapien
tgcaaccttgccttccgcataagtcgactaatc

SEQ ID NO: 709467 - DNA, 33 bp, Homo sapien
tatatggtttctgccccgactgtttaactccta

SEQ ID NO: 709468 - DNA, 33 bp, Homo sapien
tatatggtttctgccctgactgtttaactccta

SEQ ID NO: 709469 - DNA, 33 bp, Homo sapien
gacctgatgttgccaaatcaaattacttgtttg

SEQ ID NO: 709470 - DNA, 33 bp, Homo sapien
gacctgatgttgccaactcaaattacttgtttg

SEQ ID NO: 709471 - DNA, 33 bp, Homo sapien
gaggtaaagtgtatccaaatttcaaataggatg

SEQ ID NO: 709472 - DNA, 33 bp, Homo sapien
gaggtaaagtgtatccgaatttcaaataggatg

SEQ ID NO: 709473 - DNA, 33 bp, Homo sapien
agaggctgctgtaaatcaggaatctgctagatg

SEQ ID NO: 709474 - DNA, 33 bp, Homo sapien
agaggctgctgtaaattaggaatctgctagatg

SEQ ID NO: 709475 - DNA, 33 bp, Homo sapien
cattattaatattttacgatgatgtctcaacag

SEQ ID NO: 709476 - DNA, 33 bp, Homo sapien
cattattaatattttatgatgatgtctcaacag

SEQ ID NO: 709477 - DNA, 33 bp, Homo sapien
ctataattgtttccaaatggtcattgtcccttt

SEQ ID NO: 709478 - DNA, 33 bp, Homo sapien
ctataattgtttccaagtggtcattgtcccttt

SEQ ID NO: 709479 - DNA, 33 bp, Homo sapien
tctaagatcgtgtttccataggtcttatattgg

SEQ ID NO: 709480 - DNA, 33 bp, Homo sapien
tctaagatcgtgtttctataggtcttatattgg

SEQ ID NO: 709481 - DNA, 33 bp, Homo sapien
agccttcaggaaaataagtgtttgtcagtagag

SEQ ID NO: 709482 - DNA, 33 bp, Homo sapien
agccttcaggaaaatatgtgtttgtcagtagag

SEQ ID NO: 709483 - DNA, 33 bp, Homo sapien
ctcttaagtcaaaaagaaccaagataaaaaact

SEQ ID NO: 709484 - DNA, 33 bp, Homo sapien
ctcttaagtcaaaaaggaccaagataaaaaact

SEQ ID NO: 709485 - DNA, 33 bp, Homo sapien
taaagatgtatgtgtacaattgaagcaatgaca

SEQ ID NO: 709486 - DNA, 33 bp, Homo sapien
taaagatgtatgtgtataattgaagcaatgaca

SEQ ID NO: 709487 - DNA, 33 bp, Homo sapien
atatagcatggtagtcaagaggacaggtagcac

SEQ ID NO: 709488 - DNA, 33 bp, Homo sapien
atatagcatggtagtcgagaggacaggtagcac

SEQ ID NO: 709489 - DNA, 33 bp, Homo sapien
ctagtttttagaggcaccattttatatctgtca

SEQ ID NO: 709490 - DNA, 33 bp, Homo sapien
ctagtttttagaggcatcattttatatctgtca

SEQ ID NO: 709491 - DNA, 33 bp, Homo sapien
tgaacacaggctgcaaatacagctcagagggct

SEQ ID NO: 709492 - DNA, 33 bp, Homo sapien
tgaacacaggctgcaagtacagctcagagggct

SEQ ID NO: 709493 - DNA, 33 bp, Homo sapien
gactagagaatcttcaaaatccctattcacccc

SEQ ID NO: 709494 - DNA, 33 bp, Homo sapien
gactagagaatcttcacaatccctattcacccc

SEQ ID NO: 709495 - DNA, 33 bp, Homo sapien
aaaacactcgaacttacggatatagaaaataga

SEQ ID NO: 709496 - DNA, 33 bp, Homo sapien
aaaacactcgaacttatggatatagaaaataga

SEQ ID NO: 709497 - DNA, 33 bp, Homo sapien
catttcatgttaaagaacctgtgccaatattca

SEQ ID NO: 709498 - DNA, 33 bp, Homo sapien
catttcatgttaaagagcctgtgccaatattca

SEQ ID NO: 709499 - DNA, 33 bp, Homo sapien
cagaacaaatcatccagccaaatttttcattta

SEQ ID NO: 709500 - DNA, 33 bp, Homo sapien
cagaacaaatcatccatccaaatttttcattta

SEQ ID NO: 709501 - DNA, 33 bp, Homo sapien
accaaacaaatgattaccatagcctagacaaat

SEQ ID NO: 709502 - DNA, 33 bp, Homo sapien
accaaacaaatgattagcatagcctagacaaat

SEQ ID NO: 709503 - DNA, 33 bp, Homo sapien
cagagttagcaaataacaaaacaaggccttagt

SEQ ID NO: 709504 - DNA, 33 bp, Homo sapien
cagagttagcaaataagaaaacaaggccttagt

SEQ ID NO: 709505 - DNA, 33 bp, Homo sapien
tggtctccttgatcaacctttttcttcaagcct

SEQ ID NO: 709506 - DNA, 33 bp, Homo sapien
tggtctccttgatcaatctttttcttcaagcct

SEQ ID NO: 709507 - DNA, 33 bp, Homo sapien
ctgttacaacaagggaaaaatcattgaagaaaa

SEQ ID NO: 709508 - DNA, 33 bp, Homo sapien
ctgttacaacaagggacaaatcattgaagaaaa

SEQ ID NO: 709509 - DNA, 33 bp, Homo sapien
cattatttctggatatcaagtacctcagaccta

SEQ ID NO: 709510 - DNA, 33 bp, Homo sapien
cattatttctggatattaagtacctcagaccta

SEQ ID NO: 709511 - DNA, 33 bp, Homo sapien
ttggtatttagtttcacgcaatctttcacctgg

SEQ ID NO: 709512 - DNA, 33 bp, Homo sapien
ttggtatttagtttcaggcaatctttcacctgg

SEQ ID NO: 709513 - DNA, 33 bp, Homo sapien
ttgacacaaaagaagaaagtatgtctaatggag

SEQ ID NO: 709514 - DNA, 33 bp, Homo sapien
ttgacacaaaagaagagagtatgtctaatggag

SEQ ID NO: 709515 - DNA, 33 bp, Homo sapien
atgagttctcagaagaccccaaagggatgccct

SEQ ID NO: 709516 - DNA, 33 bp, Homo sapien
atgagttctcagaagagcccaaagggatgccct

SEQ ID NO: 709517 - DNA, 33 bp, Homo sapien
tgtatttgcactatccaataccattgtgcattt

SEQ ID NO: 709518 - DNA, 33 bp, Homo sapien
tgtatttgcactatccgataccattgtgcattt

SEQ ID NO: 709519 - DNA, 33 bp, Homo sapien
gaaatgtgggtgtggaacctccaaatagagtcc

SEQ ID NO: 709520 - DNA, 33 bp, Homo sapien
gaaatgtgggtgtggatcctccaaatagagtcc

SEQ ID NO: 709521 - DNA, 33 bp, Homo sapien
acattaatctgatgagccctaaagagaatcttt

SEQ ID NO: 709522 - DNA, 33 bp, Homo sapien
acattaatctgatgagtcctaaagagaatcttt

SEQ ID NO: 709523 - DNA, 33 bp, Homo sapien
gaactgtaaaattataagctctgttttcaaatg

SEQ ID NO: 709524 - DNA, 33 bp, Homo sapien
gaactgtaaaattatacgctctgttttcaaatg

SEQ ID NO: 709525 - DNA, 33 bp, Homo sapien
ggacgacaaaggcatgaattgtgaaaccaccaa

SEQ ID NO: 709526 - DNA, 33 bp, Homo sapien
ggacgacaaaggcatggattgtgaaaccaccaa

SEQ ID NO: 709527 - DNA, 33 bp, Homo sapien
ctcatctaattccaataaatgatctacctatga

SEQ ID NO: 709528 - DNA, 33 bp, Homo sapien
ctcatctaattccaatgaatgatctacctatga

SEQ ID NO: 709529 - DNA, 33 bp, Homo sapien
ccaaagtctagtcaatcaccactctctgatgat

SEQ ID NO: 709530 - DNA, 33 bp, Homo sapien
ccaaagtctagtcaattaccactctctgatgat

SEQ ID NO: 709531 - DNA, 33 bp, Homo sapien
cccaggtaaaatcttcaagacgttggtctggtg

SEQ ID NO: 709532 - DNA, 33 bp, Homo sapien
cccaggtaaaatcttcgagacgttggtctggtg

SEQ ID NO: 709533 - DNA, 33 bp, Homo sapien
gacagggttgtggctgaattaaactcatcataa

SEQ ID NO: 709534 - DNA, 33 bp, Homo sapien
gacagggttgtggctggattaaactcatcataa

SEQ ID NO: 709535 - DNA, 33 bp, Homo sapien
tgaacccattactttccacacttttaaagagaa

SEQ ID NO: 709536 - DNA, 33 bp, Homo sapien
tgaacccattactttcgacacttttaaagagaa

SEQ ID NO: 709537 - DNA, 33 bp, Homo sapien
taatcctccataatggaaataaaccacaaagct

SEQ ID NO: 709538 - DNA, 33 bp, Homo sapien
taatcctccataatgggaataaaccacaaagct

SEQ ID NO: 709539 - DNA, 33 bp, Homo sapien
tcttactcctgtaacaatggccgttatcaaaaa

SEQ ID NO: 709540 - DNA, 33 bp, Homo sapien
tcttactcctgtaacagtggccgttatcaaaaa

SEQ ID NO: 709541 - DNA, 33 bp, Homo sapien
ggataagcctacaaaaatgtcaaaaaagaatgt

SEQ ID NO: 709542 - DNA, 33 bp, Homo sapien
ggataagcctacaaaactgtcaaaaaagaatgt

SEQ ID NO: 709543 - DNA, 33 bp, Homo sapien
gaagccacaataaagactctcgcccacattttc

SEQ ID NO: 709544 - DNA, 33 bp, Homo sapien
gaagccacaataaagattctcgcccacattttc

SEQ ID NO: 709545 - DNA, 33 bp, Homo sapien
ggagatcacctcacaccacaataaaccaaatgc

SEQ ID NO: 709546 - DNA, 33 bp, Homo sapien
ggagatcacctcacacgacaataaaccaaatgc

SEQ ID NO: 709547 - DNA, 33 bp, Homo sapien
cctcctgttgttctaccattgtggtcagtaagg

SEQ ID NO: 709548 - DNA, 33 bp, Homo sapien
cctcctgttgttctactattgtggtcagtaagg

SEQ ID NO: 709549 - DNA, 33 bp, Homo sapien
gaatcagccagaatacccctgtataaacaaaaa

SEQ ID NO: 709550 - DNA, 33 bp, Homo sapien
gaatcagccagaatactcctgtataaacaaaaa

SEQ ID NO: 709551 - DNA, 33 bp, Homo sapien
cagtgaaaatgaaagacgtagagaatgaacttc

SEQ ID NO: 709552 - DNA, 33 bp, Homo sapien
cagtgaaaatgaaagatgtagagaatgaacttc

SEQ ID NO: 709553 - DNA, 33 bp, Homo sapien
gaccttagcaaccttacgtgttcttagcaactt

SEQ ID NO: 709554 - DNA, 33 bp, Homo sapien
gaccttagcaaccttatgtgttcttagcaactt

SEQ ID NO: 709555 - DNA, 33 bp, Homo sapien
tctgtactaataccaagattactgtagctgaat

SEQ ID NO: 709556 - DNA, 33 bp, Homo sapien
tctgtactaataccaatattactgtagctgaat

SEQ ID NO: 709557 - DNA, 33 bp, Homo sapien
ttgtatttttttccaccgagatttgggttacta

SEQ ID NO: 709558 - DNA, 33 bp, Homo sapien
ttgtatttttttccactgagatttgggttacta

SEQ ID NO: 709559 - DNA, 33 bp, Homo sapien
tatatttattctgagcaacatacaagtgaccta

SEQ ID NO: 709560 - DNA, 33 bp, Homo sapien
tatatttattctgagcgacatacaagtgaccta

SEQ ID NO: 709561 - DNA, 33 bp, Homo sapien
agaaaaggctgatttcaatgacaggaactctat

SEQ ID NO: 709562 - DNA, 33 bp, Homo sapien
agaaaaggctgatttcgatgacaggaactctat

SEQ ID NO: 709563 - DNA, 33 bp, Homo sapien
cctggcttttcatgaccgtatgtacatttgagt

SEQ ID NO: 709564 - DNA, 33 bp, Homo sapien
cctggcttttcatgactgtatgtacatttgagt

SEQ ID NO: 709565 - DNA, 33 bp, Homo sapien
gtttcattagaacaaaacaaggacatgaaggaa

SEQ ID NO: 709566 - DNA, 33 bp, Homo sapien
gtttcattagaacaaaccaaggacatgaaggaa

SEQ ID NO: 709567 - DNA, 33 bp, Homo sapien
ccagggtatcttcaaaatatttcccgcttataa

SEQ ID NO: 709568 - DNA, 33 bp, Homo sapien
ccagggtatcttcaaagtatttcccgcttataa

SEQ ID NO: 709569 - DNA, 33 bp, Homo sapien
gacagtaaccagtggccatatgaaaaaacaaag

SEQ ID NO: 709570 - DNA, 33 bp, Homo sapien
gacagtaaccagtggctatatgaaaaaacaaag

SEQ ID NO: 709571 - DNA, 33 bp, Homo sapien
aaagagaactgtgatcaaggaacaataagaaat

SEQ ID NO: 709572 - DNA, 33 bp, Homo sapien
aaagagaactgtgatcgaggaacaataagaaat

SEQ ID NO: 709573 - DNA, 33 bp, Homo sapien
tatagcttggaaaggaagccttagtacactact

SEQ ID NO: 709574 - DNA, 33 bp, Homo sapien
tatagcttggaaaggacgccttagtacactact

SEQ ID NO: 709575 - DNA, 33 bp, Homo sapien
ggctcataccactgtcccttattcccatacccc

SEQ ID NO: 709576 - DNA, 33 bp, Homo sapien
ggctcataccactgtctcttattcccatacccc

SEQ ID NO: 709577 - DNA, 33 bp, Homo sapien
gttacactgagtacaccattctaagtttaaaca

SEQ ID NO: 709578 - DNA, 33 bp, Homo sapien
gttacactgagtacactattctaagtttaaaca

SEQ ID NO: 709579 - DNA, 33 bp, Homo sapien
atattatcagccaaaactgttctgggtaagctg

SEQ ID NO: 709580 - DNA, 33 bp, Homo sapien
atattatcagccaaaagtgttctgggtaagctg

SEQ ID NO: 709581 - DNA, 33 bp, Homo sapien
tttatatagcacatagaactagaggctaccaga

SEQ ID NO: 709582 - DNA, 33 bp, Homo sapien
tttatatagcacatagtactagaggctaccaga

SEQ ID NO: 709583 - DNA, 33 bp, Homo sapien
aatatttatggcacaaagtttcaagtcaaagaa

SEQ ID NO: 709584 - DNA, 33 bp, Homo sapien
aatatttatggcacaacgtttcaagtcaaagaa

SEQ ID NO: 709585 - DNA, 33 bp, Homo sapien
gatgtttggatttgccactaatatcaaagcaag

SEQ ID NO: 709586 - DNA, 33 bp, Homo sapien
gatgtttggatttgccgctaatatcaaagcaag

SEQ ID NO: 709587 - DNA, 33 bp, Homo sapien
ccagacagttctctaaacctcccaaacatgcca

SEQ ID NO: 709588 - DNA, 33 bp, Homo sapien
ccagacagttctctaaccctcccaaacatgcca

SEQ ID NO: 709589 - DNA, 33 bp, Homo sapien
agataacttcagtgaacgctaggcctaaatacc

SEQ ID NO: 709590 - DNA, 33 bp, Homo sapien
agataacttcagtgaatgctaggcctaaatacc

SEQ ID NO: 709591 - DNA, 33 bp, Homo sapien
tctgctgttgttttacaggatttagagggtgac

SEQ ID NO: 709592 - DNA, 33 bp, Homo sapien
tctgctgttgttttacgggatttagagggtgac

SEQ ID NO: 709593 - DNA, 33 bp, Homo sapien
ttttgccatcttataaacctgtcacttagtaaa

SEQ ID NO: 709594 - DNA, 33 bp, Homo sapien
ttttgccatcttataatcctgtcacttagtaaa

SEQ ID NO: 709595 - DNA, 33 bp, Homo sapien
taaagtatctcctttacaatgccatgcatctgt

SEQ ID NO: 709596 - DNA, 33 bp, Homo sapien
taaagtatctcctttataatgccatgcatctgt

SEQ ID NO: 709597 - DNA, 33 bp, Homo sapien
atgctgatctattacaaatgaaatgccaacagt

SEQ ID NO: 709598 - DNA, 33 bp, Homo sapien
atgctgatctattacacatgaaatgccaacagt

SEQ ID NO: 709599 - DNA, 33 bp, Homo sapien
tacagttcaataatgcgaagtatattcacattg

SEQ ID NO: 709600 - DNA, 33 bp, Homo sapien
tacagttcaataatgctaagtatattcacattg

SEQ ID NO: 709601 - DNA, 33 bp, Homo sapien
tgaatctgtacaacacaggtagtgtcgacatcc

SEQ ID NO: 709602 - DNA, 33 bp, Homo sapien
tgaatctgtacaacacgggtagtgtcgacatcc

SEQ ID NO: 709603 - DNA, 33 bp, Homo sapien
tttggtctctatagcaagatgtcattctaacaa

SEQ ID NO: 709604 - DNA, 33 bp, Homo sapien
tttggtctctatagcaggatgtcattctaacaa

SEQ ID NO: 709605 - DNA, 33 bp, Homo sapien
agagaaagacagggacacttgtaattattactt

SEQ ID NO: 709606 - DNA, 33 bp, Homo sapien
agagaaagacagggacgcttgtaattattactt

SEQ ID NO: 709607 - DNA, 33 bp, Homo sapien
ttatttaaattgaaaaagatgccagaatggaaa

SEQ ID NO: 709608 - DNA, 33 bp, Homo sapien
ttatttaaattgaaaaggatgccagaatggaaa

SEQ ID NO: 709609 - DNA, 33 bp, Homo sapien
ctgtgtagagcaatgaatcacaattatttttgc

SEQ ID NO: 709610 - DNA, 33 bp, Homo sapien
ctgtgtagagcaatgattcacaattatttttgc

SEQ ID NO: 709611 - DNA, 33 bp, Homo sapien
aataaaactgccagataaaacagacaaacagat

SEQ ID NO: 709612 - DNA, 33 bp, Homo sapien
aataaaactgccagatgaaacagacaaacagat

SEQ ID NO: 709613 - DNA, 33 bp, Homo sapien
tgtatttgaaaactccacaaagcaaggacacaa

SEQ ID NO: 709614 - DNA, 33 bp, Homo sapien
tgtatttgaaaactccgcaaagcaaggacacaa

SEQ ID NO: 709615 - DNA, 33 bp, Homo sapien
tgcaggtaggcatttcccagtatagtttctata

SEQ ID NO: 709616 - DNA, 33 bp, Homo sapien
tgcaggtaggcatttcgcagtatagtttctata

SEQ ID NO: 709617 - DNA, 33 bp, Homo sapien
aagaatgcaaggacagaaagtaaaatgagaagg

SEQ ID NO: 709618 - DNA, 33 bp, Homo sapien
aagaatgcaaggacaggaagtaaaatgagaagg

SEQ ID NO: 709619 - DNA, 33 bp, Homo sapien
gtaagtagaaagggaaacacaagactacgaact

SEQ ID NO: 709620 - DNA, 33 bp, Homo sapien
gtaagtagaaagggaagcacaagactacgaact

SEQ ID NO: 709621 - DNA, 33 bp, Homo sapien
atttgttcttggtttgcatagtttggagattga

SEQ ID NO: 709622 - DNA, 33 bp, Homo sapien
atttgttcttggtttgtatagtttggagattga

SEQ ID NO: 709623 - DNA, 33 bp, Homo sapien
ctgtatgtggatattaagattttcttctactta

SEQ ID NO: 709624 - DNA, 33 bp, Homo sapien
ctgtatgtggatattacgattttcttctactta

SEQ ID NO: 709625 - DNA, 33 bp, Homo sapien
ggagggatgcaatatacatttgtactactattg

SEQ ID NO: 709626 - DNA, 33 bp, Homo sapien
ggagggatgcaatatagatttgtactactattg

SEQ ID NO: 709627 - DNA, 33 bp, Homo sapien
tatttgctagagctatgaagtttgagtaaggcc

SEQ ID NO: 709628 - DNA, 33 bp, Homo sapien
tatttgctagagctattaagtttgagtaaggcc

SEQ ID NO: 709629 - DNA, 33 bp, Homo sapien
acaaatatgttttctccatgcaaattatcaaac

SEQ ID NO: 709630 - DNA, 33 bp, Homo sapien
acaaatatgttttctctatgcaaattatcaaac

SEQ ID NO: 709631 - DNA, 33 bp, Homo sapien
ttagagattacaaataccacatttttcactgca

SEQ ID NO: 709632 - DNA, 33 bp, Homo sapien
ttagagattacaaatatcacatttttcactgca

SEQ ID NO: 709633 - DNA, 33 bp, Homo sapien
cttaaaggagagtttcaacagcagaaagacatt

SEQ ID NO: 709634 - DNA, 33 bp, Homo sapien
cttaaaggagagtttcgacagcagaaagacatt

SEQ ID NO: 709635 - DNA, 33 bp, Homo sapien
ttgtttagcaatgttagaatagtagcagtttca

SEQ ID NO: 709636 - DNA, 33 bp, Homo sapien
ttgtttagcaatgttataatagtagcagtttca

SEQ ID NO: 709637 - DNA, 33 bp, Homo sapien
ctaagaacctcaggcagtcatattctagaactt

SEQ ID NO: 709638 - DNA, 33 bp, Homo sapien
ctaagaacctcaggcattcatattctagaactt

SEQ ID NO: 709639 - DNA, 33 bp, Homo sapien
atttcgcaactgaggaaacctggaaataaagaa

SEQ ID NO: 709640 - DNA, 33 bp, Homo sapien
atttcgcaactgaggagacctggaaataaagaa

SEQ ID NO: 709641 - DNA, 33 bp, Homo sapien
tgctatcagcaacataagtaaagtgtccttctc

SEQ ID NO: 709642 - DNA, 33 bp, Homo sapien
tgctatcagcaacataggtaaagtgtccttctc

SEQ ID NO: 709643 - DNA, 33 bp, Homo sapien
ccaataggaataaccacaagcaaattcagggag

SEQ ID NO: 709644 - DNA, 33 bp, Homo sapien
ccaataggaataaccataagcaaattcagggag

SEQ ID NO: 709645 - DNA, 33 bp, Homo sapien
tgccaagaataaaccacaggggcaaacttaatg

SEQ ID NO: 709646 - DNA, 33 bp, Homo sapien
tgccaagaataaaccagaggggcaaacttaatg

SEQ ID NO: 709647 - DNA, 33 bp, Homo sapien
acagcaatgctggaaactgaatccttcctcttc

SEQ ID NO: 709648 - DNA, 33 bp, Homo sapien
acagcaatgctggaaattgaatccttcctcttc

SEQ ID NO: 709649 - DNA, 33 bp, Homo sapien
agcagcttatttgtcacagtattgcagtactta

SEQ ID NO: 709650 - DNA, 33 bp, Homo sapien
agcagcttatttgtcatagtattgcagtactta

SEQ ID NO: 709651 - DNA, 33 bp, Homo sapien
ctatgccgtctagcctcaccggtcctttgttat

SEQ ID NO: 709652 - DNA, 33 bp, Homo sapien
ctatgccgtctagccttaccggtcctttgttat

SEQ ID NO: 709653 - DNA, 33 bp, Homo sapien
ttgcttgctctctcagaacttggctacattagg

SEQ ID NO: 709654 - DNA, 33 bp, Homo sapien
ttgcttgctctctcaggacttggctacattagg

SEQ ID NO: 709655 - DNA, 33 bp, Homo sapien
cagtatttgttgaaaagattggattagaagttt

SEQ ID NO: 709656 - DNA, 33 bp, Homo sapien
cagtatttgttgaaaatattggattagaagttt

SEQ ID NO: 709657 - DNA, 33 bp, Homo sapien
tattttgagataactacagactcacacatagtt

SEQ ID NO: 709658 - DNA, 33 bp, Homo sapien
tattttgagataactatagactcacacatagtt

SEQ ID NO: 709659 - DNA, 33 bp, Homo sapien
atatcatagtttatcaacagttcagtaatctag

SEQ ID NO: 709660 - DNA, 33 bp, Homo sapien
atatcatagtttatcatcagttcagtaatctag

SEQ ID NO: 709661 - DNA, 33 bp, Homo sapien
aggcaaaatcctcacaccaaaatacgtacatca

SEQ ID NO: 709662 - DNA, 33 bp, Homo sapien
aggcaaaatcctcacatcaaaatacgtacatca

SEQ ID NO: 709663 - DNA, 33 bp, Homo sapien
gatagtaagaagacgagtcccaaatcccaatcc

SEQ ID NO: 709664 - DNA, 33 bp, Homo sapien
gatagtaagaagacgattcccaaatcccaatcc

SEQ ID NO: 709665 - DNA, 33 bp, Homo sapien
acaaaatgcctgaaaccgagtaaaatataaaaa

SEQ ID NO: 709666 - DNA, 33 bp, Homo sapien
acaaaatgcctgaaactgagtaaaatataaaaa

SEQ ID NO: 709667 - DNA, 33 bp, Homo sapien
tatgtaagttgaaggccaatccccagtgtctga

SEQ ID NO: 709668 - DNA, 33 bp, Homo sapien
tatgtaagttgaaggctaatccccagtgtctga

SEQ ID NO: 709669 - DNA, 33 bp, Homo sapien
cagggaaaatggccaaagaataggaagaggaag

SEQ ID NO: 709670 - DNA, 33 bp, Homo sapien
cagggaaaatggccaacgaataggaagaggaag

SEQ ID NO: 709671 - DNA, 33 bp, Homo sapien
gccttgatggctacaggattgtacgttcctcag

SEQ ID NO: 709672 - DNA, 33 bp, Homo sapien
gccttgatggctacagtattgtacgttcctcag

SEQ ID NO: 709673 - DNA, 33 bp, Homo sapien
gtgtacatattaatgacgctgataatactgaag

SEQ ID NO: 709674 - DNA, 33 bp, Homo sapien
gtgtacatattaatgatgctgataatactgaag

SEQ ID NO: 709675 - DNA, 33 bp, Homo sapien
ctaagaaatataggaacagtcattaattaggtc

SEQ ID NO: 709676 - DNA, 33 bp, Homo sapien
ctaagaaatataggaagagtcattaattaggtc

SEQ ID NO: 709677 - DNA, 33 bp, Homo sapien
tattttaattgatgtgcagcgggaccttgatgg

SEQ ID NO: 709678 - DNA, 33 bp, Homo sapien
tattttaattgatgtgtagcgggaccttgatgg

SEQ ID NO: 709679 - DNA, 33 bp, Homo sapien
cttcaggtttcacactcaaaagagatgttggcc

SEQ ID NO: 709680 - DNA, 33 bp, Homo sapien
cttcaggtttcacacttaaaagagatgttggcc

SEQ ID NO: 709681 - DNA, 33 bp, Homo sapien
ggaggatagaattctgaaatagcatacagtgat

SEQ ID NO: 709682 - DNA, 33 bp, Homo sapien
ggaggatagaattctggaatagcatacagtgat

SEQ ID NO: 709683 - DNA, 33 bp, Homo sapien
taaagttgcagtttccaagaacataccaacaac

SEQ ID NO: 709684 - DNA, 33 bp, Homo sapien
taaagttgcagtttcctagaacataccaacaac

SEQ ID NO: 709685 - DNA, 33 bp, Homo sapien
ctaacccttcaatgcccacataccaagaacatc

SEQ ID NO: 709686 - DNA, 33 bp, Homo sapien
ctaacccttcaatgcctacataccaagaacatc

SEQ ID NO: 709687 - DNA, 33 bp, Homo sapien
aagaggaagatgtactaaaaagaagtcttgtta

SEQ ID NO: 709688 - DNA, 33 bp, Homo sapien
aagaggaagatgtactgaaaagaagtcttgtta

SEQ ID NO: 709689 - DNA, 33 bp, Homo sapien
cttttctctagaataaacgaaagagtgcaggaa

SEQ ID NO: 709690 - DNA, 33 bp, Homo sapien
cttttctctagaataagcgaaagagtgcaggaa

SEQ ID NO: 709691 - DNA, 33 bp, Homo sapien
agtattttgaaaatgacagggtatgactcacat

SEQ ID NO: 709692 - DNA, 33 bp, Homo sapien
agtattttgaaaatgatagggtatgactcacat

SEQ ID NO: 709693 - DNA, 33 bp, Homo sapien
tccacgaaggtatagacgtggctccatgttgcc

SEQ ID NO: 709694 - DNA, 33 bp, Homo sapien
tccacgaaggtatagatgtggctccatgttgcc

SEQ ID NO: 709695 - DNA, 33 bp, Homo sapien
tgggtctgggcttaagaaagtttgagagaagga

SEQ ID NO: 709696 - DNA, 33 bp, Homo sapien
tgggtctgggcttaaggaagtttgagagaagga

SEQ ID NO: 709697 - DNA, 33 bp, Homo sapien
ctcaagaggattttaaccagaggagtaagatga

SEQ ID NO: 709698 - DNA, 33 bp, Homo sapien
ctcaagaggattttaatcagaggagtaagatga

SEQ ID NO: 709699 - DNA, 33 bp, Homo sapien
gatttcaagtagcaacagggccaaatacatcat

SEQ ID NO: 709700 - DNA, 33 bp, Homo sapien
gatttcaagtagcaacggggccaaatacatcat

SEQ ID NO: 709701 - DNA, 33 bp, Homo sapien
ttgcttctagaatggaccaatttgtgaacaaat

SEQ ID NO: 709702 - DNA, 33 bp, Homo sapien
ttgcttctagaatggatcaatttgtgaacaaat

SEQ ID NO: 709703 - DNA, 33 bp, Homo sapien
ctcgatctactacctaccaaatgtcataagatc

SEQ ID NO: 709704 - DNA, 33 bp, Homo sapien
ctcgatctactacctatcaaatgtcataagatc

SEQ ID NO: 709705 - DNA, 33 bp, Homo sapien
ctgtgcagatttttaacgccgaaatgccatttt

SEQ ID NO: 709706 - DNA, 33 bp, Homo sapien
ctgtgcagatttttaatgccgaaatgccatttt

SEQ ID NO: 709707 - DNA, 33 bp, Homo sapien
acaaacaaaaagcggaaaagaagatagtggcac

SEQ ID NO: 709708 - DNA, 33 bp, Homo sapien
acaaacaaaaagcggagaagaagatagtggcac

SEQ ID NO: 709709 - DNA, 33 bp, Homo sapien
aaggatatagaatccacgaatgatgcttagaat

SEQ ID NO: 709710 - DNA, 33 bp, Homo sapien
aaggatatagaatccatgaatgatgcttagaat

SEQ ID NO: 709711 - DNA, 33 bp, Homo sapien
ggcctctttcttagcaatatagtattacccaat

SEQ ID NO: 709712 - DNA, 33 bp, Homo sapien
ggcctctttcttagcagtatagtattacccaat

SEQ ID NO: 709713 - DNA, 33 bp, Homo sapien
ttcaccagtctatcagaagaactagaattataa

SEQ ID NO: 709714 - DNA, 33 bp, Homo sapien
ttcaccagtctatcagcagaactagaattataa

SEQ ID NO: 709715 - DNA, 33 bp, Homo sapien
agaaaagtgcaccatcggatacgaaaaatttac

SEQ ID NO: 709716 - DNA, 33 bp, Homo sapien
agaaaagtgcaccatctgatacgaaaaatttac

SEQ ID NO: 709717 - DNA, 33 bp, Homo sapien
aaatgcattaattgaacgttatgtaggtttttt

SEQ ID NO: 709718 - DNA, 33 bp, Homo sapien
aaatgcattaattgaatgttatgtaggtttttt

SEQ ID NO: 709719 - DNA, 33 bp, Homo sapien
caccttcccaggaataccctgacctatcactct

SEQ ID NO: 709720 - DNA, 33 bp, Homo sapien
caccttcccaggaatatcctgacctatcactct

SEQ ID NO: 709721 - DNA, 33 bp, Homo sapien
cactatgctatgaacacgaacacatagtttcta

SEQ ID NO: 709722 - DNA, 33 bp, Homo sapien
cactatgctatgaacatgaacacatagtttcta

SEQ ID NO: 709723 - DNA, 33 bp, Homo sapien
gacctcagcgagattacagactggtggagaaat

SEQ ID NO: 709724 - DNA, 33 bp, Homo sapien
gacctcagcgagattatagactggtggagaaat

SEQ ID NO: 709725 - DNA, 33 bp, Homo sapien
ataattatatccaaaaatgtctgccgtgtggta

SEQ ID NO: 709726 - DNA, 33 bp, Homo sapien
ataattatatccaaaagtgtctgccgtgtggta

SEQ ID NO: 709727 - DNA, 33 bp, Homo sapien
atagttataagttctacgaggacaagaccatat

SEQ ID NO: 709728 - DNA, 33 bp, Homo sapien
atagttataagttctatgaggacaagaccatat

SEQ ID NO: 709729 - DNA, 33 bp, Homo sapien
ttatatttaaatgaagaaatgtgagctggtccc

SEQ ID NO: 709730 - DNA, 33 bp, Homo sapien
ttatatttaaatgaagtaatgtgagctggtccc

SEQ ID NO: 709731 - DNA, 33 bp, Homo sapien
gaaactgtaagataaggctcacaagggtaatgg

SEQ ID NO: 709732 - DNA, 33 bp, Homo sapien
gaaactgtaagataagtctcacaagggtaatgg

SEQ ID NO: 709733 - DNA, 33 bp, Homo sapien
tgttttagtcttcttcaattcttggcaaaaaca

SEQ ID NO: 709734 - DNA, 33 bp, Homo sapien
tgttttagtcttcttccattcttggcaaaaaca

SEQ ID NO: 709735 - DNA, 33 bp, Homo sapien
agttggttgtttatgacaatctcaatacaatct

SEQ ID NO: 709736 - DNA, 33 bp, Homo sapien
agttggttgtttatgataatctcaatacaatct

SEQ ID NO: 709737 - DNA, 33 bp, Homo sapien
atgactcacttgcaaccgaaagaatgtggtaga

SEQ ID NO: 709738 - DNA, 33 bp, Homo sapien
atgactcacttgcaactgaaagaatgtggtaga

SEQ ID NO: 709739 - DNA, 33 bp, Homo sapien
aacagatcacctcaaaattagagcataaaacaa

SEQ ID NO: 709740 - DNA, 33 bp, Homo sapien
aacagatcacctcaaacttagagcataaaacaa

SEQ ID NO: 709741 - DNA, 33 bp, Homo sapien
ccaagacagcttcctaactataatccaccagat

SEQ ID NO: 709742 - DNA, 33 bp, Homo sapien
ccaagacagcttcctagctataatccaccagat

SEQ ID NO: 709743 - DNA, 33 bp, Homo sapien
attaagttgtggaaccaatatcagtagccactt

SEQ ID NO: 709744 - DNA, 33 bp, Homo sapien
attaagttgtggaaccgatatcagtagccactt

SEQ ID NO: 709745 - DNA, 33 bp, Homo sapien
ggaatcatgagaagaacatttggtagttaatta

SEQ ID NO: 709746 - DNA, 33 bp, Homo sapien
ggaatcatgagaagaatatttggtagttaatta

SEQ ID NO: 709747 - DNA, 33 bp, Homo sapien
atagcatatgctgccactaacagatggaattga

SEQ ID NO: 709748 - DNA, 33 bp, Homo sapien
atagcatatgctgccagtaacagatggaattga

SEQ ID NO: 709749 - DNA, 33 bp, Homo sapien
acaagcattaaccaaacacaaaaagctatctta

SEQ ID NO: 709750 - DNA, 33 bp, Homo sapien
acaagcattaaccaaatacaaaaagctatctta

SEQ ID NO: 709751 - DNA, 33 bp, Homo sapien
acaacattgcatcaaaaacatcacaacaaagtt

SEQ ID NO: 709752 - DNA, 33 bp, Homo sapien
acaacattgcatcaaacacatcacaacaaagtt

SEQ ID NO: 709753 - DNA, 33 bp, Homo sapien
ctctgatattaaacaaggagcctgaaacaacat

SEQ ID NO: 709754 - DNA, 33 bp, Homo sapien
ctctgatattaaacaatgagcctgaaacaacat

SEQ ID NO: 709755 - DNA, 33 bp, Homo sapien
tggaagataatgcaggaaacgtagctaaaattt

SEQ ID NO: 709756 - DNA, 33 bp, Homo sapien
tggaagataatgcagggaacgtagctaaaattt

SEQ ID NO: 709757 - DNA, 33 bp, Homo sapien
tattcagctttagaaaagaaggaaatcctgcca

SEQ ID NO: 709758 - DNA, 33 bp, Homo sapien
tattcagctttagaaatgaaggaaatcctgcca

SEQ ID NO: 709759 - DNA, 33 bp, Homo sapien
ggaatgctagtgtccaaatgaaggaaaatctga

SEQ ID NO: 709760 - DNA, 33 bp, Homo sapien
ggaatgctagtgtccatatgaaggaaaatctga

SEQ ID NO: 709761 - DNA, 33 bp, Homo sapien
taagttgttttcataacactggaaaatagaatg

SEQ ID NO: 709762 - DNA, 33 bp, Homo sapien
taagttgttttcataatactggaaaatagaatg

SEQ ID NO: 709763 - DNA, 33 bp, Homo sapien
gatctttgggtcagaaatataatatcttaacta

SEQ ID NO: 709764 - DNA, 33 bp, Homo sapien
gatctttgggtcagaagtataatatcttaacta

SEQ ID NO: 709765 - DNA, 33 bp, Homo sapien
acatagccttagtgtacattacaggaaggaagg

SEQ ID NO: 709766 - DNA, 33 bp, Homo sapien
acatagccttagtgtatattacaggaaggaagg

SEQ ID NO: 709767 - DNA, 33 bp, Homo sapien
attaagtttgcagatgcaattgaggttgacaat

SEQ ID NO: 709768 - DNA, 33 bp, Homo sapien
attaagtttgcagatggaattgaggttgacaat

SEQ ID NO: 709769 - DNA, 33 bp, Homo sapien
ccagtcacactccttacaaatcagaggtaaaat

SEQ ID NO: 709770 - DNA, 33 bp, Homo sapien
ccagtcacactccttataaatcagaggtaaaat

SEQ ID NO: 709771 - DNA, 33 bp, Homo sapien
tgactcctttggatgcgagtgacaggaacctag

SEQ ID NO: 709772 - DNA, 33 bp, Homo sapien
tgactcctttggatgctagtgacaggaacctag

SEQ ID NO: 709773 - DNA, 33 bp, Homo sapien
acaccttattttgttgaaattcccttcattcca

SEQ ID NO: 709774 - DNA, 33 bp, Homo sapien
acaccttattttgttggaattcccttcattcca

SEQ ID NO: 709775 - DNA, 33 bp, Homo sapien
tgtttaccagatacaactcttttacttcttaca

SEQ ID NO: 709776 - DNA, 33 bp, Homo sapien
tgtttaccagatacaattcttttacttcttaca

SEQ ID NO: 709777 - DNA, 33 bp, Homo sapien
acctacctaaaatgtacggattagaatgaagta

SEQ ID NO: 709778 - DNA, 33 bp, Homo sapien
acctacctaaaatgtagggattagaatgaagta

SEQ ID NO: 709779 - DNA, 33 bp, Homo sapien
tgtactagagatacaactggcatcaaaacaaag

SEQ ID NO: 709780 - DNA, 33 bp, Homo sapien
tgtactagagatacaattggcatcaaaacaaag

SEQ ID NO: 709781 - DNA, 33 bp, Homo sapien
ctcatgagggttaatccagtgacaatgtttact

SEQ ID NO: 709782 - DNA, 33 bp, Homo sapien
ctcatgagggttaatctagtgacaatgtttact

SEQ ID NO: 709783 - DNA, 33 bp, Homo sapien
ctagatatctgagagaataagattagcaacttt

SEQ ID NO: 709784 - DNA, 33 bp, Homo sapien
ctagatatctgagagagtaagattagcaacttt

SEQ ID NO: 709785 - DNA, 33 bp, Homo sapien
attccattacatcccaatcttaaaaaaataaag

SEQ ID NO: 709786 - DNA, 33 bp, Homo sapien
attccattacatcccagtcttaaaaaaataaag

SEQ ID NO: 709787 - DNA, 33 bp, Homo sapien
catagttctgtagacactggaaaatctgaaaaa

SEQ ID NO: 709788 - DNA, 33 bp, Homo sapien
catagttctgtagacattggaaaatctgaaaaa

SEQ ID NO: 709789 - DNA, 33 bp, Homo sapien
agaccaaattgcactaaatctcccccttgaaga

SEQ ID NO: 709790 - DNA, 33 bp, Homo sapien
agaccaaattgcactacatctcccccttgaaga

SEQ ID NO: 709791 - DNA, 33 bp, Homo sapien
gacacagggagtctcaagtaaactgtactgctc

SEQ ID NO: 709792 - DNA, 33 bp, Homo sapien
gacacagggagtctcaggtaaactgtactgctc

SEQ ID NO: 709793 - DNA, 33 bp, Homo sapien
agcacaaacaaatacacagtatacagtggaact

SEQ ID NO: 709794 - DNA, 33 bp, Homo sapien
agcacaaacaaatacagagtatacagtggaact

SEQ ID NO: 709795 - DNA, 33 bp, Homo sapien
ttgccgtgcactaaggaattggtatgaatctgg

SEQ ID NO: 709796 - DNA, 33 bp, Homo sapien
ttgccgtgcactaagggattggtatgaatctgg

SEQ ID NO: 709797 - DNA, 33 bp, Homo sapien
tgaacaataatgcaagaaagtaaatccagaccc

SEQ ID NO: 709798 - DNA, 33 bp, Homo sapien
tgaacaataatgcaaggaagtaaatccagaccc

SEQ ID NO: 709799 - DNA, 33 bp, Homo sapien
ttgcagttggaagccacgaactaccagcaaaga

SEQ ID NO: 709800 - DNA, 33 bp, Homo sapien
ttgcagttggaagccatgaactaccagcaaaga

SEQ ID NO: 709801 - DNA, 33 bp, Homo sapien
acctcaagtcattatcacatggactaacaagat

SEQ ID NO: 709802 - DNA, 33 bp, Homo sapien
acctcaagtcattatcgcatggactaacaagat

SEQ ID NO: 709803 - DNA, 33 bp, Homo sapien
gaaattaaatgtatgacgctctttaagaactaa

SEQ ID NO: 709804 - DNA, 33 bp, Homo sapien
gaaattaaatgtatgatgctctttaagaactaa

SEQ ID NO: 709805 - DNA, 33 bp, Homo sapien
gaatgaaagcataaacaacttttgtagcaagta

SEQ ID NO: 709806 - DNA, 33 bp, Homo sapien
gaatgaaagcataaacgacttttgtagcaagta

SEQ ID NO: 709807 - DNA, 33 bp, Homo sapien
caagaggccattcatcaaattatgtaaatgttc

SEQ ID NO: 709808 - DNA, 33 bp, Homo sapien
caagaggccattcatcgaattatgtaaatgttc

SEQ ID NO: 709809 - DNA, 33 bp, Homo sapien
ttccacttaggtcagaagaagaaataaatgact

SEQ ID NO: 709810 - DNA, 33 bp, Homo sapien
ttccacttaggtcagaggaagaaataaatgact

SEQ ID NO: 709811 - DNA, 33 bp, Homo sapien
ccattataattcaagacgcgacaaatttatctc

SEQ ID NO: 709812 - DNA, 33 bp, Homo sapien
ccattataattcaagatgcgacaaatttatctc

SEQ ID NO: 709813 - DNA, 33 bp, Homo sapien
taatcttgctgaaatacgaaagacacaggtcag

SEQ ID NO: 709814 - DNA, 33 bp, Homo sapien
taatcttgctgaaatatgaaagacacaggtcag

SEQ ID NO: 709815 - DNA, 33 bp, Homo sapien
agatgaagtaataatagatcagggtagtcctaa

SEQ ID NO: 709816 - DNA, 33 bp, Homo sapien
agatgaagtaataatatatcagggtagtcctaa

SEQ ID NO: 709817 - DNA, 33 bp, Homo sapien
ctcctttctcacatgaccttctctctaggtctc

SEQ ID NO: 709818 - DNA, 33 bp, Homo sapien
ctcctttctcacatgatcttctctctaggtctc

SEQ ID NO: 709819 - DNA, 33 bp, Homo sapien
ataactttctagggcacccttttgatgggcttt

SEQ ID NO: 709820 - DNA, 33 bp, Homo sapien
ataactttctagggcatccttttgatgggcttt

SEQ ID NO: 709821 - DNA, 33 bp, Homo sapien
ctcactttttcctttaaggagaccctatatgat

SEQ ID NO: 709822 - DNA, 33 bp, Homo sapien
ctcactttttcctttacggagaccctatatgat

SEQ ID NO: 709823 - DNA, 33 bp, Homo sapien
tctgcaaatgagaatgcagcttgtttgacacct

SEQ ID NO: 709824 - DNA, 33 bp, Homo sapien
tctgcaaatgagaatgtagcttgtttgacacct

SEQ ID NO: 709825 - DNA, 33 bp, Homo sapien
aaaattgagggtctcaaattgcagggagaatga

SEQ ID NO: 709826 - DNA, 33 bp, Homo sapien
aaaattgagggtctcagattgcagggagaatga

SEQ ID NO: 709827 - DNA, 33 bp, Homo sapien
cctctacttccactccaaacaccgtactttaag

SEQ ID NO: 709828 - DNA, 33 bp, Homo sapien
cctctacttccactcccaacaccgtactttaag

SEQ ID NO: 709829 - DNA, 33 bp, Homo sapien
cctcatgcttggagcactaaatgaggcttcatc

SEQ ID NO: 709830 - DNA, 33 bp, Homo sapien
cctcatgcttggagcattaaatgaggcttcatc

SEQ ID NO: 709831 - DNA, 33 bp, Homo sapien
ctttgcttgtggattgaacctgatgcctgctct

SEQ ID NO: 709832 - DNA, 33 bp, Homo sapien
ctttgcttgtggattggacctgatgcctgctct

SEQ ID NO: 709833 - DNA, 33 bp, Homo sapien
catcttgcttgaatacacttttcaaaagtagct

SEQ ID NO: 709834 - DNA, 33 bp, Homo sapien
catcttgcttgaatacccttttcaaaagtagct

SEQ ID NO: 709835 - DNA, 33 bp, Homo sapien
ttgcttcatctgggccagcaatggattggtgat

SEQ ID NO: 709836 - DNA, 33 bp, Homo sapien
ttgcttcatctgggcccgcaatggattggtgat

SEQ ID NO: 709837 - DNA, 33 bp, Homo sapien
aagataagcttaaatcaaagaaagcacatcagc

SEQ ID NO: 709838 - DNA, 33 bp, Homo sapien
aagataagcttaaatcgaagaaagcacatcagc

SEQ ID NO: 709839 - DNA, 33 bp, Homo sapien
tctcctttaatccttaactaatggaaccctaaa

SEQ ID NO: 709840 - DNA, 33 bp, Homo sapien
tctcctttaatccttagctaatggaaccctaaa

SEQ ID NO: 709841 - DNA, 33 bp, Homo sapien
acttagtggtgagtaaagtcacaatcaccaatt

SEQ ID NO: 709842 - DNA, 33 bp, Homo sapien
acttagtggtgagtaaggtcacaatcaccaatt

SEQ ID NO: 709843 - DNA, 33 bp, Homo sapien
tgaggaatgacttttacgatgctacaggctgct

SEQ ID NO: 709844 - DNA, 33 bp, Homo sapien
tgaggaatgacttttatgatgctacaggctgct

SEQ ID NO: 709845 - DNA, 33 bp, Homo sapien
aatgtctacttctttaacgattctgaatacaaa

SEQ ID NO: 709846 - DNA, 33 bp, Homo sapien
aatgtctacttctttagcgattctgaatacaaa

SEQ ID NO: 709847 - DNA, 33 bp, Homo sapien
ggttgccagaaggagacattctaatgagacttt

SEQ ID NO: 709848 - DNA, 33 bp, Homo sapien
ggttgccagaaggagatattctaatgagacttt

SEQ ID NO: 709849 - DNA, 33 bp, Homo sapien
cattccattattcatcaagtccttctaaagcac

SEQ ID NO: 709850 - DNA, 33 bp, Homo sapien
cattccattattcatcgagtccttctaaagcac

SEQ ID NO: 709851 - DNA, 33 bp, Homo sapien
aggaacatctgttttaacattccttgtgcttga

SEQ ID NO: 709852 - DNA, 33 bp, Homo sapien
aggaacatctgttttaccattccttgtgcttga

SEQ ID NO: 709853 - DNA, 33 bp, Homo sapien
ggcctgatctagacaacgtactcagtgcacatc

SEQ ID NO: 709854 - DNA, 33 bp, Homo sapien
ggcctgatctagacaatgtactcagtgcacatc

SEQ ID NO: 709855 - DNA, 33 bp, Homo sapien
aatacacgattactcccccatttcagttaagaa

SEQ ID NO: 709856 - DNA, 33 bp, Homo sapien
aatacacgattactcctccatttcagttaagaa

SEQ ID NO: 709857 - DNA, 33 bp, Homo sapien
tgtgggcaagtacgtaactctgtgaggtcaatt

SEQ ID NO: 709858 - DNA, 33 bp, Homo sapien
tgtgggcaagtacgtatctctgtgaggtcaatt

SEQ ID NO: 709859 - DNA, 33 bp, Homo sapien
gttttgatttgggcatcacacattggacaataa

SEQ ID NO: 709860 - DNA, 33 bp, Homo sapien
gttttgatttgggcattacacattggacaataa

SEQ ID NO: 709861 - DNA, 33 bp, Homo sapien
gtttaatttggaacacaagaccaacagtatttt

SEQ ID NO: 709862 - DNA, 33 bp, Homo sapien
gtttaatttggaacacgagaccaacagtatttt

SEQ ID NO: 709863 - DNA, 33 bp, Homo sapien
atttaagggctgctaaaacacaattatgatcaa

SEQ ID NO: 709864 - DNA, 33 bp, Homo sapien
atttaagggctgctaagacacaattatgatcaa

SEQ ID NO: 709865 - DNA, 33 bp, Homo sapien
ttcagaacgttagatgacaaaggtgtatgttca

SEQ ID NO: 709866 - DNA, 33 bp, Homo sapien
ttcagaacgttagatgtcaaaggtgtatgttca

SEQ ID NO: 709867 - DNA, 33 bp, Homo sapien
gaacttgaactttaaggctgtgcagatataata

SEQ ID NO: 709868 - DNA, 33 bp, Homo sapien
gaacttgaactttaagtctgtgcagatataata

SEQ ID NO: 709869 - DNA, 33 bp, Homo sapien
ttgtctctttatatccagaaaataaggcctttg

SEQ ID NO: 709870 - DNA, 33 bp, Homo sapien
ttgtctctttatatccggaaaataaggcctttg

SEQ ID NO: 709871 - DNA, 33 bp, Homo sapien
gtaccaaagcgtacacaaaaggcaagcagcata

SEQ ID NO: 709872 - DNA, 33 bp, Homo sapien
gtaccaaagcgtacacgaaaggcaagcagcata

SEQ ID NO: 709873 - DNA, 33 bp, Homo sapien
gtcttttcctgggtataaggtgtactcctgggt

SEQ ID NO: 709874 - DNA, 33 bp, Homo sapien
gtcttttcctgggtatcaggtgtactcctgggt

SEQ ID NO: 709875 - DNA, 33 bp, Homo sapien
aatatgtataggtacactatttagcaacatgaa

SEQ ID NO: 709876 - DNA, 33 bp, Homo sapien
aatatgtataggtacattatttagcaacatgaa

SEQ ID NO: 709877 - DNA, 33 bp, Homo sapien
taaggtgaatagcaaactccatttttattgacc

SEQ ID NO: 709878 - DNA, 33 bp, Homo sapien
taaggtgaatagcaaagtccatttttattgacc

SEQ ID NO: 709879 - DNA, 33 bp, Homo sapien
tctttttctaaccaggaactttccaagcaggtg

SEQ ID NO: 709880 - DNA, 33 bp, Homo sapien
tctttttctaaccaggtactttccaagcaggtg

SEQ ID NO: 709881 - DNA, 33 bp, Homo sapien
gagagatgctacaagacaccttgcttgtagcat

SEQ ID NO: 709882 - DNA, 33 bp, Homo sapien
gagagatgctacaagataccttgcttgtagcat

SEQ ID NO: 709883 - DNA, 33 bp, Homo sapien
tcttttttgtgataaccgtgaataagagttcat

SEQ ID NO: 709884 - DNA, 33 bp, Homo sapien
tcttttttgtgataactgtgaataagagttcat

SEQ ID NO: 709885 - DNA, 33 bp, Homo sapien; identical to SEQ ID NO: 709883

SEQ ID NO: 709886 - DNA, 33 bp, Homo sapien; identical to SEQ ID NO: 709884

SEQ ID NO: 709887 - DNA, 33 bp, Homo sapien
ccttaattatggaaagaaagaatctgcttcctt

SEQ ID NO: 709888 - DNA, 33 bp, Homo sapien
ccttaattatggaaaggaagaatctgcttcctt

SEQ ID NO: 709889 - DNA, 33 bp, Homo sapien
caaagtgtgttgatctcagactagaaaggaacc

SEQ ID NO: 709890 - DNA, 33 bp, Homo sapien
caaagtgtgttgatcttagactagaaaggaacc

SEQ ID NO: 709891 - DNA, 33 bp, Homo sapien
ctatgttactgcttaacagacaaagcaagtttt

SEQ ID NO: 709892 - DNA, 33 bp, Homo sapien
ctatgttactgcttaatagacaaagcaagtttt

SEQ ID NO: 709893 - DNA, 33 bp, Homo sapien
ttattaagctccaacagctataggaaaaatata

SEQ ID NO: 709894 - DNA, 33 bp, Homo sapien
ttattaagctccaacatctataggaaaaatata

SEQ ID NO: 709895 - DNA, 33 bp, Homo sapien
cactgatacatttctaaggacctactgagacat

SEQ ID NO: 709896 - DNA, 33 bp, Homo sapien
cactgatacatttctagggacctactgagacat

SEQ ID NO: 709897 - DNA, 33 bp, Homo sapien
tactatgggtctggaaataaatatgcattaaca

SEQ ID NO: 709898 - DNA, 33 bp, Homo sapien
tactatgggtctggaagtaaatatgcattaaca

SEQ ID NO: 709899 - DNA, 33 bp, Homo sapien
catatatctatcattcaccattctccataggat

SEQ ID NO: 709900 - DNA, 33 bp, Homo sapien
catatatctatcattcgccattctccataggat

SEQ ID NO: 709901 - DNA, 33 bp, Homo sapien
tctaagaatgattttaaaataacagctggcaat

SEQ ID NO: 709902 - DNA, 33 bp, Homo sapien
tctaagaatgattttacaataacagctggcaat

SEQ ID NO: 709903 - DNA, 33 bp, Homo sapien
ttttaagagcccattacgagccaactacgtgtt

SEQ ID NO: 709904 - DNA, 33 bp, Homo sapien
ttttaagagcccattaggagccaactacgtgtt

SEQ ID NO: 709905 - DNA, 33 bp, Homo sapien
aggtgaatggtaataaagttttccacaagttga

SEQ ID NO: 709906 - DNA, 33 bp, Homo sapien
aggtgaatggtaataatgttttccacaagttga

SEQ ID NO: 709907 - DNA, 33 bp, Homo sapien
gacataaaggtctaacaccatcaaagaacacct

SEQ ID NO: 709908 - DNA, 33 bp, Homo sapien
gacataaaggtctaacgccatcaaagaacacct

SEQ ID NO: 709909 - DNA, 33 bp, Homo sapien
gcaagaaacaaaagtacgtatgccaatgtgtga

SEQ ID NO: 709910 - DNA, 33 bp, Homo sapien
gcaagaaacaaaagtatgtatgccaatgtgtga

SEQ ID NO: 709911 - DNA, 33 bp, Homo sapien
gggctacaacatagaacgatacagacttggttc

SEQ ID NO: 709912 - DNA, 33 bp, Homo sapien
gggctacaacatagaatgatacagacttggttc

SEQ ID NO: 709913 - DNA, 33 bp, Homo sapien
tgtatatcttctaacaatagcaagtaagaaagg

SEQ ID NO: 709914 - DNA, 33 bp, Homo sapien
tgtatatcttctaacagtagcaagtaagaaagg

SEQ ID NO: 709915 - DNA, 33 bp, Homo sapien
gctgtagcaggttattcaactactctacatctg

SEQ ID NO: 709916 - DNA, 33 bp, Homo sapien
gctgtagcaggttatttaactactctacatctg

SEQ ID NO: 709917 - DNA, 33 bp, Homo sapien
agtttaggagctaagaataaccttagataacta

SEQ ID NO: 709918 - DNA, 33 bp, Homo sapien
agtttaggagctaagagtaaccttagataacta

SEQ ID NO: 709919 - DNA, 33 bp, Homo sapien
ttcccagtgaaaaagtcaaccacaaaggttaca

SEQ ID NO: 709920 - DNA, 33 bp, Homo sapien
ttcccagtgaaaaagtgaaccacaaaggttaca

SEQ ID NO: 709921 - DNA, 33 bp, Homo sapien
tcaaaaacagaagggcgaatgttcaggaagtga

SEQ ID NO: 709922 - DNA, 33 bp, Homo sapien
tcaaaaacagaagggctaatgttcaggaagtga

SEQ ID NO: 709923 - DNA, 33 bp, Homo sapien
agcatgagtactgacaatcaaaacagatgctag

SEQ ID NO: 709924 - DNA, 33 bp, Homo sapien
agcatgagtactgacactcaaaacagatgctag

SEQ ID NO: 709925 - DNA, 33 bp, Homo sapien
cagagatgtataatataaagagccttcgtgaac

SEQ ID NO: 709926 - DNA, 33 bp, Homo sapien
cagagatgtataatatgaagagccttcgtgaac

SEQ ID NO: 709927 - DNA, 33 bp, Homo sapien
gttcctgcctggtttaaagaggaaatcagtgga

SEQ ID NO: 709928 - DNA, 33 bp, Homo sapien
gttcctgcctggtttatagaggaaatcagtgga

SEQ ID NO: 709929 - DNA, 33 bp, Homo sapien
gtttcctttcactacactgcaagttccttatgg

SEQ ID NO: 709930 - DNA, 33 bp, Homo sapien
gtttcctttcactacattgcaagttccttatgg

SEQ ID NO: 709931 - DNA, 33 bp, Homo sapien
tgcactctctcaacaaaacagaattggtatatt

SEQ ID NO: 709932 - DNA, 33 bp, Homo sapien
tgcactctctcaacaagacagaattggtatatt

SEQ ID NO: 709933 - DNA, 33 bp, Homo sapien
ttgcattggctattgaagttcctttttgattcc

SEQ ID NO: 709934 - DNA, 33 bp, Homo sapien
ttgcattggctattgaggttcctttttgattcc

SEQ ID NO: 709935 - DNA, 33 bp, Homo sapien
tgcaaatcggaaccacaatgaaatgtcatctca

SEQ ID NO: 709936 - DNA, 33 bp, Homo sapien
tgcaaatcggaaccaccatgaaatgtcatctca

SEQ ID NO: 709937 - DNA, 33 bp, Homo sapien
gctttcacattactagcacaactggaagtatat

SEQ ID NO: 709938 - DNA, 33 bp, Homo sapien
gctttcacattactaggacaactggaagtatat

SEQ ID NO: 709939 - DNA, 33 bp, Homo sapien
ttttctggccttgttagaaattcacctattcat

SEQ ID NO: 709940 - DNA, 33 bp, Homo sapien
ttttctggccttgttataaattcacctattcat

SEQ ID NO: 709941 - DNA, 33 bp, Homo sapien
aagaattgttcttatccagggaaacattgcaaa

SEQ ID NO: 709942 - DNA, 33 bp, Homo sapien
aagaattgttcttatcgagggaaacattgcaaa

SEQ ID NO: 709943 - DNA, 33 bp, Homo sapien
ggtctccagagcaaaaaacagggaagaattgtt

SEQ ID NO: 709944 - DNA, 33 bp, Homo sapien
ggtctccagagcaaaagacagggaagaattgtt

SEQ ID NO: 709945 - DNA, 33 bp, Homo sapien
ttgagcaaaggaatgacatgatacaacttacat

SEQ ID NO: 709946 - DNA, 33 bp, Homo sapien
ttgagcaaaggaatgatatgatacaacttacat

SEQ ID NO: 709947 - DNA, 33 bp, Homo sapien
caacctacaaggctaccgatatattgacaggtt

SEQ ID NO: 709948 - DNA, 33 bp, Homo sapien
caacctacaaggctactgatatattgacaggtt

SEQ ID NO: 709949 - DNA, 33 bp, Homo sapien
gaagacttccccagataagattctaaggaaatg

SEQ ID NO: 709950 - DNA, 33 bp, Homo sapien
gaagacttccccagatgagattctaaggaaatg

SEQ ID NO: 709951 - DNA, 33 bp, Homo sapien
agcacctggcaagcacactttattctccctcct

SEQ ID NO: 709952 - DNA, 33 bp, Homo sapien
agcacctggcaagcacgctttattctccctcct

SEQ ID NO: 709953 - DNA, 33 bp, Homo sapien
cctggactctgtagaaagacagtggactatgga

SEQ ID NO: 709954 - DNA, 33 bp, Homo sapien
cctggactctgtagaaggacagtggactatgga

SEQ ID NO: 709955 - DNA, 33 bp, Homo sapien
acttcatctggaagaaatggaaaatcagtgata

SEQ ID NO: 709956 - DNA, 33 bp, Homo sapien
acttcatctggaagaactggaaaatcagtgata

SEQ ID NO: 709957 - DNA, 33 bp, Homo sapien
tctacaagttttaaacccaaatccagtcttttc

SEQ ID NO: 709958 - DNA, 33 bp, Homo sapien
tctacaagttttaaactcaaatccagtcttttc

SEQ ID NO: 709959 - DNA, 33 bp, Homo sapien
agcagcccagaagaaactcacagataggaaatg

SEQ ID NO: 709960 - DNA, 33 bp, Homo sapien
agcagcccagaagaaagtcacagataggaaatg

SEQ ID NO: 709961 - DNA, 33 bp, Homo sapien
agcagggaaagggtgacgatggagagttgttcc

SEQ ID NO: 709962 - DNA, 33 bp, Homo sapien
agcagggaaagggtgatgatggagagttgttcc

SEQ ID NO: 709963 - DNA, 33 bp, Homo sapien
gtgactgtcctcattacgcacagctctggagaa

SEQ ID NO: 709964 - DNA, 33 bp, Homo sapien
gtgactgtcctcattatgcacagctctggagaa

SEQ ID NO: 709965 - DNA, 33 bp, Homo sapien
atgccccatttgagaacgcaataaacctataca

SEQ ID NO: 709966 - DNA, 33 bp, Homo sapien
atgccccatttgagaatgcaataaacctataca

SEQ ID NO: 709967 - DNA, 33 bp, Homo sapien
gttaggtgaatggtcaaacctgtattaactaat

SEQ ID NO: 709968 - DNA, 33 bp, Homo sapien
gttaggtgaatggtcatacctgtattaactaat

SEQ ID NO: 709969 - DNA, 33 bp, Homo sapien
taggaagtcatgtaaaaacactttccaccattt

SEQ ID NO: 709970 - DNA, 33 bp, Homo sapien
taggaagtcatgtaaacacactttccaccattt

SEQ ID NO: 709971 - DNA, 33 bp, Homo sapien
taagcatttctccaataaaaaaggcctctataa

SEQ ID NO: 709972 - DNA, 33 bp, Homo sapien
taagcatttctccaattaaaaaggcctctataa

SEQ ID NO: 709973 - DNA, 33 bp, Homo sapien
agtggaaattttacaggccaggtgaaagtggca

SEQ ID NO: 709974 - DNA, 33 bp, Homo sapien
agtggaaattttacagtccaggtgaaagtggca

SEQ ID NO: 709975 - DNA, 33 bp, Homo sapien
atatgacctttcagacagagaatacagaattgc

SEQ ID NO: 709976 - DNA, 33 bp, Homo sapien
atatgacctttcagactgagaatacagaattgc

SEQ ID NO: 709977 - DNA, 33 bp, Homo sapien
cccccatcagacataccggtgtgggtgaagtaa

SEQ ID NO: 709978 - DNA, 33 bp, Homo sapien
cccccatcagacatactggtgtgggtgaagtaa

SEQ ID NO: 709979 - DNA, 33 bp, Homo sapien
ttacagaataaaaaaaactatctcaatcctgac

SEQ ID NO: 709980 - DNA, 33 bp, Homo sapien
ttacagaataaaaaaagctatctcaatcctgac

SEQ ID NO: 709981 - DNA, 33 bp, Homo sapien
ttagtcagcaggtaacagatcctgccaggacta

SEQ ID NO: 709982 - DNA, 33 bp, Homo sapien
ttagtcagcaggtaacggatcctgccaggacta

SEQ ID NO: 709983 - DNA, 33 bp, Homo sapien
cctcagtatttatcctcacttcccagaaatgca

SEQ ID NO: 709984 - DNA, 33 bp, Homo sapien
cctcagtatttatccttacttcccagaaatgca

SEQ ID NO: 709985 - DNA, 33 bp, Homo sapien
taggaggacttgagaaactgttgttgctgctta

SEQ ID NO: 709986 - DNA, 33 bp, Homo sapien
taggaggacttgagaacctgttgttgctgctta

SEQ ID NO: 709987 - DNA, 33 bp, Homo sapien
tttatggacttgccaggaactagatgaagtttg

SEQ ID NO: 709988 - DNA, 33 bp, Homo sapien
tttatggacttgccagtaactagatgaagtttg

SEQ ID NO: 709989 - DNA, 33 bp, Homo sapien
caaagtgaaattaaaaacgttgccagtttaagg

SEQ ID NO: 709990 - DNA, 33 bp, Homo sapien
caaagtgaaattaaaaccgttgccagtttaagg

SEQ ID NO: 709991 - DNA, 33 bp, Homo sapien
tttcaatgaactctacaatcttagggaaacaaa

SEQ ID NO: 709992 - DNA, 33 bp, Homo sapien
tttcaatgaactctacgatcttagggaaacaaa

SEQ ID NO: 709993 - DNA, 33 bp, Homo sapien
atacaaatcctagctagaaaggaaatagtggta

SEQ ID NO: 709994 - DNA, 33 bp, Homo sapien
atacaaatcctagctataaaggaaatagtggta

SEQ ID NO: 709995 - DNA, 33 bp, Homo sapien
ctcaagactcaaacccaggagagaggataacaa

SEQ ID NO: 709996 - DNA, 33 bp, Homo sapien
ctcaagactcaaacccgggagagaggataacaa

SEQ ID NO: 709997 - DNA, 33 bp, Homo sapien
gaatactgtacatttaaacctcattagcttacc

SEQ ID NO: 709998 - DNA, 33 bp, Homo sapien
gaatactgtacatttagacctcattagcttacc

SEQ ID NO: 709999 - DNA, 33 bp, Homo sapien
attatattagaaaactaagaggtcaacagttcc

SEQ ID NO: 710000 - DNA, 33 bp, Homo sapien
attatattagaaaactgagaggtcaacagttcc

SEQ ID NO: 710001 - DNA, 33 bp, Homo sapien
tgataatgaaaggctcgcagacacaataagaaa

SEQ ID NO: 710002 - DNA, 33 bp, Homo sapien
tgataatgaaaggctctcagacacaataagaaa

SEQ ID NO: 710003 - DNA, 33 bp, Homo sapien
tttgtagatttcattacaagaggtctcaaatcc

SEQ ID NO: 710004 - DNA, 33 bp, Homo sapien
tttgtagatttcattataagaggtctcaaatcc

SEQ ID NO: 710005 - DNA, 33 bp, Homo sapien
gagaaactgttctttacgagacttgaaaaaatc

SEQ ID NO: 710006 - DNA, 33 bp, Homo sapien
gagaaactgttctttatgagacttgaaaaaatc

SEQ ID NO: 710007 - DNA, 33 bp, Homo sapien
ccaaatgctctggccacgttaggtttgcccttc

SEQ ID NO: 710008 - DNA, 33 bp, Homo sapien
ccaaatgctctggccatgttaggtttgcccttc

SEQ ID NO: 710009 - DNA, 33 bp, Homo sapien
tgtctgtgcccaaatcacttttcaggcactcag

SEQ ID NO: 710010 - DNA, 33 bp, Homo sapien
tgtctgtgcccaaatcgcttttcaggcactcag

SEQ ID NO: 710011 - DNA, 33 bp, Homo sapien
tgtaaatgtgcatccaagctgatatttggtcca

SEQ ID NO: 710012 - DNA, 33 bp, Homo sapien
tgtaaatgtgcatccaggctgatatttggtcca

SEQ ID NO: 710013 - DNA, 33 bp, Homo sapien
tcatctctcctggcacagctccaaccacactca

SEQ ID NO: 710014 - DNA, 33 bp, Homo sapien
tcatctctcctggcacggctccaaccacactca

SEQ ID NO: 710015 - DNA, 33 bp, Homo sapien
aaggtgacattggagccaagacttgaaggagat

SEQ ID NO: 710016 - DNA, 33 bp, Homo sapien
aaggtgacattggagcgaagacttgaaggagat

SEQ ID NO: 710017 - DNA, 33 bp, Homo sapien
agcagagaaatggacacgcatggtgaatctggc

SEQ ID NO: 710018 - DNA, 33 bp, Homo sapien
agcagagaaatggacatgcatggtgaatctggc

SEQ ID NO: 710019 - DNA, 33 bp, Homo sapien
aggctgtggatccatgcatctttgcactcttgg

SEQ ID NO: 710020 - DNA, 33 bp, Homo sapien
aggctgtggatccatgtatctttgcactcttgg

SEQ ID NO: 710021 - DNA, 33 bp, Homo sapien
gacaagggaaagttccaagaagagtgatacctc

SEQ ID NO: 710022 - DNA, 33 bp, Homo sapien
gacaagggaaagttcccagaagagtgatacctc

SEQ ID NO: 710023 - DNA, 33 bp, Homo sapien
ggatattgagagttcaatcccagaccaccacaa

SEQ ID NO: 710024 - DNA, 33 bp, Homo sapien
ggatattgagagttcattcccagaccaccacaa

SEQ ID NO: 710025 - DNA, 33 bp, Homo sapien
ccacttcatccctgaagataccttttggagcta

SEQ ID NO: 710026 - DNA, 33 bp, Homo sapien
ccacttcatccctgaatataccttttggagcta

SEQ ID NO: 710027 - DNA, 33 bp, Homo sapien
tatgtctccaggagaaagtctcaattaggatct

SEQ ID NO: 710028 - DNA, 33 bp, Homo sapien
tatgtctccaggagaaggtctcaattaggatct

SEQ ID NO: 710029 - DNA, 33 bp, Homo sapien
taatcagaactgcatcaaagatgagcatctgaa

SEQ ID NO: 710030 - DNA, 33 bp, Homo sapien
taatcagaactgcatcgaagatgagcatctgaa

SEQ ID NO: 710031 - DNA, 33 bp, Homo sapien
atgccctcatctaaacacatctgagtaatttgt

SEQ ID NO: 710032 - DNA, 33 bp, Homo sapien
atgccctcatctaaacgcatctgagtaatttgt

SEQ ID NO: 710033 - DNA, 33 bp, Homo sapien
taaatcagcaccattaaaaaaatcttgaaaaat

SEQ ID NO: 710034 - DNA, 33 bp, Homo sapien
taaatcagcaccattacaaaaatcttgaaaaat

SEQ ID NO: 710035 - DNA, 33 bp, Homo sapien
atcctttgggtatgaacgttagaaacaagataa

SEQ ID NO: 710036 - DNA, 33 bp, Homo sapien
atcctttgggtatgaatgttagaaacaagataa

SEQ ID NO: 710037 - DNA, 33 bp, Homo sapien
cttgaagaaatgttcacgtattccagactaata

SEQ ID NO: 710038 - DNA, 33 bp, Homo sapien
cttgaagaaatgttcatgtattccagactaata

SEQ ID NO: 710039 - DNA, 33 bp, Homo sapien
agtttgggttagagcactatacttttttttttg

SEQ ID NO: 710040 - DNA, 33 bp, Homo sapien
agtttgggttagagcattatacttttttttttg

SEQ ID NO: 710041 - DNA, 33 bp, Homo sapien
aagtttgagtgacacaacatttaaaatgacagt

SEQ ID NO: 710042 - DNA, 33 bp, Homo sapien
aagtttgagtgacacagcatttaaaatgacagt

SEQ ID NO: 710043 - DNA, 33 bp, Homo sapien
ggctttgcgtatccaactgaagacgaaaatgct

SEQ ID NO: 710044 - DNA, 33 bp, Homo sapien
ggctttgcgtatccaattgaagacgaaaatgct

SEQ ID NO: 710045 - DNA, 33 bp, Homo sapien; identical to SEQ ID NO: 710043

SEQ ID NO: 710046 - DNA, 33 bp, Homo sapien; identical to SEQ ID NO: 710044

SEQ ID NO: 710047 - DNA, 33 bp, Homo sapien
tgactgctgatggctacgggacagattctctgt

SEQ ID NO: 710048 - DNA, 33 bp, Homo sapien
tgactgctgatggctatgggacagattctctgt

SEQ ID NO: 710049 - DNA, 33 bp, Homo sapien; identical to SEQ ID NO: 710047

SEQ ID NO: 710050 - DNA, 33 bp, Homo sapien; identical to SEQ ID NO: 710048

SEQ ID NO: 710051 - DNA, 33 bp, Homo sapien; identical to SEQ ID NO: 710047

SEQ ID NO: 710052 - DNA, 33 bp, Homo sapien; identical to SEQ ID NO: 710048

SEQ ID NO: 710053 - DNA, 33 bp, Homo sapien
atgcacatatggaggacggtcctgtggagaatt

SEQ ID NO: 710054 - DNA, 33 bp, Homo sapien
atgcacatatggaggatggtcctgtggagaatt

SEQ ID NO: 710055 - DNA, 33 bp, Homo sapien; identical to SEQ ID NO: 710053

SEQ ID NO: 710056 - DNA, 33 bp, Homo sapien; identical to SEQ ID NO: 710054

SEQ ID NO: 710057 - DNA, 33 bp, Homo sapien
gagttccataataaaacggacatggtttataga

SEQ ID NO: 710058 - DNA, 33 bp, Homo sapien
gagttccataataaaatggacatggtttataga

SEQ ID NO: 710059 - DNA, 33 bp, Homo sapien
acaatgttcaaatacaccaactttcagaagccc

SEQ ID NO: 710060 - DNA, 33 bp, Homo sapien
acaatgttcaaatacatcaactttcagaagccc

SEQ ID NO: 710061 - DNA, 33 bp, Homo sapien
tcttaataaccgtctaaagatttccaccctgct

SEQ ID NO: 710062 - DNA, 33 bp, Homo sapien
tcttaataaccgtctagagatttccaccctgct

SEQ ID NO: 710063 - DNA, 33 bp, Homo sapien
ccacatggcttacataaaaaacatatcaactgc

SEQ ID NO: 710064 - DNA, 33 bp, Homo sapien
ccacatggcttacatacaaaacatatcaactgc

SEQ ID NO: 710065 - DNA, 33 bp, Homo sapien
ttaaagaagctaaaaaatgtctaagtttatcca

SEQ ID NO: 710066 - DNA, 33 bp, Homo sapien
ttaaagaagctaaaaagtgtctaagtttatcca

SEQ ID NO: 710067 - DNA, 33 bp, Homo sapien
ttgccaaatcctggagacaaggttgtccttatg

SEQ ID NO: 710068 - DNA, 33 bp, Homo sapien
ttgccaaatcctggaggcaaggttgtccttatg

SEQ ID NO: 710069 - DNA, 33 bp, Homo sapien
gaactaaattgcaaacaccaagaactaaaatgt

SEQ ID NO: 710070 - DNA, 33 bp, Homo sapien
gaactaaattgcaaactccaagaactaaaatgt

SEQ ID NO: 710071 - DNA, 33 bp, Homo sapien
gctatcaccaatgataacaaacgcatccattct

SEQ ID NO: 710072 - DNA, 33 bp, Homo sapien
gctatcaccaatgataccaaacgcatccattct

SEQ ID NO: 710073 - DNA, 33 bp, Homo sapien
atggcactttctggaaaatttaaggcggttatt

SEQ ID NO: 710074 - DNA, 33 bp, Homo sapien
atggcactttctggaagatttaaggcggttatt

SEQ ID NO: 710075 - DNA, 33 bp, Homo sapien
ttatttggtttcaaaaagcctgcacttaatttt

SEQ ID NO: 710076 - DNA, 33 bp, Homo sapien
ttatttggtttcaaaaggcctgcacttaatttt

SEQ ID NO: 710077 - DNA, 33 bp, Homo sapien
gacaccaggtgctttacatttggtgaaaagacc

SEQ ID NO: 710078 - DNA, 33 bp, Homo sapien
gacaccaggtgctttatatttggtgaaaagacc

SEQ ID NO: 710079 - DNA, 33 bp, Homo sapien
agagaaggagtccataagaaaaagtcattacaa

SEQ ID NO: 710080 - DNA, 33 bp, Homo sapien
agagaaggagtccatatgaaaaagtcattacaa

SEQ ID NO: 710081 - DNA, 33 bp, Homo sapien
cttcaatgaaagagcactatgcaattttaaaca

SEQ ID NO: 710082 - DNA, 33 bp, Homo sapien
cttcaatgaaagagcagtatgcaattttaaaca

SEQ ID NO: 710083 - DNA, 33 bp, Homo sapien
gtatatctcttcacaaattattgtagttgtagg

SEQ ID NO: 710084 - DNA, 33 bp, Homo sapien
gtatatctcttcacaagttattgtagttgtagg

SEQ ID NO: 710085 - DNA, 33 bp, Homo sapien
aagacacgtaagacacaatccatgccttcaggg

SEQ ID NO: 710086 - DNA, 33 bp, Homo sapien
aagacacgtaagacacgatccatgccttcaggg

SEQ ID NO: 710087 - DNA, 33 bp, Homo sapien
atgcacgagtaacttccattagagagcagctta

SEQ ID NO: 710088 - DNA, 33 bp, Homo sapien
atgcacgagtaacttctattagagagcagctta

SEQ ID NO: 710089 - DNA, 33 bp, Homo sapien
aggaaattatctattgcaatggctataaatttt

SEQ ID NO: 710090 - DNA, 33 bp, Homo sapien
aggaaattatctattgtaatggctataaatttt

SEQ ID NO: 710091 - DNA, 33 bp, Homo sapien
tgctgtgtatttgcagaatgtatacagtatgcc

SEQ ID NO: 710092 - DNA, 33 bp, Homo sapien
tgctgtgtatttgcagtatgtatacagtatgcc

SEQ ID NO: 710093 - DNA, 33 bp, Homo sapien
tacctctgtaatttcacgtgcagtttcaagcta

SEQ ID NO: 710094 - DNA, 33 bp, Homo sapien
tacctctgtaatttcatgtgcagtttcaagcta

SEQ ID NO: 710095 - DNA, 33 bp, Homo sapien
tgacaagagaacatcacatatggtaagcaagcc

SEQ ID NO: 710096 - DNA, 33 bp, Homo sapien
tgacaagagaacatcatatatggtaagcaagcc

SEQ ID NO: 710097 - DNA, 33 bp, Homo sapien
tcaagacattgccttaacacccattactaattg

SEQ ID NO: 710098 - DNA, 33 bp, Homo sapien
tcaagacattgccttagcacccattactaattg

SEQ ID NO: 710099 - DNA, 33 bp, Homo sapien
aaataaccctcctacactgatatatttacatct

SEQ ID NO: 710100 - DNA, 33 bp, Homo sapien
aaataaccctcctacattgatatatttacatct

SEQ ID NO: 710101 - DNA, 33 bp, Homo sapien
ataaaaatggcttttacctatcaaacacatatg

SEQ ID NO: 710102 - DNA, 33 bp, Homo sapien
ataaaaatggcttttatctatcaaacacatatg

SEQ ID NO: 710103 - DNA, 33 bp, Homo sapien
agccaggccatgagtccataaccagtcttcatt

SEQ ID NO: 710104 - DNA, 33 bp, Homo sapien
agccaggccatgagtctataaccagtcttcatt

SEQ ID NO: 710105 - DNA, 33 bp, Homo sapien
aaacactctaccaaaagaactctatgaatagcc

SEQ ID NO: 710106 - DNA, 33 bp, Homo sapien
aaacactctaccaaaataactctatgaatagcc

SEQ ID NO: 710107 - DNA, 33 bp, Homo sapien
agatttggagtgggcacgaattagtcttactct

SEQ ID NO: 710108 - DNA, 33 bp, Homo sapien
agatttggagtgggcatgaattagtcttactct

SEQ ID NO: 710109 - DNA, 33 bp, Homo sapien
attcttgggtctaaggaagcaaacaggtaatta

SEQ ID NO: 710110 - DNA, 33 bp, Homo sapien
attcttgggtctaaggcagcaaacaggtaatta

SEQ ID NO: 710111 - DNA, 33 bp, Homo sapien
atttggtatctggtaaacatccttatattcgga

SEQ ID NO: 710112 - DNA, 33 bp, Homo sapien
atttggtatctggtaagcatccttatattcgga

SEQ ID NO: 710113 - DNA, 33 bp, Homo sapien
gaccagaatgtagagccatcccagattccgaat

SEQ ID NO: 710114 - DNA, 33 bp, Homo sapien
gaccagaatgtagagctatcccagattccgaat

SEQ ID NO: 710115 - DNA, 33 bp, Homo sapien
ataatggattataagaaagtatttgcaagcctc

SEQ ID NO: 710116 - DNA, 33 bp, Homo sapien
ataatggattataagatagtatttgcaagcctc

SEQ ID NO: 710117 - DNA, 33 bp, Homo sapien
aatttcatgacgatgaagatgagttaggactat

SEQ ID NO: 710118 - DNA, 33 bp, Homo sapien
aatttcatgacgatgaggatgagttaggactat

SEQ ID NO: 710119 - DNA, 33 bp, Homo sapien
tcactttaacaatataaccgggcaagtcatata

SEQ ID NO: 710120 - DNA, 33 bp, Homo sapien
tcactttaacaatatatccgggcaagtcatata

SEQ ID NO: 710121 - DNA, 33 bp, Homo sapien
atacttctagtacaaaataggtatgtctaaatc

SEQ ID NO: 710122 - DNA, 33 bp, Homo sapien
atacttctagtacaaagtaggtatgtctaaatc

SEQ ID NO: 710123 - DNA, 33 bp, Homo sapien
tgcaactgagcaagagaaaactgtacctggaga

SEQ ID NO: 710124 - DNA, 33 bp, Homo sapien
tgcaactgagcaagaggaaactgtacctggaga

SEQ ID NO: 710125 - DNA, 33 bp, Homo sapien
gattggagtaattggccatatttgggtttagaa

SEQ ID NO: 710126 - DNA, 33 bp, Homo sapien
gattggagtaattggctatatttgggtttagaa

SEQ ID NO: 710127 - DNA, 33 bp, Homo sapien
agcagttagtcttttacaggtattggaacacct

SEQ ID NO: 710128 - DNA, 33 bp, Homo sapien
agcagttagtcttttagaggtattggaacacct

SEQ ID NO: 710129 - DNA, 33 bp, Homo sapien
taggtggctgctaaaacgtagaaaccattaaat

SEQ ID NO: 710130 - DNA, 33 bp, Homo sapien
taggtggctgctaaaatgtagaaaccattaaat

SEQ ID NO: 710131 - DNA, 33 bp, Homo sapien
atatatgggaaagaacaagaaataggatgtagt

SEQ ID NO: 710132 - DNA, 33 bp, Homo sapien
atatatgggaaagaacgagaaataggatgtagt

SEQ ID NO: 710133 - DNA, 33 bp, Homo sapien
cgtttttaaatatgcaactggtgacattctttc

SEQ ID NO: 710134 - DNA, 33 bp, Homo sapien
cgtttttaaatatgcatctggtgacattctttc

SEQ ID NO: 710135 - DNA, 33 bp, Homo sapien
aagtttatcctagacactctccacacatcttct

SEQ ID NO: 710136 - DNA, 33 bp, Homo sapien
aagtttatcctagacattctccacacatcttct

SEQ ID NO: 710137 - DNA, 33 bp, Homo sapien
tcactaacaataccacccaattcaattcacaat

SEQ ID NO: 710138 - DNA, 33 bp, Homo sapien
tcactaacaataccactcaattcaattcacaat

SEQ ID NO: 710139 - DNA, 33 bp, Homo sapien
cttcccagactatttaccttatcacagcaacac

SEQ ID NO: 710140 - DNA, 33 bp, Homo sapien
cttcccagactatttatcttatcacagcaacac

SEQ ID NO: 710141 - DNA, 33 bp, Homo sapien
ttgcctgagactgactcagcaaattctgccagt

SEQ ID NO: 710142 - DNA, 33 bp, Homo sapien
ttgcctgagactgacttagcaaattctgccagt

SEQ ID NO: 710143 - DNA, 33 bp, Homo sapien
gttggtgttcagaaaccagggctcttcaagatt

SEQ ID NO: 710144 - DNA, 33 bp, Homo sapien
gttggtgttcagaaactagggctcttcaagatt

SEQ ID NO: 710145 - DNA, 33 bp, Homo sapien
taagtgaaagcaaacaatattaggttttctata

SEQ ID NO: 710146 - DNA, 33 bp, Homo sapien
taagtgaaagcaaacagtattaggttttctata

SEQ ID NO: 710147 - DNA, 33 bp, Homo sapien
agtgagagtttaacaccgggtacacatggacac

SEQ ID NO: 710148 - DNA, 33 bp, Homo sapien
agtgagagtttaacactgggtacacatggacac

SEQ ID NO: 710149 - DNA, 33 bp, Homo sapien
atgagctaagtaccagcctaattgctccattcc

SEQ ID NO: 710150 - DNA, 33 bp, Homo sapien
atgagctaagtaccagtctaattgctccattcc

SEQ ID NO: 710151 - DNA, 33 bp, Homo sapien
atgttaacaaagcagacgatatgattagataca

SEQ ID NO: 710152 - DNA, 33 bp, Homo sapien
atgttaacaaagcagatgatatgattagataca

SEQ ID NO: 710153 - DNA, 33 bp, Homo sapien
ccaactagagaagcacaattctttgagcaagaa

SEQ ID NO: 710154 - DNA, 33 bp, Homo sapien
ccaactagagaagcaccattctttgagcaagaa

SEQ ID NO: 710155 - DNA, 33 bp, Homo sapien
gggttattagaatgacaaaatccaggggcaaaa

SEQ ID NO: 710156 - DNA, 33 bp, Homo sapien
gggttattagaatgaccaaatccaggggcaaaa

SEQ ID NO: 710157 - DNA, 33 bp, Homo sapien
gcagaatccataggcaacaaagttaagtgtgtg

SEQ ID NO: 710158 - DNA, 33 bp, Homo sapien
gcagaatccataggcagcaaagttaagtgtgtg

SEQ ID NO: 710159 - DNA, 33 bp, Homo sapien
gcgcttgcagtgcccccgacgcgatcagcgatc

SEQ ID NO: 710160 - DNA, 33 bp, Homo sapien
gcgcttgcagtgcccctgacgcgatcagcgatc

SEQ ID NO: 710161 - DNA, 33 bp, Homo sapien
cctccctgggtaacaaagcaagaacaaatccta

SEQ ID NO: 710162 - DNA, 33 bp, Homo sapien
cctccctgggtaacaaggcaagaacaaatccta

SEQ ID NO: 710163 - DNA, 33 bp, Homo sapien
ctggcagccacttcagacatcataacaccagct

SEQ ID NO: 710164 - DNA, 33 bp, Homo sapien
ctggcagccacttcaggcatcataacaccagct

SEQ ID NO: 710165 - DNA, 33 bp, Homo sapien
tcaataaagcccttataaccctcagcaagtgtg

SEQ ID NO: 710166 - DNA, 33 bp, Homo sapien
tcaataaagcccttattaccctcagcaagtgtg

SEQ ID NO: 710167 - DNA, 33 bp, Homo sapien
atgcctatataagcaaatggcaagaagtgtacc

SEQ ID NO: 710168 - DNA, 33 bp, Homo sapien
atgcctatataagcaactggcaagaagtgtacc

SEQ ID NO: 710169 - DNA, 33 bp, Homo sapien
ttatgatttcacataaaaggaagtcatgagatg

SEQ ID NO: 710170 - DNA, 33 bp, Homo sapien
ttatgatttcacataacaggaagtcatgagatg

SEQ ID NO: 710171 - DNA, 33 bp, Homo sapien
acagtctgaacagggaagcaagacatttatcaa

SEQ ID NO: 710172 - DNA, 33 bp, Homo sapien
acagtctgaacagggaggcaagacatttatcaa

SEQ ID NO: 710173 - DNA, 33 bp, Homo sapien
tgggtgcatttgattaaccaaaacccagtgatt

SEQ ID NO: 710174 - DNA, 33 bp, Homo sapien
tgggtgcatttgattagccaaaacccagtgatt

SEQ ID NO: 710175 - DNA, 33 bp, Homo sapien
ctgaccatttcaaaaccgctttatcactggctt

SEQ ID NO: 710176 - DNA, 33 bp, Homo sapien
ctgaccatttcaaaactgctttatcactggctt

SEQ ID NO: 710177 - DNA, 33 bp, Homo sapien
tctggccccagagttacgcatggtttcaagtta

SEQ ID NO: 710178 - DNA, 33 bp, Homo sapien
tctggccccagagttatgcatggtttcaagtta

SEQ ID NO: 710179 - DNA, 33 bp, Homo sapien
ttccttgcttctattccacacaacagcaagggt

SEQ ID NO: 710180 - DNA, 33 bp, Homo sapien
ttccttgcttctattctacacaacagcaagggt

SEQ ID NO: 710181 - DNA, 33 bp, Homo sapien
gtcttcactgcaactaccttattctaaacatca

SEQ ID NO: 710182 - DNA, 33 bp, Homo sapien
gtcttcactgcaactatcttattctaaacatca

SEQ ID NO: 710183 - DNA, 33 bp, Homo sapien
gaacacaaagaggcaaacaacagatattggggc

SEQ ID NO: 710184 - DNA, 33 bp, Homo sapien
gaacacaaagaggcaagcaacagatattggggc

SEQ ID NO: 710185 - DNA, 33 bp, Homo sapien
gcattcatttttgaaccaatgaaagaaatagaa

SEQ ID NO: 710186 - DNA, 33 bp, Homo sapien
gcattcatttttgaacgaatgaaagaaatagaa

SEQ ID NO: 710187 - DNA, 33 bp, Homo sapien
taatatttgacctgcaagattctgagagtacaa

SEQ ID NO: 710188 - DNA, 33 bp, Homo sapien
taatatttgacctgcaggattctgagagtacaa

SEQ ID NO: 710189 - DNA, 33 bp, Homo sapien
gcatcaagtatctgaacagggctctgaaagcca

SEQ ID NO: 710190 - DNA, 33 bp, Homo sapien
gcatcaagtatctgaatagggctctgaaagcca

SEQ ID NO: 710191 - DNA, 33 bp, Homo sapien
agaaaaacacgatttgcattatggttatgacct

SEQ ID NO: 710192 - DNA, 33 bp, Homo sapien
agaaaaacacgatttgtattatggttatgacct

SEQ ID NO: 710193 - DNA, 33 bp, Homo sapien
aaattatctcattgcacagtgtgacaactaaag

SEQ ID NO: 710194 - DNA, 33 bp, Homo sapien
aaattatctcattgcatagtgtgacaactaaag

SEQ ID NO: 710195 - DNA, 33 bp, Homo sapien
ccaaatctattttaataaaggtgcttcagggag

SEQ ID NO: 710196 - DNA, 33 bp, Homo sapien
ccaaatctattttaatgaaggtgcttcagggag

SEQ ID NO: 710197 - DNA, 33 bp, Homo sapien
tcagccaattatttaacgatggagtccacggtt

SEQ ID NO: 710198 - DNA, 33 bp, Homo sapien
tcagccaattatttaatgatggagtccacggtt

SEQ ID NO: 710199 - DNA, 33 bp, Homo sapien
gagtttgatatttctacgttgactgaggaaact

SEQ ID NO: 710200 - DNA, 33 bp, Homo sapien
gagtttgatatttctatgttgactgaggaaact

SEQ ID NO: 710201 - DNA, 33 bp, Homo sapien
cgtgttgatcattttcccctttaaagatgatgc

SEQ ID NO: 710202 - DNA, 33 bp, Homo sapien
cgtgttgatcattttcgcctttaaagatgatgc

SEQ ID NO: 710203 - DNA, 33 bp, Homo sapien
agtttatattttaaggaaagcttggactggcta

SEQ ID NO: 710204 - DNA, 33 bp, Homo sapien
agtttatattttaaggcaagcttggactggcta

SEQ ID NO: 710205 - DNA, 33 bp, Homo sapien
cttatgatacagcacactggactaaagcagtga

SEQ ID NO: 710206 - DNA, 33 bp, Homo sapien
cttatgatacagcacattggactaaagcagtga

SEQ ID NO: 710207 - DNA, 33 bp, Homo sapien
atccatcaatgtggaaggtctatgtgggttaaa

SEQ ID NO: 710208 - DNA, 33 bp, Homo sapien
atccatcaatgtggaatgtctatgtgggttaaa

SEQ ID NO: 710209 - DNA, 33 bp, Homo sapien
tctcactgtgtgtaaacatgacttccaagctgg

SEQ ID NO: 710210 - DNA, 33 bp, Homo sapien
tctcactgtgtgtaaatatgacttccaagctgg

SEQ ID NO: 710211 - DNA, 33 bp, Homo sapien
tggtctttctggtcataagtacaacaaactcac

SEQ ID NO: 710212 - DNA, 33 bp, Homo sapien
tggtctttctggtcatgagtacaacaaactcac

SEQ ID NO: 710213 - DNA, 33 bp, Homo sapien
catttagaattcaaccacaaaaatataagtact

SEQ ID NO: 710214 - DNA, 33 bp, Homo sapien
catttagaattcaaccgcaaaaatataagtact

SEQ ID NO: 710215 - DNA, 33 bp, Homo sapien
tcacaactcaaaattaagcaaattggagtgcac

SEQ ID NO: 710216 - DNA, 33 bp, Homo sapien
tcacaactcaaaattaggcaaattggagtgcac

SEQ ID NO: 710217 - DNA, 33 bp, Homo sapien
catctggaaacacctcagaggaagaatggcatg

SEQ ID NO: 710218 - DNA, 33 bp, Homo sapien
catctggaaacacctcggaggaagaatggcatg

SEQ ID NO: 710219 - DNA, 33 bp, Homo sapien
gcttatttacatgatggcacattttcaatttga

SEQ ID NO: 710220 - DNA, 33 bp, Homo sapien
gcttatttacatgatgtcacattttcaatttga

SEQ ID NO: 710221 - DNA, 33 bp, Homo sapien
acggtatgtgataataaatctttcatgtagttt

SEQ ID NO: 710222 - DNA, 33 bp, Homo sapien
acggtatgtgataatatatctttcatgtagttt

SEQ ID NO: 710223 - DNA, 33 bp, Homo sapien
ctatttagatagtggaatcatatcacaacatga

SEQ ID NO: 710224 - DNA, 33 bp, Homo sapien
ctatttagatagtggactcatatcacaacatga

SEQ ID NO: 710225 - DNA, 33 bp, Homo sapien
gcaacccaagcttctccctatttctcgtttcct

SEQ ID NO: 710226 - DNA, 33 bp, Homo sapien
gcaacccaagcttctcgctatttctcgtttcct

SEQ ID NO: 710227 - DNA, 33 bp, Homo sapien
aagttttagaggggacaattattcaaaccattg

SEQ ID NO: 710228 - DNA, 33 bp, Homo sapien
aagttttagaggggacgattattcaaaccattg

SEQ ID NO: 710229 - DNA, 33 bp, Homo sapien
tgaattaattgactgactaatgtattgatggat

SEQ ID NO: 710230 - DNA, 33 bp, Homo sapien
tgaattaattgactgattaatgtattgatggat

SEQ ID NO: 710231 - DNA, 33 bp, Homo sapien
acaatttagaaacactaagctaaggtgcagctg

SEQ ID NO: 710232 - DNA, 33 bp, Homo sapien
acaatttagaaacactgagctaaggtgcagctg

SEQ ID NO: 710233 - DNA, 33 bp, Homo sapien
aactgataaagaagcacggcagaatactaacat

SEQ ID NO: 710234 - DNA, 33 bp, Homo sapien
aactgataaagaagcatggcagaatactaacat

SEQ ID NO: 710235 - DNA, 33 bp, Homo sapien
caaatggttggtaaaacttctgaatgtctgata

SEQ ID NO: 710236 - DNA, 33 bp, Homo sapien
caaatggttggtaaaatttctgaatgtctgata

SEQ ID NO: 710237 - DNA, 33 bp, Homo sapien
cataaaatgtacaaaacgtgttagtttactaac

SEQ ID NO: 710238 - DNA, 33 bp, Homo sapien
cataaaatgtacaaaatgtgttagtttactaac

SEQ ID NO: 710239 - DNA, 33 bp, Homo sapien
ataattctatgtccaacacgtatcttttctatc

SEQ ID NO: 710240 - DNA, 33 bp, Homo sapien
ataattctatgtccaagacgtatcttttctatc

SEQ ID NO: 710241 - DNA, 33 bp, Homo sapien
cctttcttggggtaaaaatttcatagaagacaa

SEQ ID NO: 710242 - DNA, 33 bp, Homo sapien
cctttcttggggtaaacatttcatagaagacaa

SEQ ID NO: 710243 - DNA, 33 bp, Homo sapien
actgctgagttaatccaggaaatggaaaaccat

SEQ ID NO: 710244 - DNA, 33 bp, Homo sapien
actgctgagttaatccgggaaatggaaaaccat

SEQ ID NO: 710245 - DNA, 33 bp, Homo sapien
tcatcagtaaacatgacggcattgagaagccag

SEQ ID NO: 710246 - DNA, 33 bp, Homo sapien
tcatcagtaaacatgatggcattgagaagccag

SEQ ID NO: 710247 - DNA, 33 bp, Homo sapien
gagatattgcttgaaccgagttctgaaggatga

SEQ ID NO: 710248 - DNA, 33 bp, Homo sapien
gagatattgcttgaactgagttctgaaggatga

SEQ ID NO: 710249 - DNA, 33 bp, Homo sapien
ctactagaagctgcaaccaggcttacacctgta

SEQ ID NO: 710250 - DNA, 33 bp, Homo sapien
ctactagaagctgcaatcaggcttacacctgta

SEQ ID NO: 710251 - DNA, 33 bp, Homo sapien
gtcatggccactaataaatcacattttctactc

SEQ ID NO: 710252 - DNA, 33 bp, Homo sapien
gtcatggccactaatagatcacattttctactc

SEQ ID NO: 710253 - DNA, 33 bp, Homo sapien
tttaaaatcttgccccaacattagattacttag

SEQ ID NO: 710254 - DNA, 33 bp, Homo sapien
tttaaaatcttgcccctacattagattacttag

SEQ ID NO: 710255 - DNA, 33 bp, Homo sapien
tctcactatgtgacacactgtattagtcagggc

SEQ ID NO: 710256 - DNA, 33 bp, Homo sapien
tctcactatgtgacacgctgtattagtcagggc

SEQ ID NO: 710257 - DNA, 33 bp, Homo sapien
gttcagttgaagcaaaatcttcttttccctctt

SEQ ID NO: 710258 - DNA, 33 bp, Homo sapien
gttcagttgaagcaaagtcttcttttccctctt

SEQ ID NO: 710259 - DNA, 33 bp, Homo sapien
tcactcactagcccaaagtttctctgttgctgc

SEQ ID NO: 710260 - DNA, 33 bp, Homo sapien
tcactcactagcccaatgtttctctgttgctgc

SEQ ID NO: 710261 - DNA, 33 bp, Homo sapien
taattatgaaagtttcaatagtgattccaggca

SEQ ID NO: 710262 - DNA, 33 bp, Homo sapien
taattatgaaagtttccatagtgattccaggca

SEQ ID NO: 710263 - DNA, 33 bp, Homo sapien
ttcttagctttgacgaatataccatgatattgt

SEQ ID NO: 710264 - DNA, 33 bp, Homo sapien
ttcttagctttgacgactataccatgatattgt

SEQ ID NO: 710265 - DNA, 33 bp, Homo sapien
agaaagaggatgttaacggaaaaactggcaaaa

SEQ ID NO: 710266 - DNA, 33 bp, Homo sapien
agaaagaggatgttaatggaaaaactggcaaaa

SEQ ID NO: 710267 - DNA, 33 bp, Homo sapien
aaacatcaataattaaacccctttgttctaagc

SEQ ID NO: 710268 - DNA, 33 bp, Homo sapien
aaacatcaataattaagcccctttgttctaagc

SEQ ID NO: 710269 - DNA, 33 bp, Homo sapien
ctagaaagctgagcccaaatttcaatcagatct

SEQ ID NO: 710270 - DNA, 33 bp, Homo sapien
ctagaaagctgagcccgaatttcaatcagatct

SEQ ID NO: 710271 - DNA, 33 bp, Homo sapien
ctcaagaagacagttagcctaaattttggctac

SEQ ID NO: 710272 - DNA, 33 bp, Homo sapien
ctcaagaagacagttatcctaaattttggctac

SEQ ID NO: 710273 - DNA, 33 bp, Homo sapien
gaggtgagcatagagtcaagggggttgggatac

SEQ ID NO: 710274 - DNA, 33 bp, Homo sapien
gaggtgagcatagagttaagggggttgggatac

SEQ ID NO: 710275 - DNA, 33 bp, Homo sapien
cagatctgcagcagaacttattacagttagatt

SEQ ID NO: 710276 - DNA, 33 bp, Homo sapien
cagatctgcagcagaatttattacagttagatt

SEQ ID NO: 710277 - DNA, 33 bp, Homo sapien
tctttgttgattttaacgctttcaatttaggag

SEQ ID NO: 710278 - DNA, 33 bp, Homo sapien
tctttgttgattttaatgctttcaatttaggag

SEQ ID NO: 710279 - DNA, 33 bp, Homo sapien
atatatcatgttagacacttaatgccaggcagt

SEQ ID NO: 710280 - DNA, 33 bp, Homo sapien
atatatcatgttagactcttaatgccaggcagt

SEQ ID NO: 710281 - DNA, 33 bp, Homo sapien
gtgagtctaaaaggcacattttatcacatttta

SEQ ID NO: 710282 - DNA, 33 bp, Homo sapien
gtgagtctaaaaggcatattttatcacatttta

SEQ ID NO: 710283 - DNA, 33 bp, Homo sapien
tagcttatcgcatagggcatacctaagattttc

SEQ ID NO: 710284 - DNA, 33 bp, Homo sapien
tagcttatcgcataggtcatacctaagattttc

SEQ ID NO: 710285 - DNA, 33 bp, Homo sapien
ctcaattgaatcaaaaatcataactcaagaagg

SEQ ID NO: 710286 - DNA, 33 bp, Homo sapien
ctcaattgaatcaaaagtcataactcaagaagg

SEQ ID NO: 710287 - DNA, 33 bp, Homo sapien
aagtggggagaatttaactgacagctcccatcc

SEQ ID NO: 710288 - DNA, 33 bp, Homo sapien
aagtggggagaatttatctgacagctcccatcc

SEQ ID NO: 710289 - DNA, 33 bp, Homo sapien
tctgaggcacaactacaataagcattatcattc

SEQ ID NO: 710290 - DNA, 33 bp, Homo sapien
tctgaggcacaactacgataagcattatcattc

SEQ ID NO: 710291 - DNA, 33 bp, Homo sapien
aattaaaaagaagtcaagctgttatgaacctcc

SEQ ID NO: 710292 - DNA, 33 bp, Homo sapien
aattaaaaagaagtcaggctgttatgaacctcc

SEQ ID NO: 710293 - DNA, 33 bp, Homo sapien
ttctcctaaggtcacaagtgaggaagaccactg

SEQ ID NO: 710294 - DNA, 33 bp, Homo sapien
ttctcctaaggtcacacgtgaggaagaccactg

SEQ ID NO: 710295 - DNA, 33 bp, Homo sapien
aagagaagtcactctcaaataatctcttcacat

SEQ ID NO: 710296 - DNA, 33 bp, Homo sapien
aagagaagtcactctcgaataatctcttcacat

SEQ ID NO: 710297 - DNA, 33 bp, Homo sapien
ttagcaaagtctattacggttaaactattgtaa

SEQ ID NO: 710298 - DNA, 33 bp, Homo sapien
ttagcaaagtctattatggttaaactattgtaa

SEQ ID NO: 710299 - DNA, 33 bp, Homo sapien
tagaacaaattcttccaattcactctgaaaata

SEQ ID NO: 710300 - DNA, 33 bp, Homo sapien
tagaacaaattcttccgattcactctgaaaata

SEQ ID NO: 710301 - DNA, 33 bp, Homo sapien
gatctgacttaaacacaatcaaaattatttcag

SEQ ID NO: 710302 - DNA, 33 bp, Homo sapien
gatctgacttaaacaccatcaaaattatttcag

SEQ ID NO: 710303 - DNA, 33 bp, Homo sapien
agagcctagcatctaccgatcactcacaagatg

SEQ ID NO: 710304 - DNA, 33 bp, Homo sapien
agagcctagcatctactgatcactcacaagatg

SEQ ID NO: 710305 - DNA, 33 bp, Homo sapien
aataatttgcataaagaacctagactggaacac

SEQ ID NO: 710306 - DNA, 33 bp, Homo sapien
aataatttgcataaagtacctagactggaacac

SEQ ID NO: 710307 - DNA, 33 bp, Homo sapien
cctagatcaaacaaaaacagccacgttcatggt

SEQ ID NO: 710308 - DNA, 33 bp, Homo sapien
cctagatcaaacaaaatcagccacgttcatggt

SEQ ID NO: 710309 - DNA, 33 bp, Homo sapien
gctactatgctctttaaagaatttagaaaataa

SEQ ID NO: 710310 - DNA, 33 bp, Homo sapien
gctactatgctctttagagaatttagaaaataa

SEQ ID NO: 710311 - DNA, 33 bp, Homo sapien
cagctaatcctcacaacagtcttaacagttgga

SEQ ID NO: 710312 - DNA, 33 bp, Homo sapien
cagctaatcctcacaatagtcttaacagttgga

SEQ ID NO: 710313 - DNA, 33 bp, Homo sapien
gactttcatttaaagacgcaactgcctatggta

SEQ ID NO: 710314 - DNA, 33 bp, Homo sapien
gactttcatttaaagatgcaactgcctatggta

SEQ ID NO: 710315 - DNA, 33 bp, Homo sapien
tatgtctatttgcaagaactatcaacatttata

SEQ ID NO: 710316 - DNA, 33 bp, Homo sapien
tatgtctatttgcaagtactatcaacatttata

SEQ ID NO: 710317 - DNA, 33 bp, Homo sapien
ataatgttagaactgagagtcattaggtatata

SEQ ID NO: 710318 - DNA, 33 bp, Homo sapien
ataatgttagaactgatagtcattaggtatata

SEQ ID NO: 710319 - DNA, 33 bp, Homo sapien
tagtctcctttccagaatcacattgaaagatga

SEQ ID NO: 710320 - DNA, 33 bp, Homo sapien
tagtctcctttccagagtcacattgaaagatga

SEQ ID NO: 710321 - DNA, 33 bp, Homo sapien
cccaagaaagcccaaaggttacatccaggactt

SEQ ID NO: 710322 - DNA, 33 bp, Homo sapien
cccaagaaagcccaaatgttacatccaggactt

SEQ ID NO: 710323 - DNA, 33 bp, Homo sapien
ataagaacatccccaacatagctagagaagaca

SEQ ID NO: 710324 - DNA, 33 bp, Homo sapien
ataagaacatccccaatatagctagagaagaca

SEQ ID NO: 710325 - DNA, 33 bp, Homo sapien
ctataggagactttagacctagtggaactgtca

SEQ ID NO: 710326 - DNA, 33 bp, Homo sapien
ctataggagactttagccctagtggaactgtca

SEQ ID NO: 710327 - DNA, 33 bp, Homo sapien
atgcctggccaatagaagttaatcaaaaagaaa

SEQ ID NO: 710328 - DNA, 33 bp, Homo sapien
atgcctggccaatagatgttaatcaaaaagaaa

SEQ ID NO: 710329 - DNA, 33 bp, Homo sapien
gtccacacatgtagtacaacagttgcttcttcc

SEQ ID NO: 710330 - DNA, 33 bp, Homo sapien
gtccacacatgtagtataacagttgcttcttcc

SEQ ID NO: 710331 - DNA, 33 bp, Homo sapien
ctgcaccctaactcaccaaggaaatcacaaata

SEQ ID NO: 710332 - DNA, 33 bp, Homo sapien
ctgcaccctaactcacgaaggaaatcacaaata

SEQ ID NO: 710333 - DNA, 33 bp, Homo sapien
tggttttagttagccacgataaactccccatca

SEQ ID NO: 710334 - DNA, 33 bp, Homo sapien
tggttttagttagccatgataaactccccatca

SEQ ID NO: 710335 - DNA, 33 bp, Homo sapien
cctgcataaatcattcaagatccaaagtcctta

SEQ ID NO: 710336 - DNA, 33 bp, Homo sapien
cctgcataaatcattccagatccaaagtcctta

SEQ ID NO: 710337 - DNA, 33 bp, Homo sapien
ttaggaaatgccagaacatcatctaaaattccc

SEQ ID NO: 710338 - DNA, 33 bp, Homo sapien
ttaggaaatgccagaatatcatctaaaattccc

SEQ ID NO: 710339 - DNA, 33 bp, Homo sapien
ttgaccattattattacctttgccaataaatat

SEQ ID NO: 710340 - DNA, 33 bp, Homo sapien
ttgaccattattattatctttgccaataaatat

SEQ ID NO: 710341 - DNA, 33 bp, Homo sapien
gtcctgagtggcaactaaatcattctttctctg

SEQ ID NO: 710342 - DNA, 33 bp, Homo sapien
gtcctgagtggcaactgaatcattctttctctg

SEQ ID NO: 710343 - DNA, 33 bp, Homo sapien
aaaatcattagctacaaattacagcatacaggc

SEQ ID NO: 710344 - DNA, 33 bp, Homo sapien
aaaatcattagctacagattacagcatacaggc

SEQ ID NO: 710345 - DNA, 33 bp, Homo sapien
ttattgtttctgataaatctgtatgttagcgtg

SEQ ID NO: 710346 - DNA, 33 bp, Homo sapien
ttattgtttctgataattctgtatgttagcgtg

SEQ ID NO: 710347 - DNA, 33 bp, Homo sapien
ccccaatctggctaaccactttattgtgtttcc

SEQ ID NO: 710348 - DNA, 33 bp, Homo sapien
ccccaatctggctaactactttattgtgtttcc

SEQ ID NO: 710349 - DNA, 33 bp, Homo sapien
acacaacactggataacggcataaaagactaac

SEQ ID NO: 710350 - DNA, 33 bp, Homo sapien
acacaacactggataatggcataaaagactaac

SEQ ID NO: 710351 - DNA, 33 bp, Homo sapien
aagtgtgaaacaaaacaagaagggaagaagtaa

SEQ ID NO: 710352 - DNA, 33 bp, Homo sapien
aagtgtgaaacaaaacgagaagggaagaagtaa

SEQ ID NO: 710353 - DNA, 33 bp, Homo sapien
atttagcctgcataacaagagagtgggtgttta

SEQ ID NO: 710354 - DNA, 33 bp, Homo sapien
atttagcctgcataaccagagagtgggtgttta

SEQ ID NO: 710355 - DNA, 33 bp, Homo sapien
actccccgacatcttcactacttacaggattta

SEQ ID NO: 710356 - DNA, 33 bp, Homo sapien
actccccgacatcttcgctacttacaggattta

SEQ ID NO: 710357 - DNA, 33 bp, Homo sapien
gccgtcacattgatctcactggccattttcttg

SEQ ID NO: 710358 - DNA, 33 bp, Homo sapien
gccgtcacattgatcttactggccattttcttg

SEQ ID NO: 710359 - DNA, 33 bp, Homo sapien
ggtggtataacattgcactttggatttgcattt

SEQ ID NO: 710360 - DNA, 33 bp, Homo sapien
ggtggtataacattgcgctttggatttgcattt

SEQ ID NO: 710361 - DNA, 33 bp, Homo sapien
aagcaatgattgatcaaaggaagctatgtccac

SEQ ID NO: 710362 - DNA, 33 bp, Homo sapien
aagcaatgattgatcagaggaagctatgtccac

SEQ ID NO: 710363 - DNA, 33 bp, Homo sapien
caaggggagaagtggacactccagctaagaagc

SEQ ID NO: 710364 - DNA, 33 bp, Homo sapien
caaggggagaagtggagactccagctaagaagc

SEQ ID NO: 710365 - DNA, 33 bp, Homo sapien
tataaaatgcaagacaaagttcagatgttttta

SEQ ID NO: 710366 - DNA, 33 bp, Homo sapien
tataaaatgcaagacagagttcagatgttttta

SEQ ID NO: 710367 - DNA, 33 bp, Homo sapien
atctgcctctttagaaaaaatagcagaacttta

SEQ ID NO: 710368 - DNA, 33 bp, Homo sapien
atctgcctctttagaagaaatagcagaacttta

SEQ ID NO: 710369 - DNA, 33 bp, Homo sapien
atgtataatatgaaaccgaaagcaaccatgaaa

SEQ ID NO: 710370 - DNA, 33 bp, Homo sapien
atgtataatatgaaactgaaagcaaccatgaaa

SEQ ID NO: 710371 - DNA, 33 bp, Homo sapien
gtctgtaagcggcccaaatgctcagctggactg

SEQ ID NO: 710372 - DNA, 33 bp, Homo sapien
gtctgtaagcggcccagatgctcagctggactg

SEQ ID NO: 710373 - DNA, 33 bp, Homo sapien
ctacaggtggtcacaacggtactcaaacattct

SEQ ID NO: 710374 - DNA, 33 bp, Homo sapien
ctacaggtggtcacaatggtactcaaacattct

SEQ ID NO: 710375 - DNA, 33 bp, Homo sapien
gcaaagtgatcacaccactgagactgacactct

SEQ ID NO: 710376 - DNA, 33 bp, Homo sapien
gcaaagtgatcacaccgctgagactgacactct

SEQ ID NO: 710377 - DNA, 33 bp, Homo sapien
tacttgctgacactcaagttctacttctaatga

SEQ ID NO: 710378 - DNA, 33 bp, Homo sapien
tacttgctgacactcaggttctacttctaatga

SEQ ID NO: 710379 - DNA, 33 bp, Homo sapien
ggaaacattggaatgacaccaggacttttttat

SEQ ID NO: 710380 - DNA, 33 bp, Homo sapien
ggaaacattggaatgataccaggacttttttat

SEQ ID NO: 710381 - DNA, 33 bp, Homo sapien
ctacaagggttttccacgcagattgaaatttat

SEQ ID NO: 710382 - DNA, 33 bp, Homo sapien
ctacaagggttttccatgcagattgaaatttat

SEQ ID NO: 710383 - DNA, 33 bp, Homo sapien
aaactatactgggtcccggaaggctcttctgcc

SEQ ID NO: 710384 - DNA, 33 bp, Homo sapien
aaactatactgggtcctggaaggctcttctgcc

SEQ ID NO: 710385 - DNA, 33 bp, Homo sapien
atttctggtaagaatacggctaagactgcatct

SEQ ID NO: 710386 - DNA, 33 bp, Homo sapien
atttctggtaagaatatggctaagactgcatct

SEQ ID NO: 710387 - DNA, 33 bp, Homo sapien
tctgcagttgtgtcaaaaactgactttagaggt

SEQ ID NO: 710388 - DNA, 33 bp, Homo sapien
tctgcagttgtgtcaagaactgactttagaggt

SEQ ID NO: 710389 - DNA, 33 bp, Homo sapien
cagacattcagtaacaacatgctctgaatacac

SEQ ID NO: 710390 - DNA, 33 bp, Homo sapien
cagacattcagtaacaccatgctctgaatacac

SEQ ID NO: 710391 - DNA, 33 bp, Homo sapien
agtcatcttccaaatactatgtttcaagctccc

SEQ ID NO: 710392 - DNA, 33 bp, Homo sapien
agtcatcttccaaatagtatgtttcaagctccc

SEQ ID NO: 710393 - DNA, 33 bp, Homo sapien
ggtcaaaggtcttcacagcagagtttttatgct

SEQ ID NO: 710394 - DNA, 33 bp, Homo sapien
ggtcaaaggtcttcacggcagagtttttatgct

SEQ ID NO: 710395 - DNA, 33 bp, Homo sapien
tcacagagcccactataataggtgaggtctgtg

SEQ ID NO: 710396 - DNA, 33 bp, Homo sapien
tcacagagcccactattataggtgaggtctgtg

SEQ ID NO: 710397 - DNA, 33 bp, Homo sapien
catggacaaagacttacaatgaaatcaccaaaa

SEQ ID NO: 710398 - DNA, 33 bp, Homo sapien
catggacaaagacttataatgaaatcaccaaaa

SEQ ID NO: 710399 - DNA, 33 bp, Homo sapien
cataccagtagctacacagcccatattgcaaat

SEQ ID NO: 710400 - DNA, 33 bp, Homo sapien
cataccagtagctacatagcccatattgcaaat

SEQ ID NO: 710401 - DNA, 33 bp, Homo sapien
agcagttcagtccagcacattttacaagactct

SEQ ID NO: 710402 - DNA, 33 bp, Homo sapien
agcagttcagtccagcgcattttacaagactct

SEQ ID NO: 710403 - DNA, 33 bp, Homo sapien
aagatttctgcaaggacgatttacttcaacgat

SEQ ID NO: 710404 - DNA, 33 bp, Homo sapien
aagatttctgcaaggatgatttacttcaacgat

SEQ ID NO: 710405 - DNA, 33 bp, Homo sapien
aaacacttcagttctcaatgtttccaaaatttt

SEQ ID NO: 710406 - DNA, 33 bp, Homo sapien
aaacacttcagttctcgatgtttccaaaatttt

SEQ ID NO: 710407 - DNA, 33 bp, Homo sapien
ctcaaagtagatgcaacgtttctaacacaattt

SEQ ID NO: 710408 - DNA, 33 bp, Homo sapien
ctcaaagtagatgcaatgtttctaacacaattt

SEQ ID NO: 710409 - DNA, 33 bp, Homo sapien
tacgtgctcagttaaggatagttgttactattg

SEQ ID NO: 710410 - DNA, 33 bp, Homo sapien
tacgtgctcagttaagtatagttgttactattg

SEQ ID NO: 710411 - DNA, 33 bp, Homo sapien
gccaagtgaacaagccgcagtgacacaagtcaa

SEQ ID NO: 710412 - DNA, 33 bp, Homo sapien
gccaagtgaacaagcctcagtgacacaagtcaa

SEQ ID NO: 710413 - DNA, 33 bp, Homo sapien
gggcgactctttgatcggagactcctttataat

SEQ ID NO: 710414 - DNA, 33 bp, Homo sapien
gggcgactctttgatctgagactcctttataat

SEQ ID NO: 710415 - DNA, 33 bp, Homo sapien
ttgataattttctcaacgtgtctaatggattgg

SEQ ID NO: 710416 - DNA, 33 bp, Homo sapien
ttgataattttctcaatgtgtctaatggattgg

SEQ ID NO: 710417 - DNA, 33 bp, Homo sapien
aagagcagcgtgaataaaacaggaagcacaaaa

SEQ ID NO: 710418 - DNA, 33 bp, Homo sapien
aagagcagcgtgaatagaacaggaagcacaaaa

SEQ ID NO: 710419 - DNA, 33 bp, Homo sapien
ttttgtagtaattcaccggttaatgtttgctta

SEQ ID NO: 710420 - DNA, 33 bp, Homo sapien
ttttgtagtaattcactggttaatgtttgctta

SEQ ID NO: 710421 - DNA, 33 bp, Homo sapien
ggttaggaaacaataacggaaggaagtactacc

SEQ ID NO: 710422 - DNA, 33 bp, Homo sapien
ggttaggaaacaataatggaaggaagtactacc

SEQ ID NO: 710423 - DNA, 33 bp, Homo sapien
ttgcatttattcaaccactgtctgtgaactcac

SEQ ID NO: 710424 - DNA, 33 bp, Homo sapien
ttgcatttattcaacctctgtctgtgaactcac

SEQ ID NO: 710425 - DNA, 33 bp, Homo sapien
aaggatgttatcctacgccagctccctctagtc

SEQ ID NO: 710426 - DNA, 33 bp, Homo sapien
aaggatgttatcctactccagctccctctagtc

SEQ ID NO: 710427 - DNA, 33 bp, Homo sapien
gcagacaatatgaaagacttgatggtaaacata

SEQ ID NO: 710428 - DNA, 33 bp, Homo sapien
gcagacaatatgaaaggcttgatggtaaacata

SEQ ID NO: 710429 - DNA, 33 bp, Homo sapien
ttggagcccatcaaaaataatcttcaagtctgt

SEQ ID NO: 710430 - DNA, 33 bp, Homo sapien
ttggagcccatcaaaagtaatcttcaagtctgt

SEQ ID NO: 710431 - DNA, 33 bp, Homo sapien
cagtttgaatatgatacgcctagtcctagtttg

SEQ ID NO: 710432 - DNA, 33 bp, Homo sapien
cagtttgaatatgatatgcctagtcctagtttg

SEQ ID NO: 710433 - DNA, 33 bp, Homo sapien
ctgtaataaacttccaatcagaaaccatgcaaa

SEQ ID NO: 710434 - DNA, 33 bp, Homo sapien
ctgtaataaacttccagtcagaaaccatgcaaa

SEQ ID NO: 710435 - DNA, 33 bp, Homo sapien
agaaagaaggacagaaaacaaccacctagaatc

SEQ ID NO: 710436 - DNA, 33 bp, Homo sapien
agaaagaaggacagaacacaaccacctagaatc

SEQ ID NO: 710437 - DNA, 33 bp, Homo sapien
aggaacgtgttcaagaccaaattgttacattta

SEQ ID NO: 710438 - DNA, 33 bp, Homo sapien
aggaacgtgttcaagatcaaattgttacattta

SEQ ID NO: 710439 - DNA, 33 bp, Homo sapien
tacatagtacatgttcaagagatggatcgtcct

SEQ ID NO: 710440 - DNA, 33 bp, Homo sapien
tacatagtacatgttcgagagatggatcgtcct

SEQ ID NO: 710441 - DNA, 33 bp, Homo sapien
ctgataggcagctaggaaaatgtaatctaggta

SEQ ID NO: 710442 - DNA, 33 bp, Homo sapien
ctgataggcagctaggtaaatgtaatctaggta

SEQ ID NO: 710443 - DNA, 33 bp, Homo sapien
tgtttcctatttaatacagctgaagtcaaaata

SEQ ID NO: 710444 - DNA, 33 bp, Homo sapien
tgtttcctatttaatatagctgaagtcaaaata

SEQ ID NO: 710445 - DNA, 33 bp, Homo sapien
ctgagagaatcataagacaccattctggctgat

SEQ ID NO: 710446 - DNA, 33 bp, Homo sapien
ctgagagaatcataaggcaccattctggctgat

SEQ ID NO: 710447 - DNA, 33 bp, Homo sapien
agaattcaggtcttctcactcctaattccactg

SEQ ID NO: 710448 - DNA, 33 bp, Homo sapien
agaattcaggtcttctgactcctaattccactg

SEQ ID NO: 710449 - DNA, 33 bp, Homo sapien
atcagtgtaatgattcaatgacaattcaaagat

SEQ ID NO: 710450 - DNA, 33 bp, Homo sapien
atcagtgtaatgattctatgacaattcaaagat

SEQ ID NO: 710451 - DNA, 33 bp, Homo sapien
tggcttggagcaataaatgcaaggactctaatg

SEQ ID NO: 710452 - DNA, 33 bp, Homo sapien
tggcttggagcaataagtgcaaggactctaatg

SEQ ID NO: 710453 - DNA, 33 bp, Homo sapien
cttttcttaacaatgcaataagaacataggtgg

SEQ ID NO: 710454 - DNA, 33 bp, Homo sapien
cttttcttaacaatgcgataagaacataggtgg

SEQ ID NO: 710455 - DNA, 33 bp, Homo sapien
atgtaataaggttgatcagaatctgtggaagag

SEQ ID NO: 710456 - DNA, 33 bp, Homo sapien
atgtaataaggttgattagaatctgtggaagag

SEQ ID NO: 710457 - DNA, 33 bp, Homo sapien
tcttgtcacaggaatgcatgtttttattaagtg

SEQ ID NO: 710458 - DNA, 33 bp, Homo sapien
tcttgtcacaggaatggatgtttttattaagtg

SEQ ID NO: 710459 - DNA, 33 bp, Homo sapien
aaaatgcctgatcagccatggaattcgtaacat

SEQ ID NO: 710460 - DNA, 33 bp, Homo sapien
aaaatgcctgatcagctatggaattcgtaacat

SEQ ID NO: 710461 - DNA, 33 bp, Homo sapien
accagaaagttgcaacagcattagactgagtga

SEQ ID NO: 710462 - DNA, 33 bp, Homo sapien
accagaaagttgcaacggcattagactgagtga

SEQ ID NO: 710463 - DNA, 33 bp, Homo sapien
cataatgtagcacaggcatatgttgaaatatct

SEQ ID NO: 710464 - DNA, 33 bp, Homo sapien
cataatgtagcacaggtatatgttgaaatatct

SEQ ID NO: 710465 - DNA, 33 bp, Homo sapien
tctgtggttcttcctgaaacacctccatcttac

SEQ ID NO: 710466 - DNA, 33 bp, Homo sapien
tctgtggttcttcctgcaacacctccatcttac

SEQ ID NO: 710467 - DNA, 33 bp, Homo sapien
gctccatgctgcccaacgatgcaccataaaata

SEQ ID NO: 710468 - DNA, 33 bp, Homo sapien
gctccatgctgcccaatgatgcaccataaaata

SEQ ID NO: 710469 - DNA, 33 bp, Homo sapien
aggtggctcacacaaaatacactctcaacaaat

SEQ ID NO: 710470 - DNA, 33 bp, Homo sapien
aggtggctcacacaaagtacactctcaacaaat

SEQ ID NO: 710471 - DNA, 33 bp, Homo sapien
taagaggtggttatgcaatttttatattgaaac

SEQ ID NO: 710472 - DNA, 33 bp, Homo sapien
taagaggtggttatgcgatttttatattgaaac

SEQ ID NO: 710473 - DNA, 33 bp, Homo sapien
tctaaaattatattcaagtttgagagactcttg

SEQ ID NO: 710474 - DNA, 33 bp, Homo sapien
tctaaaattatattcacgtttgagagactcttg

SEQ ID NO: 710475 - DNA, 33 bp, Homo sapien
tggtgctagaaatacaaaattctatatgcttta

SEQ ID NO: 710476 - DNA, 33 bp, Homo sapien
tggtgctagaaatacagaattctatatgcttta

SEQ ID NO: 710477 - DNA, 33 bp, Homo sapien
ctttatgatctggagaataagcttaaaacacac

SEQ ID NO: 710478 - DNA, 33 bp, Homo sapien
ctttatgatctggagagtaagcttaaaacacac

SEQ ID NO: 710479 - DNA, 33 bp, Homo sapien
ccccacaccgttcaccaaaatattcttgctgac

SEQ ID NO: 710480 - DNA, 33 bp, Homo sapien
ccccacaccgttcaccgaaatattcttgctgac

SEQ ID NO: 710481 - DNA, 33 bp, Homo sapien
gcttatgcctataacaatctcgtttccataact

SEQ ID NO: 710482 - DNA, 33 bp, Homo sapien
gcttatgcctataacagtctcgtttccataact

SEQ ID NO: 710483 - DNA, 33 bp, Homo sapien
agttctgttacaagaaaaatgtcatggacaaat

SEQ ID NO: 710484 - DNA, 33 bp, Homo sapien
agttctgttacaagaagaatgtcatggacaaat

SEQ ID NO: 710485 - DNA, 33 bp, Homo sapien
tttcaatgttagagatcagaggcaattgatgtg

SEQ ID NO: 710486 - DNA, 33 bp, Homo sapien
tttcaatgttagagattagaggcaattgatgtg

SEQ ID NO: 710487 - DNA, 33 bp, Homo sapien
acagatgaacaccagacggaagaaatgcaaagg

SEQ ID NO: 710488 - DNA, 33 bp, Homo sapien
acagatgaacaccagatggaagaaatgcaaagg

SEQ ID NO: 710489 - DNA, 33 bp, Homo sapien
aaatgtcactctggaccgggagctgtacaactc

SEQ ID NO: 710490 - DNA, 33 bp, Homo sapien
aaatgtcactctggactgggagctgtacaactc

SEQ ID NO: 710491 - DNA, 33 bp, Homo sapien
tctcacctactattacacaacttagcatcaacc

SEQ ID NO: 710492 - DNA, 33 bp, Homo sapien
tctcacctactattacgcaacttagcatcaacc

SEQ ID NO: 710493 - DNA, 33 bp, Homo sapien
actggtagcattttaaaagactgatcatcttca

SEQ ID NO: 710494 - DNA, 33 bp, Homo sapien
actggtagcattttaagagactgatcatcttca

SEQ ID NO: 710495 - DNA, 33 bp, Homo sapien
tttcacatttcttgtgaaggatagaggtatcat

SEQ ID NO: 710496 - DNA, 33 bp, Homo sapien
tttcacatttcttgtgcaggatagaggtatcat

SEQ ID NO: 710497 - DNA, 33 bp, Homo sapien
ttgtctccctaggaaacgtagtcacataataca

SEQ ID NO: 710498 - DNA, 33 bp, Homo sapien
ttgtctccctaggaaatgtagtcacataataca

SEQ ID NO: 710499 - DNA, 33 bp, Homo sapien
cttagttacctcacaaaggcttatctttcccct

SEQ ID NO: 710500 - DNA, 33 bp, Homo sapien
cttagttacctcacaacggcttatctttcccct

SEQ ID NO: 710501 - DNA, 33 bp, Homo sapien
ttggtcagcatccctgaagaagtcttcctacac

SEQ ID NO: 710502 - DNA, 33 bp, Homo sapien
ttggtcagcatccctggagaagtcttcctacac

SEQ ID NO: 710503 - DNA, 33 bp, Homo sapien
agagtagttacaatgaaccatgggaaatgacgc

SEQ ID NO: 710504 - DNA, 33 bp, Homo sapien
agagtagttacaatgagccatgggaaatgacgc

SEQ ID NO: 710505 - DNA, 33 bp, Homo sapien
taaggtggaattctaaagctgagagacaagtta

SEQ ID NO: 710506 - DNA, 33 bp, Homo sapien
taaggtggaattctaatgctgagagacaagtta

SEQ ID NO: 710507 - DNA, 33 bp, Homo sapien
tatgcatttttcaagcagatgaataaagtaaaa

SEQ ID NO: 710508 - DNA, 33 bp, Homo sapien
tatgcatttttcaagcggatgaataaagtaaaa

SEQ ID NO: 710509 - DNA, 33 bp, Homo sapien
agctacagaacacggtaaccatacacacttggc

SEQ ID NO: 710510 - DNA, 33 bp, Homo sapien
agctacagaacacggtgaccatacacacttggc

SEQ ID NO: 710511 - DNA, 33 bp, Homo sapien
tgatttaggacttaaacgtagaggggatgctta

SEQ ID NO: 710512 - DNA, 33 bp, Homo sapien
tgatttaggacttaaatgtagaggggatgctta

SEQ ID NO: 710513 - DNA, 33 bp, Homo sapien
cctatgtatgtgttcaatcatttacattggctt

SEQ ID NO: 710514 - DNA, 33 bp, Homo sapien
cctatgtatgtgttcagtcatttacattggctt

SEQ ID NO: 710515 - DNA, 33 bp, Homo sapien
agtgaatctccaggacagtcaaatacctagaaa

SEQ ID NO: 710516 - DNA, 33 bp, Homo sapien
agtgaatctccaggacggtcaaatacctagaaa

SEQ ID NO: 710517 - DNA, 33 bp, Homo sapien
acaggtaccagtagccaatctctttgctgatgc

SEQ ID NO: 710518 - DNA, 33 bp, Homo sapien
acaggtaccagtagccgatctctttgctgatgc

SEQ ID NO: 710519 - DNA, 33 bp, Homo sapien
catttgatccttacaaaaaatctatgaagtagt

SEQ ID NO: 710520 - DNA, 33 bp, Homo sapien
catttgatccttacaacaaatctatgaagtagt

SEQ ID NO: 710521 - DNA, 33 bp, Homo sapien
agctgtgtgaatattaagataaaagcagaataa

SEQ ID NO: 710522 - DNA, 33 bp, Homo sapien
agctgtgtgaatattaggataaaagcagaataa

SEQ ID NO: 710523 - DNA, 33 bp, Homo sapien
ctcaccacaccatgctaacgtggtctcattatt

SEQ ID NO: 710524 - DNA, 33 bp, Homo sapien
ctcaccacaccatgctcacgtggtctcattatt

SEQ ID NO: 710525 - DNA, 33 bp, Homo sapien
gaattttacctcactgcaaatgaattggaaact

SEQ ID NO: 710526 - DNA, 33 bp, Homo sapien
gaattttacctcactggaaatgaattggaaact

SEQ ID NO: 710527 - DNA, 33 bp, Homo sapien
gaggaaactcatgctaaatgaaaaaccaacaag

SEQ ID NO: 710528 - DNA, 33 bp, Homo sapien
gaggaaactcatgctacatgaaaaaccaacaag

SEQ ID NO: 710529 - DNA, 33 bp, Homo sapien
tttatgatgcattcaaacaatggaatatagagt

SEQ ID NO: 710530 - DNA, 33 bp, Homo sapien
tttatgatgcattcaagcaatggaatatagagt

SEQ ID NO: 710531 - DNA, 33 bp, Homo sapien
ggaagtatagagaagaaggggaagtgttaattt

SEQ ID NO: 710532 - DNA, 33 bp, Homo sapien
ggaagtatagagaagagggggaagtgttaattt

SEQ ID NO: 710533 - DNA, 33 bp, Homo sapien
ccaagatgtctcaaaaatcccttgcatctcttg

SEQ ID NO: 710534 - DNA, 33 bp, Homo sapien
ccaagatgtctcaaaagtcccttgcatctcttg

SEQ ID NO: 710535 - DNA, 33 bp, Homo sapien
ctaaggcttgatgcccactgatctgtagggtca

SEQ ID NO: 710536 - DNA, 33 bp, Homo sapien
ctaaggcttgatgcccgctgatctgtagggtca

SEQ ID NO: 710537 - DNA, 33 bp, Homo sapien
attcatcaagtaagtgcatggaaagcacttatc

SEQ ID NO: 710538 - DNA, 33 bp, Homo sapien
attcatcaagtaagtgtatggaaagcacttatc

SEQ ID NO: 710539 - DNA, 33 bp, Homo sapien
aggccaagcatgttggaactttctgtgacctat

SEQ ID NO: 710540 - DNA, 33 bp, Homo sapien
aggccaagcatgttggtactttctgtgacctat

SEQ ID NO: 710541 - DNA, 33 bp, Homo sapien
attaggatttagctacagaaaatggctatgaga

SEQ ID NO: 710542 - DNA, 33 bp, Homo sapien
attaggatttagctacggaaaatggctatgaga

SEQ ID NO: 710543 - DNA, 33 bp, Homo sapien
accccagaaaagtcacaaagtccaagaagcaga

SEQ ID NO: 710544 - DNA, 33 bp, Homo sapien
accccagaaaagtcacgaagtccaagaagcaga

SEQ ID NO: 710545 - DNA, 33 bp, Homo sapien
aatcacagggtataaaattcataattgttgctg

SEQ ID NO: 710546 - DNA, 33 bp, Homo sapien
aatcacagggtataaagttcataattgttgctg

SEQ ID NO: 710547 - DNA, 33 bp, Homo sapien
gatagatcaaaaactcagaagagacaaagctcg

SEQ ID NO: 710548 - DNA, 33 bp, Homo sapien
gatagatcaaaaactcggaagagacaaagctcg

SEQ ID NO: 710549 - DNA, 33 bp, Homo sapien
tcctatttaccaaaccacagaaatgcaagtcca

SEQ ID NO: 710550 - DNA, 33 bp, Homo sapien
tcctatttaccaaaccgcagaaatgcaagtcca

SEQ ID NO: 710551 - DNA, 33 bp, Homo sapien
gcataaaattctgtcaatctgttaaacttgtaa

SEQ ID NO: 710552 - DNA, 33 bp, Homo sapien
gcataaaattctgtcagtctgttaaacttgtaa

SEQ ID NO: 710553 - DNA, 33 bp, Homo sapien
aatgtgcaaaaaccacaggcattcctacacacc

SEQ ID NO: 710554 - DNA, 33 bp, Homo sapien
aatgtgcaaaaaccacgggcattcctacacacc

SEQ ID NO: 710555 - DNA, 33 bp, Homo sapien
ccaggctgttgctaacaaatgtcacaaaaattg

SEQ ID NO: 710556 - DNA, 33 bp, Homo sapien
ccaggctgttgctaacgaatgtcacaaaaattg

SEQ ID NO: 710557 - DNA, 33 bp, Homo sapien
tgcagttccttccatcaagagacggagtcaatt

SEQ ID NO: 710558 - DNA, 33 bp, Homo sapien
tgcagttccttccatcgagagacggagtcaatt

SEQ ID NO: 710559 - DNA, 33 bp, Homo sapien
actctactatgaaaaaaggtttgatttttagga

SEQ ID NO: 710560 - DNA, 33 bp, Homo sapien
actctactatgaaaaagggtttgatttttagga

SEQ ID NO: 710561 - DNA, 33 bp, Homo sapien
aatcttctaatctgcacagtatttggaaggtag

SEQ ID NO: 710562 - DNA, 33 bp, Homo sapien
aatcttctaatctgcatagtatttggaaggtag

SEQ ID NO: 710563 - DNA, 33 bp, Homo sapien
ggtattaaggaacagaaaggagtgtcacttagc

SEQ ID NO: 710564 - DNA, 33 bp, Homo sapien
ggtattaaggaacagagaggagtgtcacttagc

SEQ ID NO: 710565 - DNA, 33 bp, Homo sapien
tcccagtgcttaaataactccatgacaaggaac

SEQ ID NO: 710566 - DNA, 33 bp, Homo sapien
tcccagtgcttaaatacctccatgacaaggaac

SEQ ID NO: 710567 - DNA, 33 bp, Homo sapien
agagagaggaatctcaaaggacttaggatgatc

SEQ ID NO: 710568 - DNA, 33 bp, Homo sapien
agagagaggaatctcagaggacttaggatgatc

SEQ ID NO: 710569 - DNA, 33 bp, Homo sapien
attttcctcaatttgacggatgttttgattaaa

SEQ ID NO: 710570 - DNA, 33 bp, Homo sapien
attttcctcaatttgatggatgttttgattaaa

SEQ ID NO: 710571 - DNA, 33 bp, Homo sapien
gcaaaggagaatgagcaatggattcatcatgga

SEQ ID NO: 710572 - DNA, 33 bp, Homo sapien
gcaaaggagaatgagccatggattcatcatgga

SEQ ID NO: 710573 - DNA, 33 bp, Homo sapien
agaaattgttatcataaagatgtgtttaggaca

SEQ ID NO: 710574 - DNA, 33 bp, Homo sapien
agaaattgttatcatagagatgtgtttaggaca

SEQ ID NO: 710575 - DNA, 33 bp, Homo sapien
gcaaggctctattatacattactcattacctct

SEQ ID NO: 710576 - DNA, 33 bp, Homo sapien
gcaaggctctattatatattactcattacctct

SEQ ID NO: 710577 - DNA, 33 bp, Homo sapien
gatttctaaacttatggatgttctccaactcaa

SEQ ID NO: 710578 - DNA, 33 bp, Homo sapien
gatttctaaacttatgtatgttctccaactcaa

SEQ ID NO: 710579 - DNA, 33 bp, Homo sapien
cggagtcatgaagtggcagagctggaaccaggg

SEQ ID NO: 710580 - DNA, 33 bp, Homo sapien
cggagtcatgaagtggtagagctggaaccaggg

SEQ ID NO: 710581 - DNA, 33 bp, Homo sapien
tcttgcaaaatgctaaagaacgtaatttgttgg

SEQ ID NO: 710582 - DNA, 33 bp, Homo sapien
tcttgcaaaatgctaaggaacgtaatttgttgg

SEQ ID NO: 710583 - DNA, 33 bp, Homo sapien
gtgatgttttagcagaagtgtcatagtagaaat

SEQ ID NO: 710584 - DNA, 33 bp, Homo sapien
gtgatgttttagcagaggtgtcatagtagaaat

SEQ ID NO: 710585 - DNA, 33 bp, Homo sapien
gcccagattatacctacgagacaatcaggtcct

SEQ ID NO: 710586 - DNA, 33 bp, Homo sapien
gcccagattatacctatgagacaatcaggtcct

SEQ ID NO: 710587 - DNA, 33 bp, Homo sapien
gagtgatatgatgcaaacaatggtttaaaggtg

SEQ ID NO: 710588 - DNA, 33 bp, Homo sapien
gagtgatatgatgcaagcaatggtttaaaggtg

SEQ ID NO: 710589 - DNA, 33 bp, Homo sapien
attatgaagaactgaaaaagccagattagaata

SEQ ID NO: 710590 - DNA, 33 bp, Homo sapien
attatgaagaactgaagaagccagattagaata

SEQ ID NO: 710591 - DNA, 33 bp, Homo sapien
cctgaagtcaaccacaatgaatggtgagtctgg

SEQ ID NO: 710592 - DNA, 33 bp, Homo sapien
cctgaagtcaaccacagtgaatggtgagtctgg

SEQ ID NO: 710593 - DNA, 33 bp, Homo sapien
acaaaaggagcaggaaaaaaacacctgaagtag

SEQ ID NO: 710594 - DNA, 33 bp, Homo sapien
acaaaaggagcaggaagaaaacacctgaagtag

SEQ ID NO: 710595 - DNA, 33 bp, Homo sapien
acctaataacagcagaaagtttagaaagtcaaa

SEQ ID NO: 710596 - DNA, 33 bp, Homo sapien
acctaataacagcagacagtttagaaagtcaaa

SEQ ID NO: 710597 - DNA, 33 bp, Homo sapien
caaagcttttggtgaacctatgtacacattttt

SEQ ID NO: 710598 - DNA, 33 bp, Homo sapien
caaagcttttggtgaatctatgtacacattttt

SEQ ID NO: 710599 - DNA, 33 bp, Homo sapien
agaagacatgaagaggaaattcatgaagtagaa

SEQ ID NO: 710600 - DNA, 33 bp, Homo sapien
agaagacatgaagaggcaattcatgaagtagaa

SEQ ID NO: 710601 - DNA, 33 bp, Homo sapien
gagaaagacacatcaaaagtcaaagtaagctga

SEQ ID NO: 710602 - DNA, 33 bp, Homo sapien
gagaaagacacatcaacagtcaaagtaagctga

SEQ ID NO: 710603 - DNA, 33 bp, Homo sapien
aaggtagatataaatcacagttacaatttgtgt

SEQ ID NO: 710604 - DNA, 33 bp, Homo sapien
aaggtagatataaatcgcagttacaatttgtgt

SEQ ID NO: 710605 - DNA, 33 bp, Homo sapien
acaaatgggacatctcccttcccacaactgtca

SEQ ID NO: 710606 - DNA, 33 bp, Homo sapien
acaaatgggacatctctcttcccacaactgtca

SEQ ID NO: 710607 - DNA, 33 bp, Homo sapien
acacaagaagttatcacacataaggttttacat

SEQ ID NO: 710608 - DNA, 33 bp, Homo sapien
acacaagaagttatcatacataaggttttacat

SEQ ID NO: 710609 - DNA, 33 bp, Homo sapien
gattatctgcttaaaaaaaagtgtgccaaaagt

SEQ ID NO: 710610 - DNA, 33 bp, Homo sapien
gattatctgcttaaaacaaagtgtgccaaaagt

SEQ ID NO: 710611 - DNA, 33 bp, Homo sapien
ccagaatgctagcaacaaaagtggatcagggaa

SEQ ID NO: 710612 - DNA, 33 bp, Homo sapien
ccagaatgctagcaaccaaagtggatcagggaa

SEQ ID NO: 710613 - DNA, 33 bp, Homo sapien
gatactgatactctaccatgcaggtaaccatat

SEQ ID NO: 710614 - DNA, 33 bp, Homo sapien
gatactgatactctactatgcaggtaaccatat

SEQ ID NO: 710615 - DNA, 33 bp, Homo sapien
ggagctgaacacaaaacggccaagccttcgctt

SEQ ID NO: 710616 - DNA, 33 bp, Homo sapien
ggagctgaacacaaaatggccaagccttcgctt

SEQ ID NO: 710617 - DNA, 33 bp, Homo sapien
tttatgttttcctaaaattctcttcacacattg

SEQ ID NO: 710618 - DNA, 33 bp, Homo sapien
tttatgttttcctaaagttctcttcacacattg

SEQ ID NO: 710619 - DNA, 33 bp, Homo sapien
catttggagtttccaaagatatggtagagctgt

SEQ ID NO: 710620 - DNA, 33 bp, Homo sapien
catttggagtttccaaggatatggtagagctgt

SEQ ID NO: 710621 - DNA, 33 bp, Homo sapien
gcatccaaaataactacctttctgtcaactaag

SEQ ID NO: 710622 - DNA, 33 bp, Homo sapien
gcatccaaaataactatctttctgtcaactaag

SEQ ID NO: 710623 - DNA, 33 bp, Homo sapien
cctgaattcaaagttacagacatcatatttgtc

SEQ ID NO: 710624 - DNA, 33 bp, Homo sapien
cctgaattcaaagttagagacatcatatttgtc

SEQ ID NO: 710625 - DNA, 33 bp, Homo sapien
gctgtcttctcacagaaatgatataagaaatta

SEQ ID NO: 710626 - DNA, 33 bp, Homo sapien
gctgtcttctcacagagatgatataagaaatta

SEQ ID NO: 710627 - DNA, 33 bp, Homo sapien
ctgtctcttagcaaaactcaagcactgtgctag

SEQ ID NO: 710628 - DNA, 33 bp, Homo sapien
ctgtctcttagcaaaattcaagcactgtgctag

SEQ ID NO: 710629 - DNA, 33 bp, Homo sapien
tgcgtaagattctgccactacggttaataaaaa

SEQ ID NO: 710630 - DNA, 33 bp, Homo sapien
tgcgtaagattctgccgctacggttaataaaaa

SEQ ID NO: 710631 - DNA, 33 bp, Homo sapien
ctcagacggacgttcactaagtagagaaaatac

SEQ ID NO: 710632 - DNA, 33 bp, Homo sapien
ctcagacggacgttcagtaagtagagaaaatac

SEQ ID NO: 710633 - DNA, 33 bp, Homo sapien
ttttttggactcttgcactaaatctgagttggc

SEQ ID NO: 710634 - DNA, 33 bp, Homo sapien
ttttttggactcttgcgctaaatctgagttggc

SEQ ID NO: 710635 - DNA, 33 bp, Homo sapien
ctaaggctcaaaccaacgctagatgctactgct

SEQ ID NO: 710636 - DNA, 33 bp, Homo sapien
ctaaggctcaaaccaatgctagatgctactgct

SEQ ID NO: 710637 - DNA, 33 bp, Homo sapien
tggtctatcttactctaaagcctctgttagcac

SEQ ID NO: 710638 - DNA, 33 bp, Homo sapien
tggtctatcttactctgaagcctctgttagcac

SEQ ID NO: 710639 - DNA, 33 bp, Homo sapien
tatacctagagtgccaagggactaaacgttcaa

SEQ ID NO: 710640 - DNA, 33 bp, Homo sapien
tatacctagagtgccatgggactaaacgttcaa

SEQ ID NO: 710641 - DNA, 33 bp, Homo sapien
catgagatggcaaacacgtcctgtggaaatgaa

SEQ ID NO: 710642 - DNA, 33 bp, Homo sapien
catgagatggcaaacatgtcctgtggaaatgaa

SEQ ID NO: 710643 - DNA, 33 bp, Homo sapien
agcccaagctggctcacctgcttccctcagtca

SEQ ID NO: 710644 - DNA, 33 bp, Homo sapien
agcccaagctggctcatctgcttccctcagtca

SEQ ID NO: 710645 - DNA, 33 bp, Homo sapien
cagcacctgtatcctccacttgcccaggaagtt

SEQ ID NO: 710646 - DNA, 33 bp, Homo sapien
cagcacctgtatcctctacttgcccaggaagtt

SEQ ID NO: 710647 - DNA, 33 bp, Homo sapien
ttagtaaagttcttcaataaagccttgagaggt

SEQ ID NO: 710648 - DNA, 33 bp, Homo sapien
ttagtaaagttcttcagtaaagccttgagaggt

SEQ ID NO: 710649 - DNA, 33 bp, Homo sapien
tatcagctatcacccaacagataagaataaagt

SEQ ID NO: 710650 - DNA, 33 bp, Homo sapien
tatcagctatcacccagcagataagaataaagt

SEQ ID NO: 710651 - DNA, 33 bp, Homo sapien
atgtgcacattcttcacatagctactcagaagg

SEQ ID NO: 710652 - DNA, 33 bp, Homo sapien
atgtgcacattcttcatatagctactcagaagg

SEQ ID NO: 710653 - DNA, 33 bp, Homo sapien
cttgcacaagagacaaattggaaggtaattaat

SEQ ID NO: 710654 - DNA, 33 bp, Homo sapien
cttgcacaagagacaatttggaaggtaattaat

SEQ ID NO: 710655 - DNA, 33 bp, Homo sapien
gttttaaaaatgaccacacaacatagagtgtcc

SEQ ID NO: 710656 - DNA, 33 bp, Homo sapien
gttttaaaaatgaccagacaacatagagtgtcc

SEQ ID NO: 710657 - DNA, 33 bp, Homo sapien
aggacaatgatcctcaaattctaagaacttcat

SEQ ID NO: 710658 - DNA, 33 bp, Homo sapien
aggacaatgatcctcagattctaagaacttcat

SEQ ID NO: 710659 - DNA, 33 bp, Homo sapien
cagaatatttcatagagaaggtaaggctctgga

SEQ ID NO: 710660 - DNA, 33 bp, Homo sapien
cagaatatttcatagataaggtaaggctctgga

SEQ ID NO: 710661 - DNA, 33 bp, Homo sapien
tggaattaaaatgagtaaagctgatctttaagc

SEQ ID NO: 710662 - DNA, 33 bp, Homo sapien
tggaattaaaatgagtgaagctgatctttaagc

SEQ ID NO: 710663 - DNA, 33 bp, Homo sapien
ggcgacgagagtgagcaaaattcagtctcaaag

SEQ ID NO: 710664 - DNA, 33 bp, Homo sapien
ggcgacgagagtgagcgaaattcagtctcaaag

SEQ ID NO: 710665 - DNA, 33 bp, Homo sapien
aatgaagcctcttttccacttggaatttatttt

SEQ ID NO: 710666 - DNA, 33 bp, Homo sapien
aatgaagcctcttttctacttggaatttatttt

SEQ ID NO: 710667 - DNA, 33 bp, Homo sapien
tctagctaaatagcaactcttctgagccgtttt

SEQ ID NO: 710668 - DNA, 33 bp, Homo sapien
tctagctaaatagcaattcttctgagccgtttt

SEQ ID NO: 710669 - DNA, 33 bp, Homo sapien
gcaagctctgctaacaatgggtggggacttttc

SEQ ID NO: 710670 - DNA, 33 bp, Homo sapien
gcaagctctgctaacagtgggtggggacttttc

SEQ ID NO: 710671 - DNA, 33 bp, Homo sapien
atggcattactattggaagacaatcatcacaga

SEQ ID NO: 710672 - DNA, 33 bp, Homo sapien
atggcattactattggcagacaatcatcacaga

SEQ ID NO: 710673 - DNA, 33 bp, Homo sapien
gtcaatattattactaccctgaggaaagacaag

SEQ ID NO: 710674 - DNA, 33 bp, Homo sapien
gtcaatattattactatcctgaggaaagacaag

SEQ ID NO: 710675 - DNA, 33 bp, Homo sapien
aatgacatttgttgaacacctgttacgtgccta

SEQ ID NO: 710676 - DNA, 33 bp, Homo sapien
aatgacatttgttgaatacctgttacgtgccta

SEQ ID NO: 710677 - DNA, 33 bp, Homo sapien
tctttataggcttatcaagaacaaatttttatt

SEQ ID NO: 710678 - DNA, 33 bp, Homo sapien
tctttataggcttatctagaacaaatttttatt

SEQ ID NO: 710679 - DNA, 33 bp, Homo sapien
aaagttctcaagttaaaccatcctaagtcaagt

SEQ ID NO: 710680 - DNA, 33 bp, Homo sapien
aaagttctcaagttaagccatcctaagtcaagt

SEQ ID NO: 710681 - DNA, 33 bp, Homo sapien
ctgagcctctttagaccaatacttcatataact

SEQ ID NO: 710682 - DNA, 33 bp, Homo sapien
ctgagcctctttagactaatacttcatataact

SEQ ID NO: 710683 - DNA, 33 bp, Homo sapien
tacagcataggtataaacattctaggaaacgta

SEQ ID NO: 710684 - DNA, 33 bp, Homo sapien
tacagcataggtataagcattctaggaaacgta

SEQ ID NO: 710685 - DNA, 33 bp, Homo sapien
ataacctgattacttgaatttccttagccatga

SEQ ID NO: 710686 - DNA, 33 bp, Homo sapien
ataacctgattacttggatttccttagccatga

SEQ ID NO: 710687 - DNA, 33 bp, Homo sapien
gagatttattcacatcacatacccagattctgc

SEQ ID NO: 710688 - DNA, 33 bp, Homo sapien
gagatttattcacatcgcatacccagattctgc

SEQ ID NO: 710689 - DNA, 33 bp, Homo sapien
ttgtatggaatgaccaaaaatattctataggca

SEQ ID NO: 710690 - DNA, 33 bp, Homo sapien
ttgtatggaatgaccagaaatattctataggca

SEQ ID NO: 710691 - DNA, 33 bp, Homo sapien
attctataggcactcccaaccttgcaataaaca

SEQ ID NO: 710692 - DNA, 33 bp, Homo sapien
attctataggcactcctaaccttgcaataaaca

SEQ ID NO: 710693 - DNA, 33 bp, Homo sapien
tttaaaatggtaatgccctttgatcagtgtcag

SEQ ID NO: 710694 - DNA, 33 bp, Homo sapien
tttaaaatggtaatgctctttgatcagtgtcag

SEQ ID NO: 710695 - DNA, 33 bp, Homo sapien
tgtcacttgttaatgaacttccaatcttctaag

SEQ ID NO: 710696 - DNA, 33 bp, Homo sapien
tgtcacttgttaatgaccttccaatcttctaag

SEQ ID NO: 710697 - DNA, 33 bp, Homo sapien
tgtgcagatttccataagctctgtcatgtgact

SEQ ID NO: 710698 - DNA, 33 bp, Homo sapien
tgtgcagatttccatatgctctgtcatgtgact

SEQ ID NO: 710699 - DNA, 33 bp, Homo sapien
tattggtctttccatacgagagttgaataaaac

SEQ ID NO: 710700 - DNA, 33 bp, Homo sapien
tattggtctttccatatgagagttgaataaaac

SEQ ID NO: 710701 - DNA, 33 bp, Homo sapien
gtccaacaacatatgaccagtttgtgcctgtgt

SEQ ID NO: 710702 - DNA, 33 bp, Homo sapien
gtccaacaacatatgatcagtttgtgcctgtgt

SEQ ID NO: 710703 - DNA, 33 bp, Homo sapien
tgcagaggcattcataaaatgtaaaggctatct

SEQ ID NO: 710704 - DNA, 33 bp, Homo sapien
tgcagaggcattcatacaatgtaaaggctatct

SEQ ID NO: 710705 - DNA, 33 bp, Homo sapien
caagggatgatatagacgaatgaacacagaagg

SEQ ID NO: 710706 - DNA, 33 bp, Homo sapien
caagggatgatatagatgaatgaacacagaagg

SEQ ID NO: 710707 - DNA, 33 bp, Homo sapien
agccacattcagttagaaatagcaaaacaaata

SEQ ID NO: 710708 - DNA, 33 bp, Homo sapien
agccacattcagttaggaatagcaaaacaaata

SEQ ID NO: 710709 - DNA, 33 bp, Homo sapien
ctctccaataatgcagaaactccttcttttatt

SEQ ID NO: 710710 - DNA, 33 bp, Homo sapien
ctctccaataatgcaggaactccttcttttatt

SEQ ID NO: 710711 - DNA, 33 bp, Homo sapien
ataaatattactcaaaaaagtctgatttctgtg

SEQ ID NO: 710712 - DNA, 33 bp, Homo sapien
ataaatattactcaaacaagtctgatttctgtg

SEQ ID NO: 710713 - DNA, 33 bp, Homo sapien
catttattttctgaggacaacctaatggagcca

SEQ ID NO: 710714 - DNA, 33 bp, Homo sapien
catttattttctgagggcaacctaatggagcca

SEQ ID NO: 710715 - DNA, 33 bp, Homo sapien
gcaatataaagatacaacaaaatctggcaagat

SEQ ID NO: 710716 - DNA, 33 bp, Homo sapien
gcaatataaagatacagcaaaatctggcaagat

SEQ ID NO: 710717 - DNA, 33 bp, Homo sapien
aatctaggattgaaagaaaatctgaaaaagcaa

SEQ ID NO: 710718 - DNA, 33 bp, Homo sapien
aatctaggattgaaagcaaatctgaaaaagcaa

SEQ ID NO: 710719 - DNA, 33 bp, Homo sapien
taagtgactttccgggaacatgatgtctttact

SEQ ID NO: 710720 - DNA, 33 bp, Homo sapien
taagtgactttccgggtacatgatgtctttact

SEQ ID NO: 710721 - DNA, 33 bp, Homo sapien
ggaatagtaggcttaactgtgaggtgatgatca

SEQ ID NO: 710722 - DNA, 33 bp, Homo sapien
ggaatagtaggcttaattgtgaggtgatgatca

SEQ ID NO: 710723 - DNA, 33 bp, Homo sapien
tgaggctaagtcaggtcaatctcaggcattaga

SEQ ID NO: 710724 - DNA, 33 bp, Homo sapien
tgaggctaagtcaggttaatctcaggcattaga

SEQ ID NO: 710725 - DNA, 33 bp, Homo sapien
aaccaagatattgacactgatattgtcaggtta

SEQ ID NO: 710726 - DNA, 33 bp, Homo sapien
aaccaagatattgacattgatattgtcaggtta

SEQ ID NO: 710727 - DNA, 33 bp, Homo sapien
tcctatcttaactatgccaggtatcacagaaca

SEQ ID NO: 710728 - DNA, 33 bp, Homo sapien
tcctatcttaactatgtcaggtatcacagaaca

SEQ ID NO: 710729 - DNA, 33 bp, Homo sapien
ttacctgattatttagcagtgcctggatacaca

SEQ ID NO: 710730 - DNA, 33 bp, Homo sapien
ttacctgattatttagtagtgcctggatacaca

SEQ ID NO: 710731 - DNA, 33 bp, Homo sapien
cagtttggaagtcacagaatgtcatttctattg

SEQ ID NO: 710732 - DNA, 33 bp, Homo sapien
cagtttggaagtcacataatgtcatttctattg

SEQ ID NO: 710733 - DNA, 33 bp, Homo sapien
acattagaactaattaaaaccacagaaatgcaa

SEQ ID NO: 710734 - DNA, 33 bp, Homo sapien
acattagaactaattagaaccacagaaatgcaa

SEQ ID NO: 710735 - DNA, 33 bp, Homo sapien
aaattccaaaggcacccagtctcaactcaatct

SEQ ID NO: 710736 - DNA, 33 bp, Homo sapien
aaattccaaaggcacctagtctcaactcaatct

SEQ ID NO: 710737 - DNA, 33 bp, Homo sapien
acggcattctagcaccaactttccatcaatgta

SEQ ID NO: 710738 - DNA, 33 bp, Homo sapien
acggcattctagcaccgactttccatcaatgta

SEQ ID NO: 710739 - DNA, 33 bp, Homo sapien
ttgagaatgcttgctgaaaaactagtgtggtgg

SEQ ID NO: 710740 - DNA, 33 bp, Homo sapien
ttgagaatgcttgctggaaaactagtgtggtgg

SEQ ID NO: 710741 - DNA, 33 bp, Homo sapien
caccttcctagtcccaacattgctcaaattcaa

SEQ ID NO: 710742 - DNA, 33 bp, Homo sapien
caccttcctagtcccagcattgctcaaattcaa

SEQ ID NO: 710743 - DNA, 33 bp, Homo sapien
tgaatttagtgaagtacacagtagcatggtgag

SEQ ID NO: 710744 - DNA, 33 bp, Homo sapien
tgaatttagtgaagtagacagtagcatggtgag

SEQ ID NO: 710745 - DNA, 33 bp, Homo sapien
tttaaagttaagctaccatgtgaatttagtgaa

SEQ ID NO: 710746 - DNA, 33 bp, Homo sapien
tttaaagttaagctactatgtgaatttagtgaa

SEQ ID NO: 710747 - DNA, 33 bp, Homo sapien
ataagcatagcctaaacatttcttgcttaagta

SEQ ID NO: 710748 - DNA, 33 bp, Homo sapien
ataagcatagcctaaatatttcttgcttaagta

SEQ ID NO: 710749 - DNA, 33 bp, Homo sapien
ggccaaagaccttcaactcatcctggactccct

SEQ ID NO: 710750 - DNA, 33 bp, Homo sapien
ggccaaagaccttcaagtcatcctggactccct

SEQ ID NO: 710751 - DNA, 33 bp, Homo sapien
taagtccttgacaagacagttcaaaaatttctt

SEQ ID NO: 710752 - DNA, 33 bp, Homo sapien
taagtccttgacaagatagttcaaaaatttctt

SEQ ID NO: 710753 - DNA, 33 bp, Homo sapien
cgagagatgttgggtcccttatggtgaacaaca

SEQ ID NO: 710754 - DNA, 33 bp, Homo sapien
cgagagatgttgggtctcttatggtgaacaaca

SEQ ID NO: 710755 - DNA, 33 bp, Homo sapien
gcagcttcctttttcacaagaatctacacctca

SEQ ID NO: 710756 - DNA, 33 bp, Homo sapien
gcagcttcctttttcagaagaatctacacctca

SEQ ID NO: 710757 - DNA, 33 bp, Homo sapien
tctctatctaaaataaccccagttcacccttgt

SEQ ID NO: 710758 - DNA, 33 bp, Homo sapien
tctctatctaaaataatcccagttcacccttgt

SEQ ID NO: 710759 - DNA, 33 bp, Homo sapien
gttaaaatagctcctaaacctgtaaaaacagac

SEQ ID NO: 710760 - DNA, 33 bp, Homo sapien
gttaaaatagctcctagacctgtaaaaacagac

SEQ ID NO: 710761 - DNA, 33 bp, Homo sapien
agcctataaacaaggcacaccagagggacgata

SEQ ID NO: 710762 - DNA, 33 bp, Homo sapien
agcctataaacaaggcgcaccagagggacgata

SEQ ID NO: 710763 - DNA, 33 bp, Homo sapien
aagtaggtgtcaaaggcagtatgggggtcatgg

SEQ ID NO: 710764 - DNA, 33 bp, Homo sapien
aagtaggtgtcaaaggtagtatgggggtcatgg

SEQ ID NO: 710765 - DNA, 33 bp, Homo sapien
tatccagctaatttaggcaatgtggatttccca

SEQ ID NO: 710766 - DNA, 33 bp, Homo sapien
tatccagctaatttagtcaatgtggatttccca

SEQ ID NO: 710767 - DNA, 33 bp, Homo sapien
attttcgattgcgtcccggaattacagaaagaa

SEQ ID NO: 710768 - DNA, 33 bp, Homo sapien
attttcgattgcgtcctggaattacagaaagaa

SEQ ID NO: 710769 - DNA, 33 bp, Homo sapien
aatattcacatcatctcaaaggatcatttatta

SEQ ID NO: 710770 - DNA, 33 bp, Homo sapien
aatattcacatcatctgaaaggatcatttatta

SEQ ID NO: 710771 - DNA, 33 bp, Homo sapien
gcagtagattaatcaacaagttttccataaaaa

SEQ ID NO: 710772 - DNA, 33 bp, Homo sapien
gcagtagattaatcaataagttttccataaaaa

SEQ ID NO: 710773 - DNA, 33 bp, Homo sapien
acaaaccagcaatttcaagagcacccagagacc

SEQ ID NO: 710774 - DNA, 33 bp, Homo sapien
acaaaccagcaatttcgagagcacccagagacc

SEQ ID NO: 710775 - DNA, 33 bp, Homo sapien
tacgttatcagggacaccttatgtcataggtag

SEQ ID NO: 710776 - DNA, 33 bp, Homo sapien
tacgttatcagggacagcttatgtcataggtag

SEQ ID NO: 710777 - DNA, 33 bp, Homo sapien
atgtattttctcaatcaatgaagataaaatata

SEQ ID NO: 710778 - DNA, 33 bp, Homo sapien
atgtattttctcaatcgatgaagataaaatata

SEQ ID NO: 710779 - DNA, 33 bp, Homo sapien
agaagctattaatgaaatcagggtatgcccagc

SEQ ID NO: 710780 - DNA, 33 bp, Homo sapien
agaagctattaatgaagtcagggtatgcccagc

SEQ ID NO: 710781 - DNA, 33 bp, Homo sapien
ttagtggattggttcaaagcattttccaaactg

SEQ ID NO: 710782 - DNA, 33 bp, Homo sapien
ttagtggattggttcatagcattttccaaactg

SEQ ID NO: 710783 - DNA, 33 bp, Homo sapien
catgttttcttgctgaccttcttcctattatca

SEQ ID NO: 710784 - DNA, 33 bp, Homo sapien
catgttttcttgctgatcttcttcctattatca

SEQ ID NO: 710785 - DNA, 33 bp, Homo sapien
gtggccctggtttatcaagacaggagaatggcg

SEQ ID NO: 710786 - DNA, 33 bp, Homo sapien
gtggccctggtttatcgagacaggagaatggcg

SEQ ID NO: 710787 - DNA, 33 bp, Homo sapien
gatttataaaactcacgcagttatccaatcatt

SEQ ID NO: 710788 - DNA, 33 bp, Homo sapien
gatttataaaactcactcagttatccaatcatt

SEQ ID NO: 710789 - DNA, 33 bp, Homo sapien
agcactattatagaaacagctggataatgttat

SEQ ID NO: 710790 - DNA, 33 bp, Homo sapien
agcactattatagaaagagctggataatgttat

SEQ ID NO: 710791 - DNA, 33 bp, Homo sapien
taattctccatcttaacatttctcatgccacat

SEQ ID NO: 710792 - DNA, 33 bp, Homo sapien
taattctccatcttaatatttctcatgccacat

SEQ ID NO: 710793 - DNA, 33 bp, Homo sapien
ggatgctggccaggccaaaataatagatgccca

SEQ ID NO: 710794 - DNA, 33 bp, Homo sapien
ggatgctggccaggccgaaataatagatgccca

SEQ ID NO: 710795 - DNA, 33 bp, Homo sapien
tctatgtgtacacgtacgacaacaaaaagagac

SEQ ID NO: 710796 - DNA, 33 bp, Homo sapien
tctatgtgtacacgtatgacaacaaaaagagac

SEQ ID NO: 710797 - DNA, 33 bp, Homo sapien
tcgaacgctgtctaaactcacacccaatgcttg

SEQ ID NO: 710798 - DNA, 33 bp, Homo sapien
tcgaacgctgtctaaattcacacccaatgcttg

SEQ ID NO: 710799 - DNA, 33 bp, Homo sapien
acactgatttgcttccactaaaaatatctcctt

SEQ ID NO: 710800 - DNA, 33 bp, Homo sapien
acactgatttgcttccgctaaaaatatctcctt

SEQ ID NO: 710801 - DNA, 33 bp, Homo sapien
agtcaaattgcaatcaccccaggaattagttta

SEQ ID NO: 710802 - DNA, 33 bp, Homo sapien
agtcaaattgcaatcagcccaggaattagttta

SEQ ID NO: 710803 - DNA, 33 bp, Homo sapien
aagctaagattcactcacagtgttcccatactt

SEQ ID NO: 710804 - DNA, 33 bp, Homo sapien
aagctaagattcactcgcagtgttcccatactt

SEQ ID NO: 710805 - DNA, 33 bp, Homo sapien
ggtagctaagcaaatgaatcaactaaaattatc

SEQ ID NO: 710806 - DNA, 33 bp, Homo sapien
ggtagctaagcaaatggatcaactaaaattatc

SEQ ID NO: 710807 - DNA, 33 bp, Homo sapien
ctaagaaggagttttcaaaaaatgcaaaactgg

SEQ ID NO: 710808 - DNA, 33 bp, Homo sapien
ctaagaaggagttttccaaaaatgcaaaactgg

SEQ ID NO: 710809 - DNA, 33 bp, Homo sapien
gtagttggtgatagcacggccagttaactgata

SEQ ID NO: 710810 - DNA, 33 bp, Homo sapien
gtagttggtgatagcatggccagttaactgata

SEQ ID NO: 710811 - DNA, 33 bp, Homo sapien
gtgttctctgctttgacgtttggccaaaatcct

SEQ ID NO: 710812 - DNA, 33 bp, Homo sapien
gtgttctctgctttgaggtttggccaaaatcct

SEQ ID NO: 710813 - DNA, 33 bp, Homo sapien
actttagagagttgataaaacagtcacacaagt

SEQ ID NO: 710814 - DNA, 33 bp, Homo sapien
actttagagagttgatgaaacagtcacacaagt

SEQ ID NO: 710815 - DNA, 33 bp, Homo sapien
ttgtcctgtaaacaacaagatagcaagtatttt

SEQ ID NO: 710816 - DNA, 33 bp, Homo sapien
ttgtcctgtaaacaaccagatagcaagtatttt

SEQ ID NO: 710817 - DNA, 33 bp, Homo sapien
tattcttgaattttaaatcctcttcaaatgaaa

SEQ ID NO: 710818 - DNA, 33 bp, Homo sapien
tattcttgaattttaattcctcttcaaatgaaa

SEQ ID NO: 710819 - DNA, 33 bp, Homo sapien
atgatttacacacttgaagaaaggaaggctggg

SEQ ID NO: 710820 - DNA, 33 bp, Homo sapien
atgatttacacacttggagaaaggaaggctggg

SEQ ID NO: 710821 - DNA, 33 bp, Homo sapien
atgcagtcatgatcaagcttaccagaataaatc

SEQ ID NO: 710822 - DNA, 33 bp, Homo sapien
atgcagtcatgatcaatcttaccagaataaatc

SEQ ID NO: 710823 - DNA, 33 bp, Homo sapien
ctataaattattggaaaggtccagggcccttta

SEQ ID NO: 710824 - DNA, 33 bp, Homo sapien
ctataaattattggaatggtccagggcccttta

SEQ ID NO: 710825 - DNA, 33 bp, Homo sapien
cctctttgatgacttacaattacgatgaaacac

SEQ ID NO: 710826 - DNA, 33 bp, Homo sapien
cctctttgatgacttataattacgatgaaacac

SEQ ID NO: 710827 - DNA, 33 bp, Homo sapien
ccactaagtgctttaacgtgtctgacagcatag

SEQ ID NO: 710828 - DNA, 33 bp, Homo sapien
ccactaagtgctttaatgtgtctgacagcatag

SEQ ID NO: 710829 - DNA, 33 bp, Homo sapien
tatagtaagcagaactcaaatgagacctttgtt

SEQ ID NO: 710830 - DNA, 33 bp, Homo sapien
tatagtaagcagaactgaaatgagacctttgtt

SEQ ID NO: 710831 - DNA, 33 bp, Homo sapien
taaaacatatcatccagagaccagaatatttag

SEQ ID NO: 710832 - DNA, 33 bp, Homo sapien
taaaacatatcatccatagaccagaatatttag

SEQ ID NO: 710833 - DNA, 33 bp, Homo sapien
tgggtttcagccctaactcaacttttttctttc

SEQ ID NO: 710834 - DNA, 33 bp, Homo sapien
tgggtttcagccctaattcaacttttttctttc

SEQ ID NO: 710835 - DNA, 33 bp, Homo sapien
cccaagaggagaggaagttacttgactcgtagg

SEQ ID NO: 710836 - DNA, 33 bp, Homo sapien
cccaagaggagaggaatttacttgactcgtagg

SEQ ID NO: 710837 - DNA, 33 bp, Homo sapien
aacatagagctgtaatcaggtggtcccagccta

SEQ ID NO: 710838 - DNA, 33 bp, Homo sapien
aacatagagctgtaatgaggtggtcccagccta

SEQ ID NO: 710839 - DNA, 33 bp, Homo sapien
ccttctcacctctaaactcccctggattccagt

SEQ ID NO: 710840 - DNA, 33 bp, Homo sapien
ccttctcacctctaaattcccctggattccagt

SEQ ID NO: 710841 - DNA, 33 bp, Homo sapien
atggggaaggcttcaacgagaaagtgacctttg

SEQ ID NO: 710842 - DNA, 33 bp, Homo sapien
atggggaaggcttcaatgagaaagtgacctttg

SEQ ID NO: 710843 - DNA, 33 bp, Homo sapien
aacaccataaaaagagaagtgcctacctccacc

SEQ ID NO: 710844 - DNA, 33 bp, Homo sapien
aacaccataaaaagagtagtgcctacctccacc

SEQ ID NO: 710845 - DNA, 33 bp, Homo sapien
tgtgcttgaactatgccatctttggaaagacaa

SEQ ID NO: 710846 - DNA, 33 bp, Homo sapien
tgtgcttgaactatgctatctttggaaagacaa

SEQ ID NO: 710847 - DNA, 33 bp, Homo sapien
ggtgatacttaccaataatataagcaatcttgg

SEQ ID NO: 710848 - DNA, 33 bp, Homo sapien
ggtgatacttaccaatgatataagcaatcttgg

SEQ ID NO: 710849 - DNA, 33 bp, Homo sapien
ttgtgaccctgctcaaatgtctttattttggtg

SEQ ID NO: 710850 - DNA, 33 bp, Homo sapien
ttgtgaccctgctcaagtgtctttattttggtg

SEQ ID NO: 710851 - DNA, 33 bp, Homo sapien
ctaagcagaagcttgaagttcactgcctgagtc

SEQ ID NO: 710852 - DNA, 33 bp, Homo sapien
ctaagcagaagcttgacgttcactgcctgagtc

SEQ ID NO: 710853 - DNA, 33 bp, Homo sapien
tgaggtagtagttgacacaaccatttgagttaa

SEQ ID NO: 710854 - DNA, 33 bp, Homo sapien
tgaggtagtagttgacgcaaccatttgagttaa

SEQ ID NO: 710855 - DNA, 33 bp, Homo sapien
atcaaaatgcacaaaaactgtttattgaatgac

SEQ ID NO: 710856 - DNA, 33 bp, Homo sapien
atcaaaatgcacaaaagctgtttattgaatgac

SEQ ID NO: 710857 - DNA, 33 bp, Homo sapien
gtaacttttttgattacgcaacatttaaagtct

SEQ ID NO: 710858 - DNA, 33 bp, Homo sapien
gtaacttttttgattatgcaacatttaaagtct

SEQ ID NO: 710859 - DNA, 33 bp, Homo sapien
aggtgacataaattgaagctgtattatttataa

SEQ ID NO: 710860 - DNA, 33 bp, Homo sapien
aggtgacataaattgaggctgtattatttataa

SEQ ID NO: 710861 - DNA, 33 bp, Homo sapien
tttcctattgaaggccaaggaaactgtgatact

SEQ ID NO: 710862 - DNA, 33 bp, Homo sapien
tttcctattgaaggccgaggaaactgtgatact

SEQ ID NO: 710863 - DNA, 33 bp, Homo sapien
gagacaagaggtaatcaattctgagatgtattt

SEQ ID NO: 710864 - DNA, 33 bp, Homo sapien
gagacaagaggtaatcgattctgagatgtattt

SEQ ID NO: 710865 - DNA, 33 bp, Homo sapien
ataaaatgagagcctcagaaactcagcagcttc

SEQ ID NO: 710866 - DNA, 33 bp, Homo sapien
ataaaatgagagcctcggaaactcagcagcttc

SEQ ID NO: 710867 - DNA, 33 bp, Homo sapien
acaaaagattctcgcacccctatctaccatggc

SEQ ID NO: 710868 - DNA, 33 bp, Homo sapien
acaaaagattctcgcatccctatctaccatggc

SEQ ID NO: 710869 - DNA, 33 bp, Homo sapien
aacaaactactacttcaaacataagctaaagtt

SEQ ID NO: 710870 - DNA, 33 bp, Homo sapien
aacaaactactacttccaacataagctaaagtt

SEQ ID NO: 710871 - DNA, 33 bp, Homo sapien
aagatgtaatgtctgactaaatccaaggaggta

SEQ ID NO: 710872 - DNA, 33 bp, Homo sapien
aagatgtaatgtctgattaaatccaaggaggta

SEQ ID NO: 710873 - DNA, 33 bp, Homo sapien
gtaagcactatacacaaagtggtatctaccctt

SEQ ID NO: 710874 - DNA, 33 bp, Homo sapien
gtaagcactatacacagagtggtatctaccctt

SEQ ID NO: 710875 - DNA, 33 bp, Homo sapien
aaggtcgtcttttcttcaaccaaattacgactc

SEQ ID NO: 710876 - DNA, 33 bp, Homo sapien
aaggtcgtcttttcttgaaccaaattacgactc

SEQ ID NO: 710877 - DNA, 33 bp, Homo sapien
catatttacggataatcacaaagatacagatca

SEQ ID NO: 710878 - DNA, 33 bp, Homo sapien
catatttacggataattacaaagatacagatca

SEQ ID NO: 710879 - DNA, 33 bp, Homo sapien
gtgttcagatctgtcaaagcaaccaaccattta

SEQ ID NO: 710880 - DNA, 33 bp, Homo sapien
gtgttcagatctgtcagagcaaccaaccattta

SEQ ID NO: 710881 - DNA, 33 bp, Homo sapien
gatggaaaatcagacacgagctggtataatacc

SEQ ID NO: 710882 - DNA, 33 bp, Homo sapien
gatggaaaatcagacatgagctggtataatacc

SEQ ID NO: 710883 - DNA, 33 bp, Homo sapien
aaagtaaaataatgagacctatgaagagggtag

SEQ ID NO: 710884 - DNA, 33 bp, Homo sapien
aaagtaaaataatgagtcctatgaagagggtag

SEQ ID NO: 710885 - DNA, 33 bp, Homo sapien
ggctttgggtcataaaaagttgttctcttttct

SEQ ID NO: 710886 - DNA, 33 bp, Homo sapien
ggctttgggtcataaacagttgttctcttttct

SEQ ID NO: 710887 - DNA, 33 bp, Homo sapien
aaaagtatagcacttaaagttatgcatagtaca

SEQ ID NO: 710888 - DNA, 33 bp, Homo sapien
aaaagtatagcacttacagttatgcatagtaca

SEQ ID NO: 710889 - DNA, 33 bp, Homo sapien
cctgctgcactgctagacatgaaaaaagtatag

SEQ ID NO: 710890 - DNA, 33 bp, Homo sapien
cctgctgcactgctagtcatgaaaaaagtatag

SEQ ID NO: 710891 - DNA, 33 bp, Homo sapien
gggagagggcattacccggaggcttcctgaccc

SEQ ID NO: 710892 - DNA, 33 bp, Homo sapien
gggagagggcattacctggaggcttcctgaccc

SEQ ID NO: 710893 - DNA, 33 bp, Homo sapien
aagctgtccagaaatacgcaacagtgcttctct

SEQ ID NO: 710894 - DNA, 33 bp, Homo sapien
aagctgtccagaaatatgcaacagtgcttctct

SEQ ID NO: 710895 - DNA, 33 bp, Homo sapien
gattttggacaaccgcaccttcaccatccttct

SEQ ID NO: 710896 - DNA, 33 bp, Homo sapien
gattttggacaaccgcgccttcaccatccttct

SEQ ID NO: 710897 - DNA, 33 bp, Homo sapien
ctttagacacacttaaaatctctgagtatcaga

SEQ ID NO: 710898 - DNA, 33 bp, Homo sapien
ctttagacacacttaacatctctgagtatcaga

SEQ ID NO: 710899 - DNA, 33 bp, Homo sapien
ccaatcagccatagccagaaggtgcgtaggact

SEQ ID NO: 710900 - DNA, 33 bp, Homo sapien
ccaatcagccatagccggaaggtgcgtaggact

SEQ ID NO: 710901 - DNA, 33 bp, Homo sapien
ctgtggacataggcaaataacaagcgtatccaa

SEQ ID NO: 710902 - DNA, 33 bp, Homo sapien
ctgtggacataggcaagtaacaagcgtatccaa

SEQ ID NO: 710903 - DNA, 33 bp, Homo sapien
ccaggctgtatatgtaagcctctaagggagtga

SEQ ID NO: 710904 - DNA, 33 bp, Homo sapien
ccaggctgtatatgtatgcctctaagggagtga

SEQ ID NO: 710905 - DNA, 33 bp, Homo sapien
atggatgaacagcttcaatgcattaatcactgc

SEQ ID NO: 710906 - DNA, 33 bp, Homo sapien
atggatgaacagcttcgatgcattaatcactgc

SEQ ID NO: 710907 - DNA, 33 bp, Homo sapien
tgatgtatttgactaaagggtatatgggagttg

SEQ ID NO: 710908 - DNA, 33 bp, Homo sapien
tgatgtatttgactaacgggtatatgggagttg

SEQ ID NO: 710909 - DNA, 33 bp, Homo sapien
ctcttctagagttcgacattatttcaagaacaa

SEQ ID NO: 710910 - DNA, 33 bp, Homo sapien
ctcttctagagttcgatattatttcaagaacaa

SEQ ID NO: 710911 - DNA, 33 bp, Homo sapien
aggcctcacaggaaacaaagtaggaagcaggaa

SEQ ID NO: 710912 - DNA, 33 bp, Homo sapien
aggcctcacaggaaacgaagtaggaagcaggaa

SEQ ID NO: 710913 - DNA, 33 bp, Homo sapien
aatagttactggtcaccgatgtatgctttcaat

SEQ ID NO: 710914 - DNA, 33 bp, Homo sapien
aatagttactggtcactgatgtatgctttcaat

SEQ ID NO: 710915 - DNA, 33 bp, Homo sapien
gcaaaatgtaagtcaaacttcataatgcttgga

SEQ ID NO: 710916 - DNA, 33 bp, Homo sapien
gcaaaatgtaagtcaatcttcataatgcttgga

SEQ ID NO: 710917 - DNA, 33 bp, Homo sapien
agaaatgttattttatcaccatgctgcttatat

SEQ ID NO: 710918 - DNA, 33 bp, Homo sapien
agaaatgttattttatgaccatgctgcttatat

SEQ ID NO: 710919 - DNA, 33 bp, Homo sapien
gtaaagatcagtgtgaaaatatcagctcaatgg

SEQ ID NO: 710920 - DNA, 33 bp, Homo sapien
gtaaagatcagtgtgagaatatcagctcaatgg

SEQ ID NO: 710921 - DNA, 33 bp, Homo sapien
ttttttttgccttaaccaattaatagtgtgttg

SEQ ID NO: 710922 - DNA, 33 bp, Homo sapien
ttttttttgccttaactaattaatagtgtgttg

SEQ ID NO: 710923 - DNA, 33 bp, Homo sapien
ggtgcaaaatcatttacctgcattccacacatc

SEQ ID NO: 710924 - DNA, 33 bp, Homo sapien
ggtgcaaaatcatttatctgcattccacacatc

SEQ ID NO: 710925 - DNA, 33 bp, Homo sapien
atcatagtagcagtaacaggagtttagatatat

SEQ ID NO: 710926 - DNA, 33 bp, Homo sapien
atcatagtagcagtaataggagtttagatatat

SEQ ID NO: 710927 - DNA, 33 bp, Homo sapien
ctgtgccaagattaaaccaaccttggaaatctc

SEQ ID NO: 710928 - DNA, 33 bp, Homo sapien
ctgtgccaagattaaatcaaccttggaaatctc

SEQ ID NO: 710929 - DNA, 33 bp, Homo sapien
atgcttactgactcaacaataataaatgatcat

SEQ ID NO: 710930 - DNA, 33 bp, Homo sapien
atgcttactgactcaagaataataaatgatcat

SEQ ID NO: 710931 - DNA, 33 bp, Homo sapien
atctacaaaatatctacgactcttctaaattct

SEQ ID NO: 710932 - DNA, 33 bp, Homo sapien
atctacaaaatatctatgactcttctaaattct

SEQ ID NO: 710933 - DNA, 33 bp, Homo sapien
atttatagttccattaagatatgaaatttgtgg

SEQ ID NO: 710934 - DNA, 33 bp, Homo sapien
atttatagttccattaggatatgaaatttgtgg

SEQ ID NO: 710935 - DNA, 33 bp, Homo sapien
ttccattttctctaaaactcttcaagcctaacc

SEQ ID NO: 710936 - DNA, 33 bp, Homo sapien
ttccattttctctaaacctcttcaagcctaacc

SEQ ID NO: 710937 - DNA, 33 bp, Homo sapien
tcaaatgtaacagtgcgcagtagtattgcctaa

SEQ ID NO: 710938 - DNA, 33 bp, Homo sapien
tcaaatgtaacagtgctcagtagtattgcctaa

SEQ ID NO: 710939 - DNA, 33 bp, Homo sapien
aaatctctgcccataaccttaaaatcagtattt

SEQ ID NO: 710940 - DNA, 33 bp, Homo sapien
aaatctctgcccataatcttaaaatcagtattt

SEQ ID NO: 710941 - DNA, 33 bp, Homo sapien
aataattctaggaacaaaaaccaccttgctgac

SEQ ID NO: 710942 - DNA, 33 bp, Homo sapien
aataattctaggaacagaaaccaccttgctgac

SEQ ID NO: 710943 - DNA, 33 bp, Homo sapien
tctgattctgaaaatacataatacagcacatct

SEQ ID NO: 710944 - DNA, 33 bp, Homo sapien
tctgattctgaaaatatataatacagcacatct

SEQ ID NO: 710945 - DNA, 33 bp, Homo sapien
ttattacattaaaaaaaaggaagctttgagtca

SEQ ID NO: 710946 - DNA, 33 bp, Homo sapien
ttattacattaaaaaacaggaagctttgagtca

SEQ ID NO: 710947 - DNA, 33 bp, Homo sapien
aaaatctttctactcccactgaattcctcaaca

SEQ ID NO: 710948 - DNA, 33 bp, Homo sapien
aaaatctttctactcctactgaattcctcaaca

SEQ ID NO: 710949 - DNA, 33 bp, Homo sapien
cttcctcagtccttcactccaaaattcctgtgc

SEQ ID NO: 710950 - DNA, 33 bp, Homo sapien
cttcctcagtccttcattccaaaattcctgtgc

SEQ ID NO: 710951 - DNA, 33 bp, Homo sapien
aaagccaggcttatgaactaaccagaagtgcag

SEQ ID NO: 710952 - DNA, 33 bp, Homo sapien
aaagccaggcttatgatctaaccagaagtgcag

SEQ ID NO: 710953 - DNA, 33 bp, Homo sapien
ctgtcatctggactccacaaataatattctagt

SEQ ID NO: 710954 - DNA, 33 bp, Homo sapien
ctgtcatctggactccgcaaataatattctagt

SEQ ID NO: 710955 - DNA, 33 bp, Homo sapien
gatgctaatgtaaccacgcataatgcttgcttc

SEQ ID NO: 710956 - DNA, 33 bp, Homo sapien
gatgctaatgtaaccatgcataatgcttgcttc

SEQ ID NO: 710957 - DNA, 33 bp, Homo sapien
gaatagttgaggtgtcacacatgctatagagcc

SEQ ID NO: 710958 - DNA, 33 bp, Homo sapien
gaatagttgaggtgtctcacatgctatagagcc

SEQ ID NO: 710959 - DNA, 33 bp, Homo sapien
ctgctaattccttaagactcaactctgacatca

SEQ ID NO: 710960 - DNA, 33 bp, Homo sapien
ctgctaattccttaaggctcaactctgacatca

SEQ ID NO: 710961 - DNA, 33 bp, Homo sapien
ctattctgtaatcttacctatcttcactgtatt

SEQ ID NO: 710962 - DNA, 33 bp, Homo sapien
ctattctgtaatcttatctatcttcactgtatt

SEQ ID NO: 710963 - DNA, 33 bp, Homo sapien
gtatatactgagatacagaaggatgatggctca

SEQ ID NO: 710964 - DNA, 33 bp, Homo sapien
gtatatactgagatacggaaggatgatggctca

SEQ ID NO: 710965 - DNA, 33 bp, Homo sapien
aataacggaaagacctaaatttaagaggcttgg

SEQ ID NO: 710966 - DNA, 33 bp, Homo sapien
aataacggaaagacctgaatttaagaggcttgg

SEQ ID NO: 710967 - DNA, 33 bp, Homo sapien
ttgtttcattcacaaacctaccatgctatttgc

SEQ ID NO: 710968 - DNA, 33 bp, Homo sapien
ttgtttcattcacaaatctaccatgctatttgc

SEQ ID NO: 710969 - DNA, 33 bp, Homo sapien
tctcggaagttgtggaactaactagatggttag

SEQ ID NO: 710970 - DNA, 33 bp, Homo sapien
tctcggaagttgtggacctaactagatggttag

SEQ ID NO: 710971 - DNA, 33 bp, Homo sapien
cacagattaccctaatcatcagtcctatgcagg

SEQ ID NO: 710972 - DNA, 33 bp, Homo sapien
cacagattaccctaattatcagtcctatgcagg

SEQ ID NO: 710973 - DNA, 33 bp, Homo sapien
aactaagttctcctggaaaatacttttgtaaca

SEQ ID NO: 710974 - DNA, 33 bp, Homo sapien
aactaagttctcctggtaaatacttttgtaaca

SEQ ID NO: 710975 - DNA, 33 bp, Homo sapien
tacagaagtcatatcaagacagtttatgactta

SEQ ID NO: 710976 - DNA, 33 bp, Homo sapien
tacagaagtcatatcaggacagtttatgactta

SEQ ID NO: 710977 - DNA, 33 bp, Homo sapien
tatacggcagaagttacacagcaaaagtgaaaa

SEQ ID NO: 710978 - DNA, 33 bp, Homo sapien
tatacggcagaagttatacagcaaaagtgaaaa

SEQ ID NO: 710979 - DNA, 33 bp, Homo sapien
gaatttcttatgggaactcttatgtgaagtatt

SEQ ID NO: 710980 - DNA, 33 bp, Homo sapien
gaatttcttatgggaagtcttatgtgaagtatt

SEQ ID NO: 710981 - DNA, 33 bp, Homo sapien
caaagcattatgtagaccaagcttttatgtttt

SEQ ID NO: 710982 - DNA, 33 bp, Homo sapien
caaagcattatgtagagcaagcttttatgtttt

SEQ ID NO: 710983 - DNA, 33 bp, Homo sapien
cccttcaagacagccaataatgtgtgaaacctc

SEQ ID NO: 710984 - DNA, 33 bp, Homo sapien
cccttcaagacagccagtaatgtgtgaaacctc

SEQ ID NO: 710985 - DNA, 33 bp, Homo sapien
aagaggaatagagttcaatgtgcagatatctat

SEQ ID NO: 710986 - DNA, 33 bp, Homo sapien
aagaggaatagagttcgatgtgcagatatctat

SEQ ID NO: 710987 - DNA, 33 bp, Homo sapien
ctctgcaatatggttcactgtaagaatgggaaa

SEQ ID NO: 710988 - DNA, 33 bp, Homo sapien
ctctgcaatatggttcgctgtaagaatgggaaa

SEQ ID NO: 710989 - DNA, 33 bp, Homo sapien
tagctagaaatagcaaagttaccaggtcacagg

SEQ ID NO: 710990 - DNA, 33 bp, Homo sapien
tagctagaaatagcaatgttaccaggtcacagg

SEQ ID NO: 710991 - DNA, 33 bp, Homo sapien
acaaattcagtatgaaatgtctctaggaagata

SEQ ID NO: 710992 - DNA, 33 bp, Homo sapien
acaaattcagtatgaactgtctctaggaagata

SEQ ID NO: 710993 - DNA, 33 bp, Homo sapien
ttctgattattagagacgtttattggtatgttt

SEQ ID NO: 710994 - DNA, 33 bp, Homo sapien
ttctgattattagagatgtttattggtatgttt

SEQ ID NO: 710995 - DNA, 33 bp, Homo sapien
ttaattcactgtgttaactgactaaggaaattt

SEQ ID NO: 710996 - DNA, 33 bp, Homo sapien
ttaattcactgtgttagctgactaaggaaattt

SEQ ID NO: 710997 - DNA, 33 bp, Homo sapien
ataaaaggtaagcatacgttacttgtaatgtct

SEQ ID NO: 710998 - DNA, 33 bp, Homo sapien
ataaaaggtaagcatatgttacttgtaatgtct

SEQ ID NO: 710999 - DNA, 33 bp, Homo sapien
agatagtaattaggtcaaggtcacatagctacc

SEQ ID NO: 711000 - DNA, 33 bp, Homo sapien
agatagtaattaggtcgaggtcacatagctacc

SEQ ID NO: 711001 - DNA, 33 bp, Homo sapien
gatggcaggccagaaacgctatggaattaacaa

SEQ ID NO: 711002 - DNA, 33 bp, Homo sapien
gatggcaggccagaaatgctatggaattaacaa

SEQ ID NO: 711003 - DNA, 33 bp, Homo sapien
ctacccttgagataaacctggatgagaagacaa

SEQ ID NO: 711004 - DNA, 33 bp, Homo sapien
ctacccttgagataaatctggatgagaagacaa

SEQ ID NO: 711005 - DNA, 33 bp, Homo sapien
gatggggtctttgctacctgtgtgatgagatct

SEQ ID NO: 711006 - DNA, 33 bp, Homo sapien
gatggggtctttgctatctgtgtgatgagatct

SEQ ID NO: 711007 - DNA, 33 bp, Homo sapien
gtagaatgtctagaagaaagtgttatccaggta

SEQ ID NO: 711008 - DNA, 33 bp, Homo sapien
gtagaatgtctagaaggaagtgttatccaggta

SEQ ID NO: 711009 - DNA, 33 bp, Homo sapien
agttaagcctgggaaccgagacactccaaaact

SEQ ID NO: 711010 - DNA, 33 bp, Homo sapien
agttaagcctgggaactgagacactccaaaact

SEQ ID NO: 711011 - DNA, 33 bp, Homo sapien
cataagataaagcaaccgtgtgaaattacagct

SEQ ID NO: 711012 - DNA, 33 bp, Homo sapien
cataagataaagcaactgtgtgaaattacagct

SEQ ID NO: 711013 - DNA, 33 bp, Homo sapien
ttgccaaggctaaggacgtgcccgggaaaaaga

SEQ ID NO: 711014 - DNA, 33 bp, Homo sapien
ttgccaaggctaaggatgtgcccgggaaaaaga

SEQ ID NO: 711015 - DNA, 33 bp, Homo sapien
gttgttcagaaacaggcagaattagtagcactg

SEQ ID NO: 711016 - DNA, 33 bp, Homo sapien
gttgttcagaaacaggtagaattagtagcactg

SEQ ID NO: 711017 - DNA, 33 bp, Homo sapien
ctttcaattctacttacgctccattcaaaggat

SEQ ID NO: 711018 - DNA, 33 bp, Homo sapien
ctttcaattctacttatgctccattcaaaggat

SEQ ID NO: 711019 - DNA, 33 bp, Homo sapien
aaagagacaaacacaagtgagtggtgaaagtgg

SEQ ID NO: 711020 - DNA, 33 bp, Homo sapien
aaagagacaaacacaattgagtggtgaaagtgg

SEQ ID NO: 711021 - DNA, 33 bp, Homo sapien
atagtgtttcaaaataactgcagccaacattgt

SEQ ID NO: 711022 - DNA, 33 bp, Homo sapien
atagtgtttcaaaatatctgcagccaacattgt

SEQ ID NO: 711023 - DNA, 33 bp, Homo sapien
acataggagatctttacgcattctagatactaa

SEQ ID NO: 711024 - DNA, 33 bp, Homo sapien
acataggagatctttatgcattctagatactaa

SEQ ID NO: 711025 - DNA, 33 bp, Homo sapien
ctggatccagaaagtgaaaaaaattcaattcaa

SEQ ID NO: 711026 - DNA, 33 bp, Homo sapien
ctggatccagaaagtggaaaaaattcaattcaa

SEQ ID NO: 711027 - DNA, 33 bp, Homo sapien
tgtcccctgaaatggaggtagcacgcctgtgga

SEQ ID NO: 711028 - DNA, 33 bp, Homo sapien
tgtcccctgaaatggatgtagcacgcctgtgga

SEQ ID NO: 711029 - DNA, 33 bp, Homo sapien
aaactttcatgtaaccaaattcgtataataggg

SEQ ID NO: 711030 - DNA, 33 bp, Homo sapien
aaactttcatgtaaccgaattcgtataataggg

SEQ ID NO: 711031 - DNA, 33 bp, Homo sapien
tgtaaagtgaacatgaagaatgaaagcagtgaa

SEQ ID NO: 711032 - DNA, 33 bp, Homo sapien
tgtaaagtgaacatgaggaatgaaagcagtgaa

SEQ ID NO: 711033 - DNA, 33 bp, Homo sapien
aatacattgaaatagacagtgatgaagagccca

SEQ ID NO: 711034 - DNA, 33 bp, Homo sapien
aatacattgaaatagatagtgatgaagagccca

SEQ ID NO: 711035 - DNA, 33 bp, Homo sapien; identical to SEQ ID NO: 711033

SEQ ID NO: 711036 - DNA, 33 bp, Homo sapien; identical to SEQ ID NO: 711034

SEQ ID NO: 711037 - DNA, 33 bp, Homo sapien
taggtcttcaagacacagtcatcatcaatgaat

SEQ ID NO: 711038 - DNA, 33 bp, Homo sapien
taggtcttcaagacacggtcatcatcaatgaat

SEQ ID NO: 711039 - DNA, 33 bp, Homo sapien
accagctacaatcttacatcttggtaacttata

SEQ ID NO: 711040 - DNA, 33 bp, Homo sapien
accagctacaatcttatatcttggtaacttata

SEQ ID NO: 711041 - DNA, 33 bp, Homo sapien
gaggggattataggaaagaacagcattgatacc

SEQ ID NO: 711042 - DNA, 33 bp, Homo sapien
gaggggattataggaaggaacagcattgatacc

SEQ ID NO: 711043 - DNA, 33 bp, Homo sapien
agtttctcttcttgaaattaaacattaccattt

SEQ ID NO: 711044 - DNA, 33 bp, Homo sapien
agtttctcttcttgaagttaaacattaccattt

SEQ ID NO: 711045 - DNA, 33 bp, Homo sapien
agctcaaactcagtctcaatgaaattgctgcac

SEQ ID NO: 711046 - DNA, 33 bp, Homo sapien
agctcaaactcagtctgaatgaaattgctgcac

SEQ ID NO: 711047 - DNA, 33 bp, Homo sapien
acaagaattgatcctacactgggactacagcca

SEQ ID NO: 711048 - DNA, 33 bp, Homo sapien
acaagaattgatcctatactgggactacagcca

SEQ ID NO: 711049 - DNA, 33 bp, Homo sapien
ctttgttacgcatacacattttcttgagccaat

SEQ ID NO: 711050 - DNA, 33 bp, Homo sapien
ctttgttacgcatacatattttcttgagccaat

SEQ ID NO: 711051 - DNA, 33 bp, Homo sapien
acaaccatcactgcaaacaatttttgaacattt

SEQ ID NO: 711052 - DNA, 33 bp, Homo sapien
acaaccatcactgcaatcaatttttgaacattt

SEQ ID NO: 711053 - DNA, 33 bp, Homo sapien
agaaatttaagatggaaaaacttggctggacac

SEQ ID NO: 711054 - DNA, 33 bp, Homo sapien
agaaatttaagatggagaaacttggctggacac

SEQ ID NO: 711055 - DNA, 33 bp, Homo sapien
tggagtttggaaaataagagatgtggttggaga

SEQ ID NO: 711056 - DNA, 33 bp, Homo sapien
tggagtttggaaaataggagatgtggttggaga

SEQ ID NO: 711057 - DNA, 33 bp, Homo sapien
ggctattgtttcaatacaccagacattttcaag

SEQ ID NO: 711058 - DNA, 33 bp, Homo sapien
ggctattgtttcaatataccagacattttcaag

SEQ ID NO: 711059 - DNA, 33 bp, Homo sapien
cttgatgtacactttaaaggccagacaggtgta

SEQ ID NO: 711060 - DNA, 33 bp, Homo sapien
cttgatgtacactttagaggccagacaggtgta

SEQ ID NO: 711061 - DNA, 33 bp, Homo sapien
acacagaactgagaatcaagaggctagaaatat

SEQ ID NO: 711062 - DNA, 33 bp, Homo sapien
acacagaactgagaatgaagaggctagaaatat

SEQ ID NO: 711063 - DNA, 33 bp, Homo sapien
tctaaatgttgaaagaccaaaaggttaataaag

SEQ ID NO: 711064 - DNA, 33 bp, Homo sapien
tctaaatgttgaaagatcaaaaggttaataaag

SEQ ID NO: 711065 - DNA, 33 bp, Homo sapien
tgaagccagagtcagactatcacacttttatat

SEQ ID NO: 711066 - DNA, 33 bp, Homo sapien
tgaagccagagtcagagtatcacacttttatat

SEQ ID NO: 711067 - DNA, 33 bp, Homo sapien
cattcattatggattacaggggttgcttttttc

SEQ ID NO: 711068 - DNA, 33 bp, Homo sapien
cattcattatggattataggggttgcttttttc

SEQ ID NO: 711069 - DNA, 33 bp, Homo sapien
gaagtacagctataacgatctaagcaaaactga

SEQ ID NO: 711070 - DNA, 33 bp, Homo sapien
gaagtacagctataactatctaagcaaaactga

SEQ ID NO: 711071 - DNA, 33 bp, Homo sapien
gtcttggagctgaaccccatcgtaaatcaacct

SEQ ID NO: 711072 - DNA, 33 bp, Homo sapien
gtcttggagctgaacctcatcgtaaatcaacct

SEQ ID NO: 711073 - DNA, 33 bp, Homo sapien
gtacactgtacaaaaagaatcaagacagtgata

SEQ ID NO: 711074 - DNA, 33 bp, Homo sapien
gtacactgtacaaaaataatcaagacagtgata

SEQ ID NO: 711075 - DNA, 33 bp, Homo sapien
gtacttaactccactgaattgtactcttttaaa

SEQ ID NO: 711076 - DNA, 33 bp, Homo sapien
gtacttaactccactgtattgtactcttttaaa

SEQ ID NO: 711077 - DNA, 33 bp, Homo sapien
ttcatcacccagaaaccccatactcattaagta

SEQ ID NO: 711078 - DNA, 33 bp, Homo sapien
ttcatcacccagaaactccatactcattaagta

SEQ ID NO: 711079 - DNA, 33 bp, Homo sapien
accaccacttcagcttcaactagattaggtgtc

SEQ ID NO: 711080 - DNA, 33 bp, Homo sapien
accaccacttcagctttaactagattaggtgtc

SEQ ID NO: 711081 - DNA, 33 bp, Homo sapien
tcaaagtaagttaccaaattactcccatgttat

SEQ ID NO: 711082 - DNA, 33 bp, Homo sapien
tcaaagtaagttaccagattactcccatgttat

SEQ ID NO: 711083 - DNA, 33 bp, Homo sapien
atcacatgagcaaagacgatcacttttttttat

SEQ ID NO: 711084 - DNA, 33 bp, Homo sapien
atcacatgagcaaagaggatcacttttttttat

SEQ ID NO: 711085 - DNA, 33 bp, Homo sapien
ggaaaagaaggaaagaatattccagctacttgg

SEQ ID NO: 711086 - DNA, 33 bp, Homo sapien
ggaaaagaaggaaagactattccagctacttgg

SEQ ID NO: 711087 - DNA, 33 bp, Homo sapien
ctacaaagtataaaggacaagaagataccacga

SEQ ID NO: 711088 - DNA, 33 bp, Homo sapien
ctacaaagtataaaggtcaagaagataccacga

SEQ ID NO: 711089 - DNA, 33 bp, Homo sapien
aggttggagaggcagagagataactgtcaaact

SEQ ID NO: 711090 - DNA, 33 bp, Homo sapien
aggttggagaggcagatagataactgtcaaact

SEQ ID NO: 711091 - DNA, 33 bp, Homo sapien
gagcaactttacaagcaactaactgaaggaagc

SEQ ID NO: 711092 - DNA, 33 bp, Homo sapien
gagcaactttacaagcgactaactgaaggaagc

SEQ ID NO: 711093 - DNA, 33 bp, Homo sapien
acaaataaaaaccaaaatgagttgctttcctat

SEQ ID NO: 711094 - DNA, 33 bp, Homo sapien
acaaataaaaaccaaagtgagttgctttcctat

SEQ ID NO: 711095 - DNA, 33 bp, Homo sapien
gagatggaagataaatcagacaaggttccttgc

SEQ ID NO: 711096 - DNA, 33 bp, Homo sapien
gagatggaagataaattagacaaggttccttgc

SEQ ID NO: 711097 - DNA, 33 bp, Homo sapien
tgcaatggcccatgaaagatgaggaaagagaac

SEQ ID NO: 711098 - DNA, 33 bp, Homo sapien
tgcaatggcccatgaatgatgaggaaagagaac

SEQ ID NO: 711099 - DNA, 33 bp, Homo sapien
tctccaatttcttcaaatctctgtcacttaaac

SEQ ID NO: 711100 - DNA, 33 bp, Homo sapien
tctccaatttcttcaagtctctgtcacttaaac

SEQ ID NO: 711101 - DNA, 33 bp, Homo sapien
tcagacctgctcttaaacaaaactttcaatatc

SEQ ID NO: 711102 - DNA, 33 bp, Homo sapien
tcagacctgctcttaatcaaaactttcaatatc

SEQ ID NO: 711103 - DNA, 33 bp, Homo sapien
ctttagaatagagatacgttccaaccttttccc

SEQ ID NO: 711104 - DNA, 33 bp, Homo sapien
ctttagaatagagatatgttccaaccttttccc

SEQ ID NO: 711105 - DNA, 33 bp, Homo sapien
ccctccttaatgttatcactggactttgtctat

SEQ ID NO: 711106 - DNA, 33 bp, Homo sapien
ccctccttaatgttattactggactttgtctat

SEQ ID NO: 711107 - DNA, 33 bp, Homo sapien
tatcccgactcctgacaaggtacctgaaatata

SEQ ID NO: 711108 - DNA, 33 bp, Homo sapien
tatcccgactcctgacgaggtacctgaaatata

SEQ ID NO: 711109 - DNA, 33 bp, Homo sapien
ggaactgggtaggcagcaattctaagattatac

SEQ ID NO: 711110 - DNA, 33 bp, Homo sapien
ggaactgggtaggcaggaattctaagattatac

SEQ ID NO: 711111 - DNA, 33 bp, Homo sapien
cctgtactctggcttacggatcaaaaaataaga

SEQ ID NO: 711112 - DNA, 33 bp, Homo sapien
cctgtactctggcttatggatcaaaaaataaga

SEQ ID NO: 711113 - DNA, 33 bp, Homo sapien
ctttcacacaaatatggcacagctgagaaaagt

SEQ ID NO: 711114 - DNA, 33 bp, Homo sapien
ctttcacacaaatatgtcacagctgagaaaagt

SEQ ID NO: 711115 - DNA, 33 bp, Homo sapien
cccagcatagtaaagacaggtcatagctcagtt

SEQ ID NO: 711116 - DNA, 33 bp, Homo sapien
cccagcatagtaaagataggtcatagctcagtt

SEQ ID NO: 711117 - DNA, 33 bp, Homo sapien
ctttgctactcccaggaaatgctaaagaaaggt

SEQ ID NO: 711118 - DNA, 33 bp, Homo sapien
ctttgctactcccaggtaatgctaaagaaaggt

SEQ ID NO: 711119 - DNA, 33 bp, Homo sapien
tgacagtggagctttcaagagttcgtccagcct

SEQ ID NO: 711120 - DNA, 33 bp, Homo sapien
tgacagtggagctttcgagagttcgtccagcct

SEQ ID NO: 711121 - DNA, 33 bp, Homo sapien
tagattagtgtgttcgccaggtatgaagtagag

SEQ ID NO: 711122 - DNA, 33 bp, Homo sapien
tagattagtgtgttcgtcaggtatgaagtagag

SEQ ID NO: 711123 - DNA, 33 bp, Homo sapien
aagcaagtcttcaaggcataaagtgcttcactt

SEQ ID NO: 711124 - DNA, 33 bp, Homo sapien
aagcaagtcttcaaggtataaagtgcttcactt

SEQ ID NO: 711125 - DNA, 33 bp, Homo sapien
cttaagttgtcggtcacagtctaaatgtacctt

SEQ ID NO: 711126 - DNA, 33 bp, Homo sapien
cttaagttgtcggtcagagtctaaatgtacctt

SEQ ID NO: 711127 - DNA, 33 bp, Homo sapien
gtagaaaactcagaacactttgagaaatggcag

SEQ ID NO: 711128 - DNA, 33 bp, Homo sapien
gtagaaaactcagaacgctttgagaaatggcag

SEQ ID NO: 711129 - DNA, 33 bp, Homo sapien
tttttattcctaaggacgagaataagaactatt

SEQ ID NO: 711130 - DNA, 33 bp, Homo sapien
tttttattcctaaggatgagaataagaactatt

SEQ ID NO: 711131 - DNA, 33 bp, Homo sapien
atacaaatccacaccaagattagaggagtcttc

SEQ ID NO: 711132 - DNA, 33 bp, Homo sapien
atacaaatccacaccatgattagaggagtcttc

SEQ ID NO: 711133 - DNA, 33 bp, Homo sapien
gtataataagggtttacgtaagcagaactttta

SEQ ID NO: 711134 - DNA, 33 bp, Homo sapien
gtataataagggtttatgtaagcagaactttta

SEQ ID NO: 711135 - DNA, 33 bp, Homo sapien
aatacaatgtaaatgaaatgcaagtagttgttg

SEQ ID NO: 711136 - DNA, 33 bp, Homo sapien
aatacaatgtaaatgatatgcaagtagttgttg

SEQ ID NO: 711137 - DNA, 33 bp, Homo sapien
gttatcttgtttgaaacagaagacacacagagt

SEQ ID NO: 711138 - DNA, 33 bp, Homo sapien
gttatcttgtttgaaatagaagacacacagagt

SEQ ID NO: 711139 - DNA, 33 bp, Homo sapien
gagaaaatgtggacaaggcaagaaattcctgtc

SEQ ID NO: 711140 - DNA, 33 bp, Homo sapien
gagaaaatgtggacaatgcaagaaattcctgtc

SEQ ID NO: 711141 - DNA, 33 bp, Homo sapien
ccctaatcaaaatataacagcactgacaaaaat

SEQ ID NO: 711142 - DNA, 33 bp, Homo sapien
ccctaatcaaaatatatcagcactgacaaaaat

SEQ ID NO: 711143 - DNA, 33 bp, Homo sapien
aaaggtacaggggaataaacatcagttagcact

SEQ ID NO: 711144 - DNA, 33 bp, Homo sapien
aaaggtacaggggaatgaacatcagttagcact

SEQ ID NO: 711145 - DNA, 33 bp, Homo sapien
tgaatagcaaatactcaaaaaggcaaaacacta

SEQ ID NO: 711146 - DNA, 33 bp, Homo sapien
tgaatagcaaatactccaaaaggcaaaacacta

SEQ ID NO: 711147 - DNA, 33 bp, Homo sapien
catgaaaagtgctaagaaatactgtaaaaaggc

SEQ ID NO: 711148 - DNA, 33 bp, Homo sapien
catgaaaagtgctaaggaatactgtaaaaaggc

SEQ ID NO: 711149 - DNA, 33 bp, Homo sapien
tcttcctcaacttttaaatgagatgaatcaact

SEQ ID NO: 711150 - DNA, 33 bp, Homo sapien
tcttcctcaacttttacatgagatgaatcaact

SEQ ID NO: 711151 - DNA, 33 bp, Homo sapien
cttctgaaggatcctcaataatccatgctttgg

SEQ ID NO: 711152 - DNA, 33 bp, Homo sapien
cttctgaaggatcctcgataatccatgctttgg

SEQ ID NO: 711153 - DNA, 33 bp, Homo sapien
agggagctaataagtaagaggaatacatggacg

SEQ ID NO: 711154 - DNA, 33 bp, Homo sapien
agggagctaataagtatgaggaatacatggacg

SEQ ID NO: 711155 - DNA, 33 bp, Homo sapien
ttctattcccagccaacttatagatcaactatg

SEQ ID NO: 711156 - DNA, 33 bp, Homo sapien
ttctattcccagccaagttatagatcaactatg

SEQ ID NO: 711157 - DNA, 33 bp, Homo sapien
tagctgagcactagtagtaagaagagagcagag

SEQ ID NO: 711158 - DNA, 33 bp, Homo sapien
tagctgagcactagtattaagaagagagcagag

SEQ ID NO: 711159 - DNA, 33 bp, Homo sapien
gtattctcccgttgacaagactgcttcttcaag

SEQ ID NO: 711160 - DNA, 33 bp, Homo sapien
gtattctcccgttgacgagactgcttcttcaag

SEQ ID NO: 711161 - DNA, 33 bp, Homo sapien
ttggtttcagaagagcacatcctactagtctcc

SEQ ID NO: 711162 - DNA, 33 bp, Homo sapien
ttggtttcagaagagcgcatcctactagtctcc

SEQ ID NO: 711163 - DNA, 33 bp, Homo sapien
ctttaatatggtttaacgagactcaagatgatc

SEQ ID NO: 711164 - DNA, 33 bp, Homo sapien
ctttaatatggtttaatgagactcaagatgatc

SEQ ID NO: 711165 - DNA, 33 bp, Homo sapien
gatgactctaaggagaatagtcatcattttaag

SEQ ID NO: 711166 - DNA, 33 bp, Homo sapien
gatgactctaaggagactagtcatcattttaag

SEQ ID NO: 711167 - DNA, 33 bp, Homo sapien
gggtgtatagcacaaccaggctaactcttaaaa

SEQ ID NO: 711168 - DNA, 33 bp, Homo sapien
gggtgtatagcacaactaggctaactcttaaaa

SEQ ID NO: 711169 - DNA, 33 bp, Homo sapien
atttctaactctcacaaaacctcaagaagctat

SEQ ID NO: 711170 - DNA, 33 bp, Homo sapien
atttctaactctcacacaacctcaagaagctat

SEQ ID NO: 711171 - DNA, 33 bp, Homo sapien
tcctctttaaaatttccctggagagctctctgt

SEQ ID NO: 711172 - DNA, 33 bp, Homo sapien
tcctctttaaaatttctctggagagctctctgt

SEQ ID NO: 711173 - DNA, 33 bp, Homo sapien
catcactcaatgactactaagcaagagtgggac

SEQ ID NO: 711174 - DNA, 33 bp, Homo sapien
catcactcaatgactattaagcaagagtgggac

SEQ ID NO: 711175 - DNA, 33 bp, Homo sapien
gaggtgcctaaacaagcagtaatcaagataaat

SEQ ID NO: 711176 - DNA, 33 bp, Homo sapien
gaggtgcctaaacaagtagtaatcaagataaat

SEQ ID NO: 711177 - DNA, 33 bp, Homo sapien
tggtacgtaaaaatgcgcctcggtgatgatgga

SEQ ID NO: 711178 - DNA, 33 bp, Homo sapien
tggtacgtaaaaatgctcctcggtgatgatgga

SEQ ID NO: 711179 - DNA, 33 bp, Homo sapien
gttttacctgtgcttccgaactaatggctataa

SEQ ID NO: 711180 - DNA, 33 bp, Homo sapien
gttttacctgtgcttctgaactaatggctataa

SEQ ID NO: 711181 - DNA, 33 bp, Homo sapien
catcatatcacactaaacaccaagctatgccca

SEQ ID NO: 711182 - DNA, 33 bp, Homo sapien
catcatatcacactaagcaccaagctatgccca

SEQ ID NO: 711183 - DNA, 33 bp, Homo sapien
ttcagtactcctttcacgttgatgtgttcatca

SEQ ID NO: 711184 - DNA, 33 bp, Homo sapien
ttcagtactcctttcatgttgatgtgttcatca

SEQ ID NO: 711185 - DNA, 33 bp, Homo sapien
ggtcttcgtagattaactgttttagtctgtaca

SEQ ID NO: 711186 - DNA, 33 bp, Homo sapien
ggtcttcgtagattaattgttttagtctgtaca

SEQ ID NO: 711187 - DNA, 33 bp, Homo sapien
ctcctgggcctttgcagcagagcagaccgcagc

SEQ ID NO: 711188 - DNA, 33 bp, Homo sapien
ctcctgggcctttgcatcagagcagaccgcagc

SEQ ID NO: 711189 - DNA, 33 bp, Homo sapien
gacagagggtttcctgacaaacatccaacttgt

SEQ ID NO: 711190 - DNA, 33 bp, Homo sapien
gacagagggtttcctggcaaacatccaacttgt

SEQ ID NO: 711191 - DNA, 33 bp, Homo sapien
caatcccagagtagataacgtgctggagagtga

SEQ ID NO: 711192 - DNA, 33 bp, Homo sapien
caatcccagagtagatcacgtgctggagagtga

SEQ ID NO: 711193 - DNA, 33 bp, Homo sapien
ataaaaacatttttgacgtagcccatgcaatat

SEQ ID NO: 711194 - DNA, 33 bp, Homo sapien
ataaaaacatttttgatgtagcccatgcaatat

SEQ ID NO: 711195 - DNA, 33 bp, Homo sapien
gaccatctattttgaaaaagacattgcatttgg

SEQ ID NO: 711196 - DNA, 33 bp, Homo sapien
gaccatctattttgaataagacattgcatttgg

SEQ ID NO: 711197 - DNA, 33 bp, Homo sapien
acacaaaactaaatacaacaggacatctacctt

SEQ ID NO: 711198 - DNA, 33 bp, Homo sapien
acacaaaactaaatacgacaggacatctacctt

SEQ ID NO: 711199 - DNA, 33 bp, Homo sapien
acaggaagaaactataccactgtaaacggaggc

SEQ ID NO: 711200 - DNA, 33 bp, Homo sapien
acaggaagaaactatagcactgtaaacggaggc

SEQ ID NO: 711201 - DNA, 33 bp, Homo sapien
ctcccagaaagaggcccgccttagtatccctgc

SEQ ID NO: 711202 - DNA, 33 bp, Homo sapien
ctcccagaaagaggcctgccttagtatccctgc

SEQ ID NO: 711203 - DNA, 33 bp, Homo sapien
ggagaagctgtataaacgagaaagccaggttta

SEQ ID NO: 711204 - DNA, 33 bp, Homo sapien
ggagaagctgtataaatgagaaagccaggttta

SEQ ID NO: 711205 - DNA, 33 bp, Homo sapien
ctggtagcagatgtcaacctcttgtcaatccag

SEQ ID NO: 711206 - DNA, 33 bp, Homo sapien
ctggtagcagatgtcagcctcttgtcaatccag

SEQ ID NO: 711207 - DNA, 33 bp, Homo sapien
tgtttgtctgacataacgtagaagagtcttgga

SEQ ID NO: 711208 - DNA, 33 bp, Homo sapien
tgtttgtctgacataatgtagaagagtcttgga

SEQ ID NO: 711209 - DNA, 33 bp, Homo sapien
aaaagatgttcatagtaaccttaaatgatcttt

SEQ ID NO: 711210 - DNA, 33 bp, Homo sapien
aaaagatgttcatagtgaccttaaatgatcttt

SEQ ID NO: 711211 - DNA, 33 bp, Homo sapien
aaaatataaagtgcacacttagaaaaatataaa

SEQ ID NO: 711212 - DNA, 33 bp, Homo sapien
aaaatataaagtgcacgcttagaaaaatataaa

SEQ ID NO: 711213 - DNA, 33 bp, Homo sapien
ggaacaaacttccatcaaagccaatccgaaagg

SEQ ID NO: 711214 - DNA, 33 bp, Homo sapien
ggaacaaacttccatcgaagccaatccgaaagg

SEQ ID NO: 711215 - DNA, 33 bp, Homo sapien
cataacttagacattacaattttagaaagtccc

SEQ ID NO: 711216 - DNA, 33 bp, Homo sapien
cataacttagacattagaattttagaaagtccc

SEQ ID NO: 711217 - DNA, 33 bp, Homo sapien
ataactgtaggctcacaagaagttgcagaaata

SEQ ID NO: 711218 - DNA, 33 bp, Homo sapien
ataactgtaggctcaccagaagttgcagaaata

SEQ ID NO: 711219 - DNA, 33 bp, Homo sapien
gaccaaatgttacagaactcacacacctgagtg

SEQ ID NO: 711220 - DNA, 33 bp, Homo sapien
gaccaaatgttacagatctcacacacctgagtg

SEQ ID NO: 711221 - DNA, 33 bp, Homo sapien
attttatgggccaagcaagatttttcctgaacc

SEQ ID NO: 711222 - DNA, 33 bp, Homo sapien
attttatgggccaagcgagatttttcctgaacc

SEQ ID NO: 711223 - DNA, 33 bp, Homo sapien
tccttcacaaagcgaacggagagatgaaatgtg

SEQ ID NO: 711224 - DNA, 33 bp, Homo sapien
tccttcacaaagcgaatggagagatgaaatgtg

SEQ ID NO: 711225 - DNA, 33 bp, Homo sapien
aaggatgtgtacaaacaaaggatatattccaaa

SEQ ID NO: 711226 - DNA, 33 bp, Homo sapien
aaggatgtgtacaaacgaaggatatattccaaa

SEQ ID NO: 711227 - DNA, 33 bp, Homo sapien
gctgctctgaggcccacaagaactcgcatcctg

SEQ ID NO: 711228 - DNA, 33 bp, Homo sapien
gctgctctgaggcccataagaactcgcatcctg

SEQ ID NO: 711229 - DNA, 33 bp, Homo sapien
agtcagatgaaagagacgtttactgggaaagct

SEQ ID NO: 711230 - DNA, 33 bp, Homo sapien
agtcagatgaaagagatgtttactgggaaagct

SEQ ID NO: 711231 - DNA, 33 bp, Homo sapien
acttgggtgagggagcaagaggagtgttatatg

SEQ ID NO: 711232 - DNA, 33 bp, Homo sapien
acttgggtgagggagcgagaggagtgttatatg

SEQ ID NO: 711233 - DNA, 33 bp, Homo sapien
tccttctctggactgccgcaaaatgctagtgtc

SEQ ID NO: 711234 - DNA, 33 bp, Homo sapien
tccttctctggactgctgcaaaatgctagtgtc

SEQ ID NO: 711235 - DNA, 33 bp, Homo sapien
aaaatgattcctttacaactttgaggatttgac

SEQ ID NO: 711236 - DNA, 33 bp, Homo sapien
aaaatgattcctttacgactttgaggatttgac

SEQ ID NO: 711237 - DNA, 33 bp, Homo sapien
acagatcaaggcagagaaagtttgcagcacaga

SEQ ID NO: 711238 - DNA, 33 bp, Homo sapien
acagatcaaggcagaggaagtttgcagcacaga

SEQ ID NO: 711239 - DNA, 33 bp, Homo sapien
atccttggttacccaacgtcttgtgtcttgcac

SEQ ID NO: 711240 - DNA, 33 bp, Homo sapien
atccttggttacccaatgtcttgtgtcttgcac

SEQ ID NO: 711241 - DNA, 33 bp, Homo sapien
agagctccatggaaaaatcagcatacttcctgt

SEQ ID NO: 711242 - DNA, 33 bp, Homo sapien
agagctccatggaaaactcagcatacttcctgt

SEQ ID NO: 711243 - DNA, 33 bp, Homo sapien
ttaatgtcaaccaagcaacctagaagagctcca

SEQ ID NO: 711244 - DNA, 33 bp, Homo sapien
ttaatgtcaaccaagcgacctagaagagctcca

SEQ ID NO: 711245 - DNA, 33 bp, Homo sapien
tttacaaaggcatcacagaaggaattatgttta

SEQ ID NO: 711246 - DNA, 33 bp, Homo sapien
tttacaaaggcatcacggaaggaattatgttta

SEQ ID NO: 711247 - DNA, 33 bp, Homo sapien
atagtaagttattaaacagtgtgagcccagcac

SEQ ID NO: 711248 - DNA, 33 bp, Homo sapien
atagtaagttattaaatagtgtgagcccagcac

SEQ ID NO: 711249 - DNA, 33 bp, Homo sapien
aaagcaacaaacactcacaacaagggtgtgctc

SEQ ID NO: 711250 - DNA, 33 bp, Homo sapien
aaagcaacaaacactcgcaacaagggtgtgctc

SEQ ID NO: 711251 - DNA, 33 bp, Homo sapien
agggcatgggccttgcaaattccaactgttact

SEQ ID NO: 711252 - DNA, 33 bp, Homo sapien
agggcatgggccttgcgaattccaactgttact

SEQ ID NO: 711253 - DNA, 33 bp, Homo sapien
cattgcttcttggcacacctgaattaatgcagc

SEQ ID NO: 711254 - DNA, 33 bp, Homo sapien
cattgcttcttggcacgcctgaattaatgcagc

SEQ ID NO: 711255 - DNA, 33 bp, Homo sapien
caatattgatgttttggatcgaatttttcttat

SEQ ID NO: 711256 - DNA, 33 bp, Homo sapien
caatattgatgttttgtatcgaatttttcttat

SEQ ID NO: 711257 - DNA, 33 bp, Homo sapien
caaagaaatgcaatagaccaaattcatttttaa

SEQ ID NO: 711258 - DNA, 33 bp, Homo sapien
caaagaaatgcaatagcccaaattcatttttaa

SEQ ID NO: 711259 - DNA, 33 bp, Homo sapien
ccagagaatctgtaaaatccttcagatgtaagc

SEQ ID NO: 711260 - DNA, 33 bp, Homo sapien
ccagagaatctgtaaagtccttcagatgtaagc

SEQ ID NO: 711261 - DNA, 33 bp, Homo sapien
cacagtggccacggcaagccctacacaaggaga

SEQ ID NO: 711262 - DNA, 33 bp, Homo sapien
cacagtggccacggcaggccctacacaaggaga

SEQ ID NO: 711263 - DNA, 33 bp, Homo sapien
aaaccccaagttaatcaaactactcaggcttgg

SEQ ID NO: 711264 - DNA, 33 bp, Homo sapien
aaaccccaagttaatcgaactactcaggcttgg

SEQ ID NO: 711265 - DNA, 33 bp, Homo sapien
tcattctcttaaactgaagtaattcctagataa

SEQ ID NO: 711266 - DNA, 33 bp, Homo sapien
tcattctcttaaactggagtaattcctagataa

SEQ ID NO: 711267 - DNA, 33 bp, Homo sapien
ctattgtgtaccatgcaagccttagtaaatgta

SEQ ID NO: 711268 - DNA, 33 bp, Homo sapien
ctattgtgtaccatgcgagccttagtaaatgta

SEQ ID NO: 711269 - DNA, 33 bp, Homo sapien
cttatgtgtaagctctaactgattctgtgtaat

SEQ ID NO: 711270 - DNA, 33 bp, Homo sapien
cttatgtgtaagctctcactgattctgtgtaat

SEQ ID NO: 711271 - DNA, 33 bp, Homo sapien
atttctagggcacatacatttgcagggtaaaac

SEQ ID NO: 711272 - DNA, 33 bp, Homo sapien
atttctagggcacatatatttgcagggtaaaac

SEQ ID NO: 711273 - DNA, 33 bp, Homo sapien
agtaataatttcggcaagacttatccagacagc

SEQ ID NO: 711274 - DNA, 33 bp, Homo sapien
agtaataatttcggcaggacttatccagacagc

SEQ ID NO: 711275 - DNA, 33 bp, Homo sapien
actattgtatatttctcacatcatttagcactg

SEQ ID NO: 711276 - DNA, 33 bp, Homo sapien
actattgtatatttcttacatcatttagcactg

SEQ ID NO: 711277 - DNA, 33 bp, Homo sapien
acccaattgttgatcaaatcctgcccaacctgc

SEQ ID NO: 711278 - DNA, 33 bp, Homo sapien
acccaattgttgatcacatcctgcccaacctgc

SEQ ID NO: 711279 - DNA, 33 bp, Homo sapien
gtggcaatccatatgcaaagtgatggcagtcca

SEQ ID NO: 711280 - DNA, 33 bp, Homo sapien
gtggcaatccatatgcgaagtgatggcagtcca

SEQ ID NO: 711281 - DNA, 33 bp, Homo sapien
tgacctagatccttccaaataagtgacatttga

SEQ ID NO: 711282 - DNA, 33 bp, Homo sapien
tgacctagatccttccgaataagtgacatttga

SEQ ID NO: 711283 - DNA, 33 bp, Homo sapien
tttattctgttataccactaataccgcaaaagg

SEQ ID NO: 711284 - DNA, 33 bp, Homo sapien
tttattctgttataccgctaataccgcaaaagg

SEQ ID NO: 711285 - DNA, 33 bp, Homo sapien
agccatagtctttcaaatagataccatattcca

SEQ ID NO: 711286 - DNA, 33 bp, Homo sapien
agccatagtctttcaagtagataccatattcca

SEQ ID NO: 711287 - DNA, 33 bp, Homo sapien
ctggaaatttagatgaccaacttcaaaagctgt

SEQ ID NO: 711288 - DNA, 33 bp, Homo sapien
ctggaaatttagatgatcaacttcaaaagctgt

SEQ ID NO: 711289 - DNA, 33 bp, Homo sapien
ttgtgccaaccctcaaactttcttaaataccaa

SEQ ID NO: 711290 - DNA, 33 bp, Homo sapien
ttgtgccaaccctcaagctttcttaaataccaa

SEQ ID NO: 711291 - DNA, 33 bp, Homo sapien
tttaataataatcataaggaatagaagttatat

SEQ ID NO: 711292 - DNA, 33 bp, Homo sapien
tttaataataatcatacggaatagaagttatat

SEQ ID NO: 711293 - DNA, 33 bp, Homo sapien
tttttctctccgtttgaacctttccatcaataa

SEQ ID NO: 711294 - DNA, 33 bp, Homo sapien
tttttctctccgtttgcacctttccatcaataa

SEQ ID NO: 711295 - DNA, 33 bp, Homo sapien
ccatgcatttcttctcaccccccactgtcaact

SEQ ID NO: 711296 - DNA, 33 bp, Homo sapien
ccatgcatttcttctcgccccccactgtcaact

SEQ ID NO: 711297 - DNA, 33 bp, Homo sapien
aatgagatctgtgccactaaaattaaaattggg

SEQ ID NO: 711298 - DNA, 33 bp, Homo sapien
aatgagatctgtgccagtaaaattaaaattggg

SEQ ID NO: 711299 - DNA, 33 bp, Homo sapien
tgtacctggagaaaggccaggtctgagaatatt

SEQ ID NO: 711300 - DNA, 33 bp, Homo sapien
tgtacctggagaaaggtcaggtctgagaatatt

SEQ ID NO: 711301 - DNA, 33 bp, Homo sapien
tagagcaccctgaatacatatgtggagggcttc

SEQ ID NO: 711302 - DNA, 33 bp, Homo sapien
tagagcaccctgaatatatatgtggagggcttc

SEQ ID NO: 711303 - DNA, 33 bp, Homo sapien
ataacatactagataaaactaagtcctcattgt

SEQ ID NO: 711304 - DNA, 33 bp, Homo sapien
ataacatactagataacactaagtcctcattgt

SEQ ID NO: 711305 - DNA, 33 bp, Homo sapien
cactcaggctgctccaagttttgtttgtgcctc

SEQ ID NO: 711306 - DNA, 33 bp, Homo sapien
cactcaggctgctccaggttttgtttgtgcctc

SEQ ID NO: 711307 - DNA, 33 bp, Homo sapien
ttaaaaactgctagaaatatatccgcaaactta

SEQ ID NO: 711308 - DNA, 33 bp, Homo sapien
ttaaaaactgctagaattatatccgcaaactta

SEQ ID NO: 711309 - DNA, 33 bp, Homo sapien
tgaaacaaaatgaggcaaagattctctactaaa

SEQ ID NO: 711310 - DNA, 33 bp, Homo sapien
tgaaacaaaatgaggcgaagattctctactaaa

SEQ ID NO: 711311 - DNA, 33 bp, Homo sapien
taccccacccaaacaaccagagtggtcagagtc

SEQ ID NO: 711312 - DNA, 33 bp, Homo sapien
taccccacccaaacaatcagagtggtcagagtc

SEQ ID NO: 711313 - DNA, 33 bp, Homo sapien
gatcctgggaacttcacgtacagttgttaccct

SEQ ID NO: 711314 - DNA, 33 bp, Homo sapien
gatcctgggaacttcatgtacagttgttaccct

SEQ ID NO: 711315 - DNA, 33 bp, Homo sapien
aatcacactgcaggccaaagctccttttcctca

SEQ ID NO: 711316 - DNA, 33 bp, Homo sapien
aatcacactgcaggccgaagctccttttcctca

SEQ ID NO: 711317 - DNA, 33 bp, Homo sapien
tgactaggacctatagccaaaaccaaaatttcc

SEQ ID NO: 711318 - DNA, 33 bp, Homo sapien
tgactaggacctatagtcaaaaccaaaatttcc

SEQ ID NO: 711319 - DNA, 33 bp, Homo sapien
gaaagtattaatgtaaatggtgaattcctctta

SEQ ID NO: 711320 - DNA, 33 bp, Homo sapien
gaaagtattaatgtaagtggtgaattcctctta

SEQ ID NO: 711321 - DNA, 33 bp, Homo sapien
ttttcaaaccctcagccatgaatcaatcaattt

SEQ ID NO: 711322 - DNA, 33 bp, Homo sapien
ttttcaaaccctcagctatgaatcaatcaattt

SEQ ID NO: 711323 - DNA, 33 bp, Homo sapien
ttaaaattttccccaaagctctcttttcaaacc

SEQ ID NO: 711324 - DNA, 33 bp, Homo sapien
ttaaaattttccccaaggctctcttttcaaacc

SEQ ID NO: 711325 - DNA, 33 bp, Homo sapien
aatcatatgtcaggcagtgcactaaacacgtta

SEQ ID NO: 711326 - DNA, 33 bp, Homo sapien
aatcatatgtcaggcattgcactaaacacgtta

SEQ ID NO: 711327 - DNA, 33 bp, Homo sapien
aaaatagtaagagttcaagaaagagagagagag

SEQ ID NO: 711328 - DNA, 33 bp, Homo sapien
aaaatagtaagagttccagaaagagagagagag

SEQ ID NO: 711329 - DNA, 33 bp, Homo sapien
atgccttgctgtaggacctgtggattagcagta

SEQ ID NO: 711330 - DNA, 33 bp, Homo sapien
atgccttgctgtaggatctgtggattagcagta

SEQ ID NO: 711331 - DNA, 33 bp, Homo sapien
tcactggatagccatacgagagaaaaaacgtat

SEQ ID NO: 711332 - DNA, 33 bp, Homo sapien
tcactggatagccatatgagagaaaaaacgtat

SEQ ID NO: 711333 - DNA, 33 bp, Homo sapien
tgtataatattggcacaaggatagacaagaaga

SEQ ID NO: 711334 - DNA, 33 bp, Homo sapien
tgtataatattggcacgaggatagacaagaaga

SEQ ID NO: 711335 - DNA, 33 bp, Homo sapien
caagaatagctgaggcaatcttcaagaacaaag

SEQ ID NO: 711336 - DNA, 33 bp, Homo sapien
caagaatagctgaggcgatcttcaagaacaaag

SEQ ID NO: 711337 - DNA, 33 bp, Homo sapien
tattatggaagatgaacgtttaactctcttaca

SEQ ID NO: 711338 - DNA, 33 bp, Homo sapien
tattatggaagatgaatgtttaactctcttaca

SEQ ID NO: 711339 - DNA, 33 bp, Homo sapien
caagttgaaagagaaacgtatgattccacgctc

SEQ ID NO: 711340 - DNA, 33 bp, Homo sapien
caagttgaaagagaaatgtatgattccacgctc

SEQ ID NO: 711341 - DNA, 33 bp, Homo sapien
attgaataaagtttcacgcttcatatattattg

SEQ ID NO: 711342 - DNA, 33 bp, Homo sapien
attgaataaagtttcatgcttcatatattattg

SEQ ID NO: 711343 - DNA, 33 bp, Homo sapien
taacaccacattgagaggtcattacatacctgt

SEQ ID NO: 711344 - DNA, 33 bp, Homo sapien
taacaccacattgagatgtcattacatacctgt

SEQ ID NO: 711345 - DNA, 33 bp, Homo sapien
gcctgtttttggaaacaaaccctgaagcatgga

SEQ ID NO: 711346 - DNA, 33 bp, Homo sapien
gcctgtttttggaaacgaaccctgaagcatgga

SEQ ID NO: 711347 - DNA, 33 bp, Homo sapien
gagaaatgtcacgtgcagattggctggggcttg

SEQ ID NO: 711348 - DNA, 33 bp, Homo sapien
gagaaatgtcacgtgcggattggctggggcttg

SEQ ID NO: 711349 - DNA, 33 bp, Homo sapien
gatgtagtagtaggcactgcagttgttgcccca

SEQ ID NO: 711350 - DNA, 33 bp, Homo sapien
gatgtagtagtaggcattgcagttgttgcccca

SEQ ID NO: 711351 - DNA, 33 bp, Homo sapien
cagtgcagaaattagaataactttttaagaaga

SEQ ID NO: 711352 - DNA, 33 bp, Homo sapien
cagtgcagaaattagactaactttttaagaaga

SEQ ID NO: 711353 - DNA, 33 bp, Homo sapien
agcctaaaatggcaaccctctatcttcctagtg

SEQ ID NO: 711354 - DNA, 33 bp, Homo sapien
agcctaaaatggcaactctctatcttcctagtg

SEQ ID NO: 711355 - DNA, 33 bp, Homo sapien
attatttataaggttcaagagtctatggcatga

SEQ ID NO: 711356 - DNA, 33 bp, Homo sapien
attatttataaggttcgagagtctatggcatga

SEQ ID NO: 711357 - DNA, 33 bp, Homo sapien
cccaagatttcagggccgagtggagccttatgg

SEQ ID NO: 711358 - DNA, 33 bp, Homo sapien
cccaagatttcagggctgagtggagccttatgg

SEQ ID NO: 711359 - DNA, 33 bp, Homo sapien
tttaatctttaaaatcaatgcacaatgggtcag

SEQ ID NO: 711360 - DNA, 33 bp, Homo sapien
tttaatctttaaaatcgatgcacaatgggtcag

SEQ ID NO: 711361 - DNA, 33 bp, Homo sapien
cagcctactatgtggcagataaattgtctgttt

SEQ ID NO: 711362 - DNA, 33 bp, Homo sapien
cagcctactatgtggcggataaattgtctgttt

SEQ ID NO: 711363 - DNA, 33 bp, Homo sapien
ctacggagctcaaaaaatgggagtccctgtatg

SEQ ID NO: 711364 - DNA, 33 bp, Homo sapien
ctacggagctcaaaaagtgggagtccctgtatg

SEQ ID NO: 711365 - DNA, 33 bp, Homo sapien
tgctagatggttctaaactgaggagtgatgtgt

SEQ ID NO: 711366 - DNA, 33 bp, Homo sapien
tgctagatggttctaagctgaggagtgatgtgt

SEQ ID NO: 711367 - DNA, 33 bp, Homo sapien
cattcttagtgacaccaatatcctcacagatgt

SEQ ID NO: 711368 - DNA, 33 bp, Homo sapien
cattcttagtgacacccatatcctcacagatgt

SEQ ID NO: 711369 - DNA, 33 bp, Homo sapien
tcttccatctaattctaaaacaggcagctccct

SEQ ID NO: 711370 - DNA, 33 bp, Homo sapien
tcttccatctaattctgaaacaggcagctccct

SEQ ID NO: 711371 - DNA, 33 bp, Homo sapien
ttgctttaagccggtaagtttgcagtgatttgt

SEQ ID NO: 711372 - DNA, 33 bp, Homo sapien
ttgctttaagccggtaggtttgcagtgatttgt

SEQ ID NO: 711373 - DNA, 33 bp, Homo sapien
ctgttcaaccaaacaccaagcaatttagaaaga

SEQ ID NO: 711374 - DNA, 33 bp, Homo sapien
ctgttcaaccaaacactaagcaatttagaaaga

SEQ ID NO: 711375 - DNA, 33 bp, Homo sapien
ctcagcattgttttggaaccagaactaaatgct

SEQ ID NO: 711376 - DNA, 33 bp, Homo sapien
ctcagcattgttttggcaccagaactaaatgct

SEQ ID NO: 711377 - DNA, 33 bp, Homo sapien
tggttctcaggttctacgaaattactcagcatt

SEQ ID NO: 711378 - DNA, 33 bp, Homo sapien
tggttctcaggttctatgaaattactcagcatt

SEQ ID NO: 711379 - DNA, 33 bp, Homo sapien
tagagataaaaaggtaagtggataacaaaagac

SEQ ID NO: 711380 - DNA, 33 bp, Homo sapien
tagagataaaaaggtaggtggataacaaaagac

SEQ ID NO: 711381 - DNA, 33 bp, Homo sapien
tcacttaactgaccacacttttctcctgtatcc

SEQ ID NO: 711382 - DNA, 33 bp, Homo sapien
tcacttaactgaccacgcttttctcctgtatcc

SEQ ID NO: 711383 - DNA, 33 bp, Homo sapien
tatgtaagtatataaacgtaactgatatgtgct

SEQ ID NO: 711384 - DNA, 33 bp, Homo sapien
tatgtaagtatataaatgtaactgatatgtgct

SEQ ID NO: 711385 - DNA, 33 bp, Homo sapien
gttgtctgcactgactcaggacggcatcatctc

SEQ ID NO: 711386 - DNA, 33 bp, Homo sapien
gttgtctgcactgacttaggacggcatcatctc

SEQ ID NO: 711387 - DNA, 33 bp, Homo sapien
tctagtcctctcaggcaacgggcactttttcct

SEQ ID NO: 711388 - DNA, 33 bp, Homo sapien
tctagtcctctcaggccacgggcactttttcct

SEQ ID NO: 711389 - DNA, 33 bp, Homo sapien
aaaagctgccttcataacccaaataagaaagtt

SEQ ID NO: 711390 - DNA, 33 bp, Homo sapien
aaaagctgccttcatatcccaaataagaaagtt

SEQ ID NO: 711391 - DNA, 33 bp, Homo sapien
ggtgacactgcaagaaaatgactccactagcca

SEQ ID NO: 711392 - DNA, 33 bp, Homo sapien
ggtgacactgcaagaagatgactccactagcca

SEQ ID NO: 711393 - DNA, 33 bp, Homo sapien
agcacataggattagacattttgtggatgagaa

SEQ ID NO: 711394 - DNA, 33 bp, Homo sapien
agcacataggattagatattttgtggatgagaa

SEQ ID NO: 711395 - DNA, 33 bp, Homo sapien
ctagaatagacggcaacggagagacagtaacct

SEQ ID NO: 711396 - DNA, 33 bp, Homo sapien
ctagaatagacggcaatggagagacagtaacct

SEQ ID NO: 711397 - DNA, 33 bp, Homo sapien
tttaagtcaggccaaaaggaatacagccaccag

SEQ ID NO: 711398 - DNA, 33 bp, Homo sapien
tttaagtcaggccaaagggaatacagccaccag

SEQ ID NO: 711399 - DNA, 33 bp, Homo sapien
gacaaaatggaccctacagataaactagttcac

SEQ ID NO: 711400 - DNA, 33 bp, Homo sapien
gacaaaatggaccctagagataaactagttcac

SEQ ID NO: 711401 - DNA, 33 bp, Homo sapien
tagataagcagatcgaaagcatcctggctaaca

SEQ ID NO: 711402 - DNA, 33 bp, Homo sapien
tagataagcagatcgagagcatcctggctaaca

SEQ ID NO: 711403 - DNA, 33 bp, Homo sapien
gtcccaggaagttaccaaatgacaagctaaggt

SEQ ID NO: 711404 - DNA, 33 bp, Homo sapien
gtcccaggaagttaccgaatgacaagctaaggt

SEQ ID NO: 711405 - DNA, 33 bp, Homo sapien
tggaattaactgaaaaccaaatggaaactttgg

SEQ ID NO: 711406 - DNA, 33 bp, Homo sapien
tggaattaactgaaaatcaaatggaaactttgg

SEQ ID NO: 711407 - DNA, 33 bp, Homo sapien
tttcactttccagaaccctcttttaagcaaata

SEQ ID NO: 711408 - DNA, 33 bp, Homo sapien
tttcactttccagaactctcttttaagcaaata

SEQ ID NO: 711409 - DNA, 33 bp, Homo sapien
gttgggagtcttcctacgtccaaatgattagga

SEQ ID NO: 711410 - DNA, 33 bp, Homo sapien
gttgggagtcttcctatgtccaaatgattagga

SEQ ID NO: 711411 - DNA, 33 bp, Homo sapien
ggtaaccacctttcaccctgagctgctgagaca

SEQ ID NO: 711412 - DNA, 33 bp, Homo sapien
ggtaaccacctttcacgctgagctgctgagaca

SEQ ID NO: 711413 - DNA, 33 bp, Homo sapien
tatggtccctcaatagcaagtctcatactgttt

SEQ ID NO: 711414 - DNA, 33 bp, Homo sapien
tatggtccctcaataggaagtctcatactgttt

SEQ ID NO: 711415 - DNA, 33 bp, Homo sapien
tgttttctgtttggtccaagaaggatgaaagaa

SEQ ID NO: 711416 - DNA, 33 bp, Homo sapien
tgttttctgtttggtctaagaaggatgaaagaa

SEQ ID NO: 711417 - DNA, 33 bp, Homo sapien
tcaggccagacaactccagaaagcttttcttga

SEQ ID NO: 711418 - DNA, 33 bp, Homo sapien
tcaggccagacaactcgagaaagcttttcttga

SEQ ID NO: 711419 - DNA, 33 bp, Homo sapien
ctagaggaccaaccgaaaaggaagaatgggatc

SEQ ID NO: 711420 - DNA, 33 bp, Homo sapien
ctagaggaccaaccgagaaggaagaatgggatc

SEQ ID NO: 711421 - DNA, 33 bp, Homo sapien
ttggcagctgtggaaaacctggtaagaactgta

SEQ ID NO: 711422 - DNA, 33 bp, Homo sapien
ttggcagctgtggaaaccctggtaagaactgta

SEQ ID NO: 711423 - DNA, 33 bp, Homo sapien
ctgagggattgcaaaaagattctaaacagagat

SEQ ID NO: 711424 - DNA, 33 bp, Homo sapien
ctgagggattgcaaaaggattctaaacagagat

SEQ ID NO: 711425 - DNA, 33 bp, Homo sapien
gagacactggtcaataaatggaagttgttgtca

SEQ ID NO: 711426 - DNA, 33 bp, Homo sapien
gagacactggtcaatatatggaagttgttgtca

SEQ ID NO: 711427 - DNA, 33 bp, Homo sapien
gagctggatggcattcagaacctaacctttgcc

SEQ ID NO: 711428 - DNA, 33 bp, Homo sapien
gagctggatggcattcggaacctaacctttgcc

SEQ ID NO: 711429 - DNA, 33 bp, Homo sapien
caatctttccagtccaaagtggttcaggagagg

SEQ ID NO: 711430 - DNA, 33 bp, Homo sapien
caatctttccagtccagagtggttcaggagagg

SEQ ID NO: 711431 - DNA, 33 bp, Homo sapien
aagctttagttgtaataatagaaggaatgtcaa

SEQ ID NO: 711432 - DNA, 33 bp, Homo sapien
aagctttagttgtaatcatagaaggaatgtcaa

SEQ ID NO: 711433 - DNA, 33 bp, Homo sapien
tgtcccaagattccaacgtaagcctaacaaaga

SEQ ID NO: 711434 - DNA, 33 bp, Homo sapien
tgtcccaagattccaatgtaagcctaacaaaga

SEQ ID NO: 711435 - DNA, 33 bp, Homo sapien
atcaagccttgggctagggtaatgagtcggtaa

SEQ ID NO: 711436 - DNA, 33 bp, Homo sapien
atcaagccttgggctatggtaatgagtcggtaa

SEQ ID NO: 711437 - DNA, 33 bp, Homo sapien
cgtattccttgcttaactgtgaactccagaaag

SEQ ID NO: 711438 - DNA, 33 bp, Homo sapien
cgtattccttgcttaattgtgaactccagaaag

SEQ ID NO: 711439 - DNA, 33 bp, Homo sapien
acctttctacaagcacacatttaagcttataca

SEQ ID NO: 711440 - DNA, 33 bp, Homo sapien
acctttctacaagcacgcatttaagcttataca

SEQ ID NO: 711441 - DNA, 33 bp, Homo sapien
tcactaattgtaactaagaacatttgagatttt

SEQ ID NO: 711442 - DNA, 33 bp, Homo sapien
tcactaattgtaactaggaacatttgagatttt

SEQ ID NO: 711443 - DNA, 33 bp, Homo sapien
ggggcacgctcaagaaaagcacctccattaatt

SEQ ID NO: 711444 - DNA, 33 bp, Homo sapien
ggggcacgctcaagaatagcacctccattaatt

SEQ ID NO: 711445 - DNA, 33 bp, Homo sapien
aaatcaaagacgggacgaaacaacaaacaatca

SEQ ID NO: 711446 - DNA, 33 bp, Homo sapien
aaatcaaagacgggactaaacaacaaacaatca

SEQ ID NO: 711447 - DNA, 33 bp, Homo sapien
tggtgagcgtggccaacgtcttgccaagactga

SEQ ID NO: 711448 - DNA, 33 bp, Homo sapien
tggtgagcgtggccaatgtcttgccaagactga

SEQ ID NO: 711449 - DNA, 33 bp, Homo sapien
gggtcagtgtagtacacgaatctatttctctag

SEQ ID NO: 711450 - DNA, 33 bp, Homo sapien
gggtcagtgtagtacatgaatctatttctctag

SEQ ID NO: 711451 - DNA, 33 bp, Homo sapien
ccaaaccagacagtgcactcctactcagacctt

SEQ ID NO: 711452 - DNA, 33 bp, Homo sapien
ccaaaccagacagtgcgctcctactcagacctt

SEQ ID NO: 711453 - DNA, 33 bp, Homo sapien
ttatttgcaatcagggaacccgttaaatgaagt

SEQ ID NO: 711454 - DNA, 33 bp, Homo sapien
ttatttgcaatcaggggacccgttaaatgaagt

SEQ ID NO: 711455 - DNA, 33 bp, Homo sapien
gtacctctgatggtccaactccaagataggcag

SEQ ID NO: 711456 - DNA, 33 bp, Homo sapien
gtacctctgatggtccgactccaagataggcag

SEQ ID NO: 711457 - DNA, 33 bp, Homo sapien
tcattagaaattgacaccaagacctttatcaga

SEQ ID NO: 711458 - DNA, 33 bp, Homo sapien
tcattagaaattgacagcaagacctttatcaga

SEQ ID NO: 711459 - DNA, 33 bp, Homo sapien
caatatccagcacagaaaatcatcacaaagacc

SEQ ID NO: 711460 - DNA, 33 bp, Homo sapien
caatatccagcacagagaatcatcacaaagacc

SEQ ID NO: 711461 - DNA, 33 bp, Homo sapien
cattacttaaccacaccgtaaattgattttctt

SEQ ID NO: 711462 - DNA, 33 bp, Homo sapien
cattacttaaccacacggtaaattgattttctt

SEQ ID NO: 711463 - DNA, 33 bp, Homo sapien
gagtcatgatgaacacacagttttcctgctgta

SEQ ID NO: 711464 - DNA, 33 bp, Homo sapien
gagtcatgatgaacacgcagttttcctgctgta

SEQ ID NO: 711465 - DNA, 33 bp, Homo sapien
aataagcatgaactagcaccgtcccaggcagac

SEQ ID NO: 711466 - DNA, 33 bp, Homo sapien
aataagcatgaactagtaccgtcccaggcagac

SEQ ID NO: 711467 - DNA, 33 bp, Homo sapien
ccacttagggagaaaacagaatgttgggctttt

SEQ ID NO: 711468 - DNA, 33 bp, Homo sapien
ccacttagggagaaaatagaatgttgggctttt

SEQ ID NO: 711469 - DNA, 33 bp, Homo sapien
cctttctccaggatgccaccaacttctcaatgc

SEQ ID NO: 711470 - DNA, 33 bp, Homo sapien
cctttctccaggatgctaccaacttctcaatgc

SEQ ID NO: 711471 - DNA, 33 bp, Homo sapien
tactggtacatttggaatagcactgttaagtag

SEQ ID NO: 711472 - DNA, 33 bp, Homo sapien
tactggtacatttggagtagcactgttaagtag

SEQ ID NO: 711473 - DNA, 33 bp, Homo sapien
acacttcttttcttccactacataggacaccaa

SEQ ID NO: 711474 - DNA, 33 bp, Homo sapien
acacttcttttcttccgctacataggacaccaa

SEQ ID NO: 711475 - DNA, 33 bp, Homo sapien
accaactcctaagccactggctgtcaacattta

SEQ ID NO: 711476 - DNA, 33 bp, Homo sapien
accaactcctaagccattggctgtcaacattta

SEQ ID NO: 711477 - DNA, 33 bp, Homo sapien
cttgtctatatttcccacctcatctcccattca

SEQ ID NO: 711478 - DNA, 33 bp, Homo sapien
cttgtctatatttcccgcctcatctcccattca

SEQ ID NO: 711479 - DNA, 33 bp, Homo sapien
taagaccctccgtagagaattctttcactctcc

SEQ ID NO: 711480 - DNA, 33 bp, Homo sapien
taagaccctccgtagataattctttcactctcc

SEQ ID NO: 711481 - DNA, 33 bp, Homo sapien
acatataccagtggaacggaacagataacctag

SEQ ID NO: 711482 - DNA, 33 bp, Homo sapien
acatataccagtggaatggaacagataacctag

SEQ ID NO: 711483 - DNA, 33 bp, Homo sapien
cccaatatccctactcagaacttggagataaga

SEQ ID NO: 711484 - DNA, 33 bp, Homo sapien
cccaatatccctactcggaacttggagataaga

SEQ ID NO: 711485 - DNA, 33 bp, Homo sapien
ccacacgatcctgaaaaagagttaaaaggttga

SEQ ID NO: 711486 - DNA, 33 bp, Homo sapien
ccacacgatcctgaaagagagttaaaaggttga

SEQ ID NO: 711487 - DNA, 33 bp, Homo sapien
tcttggtaggccagaaatagaaacctctctatg

SEQ ID NO: 711488 - DNA, 33 bp, Homo sapien
tcttggtaggccagaattagaaacctctctatg

SEQ ID NO: 711489 - DNA, 33 bp, Homo sapien
aagaactgtgtttacaaataagtgaagtagtca

SEQ ID NO: 711490 - DNA, 33 bp, Homo sapien
aagaactgtgtttacagataagtgaagtagtca

SEQ ID NO: 711491 - DNA, 33 bp, Homo sapien
ctccgccacttgctaaaagtgtaaccctgggca

SEQ ID NO: 711492 - DNA, 33 bp, Homo sapien
ctccgccacttgctaagagtgtaaccctgggca

SEQ ID NO: 711493 - DNA, 33 bp, Homo sapien
gctgcatgattcttccactaatgaaagtctaca

SEQ ID NO: 711494 - DNA, 33 bp, Homo sapien
gctgcatgattcttccgctaatgaaagtctaca

SEQ ID NO: 711495 - DNA, 33 bp, Homo sapien
atacagttaggtgccacgtaacatttcagtcaa

SEQ ID NO: 711496 - DNA, 33 bp, Homo sapien
atacagttaggtgccatgtaacatttcagtcaa

SEQ ID NO: 711497 - DNA, 33 bp, Homo sapien
aatctcatttaatccaaggctctggtaattatt

SEQ ID NO: 711498 - DNA, 33 bp, Homo sapien
aatctcatttaatccagggctctggtaattatt

SEQ ID NO: 711499 - DNA, 33 bp, Homo sapien
acaataatacaaaaaacgagcagtcgaggcagg

SEQ ID NO: 711500 - DNA, 33 bp, Homo sapien
acaataatacaaaaaatgagcagtcgaggcagg

SEQ ID NO: 711501 - DNA, 33 bp, Homo sapien
tttttatatataggagcccattaagaaagcatc

SEQ ID NO: 711502 - DNA, 33 bp, Homo sapien
tttttatatataggagtccattaagaaagcatc

SEQ ID NO: 711503 - DNA, 33 bp, Homo sapien
acctccattctattcccgatctccttttcttcc

SEQ ID NO: 711504 - DNA, 33 bp, Homo sapien
acctccattctattcctgatctccttttcttcc

SEQ ID NO: 711505 - DNA, 33 bp, Homo sapien
taccaacttgtacttcagaaaattgaatcatgt

SEQ ID NO: 711506 - DNA, 33 bp, Homo sapien
taccaacttgtacttcggaaaattgaatcatgt

SEQ ID NO: 711507 - DNA, 33 bp, Homo sapien
agattttaaccatttccaatcccatatattccc

SEQ ID NO: 711508 - DNA, 33 bp, Homo sapien
agattttaaccatttctaatcccatatattccc

SEQ ID NO: 711509 - DNA, 33 bp, Homo sapien
gaagaaaaaatctgtcactaatttcgctacctt

SEQ ID NO: 711510 - DNA, 33 bp, Homo sapien
gaagaaaaaatctgtcgctaatttcgctacctt

SEQ ID NO: 711511 - DNA, 33 bp, Homo sapien
attattcgagttgaaaagaatttctcacatatg

SEQ ID NO: 711512 - DNA, 33 bp, Homo sapien
attattcgagttgaaaggaatttctcacatatg

SEQ ID NO: 711513 - DNA, 33 bp, Homo sapien
attttgtgttgtgagaagataccacataaatac

SEQ ID NO: 711514 - DNA, 33 bp, Homo sapien
attttgtgttgtgagatgataccacataaatac

SEQ ID NO: 711515 - DNA, 33 bp, Homo sapien
tgatggtacagaaatacctgttagtaggtgcta

SEQ ID NO: 711516 - DNA, 33 bp, Homo sapien
tgatggtacagaaatagctgttagtaggtgcta

SEQ ID NO: 711517 - DNA, 33 bp, Homo sapien
acacttacttccaggacatctttctaaagtaca

SEQ ID NO: 711518 - DNA, 33 bp, Homo sapien
acacttacttccaggagatctttctaaagtaca

SEQ ID NO: 711519 - DNA, 33 bp, Homo sapien
ttggtaatataggttcaaggctcaaggatgtgt

SEQ ID NO: 711520 - DNA, 33 bp, Homo sapien
ttggtaatataggttcgaggctcaaggatgtgt

SEQ ID NO: 711521 - DNA, 33 bp, Homo sapien
atgaaattttttgccactggaatttgagcatta

SEQ ID NO: 711522 - DNA, 33 bp, Homo sapien
atgaaattttttgccattggaatttgagcatta

SEQ ID NO: 711523 - DNA, 33 bp, Homo sapien
attcactttatttgcacatggagagcagaaagc

SEQ ID NO: 711524 - DNA, 33 bp, Homo sapien
attcactttatttgcatatggagagcagaaagc

SEQ ID NO: 711525 - DNA, 33 bp, Homo sapien
aaagagaagggatgccaagagttatagacagag

SEQ ID NO: 711526 - DNA, 33 bp, Homo sapien
aaagagaagggatgccgagagttatagacagag

SEQ ID NO: 711527 - DNA, 33 bp, Homo sapien
ttgcggctgaaaacaaatagtgcagatggagac

SEQ ID NO: 711528 - DNA, 33 bp, Homo sapien
ttgcggctgaaaacaattagtgcagatggagac

SEQ ID NO: 711529 - DNA, 33 bp, Homo sapien
ttagtatcctcatcaaaaaatggagaaatgcca

SEQ ID NO: 711530 - DNA, 33 bp, Homo sapien
ttagtatcctcatcaagaaatggagaaatgcca

SEQ ID NO: 711531 - DNA, 33 bp, Homo sapien
tatgattggctaatcccatttctggaaatgtat

SEQ ID NO: 711532 - DNA, 33 bp, Homo sapien
tatgattggctaatcctatttctggaaatgtat

SEQ ID NO: 711533 - DNA, 33 bp, Homo sapien
acactgatcatgatcaccggatttagactgtgg

SEQ ID NO: 711534 - DNA, 33 bp, Homo sapien
acactgatcatgatcatcggatttagactgtgg

SEQ ID NO: 711535 - DNA, 33 bp, Homo sapien
ccctgatcgtttctcaactctcctattgaatcc

SEQ ID NO: 711536 - DNA, 33 bp, Homo sapien
ccctgatcgtttctcatctctcctattgaatcc

SEQ ID NO: 711537 - DNA, 33 bp, Homo sapien
gttcccttcagaataaataacagctcaactccc

SEQ ID NO: 711538 - DNA, 33 bp, Homo sapien
gttcccttcagaataagtaacagctcaactccc

SEQ ID NO: 711539 - DNA, 33 bp, Homo sapien
gtagcagcaaagcgaacgtagaaaagcagggac

SEQ ID NO: 711540 - DNA, 33 bp, Homo sapien
gtagcagcaaagcgaatgtagaaaagcagggac

SEQ ID NO: 711541 - DNA, 33 bp, Homo sapien
agtagccagggccatacgtttaggatgaatgaa

SEQ ID NO: 711542 - DNA, 33 bp, Homo sapien
agtagccagggccatatgtttaggatgaatgaa

SEQ ID NO: 711543 - DNA, 33 bp, Homo sapien
tttgttctgtggataaaaaagtggtagagcctg

SEQ ID NO: 711544 - DNA, 33 bp, Homo sapien
tttgttctgtggataagaaagtggtagagcctg

SEQ ID NO: 711545 - DNA, 33 bp, Homo sapien
gggactaaagcttcacaagtttgtctgtccaaa

SEQ ID NO: 711546 - DNA, 33 bp, Homo sapien
gggactaaagcttcaccagtttgtctgtccaaa

SEQ ID NO: 711547 - DNA, 33 bp, Homo sapien
tgctatcaagactgtcagaaacatattcccatt

SEQ ID NO: 711548 - DNA, 33 bp, Homo sapien
tgctatcaagactgtcggaaacatattcccatt

SEQ ID NO: 711549 - DNA, 33 bp, Homo sapien
agtgtcacttgggggagagatctagaaacaatc

SEQ ID NO: 711550 - DNA, 33 bp, Homo sapien
agtgtcacttgggggatagatctagaaacaatc

SEQ ID NO: 711551 - DNA, 33 bp, Homo sapien
ctacaccatgcccaaacttgtgacctatgaaac

SEQ ID NO: 711552 - DNA, 33 bp, Homo sapien
ctacaccatgcccaaagttgtgacctatgaaac

SEQ ID NO: 711553 - DNA, 33 bp, Homo sapien
attaaatattgctttcaaatggaaacgtaattt

SEQ ID NO: 711554 - DNA, 33 bp, Homo sapien
attaaatattgctttcgaatggaaacgtaattt

SEQ ID NO: 711555 - DNA, 33 bp, Homo sapien
gatggcacatgaaacccataatataatgcttag

SEQ ID NO: 711556 - DNA, 33 bp, Homo sapien
gatggcacatgaaacctataatataatgcttag

SEQ ID NO: 711557 - DNA, 33 bp, Homo sapien
ctccaagtatattttcactgatcctggcaatgc

SEQ ID NO: 711558 - DNA, 33 bp, Homo sapien
ctccaagtatattttcgctgatcctggcaatgc

SEQ ID NO: 711559 - DNA, 33 bp, Homo sapien
ctaacacatctggaaacgactctctgaatttat

SEQ ID NO: 711560 - DNA, 33 bp, Homo sapien
ctaacacatctggaaatgactctctgaatttat

SEQ ID NO: 711561 - DNA, 33 bp, Homo sapien
cagtgtctaatttctgaaattgcaaaccataac

SEQ ID NO: 711562 - DNA, 33 bp, Homo sapien
cagtgtctaatttctgcaattgcaaaccataac

SEQ ID NO: 711563 - DNA, 33 bp, Homo sapien
tgtgatatccaggtggaatggttcatggacact

SEQ ID NO: 711564 - DNA, 33 bp, Homo sapien
tgtgatatccaggtggcatggttcatggacact

SEQ ID NO: 711565 - DNA, 33 bp, Homo sapien
atagcaatttgttggcaatttgttgggtttcta

SEQ ID NO: 711566 - DNA, 33 bp, Homo sapien
atagcaatttgttggcgatttgttgggtttcta

SEQ ID NO: 711567 - DNA, 33 bp, Homo sapien
atgctgccctgttagacgtgtaaagcagcccta

SEQ ID NO: 711568 - DNA, 33 bp, Homo sapien
atgctgccctgttagatgtgtaaagcagcccta

SEQ ID NO: 711569 - DNA, 33 bp, Homo sapien
ttgatagtagagtcaaagtaaattagtaataca

SEQ ID NO: 711570 - DNA, 33 bp, Homo sapien
ttgatagtagagtcaaggtaaattagtaataca

SEQ ID NO: 711571 - DNA, 33 bp, Homo sapien
tgctctgctcgggcggcagtacacagggtgaga

SEQ ID NO: 711572 - DNA, 33 bp, Homo sapien
tgctctgctcgggcggtagtacacagggtgaga

SEQ ID NO: 711573 - DNA, 33 bp, Homo sapien
atatcactgacgggtgaagacgcaaaatgtgaa

SEQ ID NO: 711574 - DNA, 33 bp, Homo sapien
atatcactgacgggtggagacgcaaaatgtgaa

SEQ ID NO: 711575 - DNA, 33 bp, Homo sapien
aggacaaaaggtgaacaagggtgctcactggga

SEQ ID NO: 711576 - DNA, 33 bp, Homo sapien
aggacaaaaggtgaacgagggtgctcactggga

SEQ ID NO: 711577 - DNA, 33 bp, Homo sapien
gagagtgacctctaacaccaagtctagtaagag

SEQ ID NO: 711578 - DNA, 33 bp, Homo sapien
gagagtgacctctaacgccaagtctagtaagag

SEQ ID NO: 711579 - DNA, 33 bp, Homo sapien
tggtatctctagtggacaactcaactggcagag

SEQ ID NO: 711580 - DNA, 33 bp, Homo sapien
tggtatctctagtggataactcaactggcagag

SEQ ID NO: 711581 - DNA, 33 bp, Homo sapien
tattaccagttgtaaacagagcagggagaagtt

SEQ ID NO: 711582 - DNA, 33 bp, Homo sapien
tattaccagttgtaaatagagcagggagaagtt

SEQ ID NO: 711583 - DNA, 33 bp, Homo sapien
gaccctgagaatgaaacgaggggaagggaataa

SEQ ID NO: 711584 - DNA, 33 bp, Homo sapien
gaccctgagaatgaaatgaggggaagggaataa

SEQ ID NO: 711585 - DNA, 33 bp, Homo sapien
aagccagtcactgaaagtctcgttcccaaaatg

SEQ ID NO: 711586 - DNA, 33 bp, Homo sapien
aagccagtcactgaaattctcgttcccaaaatg

SEQ ID NO: 711587 - DNA, 33 bp, Homo sapien
acaaaggtacaatgccaaatggctttcatctgt

SEQ ID NO: 711588 - DNA, 33 bp, Homo sapien
acaaaggtacaatgcccaatggctttcatctgt

SEQ ID NO: 711589 - DNA, 33 bp, Homo sapien
aattgacttgaagaaaaggtctaaagcagttta

SEQ ID NO: 711590 - DNA, 33 bp, Homo sapien
aattgacttgaagaaatggtctaaagcagttta

SEQ ID NO: 711591 - DNA, 33 bp, Homo sapien
ttcctctgtccaaagcaacatacaagtaacagg

SEQ ID NO: 711592 - DNA, 33 bp, Homo sapien
ttcctctgtccaaagcgacatacaagtaacagg

SEQ ID NO: 711593 - DNA, 33 bp, Homo sapien
ttgcttaattaagcataatcagttcatggaaga

SEQ ID NO: 711594 - DNA, 33 bp, Homo sapien
ttgcttaattaagcatcatcagttcatggaaga

SEQ ID NO: 711595 - DNA, 33 bp, Homo sapien
ctaaacaaagctggaacagaaactacacactag

SEQ ID NO: 711596 - DNA, 33 bp, Homo sapien
ctaaacaaagctggaatagaaactacacactag

SEQ ID NO: 711597 - DNA, 33 bp, Homo sapien
gtcaggtcataagatccgagcaacattttcctt

SEQ ID NO: 711598 - DNA, 33 bp, Homo sapien
gtcaggtcataagatctgagcaacattttcctt

SEQ ID NO: 711599 - DNA, 33 bp, Homo sapien
agaatacacttactgaaaataaaacatgaagag

SEQ ID NO: 711600 - DNA, 33 bp, Homo sapien
agaatacacttactgagaataaaacatgaagag

SEQ ID NO: 711601 - DNA, 33 bp, Homo sapien
cagaactgtgtactgacgataaaagcctctggt

SEQ ID NO: 711602 - DNA, 33 bp, Homo sapien
cagaactgtgtactgatgataaaagcctctggt

SEQ ID NO: 711603 - DNA, 33 bp, Homo sapien
gcataaagttcagtaactattaaatggagaagc

SEQ ID NO: 711604 - DNA, 33 bp, Homo sapien
gcataaagttcagtaattattaaatggagaagc

SEQ ID NO: 711605 - DNA, 33 bp, Homo sapien
catgcaaaatcaggaaaggctgtagaaggaaat

SEQ ID NO: 711606 - DNA, 33 bp, Homo sapien
catgcaaaatcaggaagggctgtagaaggaaat

SEQ ID NO: 711607 - DNA, 33 bp, Homo sapien
gtgtaccatttaaggacgtgctgtatttgagag

SEQ ID NO: 711608 - DNA, 33 bp, Homo sapien
gtgtaccatttaaggatgtgctgtatttgagag

SEQ ID NO: 711609 - DNA, 33 bp, Homo sapien
ggtaaaaaagccagtgacaaagttttgacaatt

SEQ ID NO: 711610 - DNA, 33 bp, Homo sapien
ggtaaaaaagccagtggcaaagttttgacaatt

SEQ ID NO: 711611 - DNA, 33 bp, Homo sapien
atagttatgctgtacaataagccttttataaac

SEQ ID NO: 711612 - DNA, 33 bp, Homo sapien
atagttatgctgtacagtaagccttttataaac

SEQ ID NO: 711613 - DNA, 33 bp, Homo sapien
cactagaaacaatgaactaaaggtatttgcaat

SEQ ID NO: 711614 - DNA, 33 bp, Homo sapien
cactagaaacaatgaattaaaggtatttgcaat

SEQ ID NO: 711615 - DNA, 33 bp, Homo sapien
tctgatatcccaaaccaggcggaaaggcaagcg

SEQ ID NO: 711616 - DNA, 33 bp, Homo sapien
tctgatatcccaaacctggcggaaaggcaagcg

SEQ ID NO: 711617 - DNA, 33 bp, Homo sapien
ccagttaggttggaaagcaatccatgttatctg

SEQ ID NO: 711618 - DNA, 33 bp, Homo sapien
ccagttaggttggaaatcaatccatgttatctg

SEQ ID NO: 711619 - DNA, 33 bp, Homo sapien
caaatgttgctcaattaaagaatgaataattac

SEQ ID NO: 711620 - DNA, 33 bp, Homo sapien
caaatgttgctcaattgaagaatgaataattac

SEQ ID NO: 711621 - DNA, 33 bp, Homo sapien
aaattctaggctatcaaacaaaaatttccaaat

SEQ ID NO: 711622 - DNA, 33 bp, Homo sapien
aaattctaggctatcagacaaaaatttccaaat

SEQ ID NO: 711623 - DNA, 33 bp, Homo sapien
cttacatagagataacaactgaagaactctggc

SEQ ID NO: 711624 - DNA, 33 bp, Homo sapien
cttacatagagataaccactgaagaactctggc

SEQ ID NO: 711625 - DNA, 33 bp, Homo sapien
tttctttgtggttctggaaagtgcggaggagag

SEQ ID NO: 711626 - DNA, 33 bp, Homo sapien
tttctttgtggttctgtaaagtgcggaggagag

SEQ ID NO: 711627 - DNA, 33 bp, Homo sapien
tctactctctatttcaataaatgcaacttttta

SEQ ID NO: 711628 - DNA, 33 bp, Homo sapien
tctactctctatttcagtaaatgcaacttttta

SEQ ID NO: 711629 - DNA, 33 bp, Homo sapien
tctcttctaaggctggaaaatattccacttgtg

SEQ ID NO: 711630 - DNA, 33 bp, Homo sapien
tctcttctaaggctgggaaatattccacttgtg

SEQ ID NO: 711631 - DNA, 33 bp, Homo sapien
atagctgtactaattcacattcctgccaacagt

SEQ ID NO: 711632 - DNA, 33 bp, Homo sapien
atagctgtactaattcgcattcctgccaacagt

SEQ ID NO: 711633 - DNA, 33 bp, Homo sapien
gttgggataagatcagaagttaccatagttcag

SEQ ID NO: 711634 - DNA, 33 bp, Homo sapien
gttgggataagatcaggagttaccatagttcag

SEQ ID NO: 711635 - DNA, 33 bp, Homo sapien
tgttctgagaagtgaaaaaagtgggtcaccatg

SEQ ID NO: 711636 - DNA, 33 bp, Homo sapien
tgttctgagaagtgaacaaagtgggtcaccatg

SEQ ID NO: 711637 - DNA, 33 bp, Homo sapien
aagattagcttccaagaatattcaggtttctgt

SEQ ID NO: 711638 - DNA, 33 bp, Homo sapien
aagattagcttccaagtatattcaggtttctgt

SEQ ID NO: 711639 - DNA, 33 bp, Homo sapien
cacagatacaccccaaaatgtgttttgccagct

SEQ ID NO: 711640 - DNA, 33 bp, Homo sapien
cacagatacaccccaagatgtgttttgccagct

SEQ ID NO: 711641 - DNA, 33 bp, Homo sapien
ctctcttttacacgaagaatcaactgaaataaa

SEQ ID NO: 711642 - DNA, 33 bp, Homo sapien
ctctcttttacacgaataatcaactgaaataaa

SEQ ID NO: 711643 - DNA, 33 bp, Homo sapien
ccatgggaattattcaaggtattcaaggcacca

SEQ ID NO: 711644 - DNA, 33 bp, Homo sapien
ccatgggaattattcagggtattcaaggcacca

SEQ ID NO: 711645 - DNA, 33 bp, Homo sapien
gagaagcatgatggcaaatgaaatcttatattg

SEQ ID NO: 711646 - DNA, 33 bp, Homo sapien
gagaagcatgatggcagatgaaatcttatattg

SEQ ID NO: 711647 - DNA, 33 bp, Homo sapien
attactacagaaggggaacctatatgcagaaag

SEQ ID NO: 711648 - DNA, 33 bp, Homo sapien
attactacagaaggggcacctatatgcagaaag

SEQ ID NO: 711649 - DNA, 33 bp, Homo sapien
caatttgatttgctaaacacaaagtaagttatt

SEQ ID NO: 711650 - DNA, 33 bp, Homo sapien
caatttgatttgctaaccacaaagtaagttatt

SEQ ID NO: 711651 - DNA, 33 bp, Homo sapien
agcagacctagttatccaattcttaaaatcttt

SEQ ID NO: 711652 - DNA, 33 bp, Homo sapien
agcagacctagttatctaattcttaaaatcttt

SEQ ID NO: 711653 - DNA, 33 bp, Homo sapien
gacattacccgtgctaagagaatataggatcag

SEQ ID NO: 711654 - DNA, 33 bp, Homo sapien
gacattacccgtgctaggagaatataggatcag

SEQ ID NO: 711655 - DNA, 33 bp, Homo sapien
ctcctgttggatgtaacagtgagactaaatact

SEQ ID NO: 711656 - DNA, 33 bp, Homo sapien
ctcctgttggatgtaatagtgagactaaatact

SEQ ID NO: 711657 - DNA, 33 bp, Homo sapien
agctattgtgatatgcaagacagcaggaattgg

SEQ ID NO: 711658 - DNA, 33 bp, Homo sapien
agctattgtgatatgccagacagcaggaattgg

SEQ ID NO: 711659 - DNA, 33 bp, Homo sapien
tttatacctttttgaacgaagagctgcaaatca

SEQ ID NO: 711660 - DNA, 33 bp, Homo sapien
tttatacctttttgaatgaagagctgcaaatca

SEQ ID NO: 711661 - DNA, 33 bp, Homo sapien
gggagtgccattgacaaatcctgcactactcca

SEQ ID NO: 711662 - DNA, 33 bp, Homo sapien
gggagtgccattgacagatcctgcactactcca

SEQ ID NO: 711663 - DNA, 33 bp, Homo sapien
tcctgttgatcatgaccaatttttgcatctcta

SEQ ID NO: 711664 - DNA, 33 bp, Homo sapien
tcctgttgatcatgacgaatttttgcatctcta

SEQ ID NO: 711665 - DNA, 33 bp, Homo sapien
aggatgagtctgcataggtccatcctggtcttg

SEQ ID NO: 711666 - DNA, 33 bp, Homo sapien
aggatgagtctgcatatgtccatcctggtcttg

SEQ ID NO: 711667 - DNA, 33 bp, Homo sapien
ctcatctttggtcaaactgttcatgtcgcatta

SEQ ID NO: 711668 - DNA, 33 bp, Homo sapien
ctcatctttggtcaaagtgttcatgtcgcatta

SEQ ID NO: 711669 - DNA, 33 bp, Homo sapien
tatttaacctgacatacctgagaaagcatttat

SEQ ID NO: 711670 - DNA, 33 bp, Homo sapien
tatttaacctgacatatctgagaaagcatttat

SEQ ID NO: 711671 - DNA, 33 bp, Homo sapien
atctttccaactcccaaatttcgcagaggggag

SEQ ID NO: 711672 - DNA, 33 bp, Homo sapien
atctttccaactcccagatttcgcagaggggag

SEQ ID NO: 711673 - DNA, 33 bp, Homo sapien
ctttcaggttataaacgagtgagtaaaacatga

SEQ ID NO: 711674 - DNA, 33 bp, Homo sapien
ctttcaggttataaactagtgagtaaaacatga

SEQ ID NO: 711675 - DNA, 33 bp, Homo sapien
catctcatctccaggccattttactatgttgac

SEQ ID NO: 711676 - DNA, 33 bp, Homo sapien
catctcatctccaggctattttactatgttgac

SEQ ID NO: 711677 - DNA, 33 bp, Homo sapien
cttttgacacctttgacattaggcatgactgat

SEQ ID NO: 711678 - DNA, 33 bp, Homo sapien
cttttgacacctttgatattaggcatgactgat

SEQ ID NO: 711679 - DNA, 33 bp, Homo sapien
atagcaagtttttgctcacagtctcctttcatt

SEQ ID NO: 711680 - DNA, 33 bp, Homo sapien
atagcaagtttttgctgacagtctcctttcatt

SEQ ID NO: 711681 - DNA, 33 bp, Homo sapien
tgctttacacagtagggccactcagacttatcc

SEQ ID NO: 711682 - DNA, 33 bp, Homo sapien
tgctttacacagtaggtccactcagacttatcc

SEQ ID NO: 711683 - DNA, 33 bp, Homo sapien
tgatcccctgaagaacacatcctctggagatac

SEQ ID NO: 711684 - DNA, 33 bp, Homo sapien
tgatcccctgaagaacgcatcctctggagatac

SEQ ID NO: 711685 - DNA, 33 bp, Homo sapien
atctactcatttagataaacaaagtgcaatcct

SEQ ID NO: 711686 - DNA, 33 bp, Homo sapien
atctactcatttagatcaacaaagtgcaatcct

SEQ ID NO: 711687 - DNA, 33 bp, Homo sapien
gaaatggtatctgaacaattgagcccacagtgg

SEQ ID NO: 711688 - DNA, 33 bp, Homo sapien
gaaatggtatctgaaccattgagcccacagtgg

SEQ ID NO: 711689 - DNA, 33 bp, Homo sapien
acagaggccagggagacgcaagtgagctgtgtg

SEQ ID NO: 711690 - DNA, 33 bp, Homo sapien
acagaggccagggagatgcaagtgagctgtgtg

SEQ ID NO: 711691 - DNA, 33 bp, Homo sapien
tctggtctgaccctggaaagttctccaattata

SEQ ID NO: 711692 - DNA, 33 bp, Homo sapien
tctggtctgaccctgggaagttctccaattata

SEQ ID NO: 711693 - DNA, 33 bp, Homo sapien
ggatctagtgtccaggcccaaagatagccatac

SEQ ID NO: 711694 - DNA, 33 bp, Homo sapien
ggatctagtgtccaggtccaaagatagccatac

SEQ ID NO: 711695 - DNA, 33 bp, Homo sapien
gcacccaatgatggagacatgtataagatacat

SEQ ID NO: 711696 - DNA, 33 bp, Homo sapien
gcacccaatgatggaggcatgtataagatacat

SEQ ID NO: 711697 - DNA, 33 bp, Homo sapien
ctgggacttccagtgccaagcttcacacatcca

SEQ ID NO: 711698 - DNA, 33 bp, Homo sapien
ctgggacttccagtgctaagcttcacacatcca

SEQ ID NO: 711699 - DNA, 33 bp, Homo sapien
tggcaggggtagttgacgcctatcctgttcaag

SEQ ID NO: 711700 - DNA, 33 bp, Homo sapien
tggcaggggtagttgatgcctatcctgttcaag

SEQ ID NO: 711701 - DNA, 33 bp, Homo sapien
tttacccagagacctaatacttttgcttttgca

SEQ ID NO: 711702 - DNA, 33 bp, Homo sapien
tttacccagagacctagtacttttgcttttgca

SEQ ID NO: 711703 - DNA, 33 bp, Homo sapien
ctacagaagattcaccaactgttcccccaaaaa

SEQ ID NO: 711704 - DNA, 33 bp, Homo sapien
ctacagaagattcaccgactgttcccccaaaaa

SEQ ID NO: 711705 - DNA, 33 bp, Homo sapien
cttcttcctttccttcactttcacaggtgtgga

SEQ ID NO: 711706 - DNA, 33 bp, Homo sapien
cttcttcctttccttcgctttcacaggtgtgga

SEQ ID NO: 711707 - DNA, 33 bp, Homo sapien
accaaagggacagatcagagttctaacctcatt

SEQ ID NO: 711708 - DNA, 33 bp, Homo sapien
accaaagggacagatcggagttctaacctcatt

SEQ ID NO: 711709 - DNA, 33 bp, Homo sapien
tagttgttgtggcagaatagtgttcattgcaac

SEQ ID NO: 711710 - DNA, 33 bp, Homo sapien
tagttgttgtggcagattagtgttcattgcaac

SEQ ID NO: 711711 - DNA, 33 bp, Homo sapien
agatcacaaggtctaccggccatatcacaaaac

SEQ ID NO: 711712 - DNA, 33 bp, Homo sapien
agatcacaaggtctactggccatatcacaaaac

SEQ ID NO: 711713 - DNA, 33 bp, Homo sapien
cctattaggaacttaacgagatcagccttcatg

SEQ ID NO: 711714 - DNA, 33 bp, Homo sapien
cctattaggaacttaatgagatcagccttcatg

SEQ ID NO: 711715 - DNA, 33 bp, Homo sapien
aaagcatccagtgagccgcctcaggtattaggt

SEQ ID NO: 711716 - DNA, 33 bp, Homo sapien
aaagcatccagtgagctgcctcaggtattaggt

SEQ ID NO: 711717 - DNA, 33 bp, Homo sapien
acttaaggggcttttacagagcaagaaccaaca

SEQ ID NO: 711718 - DNA, 33 bp, Homo sapien
acttaaggggcttttagagagcaagaaccaaca

SEQ ID NO: 711719 - DNA, 33 bp, Homo sapien
agctcccagttatcccaaactgtacaccccaag

SEQ ID NO: 711720 - DNA, 33 bp, Homo sapien
agctcccagttatcccgaactgtacaccccaag

SEQ ID NO: 711721 - DNA, 33 bp, Homo sapien
gagtaagcagaggatacgtttggtgcctttaaa

SEQ ID NO: 711722 - DNA, 33 bp, Homo sapien
gagtaagcagaggataggtttggtgcctttaaa

SEQ ID NO: 711723 - DNA, 33 bp, Homo sapien
atcaggatgtgaaaaacagcatggtaaacccat

SEQ ID NO: 711724 - DNA, 33 bp, Homo sapien
atcaggatgtgaaaaagagcatggtaaacccat

SEQ ID NO: 711725 - DNA, 33 bp, Homo sapien
tgatgctttgcccttacagggtatgatggtttt

SEQ ID NO: 711726 - DNA, 33 bp, Homo sapien
tgatgctttgcccttagagggtatgatggtttt

SEQ ID NO: 711727 - DNA, 33 bp, Homo sapien
cattactgagtttctcaagcataaatggtcagg

SEQ ID NO: 711728 - DNA, 33 bp, Homo sapien
cattactgagtttctcgagcataaatggtcagg

SEQ ID NO: 711729 - DNA, 33 bp, Homo sapien
ctggtgcacttatgagacagtaacatggcaaac

SEQ ID NO: 711730 - DNA, 33 bp, Homo sapien
ctggtgcacttatgaggcagtaacatggcaaac

SEQ ID NO: 711731 - DNA, 33 bp, Homo sapien
aatcttgcccaggtggaaacactgagtcacatg

SEQ ID NO: 711732 - DNA, 33 bp, Homo sapien
aatcttgcccaggtgggaacactgagtcacatg

SEQ ID NO: 711733 - DNA, 33 bp, Homo sapien
gttgactttggataggaaggactatcgctagaa

SEQ ID NO: 711734 - DNA, 33 bp, Homo sapien
gttgactttggataggcaggactatcgctagaa

SEQ ID NO: 711735 - DNA, 33 bp, Homo sapien
agtcagcatgttactgaatgaggaatttatagg

SEQ ID NO: 711736 - DNA, 33 bp, Homo sapien
agtcagcatgttactgcatgaggaatttatagg

SEQ ID NO: 711737 - DNA, 33 bp, Homo sapien
gttaagctattggtacactgactgacaccctct

SEQ ID NO: 711738 - DNA, 33 bp, Homo sapien
gttaagctattggtacgctgactgacaccctct

SEQ ID NO: 711739 - DNA, 33 bp, Homo sapien
ttggaacttgcattccggaattagaagtaatat

SEQ ID NO: 711740 - DNA, 33 bp, Homo sapien
ttggaacttgcattcctgaattagaagtaatat

SEQ ID NO: 711741 - DNA, 33 bp, Homo sapien
tggttcttgtctgttacgtcacaacagacttct

SEQ ID NO: 711742 - DNA, 33 bp, Homo sapien
tggttcttgtctgttatgtcacaacagacttct

SEQ ID NO: 711743 - DNA, 33 bp, Homo sapien
acttctgactgttcaaactaacttgtgcctctt

SEQ ID NO: 711744 - DNA, 33 bp, Homo sapien
acttctgactgttcaagctaacttgtgcctctt

SEQ ID NO: 711745 - DNA, 33 bp, Homo sapien
agtagaatttaagagcacaagaatcatattaga

SEQ ID NO: 711746 - DNA, 33 bp, Homo sapien
agtagaatttaagagcgcaagaatcatattaga

SEQ ID NO: 711747 - DNA, 33 bp, Homo sapien
ggctcaactgcatacacgaggatctgcttccaa

SEQ ID NO: 711748 - DNA, 33 bp, Homo sapien
ggctcaactgcatacaggaggatctgcttccaa

SEQ ID NO: 711749 - DNA, 33 bp, Homo sapien
tgtcaacaggataagcacatttggaccatgata

SEQ ID NO: 711750 - DNA, 33 bp, Homo sapien
tgtcaacaggataagcgcatttggaccatgata

SEQ ID NO: 711751 - DNA, 33 bp, Homo sapien
tagaaagacattttaaagctgatctgagagggt

SEQ ID NO: 711752 - DNA, 33 bp, Homo sapien
tagaaagacattttaatgctgatctgagagggt

SEQ ID NO: 711753 - DNA, 33 bp, Homo sapien
gctatagaacagagcactcgatgtccaggtggg

SEQ ID NO: 711754 - DNA, 33 bp, Homo sapien
gctatagaacagagcagtcgatgtccaggtggg

SEQ ID NO: 711755 - DNA, 33 bp, Homo sapien
ataatgtctggctttacccagtatcagacagag

SEQ ID NO: 711756 - DNA, 33 bp, Homo sapien
ataatgtctggctttatccagtatcagacagag

SEQ ID NO: 711757 - DNA, 33 bp, Homo sapien
gtctcttcatttcaaaggctgagaaatcaagac

SEQ ID NO: 711758 - DNA, 33 bp, Homo sapien
gtctcttcatttcaaatgctgagaaatcaagac

SEQ ID NO: 711759 - DNA, 33 bp, Homo sapien
aagtgtcatggatttaaggtgaaatcaagtgat

SEQ ID NO: 711760 - DNA, 33 bp, Homo sapien
aagtgtcatggatttagggtgaaatcaagtgat

SEQ ID NO: 711761 - DNA, 33 bp, Homo sapien
cttaataggaatctgaagttataggcatggcat

SEQ ID NO: 711762 - DNA, 33 bp, Homo sapien
cttaataggaatctgaggttataggcatggcat

SEQ ID NO: 711763 - DNA, 33 bp, Homo sapien
gaatgaaacctcagaaatggcctgtatttattt

SEQ ID NO: 711764 - DNA, 33 bp, Homo sapien
gaatgaaacctcagaattggcctgtatttattt

SEQ ID NO: 711765 - DNA, 33 bp, Homo sapien
attttgacagctacagaaacatgaaattcactt

SEQ ID NO: 711766 - DNA, 33 bp, Homo sapien
attttgacagctacagcaacatgaaattcactt

SEQ ID NO: 711767 - DNA, 33 bp, Homo sapien
caatgttgacttttccccagttattagagacta

SEQ ID NO: 711768 - DNA, 33 bp, Homo sapien
caatgttgacttttcctcagttattagagacta

SEQ ID NO: 711769 - DNA, 33 bp, Homo sapien
attatcagagaaaataatatgcctcaaagaccc

SEQ ID NO: 711770 - DNA, 33 bp, Homo sapien
attatcagagaaaatagtatgcctcaaagaccc

SEQ ID NO: 711771 - DNA, 33 bp, Homo sapien
ccttggaaccagtctgaataggaggatacagga

SEQ ID NO: 711772 - DNA, 33 bp, Homo sapien
ccttggaaccagtctggataggaggatacagga

SEQ ID NO: 711773 - DNA, 33 bp, Homo sapien
gggctaggtctgcttgcattgtttggcataaag

SEQ ID NO: 711774 - DNA, 33 bp, Homo sapien
gggctaggtctgcttggattgtttggcataaag

SEQ ID NO: 711775 - DNA, 33 bp, Homo sapien
cttcagcagctttgagactaagcctcactcttg

SEQ ID NO: 711776 - DNA, 33 bp, Homo sapien
cttcagcagctttgagtctaagcctcactcttg

SEQ ID NO: 711777 - DNA, 33 bp, Homo sapien
gtaataagctccttaaatgattcctgatcccag

SEQ ID NO: 711778 - DNA, 33 bp, Homo sapien
gtaataagctccttaagtgattcctgatcccag

SEQ ID NO: 711779 - DNA, 33 bp, Homo sapien
catacctatgccagaaaaacacctgtgttaatt

SEQ ID NO: 711780 - DNA, 33 bp, Homo sapien
catacctatgccagaagaacacctgtgttaatt

SEQ ID NO: 711781 - DNA, 33 bp, Homo sapien
aggtgtgtatttggccaacaatgtgggaatcaa

SEQ ID NO: 711782 - DNA, 33 bp, Homo sapien
aggtgtgtatttggccgacaatgtgggaatcaa

SEQ ID NO: 711783 - DNA, 33 bp, Homo sapien
tggcacagcctttctaactctctttaggagacg

SEQ ID NO: 711784 - DNA, 33 bp, Homo sapien
tggcacagcctttctagctctctttaggagacg

SEQ ID NO: 711785 - DNA, 33 bp, Homo sapien
tatgatttccatgttacgttggctttggcacag

SEQ ID NO: 711786 - DNA, 33 bp, Homo sapien
tatgatttccatgttatgttggctttggcacag

SEQ ID NO: 711787 - DNA, 33 bp, Homo sapien
gtggtaacttggcaaacagtgaaatattaaagt

SEQ ID NO: 711788 - DNA, 33 bp, Homo sapien
gtggtaacttggcaaagagtgaaatattaaagt

SEQ ID NO: 711789 - DNA, 33 bp, Homo sapien
tatatgcccatggacaatgccacagtcactcct

SEQ ID NO: 711790 - DNA, 33 bp, Homo sapien
tatatgcccatggacactgccacagtcactcct

SEQ ID NO: 711791 - DNA, 33 bp, Homo sapien
ccttgccccactccaaaagataaaggcaagcag

SEQ ID NO: 711792 - DNA, 33 bp, Homo sapien
ccttgccccactccaacagataaaggcaagcag

SEQ ID NO: 711793 - DNA, 33 bp, Homo sapien
catcattccaagtgaaccattgacgtgttttgt

SEQ ID NO: 711794 - DNA, 33 bp, Homo sapien
catcattccaagtgaagcattgacgtgttttgt

SEQ ID NO: 711795 - DNA, 33 bp, Homo sapien
tgttctccacagaatgacatctcagaagttggc

SEQ ID NO: 711796 - DNA, 33 bp, Homo sapien
tgttctccacagaatggcatctcagaagttggc

SEQ ID NO: 711797 - DNA, 33 bp, Homo sapien
aaacagactaatacagaagctgaagtctaaagc

SEQ ID NO: 711798 - DNA, 33 bp, Homo sapien
aaacagactaatacaggagctgaagtctaaagc

SEQ ID NO: 711799 - DNA, 33 bp, Homo sapien
gccttattgtatacaaactttctttcaaacagg

SEQ ID NO: 711800 - DNA, 33 bp, Homo sapien
gccttattgtatacaacctttctttcaaacagg

SEQ ID NO: 711801 - DNA, 33 bp, Homo sapien
ctctctgattcagtaacgctaatccttggactc

SEQ ID NO: 711802 - DNA, 33 bp, Homo sapien
ctctctgattcagtaatgctaatccttggactc

SEQ ID NO: 711803 - DNA, 33 bp, Homo sapien
aagtgatagctgatacaggttggggtacaaaag

SEQ ID NO: 711804 - DNA, 33 bp, Homo sapien
aagtgatagctgataccggttggggtacaaaag

SEQ ID NO: 711805 - DNA, 33 bp, Homo sapien
tgttgccaaatctgcaacttggtgagtatgtgg

SEQ ID NO: 711806 - DNA, 33 bp, Homo sapien
tgttgccaaatctgcagcttggtgagtatgtgg

SEQ ID NO: 711807 - DNA, 33 bp, Homo sapien
aaatgtggagacggaaatatcatagaaatccag

SEQ ID NO: 711808 - DNA, 33 bp, Homo sapien
aaatgtggagacggaagtatcatagaaatccag

SEQ ID NO: 711809 - DNA, 33 bp, Homo sapien
ctcaccaagtagaattgaagagcacaagaacca

SEQ ID NO: 711810 - DNA, 33 bp, Homo sapien
ctcaccaagtagaatttaagagcacaagaacca

SEQ ID NO: 711811 - DNA, 33 bp, Homo sapien
agagactagaaagcaaatccaattcaaatcact

SEQ ID NO: 711812 - DNA, 33 bp, Homo sapien
agagactagaaagcaagtccaattcaaatcact

SEQ ID NO: 711813 - DNA, 33 bp, Homo sapien
ctacttggctctggtcaatgattgctgtgcagg

SEQ ID NO: 711814 - DNA, 33 bp, Homo sapien
ctacttggctctggtcgatgattgctgtgcagg

SEQ ID NO: 711815 - DNA, 33 bp, Homo sapien
gcaattgaggaaagcacgggtgactcatcatct

SEQ ID NO: 711816 - DNA, 33 bp, Homo sapien
gcaattgaggaaagcatgggtgactcatcatct

SEQ ID NO: 711817 - DNA, 33 bp, Homo sapien
actacatctttcccagaccacacagctggatga

SEQ ID NO: 711818 - DNA, 33 bp, Homo sapien
actacatctttcccaggccacacagctggatga

SEQ ID NO: 711819 - DNA, 33 bp, Homo sapien
agcaagatgaagaaaacgctctccaagagttca

SEQ ID NO: 711820 - DNA, 33 bp, Homo sapien
agcaagatgaagaaaatgctctccaagagttca

SEQ ID NO: 711821 - DNA, 33 bp, Homo sapien
ctatacaagaagttgacgaataactcaatgttg

SEQ ID NO: 711822 - DNA, 33 bp, Homo sapien
ctatacaagaagttgatgaataactcaatgttg

SEQ ID NO: 711823 - DNA, 33 bp, Homo sapien
aggaactgctaacatacggtacagtggtggttc

SEQ ID NO: 711824 - DNA, 33 bp, Homo sapien
aggaactgctaacatatggtacagtggtggttc

SEQ ID NO: 711825 - DNA, 33 bp, Homo sapien
cacaactcaagcatcaaaagctccatgtccaca

SEQ ID NO: 711826 - DNA, 33 bp, Homo sapien
cacaactcaagcatcagaagctccatgtccaca

SEQ ID NO: 711827 - DNA, 33 bp, Homo sapien
gtattcttacccaatcactattgcctgtcttca

SEQ ID NO: 711828 - DNA, 33 bp, Homo sapien
gtattcttacccaatcgctattgcctgtcttca

SEQ ID NO: 711829 - DNA, 33 bp, Homo sapien
atagcaattcaggtggcaagtcatttctgagtc

SEQ ID NO: 711830 - DNA, 33 bp, Homo sapien
atagcaattcaggtggtaagtcatttctgagtc

SEQ ID NO: 711831 - DNA, 33 bp, Homo sapien
ctttcatctaccaaaaatgtttcttataaagcc

SEQ ID NO: 711832 - DNA, 33 bp, Homo sapien
ctttcatctaccaaaagtgtttcttataaagcc

SEQ ID NO: 711833 - DNA, 33 bp, Homo sapien
taagtgttaacccaggaactcaagtacctaact

SEQ ID NO: 711834 - DNA, 33 bp, Homo sapien
taagtgttaacccagggactcaagtacctaact

SEQ ID NO: 711835 - DNA, 33 bp, Homo sapien
gagggaatgtaggtaaaccaatgaaagtgttag

SEQ ID NO: 711836 - DNA, 33 bp, Homo sapien
gagggaatgtaggtaatccaatgaaagtgttag

SEQ ID NO: 711837 - DNA, 33 bp, Homo sapien
aggccaagaatgctaagagttcatccccaggaa

SEQ ID NO: 711838 - DNA, 33 bp, Homo sapien
aggccaagaatgctaatagttcatccccaggaa

SEQ ID NO: 711839 - DNA, 33 bp, Homo sapien
ccttctagacagtcaaatgtccacatctcattt

SEQ ID NO: 711840 - DNA, 33 bp, Homo sapien
ccttctagacagtcaagtgtccacatctcattt

SEQ ID NO: 711841 - DNA, 33 bp, Homo sapien
cagtctttataaagcacggggaggtaaaatgca

SEQ ID NO: 711842 - DNA, 33 bp, Homo sapien
cagtctttataaagcatggggaggtaaaatgca

SEQ ID NO: 711843 - DNA, 33 bp, Homo sapien
aactggtaaaaaatcactctagaaatgcacatg

SEQ ID NO: 711844 - DNA, 33 bp, Homo sapien
aactggtaaaaaatcagtctagaaatgcacatg

SEQ ID NO: 711845 - DNA, 33 bp, Homo sapien
atgcacatgaaagcaaatcctgcacctaaaggc

SEQ ID NO: 711846 - DNA, 33 bp, Homo sapien
atgcacatgaaagcaagtcctgcacctaaaggc

SEQ ID NO: 711847 - DNA, 33 bp, Homo sapien
aaggaaagcccaaataccctgatcaactttttt

SEQ ID NO: 711848 - DNA, 33 bp, Homo sapien
aaggaaagcccaaatatcctgatcaactttttt

SEQ ID NO: 711849 - DNA, 33 bp, Homo sapien
gaactttctcctcccacaactcaaacattcaat

SEQ ID NO: 711850 - DNA, 33 bp, Homo sapien
gaactttctcctcccagaactcaaacattcaat

SEQ ID NO: 711851 - DNA, 33 bp, Homo sapien
agatggtaacttccacacagaaggctatgttgg

SEQ ID NO: 711852 - DNA, 33 bp, Homo sapien
agatggtaacttccactcagaaggctatgttgg

SEQ ID NO: 711853 - DNA, 33 bp, Homo sapien
gtagaggtgtgaagaagattcctgaaatctcac

SEQ ID NO: 711854 - DNA, 33 bp, Homo sapien
gtagaggtgtgaagaatattcctgaaatctcac

SEQ ID NO: 711855 - DNA, 33 bp, Homo sapien
tgttcctgcaaacagactcaagttagaatggta

SEQ ID NO: 711856 - DNA, 33 bp, Homo sapien
tgttcctgcaaacagagtcaagttagaatggta

SEQ ID NO: 711857 - DNA, 33 bp, Homo sapien
cccctgaagacacttccaaggctacttcatgag

SEQ ID NO: 711858 - DNA, 33 bp, Homo sapien
cccctgaagacacttctaaggctacttcatgag

SEQ ID NO: 711859 - DNA, 33 bp, Homo sapien
tgccatctagagttccaagtgccttaaatgggc

SEQ ID NO: 711860 - DNA, 33 bp, Homo sapien
tgccatctagagttccgagtgccttaaatgggc

SEQ ID NO: 711861 - DNA, 33 bp, Homo sapien
tgtgttctaatgaccagcacagttgactcctgt

SEQ ID NO: 711862 - DNA, 33 bp, Homo sapien
tgtgttctaatgaccatcacagttgactcctgt

SEQ ID NO: 711863 - DNA, 33 bp, Homo sapien
actacataggtgctaaaaatgaggaaggagccc

SEQ ID NO: 711864 - DNA, 33 bp, Homo sapien
actacataggtgctaagaatgaggaaggagccc

SEQ ID NO: 711865 - DNA, 33 bp, Homo sapien
ttcatctttgtcactagggccacttattctccc

SEQ ID NO: 711866 - DNA, 33 bp, Homo sapien
ttcatctttgtcactatggccacttattctccc

SEQ ID NO: 711867 - DNA, 33 bp, Homo sapien
gtgtcaatcaccttaaaatagagattcatggta

SEQ ID NO: 711868 - DNA, 33 bp, Homo sapien
gtgtcaatcaccttaacatagagattcatggta

SEQ ID NO: 711869 - DNA, 33 bp, Homo sapien
ctttggagacttgaaaatgtaacctattatacc

SEQ ID NO: 711870 - DNA, 33 bp, Homo sapien
ctttggagacttgaaactgtaacctattatacc

SEQ ID NO: 711871 - DNA, 33 bp, Homo sapien
acagaggcttataaacgcctgaacaaaaatttg

SEQ ID NO: 711872 - DNA, 33 bp, Homo sapien
acagaggcttataaactcctgaacaaaaatttg

SEQ ID NO: 711873 - DNA, 33 bp, Homo sapien
attgactttggatacaaattggcacactcagac

SEQ ID NO: 711874 - DNA, 33 bp, Homo sapien
attgactttggatacatattggcacactcagac

SEQ ID NO: 711875 - DNA, 33 bp, Homo sapien
tctacaagcttaagacacatctacatcttttca

SEQ ID NO: 711876 - DNA, 33 bp, Homo sapien
tctacaagcttaagacccatctacatcttttca

SEQ ID NO: 711877 - DNA, 33 bp, Homo sapien
ttctgaaagtttagaccctgcaaaacataagcc

SEQ ID NO: 711878 - DNA, 33 bp, Homo sapien
ttctgaaagtttagactctgcaaaacataagcc

SEQ ID NO: 711879 - DNA, 33 bp, Homo sapien
aactttcagaaccatcacgtagcatatatggca

SEQ ID NO: 711880 - DNA, 33 bp, Homo sapien
aactttcagaaccatcgcgtagcatatatggca

SEQ ID NO: 711881 - DNA, 33 bp, Homo sapien
gtcacgatgcttaatgccacttgcattgttagc

SEQ ID NO: 711882 - DNA, 33 bp, Homo sapien
gtcacgatgcttaatgtcacttgcattgttagc

SEQ ID NO: 711883 - DNA, 33 bp, Homo sapien
gcttgcctcatgacaaagtgaatgtctcccact

SEQ ID NO: 711884 - DNA, 33 bp, Homo sapien
gcttgcctcatgacaacgtgaatgtctcccact

SEQ ID NO: 711885 - DNA, 33 bp, Homo sapien
tgtataagcatggaggacagataggcaatatgg

SEQ ID NO: 711886 - DNA, 33 bp, Homo sapien
tgtataagcatggaggccagataggcaatatgg

SEQ ID NO: 711887 - DNA, 33 bp, Homo sapien
tgatagaacccagggcacagaaggcagtccgtg

SEQ ID NO: 711888 - DNA, 33 bp, Homo sapien
tgatagaacccagggcgcagaaggcagtccgtg

SEQ ID NO: 711889 - DNA, 33 bp, Homo sapien
cacagctcatttctcccaggaaacatattcaaa

SEQ ID NO: 711890 - DNA, 33 bp, Homo sapien
cacagctcatttctcctaggaaacatattcaaa

SEQ ID NO: 711891 - DNA, 33 bp, Homo sapien
ttttatggactgaactcacctgaaaaattagca

SEQ ID NO: 711892 - DNA, 33 bp, Homo sapien
ttttatggactgaacttacctgaaaaattagca

SEQ ID NO: 711893 - DNA, 33 bp, Homo sapien
tatgttaaatggtgaaatgtaaaacagaaatga

SEQ ID NO: 711894 - DNA, 33 bp, Homo sapien
tatgttaaatggtgaattgtaaaacagaaatga

SEQ ID NO: 711895 - DNA, 33 bp, Homo sapien
tgtgactgtgagtagccaagctccctgtactga

SEQ ID NO: 711896 - DNA, 33 bp, Homo sapien
tgtgactgtgagtagctaagctccctgtactga

SEQ ID NO: 711897 - DNA, 33 bp, Homo sapien
aggcaaaataatctaaatgcaggagttgaagtg

SEQ ID NO: 711898 - DNA, 33 bp, Homo sapien
aggcaaaataatctaagtgcaggagttgaagtg

SEQ ID NO: 711899 - DNA, 33 bp, Homo sapien
aacaaaattttgttgccgactggagttcttatg

SEQ ID NO: 711900 - DNA, 33 bp, Homo sapien
aacaaaattttgttgctgactggagttcttatg

SEQ ID NO: 711901 - DNA, 33 bp, Homo sapien
aaagattctaccttggaaaaggaggtcaacacc

SEQ ID NO: 711902 - DNA, 33 bp, Homo sapien
aaagattctaccttgggaaaggaggtcaacacc

SEQ ID NO: 711903 - DNA, 33 bp, Homo sapien
gatgtgtgatagagaacggtaaggtcctctgtt

SEQ ID NO: 711904 - DNA, 33 bp, Homo sapien
gatgtgtgatagagaatggtaaggtcctctgtt

SEQ ID NO: 711905 - DNA, 33 bp, Homo sapien
cagcacactggcccagaaacttctacagtagtc

SEQ ID NO: 711906 - DNA, 33 bp, Homo sapien
cagcacactggcccagcaacttctacagtagtc

SEQ ID NO: 711907 - DNA, 33 bp, Homo sapien
ctctactaaaaatcaaccagacatggtggtgca

SEQ ID NO: 711908 - DNA, 33 bp, Homo sapien
ctctactaaaaatcaatcagacatggtggtgca

SEQ ID NO: 711909 - DNA, 33 bp, Homo sapien
accttccctcccttacaaatcatgcatttaccc

SEQ ID NO: 711910 - DNA, 33 bp, Homo sapien
accttccctcccttaccaatcatgcatttaccc

SEQ ID NO: 711911 - DNA, 33 bp, Homo sapien
tactgtggtggactacaattgggtactctgcct

SEQ ID NO: 711912 - DNA, 33 bp, Homo sapien
tactgtggtggactactattgggtactctgcct

SEQ ID NO: 711913 - DNA, 33 bp, Homo sapien
ttgagaatagacaaagacagcttgactggtaag

SEQ ID NO: 711914 - DNA, 33 bp, Homo sapien
ttgagaatagacaaaggcagcttgactggtaag

SEQ ID NO: 711915 - DNA, 33 bp, Homo sapien
gggacaatgaggcatgcaagactctctcactgc

SEQ ID NO: 711916 - DNA, 33 bp, Homo sapien
gggacaatgaggcatggaagactctctcactgc

SEQ ID NO: 711917 - DNA, 33 bp, Homo sapien
ttctatgttacagtagaagttgtatgtgttaag

SEQ ID NO: 711918 - DNA, 33 bp, Homo sapien
ttctatgttacagtagcagttgtatgtgttaag

SEQ ID NO: 711919 - DNA, 33 bp, Homo sapien
caggtataaagaaagacggaccagtagaaagaa

SEQ ID NO: 711920 - DNA, 33 bp, Homo sapien
caggtataaagaaagatggaccagtagaaagaa

SEQ ID NO: 711921 - DNA, 33 bp, Homo sapien
tacaggctatggaactcagtcctgcagaattgc

SEQ ID NO: 711922 - DNA, 33 bp, Homo sapien
tacaggctatggaactgagtcctgcagaattgc

SEQ ID NO: 711923 - DNA, 33 bp, Homo sapien
gctaccttgcaatgtacctgaagagcctcaaat

SEQ ID NO: 711924 - DNA, 33 bp, Homo sapien
gctaccttgcaatgtatctgaagagcctcaaat

SEQ ID NO: 711925 - DNA, 33 bp, Homo sapien
ctgcaaagcaactaaagaagactcactggatga

SEQ ID NO: 711926 - DNA, 33 bp, Homo sapien
ctgcaaagcaactaaataagactcactggatga

SEQ ID NO: 711927 - DNA, 33 bp, Homo sapien
tgaacttacaggcaaacaactacataaggtaat

SEQ ID NO: 711928 - DNA, 33 bp, Homo sapien
tgaacttacaggcaaagaactacataaggtaat

SEQ ID NO: 711929 - DNA, 33 bp, Homo sapien
cactctggattctctcccctctgtgcctgtgag

SEQ ID NO: 711930 - DNA, 33 bp, Homo sapien
cactctggattctctctcctctgtgcctgtgag

SEQ ID NO: 711931 - DNA, 33 bp, Homo sapien
ttagatcacgctggtacctacacagcccacatt

SEQ ID NO: 711932 - DNA, 33 bp, Homo sapien
ttagatcacgctggtatctacacagcccacatt

SEQ ID NO: 711933 - DNA, 33 bp, Homo sapien
gttgaggtaaaatcaccggaatctagtgtcata

SEQ ID NO: 711934 - DNA, 33 bp, Homo sapien
gttgaggtaaaatcactggaatctagtgtcata

SEQ ID NO: 711935 - DNA, 33 bp, Homo sapien
aagtaacacattctgccctgtgctggcaattct

SEQ ID NO: 711936 - DNA, 33 bp, Homo sapien
aagtaacacattctgctctgtgctggcaattct

SEQ ID NO: 711937 - DNA, 33 bp, Homo sapien
atgcctgctcatcataatagccaagtcctcctc

SEQ ID NO: 711938 - DNA, 33 bp, Homo sapien
atgcctgctcatcatattagccaagtcctcctc

SEQ ID NO: 711939 - DNA, 33 bp, Homo sapien
actagtcaaaagggtcgcaaggcatgcaattct

SEQ ID NO: 711940 - DNA, 33 bp, Homo sapien
actagtcaaaagggtctcaaggcatgcaattct

SEQ ID NO: 711941 - DNA, 33 bp, Homo sapien
acaatccaacctgcaaaactagtcaaaagggtc

SEQ ID NO: 711942 - DNA, 33 bp, Homo sapien
acaatccaacctgcaacactagtcaaaagggtc

SEQ ID NO: 711943 - DNA, 33 bp, Homo sapien
ccctacctttcctaataagtctcagatggaatc

SEQ ID NO: 711944 - DNA, 33 bp, Homo sapien
ccctacctttcctaatgagtctcagatggaatc

SEQ ID NO: 711945 - DNA, 33 bp, Homo sapien
ttactgttttctgttacgagaccactacatgat

SEQ ID NO: 711946 - DNA, 33 bp, Homo sapien
ttactgttttctgttatgagaccactacatgat

SEQ ID NO: 711947 - DNA, 33 bp, Homo sapien
tagcttgataacatgaaggctttatggttcctc

SEQ ID NO: 711948 - DNA, 33 bp, Homo sapien
tagcttgataacatgacggctttatggttcctc

SEQ ID NO: 711949 - DNA, 33 bp, Homo sapien
gatacaaaatgataagccctgtcactcatttgt

SEQ ID NO: 711950 - DNA, 33 bp, Homo sapien
gatacaaaatgataagtcctgtcactcatttgt

SEQ ID NO: 711951 - DNA, 33 bp, Homo sapien
gactggctgacaattacatccatgcagtgttag

SEQ ID NO: 711952 - DNA, 33 bp, Homo sapien
gactggctgacaattatatccatgcagtgttag

SEQ ID NO: 711953 - DNA, 33 bp, Homo sapien
taggatgacaaaacaccggaagaaatgactaga

SEQ ID NO: 711954 - DNA, 33 bp, Homo sapien
taggatgacaaaacactggaagaaatgactaga

SEQ ID NO: 711955 - DNA, 33 bp, Homo sapien
taagcatgagggagtcgaagctgtgggaggcat

SEQ ID NO: 711956 - DNA, 33 bp, Homo sapien
taagcatgagggagtctaagctgtgggaggcat

SEQ ID NO: 711957 - DNA, 33 bp, Homo sapien
catccagaacaaaagcagccagaggaacccaga

SEQ ID NO: 711958 - DNA, 33 bp, Homo sapien
catccagaacaaaagcggccagaggaacccaga

SEQ ID NO: 711959 - DNA, 33 bp, Homo sapien
tctaagccacttcctacctgacctttcttcttt

SEQ ID NO: 711960 - DNA, 33 bp, Homo sapien
tctaagccacttcctatctgacctttcttcttt

SEQ ID NO: 711961 - DNA, 33 bp, Homo sapien
agggccaagacaccaaagcaggtatatgcctaa

SEQ ID NO: 711962 - DNA, 33 bp, Homo sapien
agggccaagacaccaaggcaggtatatgcctaa

SEQ ID NO: 711963 - DNA, 33 bp, Homo sapien
tgccaccatcctcagcacaacacagatgggtat

SEQ ID NO: 711964 - DNA, 33 bp, Homo sapien
tgccaccatcctcagcgcaacacagatgggtat

SEQ ID NO: 711965 - DNA, 33 bp, Homo sapien
tgtactaaaaagctaaacagcacttctgtggac

SEQ ID NO: 711966 - DNA, 33 bp, Homo sapien
tgtactaaaaagctaagcagcacttctgtggac

SEQ ID NO: 711967 - DNA, 33 bp, Homo sapien
tcatacaggaagttaaactcatgatctgataca

SEQ ID NO: 711968 - DNA, 33 bp, Homo sapien
tcatacaggaagttaacctcatgatctgataca

SEQ ID NO: 711969 - DNA, 33 bp, Homo sapien
gccttggtattctagacccatcatgtgagcacg

SEQ ID NO: 711970 - DNA, 33 bp, Homo sapien
gccttggtattctagatccatcatgtgagcacg

SEQ ID NO: 711971 - DNA, 33 bp, Homo sapien
acctgagatagcaaagaaagtctatagtacatt

SEQ ID NO: 711972 - DNA, 33 bp, Homo sapien
acctgagatagcaaaggaagtctatagtacatt

SEQ ID NO: 711973 - DNA, 33 bp, Homo sapien
agggaggattcatactcagagccaacaagctag

SEQ ID NO: 711974 - DNA, 33 bp, Homo sapien
agggaggattcatacttagagccaacaagctag

SEQ ID NO: 711975 - DNA, 33 bp, Homo sapien
caagcaaagggttaaactactgctgtgtcctgt

SEQ ID NO: 711976 - DNA, 33 bp, Homo sapien
caagcaaagggttaaagtactgctgtgtcctgt

SEQ ID NO: 711977 - DNA, 33 bp, Homo sapien
aataaaaaattagaaacaatctgagatggttct

SEQ ID NO: 711978 - DNA, 33 bp, Homo sapien
aataaaaaattagaaagaatctgagatggttct

SEQ ID NO: 711979 - DNA, 33 bp, Homo sapien
tataaagtagccaaagacaaagtagaatttacc

SEQ ID NO: 711980 - DNA, 33 bp, Homo sapien
tataaagtagccaaaggcaaagtagaatttacc

SEQ ID NO: 711981 - DNA, 33 bp, Homo sapien
cttccaagcactgacaaaaatgttgtactctta

SEQ ID NO: 711982 - DNA, 33 bp, Homo sapien
cttccaagcactgacagaaatgttgtactctta

SEQ ID NO: 711983 - DNA, 33 bp, Homo sapien
tttgtgagctcacttacgatgtattatgcttag

SEQ ID NO: 711984 - DNA, 33 bp, Homo sapien
tttgtgagctcacttatgatgtattatgcttag

SEQ ID NO: 711985 - DNA, 33 bp, Homo sapien
taaccaaagatactaacaatttcttgttcacct

SEQ ID NO: 711986 - DNA, 33 bp, Homo sapien
taaccaaagatactaataatttcttgttcacct

SEQ ID NO: 711987 - DNA, 33 bp, Homo sapien
ggggttacagtagggcaagaaaagtatgaggag

SEQ ID NO: 711988 - DNA, 33 bp, Homo sapien
ggggttacagtagggcgagaaaagtatgaggag

SEQ ID NO: 711989 - DNA, 33 bp, Homo sapien
ggggtaagtgaccgatcagtaagagattgtgct

SEQ ID NO: 711990 - DNA, 33 bp, Homo sapien
ggggtaagtgaccgattagtaagagattgtgct

SEQ ID NO: 711991 - DNA, 33 bp, Homo sapien
tgaccagttgacctcaagaacaggggcccactc

SEQ ID NO: 711992 - DNA, 33 bp, Homo sapien
tgaccagttgacctcatgaacaggggcccactc

SEQ ID NO: 711993 - DNA, 33 bp, Homo sapien
ccacatctgtgaatgacgtagtgcaaatatctc

SEQ ID NO: 711994 - DNA, 33 bp, Homo sapien
ccacatctgtgaatgatgtagtgcaaatatctc

SEQ ID NO: 711995 - DNA, 33 bp, Homo sapien
tggcccaagaagagaacgtatactgatctctca

SEQ ID NO: 711996 - DNA, 33 bp, Homo sapien
tggcccaagaagagaatgtatactgatctctca

SEQ ID NO: 711997 - DNA, 33 bp, Homo sapien
ctgaaaccagagtctacgtaagatgctttcgaa

SEQ ID NO: 711998 - DNA, 33 bp, Homo sapien
ctgaaaccagagtctaggtaagatgctttcgaa

SEQ ID NO: 711999 - DNA, 33 bp, Homo sapien
gtttctcaagctttaacactgaagggtcaattt

SEQ ID NO: 712000 - DNA, 33 bp, Homo sapien
gtttctcaagctttaagactgaagggtcaattt

SEQ ID NO: 712001 - DNA, 33 bp, Homo sapien
tgtttctaagcaataacgaggttgcactcttag

SEQ ID NO: 712002 - DNA, 33 bp, Homo sapien
tgtttctaagcaataatgaggttgcactcttag

SEQ ID NO: 712003 - DNA, 33 bp, Homo sapien
ttcttgtagttgtgaacgtccatgtacttctta

SEQ ID NO: 712004 - DNA, 33 bp, Homo sapien
ttcttgtagttgtgaatgtccatgtacttctta

SEQ ID NO: 712005 - DNA, 33 bp, Homo sapien
cccctgcacttccagaaagttgtcacttgtgcc

SEQ ID NO: 712006 - DNA, 33 bp, Homo sapien
cccctgcacttccagatagttgtcacttgtgcc

SEQ ID NO: 712007 - DNA, 33 bp, Homo sapien
aagacttctagacctaagtgacttcggtaaatt

SEQ ID NO: 712008 - DNA, 33 bp, Homo sapien
aagacttctagacctacgtgacttcggtaaatt

SEQ ID NO: 712009 - DNA, 33 bp, Homo sapien
tatcggtagcccattcaattaataagctctatg

SEQ ID NO: 712010 - DNA, 33 bp, Homo sapien
tatcggtagcccattcgattaataagctctatg

SEQ ID NO: 712011 - DNA, 33 bp, Homo sapien
atacaatcagtcattacatgaagaaaggcatgt

SEQ ID NO: 712012 - DNA, 33 bp, Homo sapien
atacaatcagtcattagatgaagaaaggcatgt

SEQ ID NO: 712013 - DNA, 33 bp, Homo sapien
gacatcccacagaatacaacactggacaggata

SEQ ID NO: 712014 - DNA, 33 bp, Homo sapien
gacatcccacagaatataacactggacaggata

SEQ ID NO: 712015 - DNA, 33 bp, Homo sapien
aggttttcagggcccaatagctaggggtgttcc

SEQ ID NO: 712016 - DNA, 33 bp, Homo sapien
aggttttcagggcccagtagctaggggtgttcc

SEQ ID NO: 712017 - DNA, 33 bp, Homo sapien
tgccattctattttcaccccaattctcttagta

SEQ ID NO: 712018 - DNA, 33 bp, Homo sapien
tgccattctattttcatcccaattctcttagta

SEQ ID NO: 712019 - DNA, 33 bp, Homo sapien
agtacaccattgtgcacgtataacccttgtgta

SEQ ID NO: 712020 - DNA, 33 bp, Homo sapien
agtacaccattgtgcatgtataacccttgtgta

SEQ ID NO: 712021 - DNA, 33 bp, Homo sapien
acttgacccagagctaactccgaactcccaacc

SEQ ID NO: 712022 - DNA, 33 bp, Homo sapien
acttgacccagagctacctccgaactcccaacc

SEQ ID NO: 712023 - DNA, 33 bp, Homo sapien
cctagaggcaaagagaagactttaggttgctca

SEQ ID NO: 712024 - DNA, 33 bp, Homo sapien
cctagaggcaaagagacgactttaggttgctca

SEQ ID NO: 712025 - DNA, 33 bp, Homo sapien
aacaccgacttaattacgggctgacaaagaggc

SEQ ID NO: 712026 - DNA, 33 bp, Homo sapien
aacaccgacttaattatgggctgacaaagaggc

SEQ ID NO: 712027 - DNA, 33 bp, Homo sapien
atctgctctctgtttccaaaatggctccttgtt

SEQ ID NO: 712028 - DNA, 33 bp, Homo sapien
atctgctctctgtttctaaaatggctccttgtt

SEQ ID NO: 712029 - DNA, 33 bp, Homo sapien
tccaccagttaaaaatcagcagagtcatgtatt

SEQ ID NO: 712030 - DNA, 33 bp, Homo sapien
tccaccagttaaaaattagcagagtcatgtatt

SEQ ID NO: 712031 - DNA, 33 bp, Homo sapien
ggtattccatgaagaaagtagttcagctcacta

SEQ ID NO: 712032 - DNA, 33 bp, Homo sapien
ggtattccatgaagaatgtagttcagctcacta

SEQ ID NO: 712033 - DNA, 33 bp, Homo sapien
gaggatagttgcaatcggaagagtcattggcct

SEQ ID NO: 712034 - DNA, 33 bp, Homo sapien
gaggatagttgcaatctgaagagtcattggcct

SEQ ID NO: 712035 - DNA, 33 bp, Homo sapien
ttacagtaactcaagcaaatattgaagtcagag

SEQ ID NO: 712036 - DNA, 33 bp, Homo sapien
ttacagtaactcaagcgaatattgaagtcagag

SEQ ID NO: 712037 - DNA, 33 bp, Homo sapien
aaagatgttgagtctgaaagatcctttggattt

SEQ ID NO: 712038 - DNA, 33 bp, Homo sapien
aaagatgttgagtctgcaagatcctttggattt

SEQ ID NO: 712039 - DNA, 33 bp, Homo sapien
tgatgccctgcagcagaataatgacaggctgag

SEQ ID NO: 712040 - DNA, 33 bp, Homo sapien
tgatgccctgcagcaggataatgacaggctgag

SEQ ID NO: 712041 - DNA, 33 bp, Homo sapien
cttactttgctggatacgaaattttgggttgaa

SEQ ID NO: 712042 - DNA, 33 bp, Homo sapien
cttactttgctggatatgaaattttgggttgaa

SEQ ID NO: 712043 - DNA, 33 bp, Homo sapien
ggggcaagggagaagtcaaaagtatccttccct

SEQ ID NO: 712044 - DNA, 33 bp, Homo sapien
ggggcaagggagaagtgaaaagtatccttccct

SEQ ID NO: 712045 - DNA, 33 bp, Homo sapien
gttgtataattcaaaacgtatgaccttctggga

SEQ ID NO: 712046 - DNA, 33 bp, Homo sapien
gttgtataattcaaaatgtatgaccttctggga

SEQ ID NO: 712047 - DNA, 33 bp, Homo sapien
acaattgtgtaatataagtatggcttccagggg

SEQ ID NO: 712048 - DNA, 33 bp, Homo sapien
acaattgtgtaatatacgtatggcttccagggg

SEQ ID NO: 712049 - DNA, 33 bp, Homo sapien
ttgccatccatccttaggtgtcaggcattaggc

SEQ ID NO: 712050 - DNA, 33 bp, Homo sapien
ttgccatccatccttatgtgtcaggcattaggc

SEQ ID NO: 712051 - DNA, 33 bp, Homo sapien
gcttactgagaaataacggaaaagtgtgagtcc

SEQ ID NO: 712052 - DNA, 33 bp, Homo sapien
gcttactgagaaataatggaaaagtgtgagtcc

SEQ ID NO: 712053 - DNA, 33 bp, Homo sapien
ggatgaaaatatgacaaaagggtctttgaatta

SEQ ID NO: 712054 - DNA, 33 bp, Homo sapien
ggatgaaaatatgacacaagggtctttgaatta

SEQ ID NO: 712055 - DNA, 33 bp, Homo sapien
ctctctctgtctcagacgaaaagaaacctagaa

SEQ ID NO: 712056 - DNA, 33 bp, Homo sapien
ctctctctgtctcagatgaaaagaaacctagaa

SEQ ID NO: 712057 - DNA, 33 bp, Homo sapien
ataatatggaagtaaaaatcagattcacagttt

SEQ ID NO: 712058 - DNA, 33 bp, Homo sapien
ataatatggaagtaaagatcagattcacagttt

SEQ ID NO: 712059 - DNA, 33 bp, Homo sapien
tcaactggaaagggtacgcctataagggaagga

SEQ ID NO: 712060 - DNA, 33 bp, Homo sapien
tcaactggaaagggtatgcctataagggaagga

SEQ ID NO: 712061 - DNA, 33 bp, Homo sapien
tccactcggaaacagcaaggtagtacacaaaga

SEQ ID NO: 712062 - DNA, 33 bp, Homo sapien
tccactcggaaacagcgaggtagtacacaaaga

SEQ ID NO: 712063 - DNA, 33 bp, Homo sapien
gaaaatgctgatatctgacattggagaaataat

SEQ ID NO: 712064 - DNA, 33 bp, Homo sapien
gaaaatgctgatatcttacattggagaaataat

SEQ ID NO: 712065 - DNA, 33 bp, Homo sapien
cagactcaagcatgacaactgtgtaagccactg

SEQ ID NO: 712066 - DNA, 33 bp, Homo sapien
cagactcaagcatgaccactgtgtaagccactg

SEQ ID NO: 712067 - DNA, 33 bp, Homo sapien
tattagaacaacatcaatgaaatattttacctg

SEQ ID NO: 712068 - DNA, 33 bp, Homo sapien
tattagaacaacatcagtgaaatattttacctg

SEQ ID NO: 712069 - DNA, 33 bp, Homo sapien
aattccactgtgcccacgaggacaagtaagagc

SEQ ID NO: 712070 - DNA, 33 bp, Homo sapien
aattccactgtgcccatgaggacaagtaagagc

SEQ ID NO: 712071 - DNA, 33 bp, Homo sapien
aatattctgtcttttgaatactcagttctctct

SEQ ID NO: 712072 - DNA, 33 bp, Homo sapien
aatattctgtcttttggatactcagttctctct

SEQ ID NO: 712073 - DNA, 33 bp, Homo sapien
aagtggtcagagcccaagaaattaatccaggaa

SEQ ID NO: 712074 - DNA, 33 bp, Homo sapien
aagtggtcagagcccatgaaattaatccaggaa

SEQ ID NO: 712075 - DNA, 33 bp, Homo sapien
tgcccaactggtgataacactgtgacatatgtt

SEQ ID NO: 712076 - DNA, 33 bp, Homo sapien
tgcccaactggtgataccactgtgacatatgtt

SEQ ID NO: 712077 - DNA, 33 bp, Homo sapien
gcagattagctgatatcaagggaacaaagtgat

SEQ ID NO: 712078 - DNA, 33 bp, Homo sapien
gcagattagctgatattaagggaacaaagtgat

SEQ ID NO: 712079 - DNA, 33 bp, Homo sapien
gtttctcctctactgacgctataatgtaatcat

SEQ ID NO: 712080 - DNA, 33 bp, Homo sapien
gtttctcctctactgatgctataatgtaatcat

SEQ ID NO: 712081 - DNA, 33 bp, Homo sapien
agatactttgtccaatcatgccatctcactgtt

SEQ ID NO: 712082 - DNA, 33 bp, Homo sapien
agatactttgtccaattatgccatctcactgtt

SEQ ID NO: 712083 - DNA, 33 bp, Homo sapien
aggtcctgcattcaacaagattctcaggtggtt

SEQ ID NO: 712084 - DNA, 33 bp, Homo sapien
aggtcctgcattcaacgagattctcaggtggtt

SEQ ID NO: 712085 - DNA, 33 bp, Homo sapien
aaaagagataccacaactccaatattcatgtga

SEQ ID NO: 712086 - DNA, 33 bp, Homo sapien
aaaagagataccacaagtccaatattcatgtga

SEQ ID NO: 712087 - DNA, 33 bp, Homo sapien
cttctttctgcacataaccatttcttcggccac

SEQ ID NO: 712088 - DNA, 33 bp, Homo sapien
cttctttctgcacatatccatttcttcggccac

SEQ ID NO: 712089 - DNA, 33 bp, Homo sapien
aagtcatcagccatgaacagaactgagtgtgaa

SEQ ID NO: 712090 - DNA, 33 bp, Homo sapien
aagtcatcagccatgaccagaactgagtgtgaa

SEQ ID NO: 712091 - DNA, 33 bp, Homo sapien
taatgtcctctaattacgtgtggaactaaatat

SEQ ID NO: 712092 - DNA, 33 bp, Homo sapien
taatgtcctctaattatgtgtggaactaaatat

SEQ ID NO: 712093 - DNA, 33 bp, Homo sapien
ctgggagtgtttgtagaattaatacctgtcggt

SEQ ID NO: 712094 - DNA, 33 bp, Homo sapien
ctgggagtgtttgtaggattaatacctgtcggt

SEQ ID NO: 712095 - DNA, 33 bp, Homo sapien
tgatgcaataatttaaactttcctttgaagggg

SEQ ID NO: 712096 - DNA, 33 bp, Homo sapien
tgatgcaataatttaacctttcctttgaagggg

SEQ ID NO: 712097 - DNA, 33 bp, Homo sapien
gatataggctgcttcactcatctccaaccgttt

SEQ ID NO: 712098 - DNA, 33 bp, Homo sapien
gatataggctgcttcattcatctccaaccgttt

SEQ ID NO: 712099 - DNA, 33 bp, Homo sapien
ttagagagactgttaacaaccgcctgaccgtca

SEQ ID NO: 712100 - DNA, 33 bp, Homo sapien
ttagagagactgttaataaccgcctgaccgtca

SEQ ID NO: 712101 - DNA, 33 bp, Homo sapien
gaccacctgcctcaaacagatcttatcagattt

SEQ ID NO: 712102 - DNA, 33 bp, Homo sapien
gaccacctgcctcaaatagatcttatcagattt

SEQ ID NO: 712103 - DNA, 33 bp, Homo sapien
atgtttgtgcctgtatcaaattcacttagcaaa

SEQ ID NO: 712104 - DNA, 33 bp, Homo sapien
atgtttgtgcctgtatgaaattcacttagcaaa

SEQ ID NO: 712105 - DNA, 33 bp, Homo sapien
gttcaataactagttcaagttacacagtctgat

SEQ ID NO: 712106 - DNA, 33 bp, Homo sapien
gttcaataactagttccagttacacagtctgat

SEQ ID NO: 712107 - DNA, 33 bp, Homo sapien
tgagagccattcataactccgagttctgacaaa

SEQ ID NO: 712108 - DNA, 33 bp, Homo sapien
tgagagccattcataattccgagttctgacaaa

SEQ ID NO: 712109 - DNA, 33 bp, Homo sapien
ggtagataaaatagcactgatgtgattacagga

SEQ ID NO: 712110 - DNA, 33 bp, Homo sapien
ggtagataaaatagcattgatgtgattacagga

SEQ ID NO: 712111 - DNA, 33 bp, Homo sapien
tgcttggtactagacaaaaaataaaatccagtt

SEQ ID NO: 712112 - DNA, 33 bp, Homo sapien
tgcttggtactagacagaaaataaaatccagtt

SEQ ID NO: 712113 - DNA, 33 bp, Homo sapien
ccaactttccaggttaagctcttcaactctaat

SEQ ID NO: 712114 - DNA, 33 bp, Homo sapien
ccaactttccaggttatgctcttcaactctaat

SEQ ID NO: 712115 - DNA, 33 bp, Homo sapien
gaaaaggatactctgaccctacgtgaaagcaaa

SEQ ID NO: 712116 - DNA, 33 bp, Homo sapien
gaaaaggatactctgatcctacgtgaaagcaaa

SEQ ID NO: 712117 - DNA, 33 bp, Homo sapien
ttttgaggaattgacaaacttttccacagtagc

SEQ ID NO: 712118 - DNA, 33 bp, Homo sapien
ttttgaggaattgacagacttttccacagtagc

SEQ ID NO: 712119 - DNA, 33 bp, Homo sapien
agccataaagaatgaaatccgtcttcaaaaaga

SEQ ID NO: 712120 - DNA, 33 bp, Homo sapien
agccataaagaatgaactccgtcttcaaaaaga

SEQ ID NO: 712121 - DNA, 33 bp, Homo sapien
tatataactccccagaaatccctaaccaaactc

SEQ ID NO: 712122 - DNA, 33 bp, Homo sapien
tatataactccccagagatccctaaccaaactc

SEQ ID NO: 712123 - DNA, 33 bp, Homo sapien
aggaagtgatgcttgaagtgaatcttgaaggat

SEQ ID NO: 712124 - DNA, 33 bp, Homo sapien
aggaagtgatgcttgaggtgaatcttgaaggat

SEQ ID NO: 712125 - DNA, 33 bp, Homo sapien
tcatttagttcagtgactaccaaacttatttta

SEQ ID NO: 712126 - DNA, 33 bp, Homo sapien
tcatttagttcagtgattaccaaacttatttta

SEQ ID NO: 712127 - DNA, 33 bp, Homo sapien
aattcatctccacaaacggggtacctcttttta

SEQ ID NO: 712128 - DNA, 33 bp, Homo sapien
aattcatctccacaaatggggtacctcttttta

SEQ ID NO: 712129 - DNA, 33 bp, Homo sapien
taacctgggttaaaacaatttcttgctctccaa

SEQ ID NO: 712130 - DNA, 33 bp, Homo sapien
taacctgggttaaaactatttcttgctctccaa

SEQ ID NO: 712131 - DNA, 33 bp, Homo sapien
ctccagtcaagaaggaggtactcaaagcttttt

SEQ ID NO: 712132 - DNA, 33 bp, Homo sapien
ctccagtcaagaaggatgtactcaaagcttttt

SEQ ID NO: 712133 - DNA, 33 bp, Homo sapien
ccctatgatttacaccacttccaacacagtaca

SEQ ID NO: 712134 - DNA, 33 bp, Homo sapien
ccctatgatttacaccgcttccaacacagtaca

SEQ ID NO: 712135 - DNA, 33 bp, Homo sapien
cagttgtagctcccacacttgcctgtccacatt

SEQ ID NO: 712136 - DNA, 33 bp, Homo sapien
cagttgtagctcccacgcttgcctgtccacatt

SEQ ID NO: 712137 - DNA, 33 bp, Homo sapien
cagagggaaagctacaaaaggctagggagagta

SEQ ID NO: 712138 - DNA, 33 bp, Homo sapien
cagagggaaagctacagaaggctagggagagta

SEQ ID NO: 712139 - DNA, 33 bp, Homo sapien
ctaattcaacaaacatcaagtgaacttttccaa

SEQ ID NO: 712140 - DNA, 33 bp, Homo sapien
ctaattcaacaaacatgaagtgaacttttccaa

SEQ ID NO: 712141 - DNA, 33 bp, Homo sapien
tcaaataataggcaggacatacacggactaaaa

SEQ ID NO: 712142 - DNA, 33 bp, Homo sapien
tcaaataataggcaggccatacacggactaaaa

SEQ ID NO: 712143 - DNA, 33 bp, Homo sapien
ttgacaattctactgacgttagcaaggcaacag

SEQ ID NO: 712144 - DNA, 33 bp, Homo sapien
ttgacaattctactgatgttagcaaggcaacag

SEQ ID NO: 712145 - DNA, 33 bp, Homo sapien
tcctgaagtggggagcacttattgcgatttcag

SEQ ID NO: 712146 - DNA, 33 bp, Homo sapien
tcctgaagtggggagcgcttattgcgatttcag

SEQ ID NO: 712147 - DNA, 33 bp, Homo sapien
tgacatcttttgtagaagtcttcccatctagtc

SEQ ID NO: 712148 - DNA, 33 bp, Homo sapien
tgacatcttttgtagaggtcttcccatctagtc

SEQ ID NO: 712149 - DNA, 33 bp, Homo sapien
agcagaagccattccaacaatgatagagtcaaa

SEQ ID NO: 712150 - DNA, 33 bp, Homo sapien
agcagaagccattccagcaatgatagagtcaaa

SEQ ID NO: 712151 - DNA, 33 bp, Homo sapien
aacaaatggaagcatactacattttggcaagta

SEQ ID NO: 712152 - DNA, 33 bp, Homo sapien
aacaaatggaagcatattacattttggcaagta

SEQ ID NO: 712153 - DNA, 33 bp, Homo sapien
aagaagcaaattctggcacaaagtaaggcaaaa

SEQ ID NO: 712154 - DNA, 33 bp, Homo sapien
aagaagcaaattctggtacaaagtaaggcaaaa

SEQ ID NO: 712155 - DNA, 33 bp, Homo sapien
attgggccatcaatttcaaaacataccttcaaa

SEQ ID NO: 712156 - DNA, 33 bp, Homo sapien
attgggccatcaatttgaaaacataccttcaaa

SEQ ID NO: 712157 - DNA, 33 bp, Homo sapien
aatactgactgcacagcagaaagtggcatggag

SEQ ID NO: 712158 - DNA, 33 bp, Homo sapien
aatactgactgcacagtagaaagtggcatggag

SEQ ID NO: 712159 - DNA, 33 bp, Homo sapien
tcagcatgtattgatcaaacacctactacactt

SEQ ID NO: 712160 - DNA, 33 bp, Homo sapien
tcagcatgtattgatcgaacacctactacactt

SEQ ID NO: 712161 - DNA, 33 bp, Homo sapien
cgcttaaggaacacaaccctcacatgagccatc

SEQ ID NO: 712162 - DNA, 33 bp, Homo sapien
cgcttaaggaacacaatcctcacatgagccatc

SEQ ID NO: 712163 - DNA, 33 bp, Homo sapien
ttaaaggcacaagacaacgtaattcctttatac

SEQ ID NO: 712164 - DNA, 33 bp, Homo sapien
ttaaaggcacaagacagcgtaattcctttatac

SEQ ID NO: 712165 - DNA, 33 bp, Homo sapien
cagagaatgtatagaaacaccttgatgtccaga

SEQ ID NO: 712166 - DNA, 33 bp, Homo sapien
cagagaatgtatagaagcaccttgatgtccaga

SEQ ID NO: 712167 - DNA, 33 bp, Homo sapien
ttttgtttctctggagaatgctgactaataaca

SEQ ID NO: 712168 - DNA, 33 bp, Homo sapien
ttttgtttctctggagtatgctgactaataaca

SEQ ID NO: 712169 - DNA, 33 bp, Homo sapien
acagctggaaaatataaccattactgacagaat

SEQ ID NO: 712170 - DNA, 33 bp, Homo sapien
acagctggaaaatatatccattactgacagaat

SEQ ID NO: 712171 - DNA, 33 bp, Homo sapien
aggtgtgagggttccaataacaccacattcttt

SEQ ID NO: 712172 - DNA, 33 bp, Homo sapien
aggtgtgagggttccagtaacaccacattcttt

SEQ ID NO: 712173 - DNA, 33 bp, Homo sapien
gttagagattcactgcaatgcgataagaagaaa

SEQ ID NO: 712174 - DNA, 33 bp, Homo sapien
gttagagattcactgccatgcgataagaagaaa

SEQ ID NO: 712175 - DNA, 33 bp, Homo sapien
tgtcaatactccaaaactctacaggcaggaaac

SEQ ID NO: 712176 - DNA, 33 bp, Homo sapien
tgtcaatactccaaaattctacaggcaggaaac

SEQ ID NO: 712177 - DNA, 33 bp, Homo sapien
tgaaaataatcctcttaaactcatggctctgcc

SEQ ID NO: 712178 - DNA, 33 bp, Homo sapien
tgaaaataatcctcttgaactcatggctctgcc

SEQ ID NO: 712179 - DNA, 33 bp, Homo sapien
tatactgtgctataggcaagccacaagtttcca

SEQ ID NO: 712180 - DNA, 33 bp, Homo sapien
tatactgtgctataggtaagccacaagtttcca

SEQ ID NO: 712181 - DNA, 33 bp, Homo sapien
ctcattcttgtcattgaactgtgacaggaaggg

SEQ ID NO: 712182 - DNA, 33 bp, Homo sapien
ctcattcttgtcattggactgtgacaggaaggg

SEQ ID NO: 712183 - DNA, 33 bp, Homo sapien
ggccaagatgtgatcaagaaataaactcttttt

SEQ ID NO: 712184 - DNA, 33 bp, Homo sapien
ggccaagatgtgatcatgaaataaactcttttt

SEQ ID NO: 712185 - DNA, 33 bp, Homo sapien
aagcatatcttaacaaggctccacacagttggt

SEQ ID NO: 712186 - DNA, 33 bp, Homo sapien
aagcatatcttaacaatgctccacacagttggt

SEQ ID NO: 712187 - DNA, 33 bp, Homo sapien
tataatgtagtggggtaaatacaacatttcaac

SEQ ID NO: 712188 - DNA, 33 bp, Homo sapien
tataatgtagtggggttaatacaacatttcaac

SEQ ID NO: 712189 - DNA, 33 bp, Homo sapien
taccgccaacaaggaaccctgatagacacaagc

SEQ ID NO: 712190 - DNA, 33 bp, Homo sapien
taccgccaacaaggaatcctgatagacacaagc

SEQ ID NO: 712191 - DNA, 33 bp, Homo sapien
gccagctcttgaaaatgacgcctcttacactag

SEQ ID NO: 712192 - DNA, 33 bp, Homo sapien
gccagctcttgaaaattacgcctcttacactag

SEQ ID NO: 712193 - DNA, 33 bp, Homo sapien
cctcacaagacaggctaagagttagcgtaatac

SEQ ID NO: 712194 - DNA, 33 bp, Homo sapien
cctcacaagacaggctgagagttagcgtaatac

SEQ ID NO: 712195 - DNA, 33 bp, Homo sapien
gtaacaagatgtcggaatagaaatgagtgagtt

SEQ ID NO: 712196 - DNA, 33 bp, Homo sapien
gtaacaagatgtcggagtagaaatgagtgagtt

SEQ ID NO: 712197 - DNA, 33 bp, Homo sapien
agggatatcaacacataactccaggcctttctt

SEQ ID NO: 712198 - DNA, 33 bp, Homo sapien
agggatatcaacacattactccaggcctttctt

SEQ ID NO: 712199 - DNA, 33 bp, Homo sapien
ctagactgtaaagggcaacaacaggttccctga

SEQ ID NO: 712200 - DNA, 33 bp, Homo sapien
ctagactgtaaagggcgacaacaggttccctga

SEQ ID NO: 712201 - DNA, 33 bp, Homo sapien
ctgttgacgcatggaaataaaaagcctaggaac

SEQ ID NO: 712202 - DNA, 33 bp, Homo sapien
ctgttgacgcatggaactaaaaagcctaggaac

SEQ ID NO: 712203 - DNA, 33 bp, Homo sapien
ttgctagctttgtgagaatttgcaggagttact

SEQ ID NO: 712204 - DNA, 33 bp, Homo sapien
ttgctagctttgtgaggatttgcaggagttact

SEQ ID NO: 712205 - DNA, 33 bp, Homo sapien
atataaatggctttgacgacatgcactaacgtg

SEQ ID NO: 712206 - DNA, 33 bp, Homo sapien
atataaatggctttgatgacatgcactaacgtg

SEQ ID NO: 712207 - DNA, 33 bp, Homo sapien
ccataaaaagagagcacgtttccaagtgctgga

SEQ ID NO: 712208 - DNA, 33 bp, Homo sapien
ccataaaaagagagcatgtttccaagtgctgga

SEQ ID NO: 712209 - DNA, 33 bp, Homo sapien
gatgcaggaggtactaactaagccctgagctaa

SEQ ID NO: 712210 - DNA, 33 bp, Homo sapien
gatgcaggaggtactagctaagccctgagctaa

SEQ ID NO: 712211 - DNA, 33 bp, Homo sapien
tgcctacctcttgaaaacaatgtcatcagaagt

SEQ ID NO: 712212 - DNA, 33 bp, Homo sapien
tgcctacctcttgaaagcaatgtcatcagaagt

SEQ ID NO: 712213 - DNA, 33 bp, Homo sapien
atattggttgaaaatacccttgattgcctcagg

SEQ ID NO: 712214 - DNA, 33 bp, Homo sapien
atattggttgaaaatatccttgattgcctcagg

SEQ ID NO: 712215 - DNA, 33 bp, Homo sapien
atgactattgtgttaaaaatgcctgtgctaagt

SEQ ID NO: 712216 - DNA, 33 bp, Homo sapien
atgactattgtgttaagaatgcctgtgctaagt

SEQ ID NO: 712217 - DNA, 33 bp, Homo sapien
acagggctgtaatctacggctgtgcaaagaaca

SEQ ID NO: 712218 - DNA, 33 bp, Homo sapien
acagggctgtaatctatggctgtgcaaagaaca

SEQ ID NO: 712219 - DNA, 33 bp, Homo sapien
tacctacttatcagcaactacttaaatccatgc

SEQ ID NO: 712220 - DNA, 33 bp, Homo sapien
tacctacttatcagcagctacttaaatccatgc

SEQ ID NO: 712221 - DNA, 33 bp, Homo sapien
acaggcccagtacttacaagccacagtgatatc

SEQ ID NO: 712222 - DNA, 33 bp, Homo sapien
acaggcccagtacttagaagccacagtgatatc

SEQ ID NO: 712223 - DNA, 33 bp, Homo sapien
catttcaggagacactcacattcctaaatgggt

SEQ ID NO: 712224 - DNA, 33 bp, Homo sapien
catttcaggagacacttacattcctaaatgggt

SEQ ID NO: 712225 - DNA, 33 bp, Homo sapien
agcacatgtacacacacgcaagagaagtgctta

SEQ ID NO: 712226 - DNA, 33 bp, Homo sapien
agcacatgtacacacatgcaagagaagtgctta

SEQ ID NO: 712227 - DNA, 33 bp, Homo sapien
tcccaaatgaggcaagcctatgagcccaaagtt

SEQ ID NO: 712228 - DNA, 33 bp, Homo sapien
tcccaaatgaggcaagtctatgagcccaaagtt

SEQ ID NO: 712229 - DNA, 33 bp, Homo sapien
aactcagtcaggcagtaactaatggtggggtag

SEQ ID NO: 712230 - DNA, 33 bp, Homo sapien
aactcagtcaggcagtcactaatggtggggtag

SEQ ID NO: 712231 - DNA, 33 bp, Homo sapien
tgtacacaacttgatgaagcaattaggtctgaa

SEQ ID NO: 712232 - DNA, 33 bp, Homo sapien
tgtacacaacttgatgcagcaattaggtctgaa

SEQ ID NO: 712233 - DNA, 33 bp, Homo sapien
gttacactacagcaacaatccaggcaaacaatc

SEQ ID NO: 712234 - DNA, 33 bp, Homo sapien
gttacactacagcaactatccaggcaaacaatc

SEQ ID NO: 712235 - DNA, 33 bp, Homo sapien
aattatgaaaatgtaaagcagattcaagaaaca

SEQ ID NO: 712236 - DNA, 33 bp, Homo sapien
aattatgaaaatgtaatgcagattcaagaaaca

SEQ ID NO: 712237 - DNA, 33 bp, Homo sapien
gtttctttttaggctcactttaattggattcat

SEQ ID NO: 712238 - DNA, 33 bp, Homo sapien
gtttctttttaggctcgctttaattggattcat

SEQ ID NO: 712239 - DNA, 33 bp, Homo sapien
tagtacatggaactgcacatactaactcttgga

SEQ ID NO: 712240 - DNA, 33 bp, Homo sapien
tagtacatggaactgcgcatactaactcttgga

SEQ ID NO: 712241 - DNA, 33 bp, Homo sapien
acttgtattttgcttaagagagaaattgtatct

SEQ ID NO: 712242 - DNA, 33 bp, Homo sapien
acttgtattttgcttaggagagaaattgtatct

SEQ ID NO: 712243 - DNA, 33 bp, Homo sapien
caagaaatcacagtccacttaggtcacataaaa

SEQ ID NO: 712244 - DNA, 33 bp, Homo sapien
caagaaatcacagtccgcttaggtcacataaaa

SEQ ID NO: 712245 - DNA, 33 bp, Homo sapien
ggtatgtttgccaagcactaaattaatagtaag

SEQ ID NO: 712246 - DNA, 33 bp, Homo sapien
ggtatgtttgccaagcgctaaattaatagtaag

SEQ ID NO: 712247 - DNA, 33 bp, Homo sapien
gttacttctgtgtagcaagataagttcattttt

SEQ ID NO: 712248 - DNA, 33 bp, Homo sapien
gttacttctgtgtagcgagataagttcattttt

SEQ ID NO: 712249 - DNA, 33 bp, Homo sapien
ttactttaacaaagctcaagccaataaaacagc

SEQ ID NO: 712250 - DNA, 33 bp, Homo sapien
ttactttaacaaagctgaagccaataaaacagc

SEQ ID NO: 712251 - DNA, 33 bp, Homo sapien
atatcagagaaaatgactatggcagtccagtct

SEQ ID NO: 712252 - DNA, 33 bp, Homo sapien
atatcagagaaaatgattatggcagtccagtct

SEQ ID NO: 712253 - DNA, 33 bp, Homo sapien
gcctagtacattgctacacaacagaagcacaat

SEQ ID NO: 712254 - DNA, 33 bp, Homo sapien
gcctagtacattgctatacaacagaagcacaat

SEQ ID NO: 712255 - DNA, 33 bp, Homo sapien
gatcatcagttaaaccagcattttattgctcta

SEQ ID NO: 712256 - DNA, 33 bp, Homo sapien
gatcatcagttaaaccggcattttattgctcta

SEQ ID NO: 712257 - DNA, 33 bp, Homo sapien
agaaatcaggggttaaaagttcaatccactcat

SEQ ID NO: 712258 - DNA, 33 bp, Homo sapien
agaaatcaggggttaacagttcaatccactcat

SEQ ID NO: 712259 - DNA, 33 bp, Homo sapien
gccttcctctgccccaagcttttcatatctcag

SEQ ID NO: 712260 - DNA, 33 bp, Homo sapien
gccttcctctgccccaggcttttcatatctcag

SEQ ID NO: 712261 - DNA, 33 bp, Homo sapien
ataagttcaaaggcagcattttagtcatagccc

SEQ ID NO: 712262 - DNA, 33 bp, Homo sapien
ataagttcaaaggcagtattttagtcatagccc

SEQ ID NO: 712263 - DNA, 33 bp, Homo sapien
cccaagtttcttcaacagatgaaagatgaatga

SEQ ID NO: 712264 - DNA, 33 bp, Homo sapien
cccaagtttcttcaacggatgaaagatgaatga

SEQ ID NO: 712265 - DNA, 33 bp, Homo sapien
ttgttctcaaaggcacagctctgcaaaccacat

SEQ ID NO: 712266 - DNA, 33 bp, Homo sapien
ttgttctcaaaggcaccgctctgcaaaccacat

SEQ ID NO: 712267 - DNA, 33 bp, Homo sapien
ataggtaatagtggcaaccaaagtcaattagat

SEQ ID NO: 712268 - DNA, 33 bp, Homo sapien
ataggtaatagtggcagccaaagtcaattagat

SEQ ID NO: 712269 - DNA, 33 bp, Homo sapien
ataggtgaggatcagaatatggggtctgcattt

SEQ ID NO: 712270 - DNA, 33 bp, Homo sapien
ataggtgaggatcagattatggggtctgcattt

SEQ ID NO: 712271 - DNA, 33 bp, Homo sapien
cagagatttcctagccaaaattcctattagagt

SEQ ID NO: 712272 - DNA, 33 bp, Homo sapien
cagagatttcctagcccaaattcctattagagt

SEQ ID NO: 712273 - DNA, 33 bp, Homo sapien
tttttggatcatttcagacatctgtttttgaca

SEQ ID NO: 712274 - DNA, 33 bp, Homo sapien
tttttggatcatttcatacatctgtttttgaca

SEQ ID NO: 712275 - DNA, 33 bp, Homo sapien
gctcacctccccttaaatgactgtgctccccaa

SEQ ID NO: 712276 - DNA, 33 bp, Homo sapien
gctcacctccccttaagtgactgtgctccccaa

SEQ ID NO: 712277 - DNA, 33 bp, Homo sapien
ttctactcagcttaccacagtgtgtatatatga

SEQ ID NO: 712278 - DNA, 33 bp, Homo sapien
ttctactcagcttaccgcagtgtgtatatatga

SEQ ID NO: 712279 - DNA, 33 bp, Homo sapien
actgtgttcttcataacgactatatccttttca

SEQ ID NO: 712280 - DNA, 33 bp, Homo sapien
actgtgttcttcataatgactatatccttttca

SEQ ID NO: 712281 - DNA, 33 bp, Homo sapien
ttctccttctattaccacgaagattttttattt

SEQ ID NO: 712282 - DNA, 33 bp, Homo sapien
ttctccttctattaccgcgaagattttttattt

SEQ ID NO: 712283 - DNA, 33 bp, Homo sapien
cccagattttgttcagaaagccagagtcagact

SEQ ID NO: 712284 - DNA, 33 bp, Homo sapien
cccagattttgttcagcaagccagagtcagact

SEQ ID NO: 712285 - DNA, 33 bp, Homo sapien
ctctcctcagaatccacgcttgttcccatactc

SEQ ID NO: 712286 - DNA, 33 bp, Homo sapien
ctctcctcagaatccatgcttgttcccatactc

SEQ ID NO: 712287 - DNA, 33 bp, Homo sapien
tgtggataatacaatccagtctttcaattagat

SEQ ID NO: 712288 - DNA, 33 bp, Homo sapien
tgtggataatacaatctagtctttcaattagat

SEQ ID NO: 712289 - DNA, 33 bp, Homo sapien
gggtgtttcttttgtacgggtgtaaggacagca

SEQ ID NO: 712290 - DNA, 33 bp, Homo sapien
gggtgtttcttttgtatgggtgtaaggacagca

SEQ ID NO: 712291 - DNA, 33 bp, Homo sapien
tgactgttttcatagaagctattcctatctaaa

SEQ ID NO: 712292 - DNA, 33 bp, Homo sapien
tgactgttttcatagaggctattcctatctaaa

SEQ ID NO: 712293 - DNA, 33 bp, Homo sapien
ggtgaaaagtcaccaaaagtggtacaagcatga

SEQ ID NO: 712294 - DNA, 33 bp, Homo sapien
ggtgaaaagtcaccaacagtggtacaagcatga

SEQ ID NO: 712295 - DNA, 33 bp, Homo sapien
gctttattagagttggaaatgtgacttataaaa

SEQ ID NO: 712296 - DNA, 33 bp, Homo sapien
gctttattagagttgggaatgtgacttataaaa

SEQ ID NO: 712297 - DNA, 33 bp, Homo sapien
ataacaaaaggaatagacaggcagatggatggg

SEQ ID NO: 712298 - DNA, 33 bp, Homo sapien
ataacaaaaggaatagtcaggcagatggatggg

SEQ ID NO: 712299 - DNA, 33 bp, Homo sapien
agaaggaaatatctacccaggcatacaaaacaa

SEQ ID NO: 712300 - DNA, 33 bp, Homo sapien
agaaggaaatatctactcaggcatacaaaacaa

SEQ ID NO: 712301 - DNA, 33 bp, Homo sapien
ggatggcattcaggccccccacaaactgagctc

SEQ ID NO: 712302 - DNA, 33 bp, Homo sapien
ggatggcattcaggcctcccacaaactgagctc

SEQ ID NO: 712303 - DNA, 33 bp, Homo sapien
tctttgtccagaggtacagaggagataagaaat

SEQ ID NO: 712304 - DNA, 33 bp, Homo sapien
tctttgtccagaggtatagaggagataagaaat

SEQ ID NO: 712305 - DNA, 33 bp, Homo sapien
cttgttgtattcaaatcatagcacattaccaat

SEQ ID NO: 712306 - DNA, 33 bp, Homo sapien
cttgttgtattcaaatgatagcacattaccaat

SEQ ID NO: 712307 - DNA, 33 bp, Homo sapien
gtctgttcccttaatccatctacaccctgctaa

SEQ ID NO: 712308 - DNA, 33 bp, Homo sapien
gtctgttcccttaatcgatctacaccctgctaa

SEQ ID NO: 712309 - DNA, 33 bp, Homo sapien
aattagagtggaaaggccatgggtcagagtgtt

SEQ ID NO: 712310 - DNA, 33 bp, Homo sapien
aattagagtggaaaggtcatgggtcagagtgtt

SEQ ID NO: 712311 - DNA, 33 bp, Homo sapien
catcatgttccaggacacctgagtacatggatg

SEQ ID NO: 712312 - DNA, 33 bp, Homo sapien
catcatgttccaggacgcctgagtacatggatg

SEQ ID NO: 712313 - DNA, 33 bp, Homo sapien
ttgggcaatgcatacacgggtagaaaccaggat

SEQ ID NO: 712314 - DNA, 33 bp, Homo sapien
ttgggcaatgcatacatgggtagaaaccaggat

SEQ ID NO: 712315 - DNA, 33 bp, Homo sapien
actactgagtattagcaaaaagaattgtagtaa

SEQ ID NO: 712316 - DNA, 33 bp, Homo sapien
actactgagtattagcgaaaagaattgtagtaa

SEQ ID NO: 712317 - DNA, 33 bp, Homo sapien
atatgcaaactttcaagattttcaacaaaatta

SEQ ID NO: 712318 - DNA, 33 bp, Homo sapien
atatgcaaactttcaatattttcaacaaaatta

SEQ ID NO: 712319 - DNA, 33 bp, Homo sapien
tgtcctatattagaacccaggatccctcattgc

SEQ ID NO: 712320 - DNA, 33 bp, Homo sapien
tgtcctatattagaactcaggatccctcattgc

SEQ ID NO: 712321 - DNA, 33 bp, Homo sapien
tggatggcctggcctgaaattaaattgtaaagc

SEQ ID NO: 712322 - DNA, 33 bp, Homo sapien
tggatggcctggcctggaattaaattgtaaagc

SEQ ID NO: 712323 - DNA, 33 bp, Homo sapien
cctcacttccaaaatactactctgcatctactt

SEQ ID NO: 712324 - DNA, 33 bp, Homo sapien
cctcacttccaaaatattactctgcatctactt

SEQ ID NO: 712325 - DNA, 33 bp, Homo sapien
ttaagacaatggctacccttgagaagtcatgca

SEQ ID NO: 712326 - DNA, 33 bp, Homo sapien
ttaagacaatggctactcttgagaagtcatgca

SEQ ID NO: 712327 - DNA, 33 bp, Homo sapien
tttataaagtgcctacgctatgatggagactgg

SEQ ID NO: 712328 - DNA, 33 bp, Homo sapien
tttataaagtgcctactctatgatggagactgg

SEQ ID NO: 712329 - DNA, 33 bp, Homo sapien
ttgatttgagcaacccaataagcagcagagtat

SEQ ID NO: 712330 - DNA, 33 bp, Homo sapien
ttgatttgagcaacccgataagcagcagagtat

SEQ ID NO: 712331 - DNA, 33 bp, Homo sapien
gcattaaatacttcacacatatacatgctgagc

SEQ ID NO: 712332 - DNA, 33 bp, Homo sapien
gcattaaatacttcacgcatatacatgctgagc

SEQ ID NO: 712333 - DNA, 33 bp, Homo sapien
tgcagtcagactccaaaggcccatgacactgcc

SEQ ID NO: 712334 - DNA, 33 bp, Homo sapien
tgcagtcagactccaacggcccatgacactgcc

SEQ ID NO: 712335 - DNA, 33 bp, Homo sapien
gctgaggcaacagctaataaaggagaagctctg

SEQ ID NO: 712336 - DNA, 33 bp, Homo sapien
gctgaggcaacagctactaaaggagaagctctg

SEQ ID NO: 712337 - DNA, 33 bp, Homo sapien
ttccatacaagttgcaaatttcttgccttaaga

SEQ ID NO: 712338 - DNA, 33 bp, Homo sapien
ttccatacaagttgcagatttcttgccttaaga

SEQ ID NO: 712339 - DNA, 33 bp, Homo sapien
ttaaaaaattaatgcaagtcctaatcacctaat

SEQ ID NO: 712340 - DNA, 33 bp, Homo sapien
ttaaaaaattaatgcaggtcctaatcacctaat

SEQ ID NO: 712341 - DNA, 33 bp, Homo sapien
tttagaaggagaatcacgggactgagctaaaca

SEQ ID NO: 712342 - DNA, 33 bp, Homo sapien
tttagaaggagaatcatgggactgagctaaaca

SEQ ID NO: 712343 - DNA, 33 bp, Homo sapien
tggctgtcctgggaatgaggtgtattaagtaat

SEQ ID NO: 712344 - DNA, 33 bp, Homo sapien
tggctgtcctgggaattaggtgtattaagtaat

SEQ ID NO: 712345 - DNA, 33 bp, Homo sapien
gcacagttctctgaaaattcaataactgaaatt

SEQ ID NO: 712346 - DNA, 33 bp, Homo sapien
gcacagttctctgaaagttcaataactgaaatt

SEQ ID NO: 712347 - DNA, 33 bp, Homo sapien
agtctcaccactgtcacaggactcaactcttta

SEQ ID NO: 712348 - DNA, 33 bp, Homo sapien
agtctcaccactgtcataggactcaactcttta

SEQ ID NO: 712349 - DNA, 33 bp, Homo sapien
aggttaactatgacctaactgaggcaatacttt

SEQ ID NO: 712350 - DNA, 33 bp, Homo sapien
aggttaactatgacctgactgaggcaatacttt

SEQ ID NO: 712351 - DNA, 33 bp, Homo sapien
tgtcttcttttgctcacattctcacacagattt

SEQ ID NO: 712352 - DNA, 33 bp, Homo sapien
tgtcttcttttgctcagattctcacacagattt

SEQ ID NO: 712353 - DNA, 33 bp, Homo sapien
caggaatgattgatccaagatttgaacccagag

SEQ ID NO: 712354 - DNA, 33 bp, Homo sapien
caggaatgattgatccgagatttgaacccagag

SEQ ID NO: 712355 - DNA, 33 bp, Homo sapien
gacttttaatccaccaatcaagtaatccaccta

SEQ ID NO: 712356 - DNA, 33 bp, Homo sapien
gacttttaatccaccagtcaagtaatccaccta

SEQ ID NO: 712357 - DNA, 33 bp, Homo sapien
agcttaggcaacccagaagttgaacagaacagg

SEQ ID NO: 712358 - DNA, 33 bp, Homo sapien
agcttaggcaacccagcagttgaacagaacagg

SEQ ID NO: 712359 - DNA, 33 bp, Homo sapien
tcagacctacaaagacactatacttatagaacc

SEQ ID NO: 712360 - DNA, 33 bp, Homo sapien
tcagacctacaaagacgctatacttatagaacc

SEQ ID NO: 712361 - DNA, 33 bp, Homo sapien
tggtgacagtggatgaagaaggaactcactgat

SEQ ID NO: 712362 - DNA, 33 bp, Homo sapien
tggtgacagtggatgaggaaggaactcactgat

SEQ ID NO: 712363 - DNA, 33 bp, Homo sapien
gcataaaaatcaccctaagcatggtagttcggg

SEQ ID NO: 712364 - DNA, 33 bp, Homo sapien
gcataaaaatcaccctcagcatggtagttcggg

SEQ ID NO: 712365 - DNA, 33 bp, Homo sapien
ctaaaggaagctggagccaggttatggacattc

SEQ ID NO: 712366 - DNA, 33 bp, Homo sapien
ctaaaggaagctggagtcaggttatggacattc

SEQ ID NO: 712367 - DNA, 33 bp, Homo sapien
tcatgatatcctgagacccaaattaatcctcat

SEQ ID NO: 712368 - DNA, 33 bp, Homo sapien
tcatgatatcctgagagccaaattaatcctcat

SEQ ID NO: 712369 - DNA, 33 bp, Homo sapien
atgtgttccctgtacacgaagcagatctccctt

SEQ ID NO: 712370 - DNA, 33 bp, Homo sapien
atgtgttccctgtacatgaagcagatctccctt

SEQ ID NO: 712371 - DNA, 33 bp, Homo sapien
agatatcagcctaatcaaaagtgctgggcttgg

SEQ ID NO: 712372 - DNA, 33 bp, Homo sapien
agatatcagcctaatcgaaagtgctgggcttgg

SEQ ID NO: 712373 - DNA, 33 bp, Homo sapien
cttgacatagagctgcaaaatgaggtccccgaa

SEQ ID NO: 712374 - DNA, 33 bp, Homo sapien
cttgacatagagctgcgaaatgaggtccccgaa

SEQ ID NO: 712375 - DNA, 33 bp, Homo sapien
aagatccctggaattacagttcagaacttaaac

SEQ ID NO: 712376 - DNA, 33 bp, Homo sapien
aagatccctggaattatagttcagaacttaaac

SEQ ID NO: 712377 - DNA, 33 bp, Homo sapien
gtacagcctagtgtaccgggcaaaggaccatat

SEQ ID NO: 712378 - DNA, 33 bp, Homo sapien
gtacagcctagtgtactgggcaaaggaccatat

SEQ ID NO: 712379 - DNA, 33 bp, Homo sapien
tagggagctgatctacagagaggaacactcctc

SEQ ID NO: 712380 - DNA, 33 bp, Homo sapien
tagggagctgatctacggagaggaacactcctc

SEQ ID NO: 712381 - DNA, 33 bp, Homo sapien
agcttcgtagacaaccaagatcaaccctcttgt

SEQ ID NO: 712382 - DNA, 33 bp, Homo sapien
agcttcgtagacaaccgagatcaaccctcttgt

SEQ ID NO: 712383 - DNA, 33 bp, Homo sapien
catctgactacaggacaaccagagtctattatg

SEQ ID NO: 712384 - DNA, 33 bp, Homo sapien
catctgactacaggacgaccagagtctattatg

SEQ ID NO: 712385 - DNA, 33 bp, Homo sapien
ggccagtagtggcatccagtcatctatcccaat

SEQ ID NO: 712386 - DNA, 33 bp, Homo sapien
ggccagtagtggcatcgagtcatctatcccaat

SEQ ID NO: 712387 - DNA, 33 bp, Homo sapien
ttgctcactcattggaaattcagtgtgctcagg

SEQ ID NO: 712388 - DNA, 33 bp, Homo sapien
ttgctcactcattggacattcagtgtgctcagg

SEQ ID NO: 712389 - DNA, 33 bp, Homo sapien
cttagttattcttccactcagactttccttcca

SEQ ID NO: 712390 - DNA, 33 bp, Homo sapien
cttagttattcttccattcagactttccttcca

SEQ ID NO: 712391 - DNA, 33 bp, Homo sapien
aactgcagctgcctcacaataaaaggacaggaa

SEQ ID NO: 712392 - DNA, 33 bp, Homo sapien
aactgcagctgcctcataataaaaggacaggaa

SEQ ID NO: 712393 - DNA, 33 bp, Homo sapien
attgtcctctgtagacaggaaaggtggggaaat

SEQ ID NO: 712394 - DNA, 33 bp, Homo sapien
attgtcctctgtagacgggaaaggtggggaaat

SEQ ID NO: 712395 - DNA, 33 bp, Homo sapien
aaagacagcgcatacaaggactggactctcttt

SEQ ID NO: 712396 - DNA, 33 bp, Homo sapien
aaagacagcgcatacagggactggactctcttt

SEQ ID NO: 712397 - DNA, 33 bp, Homo sapien
atcatgtcctcactaacggagaaatcacagtac

SEQ ID NO: 712398 - DNA, 33 bp, Homo sapien
atcatgtcctcactaatggagaaatcacagtac

SEQ ID NO: 712399 - DNA, 33 bp, Homo sapien
ttcctccacttgaggaccttgttgttagagttg

SEQ ID NO: 712400 - DNA, 33 bp, Homo sapien
ttcctccacttgaggatcttgttgttagagttg

SEQ ID NO: 712401 - DNA, 33 bp, Homo sapien
tttttgacattagtcacctgtcatgctagcaaa

SEQ ID NO: 712402 - DNA, 33 bp, Homo sapien
tttttgacattagtcatctgtcatgctagcaaa

SEQ ID NO: 712403 - DNA, 33 bp, Homo sapien
aagggatgagtaaaaacggcggcaagggaatgg

SEQ ID NO: 712404 - DNA, 33 bp, Homo sapien
aagggatgagtaaaaatggcggcaagggaatgg

SEQ ID NO: 712405 - DNA, 33 bp, Homo sapien
atagcctgtcttattaactcacttggggcagca

SEQ ID NO: 712406 - DNA, 33 bp, Homo sapien
atagcctgtcttattatctcacttggggcagca

SEQ ID NO: 712407 - DNA, 33 bp, Homo sapien
agtgttcaggagctagaagtacactaaatactt

SEQ ID NO: 712408 - DNA, 33 bp, Homo sapien
agtgttcaggagctagcagtacactaaatactt

SEQ ID NO: 712409 - DNA, 33 bp, Homo sapien
atggagcctgaagctgaatgtttctaattaaat

SEQ ID NO: 712410 - DNA, 33 bp, Homo sapien
atggagcctgaagctgtatgtttctaattaaat

SEQ ID NO: 712411 - DNA, 33 bp, Homo sapien
atctcttaccatcttgaaatgtgtcattaattg

SEQ ID NO: 712412 - DNA, 33 bp, Homo sapien
atctcttaccatcttggaatgtgtcattaattg

SEQ ID NO: 712413 - DNA, 33 bp, Homo sapien
tctattttttctttaaagtccacatatgtgaca

SEQ ID NO: 712414 - DNA, 33 bp, Homo sapien
tctattttttctttaacgtccacatatgtgaca

SEQ ID NO: 712415 - DNA, 33 bp, Homo sapien
aagaaataaaattgccactgattctacttctac

SEQ ID NO: 712416 - DNA, 33 bp, Homo sapien
aagaaataaaattgcctctgattctacttctac

SEQ ID NO: 712417 - DNA, 33 bp, Homo sapien
gaaaacagcagtgcaaatctggtgctaaatggc

SEQ ID NO: 712418 - DNA, 33 bp, Homo sapien
gaaaacagcagtgcaagtctggtgctaaatggc

SEQ ID NO: 712419 - DNA, 33 bp, Homo sapien
caaggtaggctgacaaatcacaggtggcaagca

SEQ ID NO: 712420 - DNA, 33 bp, Homo sapien
caaggtaggctgacaagtcacaggtggcaagca

SEQ ID NO: 712421 - DNA, 33 bp, Homo sapien
ccctgtcttccactaacggtgcgtctgtctttc

SEQ ID NO: 712422 - DNA, 33 bp, Homo sapien
ccctgtcttccactaatggtgcgtctgtctttc

SEQ ID NO: 712423 - DNA, 33 bp, Homo sapien
aaacaaacataagagaagggcttagtattgacc

SEQ ID NO: 712424 - DNA, 33 bp, Homo sapien
aaacaaacataagagaggggcttagtattgacc

SEQ ID NO: 712425 - DNA, 33 bp, Homo sapien
taaatcccatgagataaggtagttaataagagt

SEQ ID NO: 712426 - DNA, 33 bp, Homo sapien
taaatcccatgagatacggtagttaataagagt

SEQ ID NO: 712427 - DNA, 33 bp, Homo sapien
atttcaaagtctctacaaataattccacccatt

SEQ ID NO: 712428 - DNA, 33 bp, Homo sapien
atttcaaagtctctacgaataattccacccatt

SEQ ID NO: 712429 - DNA, 33 bp, Homo sapien
agtggtgttctataaacgcagtggctgctaatc

SEQ ID NO: 712430 - DNA, 33 bp, Homo sapien
agtggtgttctataaatgcagtggctgctaatc

SEQ ID NO: 712431 - DNA, 33 bp, Homo sapien
aaaaccactagacataaatgggaggctttggat

SEQ ID NO: 712432 - DNA, 33 bp, Homo sapien
aaaaccactagacatagatgggaggctttggat

SEQ ID NO: 712433 - DNA, 33 bp, Homo sapien
acagttttgttgaagacagaaatagatacttaa

SEQ ID NO: 712434 - DNA, 33 bp, Homo sapien
acagttttgttgaagagagaaatagatacttaa

SEQ ID NO: 712435 - DNA, 33 bp, Homo sapien
agtggacaggaagaaaaaaggactttggaatca

SEQ ID NO: 712436 - DNA, 33 bp, Homo sapien
agtggacaggaagaaacaaggactttggaatca

SEQ ID NO: 712437 - DNA, 33 bp, Homo sapien
atctctgtgttcaccacagcagacatttgactt

SEQ ID NO: 712438 - DNA, 33 bp, Homo sapien
atctctgtgttcaccatagcagacatttgactt

SEQ ID NO: 712439 - DNA, 33 bp, Homo sapien
tatgcatttaatgtgcacttgctaaggtaaatg

SEQ ID NO: 712440 - DNA, 33 bp, Homo sapien
tatgcatttaatgtgcgcttgctaaggtaaatg

SEQ ID NO: 712441 - DNA, 33 bp, Homo sapien
ttgttcttcatttcaaatcaggtttatcctcac

SEQ ID NO: 712442 - DNA, 33 bp, Homo sapien
ttgttcttcatttcaagtcaggtttatcctcac

SEQ ID NO: 712443 - DNA, 33 bp, Homo sapien
aatatactcattagcaccatttccacaaggaat

SEQ ID NO: 712444 - DNA, 33 bp, Homo sapien
aatatactcattagcagcatttccacaaggaat

SEQ ID NO: 712445 - DNA, 33 bp, Homo sapien
tgaccatcacaagtaggacgatgggctagggtg

SEQ ID NO: 712446 - DNA, 33 bp, Homo sapien
tgaccatcacaagtagtacgatgggctagggtg

SEQ ID NO: 712447 - DNA, 33 bp, Homo sapien
aggataatatcaagaccgtagttgttcagggaa

SEQ ID NO: 712448 - DNA, 33 bp, Homo sapien
aggataatatcaagactgtagttgttcagggaa

SEQ ID NO: 712449 - DNA, 33 bp, Homo sapien
ttcccctttcaaactccatagcctcatcccttt

SEQ ID NO: 712450 - DNA, 33 bp, Homo sapien
ttcccctttcaaactctatagcctcatcccttt

SEQ ID NO: 712451 - DNA, 33 bp, Homo sapien
cttagctttcctcataagaaggacctgaatacc

SEQ ID NO: 712452 - DNA, 33 bp, Homo sapien
cttagctttcctcataggaaggacctgaatacc

SEQ ID NO: 712453 - DNA, 33 bp, Homo sapien
ggttaccaggagcgacaaggagggggatatggg

SEQ ID NO: 712454 - DNA, 33 bp, Homo sapien
ggttaccaggagcgacgaggagggggatatggg

SEQ ID NO: 712455 - DNA, 33 bp, Homo sapien
aacaggtgataaggagaacaattaggcagagaa

SEQ ID NO: 712456 - DNA, 33 bp, Homo sapien
aacaggtgataaggaggacaattaggcagagaa

SEQ ID NO: 712457 - DNA, 33 bp, Homo sapien
gactggccttctttcaatctctggaccagctct

SEQ ID NO: 712458 - DNA, 33 bp, Homo sapien
gactggccttctttcagtctctggaccagctct

SEQ ID NO: 712459 - DNA, 33 bp, Homo sapien
catggctgtcagataacccaaactcagtatgct

SEQ ID NO: 712460 - DNA, 33 bp, Homo sapien
catggctgtcagataatccaaactcagtatgct

SEQ ID NO: 712461 - DNA, 33 bp, Homo sapien
cctcccagtctcaaaacgatgccaaacatgtgt

SEQ ID NO: 712462 - DNA, 33 bp, Homo sapien
cctcccagtctcaaaaggatgccaaacatgtgt

SEQ ID NO: 712463 - DNA, 33 bp, Homo sapien
ctatctttctcttgtcaatgacaccaaattgat

SEQ ID NO: 712464 - DNA, 33 bp, Homo sapien
ctatctttctcttgtcgatgacaccaaattgat

SEQ ID NO: 712465 - DNA, 33 bp, Homo sapien
ggaaaggtagtaacacacttgggccttagaaac

SEQ ID NO: 712466 - DNA, 33 bp, Homo sapien
ggaaaggtagtaacacgcttgggccttagaaac

SEQ ID NO: 712467 - DNA, 33 bp, Homo sapien
gcttctacacaccctccactcttgtcacactga

SEQ ID NO: 712468 - DNA, 33 bp, Homo sapien
gcttctacacaccctctactcttgtcacactga

SEQ ID NO: 712469 - DNA, 33 bp, Homo sapien
gccgacacataggaaacggcctacaccagggct

SEQ ID NO: 712470 - DNA, 33 bp, Homo sapien
gccgacacataggaaatggcctacaccagggct

SEQ ID NO: 712471 - DNA, 33 bp, Homo sapien
ttaattaagcatttaacggaagcaaagtattct

SEQ ID NO: 712472 - DNA, 33 bp, Homo sapien
ttaattaagcatttaagggaagcaaagtattct

SEQ ID NO: 712473 - DNA, 33 bp, Homo sapien
taattaggtcagacttcaagatgaaagaaaaac

SEQ ID NO: 712474 - DNA, 33 bp, Homo sapien
taattaggtcagactttaagatgaaagaaaaac

SEQ ID NO: 712475 - DNA, 33 bp, Homo sapien
tcaactcctgtcctgaaactaaagtacttgttt

SEQ ID NO: 712476 - DNA, 33 bp, Homo sapien
tcaactcctgtcctgatactaaagtacttgttt

SEQ ID NO: 712477 - DNA, 33 bp, Homo sapien
aattttcataaattgtgaaaaactagtatcaag

SEQ ID NO: 712478 - DNA, 33 bp, Homo sapien
aattttcataaattgttaaaaactagtatcaag

SEQ ID NO: 712479 - DNA, 33 bp, Homo sapien
attctcttataattcacgtgagacctgtgtatt

SEQ ID NO: 712480 - DNA, 33 bp, Homo sapien
attctcttataattcatgtgagacctgtgtatt

SEQ ID NO: 712481 - DNA, 33 bp, Homo sapien
gagacattgaatatacaagaccagtgctcagaa

SEQ ID NO: 712482 - DNA, 33 bp, Homo sapien
gagacattgaatataccagaccagtgctcagaa

SEQ ID NO: 712483 - DNA, 33 bp, Homo sapien
ttgtctgacctctataaaatacgcaattctaaa

SEQ ID NO: 712484 - DNA, 33 bp, Homo sapien
ttgtctgacctctatacaatacgcaattctaaa

SEQ ID NO: 712485 - DNA, 33 bp, Homo sapien
taaactttttcttcagaactttggacacattat

SEQ ID NO: 712486 - DNA, 33 bp, Homo sapien
taaactttttcttcagtactttggacacattat

SEQ ID NO: 712487 - DNA, 33 bp, Homo sapien
tggatgagggaacataaaaagaaagacaagtca

SEQ ID NO: 712488 - DNA, 33 bp, Homo sapien
tggatgagggaacatagaaagaaagacaagtca

SEQ ID NO: 712489 - DNA, 33 bp, Homo sapien
cgatggaacactagaacttagcctcttacagac

SEQ ID NO: 712490 - DNA, 33 bp, Homo sapien
cgatggaacactagaatttagcctcttacagac

SEQ ID NO: 712491 - DNA, 33 bp, Homo sapien
aaatgggaggattccacgagtgccacagttagg

SEQ ID NO: 712492 - DNA, 33 bp, Homo sapien
aaatgggaggattccatgagtgccacagttagg

SEQ ID NO: 712493 - DNA, 33 bp, Homo sapien
tgaagtgggtgctcaacgtattaattaatagga

SEQ ID NO: 712494 - DNA, 33 bp, Homo sapien
tgaagtgggtgctcaatgtattaattaatagga

SEQ ID NO: 712495 - DNA, 33 bp, Homo sapien
tcacaggtgtttctcaaaataaatctcctgtac

SEQ ID NO: 712496 - DNA, 33 bp, Homo sapien
tcacaggtgtttctcataataaatctcctgtac

SEQ ID NO: 712497 - DNA, 33 bp, Homo sapien
ttgtgccactgtactgaataagctgtagaagac

SEQ ID NO: 712498 - DNA, 33 bp, Homo sapien
ttgtgccactgtactggataagctgtagaagac

SEQ ID NO: 712499 - DNA, 33 bp, Homo sapien
ctcagttccctcctccaaaaattcatatatata

SEQ ID NO: 712500 - DNA, 33 bp, Homo sapien
ctcagttccctcctccgaaaattcatatatata

SEQ ID NO: 712501 - DNA, 33 bp, Homo sapien
tcatgactagtcaatggcagaaccagaactgga

SEQ ID NO: 712502 - DNA, 33 bp, Homo sapien
tcatgactagtcaatgtcagaaccagaactgga

SEQ ID NO: 712503 - DNA, 33 bp, Homo sapien
gtaacaaaaagcaaataatgttcagcttcacgg

SEQ ID NO: 712504 - DNA, 33 bp, Homo sapien
gtaacaaaaagcaaatgatgttcagcttcacgg

SEQ ID NO: 712505 - DNA, 33 bp, Homo sapien
tcataatctatgtggaaacttgaggtaggtatg

SEQ ID NO: 712506 - DNA, 33 bp, Homo sapien
tcataatctatgtggagacttgaggtaggtatg

SEQ ID NO: 712507 - DNA, 33 bp, Homo sapien
ttgttgacctgaaaggaaggctcaagacccatt

SEQ ID NO: 712508 - DNA, 33 bp, Homo sapien
ttgttgacctgaaaggcaggctcaagacccatt

SEQ ID NO: 712509 - DNA, 33 bp, Homo sapien
aggttaagtatttgtcaagcactgttatctacg

SEQ ID NO: 712510 - DNA, 33 bp, Homo sapien
aggttaagtatttgtcgagcactgttatctacg

SEQ ID NO: 712511 - DNA, 33 bp, Homo sapien
aatttgacatctgataacttcatgaaaaatatt

SEQ ID NO: 712512 - DNA, 33 bp, Homo sapien
aatttgacatctgatatcttcatgaaaaatatt

SEQ ID NO: 712513 - DNA, 33 bp, Homo sapien
tccttgccaattagccaagtatctgtctttcct

SEQ ID NO: 712514 - DNA, 33 bp, Homo sapien
tccttgccaattagccgagtatctgtctttcct

SEQ ID NO: 712515 - DNA, 33 bp, Homo sapien
ctagtaaaaatgctgcagactactaagtatcag

SEQ ID NO: 712516 - DNA, 33 bp, Homo sapien
ctagtaaaaatgctgcggactactaagtatcag

SEQ ID NO: 712517 - DNA, 33 bp, Homo sapien
ctgagctaggtattaaaggaattgattggtagg

SEQ ID NO: 712518 - DNA, 33 bp, Homo sapien
ctgagctaggtattaagggaattgattggtagg

SEQ ID NO: 712519 - DNA, 33 bp, Homo sapien
cagctcacttaactcacgtactatttgatacat

SEQ ID NO: 712520 - DNA, 33 bp, Homo sapien
cagctcacttaactcatgtactatttgatacat

SEQ ID NO: 712521 - DNA, 33 bp, Homo sapien
tctagagtggtcttaacgtttctgagcctcttt

SEQ ID NO: 712522 - DNA, 33 bp, Homo sapien
tctagagtggtcttaatgtttctgagcctcttt

SEQ ID NO: 712523 - DNA, 33 bp, Homo sapien
tttatcctaactcttacagcaactagctttgag

SEQ ID NO: 712524 - DNA, 33 bp, Homo sapien
tttatcctaactcttagagcaactagctttgag

SEQ ID NO: 712525 - DNA, 33 bp, Homo sapien
ttagagtagtgtttagcacacagtaggctttca

SEQ ID NO: 712526 - DNA, 33 bp, Homo sapien
ttagagtagtgtttagtacacagtaggctttca

SEQ ID NO: 712527 - DNA, 33 bp, Homo sapien
gacaattcatattcaaataaataacagcttcca

SEQ ID NO: 712528 - DNA, 33 bp, Homo sapien
gacaattcatattcaagtaaataacagcttcca

SEQ ID NO: 712529 - DNA, 33 bp, Homo sapien
tggttctgggaactcaaattatgaccttattgc

SEQ ID NO: 712530 - DNA, 33 bp, Homo sapien
tggttctgggaactcacattatgaccttattgc

SEQ ID NO: 712531 - DNA, 33 bp, Homo sapien
atataaagatgaccagaaacacaagaatctaaa

SEQ ID NO: 712532 - DNA, 33 bp, Homo sapien
atataaagatgaccaggaacacaagaatctaaa

SEQ ID NO: 712533 - DNA, 33 bp, Homo sapien
aagtatacagcaatgagcaaaatagataaaaga

SEQ ID NO: 712534 - DNA, 33 bp, Homo sapien
aagtatacagcaatgatcaaaatagataaaaga

SEQ ID NO: 712535 - DNA, 33 bp, Homo sapien
agaaccagaattatcacaggtgaagtaaaccag

SEQ ID NO: 712536 - DNA, 33 bp, Homo sapien
agaaccagaattatcataggtgaagtaaaccag

SEQ ID NO: 712537 - DNA, 33 bp, Homo sapien
gatgaagctaggcaaacaggggacagatcatga

SEQ ID NO: 712538 - DNA, 33 bp, Homo sapien
gatgaagctaggcaaagaggggacagatcatga

SEQ ID NO: 712539 - DNA, 33 bp, Homo sapien
ttcattcaatttatgcaacacctttcatcttca

SEQ ID NO: 712540 - DNA, 33 bp, Homo sapien
ttcattcaatttatgcgacacctttcatcttca

SEQ ID NO: 712541 - DNA, 33 bp, Homo sapien
ctccatgagaattggaagtggtaaaaaagaact

SEQ ID NO: 712542 - DNA, 33 bp, Homo sapien
ctccatgagaattggaggtggtaaaaaagaact

SEQ ID NO: 712543 - DNA, 33 bp, Homo sapien
tctgaacttgtttctacacacaggtaaaaaata

SEQ ID NO: 712544 - DNA, 33 bp, Homo sapien
tctgaacttgtttctagacacaggtaaaaaata

SEQ ID NO: 712545 - DNA, 33 bp, Homo sapien
ttacagagtgggctaactggtactggattgtcc

SEQ ID NO: 712546 - DNA, 33 bp, Homo sapien
ttacagagtgggctaattggtactggattgtcc

SEQ ID NO: 712547 - DNA, 33 bp, Homo sapien
gtcaaagcttaatatgcagacatgtgatcttgc

SEQ ID NO: 712548 - DNA, 33 bp, Homo sapien
gtcaaagcttaatatggagacatgtgatcttgc

SEQ ID NO: 712549 - DNA, 33 bp, Homo sapien
aaatgtagattctgacacagaaagtttgggtgg

SEQ ID NO: 712550 - DNA, 33 bp, Homo sapien
aaatgtagattctgactcagaaagtttgggtgg

SEQ ID NO: 712551 - DNA, 33 bp, Homo sapien
acccagactgtatggcgcatctagcctcatcgt

SEQ ID NO: 712552 - DNA, 33 bp, Homo sapien
acccagactgtatggctcatctagcctcatcgt

SEQ ID NO: 712553 - DNA, 33 bp, Homo sapien
cattccttggcaaactaacagaatgaaatctca

SEQ ID NO: 712554 - DNA, 33 bp, Homo sapien
cattccttggcaaactgacagaatgaaatctca

SEQ ID NO: 712555 - DNA, 33 bp, Homo sapien
aggtaactgatgaagacagtttgtacgtgacct

SEQ ID NO: 712556 - DNA, 33 bp, Homo sapien
aggtaactgatgaagatagtttgtacgtgacct

SEQ ID NO: 712557 - DNA, 33 bp, Homo sapien
aaacaatctaatatcacggttctgtgctctgct

SEQ ID NO: 712558 - DNA, 33 bp, Homo sapien
aaacaatctaatatcatggttctgtgctctgct

SEQ ID NO: 712559 - DNA, 33 bp, Homo sapien
tcttcagagctaaaacacattattcatacagcc

SEQ ID NO: 712560 - DNA, 33 bp, Homo sapien
tcttcagagctaaaacgcattattcatacagcc

SEQ ID NO: 712561 - DNA, 33 bp, Homo sapien
ttccgatttggttataagctttcagtgaaatct

SEQ ID NO: 712562 - DNA, 33 bp, Homo sapien
ttccgatttggttatacgctttcagtgaaatct

SEQ ID NO: 712563 - DNA, 33 bp, Homo sapien
atgccttgccattaatcacagaggtcacagaaa

SEQ ID NO: 712564 - DNA, 33 bp, Homo sapien
atgccttgccattaattacagaggtcacagaaa

SEQ ID NO: 712565 - DNA, 33 bp, Homo sapien
gcaggtggataagtacaactgacattaataaca

SEQ ID NO: 712566 - DNA, 33 bp, Homo sapien
gcaggtggataagtacgactgacattaataaca

SEQ ID NO: 712567 - DNA, 33 bp, Homo sapien
attaaagtagttaccactcaagttacacaaaac

SEQ ID NO: 712568 - DNA, 33 bp, Homo sapien
attaaagtagttaccattcaagttacacaaaac

SEQ ID NO: 712569 - DNA, 33 bp, Homo sapien
tttggtctatggttaccgaattcaccaggagca

SEQ ID NO: 712570 - DNA, 33 bp, Homo sapien
tttggtctatggttactgaattcaccaggagca

SEQ ID NO: 712571 - DNA, 33 bp, Homo sapien
gagctggaagtgatgaagtgtaggaaactaagg

SEQ ID NO: 712572 - DNA, 33 bp, Homo sapien
gagctggaagtgatgaggtgtaggaaactaagg

SEQ ID NO: 712573 - DNA, 33 bp, Homo sapien
aatttatgttgagtaggcccaaaagcaagattt

SEQ ID NO: 712574 - DNA, 33 bp, Homo sapien
aatttatgttgagtagtcccaaaagcaagattt

SEQ ID NO: 712575 - DNA, 33 bp, Homo sapien
agcttccagtgtcaggaaaattttgttttgatg

SEQ ID NO: 712576 - DNA, 33 bp, Homo sapien
agcttccagtgtcagggaaattttgttttgatg

SEQ ID NO: 712577 - DNA, 33 bp, Homo sapien
aaggctatgatgtctgaaattttcccaccaagg

SEQ ID NO: 712578 - DNA, 33 bp, Homo sapien
aaggctatgatgtctgcaattttcccaccaagg

SEQ ID NO: 712579 - DNA, 33 bp, Homo sapien
ttattttgtatcatcactaaaaaaccatgccca

SEQ ID NO: 712580 - DNA, 33 bp, Homo sapien
ttattttgtatcatcattaaaaaaccatgccca

SEQ ID NO: 712581 - DNA, 33 bp, Homo sapien
aacttctctgctgacaatggcttaaaactctca

SEQ ID NO: 712582 - DNA, 33 bp, Homo sapien
aacttctctgctgacactggcttaaaactctca

SEQ ID NO: 712583 - DNA, 33 bp, Homo sapien
cggtactttccaggtaggtatctcttttatagc

SEQ ID NO: 712584 - DNA, 33 bp, Homo sapien
cggtactttccaggtatgtatctcttttatagc

SEQ ID NO: 712585 - DNA, 33 bp, Homo sapien
cctagatccagtagaaagcacttttgcgcacac

SEQ ID NO: 712586 - DNA, 33 bp, Homo sapien
cctagatccagtagaatgcacttttgcgcacac

SEQ ID NO: 712587 - DNA, 33 bp, Homo sapien
tttacctcttgctaaacgtcaaagtgagatact

SEQ ID NO: 712588 - DNA, 33 bp, Homo sapien
tttacctcttgctaaatgtcaaagtgagatact

SEQ ID NO: 712589 - DNA, 33 bp, Homo sapien
tcatgcaaaatgagtaagttatgaaagctgggc

SEQ ID NO: 712590 - DNA, 33 bp, Homo sapien
tcatgcaaaatgagtatgttatgaaagctgggc

SEQ ID NO: 712591 - DNA, 33 bp, Homo sapien
gactaaagaaactaaaccaacttatgcatgata

SEQ ID NO: 712592 - DNA, 33 bp, Homo sapien
gactaaagaaactaaagcaacttatgcatgata

SEQ ID NO: 712593 - DNA, 33 bp, Homo sapien
gagtcaatatcctcccaccttttccaattatgc

SEQ ID NO: 712594 - DNA, 33 bp, Homo sapien
gagtcaatatcctcccgccttttccaattatgc

SEQ ID NO: 712595 - DNA, 33 bp, Homo sapien
gttaactgaatgtaaacggatcaaatcaaggca

SEQ ID NO: 712596 - DNA, 33 bp, Homo sapien
gttaactgaatgtaaatggatcaaatcaaggca

SEQ ID NO: 712597 - DNA, 33 bp, Homo sapien
ttgtcctgccatgaaaatgtttctgtgactcat

SEQ ID NO: 712598 - DNA, 33 bp, Homo sapien
ttgtcctgccatgaaagtgtttctgtgactcat

SEQ ID NO: 712599 - DNA, 33 bp, Homo sapien
tggacatctcaatacccgcaaatctcactccaa

SEQ ID NO: 712600 - DNA, 33 bp, Homo sapien
tggacatctcaatacctgcaaatctcactccaa

SEQ ID NO: 712601 - DNA, 33 bp, Homo sapien
gaagagacatttatcaagaatttaaaggagcta

SEQ ID NO: 712602 - DNA, 33 bp, Homo sapien
gaagagacatttatcaggaatttaaaggagcta

SEQ ID NO: 712603 - DNA, 33 bp, Homo sapien
ttcaagaagctacccaagaatcactctatgtta

SEQ ID NO: 712604 - DNA, 33 bp, Homo sapien
ttcaagaagctacccacgaatcactctatgtta

SEQ ID NO: 712605 - DNA, 33 bp, Homo sapien
attacctcctattcataaagagaagcataatta

SEQ ID NO: 712606 - DNA, 33 bp, Homo sapien
attacctcctattcatgaagagaagcataatta

SEQ ID NO: 712607 - DNA, 33 bp, Homo sapien
aggcacaaattagatcacgggaatgtgtgtgaa

SEQ ID NO: 712608 - DNA, 33 bp, Homo sapien
aggcacaaattagatcgcgggaatgtgtgtgaa

SEQ ID NO: 712609 - DNA, 33 bp, Homo sapien
tttgcctctaaaaatacactagctcatgtgcac

SEQ ID NO: 712610 - DNA, 33 bp, Homo sapien
tttgcctctaaaaatatactagctcatgtgcac

SEQ ID NO: 712611 - DNA, 33 bp, Homo sapien
tcaaaacagttgcaacagaggccagaaataagg

SEQ ID NO: 712612 - DNA, 33 bp, Homo sapien
tcaaaacagttgcaacggaggccagaaataagg

SEQ ID NO: 712613 - DNA, 33 bp, Homo sapien
caggtcttgtgctcataacgactctgctatggt

SEQ ID NO: 712614 - DNA, 33 bp, Homo sapien
caggtcttgtgctcatgacgactctgctatggt

SEQ ID NO: 712615 - DNA, 33 bp, Homo sapien
cattcacagctctgccacattctctacggtcac

SEQ ID NO: 712616 - DNA, 33 bp, Homo sapien
cattcacagctctgccgcattctctacggtcac

SEQ ID NO: 712617 - DNA, 33 bp, Homo sapien
gcttgggagtcagtacagaagcaattaaagttt

SEQ ID NO: 712618 - DNA, 33 bp, Homo sapien
gcttgggagtcagtacggaagcaattaaagttt

SEQ ID NO: 712619 - DNA, 33 bp, Homo sapien
agatactgagattagacagtcaatagtcaggac

SEQ ID NO: 712620 - DNA, 33 bp, Homo sapien
agatactgagattagatagtcaatagtcaggac

SEQ ID NO: 712621 - DNA, 33 bp, Homo sapien
tctgttctatagcatacctggatttcagtaaag

SEQ ID NO: 712622 - DNA, 33 bp, Homo sapien
tctgttctatagcatatctggatttcagtaaag

SEQ ID NO: 712623 - DNA, 33 bp, Homo sapien
tctgaactttccattacgccaaactgactctgt

SEQ ID NO: 712624 - DNA, 33 bp, Homo sapien
tctgaactttccattatgccaaactgactctgt

SEQ ID NO: 712625 - DNA, 33 bp, Homo sapien
tcactttacaccatgacgtagaaaactcaggaa

SEQ ID NO: 712626 - DNA, 33 bp, Homo sapien
tcactttacaccatgatgtagaaaactcaggaa

SEQ ID NO: 712627 - DNA, 33 bp, Homo sapien
gggggtgaccagattacgagtgatttgaaatcc

SEQ ID NO: 712628 - DNA, 33 bp, Homo sapien
gggggtgaccagattatgagtgatttgaaatcc

SEQ ID NO: 712629 - DNA, 33 bp, Homo sapien
acctactagtgttaacccataaattctatgtct

SEQ ID NO: 712630 - DNA, 33 bp, Homo sapien
acctactagtgttaacgcataaattctatgtct

SEQ ID NO: 712631 - DNA, 33 bp, Homo sapien
tgagaagaaatgggtcagaaaaaatctaaactg

SEQ ID NO: 712632 - DNA, 33 bp, Homo sapien
tgagaagaaatgggtccgaaaaaatctaaactg

SEQ ID NO: 712633 - DNA, 33 bp, Homo sapien
tcttttcatctgtctaaatctactaatcttatt

SEQ ID NO: 712634 - DNA, 33 bp, Homo sapien
tcttttcatctgtctagatctactaatcttatt

SEQ ID NO: 712635 - DNA, 33 bp, Homo sapien
gaacagaaaacccaacacttcatgttctcactt

SEQ ID NO: 712636 - DNA, 33 bp, Homo sapien
gaacagaaaacccaacccttcatgttctcactt

SEQ ID NO: 712637 - DNA, 33 bp, Homo sapien
gttttatgtctggaaacgtcagataccagaaat

SEQ ID NO: 712638 - DNA, 33 bp, Homo sapien
gttttatgtctggaaatgtcagataccagaaat

SEQ ID NO: 712639 - DNA, 33 bp, Homo sapien
ctatcatcagggtgaacagccaacttatagaat

SEQ ID NO: 712640 - DNA, 33 bp, Homo sapien
ctatcatcagggtgaatagccaacttatagaat

SEQ ID NO: 712641 - DNA, 33 bp, Homo sapien
aaaatacatttgttaacattgtgattgattgtt

SEQ ID NO: 712642 - DNA, 33 bp, Homo sapien
aaaatacatttgttaatattgtgattgattgtt

SEQ ID NO: 712643 - DNA, 33 bp, Homo sapien
tcagctatggaagataacagccaactggcacat

SEQ ID NO: 712644 - DNA, 33 bp, Homo sapien
tcagctatggaagatagcagccaactggcacat

SEQ ID NO: 712645 - DNA, 33 bp, Homo sapien
ctctttattctgggtagagttaacagttatgag

SEQ ID NO: 712646 - DNA, 33 bp, Homo sapien
ctctttattctgggtatagttaacagttatgag

SEQ ID NO: 712647 - DNA, 33 bp, Homo sapien
ttagaatagggaatgaatagcatttctgctacc

SEQ ID NO: 712648 - DNA, 33 bp, Homo sapien
ttagaatagggaatgattagcatttctgctacc

SEQ ID NO: 712649 - DNA, 33 bp, Homo sapien
gttgagaaagttaatgcagtaatacatttgttc

SEQ ID NO: 712650 - DNA, 33 bp, Homo sapien
gttgagaaagttaatggagtaatacatttgttc

SEQ ID NO: 712651 - DNA, 33 bp, Homo sapien
ggttcactgcatactactgatctttaaaaattg

SEQ ID NO: 712652 - DNA, 33 bp, Homo sapien
ggttcactgcatactattgatctttaaaaattg

SEQ ID NO: 712653 - DNA, 33 bp, Homo sapien
catgtctcaagaaataagctgcaaatatatact

SEQ ID NO: 712654 - DNA, 33 bp, Homo sapien
catgtctcaagaaatatgctgcaaatatatact

SEQ ID NO: 712655 - DNA, 33 bp, Homo sapien
tgagacgcagtatctgaacaagataatgctctc

SEQ ID NO: 712656 - DNA, 33 bp, Homo sapien
tgagacgcagtatctgcacaagataatgctctc

SEQ ID NO: 712657 - DNA, 33 bp, Homo sapien
gttgcatgtgggattacgcttctaacatgtttt

SEQ ID NO: 712658 - DNA, 33 bp, Homo sapien
gttgcatgtgggattaggcttctaacatgtttt

SEQ ID NO: 712659 - DNA, 33 bp, Homo sapien
tgtgagcattaagggccaaaggcaaatgaagtg

SEQ ID NO: 712660 - DNA, 33 bp, Homo sapien
tgtgagcattaagggcgaaaggcaaatgaagtg

SEQ ID NO: 712661 - DNA, 33 bp, Homo sapien
actgatctttttgaaaatgcatgaactgatagt

SEQ ID NO: 712662 - DNA, 33 bp, Homo sapien
actgatctttttgaaactgcatgaactgatagt

SEQ ID NO: 712663 - DNA, 33 bp, Homo sapien
tttgccatatttgctaccagatatgttggcagt

SEQ ID NO: 712664 - DNA, 33 bp, Homo sapien
tttgccatatttgctatcagatatgttggcagt

SEQ ID NO: 712665 - DNA, 33 bp, Homo sapien
atgagctcaaagaaacaacatacccttctggcc

SEQ ID NO: 712666 - DNA, 33 bp, Homo sapien
atgagctcaaagaaacgacatacccttctggcc

SEQ ID NO: 712667 - DNA, 33 bp, Homo sapien
cccatcttcatgtgcacactcaatggtgggctt

SEQ ID NO: 712668 - DNA, 33 bp, Homo sapien
cccatcttcatgtgcatactcaatggtgggctt

SEQ ID NO: 712669 - DNA, 33 bp, Homo sapien
gccctactgaaaccctcaccacagtctattatg

SEQ ID NO: 712670 - DNA, 33 bp, Homo sapien
gccctactgaaacccttaccacagtctattatg

SEQ ID NO: 712671 - DNA, 33 bp, Homo sapien
gccttttattaactacatgcgcttggacaattt

SEQ ID NO: 712672 - DNA, 33 bp, Homo sapien
gccttttattaactacgtgcgcttggacaattt

SEQ ID NO: 712673 - DNA, 33 bp, Homo sapien
gacattcattccaactaaacaaacattcattaa

SEQ ID NO: 712674 - DNA, 33 bp, Homo sapien
gacattcattccaactgaacaaacattcattaa

SEQ ID NO: 712675 - DNA, 33 bp, Homo sapien
gtggtgtcgtttcatacggtttaatattacaag

SEQ ID NO: 712676 - DNA, 33 bp, Homo sapien
gtggtgtcgtttcatatggtttaatattacaag

SEQ ID NO: 712677 - DNA, 33 bp, Homo sapien
aatagtattgggataaacactacatattagtca

SEQ ID NO: 712678 - DNA, 33 bp, Homo sapien
aatagtattgggataagcactacatattagtca

SEQ ID NO: 712679 - DNA, 33 bp, Homo sapien
aatgttgttttataaccctgcaagacatcaagt

SEQ ID NO: 712680 - DNA, 33 bp, Homo sapien
aatgttgttttataactctgcaagacatcaagt

SEQ ID NO: 712681 - DNA, 33 bp, Homo sapien
tcaatagattttgccaataaaagtcttgagaat

SEQ ID NO: 712682 - DNA, 33 bp, Homo sapien
tcaatagattttgccactaaaagtcttgagaat

SEQ ID NO: 712683 - DNA, 33 bp, Homo sapien
atagcaatgggaatgacgagacagggatgaatg

SEQ ID NO: 712684 - DNA, 33 bp, Homo sapien
atagcaatgggaatgaggagacagggatgaatg

SEQ ID NO: 712685 - DNA, 33 bp, Homo sapien
ctcctcactctctccaaccttaagcaggccccg

SEQ ID NO: 712686 - DNA, 33 bp, Homo sapien
ctcctcactctctccacccttaagcaggccccg

SEQ ID NO: 712687 - DNA, 33 bp, Homo sapien
ctgagaactcgtcctaagtcataagagattttc

SEQ ID NO: 712688 - DNA, 33 bp, Homo sapien
ctgagaactcgtcctatgtcataagagattttc

SEQ ID NO: 712689 - DNA, 33 bp, Homo sapien
acaaattagaaaacaaactcccttctgtgtgga

SEQ ID NO: 712690 - DNA, 33 bp, Homo sapien
acaaattagaaaacaagctcccttctgtgtgga

SEQ ID NO: 712691 - DNA, 33 bp, Homo sapien
cctttatctggggagaagattaatgacttttaa

SEQ ID NO: 712692 - DNA, 33 bp, Homo sapien
cctttatctggggagaggattaatgacttttaa

SEQ ID NO: 712693 - DNA, 33 bp, Homo sapien
gtatcacgtagctataaaggcttaaaacattca

SEQ ID NO: 712694 - DNA, 33 bp, Homo sapien
gtatcacgtagctatataggcttaaaacattca

SEQ ID NO: 712695 - DNA, 33 bp, Homo sapien
agtttcaattactttacctcatcacaaacactc

SEQ ID NO: 712696 - DNA, 33 bp, Homo sapien
agtttcaattactttatctcatcacaaacactc

SEQ ID NO: 712697 - DNA, 33 bp, Homo sapien
acaagctgattctttcaaaaattctttgttttt

SEQ ID NO: 712698 - DNA, 33 bp, Homo sapien
acaagctgattctttctaaaattctttgttttt

SEQ ID NO: 712699 - DNA, 33 bp, Homo sapien
ttgggacaaaagagcaaagttttctgaatcaac

SEQ ID NO: 712700 - DNA, 33 bp, Homo sapien
ttgggacaaaagagcagagttttctgaatcaac

SEQ ID NO: 712701 - DNA, 33 bp, Homo sapien
tgcttctctcttgctcaccttagtcccaagttt

SEQ ID NO: 712702 - DNA, 33 bp, Homo sapien
tgcttctctcttgctcgccttagtcccaagttt

SEQ ID NO: 712703 - DNA, 33 bp, Homo sapien
gcaccaaccattcatacaagaacttttaaatca

SEQ ID NO: 712704 - DNA, 33 bp, Homo sapien
gcaccaaccattcatataagaacttttaaatca

SEQ ID NO: 712705 - DNA, 33 bp, Homo sapien
gaaactgaggcacaggaagctataacttactct

SEQ ID NO: 712706 - DNA, 33 bp, Homo sapien
gaaactgaggcacagggagctataacttactct

SEQ ID NO: 712707 - DNA, 33 bp, Homo sapien
catcaaaacaacagtgaacttctttagagactt

SEQ ID NO: 712708 - DNA, 33 bp, Homo sapien
catcaaaacaacagtgcacttctttagagactt

SEQ ID NO: 712709 - DNA, 33 bp, Homo sapien
atttacagtttgtcacaaggttcatcagaatgt

SEQ ID NO: 712710 - DNA, 33 bp, Homo sapien
atttacagtttgtcaccaggttcatcagaatgt

SEQ ID NO: 712711 - DNA, 33 bp, Homo sapien
actggaaagctagggaaaatacaaactttgggg

SEQ ID NO: 712712 - DNA, 33 bp, Homo sapien
actggaaagctagggacaatacaaactttgggg

SEQ ID NO: 712713 - DNA, 33 bp, Homo sapien
agttgaattgttatcaaaactgtaagtgaacat

SEQ ID NO: 712714 - DNA, 33 bp, Homo sapien
agttgaattgttatcagaactgtaagtgaacat

SEQ ID NO: 712715 - DNA, 33 bp, Homo sapien
atgagaaaacaggcacagaggacttatgtaact

SEQ ID NO: 712716 - DNA, 33 bp, Homo sapien
atgagaaaacaggcacggaggacttatgtaact

SEQ ID NO: 712717 - DNA, 33 bp, Homo sapien
gggattgttcatgttcaagaggaattaacttta

SEQ ID NO: 712718 - DNA, 33 bp, Homo sapien
gggattgttcatgttcgagaggaattaacttta

SEQ ID NO: 712719 - DNA, 33 bp, Homo sapien
tcaaatatgctgcttacggaaaaagcatagtct

SEQ ID NO: 712720 - DNA, 33 bp, Homo sapien
tcaaatatgctgcttagggaaaaagcatagtct

SEQ ID NO: 712721 - DNA, 33 bp, Homo sapien
caatcccagccctggcaaacatacctaccaaag

SEQ ID NO: 712722 - DNA, 33 bp, Homo sapien
caatcccagccctggcgaacatacctaccaaag

SEQ ID NO: 712723 - DNA, 33 bp, Homo sapien
ttgcaatcttacataaccacatcttacaaatcc

SEQ ID NO: 712724 - DNA, 33 bp, Homo sapien
ttgcaatcttacataagcacatcttacaaatcc

SEQ ID NO: 712725 - DNA, 33 bp, Homo sapien
tccgtattccttctcaaagaaaaagcctcaaca

SEQ ID NO: 712726 - DNA, 33 bp, Homo sapien
tccgtattccttctcagagaaaaagcctcaaca

SEQ ID NO: 712727 - DNA, 33 bp, Homo sapien
ccatgttgacacaagacacatggtcaggagaat

SEQ ID NO: 712728 - DNA, 33 bp, Homo sapien
ccatgttgacacaagatacatggtcaggagaat

SEQ ID NO: 712729 - DNA, 33 bp, Homo sapien
catcacaaacattatgcatttcctattgaggag

SEQ ID NO: 712730 - DNA, 33 bp, Homo sapien
catcacaaacattatgtatttcctattgaggag

SEQ ID NO: 712731 - DNA, 33 bp, Homo sapien
tatgcagccataaaacagaaggagattgtgtcc

SEQ ID NO: 712732 - DNA, 33 bp, Homo sapien
tatgcagccataaaacggaaggagattgtgtcc

SEQ ID NO: 712733 - DNA, 33 bp, Homo sapien
tacttgggtgaaagaaacttcctatttatcttc

SEQ ID NO: 712734 - DNA, 33 bp, Homo sapien
tacttgggtgaaagaatcttcctatttatcttc

SEQ ID NO: 712735 - DNA, 33 bp, Homo sapien
aatgacataacaacaccgggtgagtgagtttgg

SEQ ID NO: 712736 - DNA, 33 bp, Homo sapien
aatgacataacaacactgggtgagtgagtttgg

SEQ ID NO: 712737 - DNA, 33 bp, Homo sapien
aaactaggaaaacggcaaacaatatttaataat

SEQ ID NO: 712738 - DNA, 33 bp, Homo sapien
aaactaggaaaacggcgaacaatatttaataat

SEQ ID NO: 712739 - DNA, 33 bp, Homo sapien
gagtttgttgcttcaaatggaggaaaaaaatca

SEQ ID NO: 712740 - DNA, 33 bp, Homo sapien
gagtttgttgcttcaagtggaggaaaaaaatca

SEQ ID NO: 712741 - DNA, 33 bp, Homo sapien
ttagagccagacaaagaatatgcactcaacctt

SEQ ID NO: 712742 - DNA, 33 bp, Homo sapien
ttagagccagacaaaggatatgcactcaacctt

SEQ ID NO: 712743 - DNA, 33 bp, Homo sapien
gaaattatgaacattaagaaagaaacaacagac

SEQ ID NO: 712744 - DNA, 33 bp, Homo sapien
gaaattatgaacattatgaaagaaacaacagac

SEQ ID NO: 712745 - DNA, 33 bp, Homo sapien
taagtgaagtaaatcacgaatgaaaaatcaaat

SEQ ID NO: 712746 - DNA, 33 bp, Homo sapien
taagtgaagtaaatcaggaatgaaaaatcaaat

SEQ ID NO: 712747 - DNA, 33 bp, Homo sapien
aggtattgaatcaacccatgttcccatcaactg

SEQ ID NO: 712748 - DNA, 33 bp, Homo sapien
aggtattgaatcaacctatgttcccatcaactg

SEQ ID NO: 712749 - DNA, 33 bp, Homo sapien
caaatacctacaattaacttaccttcaataaag

SEQ ID NO: 712750 - DNA, 33 bp, Homo sapien
caaatacctacaattagcttaccttcaataaag

SEQ ID NO: 712751 - DNA, 33 bp, Homo sapien
gcttatactagtccaaataagcattaggtcata

SEQ ID NO: 712752 - DNA, 33 bp, Homo sapien
gcttatactagtccaagtaagcattaggtcata

SEQ ID NO: 712753 - DNA, 33 bp, Homo sapien
caatggaaagctactacctatcaaactctagat

SEQ ID NO: 712754 - DNA, 33 bp, Homo sapien
caatggaaagctactatctatcaaactctagat

SEQ ID NO: 712755 - DNA, 33 bp, Homo sapien
tgacagtcttgtagcaatgagcatgctagccca

SEQ ID NO: 712756 - DNA, 33 bp, Homo sapien
tgacagtcttgtagcagtgagcatgctagccca

SEQ ID NO: 712757 - DNA, 33 bp, Homo sapien
ttaccttttcctgcacgctattcccccacatga

SEQ ID NO: 712758 - DNA, 33 bp, Homo sapien
ttaccttttcctgcactctattcccccacatga

SEQ ID NO: 712759 - DNA, 33 bp, Homo sapien
caagagaactacaagaagcaagtatatactggc

SEQ ID NO: 712760 - DNA, 33 bp, Homo sapien
caagagaactacaagaggcaagtatatactggc

SEQ ID NO: 712761 - DNA, 33 bp, Homo sapien
agattcaaggtacctccagttaccagtggcaaa

SEQ ID NO: 712762 - DNA, 33 bp, Homo sapien
agattcaaggtacctcgagttaccagtggcaaa

SEQ ID NO: 712763 - DNA, 33 bp, Homo sapien
atgttcaccagtactacattagcatcatcctac

SEQ ID NO: 712764 - DNA, 33 bp, Homo sapien
atgttcaccagtactatattagcatcatcctac

SEQ ID NO: 712765 - DNA, 33 bp, Homo sapien
acttcttttggagtcagtatttcttttgaaatt

SEQ ID NO: 712766 - DNA, 33 bp, Homo sapien
acttcttttggagtcattatttcttttgaaatt

SEQ ID NO: 712767 - DNA, 33 bp, Homo sapien
agtggtacctccttgccgatacaacattgaccc

SEQ ID NO: 712768 - DNA, 33 bp, Homo sapien
agtggtacctccttgctgatacaacattgaccc

SEQ ID NO: 712769 - DNA, 33 bp, Homo sapien
tttctgtttctgattaagccagtaaagctcctt

SEQ ID NO: 712770 - DNA, 33 bp, Homo sapien
tttctgtttctgattaggccagtaaagctcctt

SEQ ID NO: 712771 - DNA, 33 bp, Homo sapien
gagtagaagccaagcaatatattaggagacaat

SEQ ID NO: 712772 - DNA, 33 bp, Homo sapien
gagtagaagccaagcactatattaggagacaat

SEQ ID NO: 712773 - DNA, 33 bp, Homo sapien
cgctgccattaatttaagcattgaagaatcaat

SEQ ID NO: 712774 - DNA, 33 bp, Homo sapien
cgctgccattaatttaggcattgaagaatcaat

SEQ ID NO: 712775 - DNA, 33 bp, Homo sapien
ttttgccctccctaccactcactctacttcata

SEQ ID NO: 712776 - DNA, 33 bp, Homo sapien
ttttgccctccctaccgctcactctacttcata

SEQ ID NO: 712777 - DNA, 33 bp, Homo sapien
aggaataaagagactaaatttctttctctaccc

SEQ ID NO: 712778 - DNA, 33 bp, Homo sapien
aggaataaagagactacatttctttctctaccc

SEQ ID NO: 712779 - DNA, 33 bp, Homo sapien
agactgtgtggcttaaatgacagaaatatatag

SEQ ID NO: 712780 - DNA, 33 bp, Homo sapien
agactgtgtggcttaagtgacagaaatatatag

SEQ ID NO: 712781 - DNA, 33 bp, Homo sapien
ctaggtaagcgcctgtaaaatgcagttgaggtg

SEQ ID NO: 712782 - DNA, 33 bp, Homo sapien
ctaggtaagcgcctgtgaaatgcagttgaggtg

SEQ ID NO: 712783 - DNA, 33 bp, Homo sapien
agtctcttatctatgaaaagtccaagagtgaat

SEQ ID NO: 712784 - DNA, 33 bp, Homo sapien
agtctcttatctatgagaagtccaagagtgaat

SEQ ID NO: 712785 - DNA, 33 bp, Homo sapien
tgctgtagaccactttaaaacaagacttcacaa

SEQ ID NO: 712786 - DNA, 33 bp, Homo sapien
tgctgtagaccactttcaaacaagacttcacaa

SEQ ID NO: 712787 - DNA, 33 bp, Homo sapien
tatagtctggctataccgaggtagaaacaatca

SEQ ID NO: 712788 - DNA, 33 bp, Homo sapien
tatagtctggctatactgaggtagaaacaatca

SEQ ID NO: 712789 - DNA, 33 bp, Homo sapien
ttcagaatttcacgtccactcctttaatgattg

SEQ ID NO: 712790 - DNA, 33 bp, Homo sapien
ttcagaatttcacgtctactcctttaatgattg

SEQ ID NO: 712791 - DNA, 33 bp, Homo sapien
ccccagaagagcttgaagataagagtaaaagat

SEQ ID NO: 712792 - DNA, 33 bp, Homo sapien
ccccagaagagcttgatgataagagtaaaagat

SEQ ID NO: 712793 - DNA, 33 bp, Homo sapien
catgctgatctttatccctttggatgcatatcc

SEQ ID NO: 712794 - DNA, 33 bp, Homo sapien
catgctgatctttatctctttggatgcatatcc

SEQ ID NO: 712795 - DNA, 33 bp, Homo sapien
gtacactcgtataacaagagactgatgagagaa

SEQ ID NO: 712796 - DNA, 33 bp, Homo sapien
gtacactcgtataacatgagactgatgagagaa

SEQ ID NO: 712797 - DNA, 33 bp, Homo sapien
cccagagctcagttagaaatgatctagctgttt

SEQ ID NO: 712798 - DNA, 33 bp, Homo sapien
cccagagctcagttaggaatgatctagctgttt

SEQ ID NO: 712799 - DNA, 33 bp, Homo sapien
ctcaaactgttaaaataatggaggaaatctagg

SEQ ID NO: 712800 - DNA, 33 bp, Homo sapien
ctcaaactgttaaaatcatggaggaaatctagg

SEQ ID NO: 712801 - DNA, 33 bp, Homo sapien
gagtgaaaattggatgaacatggagattaagtg

SEQ ID NO: 712802 - DNA, 33 bp, Homo sapien
gagtgaaaattggatggacatggagattaagtg

SEQ ID NO: 712803 - DNA, 33 bp, Homo sapien
gatttctggatcatacaatagttaatttcagtt

SEQ ID NO: 712804 - DNA, 33 bp, Homo sapien
gatttctggatcatacgatagttaatttcagtt

SEQ ID NO: 712805 - DNA, 33 bp, Homo sapien
gcttccctctcttcctcaagatgcaaagtatgt

SEQ ID NO: 712806 - DNA, 33 bp, Homo sapien
gcttccctctcttcctgaagatgcaaagtatgt

SEQ ID NO: 712807 - DNA, 33 bp, Homo sapien
tgagacttccgtgctgcagttaaagaaggaacg

SEQ ID NO: 712808 - DNA, 33 bp, Homo sapien
tgagacttccgtgctgtagttaaagaaggaacg

SEQ ID NO: 712809 - DNA, 33 bp, Homo sapien
caatcgtcataaaacaagtaggtgtggaaaaaa

SEQ ID NO: 712810 - DNA, 33 bp, Homo sapien
caatcgtcataaaacaggtaggtgtggaaaaaa

SEQ ID NO: 712811 - DNA, 33 bp, Homo sapien
cctgggagcatgatagaaagttcactgtagagc

SEQ ID NO: 712812 - DNA, 33 bp, Homo sapien
cctgggagcatgataggaagttcactgtagagc

SEQ ID NO: 712813 - DNA, 33 bp, Homo sapien
ctggcaaacaatttacaatttgaattttcaatg

SEQ ID NO: 712814 - DNA, 33 bp, Homo sapien
ctggcaaacaatttacgatttgaattttcaatg

SEQ ID NO: 712815 - DNA, 33 bp, Homo sapien
gtttcaagcacttccacattgaaagcatcattt

SEQ ID NO: 712816 - DNA, 33 bp, Homo sapien
gtttcaagcacttccagattgaaagcatcattt

SEQ ID NO: 712817 - DNA, 33 bp, Homo sapien
tgaaaccaattaggaaaatgtaggtgaagaagc

SEQ ID NO: 712818 - DNA, 33 bp, Homo sapien
tgaaaccaattaggaagatgtaggtgaagaagc

SEQ ID NO: 712819 - DNA, 33 bp, Homo sapien
caacttactgttttcccatttgcattgctgcag

SEQ ID NO: 712820 - DNA, 33 bp, Homo sapien
caacttactgttttcctatttgcattgctgcag

SEQ ID NO: 712821 - DNA, 33 bp, Homo sapien
tgtatccatcactaaaatatcatacagaatagt

SEQ ID NO: 712822 - DNA, 33 bp, Homo sapien
tgtatccatcactaaagtatcatacagaatagt

SEQ ID NO: 712823 - DNA, 33 bp, Homo sapien
aagttgattgcatacacatattcttctttattt

SEQ ID NO: 712824 - DNA, 33 bp, Homo sapien
aagttgattgcatacatatattcttctttattt

SEQ ID NO: 712825 - DNA, 33 bp, Homo sapien
aatttttatttcactcacttgtgatctaagatc

SEQ ID NO: 712826 - DNA, 33 bp, Homo sapien
aatttttatttcactcgcttgtgatctaagatc

SEQ ID NO: 712827 - DNA, 33 bp, Homo sapien
gtaagggacccaaactaagacaatgatttgggg

SEQ ID NO: 712828 - DNA, 33 bp, Homo sapien
gtaagggacccaaactgagacaatgatttgggg

SEQ ID NO: 712829 - DNA, 33 bp, Homo sapien
acagaccattgccagaactttgttgtggaatca

SEQ ID NO: 712830 - DNA, 33 bp, Homo sapien
acagaccattgccagagctttgttgtggaatca

SEQ ID NO: 712831 - DNA, 33 bp, Homo sapien
attactagataaaaatgagatcctgttgtatga

SEQ ID NO: 712832 - DNA, 33 bp, Homo sapien
attactagataaaaattagatcctgttgtatga

SEQ ID NO: 712833 - DNA, 33 bp, Homo sapien
tgttcttcttactgtacatgaaatggctttgca

SEQ ID NO: 712834 - DNA, 33 bp, Homo sapien
tgttcttcttactgtatatgaaatggctttgca

SEQ ID NO: 712835 - DNA, 33 bp, Homo sapien
tgtgacaaacccaaaaatctcacaatgattaca

SEQ ID NO: 712836 - DNA, 33 bp, Homo sapien
tgtgacaaacccaaaattctcacaatgattaca

SEQ ID NO: 712837 - DNA, 33 bp, Homo sapien; identical to SEQ ID NO: 712835

SEQ ID NO: 712838 - DNA, 33 bp, Homo sapien; identical to SEQ ID NO: 712836

SEQ ID NO: 712839 - DNA, 33 bp, Homo sapien; identical to SEQ ID NO: 712835

SEQ ID NO: 712840 - DNA, 33 bp, Homo sapien; identical to SEQ ID NO: 712836

SEQ ID NO: 712841 - DNA, 33 bp, Homo sapien
gaatgttattcctggaacaatacagtctcccct

SEQ ID NO: 712842 - DNA, 33 bp, Homo sapien
gaatgttattcctggagcaatacagtctcccct

SEQ ID NO: 712843 - DNA, 33 bp, Homo sapien
cagaataaagcagaaaactcccttgcactccag

SEQ ID NO: 712844 - DNA, 33 bp, Homo sapien
cagaataaagcagaaatctcccttgcactccag

SEQ ID NO: 712845 - DNA, 33 bp, Homo sapien
ggtgccagacagcctacgctagaaactgattgt

SEQ ID NO: 712846 - DNA, 33 bp, Homo sapien
ggtgccagacagcctatgctagaaactgattgt

SEQ ID NO: 712847 - DNA, 33 bp, Homo sapien
gaataccacagactgagctgcttaaataacatt

SEQ ID NO: 712848 - DNA, 33 bp, Homo sapien
gaataccacagactgatctgcttaaataacatt

SEQ ID NO: 712849 - DNA, 33 bp, Homo sapien
ttgaggctattctagactagtcatcagccactg

SEQ ID NO: 712850 - DNA, 33 bp, Homo sapien
ttgaggctattctagattagtcatcagccactg

SEQ ID NO: 712851 - DNA, 33 bp, Homo sapien
cacaatgccaagaaaagtaggctctgttctcta

SEQ ID NO: 712852 - DNA, 33 bp, Homo sapien
cacaatgccaagaaaattaggctctgttctcta

SEQ ID NO: 712853 - DNA, 33 bp, Homo sapien
aaaagcagctctgcacaaaagtctttttatttc

SEQ ID NO: 712854 - DNA, 33 bp, Homo sapien
aaaagcagctctgcaccaaagtctttttatttc

SEQ ID NO: 712855 - DNA, 33 bp, Homo sapien
agatggtggaacttggaagacatgcagtagggc

SEQ ID NO: 712856 - DNA, 33 bp, Homo sapien
agatggtggaacttgggagacatgcagtagggc

SEQ ID NO: 712857 - DNA, 33 bp, Homo sapien
tcttactattccatgacattagttgtcaacaag

SEQ ID NO: 712858 - DNA, 33 bp, Homo sapien
tcttactattccatgatattagttgtcaacaag

SEQ ID NO: 712859 - DNA, 33 bp, Homo sapien
gcttcagttggctgtcaaattattacgtgtgtt

SEQ ID NO: 712860 - DNA, 33 bp, Homo sapien
gcttcagttggctgtcgaattattacgtgtgtt

SEQ ID NO: 712861 - DNA, 33 bp, Homo sapien
aactggctttttcccaaattctgccatctgatc

SEQ ID NO: 712862 - DNA, 33 bp, Homo sapien
aactggctttttcccagattctgccatctgatc

SEQ ID NO: 712863 - DNA, 33 bp, Homo sapien
attcctagaggttaaactgtagggcagcaaaaa

SEQ ID NO: 712864 - DNA, 33 bp, Homo sapien
attcctagaggttaaattgtagggcagcaaaaa

SEQ ID NO: 712865 - DNA, 33 bp, Homo sapien
gtaatttgacatggaaagactttgataaataaa

SEQ ID NO: 712866 - DNA, 33 bp, Homo sapien
gtaatttgacatggaaggactttgataaataaa

SEQ ID NO: 712867 - DNA, 33 bp, Homo sapien
tttgataaataaaccaatgaaacatttcttccc

SEQ ID NO: 712868 - DNA, 33 bp, Homo sapien
tttgataaataaaccagtgaaacatttcttccc

SEQ ID NO: 712869 - DNA, 33 bp, Homo sapien
acacattttcaaggtgaaaccaatgtgttgaga

SEQ ID NO: 712870 - DNA, 33 bp, Homo sapien
acacattttcaaggtggaaccaatgtgttgaga

SEQ ID NO: 712871 - DNA, 33 bp, Homo sapien
acattaagccagttcaataattccattatctgc

SEQ ID NO: 712872 - DNA, 33 bp, Homo sapien
acattaagccagttcagtaattccattatctgc

SEQ ID NO: 712873 - DNA, 33 bp, Homo sapien
caatcctcaatagtgaactagcagtgagagcag

SEQ ID NO: 712874 - DNA, 33 bp, Homo sapien
caatcctcaatagtgagctagcagtgagagcag

SEQ ID NO: 712875 - DNA, 33 bp, Homo sapien
ccttacctgactcccaataattaagttctgcct

SEQ ID NO: 712876 - DNA, 33 bp, Homo sapien
ccttacctgactcccagtaattaagttctgcct

SEQ ID NO: 712877 - DNA, 33 bp, Homo sapien
acatgatttaacaggaatacttgactacataca

SEQ ID NO: 712878 - DNA, 33 bp, Homo sapien
acatgatttaacaggagtacttgactacataca

SEQ ID NO: 712879 - DNA, 33 bp, Homo sapien
agggacacctggttaaatgttcaggtttctcag

SEQ ID NO: 712880 - DNA, 33 bp, Homo sapien
agggacacctggttaagtgttcaggtttctcag

SEQ ID NO: 712881 - DNA, 33 bp, Homo sapien
tatatggcgattgtaaaataagtatagcattta

SEQ ID NO: 712882 - DNA, 33 bp, Homo sapien
tatatggcgattgtaatataagtatagcattta

SEQ ID NO: 712883 - DNA, 33 bp, Homo sapien
gccacagaatccactgaaataaaattagctggt

SEQ ID NO: 712884 - DNA, 33 bp, Homo sapien
gccacagaatccactgtaataaaattagctggt

SEQ ID NO: 712885 - DNA, 33 bp, Homo sapien
tcagattctaaagaaaataagttagctagacac

SEQ ID NO: 712886 - DNA, 33 bp, Homo sapien
tcagattctaaagaaagtaagttagctagacac

SEQ ID NO: 712887 - DNA, 33 bp, Homo sapien
catggtactggtatacaaatgagcaaaaagaaa

SEQ ID NO: 712888 - DNA, 33 bp, Homo sapien
catggtactggtatacgaatgagcaaaaagaaa

SEQ ID NO: 712889 - DNA, 33 bp, Homo sapien
tactgaactaattcaacgtgttcacagctctac

SEQ ID NO: 712890 - DNA, 33 bp, Homo sapien
tactgaactaattcaatgtgttcacagctctac

SEQ ID NO: 712891 - DNA, 33 bp, Homo sapien
cagtcaggaaatacaacgtttaaaacagcagaa

SEQ ID NO: 712892 - DNA, 33 bp, Homo sapien
cagtcaggaaatacaatgtttaaaacagcagaa

SEQ ID NO: 712893 - DNA, 33 bp, Homo sapien
acacagatgttccacactcaggcaactggctaa

SEQ ID NO: 712894 - DNA, 33 bp, Homo sapien
acacagatgttccacattcaggcaactggctaa

SEQ ID NO: 712895 - DNA, 33 bp, Homo sapien
ttgatttgaaaacttgcagcatatccacatagc

SEQ ID NO: 712896 - DNA, 33 bp, Homo sapien
ttgatttgaaaacttgtagcatatccacatagc

SEQ ID NO: 712897 - DNA, 33 bp, Homo sapien
agcgagaaacaaaagaagacatgctatgtatga

SEQ ID NO: 712898 - DNA, 33 bp, Homo sapien
agcgagaaacaaaagatgacatgctatgtatga

SEQ ID NO: 712899 - DNA, 33 bp, Homo sapien
aatgatattgaagagaagagggaagtgggaaaa

SEQ ID NO: 712900 - DNA, 33 bp, Homo sapien
aatgatattgaagagaggagggaagtgggaaaa

SEQ ID NO: 712901 - DNA, 33 bp, Homo sapien
gaaatccaggaaataacgaggaaattaccaggt

SEQ ID NO: 712902 - DNA, 33 bp, Homo sapien
gaaatccaggaaataatgaggaaattaccaggt

SEQ ID NO: 712903 - DNA, 33 bp, Homo sapien
aaaaaattagaaaccacgctttatcttgtggga

SEQ ID NO: 712904 - DNA, 33 bp, Homo sapien
aaaaaattagaaaccatgctttatcttgtggga

SEQ ID NO: 712905 - DNA, 33 bp, Homo sapien
ctggtcctaccaataccactggaaggtactacc

SEQ ID NO: 712906 - DNA, 33 bp, Homo sapien
ctggtcctaccaatactactggaaggtactacc

SEQ ID NO: 712907 - DNA, 33 bp, Homo sapien
ttctttaagagatcacacaaaatataaaccagg

SEQ ID NO: 712908 - DNA, 33 bp, Homo sapien
ttctttaagagatcacgcaaaatataaaccagg

SEQ ID NO: 712909 - DNA, 33 bp, Homo sapien
cttggtctctctttaaatatactctccatcata

SEQ ID NO: 712910 - DNA, 33 bp, Homo sapien
cttggtctctctttaagtatactctccatcata

SEQ ID NO: 712911 - DNA, 33 bp, Homo sapien
cttcaaatctacttaactgacaaaattgtaact

SEQ ID NO: 712912 - DNA, 33 bp, Homo sapien
cttcaaatctacttaattgacaaaattgtaact

SEQ ID NO: 712913 - DNA, 33 bp, Homo sapien
tcagttctggaaaacaatcattagttaagcaaa

SEQ ID NO: 712914 - DNA, 33 bp, Homo sapien
tcagttctggaaaacagtcattagttaagcaaa

SEQ ID NO: 712915 - DNA, 33 bp, Homo sapien
ctctgaatcatctttacagttattttctcaaga

SEQ ID NO: 712916 - DNA, 33 bp, Homo sapien
ctctgaatcatctttagagttattttctcaaga

SEQ ID NO: 712917 - DNA, 33 bp, Homo sapien
gctccaatggctatccactgcattttgaataaa

SEQ ID NO: 712918 - DNA, 33 bp, Homo sapien
gctccaatggctatccgctgcattttgaataaa

SEQ ID NO: 712919 - DNA, 33 bp, Homo sapien
tggatctgggacaactaacattgagaagttact

SEQ ID NO: 712920 - DNA, 33 bp, Homo sapien
tggatctgggacaactgacattgagaagttact

SEQ ID NO: 712921 - DNA, 33 bp, Homo sapien
agcagtttcctctcaccacaaaataaaaaggtc

SEQ ID NO: 712922 - DNA, 33 bp, Homo sapien
agcagtttcctctcactacaaaataaaaaggtc

SEQ ID NO: 712923 - DNA, 33 bp, Homo sapien
ttgaaatggatgcctacggtctttctgatgatt

SEQ ID NO: 712924 - DNA, 33 bp, Homo sapien
ttgaaatggatgcctatggtctttctgatgatt

SEQ ID NO: 712925 - DNA, 33 bp, Homo sapien
ttcactgattgcagaaagcaaagaggaaccact

SEQ ID NO: 712926 - DNA, 33 bp, Homo sapien
ttcactgattgcagaaggcaaagaggaaccact

SEQ ID NO: 712927 - DNA, 33 bp, Homo sapien
tagcaatgcagaatgaactaacacatctattaa

SEQ ID NO: 712928 - DNA, 33 bp, Homo sapien
tagcaatgcagaatgagctaacacatctattaa

SEQ ID NO: 712929 - DNA, 33 bp, Homo sapien
tggctatatttggaaactggctatttaagaatg

SEQ ID NO: 712930 - DNA, 33 bp, Homo sapien
tggctatatttggaaagtggctatttaagaatg

SEQ ID NO: 712931 - DNA, 33 bp, Homo sapien
ctgaattatacactgtaaaagggtgaattttat

SEQ ID NO: 712932 - DNA, 33 bp, Homo sapien
ctgaattatacactgttaaagggtgaattttat

SEQ ID NO: 712933 - DNA, 33 bp, Homo sapien
tatccaattaaactccacaaggttcatattaga

SEQ ID NO: 712934 - DNA, 33 bp, Homo sapien
tatccaattaaactcctcaaggttcatattaga

SEQ ID NO: 712935 - DNA, 33 bp, Homo sapien
gaagccaaactaagaaactcccaatagccaaat

SEQ ID NO: 712936 - DNA, 33 bp, Homo sapien
gaagccaaactaagaacctcccaatagccaaat

SEQ ID NO: 712937 - DNA, 33 bp, Homo sapien
gtgttaagggtggtcggaagccaatatccagca

SEQ ID NO: 712938 - DNA, 33 bp, Homo sapien
gtgttaagggtggtcgtaagccaatatccagca

SEQ ID NO: 712939 - DNA, 33 bp, Homo sapien
attagtgccaggcaaacagaaggttttcaatca

SEQ ID NO: 712940 - DNA, 33 bp, Homo sapien
attagtgccaggcaaatagaaggttttcaatca

SEQ ID NO: 712941 - DNA, 33 bp, Homo sapien
gtcagcaagaagaaccaaaaaataattccttcc

SEQ ID NO: 712942 - DNA, 33 bp, Homo sapien
gtcagcaagaagaaccgaaaaataattccttcc

SEQ ID NO: 712943 - DNA, 33 bp, Homo sapien
aaagggtgagagggggacaagagataaaagaca

SEQ ID NO: 712944 - DNA, 33 bp, Homo sapien
aaagggtgagagggggccaagagataaaagaca

SEQ ID NO: 712945 - DNA, 33 bp, Homo sapien
gctgcaaaaacctcaactggattacgttcaact

SEQ ID NO: 712946 - DNA, 33 bp, Homo sapien
gctgcaaaaacctcaattggattacgttcaact

SEQ ID NO: 712947 - DNA, 33 bp, Homo sapien
tgtccccatctagctgcactctccatggtttca

SEQ ID NO: 712948 - DNA, 33 bp, Homo sapien
tgtccccatctagctggactctccatggtttca

SEQ ID NO: 712949 - DNA, 33 bp, Homo sapien
aaacacctgcttcatcagagaacttgccatact

SEQ ID NO: 712950 - DNA, 33 bp, Homo sapien
aaacacctgcttcatcggagaacttgccatact

SEQ ID NO: 712951 - DNA, 33 bp, Homo sapien
acaccacattaaaagaacattcatgtaattcag

SEQ ID NO: 712952 - DNA, 33 bp, Homo sapien
acaccacattaaaagagcattcatgtaattcag

SEQ ID NO: 712953 - DNA, 33 bp, Homo sapien
cacacaaaaagaaatcaaaaggtccatgtccca

SEQ ID NO: 712954 - DNA, 33 bp, Homo sapien
cacacaaaaagaaatcgaaaggtccatgtccca

SEQ ID NO: 712955 - DNA, 33 bp, Homo sapien
tcagatgtgcaagggccgatcaactttaaaaaa

SEQ ID NO: 712956 - DNA, 33 bp, Homo sapien
tcagatgtgcaagggctgatcaactttaaaaaa

SEQ ID NO: 712957 - DNA, 33 bp, Homo sapien
aaatccagttctacaccatttcactggtgaatt

SEQ ID NO: 712958 - DNA, 33 bp, Homo sapien
aaatccagttctacactatttcactggtgaatt

SEQ ID NO: 712959 - DNA, 33 bp, Homo sapien
atgaaacaatctggataatcaataaccattaaa

SEQ ID NO: 712960 - DNA, 33 bp, Homo sapien
atgaaacaatctggatgatcaataaccattaaa

SEQ ID NO: 712961 - DNA, 33 bp, Homo sapien
taccaaggatatgacacaaacaaaagtctggtc

SEQ ID NO: 712962 - DNA, 33 bp, Homo sapien
taccaaggatatgacagaaacaaaagtctggtc

SEQ ID NO: 712963 - DNA, 33 bp, Homo sapien
tagaaaaagatttataagtgactgctaccaggc

SEQ ID NO: 712964 - DNA, 33 bp, Homo sapien
tagaaaaagatttataggtgactgctaccaggc

SEQ ID NO: 712965 - DNA, 33 bp, Homo sapien
agacttttgcctgtggaatgtttaccactattg

SEQ ID NO: 712966 - DNA, 33 bp, Homo sapien
agacttttgcctgtgggatgtttaccactattg

SEQ ID NO: 712967 - DNA, 33 bp, Homo sapien
tgtatttcgatctaagactcacaatggccttag

SEQ ID NO: 712968 - DNA, 33 bp, Homo sapien
tgtatttcgatctaaggctcacaatggccttag

SEQ ID NO: 712969 - DNA, 33 bp, Homo sapien
gagttgtatcaacacacatagagacagcgcatg

SEQ ID NO: 712970 - DNA, 33 bp, Homo sapien
gagttgtatcaacacagatagagacagcgcatg

SEQ ID NO: 712971 - DNA, 33 bp, Homo sapien
ggaaaagatgccataacgtaaaatgcctggggg

SEQ ID NO: 712972 - DNA, 33 bp, Homo sapien
ggaaaagatgccataatgtaaaatgcctggggg

SEQ ID NO: 712973 - DNA, 33 bp, Homo sapien
ggccagactgtctagacaaacatactgaacatc

SEQ ID NO: 712974 - DNA, 33 bp, Homo sapien
ggccagactgtctagagaaacatactgaacatc

SEQ ID NO: 712975 - DNA, 33 bp, Homo sapien
tttatcaaaaggttgccgatgaaattttactca

SEQ ID NO: 712976 - DNA, 33 bp, Homo sapien
tttatcaaaaggttgctgatgaaattttactca

SEQ ID NO: 712977 - DNA, 33 bp, Homo sapien
ttgagtgcataggaaaataaagattagctctcc

SEQ ID NO: 712978 - DNA, 33 bp, Homo sapien
ttgagtgcataggaaagtaaagattagctctcc

SEQ ID NO: 712979 - DNA, 33 bp, Homo sapien
agtttggggtaaccagacagtccagatgaatta

SEQ ID NO: 712980 - DNA, 33 bp, Homo sapien
agtttggggtaaccagtcagtccagatgaatta

SEQ ID NO: 712981 - DNA, 33 bp, Homo sapien
gatttttggaagagacaggtttacaattttcag

SEQ ID NO: 712982 - DNA, 33 bp, Homo sapien
gatttttggaagagacgggtttacaattttcag

SEQ ID NO: 712983 - DNA, 33 bp, Homo sapien
taaaacattaccatgaactacacaatattaagt

SEQ ID NO: 712984 - DNA, 33 bp, Homo sapien
taaaacattaccatgagctacacaatattaagt

SEQ ID NO: 712985 - DNA, 33 bp, Homo sapien
ttgcattttccctgacccttttcccatcatgtt

SEQ ID NO: 712986 - DNA, 33 bp, Homo sapien
ttgcattttccctgacgcttttcccatcatgtt

SEQ ID NO: 712987 - DNA, 33 bp, Homo sapien
acaacaggcacttagaaaactgcaaaactccgt

SEQ ID NO: 712988 - DNA, 33 bp, Homo sapien
acaacaggcacttagagaactgcaaaactccgt

SEQ ID NO: 712989 - DNA, 33 bp, Homo sapien
ctacctgttgtttcaggcatcaactggggttct

SEQ ID NO: 712990 - DNA, 33 bp, Homo sapien
ctacctgttgtttcagtcatcaactggggttct

SEQ ID NO: 712991 - DNA, 33 bp, Homo sapien
accagcttcccttgctaaaactacagttcagaa

SEQ ID NO: 712992 - DNA, 33 bp, Homo sapien
accagcttcccttgctgaaactacagttcagaa

SEQ ID NO: 712993 - DNA, 33 bp, Homo sapien
tagtcaccccttattcacttcctacaatgtatt

SEQ ID NO: 712994 - DNA, 33 bp, Homo sapien
tagtcaccccttattcgcttcctacaatgtatt

SEQ ID NO: 712995 - DNA, 33 bp, Homo sapien
gacaggagattgaaaacgcaaactgcttgagaa

SEQ ID NO: 712996 - DNA, 33 bp, Homo sapien
gacaggagattgaaaatgcaaactgcttgagaa

SEQ ID NO: 712997 - DNA, 33 bp, Homo sapien
gttttattaggccacaatgaatgaggtatacag

SEQ ID NO: 712998 - DNA, 33 bp, Homo sapien
gttttattaggccacagtgaatgaggtatacag

SEQ ID NO: 712999 - DNA, 33 bp, Homo sapien
tgatctaaaagttaaacgttccaggagtcccat

SEQ ID NO: 713000 - DNA, 33 bp, Homo sapien
tgatctaaaagttaaaggttccaggagtcccat

SEQ ID NO: 713001 - DNA, 33 bp, Homo sapien
ccctcactatggtctgaaagtttatatttcccc

SEQ ID NO: 713002 - DNA, 33 bp, Homo sapien
ccctcactatggtctgcaagtttatatttcccc

SEQ ID NO: 713003 - DNA, 33 bp, Homo sapien
atgagggaatctacccccaagacccgaacacct

SEQ ID NO: 713004 - DNA, 33 bp, Homo sapien
atgagggaatctacccgcaagacccgaacacct

SEQ ID NO: 713005 - DNA, 33 bp, Homo sapien
cagatgacctcatttccatagaagctccaacca

SEQ ID NO: 713006 - DNA, 33 bp, Homo sapien
cagatgacctcatttctatagaagctccaacca

SEQ ID NO: 713007 - DNA, 33 bp, Homo sapien
caatttgtatctactgaatgcttttatatcacc

SEQ ID NO: 713008 - DNA, 33 bp, Homo sapien
caatttgtatctactggatgcttttatatcacc

SEQ ID NO: 713009 - DNA, 33 bp, Homo sapien
cactgttgatcaaggcacttaaataagctttaa

SEQ ID NO: 713010 - DNA, 33 bp, Homo sapien
cactgttgatcaaggctcttaaataagctttaa

SEQ ID NO: 713011 - DNA, 33 bp, Homo sapien
actaattaatagaccacgtatctgcaggaccta

SEQ ID NO: 713012 - DNA, 33 bp, Homo sapien
actaattaatagaccatgtatctgcaggaccta

SEQ ID NO: 713013 - DNA, 33 bp, Homo sapien
atgtagttcaatctaaaacatatgtcttcttca

SEQ ID NO: 713014 - DNA, 33 bp, Homo sapien
atgtagttcaatctaacacatatgtcttcttca

SEQ ID NO: 713015 - DNA, 33 bp, Homo sapien
gtcaccctggtaatgggaacagaaacattcagg

SEQ ID NO: 713016 - DNA, 33 bp, Homo sapien
gtcaccctggtaatggtaacagaaacattcagg

SEQ ID NO: 713017 - DNA, 33 bp, Homo sapien
ttatctttcatcttccacttctttcattttctc

SEQ ID NO: 713018 - DNA, 33 bp, Homo sapien
ttatctttcatcttccgcttctttcattttctc

SEQ ID NO: 713019 - DNA, 33 bp, Homo sapien
ttcttttatttgttaacggcgttcatgataccc

SEQ ID NO: 713020 - DNA, 33 bp, Homo sapien
ttcttttatttgttaatggcgttcatgataccc

SEQ ID NO: 713021 - DNA, 33 bp, Homo sapien
agttccttgcaatttcacattaagtttagagtc

SEQ ID NO: 713022 - DNA, 33 bp, Homo sapien
agttccttgcaatttcgcattaagtttagagtc

SEQ ID NO: 713023 - DNA, 33 bp, Homo sapien
gaaataagatagctgacaggagctctcttggag

SEQ ID NO: 713024 - DNA, 33 bp, Homo sapien
gaaataagatagctgagaggagctctcttggag

SEQ ID NO: 713025 - DNA, 33 bp, Homo sapien
tgtaatgtttcaggacacgttttttgcagaggc

SEQ ID NO: 713026 - DNA, 33 bp, Homo sapien
tgtaatgtttcaggacgcgttttttgcagaggc

SEQ ID NO: 713027 - DNA, 33 bp, Homo sapien
ctttttgtactattgaatatgattgactcccat

SEQ ID NO: 713028 - DNA, 33 bp, Homo sapien
ctttttgtactattgactatgattgactcccat

SEQ ID NO: 713029 - DNA, 33 bp, Homo sapien
catacctctataagaaatcttttgtgaccttga

SEQ ID NO: 713030 - DNA, 33 bp, Homo sapien
catacctctataagaagtcttttgtgaccttga

SEQ ID NO: 713031 - DNA, 33 bp, Homo sapien
cattcttggttctataacacaatacgtcggtta

SEQ ID NO: 713032 - DNA, 33 bp, Homo sapien
cattcttggttctatatcacaatacgtcggtta

SEQ ID NO: 713033 - DNA, 33 bp, Homo sapien
caactgattaccattaacattctctttaagata

SEQ ID NO: 713034 - DNA, 33 bp, Homo sapien
caactgattaccattatcattctctttaagata

SEQ ID NO: 713035 - DNA, 33 bp, Homo sapien
tactatttcattacaccgccataaatcaacatc

SEQ ID NO: 713036 - DNA, 33 bp, Homo sapien
tactatttcattacactgccataaatcaacatc

SEQ ID NO: 713037 - DNA, 33 bp, Homo sapien
ataatacagctgaaaaattcctatcgtctagtg

SEQ ID NO: 713038 - DNA, 33 bp, Homo sapien
ataatacagctgaaaatttcctatcgtctagtg

SEQ ID NO: 713039 - DNA, 33 bp, Homo sapien
tactgtcccatatccccgctttcttttacaaca

SEQ ID NO: 713040 - DNA, 33 bp, Homo sapien
tactgtcccatatccctgctttcttttacaaca

SEQ ID NO: 713041 - DNA, 33 bp, Homo sapien
gttaattggctgttaaatatctagagacttgac

SEQ ID NO: 713042 - DNA, 33 bp, Homo sapien
gttaattggctgttaagtatctagagacttgac

SEQ ID NO: 713043 - DNA, 33 bp, Homo sapien
atttaaaatttcaagacggcaatggaagagctt

SEQ ID NO: 713044 - DNA, 33 bp, Homo sapien
atttaaaatttcaagatggcaatggaagagctt

SEQ ID NO: 713045 - DNA, 33 bp, Homo sapien
ccctagagtagctaagccatagaaaaaaggata

SEQ ID NO: 713046 - DNA, 33 bp, Homo sapien
ccctagagtagctaagtcatagaaaaaaggata

SEQ ID NO: 713047 - DNA, 33 bp, Homo sapien
tttgttatctagaagaaatatggctacacttgc

SEQ ID NO: 713048 - DNA, 33 bp, Homo sapien
tttgttatctagaagagatatggctacacttgc

SEQ ID NO: 713049 - DNA, 33 bp, Homo sapien
tactgctttgtttataagcattagcaccttaat

SEQ ID NO: 713050 - DNA, 33 bp, Homo sapien
tactgctttgtttataggcattagcaccttaat

SEQ ID NO: 713051 - DNA, 33 bp, Homo sapien
ccgtgacatgcacaacgctcagaacacttcctg

SEQ ID NO: 713052 - DNA, 33 bp, Homo sapien
ccgtgacatgcacaactctcagaacacttcctg

SEQ ID NO: 713053 - DNA, 33 bp, Homo sapien
gcagttacagagttctcactataagccagatat

SEQ ID NO: 713054 - DNA, 33 bp, Homo sapien
gcagttacagagttcttactataagccagatat

SEQ ID NO: 713055 - DNA, 33 bp, Homo sapien
aagggtgataggaatagagagttgggtaggggt

SEQ ID NO: 713056 - DNA, 33 bp, Homo sapien
aagggtgataggaatatagagttgggtaggggt

SEQ ID NO: 713057 - DNA, 33 bp, Homo sapien
ccctcttcttgagctcactttcagcggtgtctc

SEQ ID NO: 713058 - DNA, 33 bp, Homo sapien
ccctcttcttgagctctctttcagcggtgtctc

SEQ ID NO: 713059 - DNA, 33 bp, Homo sapien
cccattcctcaagtgacgaagattctccaaagc

SEQ ID NO: 713060 - DNA, 33 bp, Homo sapien
cccattcctcaagtgatgaagattctccaaagc

SEQ ID NO: 713061 - DNA, 33 bp, Homo sapien
gccacattgatgctgccgaatgccatttgtaag

SEQ ID NO: 713062 - DNA, 33 bp, Homo sapien
gccacattgatgctgctgaatgccatttgtaag

SEQ ID NO: 713063 - DNA, 33 bp, Homo sapien
aaagtgtagtaaaaccactgtgataaagaaaga

SEQ ID NO: 713064 - DNA, 33 bp, Homo sapien
aaagtgtagtaaaaccgctgtgataaagaaaga

SEQ ID NO: 713065 - DNA, 33 bp, Homo sapien
tcttccctaaactgacaactacttgattgccta

SEQ ID NO: 713066 - DNA, 33 bp, Homo sapien
tcttccctaaactgactactacttgattgccta

SEQ ID NO: 713067 - DNA, 33 bp, Homo sapien
aatagggctctactgacagtggttgatacaact

SEQ ID NO: 713068 - DNA, 33 bp, Homo sapien
aatagggctctactgatagtggttgatacaact

SEQ ID NO: 713069 - DNA, 33 bp, Homo sapien
gcacaagtataaaaaacgaactgagtttagggt

SEQ ID NO: 713070 - DNA, 33 bp, Homo sapien
gcacaagtataaaaaatgaactgagtttagggt

SEQ ID NO: 713071 - DNA, 33 bp, Homo sapien
aggaataattttgaccccatttctgtgaacagg

SEQ ID NO: 713072 - DNA, 33 bp, Homo sapien
aggaataattttgacctcatttctgtgaacagg

SEQ ID NO: 713073 - DNA, 33 bp, Homo sapien
gtactctcatattttgaacttctggagaaaata

SEQ ID NO: 713074 - DNA, 33 bp, Homo sapien
gtactctcatattttgcacttctggagaaaata

SEQ ID NO: 713075 - DNA, 33 bp, Homo sapien
tgacacttcaatttcactagcaatcataaaaat

SEQ ID NO: 713076 - DNA, 33 bp, Homo sapien
tgacacttcaatttcagtagcaatcataaaaat

SEQ ID NO: 713077 - DNA, 33 bp, Homo sapien
tttatgctaaatacaaatgaaaaccacaacaaa

SEQ ID NO: 713078 - DNA, 33 bp, Homo sapien
tttatgctaaatacaagtgaaaaccacaacaaa

SEQ ID NO: 713079 - DNA, 33 bp, Homo sapien
acactgcaatttctcactcgtaagtgggcatta

SEQ ID NO: 713080 - DNA, 33 bp, Homo sapien
acactgcaatttctcattcgtaagtgggcatta

SEQ ID NO: 713081 - DNA, 33 bp, Homo sapien
ctttccatgcaatgtgaactaaatagaagacct

SEQ ID NO: 713082 - DNA, 33 bp, Homo sapien
ctttccatgcaatgtggactaaatagaagacct

SEQ ID NO: 713083 - DNA, 33 bp, Homo sapien
gttttggctcagtgaaccaaacttacatctgac

SEQ ID NO: 713084 - DNA, 33 bp, Homo sapien
gttttggctcagtgaagcaaacttacatctgac

SEQ ID NO: 713085 - DNA, 33 bp, Homo sapien
taatgacactaaggtagctcgatgacagaattt

SEQ ID NO: 713086 - DNA, 33 bp, Homo sapien
taatgacactaaggtatctcgatgacagaattt

SEQ ID NO: 713087 - DNA, 33 bp, Homo sapien
taagccttctccatgccgaatagtccatttcac

SEQ ID NO: 713088 - DNA, 33 bp, Homo sapien
taagccttctccatgctgaatagtccatttcac

SEQ ID NO: 713089 - DNA, 33 bp, Homo sapien
tttgccctctcttccaacccgatttctttctta

SEQ ID NO: 713090 - DNA, 33 bp, Homo sapien
tttgccctctcttccagcccgatttctttctta

SEQ ID NO: 713091 - DNA, 33 bp, Homo sapien
actaagccctcaacagaagtttttgttccttag

SEQ ID NO: 713092 - DNA, 33 bp, Homo sapien
actaagccctcaacaggagtttttgttccttag

SEQ ID NO: 713093 - DNA, 33 bp, Homo sapien
aggcctgttatttccacctctcaattacttctc

SEQ ID NO: 713094 - DNA, 33 bp, Homo sapien
aggcctgttatttccatctctcaattacttctc

SEQ ID NO: 713095 - DNA, 33 bp, Homo sapien
ggaggggaatgacacacagtgagcctgtcaaag

SEQ ID NO: 713096 - DNA, 33 bp, Homo sapien
ggaggggaatgacacatagtgagcctgtcaaag

SEQ ID NO: 713097 - DNA, 33 bp, Homo sapien
taccaactagaggcacccatttcaacatttact

SEQ ID NO: 713098 - DNA, 33 bp, Homo sapien
taccaactagaggcactcatttcaacatttact

SEQ ID NO: 713099 - DNA, 33 bp, Homo sapien
ctcaaagaggctaggacggaaaaaatattatgc

SEQ ID NO: 713100 - DNA, 33 bp, Homo sapien
ctcaaagaggctaggatggaaaaaatattatgc

SEQ ID NO: 713101 - DNA, 33 bp, Homo sapien
tcaggcttcacatccccggaccagcccatgccc

SEQ ID NO: 713102 - DNA, 33 bp, Homo sapien
tcaggcttcacatccctggaccagcccatgccc

SEQ ID NO: 713103 - DNA, 33 bp, Homo sapien
gcgaggcctgctggaccgctgtgggtgctgccg

SEQ ID NO: 713104 - DNA, 33 bp, Homo sapien
gcgaggcctgctggactgctgtgggtgctgccg

SEQ ID NO: 713105 - DNA, 33 bp, Homo sapien
tgacccacaagcgggaacagtgccaaagaaatg

SEQ ID NO: 713106 - DNA, 33 bp, Homo sapien
tgacccacaagcgggagcagtgccaaagaaatg

SEQ ID NO: 713107 - DNA, 33 bp, Homo sapien
ttccagaggaaaaagcaacaaggtaccatccta

SEQ ID NO: 713108 - DNA, 33 bp, Homo sapien
ttccagaggaaaaagcgacaaggtaccatccta

SEQ ID NO: 713109 - DNA, 33 bp, Homo sapien
cctagaagcagacacaaccttcagcagacacta

SEQ ID NO: 713110 - DNA, 33 bp, Homo sapien
cctagaagcagacacagccttcagcagacacta

SEQ ID NO: 713111 - DNA, 33 bp, Homo sapien
cgggaatctcagaagaccatcaggtgatgatca

SEQ ID NO: 713112 - DNA, 33 bp, Homo sapien
cgggaatctcagaagatcatcaggtgatgatca

SEQ ID NO: 713113 - DNA, 33 bp, Homo sapien
ttttctatatgatgtactaacttacactcctag

SEQ ID NO: 713114 - DNA, 33 bp, Homo sapien
ttttctatatgatgtagtaacttacactcctag

SEQ ID NO: 713115 - DNA, 33 bp, Homo sapien
tgccaattaagccaccaaacagcttagggagtg

SEQ ID NO: 713116 - DNA, 33 bp, Homo sapien
tgccaattaagccaccgaacagcttagggagtg

SEQ ID NO: 713117 - DNA, 33 bp, Homo sapien
gttgatattttgggtcccgtaacagtcagctat

SEQ ID NO: 713118 - DNA, 33 bp, Homo sapien
gttgatattttgggtctcgtaacagtcagctat

SEQ ID NO: 713119 - DNA, 33 bp, Homo sapien
taataagctagcctgcaatagtgtaatgaatgc

SEQ ID NO: 713120 - DNA, 33 bp, Homo sapien
taataagctagcctgccatagtgtaatgaatgc

SEQ ID NO: 713121 - DNA, 33 bp, Homo sapien
ggaaaagccttcagtaaatgcaaaggccttgag

SEQ ID NO: 713122 - DNA, 33 bp, Homo sapien
ggaaaagccttcagtatatgcaaaggccttgag

SEQ ID NO: 713123 - DNA, 33 bp, Homo sapien
tataatttttctaggaaccatctacaatagaga

SEQ ID NO: 713124 - DNA, 33 bp, Homo sapien
tataatttttctaggagccatctacaatagaga

SEQ ID NO: 713125 - DNA, 33 bp, Homo sapien
ttgttcaagttacagcaataaaaaaacaaagca

SEQ ID NO: 713126 - DNA, 33 bp, Homo sapien
ttgttcaagttacagcgataaaaaaacaaagca

SEQ ID NO: 713127 - DNA, 33 bp, Homo sapien
aaaagacaaacgttgaagtaacattataattca

SEQ ID NO: 713128 - DNA, 33 bp, Homo sapien
aaaagacaaacgttgaggtaacattataattca

SEQ ID NO: 713129 - DNA, 33 bp, Homo sapien
ttttacctggatcctcaaaactgctagcttatc

SEQ ID NO: 713130 - DNA, 33 bp, Homo sapien
ttttacctggatcctcgaaactgctagcttatc

SEQ ID NO: 713131 - DNA, 33 bp, Homo sapien
tccctgtataacagctaagaccaattttaaaaa

SEQ ID NO: 713132 - DNA, 33 bp, Homo sapien
tccctgtataacagctgagaccaattttaaaaa

SEQ ID NO: 713133 - DNA, 33 bp, Homo sapien
ggcaagacttgcctcaatacgttgggaacttgc

SEQ ID NO: 713134 - DNA, 33 bp, Homo sapien
ggcaagacttgcctcagtacgttgggaacttgc

SEQ ID NO: 713135 - DNA, 33 bp, Homo sapien
ttctacctttctttcaacctcatctgtgttttc

SEQ ID NO: 713136 - DNA, 33 bp, Homo sapien
ttctacctttctttcagcctcatctgtgttttc

SEQ ID NO: 713137 - DNA, 33 bp, Homo sapien
ttagatatttagtgcacacaattttctgcaatc

SEQ ID NO: 713138 - DNA, 33 bp, Homo sapien
ttagatatttagtgcatacaattttctgcaatc

SEQ ID NO: 713139 - DNA, 33 bp, Homo sapien
aattgcaaagccctataacaataatttagcaat

SEQ ID NO: 713140 - DNA, 33 bp, Homo sapien
aattgcaaagccctatgacaataatttagcaat

SEQ ID NO: 713141 - DNA, 33 bp, Homo sapien
ttggagctggaaagccaactaaaaacctattaa

SEQ ID NO: 713142 - DNA, 33 bp, Homo sapien
ttggagctggaaagccgactaaaaacctattaa

SEQ ID NO: 713143 - DNA, 33 bp, Homo sapien
taattgtcaaagctacacttactatatgatatt

SEQ ID NO: 713144 - DNA, 33 bp, Homo sapien
taattgtcaaagctactcttactatatgatatt

SEQ ID NO: 713145 - DNA, 33 bp, Homo sapien
ttcatcaaagagctgcagaatacacattttttt

SEQ ID NO: 713146 - DNA, 33 bp, Homo sapien
ttcatcaaagagctgcggaatacacattttttt

SEQ ID NO: 713147 - DNA, 33 bp, Homo sapien
tatgtactctttgaccagaaatcttccttctag

SEQ ID NO: 713148 - DNA, 33 bp, Homo sapien
tatgtactctttgaccggaaatcttccttctag

SEQ ID NO: 713149 - DNA, 33 bp, Homo sapien
agcctatacccaaaacaaagtatatcagtatat

SEQ ID NO: 713150 - DNA, 33 bp, Homo sapien
agcctatacccaaaacgaagtatatcagtatat

SEQ ID NO: 713151 - DNA, 33 bp, Homo sapien
aagataattttctgacagccctggcaatgagag

SEQ ID NO: 713152 - DNA, 33 bp, Homo sapien
aagataattttctgacggccctggcaatgagag

SEQ ID NO: 713153 - DNA, 33 bp, Homo sapien
cagttgcagcatttacaaagtgtctgttttatg

SEQ ID NO: 713154 - DNA, 33 bp, Homo sapien
cagttgcagcatttacgaagtgtctgttttatg

SEQ ID NO: 713155 - DNA, 33 bp, Homo sapien
actgatgctgctcataccttgaagaagcaactg

SEQ ID NO: 713156 - DNA, 33 bp, Homo sapien
actgatgctgctcatatcttgaagaagcaactg

SEQ ID NO: 713157 - DNA, 33 bp, Homo sapien
ttttcatttctgtatacataacaagtcacctat

SEQ ID NO: 713158 - DNA, 33 bp, Homo sapien
ttttcatttctgtatatataacaagtcacctat

SEQ ID NO: 713159 - DNA, 33 bp, Homo sapien
attaccccttcatcccaatctttcctctttgca

SEQ ID NO: 713160 - DNA, 33 bp, Homo sapien
attaccccttcatcccgatctttcctctttgca

SEQ ID NO: 713161 - DNA, 33 bp, Homo sapien
atgaataattttagcacggttttcatatgtact

SEQ ID NO: 713162 - DNA, 33 bp, Homo sapien
atgaataattttagcatggttttcatatgtact

SEQ ID NO: 713163 - DNA, 33 bp, Homo sapien
ataaaattaggagccaggaaactgaacagacat

SEQ ID NO: 713164 - DNA, 33 bp, Homo sapien
ataaaattaggagccatgaaactgaacagacat

SEQ ID NO: 713165 - DNA, 33 bp, Homo sapien
atacaaatggttaaaaagtatgtgaaacaaaag

SEQ ID NO: 713166 - DNA, 33 bp, Homo sapien
atacaaatggttaaaaggtatgtgaaacaaaag

SEQ ID NO: 713167 - DNA, 33 bp, Homo sapien
taactaaccactgtcaaggagaatactctgggc

SEQ ID NO: 713168 - DNA, 33 bp, Homo sapien
taactaaccactgtcagggagaatactctgggc

SEQ ID NO: 713169 - DNA, 33 bp, Homo sapien
tcataattcccccaaaatgaactccagaagtga

SEQ ID NO: 713170 - DNA, 33 bp, Homo sapien
tcataattcccccaaagtgaactccagaagtga

SEQ ID NO: 713171 - DNA, 33 bp, Homo sapien
tccttccatagctttacacagttaacagattaa

SEQ ID NO: 713172 - DNA, 33 bp, Homo sapien
tccttccatagctttatacagttaacagattaa

SEQ ID NO: 713173 - DNA, 33 bp, Homo sapien
taattagtataatagaaagtctctgaatctgtg

SEQ ID NO: 713174 - DNA, 33 bp, Homo sapien
taattagtataatagagagtctctgaatctgtg

SEQ ID NO: 713175 - DNA, 33 bp, Homo sapien
agttgaagtgtctactcactgtttcaaatattt

SEQ ID NO: 713176 - DNA, 33 bp, Homo sapien
agttgaagtgtctacttactgtttcaaatattt

SEQ ID NO: 713177 - DNA, 33 bp, Homo sapien
gataataggcatctcaagggaggtaagtattgt

SEQ ID NO: 713178 - DNA, 33 bp, Homo sapien
gataataggcatctcaggggaggtaagtattgt

SEQ ID NO: 713179 - DNA, 33 bp, Homo sapien
tgtggagaaataggaccgcctttacactattgg

SEQ ID NO: 713180 - DNA, 33 bp, Homo sapien
tgtggagaaataggactgcctttacactattgg

SEQ ID NO: 713181 - DNA, 33 bp, Homo sapien
gctcttcaatgaccaacgggtgaatgaagaaat

SEQ ID NO: 713182 - DNA, 33 bp, Homo sapien
gctcttcaatgaccaatgggtgaatgaagaaat

SEQ ID NO: 713183 - DNA, 33 bp, Homo sapien
aattattttgtaacaacggcaatatcttggaaa

SEQ ID NO: 713184 - DNA, 33 bp, Homo sapien
aattattttgtaacaagggcaatatcttggaaa

SEQ ID NO: 713185 - DNA, 33 bp, Homo sapien
attcatgtagcataaagcaaaggcagcccttga

SEQ ID NO: 713186 - DNA, 33 bp, Homo sapien
attcatgtagcataaatcaaaggcagcccttga

SEQ ID NO: 713187 - DNA, 33 bp, Homo sapien
ttagatttagaacacactgggcttttaagtact

SEQ ID NO: 713188 - DNA, 33 bp, Homo sapien
ttagatttagaacacattgggcttttaagtact

SEQ ID NO: 713189 - DNA, 33 bp, Homo sapien
tgtctggccattcccacaccaaagagatgctat

SEQ ID NO: 713190 - DNA, 33 bp, Homo sapien
tgtctggccattcccataccaaagagatgctat

SEQ ID NO: 713191 - DNA, 33 bp, Homo sapien
taaaagcatgaaattaggagaactcgggcagca

SEQ ID NO: 713192 - DNA, 33 bp, Homo sapien
taaaagcatgaaattatgagaactcgggcagca

SEQ ID NO: 713193 - DNA, 33 bp, Homo sapien
ttttcagtgttggatacaagactcaaaccctga

SEQ ID NO: 713194 - DNA, 33 bp, Homo sapien
ttttcagtgttggatataagactcaaaccctga

SEQ ID NO: 713195 - DNA, 33 bp, Homo sapien
acactatgaggattcaaggtgtttctggtactg

SEQ ID NO: 713196 - DNA, 33 bp, Homo sapien
acactatgaggattcagggtgtttctggtactg

SEQ ID NO: 713197 - DNA, 33 bp, Homo sapien
tacttccctgcttcaacgatattcacaatagaa

SEQ ID NO: 713198 - DNA, 33 bp, Homo sapien
tacttccctgcttcaatgatattcacaatagaa

SEQ ID NO: 713199 - DNA, 33 bp, Homo sapien
tgttaaggagcaagtcaagattcccctccagtc

SEQ ID NO: 713200 - DNA, 33 bp, Homo sapien
tgttaaggagcaagtcgagattcccctccagtc

SEQ ID NO: 713201 - DNA, 33 bp, Homo sapien
ttaaatactaaggctcagaagaaatcctctcct

SEQ ID NO: 713202 - DNA, 33 bp, Homo sapien
ttaaatactaaggctcggaagaaatcctctcct

SEQ ID NO: 713203 - DNA, 33 bp, Homo sapien
gcataattcaaaaatacggtactctggatcaga

SEQ ID NO: 713204 - DNA, 33 bp, Homo sapien
gcataattcaaaaatagggtactctggatcaga

SEQ ID NO: 713205 - DNA, 33 bp, Homo sapien
tagaaaataatcgagccaggctcagtggctcat

SEQ ID NO: 713206 - DNA, 33 bp, Homo sapien
tagaaaataatcgagcgaggctcagtggctcat

SEQ ID NO: 713207 - DNA, 33 bp, Homo sapien
atgctgtggaccatagaccctgagacatgctct

SEQ ID NO: 713208 - DNA, 33 bp, Homo sapien
atgctgtggaccataggccctgagacatgctct

SEQ ID NO: 713209 - DNA, 33 bp, Homo sapien
cacattcactattatacaggcagcatttctagt

SEQ ID NO: 713210 - DNA, 33 bp, Homo sapien
cacattcactattatataggcagcatttctagt

SEQ ID NO: 713211 - DNA, 33 bp, Homo sapien
cacattttttatctgacatcttcaccacatgat

SEQ ID NO: 713212 - DNA, 33 bp, Homo sapien
cacattttttatctgatatcttcaccacatgat

SEQ ID NO: 713213 - DNA, 33 bp, Homo sapien
gaaaatatgcttcacaataaccctaggaagtgg

SEQ ID NO: 713214 - DNA, 33 bp, Homo sapien
gaaaatatgcttcacactaaccctaggaagtgg

SEQ ID NO: 713215 - DNA, 33 bp, Homo sapien
cttggatatttttatacagataacagctattca

SEQ ID NO: 713216 - DNA, 33 bp, Homo sapien
cttggatatttttatagagataacagctattca

SEQ ID NO: 713217 - DNA, 33 bp, Homo sapien
tagaaattagcagtcaaattaactggtttaact

SEQ ID NO: 713218 - DNA, 33 bp, Homo sapien
tagaaattagcagtcatattaactggtttaact

SEQ ID NO: 713219 - DNA, 33 bp, Homo sapien
tctttaagccattaagaaaaagtataaaacatc

SEQ ID NO: 713220 - DNA, 33 bp, Homo sapien
tctttaagccattaaggaaaagtataaaacatc

SEQ ID NO: 713221 - DNA, 33 bp, Homo sapien
gagtttggctagaaaaagaaactatgatgactg

SEQ ID NO: 713222 - DNA, 33 bp, Homo sapien
gagtttggctagaaaaggaaactatgatgactg

SEQ ID NO: 713223 - DNA, 33 bp, Homo sapien
ttataaggcactaatccatttctgaggcagaag

SEQ ID NO: 713224 - DNA, 33 bp, Homo sapien
ttataaggcactaatctatttctgaggcagaag

SEQ ID NO: 713225 - DNA, 33 bp, Homo sapien
caaggggttgagtgccacaggctgagtaactga

SEQ ID NO: 713226 - DNA, 33 bp, Homo sapien
caaggggttgagtgccgcaggctgagtaactga

SEQ ID NO: 713227 - DNA, 33 bp, Homo sapien
gattccttttcctcaacgtagactacagggctg

SEQ ID NO: 713228 - DNA, 33 bp, Homo sapien
gattccttttcctcaatgtagactacagggctg

SEQ ID NO: 713229 - DNA, 33 bp, Homo sapien
agtggagaggtgttccaaaatagagttgctcac

SEQ ID NO: 713230 - DNA, 33 bp, Homo sapien
agtggagaggtgttccgaaatagagttgctcac

SEQ ID NO: 713231 - DNA, 33 bp, Homo sapien
attcatgagctttggccaatgtgtacagtaatc

SEQ ID NO: 713232 - DNA, 33 bp, Homo sapien
attcatgagctttggctaatgtgtacagtaatc

SEQ ID NO: 713233 - DNA, 33 bp, Homo sapien
aacctcctctatgcaaagtactactcctgtatg

SEQ ID NO: 713234 - DNA, 33 bp, Homo sapien
aacctcctctatgcaaggtactactcctgtatg

SEQ ID NO: 713235 - DNA, 33 bp, Homo sapien
cataaaactgaaaaacagcaggtatatgaaagg

SEQ ID NO: 713236 - DNA, 33 bp, Homo sapien
cataaaactgaaaaacggcaggtatatgaaagg

SEQ ID NO: 713237 - DNA, 33 bp, Homo sapien
tttttatatatacactaagagacgacaatgaaa

SEQ ID NO: 713238 - DNA, 33 bp, Homo sapien
tttttatatatacactgagagacgacaatgaaa

SEQ ID NO: 713239 - DNA, 33 bp, Homo sapien
gcatggtttttcttccgatcagaacacccttcc

SEQ ID NO: 713240 - DNA, 33 bp, Homo sapien
gcatggtttttcttcctatcagaacacccttcc

SEQ ID NO: 713241 - DNA, 33 bp, Homo sapien
tatttactcaactaacaactgctaaaatcaatg

SEQ ID NO: 713242 - DNA, 33 bp, Homo sapien
tatttactcaactaactactgctaaaatcaatg

SEQ ID NO: 713243 - DNA, 33 bp, Homo sapien
aaaatgacagcttgtacgtagagttctgtcagg

SEQ ID NO: 713244 - DNA, 33 bp, Homo sapien
aaaatgacagcttgtatgtagagttctgtcagg

SEQ ID NO: 713245 - DNA, 33 bp, Homo sapien
tgcaatttcctgaagacatatggtgttgagcat

SEQ ID NO: 713246 - DNA, 33 bp, Homo sapien
tgcaatttcctgaagatatatggtgttgagcat

SEQ ID NO: 713247 - DNA, 33 bp, Homo sapien
tatattctctggtaacaggtgcaatacatgata

SEQ ID NO: 713248 - DNA, 33 bp, Homo sapien
tatattctctggtaacgggtgcaatacatgata

SEQ ID NO: 713249 - DNA, 33 bp, Homo sapien
tgccccacatcataaaacatggtactcgatttt

SEQ ID NO: 713250 - DNA, 33 bp, Homo sapien
tgccccacatcataaagcatggtactcgatttt

SEQ ID NO: 713251 - DNA, 33 bp, Homo sapien
tcggggttatggagcccaggattgtctaccgag

SEQ ID NO: 713252 - DNA, 33 bp, Homo sapien
tcggggttatggagcctaggattgtctaccgag

SEQ ID NO: 713253 - DNA, 33 bp, Homo sapien
tggagcagaaaagtggaatcactggaaatgcaa

SEQ ID NO: 713254 - DNA, 33 bp, Homo sapien
tggagcagaaaagtggtatcactggaaatgcaa

SEQ ID NO: 713255 - DNA, 33 bp, Homo sapien
agtcattaacccataaagttcccaaattatctc

SEQ ID NO: 713256 - DNA, 33 bp, Homo sapien
agtcattaacccataaggttcccaaattatctc

SEQ ID NO: 713257 - DNA, 33 bp, Homo sapien
taataaaaggcaacaacatttcctttgtatcaa

SEQ ID NO: 713258 - DNA, 33 bp, Homo sapien
taataaaaggcaacaatatttcctttgtatcaa

SEQ ID NO: 713259 - DNA, 33 bp, Homo sapien
ttcagctcagcaaataactactaagcaggtaat

SEQ ID NO: 713260 - DNA, 33 bp, Homo sapien
ttcagctcagcaaatatctactaagcaggtaat

SEQ ID NO: 713261 - DNA, 33 bp, Homo sapien
ctacatttgatgaataagtcattaagacagtct

SEQ ID NO: 713262 - DNA, 33 bp, Homo sapien
ctacatttgatgaatatgtcattaagacagtct

SEQ ID NO: 713263 - DNA, 33 bp, Homo sapien
cataaaagcaggaagacggtacaatgccaattg

SEQ ID NO: 713264 - DNA, 33 bp, Homo sapien
cataaaagcaggaagatggtacaatgccaattg

SEQ ID NO: 713265 - DNA, 33 bp, Homo sapien
ttagaacatacaatggaaagctttctatgtaaa

SEQ ID NO: 713266 - DNA, 33 bp, Homo sapien
ttagaacatacaatgggaagctttctatgtaaa

SEQ ID NO: 713267 - DNA, 33 bp, Homo sapien
tttctgatgtttagcaatgaagcaaatgaaata

SEQ ID NO: 713268 - DNA, 33 bp, Homo sapien
tttctgatgtttagcagtgaagcaaatgaaata

SEQ ID NO: 713269 - DNA, 33 bp, Homo sapien
tataatcattgggatgacaagcataacaaacat

SEQ ID NO: 713270 - DNA, 33 bp, Homo sapien
tataatcattgggatggcaagcataacaaacat

SEQ ID NO: 713271 - DNA, 33 bp, Homo sapien
cctgcttttactgttccgaaacctgctgttact

SEQ ID NO: 713272 - DNA, 33 bp, Homo sapien
cctgcttttactgttctgaaacctgctgttact

SEQ ID NO: 713273 - DNA, 33 bp, Homo sapien
cccagaaactatctaactggaatcagtgaaagg

SEQ ID NO: 713274 - DNA, 33 bp, Homo sapien
cccagaaactatctaattggaatcagtgaaagg

SEQ ID NO: 713275 - DNA, 33 bp, Homo sapien
aataaaatgtaggtataaaaagtagaagagtct

SEQ ID NO: 713276 - DNA, 33 bp, Homo sapien
aataaaatgtaggtatgaaaagtagaagagtct

SEQ ID NO: 713277 - DNA, 33 bp, Homo sapien
gtgaagtgcaaaagaacaggacaattggggtga

SEQ ID NO: 713278 - DNA, 33 bp, Homo sapien
gtgaagtgcaaaagaataggacaattggggtga

SEQ ID NO: 713279 - DNA, 33 bp, Homo sapien
tcatttacctggctgacgtaagaggaatttgat

SEQ ID NO: 713280 - DNA, 33 bp, Homo sapien
tcatttacctggctgatgtaagaggaatttgat

SEQ ID NO: 713281 - DNA, 33 bp, Homo sapien
agaacagtaaagcaacaaagtacactgtggata

SEQ ID NO: 713282 - DNA, 33 bp, Homo sapien
agaacagtaaagcaacgaagtacactgtggata

SEQ ID NO: 713283 - DNA, 33 bp, Homo sapien
tcaccataaaaggaaacttcttagatctgcatt

SEQ ID NO: 713284 - DNA, 33 bp, Homo sapien
tcaccataaaaggaaagttcttagatctgcatt

SEQ ID NO: 713285 - DNA, 33 bp, Homo sapien
acatcagttttattggcagcagactggcatagc

SEQ ID NO: 713286 - DNA, 33 bp, Homo sapien
acatcagttttattggtagcagactggcatagc

SEQ ID NO: 713287 - DNA, 33 bp, Homo sapien
aaagatagtcaaaatactaaagtgtgccttttc

SEQ ID NO: 713288 - DNA, 33 bp, Homo sapien
aaagatagtcaaaatattaaagtgtgccttttc

SEQ ID NO: 713289 - DNA, 33 bp, Homo sapien
aaatttcagtgttagactatctgtggctacatt

SEQ ID NO: 713290 - DNA, 33 bp, Homo sapien
aaatttcagtgttagattatctgtggctacatt

SEQ ID NO: 713291 - DNA, 33 bp, Homo sapien
cttcttgaactttctacgctacaaatttcagtg

SEQ ID NO: 713292 - DNA, 33 bp, Homo sapien
cttcttgaactttctatgctacaaatttcagtg

SEQ ID NO: 713293 - DNA, 33 bp, Homo sapien
tcacttccactcaatcaaaaccatccattgttg

SEQ ID NO: 713294 - DNA, 33 bp, Homo sapien
tcacttccactcaatcgaaaccatccattgttg

SEQ ID NO: 713295 - DNA, 33 bp, Homo sapien
taagctcataaaacacaagctggttattcctga

SEQ ID NO: 713296 - DNA, 33 bp, Homo sapien
taagctcataaaacactagctggttattcctga

SEQ ID NO: 713297 - DNA, 33 bp, Homo sapien
gaagaaatccataagcaaacgaatcaacttact

SEQ ID NO: 713298 - DNA, 33 bp, Homo sapien
gaagaaatccataagcgaacgaatcaacttact

SEQ ID NO: 713299 - DNA, 33 bp, Homo sapien
gtaattagcataagataaaccaatcattaataa

SEQ ID NO: 713300 - DNA, 33 bp, Homo sapien
gtaattagcataagatcaaccaatcattaataa

SEQ ID NO: 713301 - DNA, 33 bp, Homo sapien
cctctacatatacaagcacaaattttcctgctg

SEQ ID NO: 713302 - DNA, 33 bp, Homo sapien
cctctacatatacaagtacaaattttcctgctg

SEQ ID NO: 713303 - DNA, 33 bp, Homo sapien
aactatgaggcaaagaaacgccaaatatcattg

SEQ ID NO: 713304 - DNA, 33 bp, Homo sapien
aactatgaggcaaagacacgccaaatatcattg

SEQ ID NO: 713305 - DNA, 33 bp, Homo sapien
tgacagaggacaaagaaaatgaaggaaggcaat

SEQ ID NO: 713306 - DNA, 33 bp, Homo sapien
tgacagaggacaaagacaatgaaggaaggcaat

SEQ ID NO: 713307 - DNA, 33 bp, Homo sapien
ttttaaggcaagcacacctggatcaggtgggcc

SEQ ID NO: 713308 - DNA, 33 bp, Homo sapien
ttttaaggcaagcacatctggatcaggtgggcc

SEQ ID NO: 713309 - DNA, 33 bp, Homo sapien
ttgccattttatacaactgtacaaggactgcct

SEQ ID NO: 713310 - DNA, 33 bp, Homo sapien
ttgccattttatacaattgtacaaggactgcct

SEQ ID NO: 713311 - DNA, 33 bp, Homo sapien
actacttgggaaggaacgagataggcttacatc

SEQ ID NO: 713312 - DNA, 33 bp, Homo sapien
actacttgggaaggaatgagataggcttacatc

SEQ ID NO: 713313 - DNA, 33 bp, Homo sapien
gaatatataataggtacagagttccagtttggg

SEQ ID NO: 713314 - DNA, 33 bp, Homo sapien
gaatatataataggtagagagttccagtttggg

SEQ ID NO: 713315 - DNA, 33 bp, Homo sapien
acattgtctatcactacgaaatataaccttttg

SEQ ID NO: 713316 - DNA, 33 bp, Homo sapien
acattgtctatcactatgaaatataaccttttg

SEQ ID NO: 713317 - DNA, 33 bp, Homo sapien
tagggcatggatgatacagtttttgtctcttta

SEQ ID NO: 713318 - DNA, 33 bp, Homo sapien
tagggcatggatgatagagtttttgtctcttta

SEQ ID NO: 713319 - DNA, 33 bp, Homo sapien
aagtcggctccacagggcattaattccactata

SEQ ID NO: 713320 - DNA, 33 bp, Homo sapien
aagtcggctccacaggtcattaattccactata

SEQ ID NO: 713321 - DNA, 33 bp, Homo sapien
cctactattgacccagaatttaagtttatgaga

SEQ ID NO: 713322 - DNA, 33 bp, Homo sapien
cctactattgacccaggatttaagtttatgaga

SEQ ID NO: 713323 - DNA, 33 bp, Homo sapien
aaagcagcttatgctaccctagttgttgctagc

SEQ ID NO: 713324 - DNA, 33 bp, Homo sapien
aaagcagcttatgctatcctagttgttgctagc

SEQ ID NO: 713325 - DNA, 33 bp, Homo sapien
aaacctttggtgtctgaaggactttctgtgagg

SEQ ID NO: 713326 - DNA, 33 bp, Homo sapien
aaacctttggtgtctggaggactttctgtgagg

SEQ ID NO: 713327 - DNA, 33 bp, Homo sapien
gatctttgataaagtcaacaagagtatacactg

SEQ ID NO: 713328 - DNA, 33 bp, Homo sapien
gatctttgataaagtcgacaagagtatacactg

SEQ ID NO: 713329 - DNA, 33 bp, Homo sapien
gaaatctaaactctgcagaatcaggattaaaga

SEQ ID NO: 713330 - DNA, 33 bp, Homo sapien
gaaatctaaactctgcggaatcaggattaaaga

SEQ ID NO: 713331 - DNA, 33 bp, Homo sapien
atgcaaatgactaccaaaagtatgcaggagtag

SEQ ID NO: 713332 - DNA, 33 bp, Homo sapien
atgcaaatgactaccagaagtatgcaggagtag

SEQ ID NO: 713333 - DNA, 33 bp, Homo sapien
agtgataaagtcaacacattcatcatcatgtgt

SEQ ID NO: 713334 - DNA, 33 bp, Homo sapien
agtgataaagtcaacatattcatcatcatgtgt

SEQ ID NO: 713335 - DNA, 33 bp, Homo sapien
agaacatgggatgggacggacatactctcttgc

SEQ ID NO: 713336 - DNA, 33 bp, Homo sapien
agaacatgggatgggatggacatactctcttgc

SEQ ID NO: 713337 - DNA, 33 bp, Homo sapien
ggttcttcacatcgtcaataaacctttaaaact

SEQ ID NO: 713338 - DNA, 33 bp, Homo sapien
ggttcttcacatcgtcgataaacctttaaaact

SEQ ID NO: 713339 - DNA, 33 bp, Homo sapien
catacaaccagttgacgaaacttttggacatgg

SEQ ID NO: 713340 - DNA, 33 bp, Homo sapien
catacaaccagttgactaaacttttggacatgg

SEQ ID NO: 713341 - DNA, 33 bp, Homo sapien
tgagaatgaactaataaaggcatctcttaaatt

SEQ ID NO: 713342 - DNA, 33 bp, Homo sapien
tgagaatgaactaatacaggcatctcttaaatt

SEQ ID NO: 713343 - DNA, 33 bp, Homo sapien
aagtcttatttattgaaaagctgtgatatacaa

SEQ ID NO: 713344 - DNA, 33 bp, Homo sapien
aagtcttatttattgagaagctgtgatatacaa

SEQ ID NO: 713345 - DNA, 33 bp, Homo sapien
ttagtgtaaatattcacaccactgccagtttca

SEQ ID NO: 713346 - DNA, 33 bp, Homo sapien
ttagtgtaaatattcataccactgccagtttca

SEQ ID NO: 713347 - DNA, 33 bp, Homo sapien
acaacaagagtgaaacacaggagagtccctgag

SEQ ID NO: 713348 - DNA, 33 bp, Homo sapien
acaacaagagtgaaacgcaggagagtccctgag

SEQ ID NO: 713349 - DNA, 33 bp, Homo sapien
tcttgcctggaaagaacgtatgaggccttctca

SEQ ID NO: 713350 - DNA, 33 bp, Homo sapien
tcttgcctggaaagaatgtatgaggccttctca

SEQ ID NO: 713351 - DNA, 33 bp, Homo sapien
gacttgtaaaggaggcaatgtatgagatgaatc

SEQ ID NO: 713352 - DNA, 33 bp, Homo sapien
gacttgtaaaggaggcgatgtatgagatgaatc

SEQ ID NO: 713353 - DNA, 33 bp, Homo sapien
acctgttggaactacaccttgctgatggatagg

SEQ ID NO: 713354 - DNA, 33 bp, Homo sapien
acctgttggaactacatcttgctgatggatagg

SEQ ID NO: 713355 - DNA, 33 bp, Homo sapien
tttcatcacaatgcaaactctataaaaacagac

SEQ ID NO: 713356 - DNA, 33 bp, Homo sapien
tttcatcacaatgcaatctctataaaaacagac

SEQ ID NO: 713357 - DNA, 33 bp, Homo sapien
tatactatagctatccaaaagtatatatgctgg

SEQ ID NO: 713358 - DNA, 33 bp, Homo sapien
tatactatagctatccgaaagtatatatgctgg

SEQ ID NO: 713359 - DNA, 33 bp, Homo sapien
tatgccacttggatgccaaaggactggacccag

SEQ ID NO: 713360 - DNA, 33 bp, Homo sapien
tatgccacttggatgctaaaggactggacccag

SEQ ID NO: 713361 - DNA, 33 bp, Homo sapien
cttctaaatgcttttaagtgtcattaccctcaa

SEQ ID NO: 713362 - DNA, 33 bp, Homo sapien
cttctaaatgcttttaggtgtcattaccctcaa

SEQ ID NO: 713363 - DNA, 33 bp, Homo sapien
atgctccaaaagctaactctttcattgataagt

SEQ ID NO: 713364 - DNA, 33 bp, Homo sapien
atgctccaaaagctaattctttcattgataagt

SEQ ID NO: 713365 - DNA, 33 bp, Homo sapien
agcaaattgcaagacaactaatgagttttaatg

SEQ ID NO: 713366 - DNA, 33 bp, Homo sapien
agcaaattgcaagacagctaatgagttttaatg

SEQ ID NO: 713367 - DNA, 33 bp, Homo sapien
ctgaggggttacaggacggagtgaccaaagtgg

SEQ ID NO: 713368 - DNA, 33 bp, Homo sapien
ctgaggggttacaggatggagtgaccaaagtgg

SEQ ID NO: 713369 - DNA, 33 bp, Homo sapien
cccagtatgtggcatcaagtaagttctcaataa

SEQ ID NO: 713370 - DNA, 33 bp, Homo sapien
cccagtatgtggcatccagtaagttctcaataa

SEQ ID NO: 713371 - DNA, 33 bp, Homo sapien
ctgaagtgagcaataacggctgatccctgtccc

SEQ ID NO: 713372 - DNA, 33 bp, Homo sapien
ctgaagtgagcaataatggctgatccctgtccc

SEQ ID NO: 713373 - DNA, 33 bp, Homo sapien
ttaaataacctgctcaatatcacaaagccgagt

SEQ ID NO: 713374 - DNA, 33 bp, Homo sapien
ttaaataacctgctcagtatcacaaagccgagt

SEQ ID NO: 713375 - DNA, 33 bp, Homo sapien
atcaacaggaaatctacacaaactctgtaatgc

SEQ ID NO: 713376 - DNA, 33 bp, Homo sapien
atcaacaggaaatctatacaaactctgtaatgc

SEQ ID NO: 713377 - DNA, 33 bp, Homo sapien
tatgtgaacaaccttaaaccacttatatgggag

SEQ ID NO: 713378 - DNA, 33 bp, Homo sapien
tatgtgaacaaccttagaccacttatatgggag

SEQ ID NO: 713379 - DNA, 33 bp, Homo sapien
aataaatatcaacagacgtattcaggcacaaac

SEQ ID NO: 713380 - DNA, 33 bp, Homo sapien
aataaatatcaacagatgtattcaggcacaaac

SEQ ID NO: 713381 - DNA, 33 bp, Homo sapien
cctatgttgttcactgccaagccttgccacctt

SEQ ID NO: 713382 - DNA, 33 bp, Homo sapien
cctatgttgttcactgtcaagccttgccacctt

SEQ ID NO: 713383 - DNA, 33 bp, Homo sapien
gctaactagttttccaaaaatagtcatgacata

SEQ ID NO: 713384 - DNA, 33 bp, Homo sapien
gctaactagttttccagaaatagtcatgacata

SEQ ID NO: 713385 - DNA, 33 bp, Homo sapien
ctgcaacatggtagccaattaaaaaaaaagtaa

SEQ ID NO: 713386 - DNA, 33 bp, Homo sapien
ctgcaacatggtagccgattaaaaaaaaagtaa

SEQ ID NO: 713387 - DNA, 33 bp, Homo sapien
gcatataaagtggctaccaaaagagtatattac

SEQ ID NO: 713388 - DNA, 33 bp, Homo sapien
gcatataaagtggctatcaaaagagtatattac

SEQ ID NO: 713389 - DNA, 33 bp, Homo sapien
ggaaaaaacatgagaagcaaagctgaagtcaga

SEQ ID NO: 713390 - DNA, 33 bp, Homo sapien
ggaaaaaacatgagaatcaaagctgaagtcaga

SEQ ID NO: 713391 - DNA, 33 bp, Homo sapien
agtcatggtaatatgacagataaatgctgtgat

SEQ ID NO: 713392 - DNA, 33 bp, Homo sapien
agtcatggtaatatgatagataaatgctgtgat

SEQ ID NO: 713393 - DNA, 33 bp, Homo sapien
ggatcatctagaaataccttatgggctacatct

SEQ ID NO: 713394 - DNA, 33 bp, Homo sapien
ggatcatctagaaatatcttatgggctacatct

SEQ ID NO: 713395 - DNA, 33 bp, Homo sapien
gtgagaaatacacaaaattcacaagaagggcaa

SEQ ID NO: 713396 - DNA, 33 bp, Homo sapien
gtgagaaatacacaaacttcacaagaagggcaa

SEQ ID NO: 713397 - DNA, 33 bp, Homo sapien
atatccgttgtgaacactgattttaagcagagt

SEQ ID NO: 713398 - DNA, 33 bp, Homo sapien
atatccgttgtgaacattgattttaagcagagt

SEQ ID NO: 713399 - DNA, 33 bp, Homo sapien
tccaatcaacagtgagaactctagtcagctagt

SEQ ID NO: 713400 - DNA, 33 bp, Homo sapien
tccaatcaacagtgaggactctagtcagctagt

SEQ ID NO: 713401 - DNA, 33 bp, Homo sapien
caaagttatctatgcactccaatcaacagtgag

SEQ ID NO: 713402 - DNA, 33 bp, Homo sapien
caaagttatctatgcattccaatcaacagtgag

SEQ ID NO: 713403 - DNA, 33 bp, Homo sapien
aattctgactaaatccactgtctctgattaact

SEQ ID NO: 713404 - DNA, 33 bp, Homo sapien
aattctgactaaatccgctgtctctgattaact

SEQ ID NO: 713405 - DNA, 33 bp, Homo sapien
tagccctagaaggagacgaacctgattattccc

SEQ ID NO: 713406 - DNA, 33 bp, Homo sapien
tagccctagaaggagatgaacctgattattccc

SEQ ID NO: 713407 - DNA, 33 bp, Homo sapien
atctctagaatactaactgcagccaggagaacc

SEQ ID NO: 713408 - DNA, 33 bp, Homo sapien
atctctagaatactaattgcagccaggagaacc

SEQ ID NO: 713409 - DNA, 33 bp, Homo sapien
acctcaggaaaatcaacgtgggtgcagcatata

SEQ ID NO: 713410 - DNA, 33 bp, Homo sapien
acctcaggaaaatcaatgtgggtgcagcatata

SEQ ID NO: 713411 - DNA, 33 bp, Homo sapien
ttctgctgagattttacaggaaagtctgtttct

SEQ ID NO: 713412 - DNA, 33 bp, Homo sapien
ttctgctgagattttataggaaagtctgtttct

SEQ ID NO: 713413 - DNA, 33 bp, Homo sapien
cctgtctctgttctccgaatgcctttgaccgag

SEQ ID NO: 713414 - DNA, 33 bp, Homo sapien
cctgtctctgttctcctaatgcctttgaccgag

SEQ ID NO: 713415 - DNA, 33 bp, Homo sapien
agtcaagtacaggaacacttaatatcactgtat

SEQ ID NO: 713416 - DNA, 33 bp, Homo sapien
agtcaagtacaggaacccttaatatcactgtat

SEQ ID NO: 713417 - DNA, 33 bp, Homo sapien
tgtcttagaccagacaataaactaggaggcttt

SEQ ID NO: 713418 - DNA, 33 bp, Homo sapien
tgtcttagaccagacagtaaactaggaggcttt

SEQ ID NO: 713419 - DNA, 33 bp, Homo sapien
agaaggaaatttaaaaattcaggcagcaagggg

SEQ ID NO: 713420 - DNA, 33 bp, Homo sapien
agaaggaaatttaaaacttcaggcagcaagggg

SEQ ID NO: 713421 - DNA, 33 bp, Homo sapien
caatatccttgcaaataacccgggaatcttttt

SEQ ID NO: 713422 - DNA, 33 bp, Homo sapien
caatatccttgcaaattacccgggaatcttttt

SEQ ID NO: 713423 - DNA, 33 bp, Homo sapien
ctctagtttttggaacaatgtcattaagttttc

SEQ ID NO: 713424 - DNA, 33 bp, Homo sapien
ctctagtttttggaaccatgtcattaagttttc

SEQ ID NO: 713425 - DNA, 33 bp, Homo sapien
gcatgatttgtcactaaaaagtgttggatcact

SEQ ID NO: 713426 - DNA, 33 bp, Homo sapien
gcatgatttgtcactacaaagtgttggatcact

SEQ ID NO: 713427 - DNA, 33 bp, Homo sapien
tgtttgctattttcacagagttagtcagaaaaa

SEQ ID NO: 713428 - DNA, 33 bp, Homo sapien
tgtttgctattttcacggagttagtcagaaaaa

SEQ ID NO: 713429 - DNA, 33 bp, Homo sapien
gaatactaggtaaacacacatggaaacaaaagc

SEQ ID NO: 713430 - DNA, 33 bp, Homo sapien
gaatactaggtaaacatacatggaaacaaaagc

SEQ ID NO: 713431 - DNA, 33 bp, Homo sapien
gcacttgggttcatcacaatataatgtcaaaaa

SEQ ID NO: 713432 - DNA, 33 bp, Homo sapien
gcacttgggttcatcataatataatgtcaaaaa

SEQ ID NO: 713433 - DNA, 33 bp, Homo sapien
agggtatcaagttatacgttgcagcacaccact

SEQ ID NO: 713434 - DNA, 33 bp, Homo sapien
agggtatcaagttatatgttgcagcacaccact

SEQ ID NO: 713435 - DNA, 33 bp, Homo sapien
tactcattctcaacagaagcgtatttattttct

SEQ ID NO: 713436 - DNA, 33 bp, Homo sapien
tactcattctcaacaggagcgtatttattttct

SEQ ID NO: 713437 - DNA, 33 bp, Homo sapien
gccatactccaagctacggactgacagggacag

SEQ ID NO: 713438 - DNA, 33 bp, Homo sapien
gccatactccaagctatggactgacagggacag

SEQ ID NO: 713439 - DNA, 33 bp, Homo sapien
aaaggagatgggtgaaaggaatgtctttttctt

SEQ ID NO: 713440 - DNA, 33 bp, Homo sapien
aaaggagatgggtgaatggaatgtctttttctt

SEQ ID NO: 713441 - DNA, 33 bp, Homo sapien
cataagcttcaggctaggggtattctgggctaa

SEQ ID NO: 713442 - DNA, 33 bp, Homo sapien
cataagcttcaggctatgggtattctgggctaa

SEQ ID NO: 713443 - DNA, 33 bp, Homo sapien
aagtgataacccaaagcagtagatgctaagagg

SEQ ID NO: 713444 - DNA, 33 bp, Homo sapien
aagtgataacccaaagtagtagatgctaagagg

SEQ ID NO: 713445 - DNA, 33 bp, Homo sapien
ggaatgaggcatagcaatcggagggcctgaaca

SEQ ID NO: 713446 - DNA, 33 bp, Homo sapien
ggaatgaggcatagcagtcggagggcctgaaca

SEQ ID NO: 713447 - DNA, 33 bp, Homo sapien
atcctcgtaactgtataaggtgagttctcttat

SEQ ID NO: 713448 - DNA, 33 bp, Homo sapien
atcctcgtaactgtatgaggtgagttctcttat

SEQ ID NO: 713449 - DNA, 33 bp, Homo sapien
tacaaactcttgtaagaactatgaaggaaagat

SEQ ID NO: 713450 - DNA, 33 bp, Homo sapien
tacaaactcttgtaagcactatgaaggaaagat

SEQ ID NO: 713451 - DNA, 33 bp, Homo sapien
cccattaagttggggcacaaaactcttagccag

SEQ ID NO: 713452 - DNA, 33 bp, Homo sapien
cccattaagttggggcgcaaaactcttagccag

SEQ ID NO: 713453 - DNA, 33 bp, Homo sapien
ctctatgtggtaaagagaatatgttcttaaagt

SEQ ID NO: 713454 - DNA, 33 bp, Homo sapien
ctctatgtggtaaagataatatgttcttaaagt

SEQ ID NO: 713455 - DNA, 33 bp, Homo sapien
aggggtagtcaagacaacactttgcaatgtcag

SEQ ID NO: 713456 - DNA, 33 bp, Homo sapien
aggggtagtcaagacatcactttgcaatgtcag

SEQ ID NO: 713457 - DNA, 33 bp, Homo sapien
attgaagcagcaatgaaaactcaggccatgtaa

SEQ ID NO: 713458 - DNA, 33 bp, Homo sapien
attgaagcagcaatgagaactcaggccatgtaa

SEQ ID NO: 713459 - DNA, 33 bp, Homo sapien
ccacaaaaaggccttgaaagtttctcaggggga

SEQ ID NO: 713460 - DNA, 33 bp, Homo sapien
ccacaaaaaggccttggaagtttctcaggggga

SEQ ID NO: 713461 - DNA, 33 bp, Homo sapien
gacgccagcgacaggaagctaataccactgcta

SEQ ID NO: 713462 - DNA, 33 bp, Homo sapien
gacgccagcgacaggaggctaataccactgcta

SEQ ID NO: 713463 - DNA, 33 bp, Homo sapien
ctggcttttgtatcagaagtcaatttttacatt

SEQ ID NO: 713464 - DNA, 33 bp, Homo sapien
ctggcttttgtatcagcagtcaatttttacatt

SEQ ID NO: 713465 - DNA, 33 bp, Homo sapien
ttttcaacaaatattcaacaagaactcagtcag

SEQ ID NO: 713466 - DNA, 33 bp, Homo sapien
ttttcaacaaatattccacaagaactcagtcag

SEQ ID NO: 713467 - DNA, 33 bp, Homo sapien
tggaattagtaagtaccgagtaaatgtggtgta

SEQ ID NO: 713468 - DNA, 33 bp, Homo sapien
tggaattagtaagtactgagtaaatgtggtgta

SEQ ID NO: 713469 - DNA, 33 bp, Homo sapien
tggttacctttagtgacgaaatatacgaaataa

SEQ ID NO: 713470 - DNA, 33 bp, Homo sapien
tggttacctttagtgatgaaatatacgaaataa

SEQ ID NO: 713471 - DNA, 33 bp, Homo sapien
ggctggttaacattcacatcagttctcatacct

SEQ ID NO: 713472 - DNA, 33 bp, Homo sapien
ggctggttaacattcatatcagttctcatacct

SEQ ID NO: 713473 - DNA, 33 bp, Homo sapien
tgaaatgcttaatctccatttcccaagcaatta

SEQ ID NO: 713474 - DNA, 33 bp, Homo sapien
tgaaatgcttaatctctatttcccaagcaatta

SEQ ID NO: 713475 - DNA, 33 bp, Homo sapien
acctgcttaatgctacaaaaaacccatgaagaa

SEQ ID NO: 713476 - DNA, 33 bp, Homo sapien
acctgcttaatgctacgaaaaacccatgaagaa

SEQ ID NO: 713477 - DNA, 33 bp, Homo sapien
aatttataacaaaaaacttcaattgacctctga

SEQ ID NO: 713478 - DNA, 33 bp, Homo sapien
aatttataacaaaaaatttcaattgacctctga

SEQ ID NO: 713479 - DNA, 33 bp, Homo sapien
aataaattttgcaaggcatatttgttcaagctt

SEQ ID NO: 713480 - DNA, 33 bp, Homo sapien
aataaattttgcaaggtatatttgttcaagctt

SEQ ID NO: 713481 - DNA, 33 bp, Homo sapien
cagatacctcaaaatcggaacaagatgagttcc

SEQ ID NO: 713482 - DNA, 33 bp, Homo sapien
cagatacctcaaaatctgaacaagatgagttcc

SEQ ID NO: 713483 - DNA, 33 bp, Homo sapien
gcatcaaaatgctcaaagataattctggctcaa

SEQ ID NO: 713484 - DNA, 33 bp, Homo sapien
gcatcaaaatgctcaaggataattctggctcaa

SEQ ID NO: 713485 - DNA, 33 bp, Homo sapien
tctaacagcattaacactaatcagcttcactga

SEQ ID NO: 713486 - DNA, 33 bp, Homo sapien
tctaacagcattaacagtaatcagcttcactga

SEQ ID NO: 713487 - DNA, 33 bp, Homo sapien
gtgaccagagtcaaaacgcatattaaaaattca

SEQ ID NO: 713488 - DNA, 33 bp, Homo sapien
gtgaccagagtcaaaatgcatattaaaaattca

SEQ ID NO: 713489 - DNA, 33 bp, Homo sapien
gctacctaacccgctcaaccctttcagtctttc

SEQ ID NO: 713490 - DNA, 33 bp, Homo sapien
gctacctaacccgctcgaccctttcagtctttc

SEQ ID NO: 713491 - DNA, 33 bp, Homo sapien
taagagttgccatgtgaaaaagggattggacat

SEQ ID NO: 713492 - DNA, 33 bp, Homo sapien
taagagttgccatgtggaaaagggattggacat

SEQ ID NO: 713493 - DNA, 33 bp, Homo sapien
gggtatatgcatcctacggcagccttaggtcat

SEQ ID NO: 713494 - DNA, 33 bp, Homo sapien
gggtatatgcatcctatggcagccttaggtcat

SEQ ID NO: 713495 - DNA, 33 bp, Homo sapien
tctctggtaccattcagtatctttttacctttg

SEQ ID NO: 713496 - DNA, 33 bp, Homo sapien
tctctggtaccattcattatctttttacctttg

SEQ ID NO: 713497 - DNA, 33 bp, Homo sapien
agcaaagacttgcgatcaacttgggtgcctgcc

SEQ ID NO: 713498 - DNA, 33 bp, Homo sapien
agcaaagacttgcgatgaacttgggtgcctgcc

SEQ ID NO: 713499 - DNA, 33 bp, Homo sapien
tctttctcatgacacacctaccctcttgcctag

SEQ ID NO: 713500 - DNA, 33 bp, Homo sapien
tctttctcatgacacatctaccctcttgcctag

SEQ ID NO: 713501 - DNA, 33 bp, Homo sapien
actcaccctgagaaaaacagcatctttaaaaaa

SEQ ID NO: 713502 - DNA, 33 bp, Homo sapien
actcaccctgagaaaagcagcatctttaaaaaa

SEQ ID NO: 713503 - DNA, 33 bp, Homo sapien
ccaacataacaacagcaacaaagccaaacatgt

SEQ ID NO: 713504 - DNA, 33 bp, Homo sapien
ccaacataacaacagcgacaaagccaaacatgt

SEQ ID NO: 713505 - DNA, 33 bp, Homo sapien
tacatgatatgcaaaaatgaccttagtgtgttc

SEQ ID NO: 713506 - DNA, 33 bp, Homo sapien
tacatgatatgcaaaagtgaccttagtgtgttc

SEQ ID NO: 713507 - DNA, 33 bp, Homo sapien
atctttgattttccacaagaagtcatctcaatg

SEQ ID NO: 713508 - DNA, 33 bp, Homo sapien
atctttgattttccacgagaagtcatctcaatg

SEQ ID NO: 713509 - DNA, 33 bp, Homo sapien
ttcacattcagttttgaaacaatcttgaaataa

SEQ ID NO: 713510 - DNA, 33 bp, Homo sapien
ttcacattcagttttgcaacaatcttgaaataa

SEQ ID NO: 713511 - DNA, 33 bp, Homo sapien
tgtttgctgtggaatacaatttagggaagtaat

SEQ ID NO: 713512 - DNA, 33 bp, Homo sapien
tgtttgctgtggaatagaatttagggaagtaat

SEQ ID NO: 713513 - DNA, 33 bp, Homo sapien
ctgagtcgttgactccaaagtaataaactagtt

SEQ ID NO: 713514 - DNA, 33 bp, Homo sapien
ctgagtcgttgactccgaagtaataaactagtt

SEQ ID NO: 713515 - DNA, 33 bp, Homo sapien
agataaggcagcataaagctagacgttaatttt

SEQ ID NO: 713516 - DNA, 33 bp, Homo sapien
agataaggcagcataaggctagacgttaatttt

SEQ ID NO: 713517 - DNA, 33 bp, Homo sapien
aaataagaattccatacgcaagaggattgtatc

SEQ ID NO: 713518 - DNA, 33 bp, Homo sapien
aaataagaattccatatgcaagaggattgtatc

SEQ ID NO: 713519 - DNA, 33 bp, Homo sapien
aaagagagagaggatgcaattgactctagataa

SEQ ID NO: 713520 - DNA, 33 bp, Homo sapien
aaagagagagaggatgtaattgactctagataa

SEQ ID NO: 713521 - DNA, 33 bp, Homo sapien
caattgtcatccaaaaatacatatcatgaaaac

SEQ ID NO: 713522 - DNA, 33 bp, Homo sapien
caattgtcatccaaaagtacatatcatgaaaac

SEQ ID NO: 713523 - DNA, 33 bp, Homo sapien
ctatgctttagtcataaactgttgagaagatca

SEQ ID NO: 713524 - DNA, 33 bp, Homo sapien
ctatgctttagtcatacactgttgagaagatca

SEQ ID NO: 713525 - DNA, 33 bp, Homo sapien
tccttgtcacgtaccagatctcagaggaaaggt

SEQ ID NO: 713526 - DNA, 33 bp, Homo sapien
tccttgtcacgtaccatatctcagaggaaaggt

SEQ ID NO: 713527 - DNA, 33 bp, Homo sapien
aaatagctccactccacaggtgctaaagccatt

SEQ ID NO: 713528 - DNA, 33 bp, Homo sapien
aaatagctccactccataggtgctaaagccatt

SEQ ID NO: 713529 - DNA, 33 bp, Homo sapien
atgaactgaataagagacgtggatattcttttg

SEQ ID NO: 713530 - DNA, 33 bp, Homo sapien
atgaactgaataagaggcgtggatattcttttg

SEQ ID NO: 713531 - DNA, 33 bp, Homo sapien
aattctgagctttaaaaaccaacaattttctaa

SEQ ID NO: 713532 - DNA, 33 bp, Homo sapien
aattctgagctttaaataccaacaattttctaa

SEQ ID NO: 713533 - DNA, 33 bp, Homo sapien
ctgtatcacattttataacccagcctcagacat

SEQ ID NO: 713534 - DNA, 33 bp, Homo sapien
ctgtatcacattttattacccagcctcagacat

SEQ ID NO: 713535 - DNA, 33 bp, Homo sapien
ttgtgaaaagagctgactcaaaagagatgcata

SEQ ID NO: 713536 - DNA, 33 bp, Homo sapien
ttgtgaaaagagctgagtcaaaagagatgcata

SEQ ID NO: 713537 - DNA, 33 bp, Homo sapien
aagcagccatagacaaaacgtacgtgaataggc

SEQ ID NO: 713538 - DNA, 33 bp, Homo sapien
aagcagccatagacaatacgtacgtgaataggc

SEQ ID NO: 713539 - DNA, 33 bp, Homo sapien
gcaggtggcccaaatccgaactgccataaagtt

SEQ ID NO: 713540 - DNA, 33 bp, Homo sapien
gcaggtggcccaaatctgaactgccataaagtt

SEQ ID NO: 713541 - DNA, 33 bp, Homo sapien
aaccaggtagaagcaaaaaagatactaatcaag

SEQ ID NO: 713542 - DNA, 33 bp, Homo sapien
aaccaggtagaagcaacaaagatactaatcaag

SEQ ID NO: 713543 - DNA, 33 bp, Homo sapien
gtgttgtaatagccaacgtgtgaatttaaatgt

SEQ ID NO: 713544 - DNA, 33 bp, Homo sapien
gtgttgtaatagccaatgtgtgaatttaaatgt

SEQ ID NO: 713545 - DNA, 33 bp, Homo sapien
ttagttcattatttagaagatggcagcccctag

SEQ ID NO: 713546 - DNA, 33 bp, Homo sapien
ttagttcattatttagtagatggcagcccctag

SEQ ID NO: 713547 - DNA, 33 bp, Homo sapien
tgagcccactcattggcattatcttcaacatct

SEQ ID NO: 713548 - DNA, 33 bp, Homo sapien
tgagcccactcattggtattatcttcaacatct

SEQ ID NO: 713549 - DNA, 33 bp, Homo sapien
gggaagctaagcctgacattaaaaggactcggt

SEQ ID NO: 713550 - DNA, 33 bp, Homo sapien
gggaagctaagcctgagattaaaaggactcggt

SEQ ID NO: 713551 - DNA, 33 bp, Homo sapien
aatctcccggtgaatacactgtgaagctagaaa

SEQ ID NO: 713552 - DNA, 33 bp, Homo sapien
aatctcccggtgaatagactgtgaagctagaaa

SEQ ID NO: 713553 - DNA, 33 bp, Homo sapien
tgaaatcagtttacaccgggagtctgttgcatg

SEQ ID NO: 713554 - DNA, 33 bp, Homo sapien
tgaaatcagtttacactgggagtctgttgcatg

SEQ ID NO: 713555 - DNA, 33 bp, Homo sapien
aaactgtcccatgacaagaaggatggaagaagg

SEQ ID NO: 713556 - DNA, 33 bp, Homo sapien
aaactgtcccatgacaggaaggatggaagaagg

SEQ ID NO: 713557 - DNA, 33 bp, Homo sapien
tgaaggacagcttggaagtaaaagagtggaact

SEQ ID NO: 713558 - DNA, 33 bp, Homo sapien
tgaaggacagcttggaggtaaaagagtggaact

SEQ ID NO: 713559 - DNA, 33 bp, Homo sapien
aagctgtccttcaaacactacagtctgatttct

SEQ ID NO: 713560 - DNA, 33 bp, Homo sapien
aagctgtccttcaaactctacagtctgatttct

SEQ ID NO: 713561 - DNA, 33 bp, Homo sapien
taaagggcactactgacctaatgtgcaaatctt

SEQ ID NO: 713562 - DNA, 33 bp, Homo sapien
taaagggcactactgagctaatgtgcaaatctt

SEQ ID NO: 713563 - DNA, 33 bp, Homo sapien
ctgttacccacatttccatactcggatctcttt

SEQ ID NO: 713564 - DNA, 33 bp, Homo sapien
ctgttacccacatttctatactcggatctcttt

SEQ ID NO: 713565 - DNA, 33 bp, Homo sapien
ttaatgctatccaagacgtaacctgatttgcca

SEQ ID NO: 713566 - DNA, 33 bp, Homo sapien
ttaatgctatccaagatgtaacctgatttgcca

SEQ ID NO: 713567 - DNA, 33 bp, Homo sapien
ggagtctaaaatcagacgtgactttaatttatg

SEQ ID NO: 713568 - DNA, 33 bp, Homo sapien
ggagtctaaaatcagatgtgactttaatttatg

SEQ ID NO: 713569 - DNA, 33 bp, Homo sapien
actcgaggaatatatgcagcttttcaaatctaa

SEQ ID NO: 713570 - DNA, 33 bp, Homo sapien
actcgaggaatatatgtagcttttcaaatctaa

SEQ ID NO: 713571 - DNA, 33 bp, Homo sapien
tttagctctaactttccaacggctaaagcaaaa

SEQ ID NO: 713572 - DNA, 33 bp, Homo sapien
tttagctctaactttctaacggctaaagcaaaa

SEQ ID NO: 713573 - DNA, 33 bp, Homo sapien
aagatctaccattcaaagcaccattttagaagc

SEQ ID NO: 713574 - DNA, 33 bp, Homo sapien
aagatctaccattcaaggcaccattttagaagc

SEQ ID NO: 713575 - DNA, 33 bp, Homo sapien
agaacttcaaaaccacaaactcttagtggtagc

SEQ ID NO: 713576 - DNA, 33 bp, Homo sapien
agaacttcaaaaccacgaactcttagtggtagc

SEQ ID NO: 713577 - DNA, 33 bp, Homo sapien
tgaggttaaaaagaagaatgactatggataaat

SEQ ID NO: 713578 - DNA, 33 bp, Homo sapien
tgaggttaaaaagaagcatgactatggataaat

SEQ ID NO: 713579 - DNA, 33 bp, Homo sapien
taagcaatgatcagacaaatgaaaagctgtgta

SEQ ID NO: 713580 - DNA, 33 bp, Homo sapien
taagcaatgatcagacgaatgaaaagctgtgta

SEQ ID NO: 713581 - DNA, 33 bp, Homo sapien
cagctttgcctgttgaagacccaatacactacc

SEQ ID NO: 713582 - DNA, 33 bp, Homo sapien
cagctttgcctgttgatgacccaatacactacc

SEQ ID NO: 713583 - DNA, 33 bp, Homo sapien
ccagaccgcagtctaactcaaagcaggcaaagt

SEQ ID NO: 713584 - DNA, 33 bp, Homo sapien
ccagaccgcagtctaattcaaagcaggcaaagt

SEQ ID NO: 713585 - DNA, 33 bp, Homo sapien
taacaaaaattcaagacggagttcgctctgatg

SEQ ID NO: 713586 - DNA, 33 bp, Homo sapien
taacaaaaattcaagatggagttcgctctgatg

SEQ ID NO: 713587 - DNA, 33 bp, Homo sapien
ctgagaaagaaacagaatcagaaaggtaaagaa

SEQ ID NO: 713588 - DNA, 33 bp, Homo sapien
ctgagaaagaaacagactcagaaaggtaaagaa

SEQ ID NO: 713589 - DNA, 33 bp, Homo sapien
actatgaatcactagggatgtcataaattattc

SEQ ID NO: 713590 - DNA, 33 bp, Homo sapien
actatgaatcactaggtatgtcataaattattc

SEQ ID NO: 713591 - DNA, 33 bp, Homo sapien
cctttttaaatgtagacaactgtgaacacaagc

SEQ ID NO: 713592 - DNA, 33 bp, Homo sapien
cctttttaaatgtagataactgtgaacacaagc

SEQ ID NO: 713593 - DNA, 33 bp, Homo sapien
ttggttcacaatacccagaggaatattgactaa

SEQ ID NO: 713594 - DNA, 33 bp, Homo sapien
ttggttcacaatacccggaggaatattgactaa

SEQ ID NO: 713595 - DNA, 33 bp, Homo sapien
aaaggtcactcttcaaaatttctttggacacat

SEQ ID NO: 713596 - DNA, 33 bp, Homo sapien
aaaggtcactcttcaatatttctttggacacat

SEQ ID NO: 713597 - DNA, 33 bp, Homo sapien
ttattcttgtacttttcttttggtggccacaag

SEQ ID NO: 713598 - DNA, 33 bp, Homo sapien
ttattcttgtactttttttttggtggccacaag

SEQ ID NO: 713599 - DNA, 33 bp, Homo sapien
ccacaattattaatccattcaactgttggtata

SEQ ID NO: 713600 - DNA, 33 bp, Homo sapien
ccacaattattaatccgttcaactgttggtata

SEQ ID NO: 713601 - DNA, 33 bp, Homo sapien
gtattcttttgccagaacataccacaattatta

SEQ ID NO: 713602 - DNA, 33 bp, Homo sapien
gtattcttttgccagagcataccacaattatta

SEQ ID NO: 713603 - DNA, 33 bp, Homo sapien
atacctatcaacatataaaactgactggaaacc

SEQ ID NO: 713604 - DNA, 33 bp, Homo sapien
atacctatcaacatatgaaactgactggaaacc

SEQ ID NO: 713605 - DNA, 33 bp, Homo sapien
ttgtacagtcctgatacctgtgcaggccaatga

SEQ ID NO: 713606 - DNA, 33 bp, Homo sapien
ttgtacagtcctgatatctgtgcaggccaatga

SEQ ID NO: 713607 - DNA, 33 bp, Homo sapien
aatattacataacttaggttcaccagtaaatac

SEQ ID NO: 713608 - DNA, 33 bp, Homo sapien
aatattacataacttatgttcaccagtaaatac

SEQ ID NO: 713609 - DNA, 33 bp, Homo sapien
tgctgctggtgtagaactgcaagataagcagag

SEQ ID NO: 713610 - DNA, 33 bp, Homo sapien
tgctgctggtgtagaattgcaagataagcagag

SEQ ID NO: 713611 - DNA, 33 bp, Homo sapien
tactgtgttttcaatccactgttgatggaatct

SEQ ID NO: 713612 - DNA, 33 bp, Homo sapien
tactgtgttttcaatctactgttgatggaatct

SEQ ID NO: 713613 - DNA, 33 bp, Homo sapien
aacccctggattctaaagatcaattttcatagc

SEQ ID NO: 713614 - DNA, 33 bp, Homo sapien
aacccctggattctaaggatcaattttcatagc

SEQ ID NO: 713615 - DNA, 33 bp, Homo sapien
gaagcataaaaccttccaaacagtactgtacaa

SEQ ID NO: 713616 - DNA, 33 bp, Homo sapien
gaagcataaaaccttctaaacagtactgtacaa

SEQ ID NO: 713617 - DNA, 33 bp, Homo sapien
aaggacagaagaagcaagatttagatgtgaagt

SEQ ID NO: 713618 - DNA, 33 bp, Homo sapien
aaggacagaagaagcaggatttagatgtgaagt

SEQ ID NO: 713619 - DNA, 33 bp, Homo sapien
gacagagagaaaagccaaagaaccaggcagcat

SEQ ID NO: 713620 - DNA, 33 bp, Homo sapien
gacagagagaaaagccgaagaaccaggcagcat

SEQ ID NO: 713621 - DNA, 33 bp, Homo sapien
gagtcccatttcagacagagaatgaaacttgaa

SEQ ID NO: 713622 - DNA, 33 bp, Homo sapien
gagtcccatttcagacggagaatgaaacttgaa

SEQ ID NO: 713623 - DNA, 33 bp, Homo sapien
aaattagcaagcagaaactttattaggaagtgt

SEQ ID NO: 713624 - DNA, 33 bp, Homo sapien
aaattagcaagcagaagctttattaggaagtgt

SEQ ID NO: 713625 - DNA, 33 bp, Homo sapien
gaactaagcagtatgcccattgatttccaaaca

SEQ ID NO: 713626 - DNA, 33 bp, Homo sapien
gaactaagcagtatgctcattgatttccaaaca

SEQ ID NO: 713627 - DNA, 33 bp, Homo sapien
cacaacgggtgattcaaaaaagcgtaacataaa

SEQ ID NO: 713628 - DNA, 33 bp, Homo sapien
cacaacgggtgattcacaaaagcgtaacataaa

SEQ ID NO: 713629 - DNA, 33 bp, Homo sapien
taataactgtttgtagaaatattccaagtgggc

SEQ ID NO: 713630 - DNA, 33 bp, Homo sapien
taataactgtttgtagcaatattccaagtgggc

SEQ ID NO: 713631 - DNA, 33 bp, Homo sapien
tattttatcaaacatccattggctatgaatcat

SEQ ID NO: 713632 - DNA, 33 bp, Homo sapien
tattttatcaaacatctattggctatgaatcat

SEQ ID NO: 713633 - DNA, 33 bp, Homo sapien
gggcttgttctgtgacaacattctcgtctggct

SEQ ID NO: 713634 - DNA, 33 bp, Homo sapien
gggcttgttctgtgacgacattctcgtctggct

SEQ ID NO: 713635 - DNA, 33 bp, Homo sapien
ggactgtcaaagcaaaaatgtacgaaaggaagt

SEQ ID NO: 713636 - DNA, 33 bp, Homo sapien
ggactgtcaaagcaaagatgtacgaaaggaagt

SEQ ID NO: 713637 - DNA, 33 bp, Homo sapien
tgcagttgataggaaacgcttagtcaatgtccc

SEQ ID NO: 713638 - DNA, 33 bp, Homo sapien
tgcagttgataggaaatgcttagtcaatgtccc

SEQ ID NO: 713639 - DNA, 33 bp, Homo sapien
acagacaggttcaccactgggactaagaaacct

SEQ ID NO: 713640 - DNA, 33 bp, Homo sapien
acagacaggttcaccattgggactaagaaacct

SEQ ID NO: 713641 - DNA, 33 bp, Homo sapien
gaactagggaccagtcaactttctgcagatgtg

SEQ ID NO: 713642 - DNA, 33 bp, Homo sapien
gaactagggaccagtcgactttctgcagatgtg

SEQ ID NO: 713643 - DNA, 33 bp, Homo sapien
taccttatttatctgaacccattaccactatct

SEQ ID NO: 713644 - DNA, 33 bp, Homo sapien
taccttatttatctgagcccattaccactatct

SEQ ID NO: 713645 - DNA, 33 bp, Homo sapien
atgactttatgccgtacacttcagtaagcagat

SEQ ID NO: 713646 - DNA, 33 bp, Homo sapien
atgactttatgccgtatacttcagtaagcagat

SEQ ID NO: 713647 - DNA, 33 bp, Homo sapien
aaaggaagaggtcaaactatccttctttgcaga

SEQ ID NO: 713648 - DNA, 33 bp, Homo sapien
aaaggaagaggtcaaattatccttctttgcaga

SEQ ID NO: 713649 - DNA, 33 bp, Homo sapien
ttctgccttatagggacgactaggctatttgaa

SEQ ID NO: 713650 - DNA, 33 bp, Homo sapien
ttctgccttatagggatgactaggctatttgaa

SEQ ID NO: 713651 - DNA, 33 bp, Homo sapien
catttgtgatttgtgacgtacttgcattggtgc

SEQ ID NO: 713652 - DNA, 33 bp, Homo sapien
catttgtgatttgtgatgtacttgcattggtgc

SEQ ID NO: 713653 - DNA, 33 bp, Homo sapien
tggagatggctcatagacagggacgaagacaag

SEQ ID NO: 713654 - DNA, 33 bp, Homo sapien
tggagatggctcatagccagggacgaagacaag

SEQ ID NO: 713655 - DNA, 33 bp, Homo sapien
tgtcacaatgtaagccacaaagcatgtgacttc

SEQ ID NO: 713656 - DNA, 33 bp, Homo sapien
tgtcacaatgtaagccgcaaagcatgtgacttc

SEQ ID NO: 713657 - DNA, 33 bp, Homo sapien
ttggtagttccttgtggagttggctgaagcttc

SEQ ID NO: 713658 - DNA, 33 bp, Homo sapien
ttggtagttccttgtgtagttggctgaagcttc

SEQ ID NO: 713659 - DNA, 33 bp, Homo sapien
aatattagatgataacagtgtatttgaagtatg

SEQ ID NO: 713660 - DNA, 33 bp, Homo sapien
aatattagatgataacggtgtatttgaagtatg

SEQ ID NO: 713661 - DNA, 33 bp, Homo sapien
ttgctcttattcagcacggtgctctttcttatt

SEQ ID NO: 713662 - DNA, 33 bp, Homo sapien
ttgctcttattcagcatggtgctctttcttatt

SEQ ID NO: 713663 - DNA, 33 bp, Homo sapien
aaaggcacttctctaacggaaccaggagggcaa

SEQ ID NO: 713664 - DNA, 33 bp, Homo sapien
aaaggcacttctctaagggaaccaggagggcaa

SEQ ID NO: 713665 - DNA, 33 bp, Homo sapien
ttggtaccagacaggaaatgtaacccctccaag

SEQ ID NO: 713666 - DNA, 33 bp, Homo sapien
ttggtaccagacaggatatgtaacccctccaag

SEQ ID NO: 713667 - DNA, 33 bp, Homo sapien
ggagggcaattctctgaagaaaggtgcagctat

SEQ ID NO: 713668 - DNA, 33 bp, Homo sapien
ggagggcaattctctggagaaaggtgcagctat

SEQ ID NO: 713669 - DNA, 33 bp, Homo sapien
tgatttcctgcttagaccttggctgatacaggt

SEQ ID NO: 713670 - DNA, 33 bp, Homo sapien
tgatttcctgcttagatcttggctgatacaggt

SEQ ID NO: 713671 - DNA, 33 bp, Homo sapien
tcaagcatctcaaactgagaagagtgggcttca

SEQ ID NO: 713672 - DNA, 33 bp, Homo sapien
tcaagcatctcaaacttagaagagtgggcttca

SEQ ID NO: 713673 - DNA, 33 bp, Homo sapien
gcgatagaatttgacccacattgctaaaatgcc

SEQ ID NO: 713674 - DNA, 33 bp, Homo sapien
gcgatagaatttgacctacattgctaaaatgcc

SEQ ID NO: 713675 - DNA, 33 bp, Homo sapien
atcagaatcgaatgagaaaacaagaataacaca

SEQ ID NO: 713676 - DNA, 33 bp, Homo sapien
atcagaatcgaatgaggaaacaagaataacaca

SEQ ID NO: 713677 - DNA, 33 bp, Homo sapien
attaaactcaagatcactgaacaccatggcatg

SEQ ID NO: 713678 - DNA, 33 bp, Homo sapien
attaaactcaagatcattgaacaccatggcatg

SEQ ID NO: 713679 - DNA, 33 bp, Homo sapien
cactctctgaagataaacaataggcatttattt

SEQ ID NO: 713680 - DNA, 33 bp, Homo sapien
cactctctgaagataagcaataggcatttattt

SEQ ID NO: 713681 - DNA, 33 bp, Homo sapien
tgaagccatcactaagacctttctgagccccac

SEQ ID NO: 713682 - DNA, 33 bp, Homo sapien
tgaagccatcactaagccctttctgagccccac

SEQ ID NO: 713683 - DNA, 33 bp, Homo sapien
agagtttttctatacagattgttaggatgtcca

SEQ ID NO: 713684 - DNA, 33 bp, Homo sapien
agagtttttctatacatattgttaggatgtcca

SEQ ID NO: 713685 - DNA, 33 bp, Homo sapien
atctcccagatggaaacattagatcatgtagag

SEQ ID NO: 713686 - DNA, 33 bp, Homo sapien
atctcccagatggaaagattagatcatgtagag

SEQ ID NO: 713687 - DNA, 33 bp, Homo sapien
taaattgtttaccttcaatggaaatccaagtaa

SEQ ID NO: 713688 - DNA, 33 bp, Homo sapien
taaattgtttaccttcgatggaaatccaagtaa

SEQ ID NO: 713689 - DNA, 33 bp, Homo sapien
gagcctgcaccaaagacagtcatctagcatttg

SEQ ID NO: 713690 - DNA, 33 bp, Homo sapien
gagcctgcaccaaagatagtcatctagcatttg

SEQ ID NO: 713691 - DNA, 33 bp, Homo sapien
tgttttacaaaaattcccacagacataacttat

SEQ ID NO: 713692 - DNA, 33 bp, Homo sapien
tgttttacaaaaattctcacagacataacttat

SEQ ID NO: 713693 - DNA, 33 bp, Homo sapien
acagggcacagacccacacaagcattttgcaag

SEQ ID NO: 713694 - DNA, 33 bp, Homo sapien
acagggcacagacccatacaagcattttgcaag

SEQ ID NO: 713695 - DNA, 33 bp, Homo sapien
tcttcaataagaagtaacaacacagtgttctac

SEQ ID NO: 713696 - DNA, 33 bp, Homo sapien
tcttcaataagaagtatcaacacagtgttctac

SEQ ID NO: 713697 - DNA, 33 bp, Homo sapien
atgtggactttgtgacaagtagcaatggacttt

SEQ ID NO: 713698 - DNA, 33 bp, Homo sapien
atgtggactttgtgaccagtagcaatggacttt

SEQ ID NO: 713699 - DNA, 33 bp, Homo sapien
atttgatttttcttgcaaaatatgtgttctttg

SEQ ID NO: 713700 - DNA, 33 bp, Homo sapien
atttgatttttcttgcgaaatatgtgttctttg

SEQ ID NO: 713701 - DNA, 33 bp, Homo sapien
atgcagcaaatggaaaacaagattaatgagact

SEQ ID NO: 713702 - DNA, 33 bp, Homo sapien
atgcagcaaatggaaagcaagattaatgagact

SEQ ID NO: 713703 - DNA, 33 bp, Homo sapien
tttgagggttgtttaccactacctatgccagct

SEQ ID NO: 713704 - DNA, 33 bp, Homo sapien
tttgagggttgtttactactacctatgccagct

SEQ ID NO: 713705 - DNA, 33 bp, Homo sapien
ttttaatttgtgtttacgtaatgattagtgatg

SEQ ID NO: 713706 - DNA, 33 bp, Homo sapien
ttttaatttgtgtttatgtaatgattagtgatg

SEQ ID NO: 713707 - DNA, 33 bp, Homo sapien
aggaaactcagtgagacatctgtattacatttt

SEQ ID NO: 713708 - DNA, 33 bp, Homo sapien
aggaaactcagtgagatatctgtattacatttt

SEQ ID NO: 713709 - DNA, 33 bp, Homo sapien
ataatcactgaaccataacggcaggttcacatc

SEQ ID NO: 713710 - DNA, 33 bp, Homo sapien
ataatcactgaaccatgacggcaggttcacatc

SEQ ID NO: 713711 - DNA, 33 bp, Homo sapien
gatctggtaggcagtgaactcaacagcatcagg

SEQ ID NO: 713712 - DNA, 33 bp, Homo sapien
gatctggtaggcagtggactcaacagcatcagg

SEQ ID NO: 713713 - DNA, 33 bp, Homo sapien
cctcccttctctatcaaacaccttagtggaatc

SEQ ID NO: 713714 - DNA, 33 bp, Homo sapien
cctcccttctctatcagacaccttagtggaatc

SEQ ID NO: 713715 - DNA, 33 bp, Homo sapien
cctgtgatttcttcaacgataggatggcgaagc

SEQ ID NO: 713716 - DNA, 33 bp, Homo sapien
cctgtgatttcttcaatgataggatggcgaagc

SEQ ID NO: 713717 - DNA, 33 bp, Homo sapien
aaagatcattcattgccacgtacttaagtctct

SEQ ID NO: 713718 - DNA, 33 bp, Homo sapien
aaagatcattcattgctacgtacttaagtctct

SEQ ID NO: 713719 - DNA, 33 bp, Homo sapien
ttggcaatattgaagacgggtctgaaacaggtg

SEQ ID NO: 713720 - DNA, 33 bp, Homo sapien
ttggcaatattgaagatgggtctgaaacaggtg

SEQ ID NO: 713721 - DNA, 33 bp, Homo sapien
gagggtaattcatccacggttaaaggatagtaa

SEQ ID NO: 713722 - DNA, 33 bp, Homo sapien
gagggtaattcatccatggttaaaggatagtaa

SEQ ID NO: 713723 - DNA, 33 bp, Homo sapien
taaaatgactggcatacgacaagctacaatccc

SEQ ID NO: 713724 - DNA, 33 bp, Homo sapien
taaaatgactggcatatgacaagctacaatccc

SEQ ID NO: 713725 - DNA, 33 bp, Homo sapien
gggggcctgtcaaagaaaaccctctgtccaacc

SEQ ID NO: 713726 - DNA, 33 bp, Homo sapien
gggggcctgtcaaagagaaccctctgtccaacc

SEQ ID NO: 713727 - DNA, 33 bp, Homo sapien
caaaaagaatggagaacttaaaactggtctgac

SEQ ID NO: 713728 - DNA, 33 bp, Homo sapien
caaaaagaatggagaatttaaaactggtctgac

SEQ ID NO: 713729 - DNA, 33 bp, Homo sapien
tctctgactctgaccaactcttccactttttgc

SEQ ID NO: 713730 - DNA, 33 bp, Homo sapien
tctctgactctgaccatctcttccactttttgc

SEQ ID NO: 713731 - DNA, 33 bp, Homo sapien
aacaacaatgagaaaccaatatacagagaatgc

SEQ ID NO: 713732 - DNA, 33 bp, Homo sapien
aacaacaatgagaaactaatatacagagaatgc

SEQ ID NO: 713733 - DNA, 33 bp, Homo sapien
aggcctagtcaggaagaaagtttgatagagcct

SEQ ID NO: 713734 - DNA, 33 bp, Homo sapien
aggcctagtcaggaaggaagtttgatagagcct

SEQ ID NO: 713735 - DNA, 33 bp, Homo sapien
agctgtggtgttcgtcaagggaagcaggcagcc

SEQ ID NO: 713736 - DNA, 33 bp, Homo sapien
agctgtggtgttcgtcgagggaagcaggcagcc

SEQ ID NO: 713737 - DNA, 33 bp, Homo sapien
acaggctgaactcatcaccaccagcttagttta

SEQ ID NO: 713738 - DNA, 33 bp, Homo sapien
acaggctgaactcatcgccaccagcttagttta

SEQ ID NO: 713739 - DNA, 33 bp, Homo sapien
gaacaccatgataaatcatctttttttcctgtc

SEQ ID NO: 713740 - DNA, 33 bp, Homo sapien
gaacaccatgataaattatctttttttcctgtc

SEQ ID NO: 713741 - DNA, 33 bp, Homo sapien
accaagttgcactataaaacttaattcacctaa

SEQ ID NO: 713742 - DNA, 33 bp, Homo sapien
accaagttgcactatagaacttaattcacctaa

SEQ ID NO: 713743 - DNA, 33 bp, Homo sapien
ttctccgtattttaccgcacttcttgtcccagc

SEQ ID NO: 713744 - DNA, 33 bp, Homo sapien
ttctccgtattttacctcacttcttgtcccagc

SEQ ID NO: 713745 - DNA, 33 bp, Homo sapien
aattaaaataacacagccaactttgaaaatatc

SEQ ID NO: 713746 - DNA, 33 bp, Homo sapien
aattaaaataacacaggcaactttgaaaatatc

SEQ ID NO: 713747 - DNA, 33 bp, Homo sapien
taatagcctaatgcaacggagatagggtagaga

SEQ ID NO: 713748 - DNA, 33 bp, Homo sapien
taatagcctaatgcaagggagatagggtagaga

SEQ ID NO: 713749 - DNA, 33 bp, Homo sapien
gtttcccgtcattgtcccttctcttgctacttt

SEQ ID NO: 713750 - DNA, 33 bp, Homo sapien
gtttcccgtcattgtcgcttctcttgctacttt

SEQ ID NO: 713751 - DNA, 33 bp, Homo sapien
agcaaaattgtccaaacggttttgcagatattt

SEQ ID NO: 713752 - DNA, 33 bp, Homo sapien
agcaaaattgtccaaatggttttgcagatattt

SEQ ID NO: 713753 - DNA, 33 bp, Homo sapien
tgatgattaaaccacaccatgaccagtaaagtg

SEQ ID NO: 713754 - DNA, 33 bp, Homo sapien
tgatgattaaaccacatcatgaccagtaaagtg

SEQ ID NO: 713755 - DNA, 33 bp, Homo sapien
aagggtcagtaagtagaagtaacagaggcaatg

SEQ ID NO: 713756 - DNA, 33 bp, Homo sapien
aagggtcagtaagtaggagtaacagaggcaatg

SEQ ID NO: 713757 - DNA, 33 bp, Homo sapien
catattccagacactacgctaagtattttattt

SEQ ID NO: 713758 - DNA, 33 bp, Homo sapien
catattccagacactatgctaagtattttattt

SEQ ID NO: 713759 - DNA, 33 bp, Homo sapien
ttattatgacaacccaatgaagtagctattatt

SEQ ID NO: 713760 - DNA, 33 bp, Homo sapien
ttattatgacaacccagtgaagtagctattatt

SEQ ID NO: 713761 - DNA, 33 bp, Homo sapien
ttaagatcatttcatcaaatgcccactacatac

SEQ ID NO: 713762 - DNA, 33 bp, Homo sapien
ttaagatcatttcatccaatgcccactacatac

SEQ ID NO: 713763 - DNA, 33 bp, Homo sapien
agttctatagcagccacatatttaaaccaaagc

SEQ ID NO: 713764 - DNA, 33 bp, Homo sapien
agttctatagcagccagatatttaaaccaaagc

SEQ ID NO: 713765 - DNA, 33 bp, Homo sapien
caccttaggctcagaacgtagaacctgagcctc

SEQ ID NO: 713766 - DNA, 33 bp, Homo sapien
caccttaggctcagaatgtagaacctgagcctc

SEQ ID NO: 713767 - DNA, 33 bp, Homo sapien
tttccgccttatagtcaatgtgcacagtcttcc

SEQ ID NO: 713768 - DNA, 33 bp, Homo sapien
tttccgccttatagtcgatgtgcacagtcttcc

SEQ ID NO: 713769 - DNA, 33 bp, Homo sapien
ttaaatttgcaatcaaggtaaatacaattaata

SEQ ID NO: 713770 - DNA, 33 bp, Homo sapien
ttaaatttgcaatcaatgtaaatacaattaata

SEQ ID NO: 713771 - DNA, 33 bp, Homo sapien
gctctatcttatctccactaggatgccatccaa

SEQ ID NO: 713772 - DNA, 33 bp, Homo sapien
gctctatcttatctccgctaggatgccatccaa

SEQ ID NO: 713773 - DNA, 33 bp, Homo sapien
tttgatccaatagaaaacttagcttgatccttt

SEQ ID NO: 713774 - DNA, 33 bp, Homo sapien
tttgatccaatagaaaccttagcttgatccttt

SEQ ID NO: 713775 - DNA, 33 bp, Homo sapien
atctttttttttatcaagatggctttaatttaa

SEQ ID NO: 713776 - DNA, 33 bp, Homo sapien
atctttttttttatcaggatggctttaatttaa

SEQ ID NO: 713777 - DNA, 33 bp, Homo sapien
ccttgaagtcatcaaaatgctctgaatctaaag

SEQ ID NO: 713778 - DNA, 33 bp, Homo sapien
ccttgaagtcatcaaagtgctctgaatctaaag

SEQ ID NO: 713779 - DNA, 33 bp, Homo sapien
gtagccttcctggagacgatctcaccaacactt

SEQ ID NO: 713780 - DNA, 33 bp, Homo sapien
gtagccttcctggagatgatctcaccaacactt

SEQ ID NO: 713781 - DNA, 33 bp, Homo sapien
gcaagatgtatgattcccaattccaatacttac

SEQ ID NO: 713782 - DNA, 33 bp, Homo sapien
gcaagatgtatgattctcaattccaatacttac

SEQ ID NO: 713783 - DNA, 33 bp, Homo sapien
atacttacttactgctaagatttacaacaccct

SEQ ID NO: 713784 - DNA, 33 bp, Homo sapien
atacttacttactgctgagatttacaacaccct

SEQ ID NO: 713785 - DNA, 33 bp, Homo sapien
catcaccagctttaaaagcaaccataaattaag

SEQ ID NO: 713786 - DNA, 33 bp, Homo sapien
catcaccagctttaaaggcaaccataaattaag

SEQ ID NO: 713787 - DNA, 33 bp, Homo sapien
tgtattccaagccttcacctctacatctcctcc

SEQ ID NO: 713788 - DNA, 33 bp, Homo sapien
tgtattccaagccttcgcctctacatctcctcc

SEQ ID NO: 713789 - DNA, 33 bp, Homo sapien
actgtggtactgagcgcaggccattcttggtcc

SEQ ID NO: 713790 - DNA, 33 bp, Homo sapien
actgtggtactgagcgtaggccattcttggtcc

SEQ ID NO: 713791 - DNA, 33 bp, Homo sapien
taatatatagtatacacgatggaataccacaca

SEQ ID NO: 713792 - DNA, 33 bp, Homo sapien
taatatatagtatacatgatggaataccacaca

SEQ ID NO: 713793 - DNA, 33 bp, Homo sapien
ggaaatcgtctgtaaaggtacacatgggtataa

SEQ ID NO: 713794 - DNA, 33 bp, Homo sapien
ggaaatcgtctgtaaatgtacacatgggtataa

SEQ ID NO: 713795 - DNA, 33 bp, Homo sapien
tgtgtttttctacagaactcagagacgatccat

SEQ ID NO: 713796 - DNA, 33 bp, Homo sapien
tgtgtttttctacagagctcagagacgatccat

SEQ ID NO: 713797 - DNA, 33 bp, Homo sapien
ctttagaggtgcttaaaaggcttcttcataact

SEQ ID NO: 713798 - DNA, 33 bp, Homo sapien
ctttagaggtgcttaagaggcttcttcataact

SEQ ID NO: 713799 - DNA, 33 bp, Homo sapien
cattttgcttccaggtaaagaatgcctaagaaa

SEQ ID NO: 713800 - DNA, 33 bp, Homo sapien
cattttgcttccaggttaagaatgcctaagaaa

SEQ ID NO: 713801 - DNA, 33 bp, Homo sapien
acatcaaatcaaagtcaatacaagcattctggg

SEQ ID NO: 713802 - DNA, 33 bp, Homo sapien
acatcaaatcaaagtccatacaagcattctggg

SEQ ID NO: 713803 - DNA, 33 bp, Homo sapien
atgacagttagcagatcagagggaaactggtat

SEQ ID NO: 713804 - DNA, 33 bp, Homo sapien
atgacagttagcagatgagagggaaactggtat

SEQ ID NO: 713805 - DNA, 33 bp, Homo sapien
ttagtaagtactttcaaaatgagctttgtcttc

SEQ ID NO: 713806 - DNA, 33 bp, Homo sapien
ttagtaagtactttcacaatgagctttgtcttc

SEQ ID NO: 713807 - DNA, 33 bp, Homo sapien
ggtggctcagggcaccaaaagagagcgttccag

SEQ ID NO: 713808 - DNA, 33 bp, Homo sapien
ggtggctcagggcaccgaaagagagcgttccag

SEQ ID NO: 713809 - DNA, 33 bp, Homo sapien
ccaataaatatacatcacactaacagcatatgt

SEQ ID NO: 713810 - DNA, 33 bp, Homo sapien
ccaataaatatacatctcactaacagcatatgt

SEQ ID NO: 713811 - DNA, 33 bp, Homo sapien
gagatgacaagtattaaggaaaaacgtaattca

SEQ ID NO: 713812 - DNA, 33 bp, Homo sapien
gagatgacaagtattagggaaaaacgtaattca

SEQ ID NO: 713813 - DNA, 33 bp, Homo sapien
ggtgaagattcatgtcactttcacttagagtct

SEQ ID NO: 713814 - DNA, 33 bp, Homo sapien
ggtgaagattcatgtcgctttcacttagagtct

SEQ ID NO: 713815 - DNA, 33 bp, Homo sapien
gacagcaagaggatcacggagttttcaaataac

SEQ ID NO: 713816 - DNA, 33 bp, Homo sapien
gacagcaagaggatcatggagttttcaaataac

SEQ ID NO: 713817 - DNA, 33 bp, Homo sapien
gggtaatgatgatggaaagaagttgacctactc

SEQ ID NO: 713818 - DNA, 33 bp, Homo sapien
gggtaatgatgatggagagaagttgacctactc

SEQ ID NO: 713819 - DNA, 33 bp, Homo sapien
agattaccatgcaggaactgttctgagattagc

SEQ ID NO: 713820 - DNA, 33 bp, Homo sapien
agattaccatgcaggatctgttctgagattagc

SEQ ID NO: 713821 - DNA, 33 bp, Homo sapien
cgtcttaattagcaccaggtactctactttttt

SEQ ID NO: 713822 - DNA, 33 bp, Homo sapien
cgtcttaattagcaccgggtactctactttttt

SEQ ID NO: 713823 - DNA, 33 bp, Homo sapien
cccaaagataccctaacctcttcaccagtcaaa

SEQ ID NO: 713824 - DNA, 33 bp, Homo sapien
cccaaagataccctaatctcttcaccagtcaaa

SEQ ID NO: 713825 - DNA, 33 bp, Homo sapien
taagctggaaaataagacagtcacctgccttct

SEQ ID NO: 713826 - DNA, 33 bp, Homo sapien
taagctggaaaataagtcagtcacctgccttct

SEQ ID NO: 713827 - DNA, 33 bp, Homo sapien
gagtcaggcaactatactattatgccaaatagt

SEQ ID NO: 713828 - DNA, 33 bp, Homo sapien
gagtcaggcaactatattattatgccaaatagt

SEQ ID NO: 713829 - DNA, 33 bp, Homo sapien
gtggcttaagaaaacactaacgttggctgggca

SEQ ID NO: 713830 - DNA, 33 bp, Homo sapien
gtggcttaagaaaacattaacgttggctgggca

SEQ ID NO: 713831 - DNA, 33 bp, Homo sapien
gttctggagcccaaaagtctggagtcaaggcat

SEQ ID NO: 713832 - DNA, 33 bp, Homo sapien
gttctggagcccaaaattctggagtcaaggcat

SEQ ID NO: 713833 - DNA, 33 bp, Homo sapien
gtttgctgtggacaggccactaattccagctta

SEQ ID NO: 713834 - DNA, 33 bp, Homo sapien
gtttgctgtggacaggtcactaattccagctta

SEQ ID NO: 713835 - DNA, 33 bp, Homo sapien
tctgcacagcatgatacgtgccagaatggagac

SEQ ID NO: 713836 - DNA, 33 bp, Homo sapien
tctgcacagcatgataggtgccagaatggagac

SEQ ID NO: 713837 - DNA, 33 bp, Homo sapien
tctatgaccttgtacccgaatactgatgttgct

SEQ ID NO: 713838 - DNA, 33 bp, Homo sapien
tctatgaccttgtacctgaatactgatgttgct

SEQ ID NO: 713839 - DNA, 33 bp, Homo sapien
cattttataaaagctacatggatgtcatggtgc

SEQ ID NO: 713840 - DNA, 33 bp, Homo sapien
cattttataaaagctatatggatgtcatggtgc

SEQ ID NO: 713841 - DNA, 33 bp, Homo sapien
ccattgtgccttgctcactacattaattccaga

SEQ ID NO: 713842 - DNA, 33 bp, Homo sapien
ccattgtgccttgctcgctacattaattccaga

SEQ ID NO: 713843 - DNA, 33 bp, Homo sapien
tgtgaaagtatcttataagtagggactctgtct

SEQ ID NO: 713844 - DNA, 33 bp, Homo sapien
tgtgaaagtatcttatgagtagggactctgtct

SEQ ID NO: 713845 - DNA, 33 bp, Homo sapien
tctctcatcctgctgagccaagtcacatttcgc

SEQ ID NO: 713846 - DNA, 33 bp, Homo sapien
tctctcatcctgctgatccaagtcacatttcgc

SEQ ID NO: 713847 - DNA, 33 bp, Homo sapien
ccttttgaaagtgttacgactgtatttcatggt

SEQ ID NO: 713848 - DNA, 33 bp, Homo sapien
ccttttgaaagtgttatgactgtatttcatggt

SEQ ID NO: 713849 - DNA, 33 bp, Homo sapien
aaaatgtaattcatagcatactcatctcgtaag

SEQ ID NO: 713850 - DNA, 33 bp, Homo sapien
aaaatgtaattcatagtatactcatctcgtaag

SEQ ID NO: 713851 - DNA, 33 bp, Homo sapien
actgagctggcccaaaaagaaaccagcgtggag

SEQ ID NO: 713852 - DNA, 33 bp, Homo sapien
actgagctggcccaaagagaaaccagcgtggag

SEQ ID NO: 713853 - DNA, 33 bp, Homo sapien
ggaaatatttgatacaaccactctgtaatcaca

SEQ ID NO: 713854 - DNA, 33 bp, Homo sapien
ggaaatatttgatacatccactctgtaatcaca

SEQ ID NO: 713855 - DNA, 33 bp, Homo sapien
tcctactaaaaaacaacttccacactgctgccc

SEQ ID NO: 713856 - DNA, 33 bp, Homo sapien
tcctactaaaaaacaatttccacactgctgccc

SEQ ID NO: 713857 - DNA, 33 bp, Homo sapien
cacatgggtatgtgggaaagggaaggagataac

SEQ ID NO: 713858 - DNA, 33 bp, Homo sapien
cacatgggtatgtggggaagggaaggagataac

SEQ ID NO: 713859 - DNA, 33 bp, Homo sapien
atgatagtcatgtaaaagtgcttgaggttagca

SEQ ID NO: 713860 - DNA, 33 bp, Homo sapien
atgatagtcatgtaaatgtgcttgaggttagca

SEQ ID NO: 713861 - DNA, 33 bp, Homo sapien
tacccattactgcaatcaatttcagaacatttg

SEQ ID NO: 713862 - DNA, 33 bp, Homo sapien
tacccattactgcaatgaatttcagaacatttg

SEQ ID NO: 713863 - DNA, 33 bp, Homo sapien
tcttcaggaggcatcaacttctaactcatctca

SEQ ID NO: 713864 - DNA, 33 bp, Homo sapien
tcttcaggaggcatcagcttctaactcatctca

SEQ ID NO: 713865 - DNA, 33 bp, Homo sapien
aataaaagaaaaagcaagagccagctatagata

SEQ ID NO: 713866 - DNA, 33 bp, Homo sapien
aataaaagaaaaagcaggagccagctatagata

SEQ ID NO: 713867 - DNA, 33 bp, Homo sapien
tccagagtagcctctacaattcacggtcctctg

SEQ ID NO: 713868 - DNA, 33 bp, Homo sapien
tccagagtagcctctataattcacggtcctctg

SEQ ID NO: 713869 - DNA, 33 bp, Homo sapien
agttttagaagtgagaataagaggcaacatttc

SEQ ID NO: 713870 - DNA, 33 bp, Homo sapien
agttttagaagtgagagtaagaggcaacatttc

SEQ ID NO: 713871 - DNA, 33 bp, Homo sapien
gagtagttgatctcacacaacgggtgatctcac

SEQ ID NO: 713872 - DNA, 33 bp, Homo sapien
gagtagttgatctcacgcaacgggtgatctcac

SEQ ID NO: 713873 - DNA, 33 bp, Homo sapien
ttgtatatttgaagcactgagagaaattaatat

SEQ ID NO: 713874 - DNA, 33 bp, Homo sapien
ttgtatatttgaagcattgagagaaattaatat

SEQ ID NO: 713875 - DNA, 33 bp, Homo sapien
cacatttaagtgcccacgttttagctaaattag

SEQ ID NO: 713876 - DNA, 33 bp, Homo sapien
cacatttaagtgcccatgttttagctaaattag

SEQ ID NO: 713877 - DNA, 33 bp, Homo sapien
gagctacctcttcttgcaaaggacctatttaag

SEQ ID NO: 713878 - DNA, 33 bp, Homo sapien
gagctacctcttcttgtaaaggacctatttaag

SEQ ID NO: 713879 - DNA, 33 bp, Homo sapien
tcagcagttgtggtatcagaattgctcttcaaa

SEQ ID NO: 713880 - DNA, 33 bp, Homo sapien
tcagcagttgtggtattagaattgctcttcaaa

SEQ ID NO: 713881 - DNA, 33 bp, Homo sapien
gagactgcatctcaaaataaaataaaataaagt

SEQ ID NO: 713882 - DNA, 33 bp, Homo sapien
gagactgcatctcaaagtaaaataaaataaagt

SEQ ID NO: 713883 - DNA, 33 bp, Homo sapien
tagagatgactggttcaacaacccaagttcttt

SEQ ID NO: 713884 - DNA, 33 bp, Homo sapien
tagagatgactggttctacaacccaagttcttt

SEQ ID NO: 713885 - DNA, 33 bp, Homo sapien
ctggctggctcaactaactaccccttatactca

SEQ ID NO: 713886 - DNA, 33 bp, Homo sapien
ctggctggctcaactacctaccccttatactca

SEQ ID NO: 713887 - DNA, 33 bp, Homo sapien
cctgagttctcttaaacgtgcgagggtgttaca

SEQ ID NO: 713888 - DNA, 33 bp, Homo sapien
cctgagttctcttaaatgtgcgagggtgttaca

SEQ ID NO: 713889 - DNA, 33 bp, Homo sapien
gtctttaacaatgacaataacaatcctagagga

SEQ ID NO: 713890 - DNA, 33 bp, Homo sapien
gtctttaacaatgacagtaacaatcctagagga

SEQ ID NO: 713891 - DNA, 33 bp, Homo sapien
cacagcactccatcacaaagtgatcatcagcta

SEQ ID NO: 713892 - DNA, 33 bp, Homo sapien
cacagcactccatcacgaagtgatcatcagcta

SEQ ID NO: 713893 - DNA, 33 bp, Homo sapien
aattaagtaggggacacctgtatggcaaaggac

SEQ ID NO: 713894 - DNA, 33 bp, Homo sapien
aattaagtaggggacatctgtatggcaaaggac

SEQ ID NO: 713895 - DNA, 33 bp, Homo sapien
gtggtgcttagaggatgaaatttgctctttggg

SEQ ID NO: 713896 - DNA, 33 bp, Homo sapien
gtggtgcttagaggattaaatttgctctttggg

SEQ ID NO: 713897 - DNA, 33 bp, Homo sapien
ttggcagcagttaatacgccctgtgcctaacat

SEQ ID NO: 713898 - DNA, 33 bp, Homo sapien
ttggcagcagttaatatgccctgtgcctaacat

SEQ ID NO: 713899 - DNA, 33 bp, Homo sapien
agtaaagatcgaaagcaaggccatctagtttta

SEQ ID NO: 713900 - DNA, 33 bp, Homo sapien
agtaaagatcgaaagcgaggccatctagtttta

SEQ ID NO: 713901 - DNA, 33 bp, Homo sapien
ggcaccatcagctccaagagtaaaaatttatag

SEQ ID NO: 713902 - DNA, 33 bp, Homo sapien
ggcaccatcagctccaggagtaaaaatttatag

SEQ ID NO: 713903 - DNA, 33 bp, Homo sapien
ggatcagttcagtaaccaattaagcaagacaag

SEQ ID NO: 713904 - DNA, 33 bp, Homo sapien
ggatcagttcagtaacgaattaagcaagacaag

SEQ ID NO: 713905 - DNA, 33 bp, Homo sapien
accattaaaattcctacgcttatgccttgaaga

SEQ ID NO: 713906 - DNA, 33 bp, Homo sapien
accattaaaattcctatgcttatgccttgaaga

SEQ ID NO: 713907 - DNA, 33 bp, Homo sapien
caattcctgacaacgaatcatttattcagaaat

SEQ ID NO: 713908 - DNA, 33 bp, Homo sapien
caattcctgacaacgattcatttattcagaaat

SEQ ID NO: 713909 - DNA, 33 bp, Homo sapien
ccgcttttattcaacaacaataactgggcatct

SEQ ID NO: 713910 - DNA, 33 bp, Homo sapien
ccgcttttattcaacagcaataactgggcatct

SEQ ID NO: 713911 - DNA, 33 bp, Homo sapien
tatttgaaattcgcacactattctagtctaacc

SEQ ID NO: 713912 - DNA, 33 bp, Homo sapien
tatttgaaattcgcaccctattctagtctaacc

SEQ ID NO: 713913 - DNA, 33 bp, Homo sapien
ggactgcagaaggaagacacgggctagtgtacg

SEQ ID NO: 713914 - DNA, 33 bp, Homo sapien
ggactgcagaaggaagtcacgggctagtgtacg

SEQ ID NO: 713915 - DNA, 33 bp, Homo sapien
agacaccaagcaggaactctatgttcaagaggt

SEQ ID NO: 713916 - DNA, 33 bp, Homo sapien
agacaccaagcaggaattctatgttcaagaggt

SEQ ID NO: 713917 - DNA, 33 bp, Homo sapien
ttctcctttcttcttccagcctttcagccagtt

SEQ ID NO: 713918 - DNA, 33 bp, Homo sapien
ttctcctttcttcttcgagcctttcagccagtt

SEQ ID NO: 713919 - DNA, 33 bp, Homo sapien
cttttgcagggcaaagccttcacagccccagct

SEQ ID NO: 713920 - DNA, 33 bp, Homo sapien
cttttgcagggcaaagtcttcacagccccagct

SEQ ID NO: 713921 - DNA, 33 bp, Homo sapien
gcagattttttaaaaccaagaacattctatcct

SEQ ID NO: 713922 - DNA, 33 bp, Homo sapien
gcagattttttaaaacgaagaacattctatcct

SEQ ID NO: 713923 - DNA, 33 bp, Homo sapien
gggagtccagtgttgacctggatagacttataa

SEQ ID NO: 713924 - DNA, 33 bp, Homo sapien
gggagtccagtgttgagctggatagacttataa

SEQ ID NO: 713925 - DNA, 33 bp, Homo sapien
gggccaggaaactcaaacagtatggccatgaca

SEQ ID NO: 713926 - DNA, 33 bp, Homo sapien
gggccaggaaactcaagcagtatggccatgaca

SEQ ID NO: 713927 - DNA, 33 bp, Homo sapien
tgagctaagtgctggcaatacaaagacaagtta

SEQ ID NO: 713928 - DNA, 33 bp, Homo sapien
tgagctaagtgctggcgatacaaagacaagtta

SEQ ID NO: 713929 - DNA, 33 bp, Homo sapien
agcagtagccactccagtaatgcatgcagtcat

SEQ ID NO: 713930 - DNA, 33 bp, Homo sapien
agcagtagccactccattaatgcatgcagtcat

SEQ ID NO: 713931 - DNA, 33 bp, Homo sapien
ttgatgggtcacaatacacctctggattatctt

SEQ ID NO: 713932 - DNA, 33 bp, Homo sapien
ttgatgggtcacaatatacctctggattatctt

SEQ ID NO: 713933 - DNA, 33 bp, Homo sapien
agagcacattagtggtaaataccaggaagaaaa

SEQ ID NO: 713934 - DNA, 33 bp, Homo sapien
agagcacattagtggtgaataccaggaagaaaa

SEQ ID NO: 713935 - DNA, 33 bp, Homo sapien
acacgagctggcttaacgggcagcctaacctgc

SEQ ID NO: 713936 - DNA, 33 bp, Homo sapien
acacgagctggcttaatgggcagcctaacctgc

SEQ ID NO: 713937 - DNA, 33 bp, Homo sapien
ctttcctgcagtgacacccagtccggcaacagc

SEQ ID NO: 713938 - DNA, 33 bp, Homo sapien
ctttcctgcagtgacatccagtccggcaacagc

SEQ ID NO: 713939 - DNA, 33 bp, Homo sapien
tcctacatgggcaccaatccaagaggtaagcat

SEQ ID NO: 713940 - DNA, 33 bp, Homo sapien
tcctacatgggcaccagtccaagaggtaagcat

SEQ ID NO: 713941 - DNA, 33 bp, Homo sapien
attgtcaacattttacaataattggaagctcag

SEQ ID NO: 713942 - DNA, 33 bp, Homo sapien
attgtcaacattttaccataattggaagctcag

SEQ ID NO: 713943 - DNA, 33 bp, Homo sapien
cattccaaaccaagaccgaacctgttagagtgg

SEQ ID NO: 713944 - DNA, 33 bp, Homo sapien
cattccaaaccaagactgaacctgttagagtgg

SEQ ID NO: 713945 - DNA, 33 bp, Homo sapien
tgagtgttcatagatacgcagagaggaagtcac

SEQ ID NO: 713946 - DNA, 33 bp, Homo sapien
tgagtgttcatagataggcagagaggaagtcac

SEQ ID NO: 713947 - DNA, 33 bp, Homo sapien
actagccaggtgtggaagtgaatacctgtagtc

SEQ ID NO: 713948 - DNA, 33 bp, Homo sapien
actagccaggtgtggaggtgaatacctgtagtc

SEQ ID NO: 713949 - DNA, 33 bp, Homo sapien
cattgcccacagggaagtgaaatatgtgatgca

SEQ ID NO: 713950 - DNA, 33 bp, Homo sapien
cattgcccacagggaattgaaatatgtgatgca

SEQ ID NO: 713951 - DNA, 33 bp, Homo sapien
gattagatgggctgaccatttttcttgttgagg

SEQ ID NO: 713952 - DNA, 33 bp, Homo sapien
gattagatgggctgacgatttttcttgttgagg

SEQ ID NO: 713953 - DNA, 33 bp, Homo sapien
atatggaaatcattacccattttttttgccctc

SEQ ID NO: 713954 - DNA, 33 bp, Homo sapien
atatggaaatcattactcattttttttgccctc

SEQ ID NO: 713955 - DNA, 33 bp, Homo sapien
tttgccctcttaatcacagtttatgaaacaaac

SEQ ID NO: 713956 - DNA, 33 bp, Homo sapien
tttgccctcttaatcagagtttatgaaacaaac

SEQ ID NO: 713957 - DNA, 33 bp, Homo sapien
aaagctcaagtccacgaaaagagagtgtgggag

SEQ ID NO: 713958 - DNA, 33 bp, Homo sapien
aaagctcaagtccacggaaagagagtgtgggag

SEQ ID NO: 713959 - DNA, 33 bp, Homo sapien
actcatatataatgacacagacaagaccgagac

SEQ ID NO: 713960 - DNA, 33 bp, Homo sapien
actcatatataatgactcagacaagaccgagac

SEQ ID NO: 713961 - DNA, 33 bp, Homo sapien
aaacaagttagaaggaacaaagaagcaactgct

SEQ ID NO: 713962 - DNA, 33 bp, Homo sapien
aaacaagttagaaggagcaaagaagcaactgct

SEQ ID NO: 713963 - DNA, 33 bp, Homo sapien
ccgagactaagagtacaaaattatgaggatcat

SEQ ID NO: 713964 - DNA, 33 bp, Homo sapien
ccgagactaagagtacgaaattatgaggatcat

SEQ ID NO: 713965 - DNA, 33 bp, Homo sapien
catggaatcctcgaaacgccaaagcacatgttc

SEQ ID NO: 713966 - DNA, 33 bp, Homo sapien
catggaatcctcgaaatgccaaagcacatgttc

SEQ ID NO: 713967 - DNA, 33 bp, Homo sapien
tgctggagaatcttcaagtaaatcacaagcagt

SEQ ID NO: 713968 - DNA, 33 bp, Homo sapien
tgctggagaatcttcaggtaaatcacaagcagt

SEQ ID NO: 713969 - DNA, 33 bp, Homo sapien
tggggcatgagattccacctttctaacaagctc

SEQ ID NO: 713970 - DNA, 33 bp, Homo sapien
tggggcatgagattccgcctttctaacaagctc

SEQ ID NO: 713971 - DNA, 33 bp, Homo sapien
caagctcctgggtaacactgatgctgctggtcc

SEQ ID NO: 713972 - DNA, 33 bp, Homo sapien
caagctcctgggtaacgctgatgctgctggtcc

SEQ ID NO: 713973 - DNA, 33 bp, Homo sapien
caaaagcacagtgtcacgaaatagcctgaagtg

SEQ ID NO: 713974 - DNA, 33 bp, Homo sapien
caaaagcacagtgtcatgaaatagcctgaagtg

SEQ ID NO: 713975 - DNA, 33 bp, Homo sapien
gcaacaacatagataaagtcctctccaggtagg

SEQ ID NO: 713976 - DNA, 33 bp, Homo sapien
gcaacaacatagataacgtcctctccaggtagg

SEQ ID NO: 713977 - DNA, 33 bp, Homo sapien
tacttttatacttttgcaactggtgatgttact

SEQ ID NO: 713978 - DNA, 33 bp, Homo sapien
tacttttatacttttgtaactggtgatgttact

SEQ ID NO: 713979 - DNA, 33 bp, Homo sapien
aagaggaaggaacaggaattggcaaaatgaaaa

SEQ ID NO: 713980 - DNA, 33 bp, Homo sapien
aagaggaaggaacagggattggcaaaatgaaaa

SEQ ID NO: 713981 - DNA, 33 bp, Homo sapien
aagcctcggacacaaaagagtttgtattcacac

SEQ ID NO: 713982 - DNA, 33 bp, Homo sapien
aagcctcggacacaaaggagtttgtattcacac

SEQ ID NO: 713983 - DNA, 33 bp, Homo sapien
aagactaccttttctccattgtattccctttgt

SEQ ID NO: 713984 - DNA, 33 bp, Homo sapien
aagactaccttttctctattgtattccctttgt

SEQ ID NO: 713985 - DNA, 33 bp, Homo sapien
aaggaccttgtttttacgtgtctggactagcat

SEQ ID NO: 713986 - DNA, 33 bp, Homo sapien
aaggaccttgtttttatgtgtctggactagcat

SEQ ID NO: 713987 - DNA, 33 bp, Homo sapien
ttgtttaccccatatcaattcacccttccttcc

SEQ ID NO: 713988 - DNA, 33 bp, Homo sapien
ttgtttaccccatatcgattcacccttccttcc

SEQ ID NO: 713989 - DNA, 33 bp, Homo sapien
attccccttctggttgaagatttagtgatcagt

SEQ ID NO: 713990 - DNA, 33 bp, Homo sapien
attccccttctggttggagatttagtgatcagt

SEQ ID NO: 713991 - DNA, 33 bp, Homo sapien
atagtctttagacatacgtgccgccaatacaca

SEQ ID NO: 713992 - DNA, 33 bp, Homo sapien
atagtctttagacatatgtgccgccaatacaca

SEQ ID NO: 713993 - DNA, 33 bp, Homo sapien
ccttagattaatttgaagagttcagatgagaag

SEQ ID NO: 713994 - DNA, 33 bp, Homo sapien
ccttagattaatttgaggagttcagatgagaag

SEQ ID NO: 713995 - DNA, 33 bp, Homo sapien
ccttcctttcatgcaaagattcttgtgttgaac

SEQ ID NO: 713996 - DNA, 33 bp, Homo sapien
ccttcctttcatgcaatgattcttgtgttgaac

SEQ ID NO: 713997 - DNA, 33 bp, Homo sapien
acttctgagctggccacggaggaaaaagatgtg

SEQ ID NO: 713998 - DNA, 33 bp, Homo sapien
acttctgagctggccagggaggaaaaagatgtg

SEQ ID NO: 713999 - DNA, 33 bp, Homo sapien
ggggggtgccacagtgaatttcacactcaaggg

SEQ ID NO: 714000 - DNA, 33 bp, Homo sapien
ggggggtgccacagtggatttcacactcaaggg

SEQ ID NO: 714001 - DNA, 33 bp, Homo sapien
agacaaatcctcttcacgtgcagctcaaatctc

SEQ ID NO: 714002 - DNA, 33 bp, Homo sapien
agacaaatcctcttcatgtgcagctcaaatctc

SEQ ID NO: 714003 - DNA, 33 bp, Homo sapien
gctgctgcgtggggtacggcattttctttctgc

SEQ ID NO: 714004 - DNA, 33 bp, Homo sapien
gctgctgcgtggggtatggcattttctttctgc

SEQ ID NO: 714005 - DNA, 33 bp, Homo sapien
tacatatcacaggaaggcactgccaggtcttag

SEQ ID NO: 714006 - DNA, 33 bp, Homo sapien
tacatatcacaggaagtcactgccaggtcttag

SEQ ID NO: 714007 - DNA, 33 bp, Homo sapien
agaacaacctggggaaatgaaaaaatgctatga

SEQ ID NO: 714008 - DNA, 33 bp, Homo sapien
agaacaacctggggaagtgaaaaaatgctatga

SEQ ID NO: 714009 - DNA, 33 bp, Homo sapien
cagatgaggagaatgaagttcagtgaggttaaa

SEQ ID NO: 714010 - DNA, 33 bp, Homo sapien
cagatgaggagaatgaggttcagtgaggttaaa

SEQ ID NO: 714011 - DNA, 33 bp, Homo sapien
tcatgttgcagctttcccccctgacaccatttc

SEQ ID NO: 714012 - DNA, 33 bp, Homo sapien
tcatgttgcagctttctcccctgacaccatttc

SEQ ID NO: 714013 - DNA, 33 bp, Homo sapien
gacagacaaccatgcaagtgatccctaaattat

SEQ ID NO: 714014 - DNA, 33 bp, Homo sapien
gacagacaaccatgcaggtgatccctaaattat

SEQ ID NO: 714015 - DNA, 33 bp, Homo sapien
ttcgatagttgcataacatggagagagagaggt

SEQ ID NO: 714016 - DNA, 33 bp, Homo sapien
ttcgatagttgcataagatggagagagagaggt

SEQ ID NO: 714017 - DNA, 33 bp, Homo sapien
ctgtgctatggacccactgaatttccttttcat

SEQ ID NO: 714018 - DNA, 33 bp, Homo sapien
ctgtgctatggacccattgaatttccttttcat

SEQ ID NO: 714019 - DNA, 33 bp, Homo sapien
aaaaacagtaccaaaactggtcaatttcaggca

SEQ ID NO: 714020 - DNA, 33 bp, Homo sapien
aaaaacagtaccaaaagtggtcaatttcaggca

SEQ ID NO: 714021 - DNA, 33 bp, Homo sapien
tggaaagatctggcaacgtcaggccacctctct

SEQ ID NO: 714022 - DNA, 33 bp, Homo sapien
tggaaagatctggcaatgtcaggccacctctct

SEQ ID NO: 714023 - DNA, 33 bp, Homo sapien
cccagtagttggggaacgagtacctggacctac

SEQ ID NO: 714024 - DNA, 33 bp, Homo sapien
cccagtagttggggaatgagtacctggacctac

SEQ ID NO: 714025 - DNA, 33 bp, Homo sapien
ccagttgataaagtcccgattaaccttgctgta

SEQ ID NO: 714026 - DNA, 33 bp, Homo sapien
ccagttgataaagtcctgattaaccttgctgta

SEQ ID NO: 714027 - DNA, 33 bp, Homo sapien
ttaaatagagacctgcactaagtaatataatac

SEQ ID NO: 714028 - DNA, 33 bp, Homo sapien
ttaaatagagacctgcgctaagtaatataatac

SEQ ID NO: 714029 - DNA, 33 bp, Homo sapien
gtttctgaatgtttgaaatatgtttaactccac

SEQ ID NO: 714030 - DNA, 33 bp, Homo sapien
gtttctgaatgtttgagatatgtttaactccac

SEQ ID NO: 714031 - DNA, 33 bp, Homo sapien
agtaaagttttagagaaatgacaaagacaaagg

SEQ ID NO: 714032 - DNA, 33 bp, Homo sapien
agtaaagttttagagagatgacaaagacaaagg

SEQ ID NO: 714033 - DNA, 33 bp, Homo sapien
cctccctgaaagataacgacctttgagcaaaga

SEQ ID NO: 714034 - DNA, 33 bp, Homo sapien
cctccctgaaagataatgacctttgagcaaaga

SEQ ID NO: 714035 - DNA, 33 bp, Homo sapien
agctcagggaaagaaacggaatgtggggtgcta

SEQ ID NO: 714036 - DNA, 33 bp, Homo sapien
agctcagggaaagaaatggaatgtggggtgcta

SEQ ID NO: 714037 - DNA, 33 bp, Homo sapien
ctcccaccctgaagtgcaataagcgggttgggt

SEQ ID NO: 714038 - DNA, 33 bp, Homo sapien
ctcccaccctgaagtggaataagcgggttgggt

SEQ ID NO: 714039 - DNA, 33 bp, Homo sapien
tggcttttcacgatcaacatggctaagcagaag

SEQ ID NO: 714040 - DNA, 33 bp, Homo sapien
tggcttttcacgatcagcatggctaagcagaag

SEQ ID NO: 714041 - DNA, 33 bp, Homo sapien
atatgctgtgctaaaaaaattatcaagttttca

SEQ ID NO: 714042 - DNA, 33 bp, Homo sapien
atatgctgtgctaaaagaattatcaagttttca

SEQ ID NO: 714043 - DNA, 33 bp, Homo sapien
tatgtgtgcttatctcaagtttaagttgaaagg

SEQ ID NO: 714044 - DNA, 33 bp, Homo sapien
tatgtgtgcttatctcgagtttaagttgaaagg

SEQ ID NO: 714045 - DNA, 33 bp, Homo sapien
caaagtagagcggagacatggaggaaataatca

SEQ ID NO: 714046 - DNA, 33 bp, Homo sapien
caaagtagagcggagatatggaggaaataatca

SEQ ID NO: 714047 - DNA, 33 bp, Homo sapien
aacgtggccactcagaagagagagctggtgtga

SEQ ID NO: 714048 - DNA, 33 bp, Homo sapien
aacgtggccactcagaggagagagctggtgtga

SEQ ID NO: 714049 - DNA, 33 bp, Homo sapien
agagcagtgcctggctcacaataagtgctatat

SEQ ID NO: 714050 - DNA, 33 bp, Homo sapien
agagcagtgcctggcttacaataagtgctatat

SEQ ID NO: 714051 - DNA, 33 bp, Homo sapien
gagtgattgtaataagcatggttataaagtgct

SEQ ID NO: 714052 - DNA, 33 bp, Homo sapien
gagtgattgtaataagtatggttataaagtgct

SEQ ID NO: 714053 - DNA, 33 bp, Homo sapien
aataccttaataaacagctcatttaatcttcac

SEQ ID NO: 714054 - DNA, 33 bp, Homo sapien
aataccttaataaacatctcatttaatcttcac

SEQ ID NO: 714055 - DNA, 33 bp, Homo sapien
tggttatatgctcttaaatccgtgttccctcct

SEQ ID NO: 714056 - DNA, 33 bp, Homo sapien
tggttatatgctcttagatccgtgttccctcct

SEQ ID NO: 714057 - DNA, 33 bp, Homo sapien
ttaacctctgtgactacgtcttcctccccagtc

SEQ ID NO: 714058 - DNA, 33 bp, Homo sapien
ttaacctctgtgactatgtcttcctccccagtc

SEQ ID NO: 714059 - DNA, 33 bp, Homo sapien
gttccatttgttgttacggagggccgcttgtga

SEQ ID NO: 714060 - DNA, 33 bp, Homo sapien
gttccatttgttgttatggagggccgcttgtga

SEQ ID NO: 714061 - DNA, 33 bp, Homo sapien
atgctggtgaaatacacgcccatccctgtgaat

SEQ ID NO: 714062 - DNA, 33 bp, Homo sapien
atgctggtgaaatacatgcccatccctgtgaat

SEQ ID NO: 714063 - DNA, 33 bp, Homo sapien
caaatgaatcaattacaggttggcaggtgtcct

SEQ ID NO: 714064 - DNA, 33 bp, Homo sapien
caaatgaatcaattacgggttggcaggtgtcct

SEQ ID NO: 714065 - DNA, 33 bp, Homo sapien
atgttggacatcaggcagaacaggacggagatc

SEQ ID NO: 714066 - DNA, 33 bp, Homo sapien
atgttggacatcaggcggaacaggacggagatc

SEQ ID NO: 714067 - DNA, 33 bp, Homo sapien
aagttttccccagttcaatactgaaaggcaggt

SEQ ID NO: 714068 - DNA, 33 bp, Homo sapien
aagttttccccagttcgatactgaaaggcaggt

SEQ ID NO: 714069 - DNA, 33 bp, Homo sapien
tccctatgccagcttcaaggggtacaatagagt

SEQ ID NO: 714070 - DNA, 33 bp, Homo sapien
tccctatgccagcttcgaggggtacaatagagt

SEQ ID NO: 714071 - DNA, 33 bp, Homo sapien
gctgatttggagtagcaaaatgactgatgtgtg

SEQ ID NO: 714072 - DNA, 33 bp, Homo sapien
gctgatttggagtagcgaaatgactgatgtgtg

SEQ ID NO: 714073 - DNA, 33 bp, Homo sapien
tccttatttcactcacaccctggttgggagctg

SEQ ID NO: 714074 - DNA, 33 bp, Homo sapien
tccttatttcactcacgccctggttgggagctg

SEQ ID NO: 714075 - DNA, 33 bp, Homo sapien
gtgcatttgcactacaataatgcccacagtgag

SEQ ID NO: 714076 - DNA, 33 bp, Homo sapien
gtgcatttgcactacagtaatgcccacagtgag

SEQ ID NO: 714077 - DNA, 33 bp, Homo sapien
ggagaacttcttttgcaccttaaaatacttcat

SEQ ID NO: 714078 - DNA, 33 bp, Homo sapien
ggagaacttcttttgctccttaaaatacttcat

SEQ ID NO: 714079 - DNA, 33 bp, Homo sapien
aagttttccatggacaatgtagccagaatgacc

SEQ ID NO: 714080 - DNA, 33 bp, Homo sapien
aagttttccatggacattgtagccagaatgacc

SEQ ID NO: 714081 - DNA, 33 bp, Homo sapien
aaagaggacatggcaaagatgcctgatgacatt

SEQ ID NO: 714082 - DNA, 33 bp, Homo sapien
aaagaggacatggcaaggatgcctgatgacatt

SEQ ID NO: 714083 - DNA, 33 bp, Homo sapien
gcatgagcattgtacccggccacaagtgagatt

SEQ ID NO: 714084 - DNA, 33 bp, Homo sapien
gcatgagcattgtacctggccacaagtgagatt

SEQ ID NO: 714085 - DNA, 33 bp, Homo sapien
ctctagttggagtttgcattctgtccatttttt

SEQ ID NO: 714086 - DNA, 33 bp, Homo sapien
ctctagttggagtttgtattctgtccatttttt

SEQ ID NO: 714087 - DNA, 33 bp, Homo sapien
gccctatctcattgcactaaaccttatacttaa

SEQ ID NO: 714088 - DNA, 33 bp, Homo sapien
gccctatctcattgcattaaaccttatacttaa

SEQ ID NO: 714089 - DNA, 33 bp, Homo sapien
ctagtacaaagtgtagacgctcttcctacagtt

SEQ ID NO: 714090 - DNA, 33 bp, Homo sapien
ctagtacaaagtgtaggcgctcttcctacagtt

SEQ ID NO: 714091 - DNA, 33 bp, Homo sapien
caggcctctttcaaaaagtaggaaatttcaggc

SEQ ID NO: 714092 - DNA, 33 bp, Homo sapien
caggcctctttcaaaatgtaggaaatttcaggc

SEQ ID NO: 714093 - DNA, 33 bp, Homo sapien
cacactactaacgtgcaagaggtaacaaagcag

SEQ ID NO: 714094 - DNA, 33 bp, Homo sapien
cacactactaacgtgcgagaggtaacaaagcag

SEQ ID NO: 714095 - DNA, 33 bp, Homo sapien
gaaacagagtgactaacaggaagaggaagccag

SEQ ID NO: 714096 - DNA, 33 bp, Homo sapien
gaaacagagtgactaataggaagaggaagccag

SEQ ID NO: 714097 - DNA, 33 bp, Homo sapien
atttttattagcattcaatcaaactacataagc

SEQ ID NO: 714098 - DNA, 33 bp, Homo sapien
atttttattagcattccatcaaactacataagc

SEQ ID NO: 714099 - DNA, 33 bp, Homo sapien
cattttactgtacctaagttacttgtgtgtgtg

SEQ ID NO: 714100 - DNA, 33 bp, Homo sapien
cattttactgtacctacgttacttgtgtgtgtg

SEQ ID NO: 714101 - DNA, 33 bp, Homo sapien
ttttttattgctgttacatgtaaggtaggaagg

SEQ ID NO: 714102 - DNA, 33 bp, Homo sapien
ttttttattgctgttatatgtaaggtaggaagg

SEQ ID NO: 714103 - DNA, 33 bp, Homo sapien
gaaactacaaggaataccatcaagaacatgaaa

SEQ ID NO: 714104 - DNA, 33 bp, Homo sapien
gaaactacaaggaatatcatcaagaacatgaaa

SEQ ID NO: 714105 - DNA, 33 bp, Homo sapien
tacttagagaagctaactggaactagagtatgg

SEQ ID NO: 714106 - DNA, 33 bp, Homo sapien
tacttagagaagctaattggaactagagtatgg

SEQ ID NO: 714107 - DNA, 33 bp, Homo sapien
ctgttaaaagaatgaacaggccgggtacggtgg

SEQ ID NO: 714108 - DNA, 33 bp, Homo sapien
ctgttaaaagaatgaataggccgggtacggtgg

SEQ ID NO: 714109 - DNA, 33 bp, Homo sapien
ctcaaccaccccgactcagatcatctttcatct

SEQ ID NO: 714110 - DNA, 33 bp, Homo sapien
ctcaaccaccccgactgagatcatctttcatct

SEQ ID NO: 714111 - DNA, 33 bp, Homo sapien
gtttttaagtttgatacgtctaatgcttatgaa

SEQ ID NO: 714112 - DNA, 33 bp, Homo sapien
gtttttaagtttgatatgtctaatgcttatgaa

SEQ ID NO: 714113 - DNA, 33 bp, Homo sapien
aacatgatttaacccaaataagcttcaggaata

SEQ ID NO: 714114 - DNA, 33 bp, Homo sapien
aacatgatttaacccagataagcttcaggaata

SEQ ID NO: 714115 - DNA, 33 bp, Homo sapien
aatcagcagttttcaaatctgtcaatgagagga

SEQ ID NO: 714116 - DNA, 33 bp, Homo sapien
aatcagcagttttcaagtctgtcaatgagagga

SEQ ID NO: 714117 - DNA, 33 bp, Homo sapien
caaaccattcactagcaagaaaaagtggcctag

SEQ ID NO: 714118 - DNA, 33 bp, Homo sapien
caaaccattcactagccagaaaaagtggcctag

SEQ ID NO: 714119 - DNA, 33 bp, Homo sapien
ggaaagaccattagaaacactgggtcagccaca

SEQ ID NO: 714120 - DNA, 33 bp, Homo sapien
ggaaagaccattagaagcactgggtcagccaca

SEQ ID NO: 714121 - DNA, 33 bp, Homo sapien
ttccattatcagggcaatgagtatccatacttc

SEQ ID NO: 714122 - DNA, 33 bp, Homo sapien
ttccattatcagggcagtgagtatccatacttc

SEQ ID NO: 714123 - DNA, 33 bp, Homo sapien
catacttccttcccagcattctgccattgttac

SEQ ID NO: 714124 - DNA, 33 bp, Homo sapien
catacttccttcccaggattctgccattgttac

SEQ ID NO: 714125 - DNA, 33 bp, Homo sapien
gagtggactcaagctacaaccctgcaaagcacc

SEQ ID NO: 714126 - DNA, 33 bp, Homo sapien
gagtggactcaagctagaaccctgcaaagcacc

SEQ ID NO: 714127 - DNA, 33 bp, Homo sapien
cattaatactaacagacaacatgagaagaggca

SEQ ID NO: 714128 - DNA, 33 bp, Homo sapien
cattaatactaacagataacatgagaagaggca

SEQ ID NO: 714129 - DNA, 33 bp, Homo sapien
tgtacttaagcatatcaatcatatttcagttgc

SEQ ID NO: 714130 - DNA, 33 bp, Homo sapien
tgtacttaagcatatccatcatatttcagttgc

SEQ ID NO: 714131 - DNA, 33 bp, Homo sapien; identical to SEQ ID NO: 714129

SEQ ID NO: 714132 - DNA, 33 bp, Homo sapien; identical to SEQ ID NO: 714130

SEQ ID NO: 714133 - DNA, 33 bp, Homo sapien
tatttttgagatgcagcctcgagtgcaatggtg

SEQ ID NO: 714134 - DNA, 33 bp, Homo sapien
tatttttgagatgcaggctcgagtgcaatggtg

SEQ ID NO: 714135 - DNA, 33 bp, Homo sapien
acttctgctggattacgctggccaataagagcg

SEQ ID NO: 714136 - DNA, 33 bp, Homo sapien
acttctgctggattactctggccaataagagcg

SEQ ID NO: 714137 - DNA, 33 bp, Homo sapien
gatattgtagagaaaaggctagaatgttgaaca

SEQ ID NO: 714138 - DNA, 33 bp, Homo sapien
gatattgtagagaaaatgctagaatgttgaaca

SEQ ID NO: 714139 - DNA, 33 bp, Homo sapien
atgactttctgcatgacagaggaagattaagct

SEQ ID NO: 714140 - DNA, 33 bp, Homo sapien
atgactttctgcatgatagaggaagattaagct

SEQ ID NO: 714141 - DNA, 33 bp, Homo sapien
gagtgtcccacaattaataaaggctacataagt

SEQ ID NO: 714142 - DNA, 33 bp, Homo sapien
gagtgtcccacaattagtaaaggctacataagt

SEQ ID NO: 714143 - DNA, 33 bp, Homo sapien
agggtttgttaaatgcaaagtgtaatccactaa

SEQ ID NO: 714144 - DNA, 33 bp, Homo sapien
agggtttgttaaatgcgaagtgtaatccactaa

SEQ ID NO: 714145 - DNA, 33 bp, Homo sapien
aattattctacacaacaagcatatgtgtccaga

SEQ ID NO: 714146 - DNA, 33 bp, Homo sapien
aattattctacacaaccagcatatgtgtccaga

SEQ ID NO: 714147 - DNA, 33 bp, Homo sapien
gaagagatgtgggggcagaaagacaggaaatag

SEQ ID NO: 714148 - DNA, 33 bp, Homo sapien
gaagagatgtgggggcggaaagacaggaaatag

SEQ ID NO: 714149 - DNA, 33 bp, Homo sapien
tcataacacacataagactgcttaacatgaaat

SEQ ID NO: 714150 - DNA, 33 bp, Homo sapien
tcataacacacataaggctgcttaacatgaaat

SEQ ID NO: 714151 - DNA, 33 bp, Homo sapien
acatttgagtcacagcaagatttaaaatacagt

SEQ ID NO: 714152 - DNA, 33 bp, Homo sapien
acatttgagtcacagcgagatttaaaatacagt

SEQ ID NO: 714153 - DNA, 33 bp, Homo sapien
atccctgatatgttccccttcaagctcctgtct

SEQ ID NO: 714154 - DNA, 33 bp, Homo sapien
atccctgatatgttcctcttcaagctcctgtct

SEQ ID NO: 714155 - DNA, 33 bp, Homo sapien
gctgatactttgccccactgatggcagagaccc

SEQ ID NO: 714156 - DNA, 33 bp, Homo sapien
gctgatactttgcccccctgatggcagagaccc

SEQ ID NO: 714157 - DNA, 33 bp, Homo sapien
atatgtaaaaaggaaaccttgaccaaccactca

SEQ ID NO: 714158 - DNA, 33 bp, Homo sapien
atatgtaaaaaggaaatcttgaccaaccactca

SEQ ID NO: 714159 - DNA, 33 bp, Homo sapien
atacagccaaaagggaagatcagacacatccac

SEQ ID NO: 714160 - DNA, 33 bp, Homo sapien
atacagccaaaagggaggatcagacacatccac

SEQ ID NO: 714161 - DNA, 33 bp, Homo sapien
gctggattcagcactcaaaaataaagtagcaca

SEQ ID NO: 714162 - DNA, 33 bp, Homo sapien
gctggattcagcactcgaaaataaagtagcaca

SEQ ID NO: 714163 - DNA, 33 bp, Homo sapien
gtgggtgttctggttaaatttggaggtcctctt

SEQ ID NO: 714164 - DNA, 33 bp, Homo sapien
gtgggtgttctggttacatttggaggtcctctt

SEQ ID NO: 714165 - DNA, 33 bp, Homo sapien
ggcagataatcacaaacgaacacacaactacag

SEQ ID NO: 714166 - DNA, 33 bp, Homo sapien
ggcagataatcacaaatgaacacacaactacag

SEQ ID NO: 714167 - DNA, 33 bp, Homo sapien
gaacagagtatgggagaaatgatggtatgccac

SEQ ID NO: 714168 - DNA, 33 bp, Homo sapien
gaacagagtatgggaggaatgatggtatgccac

SEQ ID NO: 714169 - DNA, 33 bp, Homo sapien
gggtccagttgtgtcacgtggccgtaacaaggt

SEQ ID NO: 714170 - DNA, 33 bp, Homo sapien
gggtccagttgtgtcatgtggccgtaacaaggt

SEQ ID NO: 714171 - DNA, 33 bp, Homo sapien
tgcccggcttcaatcacgtcctttattgttttc

SEQ ID NO: 714172 - DNA, 33 bp, Homo sapien
tgcccggcttcaatcatgtcctttattgttttc

SEQ ID NO: 714173 - DNA, 33 bp, Homo sapien
ggcagagacgggaatacatgggcaagagccttt

SEQ ID NO: 714174 - DNA, 33 bp, Homo sapien
ggcagagacgggaatatatgggcaagagccttt

SEQ ID NO: 714175 - DNA, 33 bp, Homo sapien
aattgctcaatagcacggattataagaagactg

SEQ ID NO: 714176 - DNA, 33 bp, Homo sapien
aattgctcaatagcactgattataagaagactg

SEQ ID NO: 714177 - DNA, 33 bp, Homo sapien
ttaagggaaatgtaggcatgttcccaaacttgt

SEQ ID NO: 714178 - DNA, 33 bp, Homo sapien
ttaagggaaatgtaggtatgttcccaaacttgt

SEQ ID NO: 714179 - DNA, 33 bp, Homo sapien
gttgccagctaggggaagatgcctggcagtggt

SEQ ID NO: 714180 - DNA, 33 bp, Homo sapien
gttgccagctaggggaggatgcctggcagtggt

SEQ ID NO: 714181 - DNA, 33 bp, Homo sapien
ggacacgcatggcccacagacccactaagacca

SEQ ID NO: 714182 - DNA, 33 bp, Homo sapien
ggacacgcatggcccagagacccactaagacca

SEQ ID NO: 714183 - DNA, 33 bp, Homo sapien
tggtgatattaacacaatgtaaaaacgctttca

SEQ ID NO: 714184 - DNA, 33 bp, Homo sapien
tggtgatattaacacagtgtaaaaacgctttca

SEQ ID NO: 714185 - DNA, 33 bp, Homo sapien
tattgagacttcgtaaatgttaacatcttcatt

SEQ ID NO: 714186 - DNA, 33 bp, Homo sapien
tattgagacttcgtaagtgttaacatcttcatt

SEQ ID NO: 714187 - DNA, 33 bp, Homo sapien
ttggcttttatgcatcaaaaaaggttattcaga

SEQ ID NO: 714188 - DNA, 33 bp, Homo sapien
ttggcttttatgcatcgaaaaaggttattcaga

SEQ ID NO: 714189 - DNA, 33 bp, Homo sapien
gaggtcaagaggaggcaatgacatcagagacca

SEQ ID NO: 714190 - DNA, 33 bp, Homo sapien
gaggtcaagaggaggcgatgacatcagagacca

SEQ ID NO: 714191 - DNA, 33 bp, Homo sapien
gctccgaggcaatgcaacaatgccactggaggt

SEQ ID NO: 714192 - DNA, 33 bp, Homo sapien
gctccgaggcaatgcagcaatgccactggaggt

SEQ ID NO: 714193 - DNA, 33 bp, Homo sapien
atttggctaatagtgacgctaatctatatgtaa

SEQ ID NO: 714194 - DNA, 33 bp, Homo sapien
atttggctaatagtgatgctaatctatatgtaa

SEQ ID NO: 714195 - DNA, 33 bp, Homo sapien
cgggtgagtagggaccaaaatccagtctgtgct

SEQ ID NO: 714196 - DNA, 33 bp, Homo sapien
cgggtgagtagggaccgaaatccagtctgtgct

SEQ ID NO: 714197 - DNA, 33 bp, Homo sapien
acttctgtgaattaccacttggtgcctgttcat

SEQ ID NO: 714198 - DNA, 33 bp, Homo sapien
acttctgtgaattacctcttggtgcctgttcat

SEQ ID NO: 714199 - DNA, 33 bp, Homo sapien
ggtggcaggatattcaaatatctcaagatggct

SEQ ID NO: 714200 - DNA, 33 bp, Homo sapien
ggtggcaggatattcagatatctcaagatggct

SEQ ID NO: 714201 - DNA, 33 bp, Homo sapien
ttatatgcacctaacacaaactgagatcagtat

SEQ ID NO: 714202 - DNA, 33 bp, Homo sapien
ttatatgcacctaacagaaactgagatcagtat

SEQ ID NO: 714203 - DNA, 33 bp, Homo sapien
agatcagaacaacgcaaagatgtccattcttgc

SEQ ID NO: 714204 - DNA, 33 bp, Homo sapien
agatcagaacaacgcagagatgtccattcttgc

SEQ ID NO: 714205 - DNA, 33 bp, Homo sapien
tccagctcacctaacacatagctgtattcatgt

SEQ ID NO: 714206 - DNA, 33 bp, Homo sapien
tccagctcacctaacagatagctgtattcatgt

SEQ ID NO: 714207 - DNA, 33 bp, Homo sapien
tgtagccaagcacctaagaagaagaggagaatg

SEQ ID NO: 714208 - DNA, 33 bp, Homo sapien
tgtagccaagcacctaggaagaagaggagaatg

SEQ ID NO: 714209 - DNA, 33 bp, Homo sapien
caataatattctagagccaagttaagctcactt

SEQ ID NO: 714210 - DNA, 33 bp, Homo sapien
caataatattctagaggcaagttaagctcactt

SEQ ID NO: 714211 - DNA, 33 bp, Homo sapien
cctgaagattctgctacctattctgaatagtaa

SEQ ID NO: 714212 - DNA, 33 bp, Homo sapien
cctgaagattctgctatctattctgaatagtaa

SEQ ID NO: 714213 - DNA, 33 bp, Homo sapien
gtccaggcccttgatgcatattgaaaacattca

SEQ ID NO: 714214 - DNA, 33 bp, Homo sapien
gtccaggcccttgatgtatattgaaaacattca

SEQ ID NO: 714215 - DNA, 33 bp, Homo sapien
agaaaactatgcaccaaaatagagatgattatt

SEQ ID NO: 714216 - DNA, 33 bp, Homo sapien
agaaaactatgcaccagaatagagatgattatt

SEQ ID NO: 714217 - DNA, 33 bp, Homo sapien
ggaagtagacatctcaaacagtgtggtgtgaga

SEQ ID NO: 714218 - DNA, 33 bp, Homo sapien
ggaagtagacatctcagacagtgtggtgtgaga

SEQ ID NO: 714219 - DNA, 33 bp, Homo sapien
agcactttacatctgccaactcattattcagtt

SEQ ID NO: 714220 - DNA, 33 bp, Homo sapien
agcactttacatctgcgaactcattattcagtt

SEQ ID NO: 714221 - DNA, 33 bp, Homo sapien
ctgagccatcctcacacgagggtagagcagttc

SEQ ID NO: 714222 - DNA, 33 bp, Homo sapien
ctgagccatcctcacatgagggtagagcagttc

SEQ ID NO: 714223 - DNA, 33 bp, Homo sapien
aggcaactggttagcaatatgttcctgctgccc

SEQ ID NO: 714224 - DNA, 33 bp, Homo sapien
aggcaactggttagcactatgttcctgctgccc

SEQ ID NO: 714225 - DNA, 33 bp, Homo sapien
cgctcataggaatgaagttagcctgctctagtg

SEQ ID NO: 714226 - DNA, 33 bp, Homo sapien
cgctcataggaatgaatttagcctgctctagtg

SEQ ID NO: 714227 - DNA, 33 bp, Homo sapien
catgattattgccaaagctcagcaagttccagt

SEQ ID NO: 714228 - DNA, 33 bp, Homo sapien
catgattattgccaaatctcagcaagttccagt

SEQ ID NO: 714229 - DNA, 33 bp, Homo sapien
ttccctgttcaaattacactccgattctggact

SEQ ID NO: 714230 - DNA, 33 bp, Homo sapien
ttccctgttcaaattatactccgattctggact

SEQ ID NO: 714231 - DNA, 33 bp, Homo sapien
tgaattccagcttgaccagaggaatcccttcca

SEQ ID NO: 714232 - DNA, 33 bp, Homo sapien
tgaattccagcttgacgagaggaatcccttcca

SEQ ID NO: 714233 - DNA, 33 bp, Homo sapien
atttgcccaaaagtcaccgattcagtgaaacca

SEQ ID NO: 714234 - DNA, 33 bp, Homo sapien
atttgcccaaaagtcatcgattcagtgaaacca

SEQ ID NO: 714235 - DNA, 33 bp, Homo sapien
agagcaaaaggaaaaggagatgccattaatgag

SEQ ID NO: 714236 - DNA, 33 bp, Homo sapien
agagcaaaaggaaaagtagatgccattaatgag

SEQ ID NO: 714237 - DNA, 33 bp, Homo sapien
aaccaaaaatgccctcccacatttctaaatctc

SEQ ID NO: 714238 - DNA, 33 bp, Homo sapien
aaccaaaaatgccctctcacatttctaaatctc

SEQ ID NO: 714239 - DNA, 33 bp, Homo sapien
caggcatctcttctaacctgtaagtcaagtttc

SEQ ID NO: 714240 - DNA, 33 bp, Homo sapien
caggcatctcttctaatctgtaagtcaagtttc

SEQ ID NO: 714241 - DNA, 33 bp, Homo sapien
agtatcatgaaaaggcagatctgtaatcagtct

SEQ ID NO: 714242 - DNA, 33 bp, Homo sapien
agtatcatgaaaaggcggatctgtaatcagtct

SEQ ID NO: 714243 - DNA, 33 bp, Homo sapien
gaattcttggatgaacaataaccaagaatactt

SEQ ID NO: 714244 - DNA, 33 bp, Homo sapien
gaattcttggatgaacgataaccaagaatactt

SEQ ID NO: 714245 - DNA, 33 bp, Homo sapien
gaaagagagggaggaagaacttaaagatgaaca

SEQ ID NO: 714246 - DNA, 33 bp, Homo sapien
gaaagagagggaggaataacttaaagatgaaca

SEQ ID NO: 714247 - DNA, 33 bp, Homo sapien
ggctcagccactgaaacggtctttgatctgctt

SEQ ID NO: 714248 - DNA, 33 bp, Homo sapien
ggctcagccactgaaatggtctttgatctgctt

SEQ ID NO: 714249 - DNA, 33 bp, Homo sapien
ggacggactgctaccaaggaagattttctaaac

SEQ ID NO: 714250 - DNA, 33 bp, Homo sapien
ggacggactgctaccagggaagattttctaaac

SEQ ID NO: 714251 - DNA, 33 bp, Homo sapien
tgggtttgaaaagctccctagagtcctgtgacc

SEQ ID NO: 714252 - DNA, 33 bp, Homo sapien
tgggtttgaaaagctctctagagtcctgtgacc

SEQ ID NO: 714253 - DNA, 33 bp, Homo sapien
caaatatttcagaagccaataggggattccaca

SEQ ID NO: 714254 - DNA, 33 bp, Homo sapien
caaatatttcagaagctaataggggattccaca

SEQ ID NO: 714255 - DNA, 33 bp, Homo sapien
ctgctcactgtgaaaacagaccttctaaatgat

SEQ ID NO: 714256 - DNA, 33 bp, Homo sapien
ctgctcactgtgaaaatagaccttctaaatgat

SEQ ID NO: 714257 - DNA, 33 bp, Homo sapien
tgttcagtgtatgttcaatatttcttaggaaac

SEQ ID NO: 714258 - DNA, 33 bp, Homo sapien
tgttcagtgtatgttcgatatttcttaggaaac

SEQ ID NO: 714259 - DNA, 33 bp, Homo sapien
caagtagttattgggcacctactatgtaccaag

SEQ ID NO: 714260 - DNA, 33 bp, Homo sapien
caagtagttattgggcgcctactatgtaccaag

SEQ ID NO: 714261 - DNA, 33 bp, Homo sapien
ccaaagaactggatagacaattgcttttacaac

SEQ ID NO: 714262 - DNA, 33 bp, Homo sapien
ccaaagaactggataggcaattgcttttacaac

SEQ ID NO: 714263 - DNA, 33 bp, Homo sapien
cagtcttgacttcaggcacccaagtgattctcc

SEQ ID NO: 714264 - DNA, 33 bp, Homo sapien
cagtcttgacttcagggacccaagtgattctcc

SEQ ID NO: 714265 - DNA, 33 bp, Homo sapien
ctgctgggttccaccacaaattcataatcccca

SEQ ID NO: 714266 - DNA, 33 bp, Homo sapien
ctgctgggttccaccataaattcataatcccca

SEQ ID NO: 714267 - DNA, 33 bp, Homo sapien
cacaccttttctttcccacctcctcagaagatg

SEQ ID NO: 714268 - DNA, 33 bp, Homo sapien
cacaccttttctttcctacctcctcagaagatg

SEQ ID NO: 714269 - DNA, 33 bp, Homo sapien
ttattttacaaaatgaaagaaattggagcttag

SEQ ID NO: 714270 - DNA, 33 bp, Homo sapien
ttattttacaaaatgagagaaattggagcttag

SEQ ID NO: 714271 - DNA, 33 bp, Homo sapien
ccaggagtgccctgtaggtaaatcttaataaac

SEQ ID NO: 714272 - DNA, 33 bp, Homo sapien
ccaggagtgccctgtatgtaaatcttaataaac

SEQ ID NO: 714273 - DNA, 33 bp, Homo sapien
gttggctctccctacaaggtcaggagcttcact

SEQ ID NO: 714274 - DNA, 33 bp, Homo sapien
gttggctctccctacagggtcaggagcttcact

SEQ ID NO: 714275 - DNA, 33 bp, Homo sapien
tggcactgtaaaggagaaaaaatatctttcctt

SEQ ID NO: 714276 - DNA, 33 bp, Homo sapien
tggcactgtaaaggaggaaaaatatctttcctt

SEQ ID NO: 714277 - DNA, 33 bp, Homo sapien
taacctaccataaatcccctcttcagtgtggtt

SEQ ID NO: 714278 - DNA, 33 bp, Homo sapien
taacctaccataaatctcctcttcagtgtggtt

SEQ ID NO: 714279 - DNA, 33 bp, Homo sapien
tacaatggaaaatgtccaggttgaagcaagttc

SEQ ID NO: 714280 - DNA, 33 bp, Homo sapien
tacaatggaaaatgtctaggttgaagcaagttc

SEQ ID NO: 714281 - DNA, 33 bp, Homo sapien
ctttaaaacagtaaaaagtcagtaattccagtg

SEQ ID NO: 714282 - DNA, 33 bp, Homo sapien
ctttaaaacagtaaaatgtcagtaattccagtg

SEQ ID NO: 714283 - DNA, 33 bp, Homo sapien
aatctttgatttgcctaaagtttaatttggttt

SEQ ID NO: 714284 - DNA, 33 bp, Homo sapien
aatctttgatttgcctgaagtttaatttggttt

SEQ ID NO: 714285 - DNA, 33 bp, Homo sapien
acacacttcactgcacaaagtaggaatctcaga

SEQ ID NO: 714286 - DNA, 33 bp, Homo sapien
acacacttcactgcacgaagtaggaatctcaga

SEQ ID NO: 714287 - DNA, 33 bp, Homo sapien
aagcaacataatgagcaaaaaaagtatttccaa

SEQ ID NO: 714288 - DNA, 33 bp, Homo sapien
aagcaacataatgagcgaaaaaagtatttccaa

SEQ ID NO: 714289 - DNA, 33 bp, Homo sapien
tattatacaccatgacaaaattgggaggttaaa

SEQ ID NO: 714290 - DNA, 33 bp, Homo sapien
tattatacaccatgacgaaattgggaggttaaa

SEQ ID NO: 714291 - DNA, 33 bp, Homo sapien
cagttcttcttactagaacaaaaaactaagcag

SEQ ID NO: 714292 - DNA, 33 bp, Homo sapien
cagttcttcttactaggacaaaaaactaagcag

SEQ ID NO: 714293 - DNA, 33 bp, Homo sapien
ctctaaatctggcttaataacatgaccagatta

SEQ ID NO: 714294 - DNA, 33 bp, Homo sapien
ctctaaatctggcttagtaacatgaccagatta

SEQ ID NO: 714295 - DNA, 33 bp, Homo sapien
ggttcagtggtagcagaacaggtaggaatggaa

SEQ ID NO: 714296 - DNA, 33 bp, Homo sapien
ggttcagtggtagcaggacaggtaggaatggaa

SEQ ID NO: 714297 - DNA, 33 bp, Homo sapien
tttgatgatgactcaactgttttcttagcaaca

SEQ ID NO: 714298 - DNA, 33 bp, Homo sapien
tttgatgatgactcaattgttttcttagcaaca

SEQ ID NO: 714299 - DNA, 33 bp, Homo sapien
actgtgaatgaggaaccgccccataattgcata

SEQ ID NO: 714300 - DNA, 33 bp, Homo sapien
actgtgaatgaggaactgccccataattgcata

SEQ ID NO: 714301 - DNA, 33 bp, Homo sapien
tctcgtcttcgttaccactgttaatcggcactt

SEQ ID NO: 714302 - DNA, 33 bp, Homo sapien
tctcgtcttcgttaccgctgttaatcggcactt

SEQ ID NO: 714303 - DNA, 33 bp, Homo sapien
tgcttccggtccgcgagccctgagagctaactt

SEQ ID NO: 714304 - DNA, 33 bp, Homo sapien
tgcttccggtccgcgatccctgagagctaactt

SEQ ID NO: 714305 - DNA, 33 bp, Homo sapien
tcggaacgatttggaacgaaaggaagtggaaga

SEQ ID NO: 714306 - DNA, 33 bp, Homo sapien
tcggaacgatttggaatgaaaggaagtggaaga

SEQ ID NO: 714307 - DNA, 33 bp, Homo sapien
ttcctagacgagtctaccctcaaaccagtagtg

SEQ ID NO: 714308 - DNA, 33 bp, Homo sapien
ttcctagacgagtctatcctcaaaccagtagtg

SEQ ID NO: 714309 - DNA, 33 bp, Homo sapien
aactggcatgataaaaactgtataaatgagaag

SEQ ID NO: 714310 - DNA, 33 bp, Homo sapien
aactggcatgataaaagctgtataaatgagaag

SEQ ID NO: 714311 - DNA, 33 bp, Homo sapien
taccaaagcttgaagcaattatctgtagaacgt

SEQ ID NO: 714312 - DNA, 33 bp, Homo sapien
taccaaagcttgaagctattatctgtagaacgt

SEQ ID NO: 714313 - DNA, 33 bp, Homo sapien
tgaggaatgtacccaaaaggcagaaccggagac

SEQ ID NO: 714314 - DNA, 33 bp, Homo sapien
tgaggaatgtacccaataggcagaaccggagac

SEQ ID NO: 714315 - DNA, 33 bp, Homo sapien
atcttcctgccttagagatgcgatgccccccag

SEQ ID NO: 714316 - DNA, 33 bp, Homo sapien
atcttcctgccttagatatgcgatgccccccag

SEQ ID NO: 714317 - DNA, 33 bp, Homo sapien
gggttggtagccaccacgtcgttctagcaggag

SEQ ID NO: 714318 - DNA, 33 bp, Homo sapien
gggttggtagccaccatgtcgttctagcaggag

SEQ ID NO: 714319 - DNA, 33 bp, Homo sapien
gatgagtttggacttccatccctctgacatagt

SEQ ID NO: 714320 - DNA, 33 bp, Homo sapien
gatgagtttggacttctatccctctgacatagt

SEQ ID NO: 714321 - DNA, 33 bp, Homo sapien
actagaagactgataacatttggggcaagatct

SEQ ID NO: 714322 - DNA, 33 bp, Homo sapien
actagaagactgataatatttggggcaagatct

SEQ ID NO: 714323 - DNA, 33 bp, Homo sapien
gaggcattggtgccttcaaaactaaccagatta

SEQ ID NO: 714324 - DNA, 33 bp, Homo sapien
gaggcattggtgcctttaaaactaaccagatta

SEQ ID NO: 714325 - DNA, 33 bp, Homo sapien
ctgaaaaccaacccccaagtctccatctgccaa

SEQ ID NO: 714326 - DNA, 33 bp, Homo sapien
ctgaaaaccaacccccgagtctccatctgccaa

SEQ ID NO: 714327 - DNA, 33 bp, Homo sapien
aaagatccaaaccctagagaacacactgctctc

SEQ ID NO: 714328 - DNA, 33 bp, Homo sapien
aaagatccaaaccctatagaacacactgctctc

SEQ ID NO: 714329 - DNA, 33 bp, Homo sapien
tctgaatgaaatatgacaaattttgcgggtatc

SEQ ID NO: 714330 - DNA, 33 bp, Homo sapien
tctgaatgaaatatgataaattttgcgggtatc

SEQ ID NO: 714331 - DNA, 33 bp, Homo sapien
tcccaaagtaaaattacagggccatgttaggca

SEQ ID NO: 714332 - DNA, 33 bp, Homo sapien
tcccaaagtaaaattagagggccatgttaggca

SEQ ID NO: 714333 - DNA, 33 bp, Homo sapien
ggaggtggggcctgcacggaggtggttagatca

SEQ ID NO: 714334 - DNA, 33 bp, Homo sapien
ggaggtggggcctgcagggaggtggttagatca

SEQ ID NO: 714335 - DNA, 33 bp, Homo sapien
tttgttttattaaaatcatggcctctggaattc

SEQ ID NO: 714336 - DNA, 33 bp, Homo sapien
tttgttttattaaaatgatggcctctggaattc

SEQ ID NO: 714337 - DNA, 33 bp, Homo sapien
atgacgttggcacaaacctgctaaaataaaata

SEQ ID NO: 714338 - DNA, 33 bp, Homo sapien
atgacgttggcacaaatctgctaaaataaaata

SEQ ID NO: 714339 - DNA, 33 bp, Homo sapien
ctttctttttgaatcacgtacataatggccacg

SEQ ID NO: 714340 - DNA, 33 bp, Homo sapien
ctttctttttgaatcatgtacataatggccacg

SEQ ID NO: 714341 - DNA, 33 bp, Homo sapien
tggactggcaaagaaaagcagtgggttctggtc

SEQ ID NO: 714342 - DNA, 33 bp, Homo sapien
tggactggcaaagaaaggcagtgggttctggtc

SEQ ID NO: 714343 - DNA, 33 bp, Homo sapien
tagtttatggaaagcacgatgtggaacatgagt

SEQ ID NO: 714344 - DNA, 33 bp, Homo sapien
tagtttatggaaagcatgatgtggaacatgagt

SEQ ID NO: 714345 - DNA, 33 bp, Homo sapien
agtaggaaggtggagaatattggcacatgtgca

SEQ ID NO: 714346 - DNA, 33 bp, Homo sapien
agtaggaaggtggagagtattggcacatgtgca

SEQ ID NO: 714347 - DNA, 33 bp, Homo sapien
gtttcacttaacactacgagcaaatacaacacc

SEQ ID NO: 714348 - DNA, 33 bp, Homo sapien
gtttcacttaacactatgagcaaatacaacacc

SEQ ID NO: 714349 - DNA, 33 bp, Homo sapien
acttgagttccatacaccctggagtatgaaact

SEQ ID NO: 714350 - DNA, 33 bp, Homo sapien
acttgagttccatacatcctggagtatgaaact

SEQ ID NO: 714351 - DNA, 33 bp, Homo sapien
tatattccaaaacagactccgaataaaataaca

SEQ ID NO: 714352 - DNA, 33 bp, Homo sapien
tatattccaaaacagattccgaataaaataaca

SEQ ID NO: 714353 - DNA, 33 bp, Homo sapien
tatggcaagtagaagacgttatgagccaatcac

SEQ ID NO: 714354 - DNA, 33 bp, Homo sapien
tatggcaagtagaagatgttatgagccaatcac

SEQ ID NO: 714355 - DNA, 33 bp, Homo sapien
ggctaatttcactaacaattaatgtcctccagc

SEQ ID NO: 714356 - DNA, 33 bp, Homo sapien
ggctaatttcactaaccattaatgtcctccagc

SEQ ID NO: 714357 - DNA, 33 bp, Homo sapien
agactacaggatttacagggcatcataaagcaa

SEQ ID NO: 714358 - DNA, 33 bp, Homo sapien
agactacaggatttacggggcatcataaagcaa

SEQ ID NO: 714359 - DNA, 33 bp, Homo sapien
tcctcttgcatctcaccaagttttcttaaactc

SEQ ID NO: 714360 - DNA, 33 bp, Homo sapien
tcctcttgcatctcacgaagttttcttaaactc

SEQ ID NO: 714361 - DNA, 33 bp, Homo sapien
gacctaaaacatttcaaatccgtttgccctcta

SEQ ID NO: 714362 - DNA, 33 bp, Homo sapien
gacctaaaacatttcatatccgtttgccctcta

SEQ ID NO: 714363 - DNA, 33 bp, Homo sapien
cttgctgattacacaaatcaattagggatcaca

SEQ ID NO: 714364 - DNA, 33 bp, Homo sapien
cttgctgattacacaagtcaattagggatcaca

SEQ ID NO: 714365 - DNA, 33 bp, Homo sapien
ctcagacctagaacagcatacgaattgtaagca

SEQ ID NO: 714366 - DNA, 33 bp, Homo sapien
ctcagacctagaacagtatacgaattgtaagca

SEQ ID NO: 714367 - DNA, 33 bp, Homo sapien
ctgaagcaggtggaaaataaaaacaaaatcaag

SEQ ID NO: 714368 - DNA, 33 bp, Homo sapien
ctgaagcaggtggaaactaaaaacaaaatcaag

SEQ ID NO: 714369 - DNA, 33 bp, Homo sapien
tagtggtgtttgtctccacttccagatttttct

SEQ ID NO: 714370 - DNA, 33 bp, Homo sapien
tagtggtgtttgtctctacttccagatttttct

SEQ ID NO: 714371 - DNA, 33 bp, Homo sapien
aacaagatcctcagaaatggaatttatcagaaa

SEQ ID NO: 714372 - DNA, 33 bp, Homo sapien
aacaagatcctcagaattggaatttatcagaaa

SEQ ID NO: 714373 - DNA, 33 bp, Homo sapien
ctcctcttgaggaacaccagtagccagcctcag

SEQ ID NO: 714374 - DNA, 33 bp, Homo sapien
ctcctcttgaggaacagcagtagccagcctcag

SEQ ID NO: 714375 - DNA, 33 bp, Homo sapien
catttggttcaactccacagggacacctttgaa

SEQ ID NO: 714376 - DNA, 33 bp, Homo sapien
catttggttcaactccgcagggacacctttgaa

SEQ ID NO: 714377 - DNA, 33 bp, Homo sapien
gtttccatatttctaacctcttgctttgcagct

SEQ ID NO: 714378 - DNA, 33 bp, Homo sapien
gtttccatatttctaatctcttgctttgcagct

SEQ ID NO: 714379 - DNA, 33 bp, Homo sapien
ccagcaacacaggaccagctattgtatcttatt

SEQ ID NO: 714380 - DNA, 33 bp, Homo sapien
ccagcaacacaggaccggctattgtatcttatt

SEQ ID NO: 714381 - DNA, 33 bp, Homo sapien
atgtcttgataaataacggaaggtacagaaaac

SEQ ID NO: 714382 - DNA, 33 bp, Homo sapien
atgtcttgataaataatggaaggtacagaaaac

SEQ ID NO: 714383 - DNA, 33 bp, Homo sapien
caagaagtaagaattgccaacacactggttatt

SEQ ID NO: 714384 - DNA, 33 bp, Homo sapien
caagaagtaagaattgtcaacacactggttatt

SEQ ID NO: 714385 - DNA, 33 bp, Homo sapien
catgttaatccatcacagcaattgaatgaaatg

SEQ ID NO: 714386 - DNA, 33 bp, Homo sapien
catgttaatccatcactgcaattgaatgaaatg

SEQ ID NO: 714387 - DNA, 33 bp, Homo sapien
tcctaacaacttactcaagcttcatttgaggat

SEQ ID NO: 714388 - DNA, 33 bp, Homo sapien
tcctaacaacttactcgagcttcatttgaggat

SEQ ID NO: 714389 - DNA, 33 bp, Homo sapien
gtggcacagcaccatccattacaaagggacttg

SEQ ID NO: 714390 - DNA, 33 bp, Homo sapien
gtggcacagcaccatctattacaaagggacttg

SEQ ID NO: 714391 - DNA, 33 bp, Homo sapien
caaaacttatgccacccctccgtcatcatttac

SEQ ID NO: 714392 - DNA, 33 bp, Homo sapien
caaaacttatgccacctctccgtcatcatttac

SEQ ID NO: 714393 - DNA, 33 bp, Homo sapien
ggaactcaaactggacacaaccaggaagttgga

SEQ ID NO: 714394 - DNA, 33 bp, Homo sapien
ggaactcaaactggacgcaaccaggaagttgga

SEQ ID NO: 714395 - DNA, 33 bp, Homo sapien
acataacattgaatcacgtagagtgaaaattat

SEQ ID NO: 714396 - DNA, 33 bp, Homo sapien
acataacattgaatcatgtagagtgaaaattat

SEQ ID NO: 714397 - DNA, 33 bp, Homo sapien
aaagtccaattctgctaagcacactctcctgct

SEQ ID NO: 714398 - DNA, 33 bp, Homo sapien
aaagtccaattctgctgagcacactctcctgct

SEQ ID NO: 714399 - DNA, 33 bp, Homo sapien
gtaaaaatgataaacacagtaactgtaaacagc

SEQ ID NO: 714400 - DNA, 33 bp, Homo sapien
gtaaaaatgataaacagagtaactgtaaacagc

SEQ ID NO: 714401 - DNA, 33 bp, Homo sapien
gggtacagaagaaggaagatcaatctatctggc

SEQ ID NO: 714402 - DNA, 33 bp, Homo sapien
gggtacagaagaaggaggatcaatctatctggc

SEQ ID NO: 714403 - DNA, 33 bp, Homo sapien
atcattcattcattcaactcaacctagactgag

SEQ ID NO: 714404 - DNA, 33 bp, Homo sapien
atcattcattcattcagctcaacctagactgag

SEQ ID NO: 714405 - DNA, 33 bp, Homo sapien
tctaggttagaaaaaaatctgtccctgaatgtt

SEQ ID NO: 714406 - DNA, 33 bp, Homo sapien
tctaggttagaaaaaagtctgtccctgaatgtt

SEQ ID NO: 714407 - DNA, 33 bp, Homo sapien
tcactttaacaacaagaagactgaagtcctcag

SEQ ID NO: 714408 - DNA, 33 bp, Homo sapien
tcactttaacaacaaggagactgaagtcctcag

SEQ ID NO: 714409 - DNA, 33 bp, Homo sapien
atggagaaaagagtaacgaaggatggaaaggat

SEQ ID NO: 714410 - DNA, 33 bp, Homo sapien
atggagaaaagagtaatgaaggatggaaaggat

SEQ ID NO: 714411 - DNA, 33 bp, Homo sapien
aaaggtagcaagtatacagccaggacttggacc

SEQ ID NO: 714412 - DNA, 33 bp, Homo sapien
aaaggtagcaagtatagagccaggacttggacc

SEQ ID NO: 714413 - DNA, 33 bp, Homo sapien
ctctctcacacacttacacttaaatcagcttaa

SEQ ID NO: 714414 - DNA, 33 bp, Homo sapien
ctctctcacacacttagacttaaatcagcttaa

SEQ ID NO: 714415 - DNA, 33 bp, Homo sapien
tgcgaaggactagcaacttccctcctatcaccc

SEQ ID NO: 714416 - DNA, 33 bp, Homo sapien
tgcgaaggactagcaagttccctcctatcaccc

SEQ ID NO: 714417 - DNA, 33 bp, Homo sapien
atcttaatatttgaaacgatcttagaagttatt

SEQ ID NO: 714418 - DNA, 33 bp, Homo sapien
atcttaatatttgaaaggatcttagaagttatt

SEQ ID NO: 714419 - DNA, 33 bp, Homo sapien
tctggtacccagctaagtctttccatccatgtt

SEQ ID NO: 714420 - DNA, 33 bp, Homo sapien
tctggtacccagctaattctttccatccatgtt

SEQ ID NO: 714421 - DNA, 33 bp, Homo sapien
agcttttgaggcaatgaagataattaaaggaac

SEQ ID NO: 714422 - DNA, 33 bp, Homo sapien
agcttttgaggcaatggagataattaaaggaac

SEQ ID NO: 714423 - DNA, 33 bp, Homo sapien
tatgtgtgtagttctacggcattgctgtgttac

SEQ ID NO: 714424 - DNA, 33 bp, Homo sapien
tatgtgtgtagttctatggcattgctgtgttac

SEQ ID NO: 714425 - DNA, 33 bp, Homo sapien
gctgtgctcaaggtgacgaggggtcctaagaga

SEQ ID NO: 714426 - DNA, 33 bp, Homo sapien
gctgtgctcaaggtgatgaggggtcctaagaga

SEQ ID NO: 714427 - DNA, 33 bp, Homo sapien
agttgaaattgctttcccttctctattctttca

SEQ ID NO: 714428 - DNA, 33 bp, Homo sapien
agttgaaattgctttctcttctctattctttca

SEQ ID NO: 714429 - DNA, 33 bp, Homo sapien
tgaaggtttgtgtcacactgccaggtaaagaac

SEQ ID NO: 714430 - DNA, 33 bp, Homo sapien
tgaaggtttgtgtcaccctgccaggtaaagaac

SEQ ID NO: 714431 - DNA, 33 bp, Homo sapien
ttttttctcatttcagaaaagctgtcatggacc

SEQ ID NO: 714432 - DNA, 33 bp, Homo sapien
ttttttctcatttcagtaaagctgtcatggacc

SEQ ID NO: 714433 - DNA, 33 bp, Homo sapien
gacattttgttatttaccttgtccagtaatgtg

SEQ ID NO: 714434 - DNA, 33 bp, Homo sapien
gacattttgttatttatcttgtccagtaatgtg

SEQ ID NO: 714435 - DNA, 33 bp, Homo sapien
tgatgtctccaacaaaaaataataagttctaaa

SEQ ID NO: 714436 - DNA, 33 bp, Homo sapien
tgatgtctccaacaaacaataataagttctaaa

SEQ ID NO: 714437 - DNA, 33 bp, Homo sapien
agaccagcttgaccaacataatgaggccctgac

SEQ ID NO: 714438 - DNA, 33 bp, Homo sapien
agaccagcttgaccaatataatgaggccctgac

SEQ ID NO: 714439 - DNA, 33 bp, Homo sapien
agtggccttatataccaaagagagctgttccac

SEQ ID NO: 714440 - DNA, 33 bp, Homo sapien
agtggccttatataccgaagagagctgttccac

SEQ ID NO: 714441 - DNA, 33 bp, Homo sapien
caatgtctatgtagtacgtcaaaatattgcatt

SEQ ID NO: 714442 - DNA, 33 bp, Homo sapien
caatgtctatgtagtatgtcaaaatattgcatt

SEQ ID NO: 714443 - DNA, 33 bp, Homo sapien
aaatttcagttacgcaagatcaataagttctgg

SEQ ID NO: 714444 - DNA, 33 bp, Homo sapien
aaatttcagttacgcaggatcaataagttctgg

SEQ ID NO: 714445 - DNA, 33 bp, Homo sapien
tctactcatctctagacctgtgtttccatctgc

SEQ ID NO: 714446 - DNA, 33 bp, Homo sapien
tctactcatctctagatctgtgtttccatctgc

SEQ ID NO: 714447 - DNA, 33 bp, Homo sapien
aaaatgtttctcaatccctgatctgtttatatc

SEQ ID NO: 714448 - DNA, 33 bp, Homo sapien
aaaatgtttctcaatctctgatctgtttatatc

SEQ ID NO: 714449 - DNA, 33 bp, Homo sapien
tataaaaaggatcttaagctttcaaagattcta

SEQ ID NO: 714450 - DNA, 33 bp, Homo sapien
tataaaaaggatcttacgctttcaaagattcta

SEQ ID NO: 714451 - DNA, 33 bp, Homo sapien
aagacataaaagccaacttcaagaggctcccac

SEQ ID NO: 714452 - DNA, 33 bp, Homo sapien
aagacataaaagccaagttcaagaggctcccac

SEQ ID NO: 714453 - DNA, 33 bp, Homo sapien
tgagcagggtgaagacagcattcatcgaggggg

SEQ ID NO: 714454 - DNA, 33 bp, Homo sapien
tgagcagggtgaagactgcattcatcgaggggg

SEQ ID NO: 714455 - DNA, 33 bp, Homo sapien
caggtactcaatcaacactaaatgaatgaatag

SEQ ID NO: 714456 - DNA, 33 bp, Homo sapien
caggtactcaatcaacgctaaatgaatgaatag

SEQ ID NO: 714457 - DNA, 33 bp, Homo sapien
aaattttctttagcaaatagcagagtcaaatga

SEQ ID NO: 714458 - DNA, 33 bp, Homo sapien
aaattttctttagcaagtagcagagtcaaatga

SEQ ID NO: 714459 - DNA, 33 bp, Homo sapien
agttgtatcagtactaacttctgacacactcac

SEQ ID NO: 714460 - DNA, 33 bp, Homo sapien
agttgtatcagtactatcttctgacacactcac

SEQ ID NO: 714461 - DNA, 33 bp, Homo sapien
aatttggaaaattcctcaaagcacaaataaagc

SEQ ID NO: 714462 - DNA, 33 bp, Homo sapien
aatttggaaaattcctgaaagcacaaataaagc

SEQ ID NO: 714463 - DNA, 33 bp, Homo sapien
taaatatttgtggctacgacttttattaccaga

SEQ ID NO: 714464 - DNA, 33 bp, Homo sapien
taaatatttgtggctatgacttttattaccaga

SEQ ID NO: 714465 - DNA, 33 bp, Homo sapien
ggagcctgatgtgtgcaagttcccagctggggc

SEQ ID NO: 714466 - DNA, 33 bp, Homo sapien
ggagcctgatgtgtgcgagttcccagctggggc

SEQ ID NO: 714467 - DNA, 33 bp, Homo sapien
ggtgttccttacattgcagatgcatccctccag

SEQ ID NO: 714468 - DNA, 33 bp, Homo sapien
ggtgttccttacattgtagatgcatccctccag

SEQ ID NO: 714469 - DNA, 33 bp, Homo sapien
gtcattggataagggaccattagaatccagtgt

SEQ ID NO: 714470 - DNA, 33 bp, Homo sapien
gtcattggataagggatcattagaatccagtgt

SEQ ID NO: 714471 - DNA, 33 bp, Homo sapien
ggtgttggcacagtgacacttaacatacataat

SEQ ID NO: 714472 - DNA, 33 bp, Homo sapien
ggtgttggcacagtgatacttaacatacataat

SEQ ID NO: 714473 - DNA, 33 bp, Homo sapien
gactatttcagagttcaagtaaaagagaattga

SEQ ID NO: 714474 - DNA, 33 bp, Homo sapien
gactatttcagagttctagtaaaagagaattga

SEQ ID NO: 714475 - DNA, 33 bp, Homo sapien
actgagaatacaaagacgaacaagacagatata

SEQ ID NO: 714476 - DNA, 33 bp, Homo sapien
actgagaatacaaagatgaacaagacagatata

SEQ ID NO: 714477 - DNA, 33 bp, Homo sapien
gtaatgataatattgcgcattaaagagggaatt

SEQ ID NO: 714478 - DNA, 33 bp, Homo sapien
gtaatgataatattgctcattaaagagggaatt

SEQ ID NO: 714479 - DNA, 33 bp, Homo sapien
tatgtctagagtatagcacaatgttgcatacat

SEQ ID NO: 714480 - DNA, 33 bp, Homo sapien
tatgtctagagtataggacaatgttgcatacat

SEQ ID NO: 714481 - DNA, 33 bp, Homo sapien
acctactggctaaccgcagaaaacctgagtgaa

SEQ ID NO: 714482 - DNA, 33 bp, Homo sapien
acctactggctaaccgtagaaaacctgagtgaa

SEQ ID NO: 714483 - DNA, 33 bp, Homo sapien
tgtgtttgcttttacgccattatcatattggtt

SEQ ID NO: 714484 - DNA, 33 bp, Homo sapien
tgtgtttgcttttacgtcattatcatattggtt

SEQ ID NO: 714485 - DNA, 33 bp, Homo sapien
aaaagaccccaaataacgaaagcaattttgact

SEQ ID NO: 714486 - DNA, 33 bp, Homo sapien
aaaagaccccaaataatgaaagcaattttgact

SEQ ID NO: 714487 - DNA, 33 bp, Homo sapien
tttggccattaacacaaccttttgattcaatta

SEQ ID NO: 714488 - DNA, 33 bp, Homo sapien
tttggccattaacacagccttttgattcaatta

SEQ ID NO: 714489 - DNA, 33 bp, Homo sapien
ttaattgagtgtttaacagagacatcgatgtta

SEQ ID NO: 714490 - DNA, 33 bp, Homo sapien
ttaattgagtgtttaatagagacatcgatgtta

SEQ ID NO: 714491 - DNA, 33 bp, Homo sapien
caaatgtcacttctcgaaactctgagtttaagc

SEQ ID NO: 714492 - DNA, 33 bp, Homo sapien
caaatgtcacttctcggaactctgagtttaagc

SEQ ID NO: 714493 - DNA, 33 bp, Homo sapien
gctaatctctgaagtccaaagtttgttaaaatg

SEQ ID NO: 714494 - DNA, 33 bp, Homo sapien
gctaatctctgaagtctaaagtttgttaaaatg

SEQ ID NO: 714495 - DNA, 33 bp, Homo sapien
ggaaagagaataagcaatacagtgaggaacctg

SEQ ID NO: 714496 - DNA, 33 bp, Homo sapien
ggaaagagaataagcagtacagtgaggaacctg

SEQ ID NO: 714497 - DNA, 33 bp, Homo sapien
ggttggcttccttttccatcccctacagcacct

SEQ ID NO: 714498 - DNA, 33 bp, Homo sapien
ggttggcttccttttctatcccctacagcacct

SEQ ID NO: 714499 - DNA, 33 bp, Homo sapien
agctaaagatgaaaaaagtcacaaatttctcat

SEQ ID NO: 714500 - DNA, 33 bp, Homo sapien
agctaaagatgaaaaacgtcacaaatttctcat

SEQ ID NO: 714501 - DNA, 33 bp, Homo sapien
gaacaaagcaatctagcacttccaataaaagtc

SEQ ID NO: 714502 - DNA, 33 bp, Homo sapien
gaacaaagcaatctaggacttccaataaaagtc

SEQ ID NO: 714503 - DNA, 33 bp, Homo sapien
atctagctgcccattacgatgatgtctccagcc

SEQ ID NO: 714504 - DNA, 33 bp, Homo sapien
atctagctgcccattatgatgatgtctccagcc

SEQ ID NO: 714505 - DNA, 33 bp, Homo sapien
tgattgaatatgaggaaagcatggagccagtgg

SEQ ID NO: 714506 - DNA, 33 bp, Homo sapien
tgattgaatatgaggagagcatggagccagtgg

SEQ ID NO: 714507 - DNA, 33 bp, Homo sapien
aataacaatttatagcagatagctttctggaaa

SEQ ID NO: 714508 - DNA, 33 bp, Homo sapien
aataacaatttatagcggatagctttctggaaa

SEQ ID NO: 714509 - DNA, 33 bp, Homo sapien
tttagcttcctcaacacgtacagtacagaaatg

SEQ ID NO: 714510 - DNA, 33 bp, Homo sapien
tttagcttcctcaacatgtacagtacagaaatg

SEQ ID NO: 714511 - DNA, 33 bp, Homo sapien
ggggctgttacctatacacatgtgaagtccact

SEQ ID NO: 714512 - DNA, 33 bp, Homo sapien
ggggctgttacctatatacatgtgaagtccact

SEQ ID NO: 714513 - DNA, 33 bp, Homo sapien
ttaattagctaaacgccgcactggattatgcat

SEQ ID NO: 714514 - DNA, 33 bp, Homo sapien
ttaattagctaaacgctgcactggattatgcat

SEQ ID NO: 714515 - DNA, 33 bp, Homo sapien
agtgaaagctcctttagctaatgccattggtac

SEQ ID NO: 714516 - DNA, 33 bp, Homo sapien
agtgaaagctcctttatctaatgccattggtac

SEQ ID NO: 714517 - DNA, 33 bp, Homo sapien
agtggagaacctgaaaaagcagggagccaatat

SEQ ID NO: 714518 - DNA, 33 bp, Homo sapien
agtggagaacctgaaagagcagggagccaatat

SEQ ID NO: 714519 - DNA, 33 bp, Homo sapien
gatgaactggctgagactcccttcctggcagtc

SEQ ID NO: 714520 - DNA, 33 bp, Homo sapien
gatgaactggctgagattcccttcctggcagtc

SEQ ID NO: 714521 - DNA, 33 bp, Homo sapien
gcagatttagaagcgacaacactcctcttgcct

SEQ ID NO: 714522 - DNA, 33 bp, Homo sapien
gcagatttagaagcgataacactcctcttgcct

SEQ ID NO: 714523 - DNA, 33 bp, Homo sapien
cccccaggctggagcgcaatcctggctcactgc

SEQ ID NO: 714524 - DNA, 33 bp, Homo sapien
cccccaggctggagcgtaatcctggctcactgc

SEQ ID NO: 714525 - DNA, 33 bp, Homo sapien
ctcaggctttcttttcaaagagtaggtaaattc

SEQ ID NO: 714526 - DNA, 33 bp, Homo sapien
ctcaggctttcttttcgaagagtaggtaaattc

SEQ ID NO: 714527 - DNA, 33 bp, Homo sapien
ttagaagagaaaattgaagcagcaaagtgtaaa

SEQ ID NO: 714528 - DNA, 33 bp, Homo sapien
ttagaagagaaaattggagcagcaaagtgtaaa

SEQ ID NO: 714529 - DNA, 33 bp, Homo sapien
ccttgatagtttagccacatattcactctcaat

SEQ ID NO: 714530 - DNA, 33 bp, Homo sapien
ccttgatagtttagcctcatattcactctcaat

SEQ ID NO: 714531 - DNA, 33 bp, Homo sapien
aaagtagagctttcaaatatctcttcagtgaat

SEQ ID NO: 714532 - DNA, 33 bp, Homo sapien
aaagtagagctttcaagtatctcttcagtgaat

SEQ ID NO: 714533 - DNA, 33 bp, Homo sapien
tttcctcgttcacttacacgttctcaatgtcta

SEQ ID NO: 714534 - DNA, 33 bp, Homo sapien
tttcctcgttcacttatacgttctcaatgtcta

SEQ ID NO: 714535 - DNA, 33 bp, Homo sapien
ggctaatggccgaaaagattttatgtgagtttc

SEQ ID NO: 714536 - DNA, 33 bp, Homo sapien
ggctaatggccgaaaatattttatgtgagtttc

SEQ ID NO: 714537 - DNA, 33 bp, Homo sapien
ggtctaagaaagaggaaataagcaacacaaaga

SEQ ID NO: 714538 - DNA, 33 bp, Homo sapien
ggtctaagaaagaggatataagcaacacaaaga

SEQ ID NO: 714539 - DNA, 33 bp, Homo sapien
aggtccacacacagaaggttgaagagaagaaaa

SEQ ID NO: 714540 - DNA, 33 bp, Homo sapien
aggtccacacacagaatgttgaagagaagaaaa

SEQ ID NO: 714541 - DNA, 33 bp, Homo sapien
tcttcaaatgtgcaacaagatctatggaattta

SEQ ID NO: 714542 - DNA, 33 bp, Homo sapien
tcttcaaatgtgcaacgagatctatggaattta

SEQ ID NO: 714543 - DNA, 33 bp, Homo sapien
ctgggttctgataaccactcacattcctcatcc

SEQ ID NO: 714544 - DNA, 33 bp, Homo sapien
ctgggttctgataaccgctcacattcctcatcc

SEQ ID NO: 714545 - DNA, 33 bp, Homo sapien
tacaacccctccattaccttaactccagctgat

SEQ ID NO: 714546 - DNA, 33 bp, Homo sapien
tacaacccctccattatcttaactccagctgat

SEQ ID NO: 714547 - DNA, 33 bp, Homo sapien
catgatttttattccaactgactactagctgtg

SEQ ID NO: 714548 - DNA, 33 bp, Homo sapien
catgatttttattccacctgactactagctgtg

SEQ ID NO: 714549 - DNA, 33 bp, Homo sapien
tggtaagaactgaaacgctctatacttacgcag

SEQ ID NO: 714550 - DNA, 33 bp, Homo sapien
tggtaagaactgaaactctctatacttacgcag

SEQ ID NO: 714551 - DNA, 33 bp, Homo sapien
cacctttcccagcatgacaaacttacttgaaca

SEQ ID NO: 714552 - DNA, 33 bp, Homo sapien
cacctttcccagcatggcaaacttacttgaaca

SEQ ID NO: 714553 - DNA, 33 bp, Homo sapien
tatgtaattcttgcagcatcttgaaacagattg

SEQ ID NO: 714554 - DNA, 33 bp, Homo sapien
tatgtaattcttgcagtatcttgaaacagattg

SEQ ID NO: 714555 - DNA, 33 bp, Homo sapien
ctttctagtgagaaacagttatcaattatggtt

SEQ ID NO: 714556 - DNA, 33 bp, Homo sapien
ctttctagtgagaaactgttatcaattatggtt

SEQ ID NO: 714557 - DNA, 33 bp, Homo sapien
gaattcttgtaaaggcaaattatcttctccaag

SEQ ID NO: 714558 - DNA, 33 bp, Homo sapien
gaattcttgtaaaggcgaattatcttctccaag

SEQ ID NO: 714559 - DNA, 33 bp, Homo sapien
tggttggaccaggtgactatgtaaggtggtgat

SEQ ID NO: 714560 - DNA, 33 bp, Homo sapien
tggttggaccaggtgagtatgtaaggtggtgat

SEQ ID NO: 714561 - DNA, 33 bp, Homo sapien
cagtcatactggctgaaaaaacgagaacattgt

SEQ ID NO: 714562 - DNA, 33 bp, Homo sapien
cagtcatactggctgagaaaacgagaacattgt

SEQ ID NO: 714563 - DNA, 33 bp, Homo sapien
acatgagaagttacaccgaacgctgaagaaatt

SEQ ID NO: 714564 - DNA, 33 bp, Homo sapien
acatgagaagttacactgaacgctgaagaaatt

SEQ ID NO: 714565 - DNA, 33 bp, Homo sapien
aaggcagttactaagacggtactgtaaaaaccc

SEQ ID NO: 714566 - DNA, 33 bp, Homo sapien
aaggcagttactaagatggtactgtaaaaaccc

SEQ ID NO: 714567 - DNA, 33 bp, Homo sapien
tccctgggctccaaaacctgtgccagctggaaa

SEQ ID NO: 714568 - DNA, 33 bp, Homo sapien
tccctgggctccaaaatctgtgccagctggaaa

SEQ ID NO: 714569 - DNA, 33 bp, Homo sapien
ggtgaatattgaactacatcaggctaagagatc

SEQ ID NO: 714570 - DNA, 33 bp, Homo sapien
ggtgaatattgaactagatcaggctaagagatc

SEQ ID NO: 714571 - DNA, 33 bp, Homo sapien
aagtctttccttccaaatcaaaatgtttgcaaa

SEQ ID NO: 714572 - DNA, 33 bp, Homo sapien
aagtctttccttccaactcaaaatgtttgcaaa

SEQ ID NO: 714573 - DNA, 33 bp, Homo sapien
gaaatgtgtggaatcacagaatcattttcccag

SEQ ID NO: 714574 - DNA, 33 bp, Homo sapien
gaaatgtgtggaatcatagaatcattttcccag

SEQ ID NO: 714575 - DNA, 33 bp, Homo sapien
gagaggttataagtcacccattctcacattttg

SEQ ID NO: 714576 - DNA, 33 bp, Homo sapien
gagaggttataagtcatccattctcacattttg

SEQ ID NO: 714577 - DNA, 33 bp, Homo sapien
cacaatgaagcaaaaacgtgaaaagctcaatat

SEQ ID NO: 714578 - DNA, 33 bp, Homo sapien
cacaatgaagcaaaaatgtgaaaagctcaatat

SEQ ID NO: 714579 - DNA, 33 bp, Homo sapien
ggccctttccccagtacaggttgactaatatca

SEQ ID NO: 714580 - DNA, 33 bp, Homo sapien
ggccctttccccagtagaggttgactaatatca

SEQ ID NO: 714581 - DNA, 33 bp, Homo sapien
aaaaagttaaacatacacttatgcagctgagcc

SEQ ID NO: 714582 - DNA, 33 bp, Homo sapien
aaaaagttaaacatacgcttatgcagctgagcc

SEQ ID NO: 714583 - DNA, 33 bp, Homo sapien
aagtgttacaatcccaagatatttgtcaaatgc

SEQ ID NO: 714584 - DNA, 33 bp, Homo sapien
aagtgttacaatcccaggatatttgtcaaatgc

SEQ ID NO: 714585 - DNA, 33 bp, Homo sapien
tctttcttgttgctaaggtatctatccattttg

SEQ ID NO: 714586 - DNA, 33 bp, Homo sapien
tctttcttgttgctaatgtatctatccattttg

SEQ ID NO: 714587 - DNA, 33 bp, Homo sapien
taaatttttacgagacactccaaccaggaagaa

SEQ ID NO: 714588 - DNA, 33 bp, Homo sapien
taaatttttacgagacgctccaaccaggaagaa

SEQ ID NO: 714589 - DNA, 33 bp, Homo sapien
gtggcaccaattctcaacaattctgctttccag

SEQ ID NO: 714590 - DNA, 33 bp, Homo sapien
gtggcaccaattctcagcaattctgctttccag

SEQ ID NO: 714591 - DNA, 33 bp, Homo sapien
aatactagaactgagcaagtaggggccaaaagt

SEQ ID NO: 714592 - DNA, 33 bp, Homo sapien
aatactagaactgagccagtaggggccaaaagt

SEQ ID NO: 714593 - DNA, 33 bp, Homo sapien
ttaaaataattctcgacgtctgggcacagtggc

SEQ ID NO: 714594 - DNA, 33 bp, Homo sapien
ttaaaataattctcgatgtctgggcacagtggc

SEQ ID NO: 714595 - DNA, 33 bp, Homo sapien
tcaacactatgaagagactacaactaacggtgc

SEQ ID NO: 714596 - DNA, 33 bp, Homo sapien
tcaacactatgaagaggctacaactaacggtgc

SEQ ID NO: 714597 - DNA, 33 bp, Homo sapien
agaggccctgaggtaacgtggaataagagataa

SEQ ID NO: 714598 - DNA, 33 bp, Homo sapien
agaggccctgaggtaatgtggaataagagataa

SEQ ID NO: 714599 - DNA, 33 bp, Homo sapien
tggaaggttttgaaaacgtcacagatttataga

SEQ ID NO: 714600 - DNA, 33 bp, Homo sapien
tggaaggttttgaaaatgtcacagatttataga

SEQ ID NO: 714601 - DNA, 33 bp, Homo sapien
atgtatgcttttggtaaacttacagaaagattg

SEQ ID NO: 714602 - DNA, 33 bp, Homo sapien
atgtatgcttttggtagacttacagaaagattg

SEQ ID NO: 714603 - DNA, 33 bp, Homo sapien
agaacacagattttgacattagacaaatctggc

SEQ ID NO: 714604 - DNA, 33 bp, Homo sapien
agaacacagattttgagattagacaaatctggc

SEQ ID NO: 714605 - DNA, 33 bp, Homo sapien
ttcaactgaaggaaaccaccctgcctctgcttc

SEQ ID NO: 714606 - DNA, 33 bp, Homo sapien
ttcaactgaaggaaacgaccctgcctctgcttc

SEQ ID NO: 714607 - DNA, 33 bp, Homo sapien
ctatcggtggatacagaactaaatgtttgtaaa

SEQ ID NO: 714608 - DNA, 33 bp, Homo sapien
ctatcggtggatacaggactaaatgtttgtaaa

SEQ ID NO: 714609 - DNA, 33 bp, Homo sapien
ttttgactgtcaattgaagtgatgatgtggagg

SEQ ID NO: 714610 - DNA, 33 bp, Homo sapien
ttttgactgtcaattgcagtgatgatgtggagg

SEQ ID NO: 714611 - DNA, 33 bp, Homo sapien
cggtttaaaggttgctaaaaatatcataaaggt

SEQ ID NO: 714612 - DNA, 33 bp, Homo sapien
cggtttaaaggttgctgaaaatatcataaaggt

SEQ ID NO: 714613 - DNA, 33 bp, Homo sapien
agtaaaacagcatgaacaattttttcacaattt

SEQ ID NO: 714614 - DNA, 33 bp, Homo sapien
agtaaaacagcatgaagaattttttcacaattt

SEQ ID NO: 714615 - DNA, 33 bp, Homo sapien
acagtctctcctggatgataaaacccttgatga

SEQ ID NO: 714616 - DNA, 33 bp, Homo sapien
acagtctctcctggattataaaacccttgatga

SEQ ID NO: 714617 - DNA, 33 bp, Homo sapien
gaaattgtatcagaaacagatgctttcctgatt

SEQ ID NO: 714618 - DNA, 33 bp, Homo sapien
gaaattgtatcagaaatagatgctttcctgatt

SEQ ID NO: 714619 - DNA, 33 bp, Homo sapien
tacaggctgtagttacactgagtacgatactgg

SEQ ID NO: 714620 - DNA, 33 bp, Homo sapien
tacaggctgtagttactctgagtacgatactgg

SEQ ID NO: 714621 - DNA, 33 bp, Homo sapien
ggaagggttgcactacagccatctgctatgcct

SEQ ID NO: 714622 - DNA, 33 bp, Homo sapien
ggaagggttgcactacggccatctgctatgcct

SEQ ID NO: 714623 - DNA, 33 bp, Homo sapien
agctaatgttgccacaaaaggaggtgacttaaa

SEQ ID NO: 714624 - DNA, 33 bp, Homo sapien
agctaatgttgccacagaaggaggtgacttaaa

SEQ ID NO: 714625 - DNA, 33 bp, Homo sapien
acactatggtcaggtcacatagatattatttgt

SEQ ID NO: 714626 - DNA, 33 bp, Homo sapien
acactatggtcaggtcgcatagatattatttgt

SEQ ID NO: 714627 - DNA, 33 bp, Homo sapien
aatggttaatctagaaatgtcatgtaggataga

SEQ ID NO: 714628 - DNA, 33 bp, Homo sapien
aatggttaatctagaagtgtcatgtaggataga

SEQ ID NO: 714629 - DNA, 33 bp, Homo sapien
caggacacttctcttacccaccatctcttgaaa

SEQ ID NO: 714630 - DNA, 33 bp, Homo sapien
caggacacttctcttatccaccatctcttgaaa

SEQ ID NO: 714631 - DNA, 33 bp, Homo sapien
aaaatctgttctcttcacagtggccagaatgat

SEQ ID NO: 714632 - DNA, 33 bp, Homo sapien
aaaatctgttctcttcccagtggccagaatgat

SEQ ID NO: 714633 - DNA, 33 bp, Homo sapien
attctctcaaacatgaacaaagcatcaaggaaa

SEQ ID NO: 714634 - DNA, 33 bp, Homo sapien
attctctcaaacatgagcaaagcatcaaggaaa

SEQ ID NO: 714635 - DNA, 33 bp, Homo sapien
caattttttatactgacatgactttagagtttg

SEQ ID NO: 714636 - DNA, 33 bp, Homo sapien
caattttttatactgatatgactttagagtttg

SEQ ID NO: 714637 - DNA, 33 bp, Homo sapien
agaggaattatttaacaacaacctgcggacata

SEQ ID NO: 714638 - DNA, 33 bp, Homo sapien
agaggaattatttaacgacaacctgcggacata

SEQ ID NO: 714639 - DNA, 33 bp, Homo sapien
gaaaagggcaatatatcaggtatgtttacttca

SEQ ID NO: 714640 - DNA, 33 bp, Homo sapien
gaaaagggcaatatattaggtatgtttacttca

SEQ ID NO: 714641 - DNA, 33 bp, Homo sapien
atttctatactggttaaacctattttctatctc

SEQ ID NO: 714642 - DNA, 33 bp, Homo sapien
atttctatactggttagacctattttctatctc

SEQ ID NO: 714643 - DNA, 33 bp, Homo sapien
gtctgcataggtcctcaaaagcacattttttaa

SEQ ID NO: 714644 - DNA, 33 bp, Homo sapien
gtctgcataggtcctcgaaagcacattttttaa

SEQ ID NO: 714645 - DNA, 33 bp, Homo sapien
tgtagcttaggaaacacagaaggaattacacat

SEQ ID NO: 714646 - DNA, 33 bp, Homo sapien
tgtagcttaggaaacatagaaggaattacacat

SEQ ID NO: 714647 - DNA, 33 bp, Homo sapien
agtgaatgaataaatgcatctagttgaatccaa

SEQ ID NO: 714648 - DNA, 33 bp, Homo sapien
agtgaatgaataaatgtatctagttgaatccaa

SEQ ID NO: 714649 - DNA, 33 bp, Homo sapien
tcctccagtaccaaagcccttacatgagttaca

SEQ ID NO: 714650 - DNA, 33 bp, Homo sapien
tcctccagtaccaaagtccttacatgagttaca

SEQ ID NO: 714651 - DNA, 33 bp, Homo sapien
agatgcgtttcaggcactctatattcaaagtac

SEQ ID NO: 714652 - DNA, 33 bp, Homo sapien
agatgcgtttcaggcattctatattcaaagtac

SEQ ID NO: 714653 - DNA, 33 bp, Homo sapien
tatattcaaagtacacagaattcacataaacag

SEQ ID NO: 714654 - DNA, 33 bp, Homo sapien
tatattcaaagtacaccgaattcacataaacag

SEQ ID NO: 714655 - DNA, 33 bp, Homo sapien
agcattaggcagcttaaacatgaattcagattc

SEQ ID NO: 714656 - DNA, 33 bp, Homo sapien
agcattaggcagcttacacatgaattcagattc

SEQ ID NO: 714657 - DNA, 33 bp, Homo sapien
ctgttcttgcagaatcaaccctttcttacactg

SEQ ID NO: 714658 - DNA, 33 bp, Homo sapien
ctgttcttgcagaatcgaccctttcttacactg

SEQ ID NO: 714659 - DNA, 33 bp, Homo sapien
ctcgaaaagaggaaacactgggcatgatatgaa

SEQ ID NO: 714660 - DNA, 33 bp, Homo sapien
ctcgaaaagaggaaaccctgggcatgatatgaa

SEQ ID NO: 714661 - DNA, 33 bp, Homo sapien
tttttagagttctgcacgttcttggtttctaag

SEQ ID NO: 714662 - DNA, 33 bp, Homo sapien
tttttagagttctgcatgttcttggtttctaag

SEQ ID NO: 714663 - DNA, 33 bp, Homo sapien
tttaaatatctgatcaccccagtcccagtttac

SEQ ID NO: 714664 - DNA, 33 bp, Homo sapien
tttaaatatctgatcagcccagtcccagtttac

SEQ ID NO: 714665 - DNA, 33 bp, Homo sapien
ttccacaagctctctcccgcttttttcctctcc

SEQ ID NO: 714666 - DNA, 33 bp, Homo sapien
ttccacaagctctctctcgcttttttcctctcc

SEQ ID NO: 714667 - DNA, 33 bp, Homo sapien
cctccgggcatcgtatcaagaccttatggaaga

SEQ ID NO: 714668 - DNA, 33 bp, Homo sapien
cctccgggcatcgtatgaagaccttatggaaga

SEQ ID NO: 714669 - DNA, 33 bp, Homo sapien
tacagaaaaaacactcaataaaatctgactttt

SEQ ID NO: 714670 - DNA, 33 bp, Homo sapien
tacagaaaaaacactcgataaaatctgactttt

SEQ ID NO: 714671 - DNA, 33 bp, Homo sapien
tcagaggcagggtaaactgttaggaagagcaca

SEQ ID NO: 714672 - DNA, 33 bp, Homo sapien
tcagaggcagggtaaattgttaggaagagcaca

SEQ ID NO: 714673 - DNA, 33 bp, Homo sapien
tcatcatgacctatgaaaagtgaaactatgcta

SEQ ID NO: 714674 - DNA, 33 bp, Homo sapien
tcatcatgacctatgagaagtgaaactatgcta

SEQ ID NO: 714675 - DNA, 33 bp, Homo sapien
tgacttccagagatagcaaattttttcccttgt

SEQ ID NO: 714676 - DNA, 33 bp, Homo sapien
tgacttccagagatagtaaattttttcccttgt

SEQ ID NO: 714677 - DNA, 33 bp, Homo sapien
acccagataataaacactgtacctgacagagag

SEQ ID NO: 714678 - DNA, 33 bp, Homo sapien
acccagataataaacattgtacctgacagagag

SEQ ID NO: 714679 - DNA, 33 bp, Homo sapien
caattgaaacagatacaagaaggtcctgccggc

SEQ ID NO: 714680 - DNA, 33 bp, Homo sapien
caattgaaacagatacgagaaggtcctgccggc

SEQ ID NO: 714681 - DNA, 33 bp, Homo sapien
ttatagaaaaccgacacgaaacaagtaatgaca

SEQ ID NO: 714682 - DNA, 33 bp, Homo sapien
ttatagaaaaccgacatgaaacaagtaatgaca

SEQ ID NO: 714683 - DNA, 33 bp, Homo sapien
aagtaactcaaactgaactagaaagtcattgtt

SEQ ID NO: 714684 - DNA, 33 bp, Homo sapien
aagtaactcaaactgagctagaaagtcattgtt

SEQ ID NO: 714685 - DNA, 33 bp, Homo sapien
tatgaggagaataaccactttttccaagtatgt

SEQ ID NO: 714686 - DNA, 33 bp, Homo sapien
tatgaggagaataacctctttttccaagtatgt

SEQ ID NO: 714687 - DNA, 33 bp, Homo sapien
gaggtctacaagactaagccagtgttccttagt

SEQ ID NO: 714688 - DNA, 33 bp, Homo sapien
gaggtctacaagactaggccagtgttccttagt

SEQ ID NO: 714689 - DNA, 33 bp, Homo sapien
ccaagtgtagacaaaaactcttgaagtaatttt

SEQ ID NO: 714690 - DNA, 33 bp, Homo sapien
ccaagtgtagacaaaacctcttgaagtaatttt

SEQ ID NO: 714691 - DNA, 33 bp, Homo sapien
ggttagattcttattacaccaagtgtagacaaa

SEQ ID NO: 714692 - DNA, 33 bp, Homo sapien
ggttagattcttattataccaagtgtagacaaa

SEQ ID NO: 714693 - DNA, 33 bp, Homo sapien
cacatccttcaaatgcaagaactacaccataat

SEQ ID NO: 714694 - DNA, 33 bp, Homo sapien
cacatccttcaaatgccagaactacaccataat

SEQ ID NO: 714695 - DNA, 33 bp, Homo sapien
ttgtgttaaatagatacgtttagtgtaccattt

SEQ ID NO: 714696 - DNA, 33 bp, Homo sapien
ttgtgttaaatagatatgtttagtgtaccattt

SEQ ID NO: 714697 - DNA, 33 bp, Homo sapien
gggaaggagatcaaaacctaaagttgttacatt

SEQ ID NO: 714698 - DNA, 33 bp, Homo sapien
gggaaggagatcaaaatctaaagttgttacatt

SEQ ID NO: 714699 - DNA, 33 bp, Homo sapien
actgaacctaaagctaagatccctttagttctt

SEQ ID NO: 714700 - DNA, 33 bp, Homo sapien
actgaacctaaagctacgatccctttagttctt

SEQ ID NO: 714701 - DNA, 33 bp, Homo sapien
ggttcagttagatacccacattttatctacccc

SEQ ID NO: 714702 - DNA, 33 bp, Homo sapien
ggttcagttagataccgacattttatctacccc

SEQ ID NO: 714703 - DNA, 33 bp, Homo sapien
ccttaaggtaaaatgacgactatttcctgtaag

SEQ ID NO: 714704 - DNA, 33 bp, Homo sapien
ccttaaggtaaaatgatgactatttcctgtaag

SEQ ID NO: 714705 - DNA, 33 bp, Homo sapien
cttagatttggtgtcaatcatggcctatgctcc

SEQ ID NO: 714706 - DNA, 33 bp, Homo sapien
cttagatttggtgtcagtcatggcctatgctcc

SEQ ID NO: 714707 - DNA, 33 bp, Homo sapien
aacttctaggggtagcagccacatctcaagagc

SEQ ID NO: 714708 - DNA, 33 bp, Homo sapien
aacttctaggggtagcggccacatctcaagagc

SEQ ID NO: 714709 - DNA, 33 bp, Homo sapien
gggatgggaacataccacagcctgcattctcaa

SEQ ID NO: 714710 - DNA, 33 bp, Homo sapien
gggatgggaacataccgcagcctgcattctcaa

SEQ ID NO: 714711 - DNA, 33 bp, Homo sapien
atttgttacctaggacactagtaatgacctcag

SEQ ID NO: 714712 - DNA, 33 bp, Homo sapien
atttgttacctaggacgctagtaatgacctcag

SEQ ID NO: 714713 - DNA, 33 bp, Homo sapien
tggagagtgagaaagactagagataaagcagaa

SEQ ID NO: 714714 - DNA, 33 bp, Homo sapien
tggagagtgagaaagagtagagataaagcagaa

SEQ ID NO: 714715 - DNA, 33 bp, Homo sapien
tttctttcttccttcactaaaactctacttttc

SEQ ID NO: 714716 - DNA, 33 bp, Homo sapien
tttctttcttccttcattaaaactctacttttc

SEQ ID NO: 714717 - DNA, 33 bp, Homo sapien
tggcaaagggtctagacgttatggtgataggtg

SEQ ID NO: 714718 - DNA, 33 bp, Homo sapien
tggcaaagggtctagatgttatggtgataggtg

SEQ ID NO: 714719 - DNA, 33 bp, Homo sapien
caacccttacacctcacgaagtaagaaagaaaa

SEQ ID NO: 714720 - DNA, 33 bp, Homo sapien
caacccttacacctcatgaagtaagaaagaaaa

SEQ ID NO: 714721 - DNA, 33 bp, Homo sapien
gaggtacagaggtgtccagttacttccccaaag

SEQ ID NO: 714722 - DNA, 33 bp, Homo sapien
gaggtacagaggtgtctagttacttccccaaag

SEQ ID NO: 714723 - DNA, 33 bp, Homo sapien
tagtgttgttgcaaaactgatagatgattattg

SEQ ID NO: 714724 - DNA, 33 bp, Homo sapien
tagtgttgttgcaaaattgatagatgattattg

SEQ ID NO: 714725 - DNA, 33 bp, Homo sapien
aatgctaaattatctgaatcaaaaagaaatatc

SEQ ID NO: 714726 - DNA, 33 bp, Homo sapien
aatgctaaattatctggatcaaaaagaaatatc

SEQ ID NO: 714727 - DNA, 33 bp, Homo sapien
tcctgttttccattcacgttgtcactaagctaa

SEQ ID NO: 714728 - DNA, 33 bp, Homo sapien
tcctgttttccattcatgttgtcactaagctaa

SEQ ID NO: 714729 - DNA, 33 bp, Homo sapien
aagatgatcccttttacggtttgaagacagacc

SEQ ID NO: 714730 - DNA, 33 bp, Homo sapien
aagatgatcccttttatggtttgaagacagacc

SEQ ID NO: 714731 - DNA, 33 bp, Homo sapien
aaatttcagattctccagacctgtccctactct

SEQ ID NO: 714732 - DNA, 33 bp, Homo sapien
aaatttcagattctccggacctgtccctactct

SEQ ID NO: 714733 - DNA, 33 bp, Homo sapien
actatgaggtctaagcagaaaagtaaaaacttt

SEQ ID NO: 714734 - DNA, 33 bp, Homo sapien
actatgaggtctaagctgaaaagtaaaaacttt

SEQ ID NO: 714735 - DNA, 33 bp, Homo sapien
ttgttataatgtaccaagcatttatcagattga

SEQ ID NO: 714736 - DNA, 33 bp, Homo sapien
ttgttataatgtaccaggcatttatcagattga

SEQ ID NO: 714737 - DNA, 33 bp, Homo sapien
gtgtcccctgttccaacaccttttcattaggcc

SEQ ID NO: 714738 - DNA, 33 bp, Homo sapien
gtgtcccctgttccaagaccttttcattaggcc

SEQ ID NO: 714739 - DNA, 33 bp, Homo sapien
atgtggccaggtctcaaaggactagacgcggag

SEQ ID NO: 714740 - DNA, 33 bp, Homo sapien
atgtggccaggtctcagaggactagacgcggag

SEQ ID NO: 714741 - DNA, 33 bp, Homo sapien
gtgatggagactgtaacgccctataggagagag

SEQ ID NO: 714742 - DNA, 33 bp, Homo sapien
gtgatggagactgtaaggccctataggagagag

SEQ ID NO: 714743 - DNA, 33 bp, Homo sapien
tttactttggtggcagaaaaagtcagatggcag

SEQ ID NO: 714744 - DNA, 33 bp, Homo sapien
tttactttggtggcaggaaaagtcagatggcag

SEQ ID NO: 714745 - DNA, 33 bp, Homo sapien
gggtgtggagtcaccaacgtaagccaattgtaa

SEQ ID NO: 714746 - DNA, 33 bp, Homo sapien
gggtgtggagtcaccagcgtaagccaattgtaa

SEQ ID NO: 714747 - DNA, 33 bp, Homo sapien
aagtgagaattctggacagactgtgcacttttg

SEQ ID NO: 714748 - DNA, 33 bp, Homo sapien
aagtgagaattctggagagactgtgcacttttg

SEQ ID NO: 714749 - DNA, 33 bp, Homo sapien
aactgtgaaataggcaataaagtatgaatattt

SEQ ID NO: 714750 - DNA, 33 bp, Homo sapien
aactgtgaaataggcagtaaagtatgaatattt

SEQ ID NO: 714751 - DNA, 33 bp, Homo sapien
ttcctccatgtaatccagatatatcttgcctcc

SEQ ID NO: 714752 - DNA, 33 bp, Homo sapien
ttcctccatgtaatcccgatatatcttgcctcc

SEQ ID NO: 714753 - DNA, 33 bp, Homo sapien
gcagtaagaatattcccggaagactttcctaca

SEQ ID NO: 714754 - DNA, 33 bp, Homo sapien
gcagtaagaatattcctggaagactttcctaca

SEQ ID NO: 714755 - DNA, 33 bp, Homo sapien
ttcccatttttattccaacttctctcatctctc

SEQ ID NO: 714756 - DNA, 33 bp, Homo sapien
ttcccatttttattccgacttctctcatctctc

SEQ ID NO: 714757 - DNA, 33 bp, Homo sapien
catcaagagcaaaaccaattttcttgtcctgca

SEQ ID NO: 714758 - DNA, 33 bp, Homo sapien
catcaagagcaaaaccgattttcttgtcctgca

SEQ ID NO: 714759 - DNA, 33 bp, Homo sapien
aattgacaaacaaaaacttggatatcgctacag

SEQ ID NO: 714760 - DNA, 33 bp, Homo sapien
aattgacaaacaaaaagttggatatcgctacag

SEQ ID NO: 714761 - DNA, 33 bp, Homo sapien
attctgggctcaacaacagtaagtaggcttgtc

SEQ ID NO: 714762 - DNA, 33 bp, Homo sapien
attctgggctcaacaatagtaagtaggcttgtc

SEQ ID NO: 714763 - DNA, 33 bp, Homo sapien
tgctcggttgcaatgtaaaatgtcatcattaaa

SEQ ID NO: 714764 - DNA, 33 bp, Homo sapien
tgctcggttgcaatgtgaaatgtcatcattaaa

SEQ ID NO: 714765 - DNA, 33 bp, Homo sapien
ttaaaattctggttaactcacatgctatgtgtt

SEQ ID NO: 714766 - DNA, 33 bp, Homo sapien
ttaaaattctggttaagtcacatgctatgtgtt

SEQ ID NO: 714767 - DNA, 33 bp, Homo sapien
ttttgtagacccctaacgcctctcttcccatct

SEQ ID NO: 714768 - DNA, 33 bp, Homo sapien
ttttgtagacccctaatgcctctcttcccatct

SEQ ID NO: 714769 - DNA, 33 bp, Homo sapien
tcattttgaaccctggacattgcctaattcaag

SEQ ID NO: 714770 - DNA, 33 bp, Homo sapien
tcattttgaaccctgggcattgcctaattcaag

SEQ ID NO: 714771 - DNA, 33 bp, Homo sapien
caaatgaacccaaatgaattcaactttactgaa

SEQ ID NO: 714772 - DNA, 33 bp, Homo sapien
caaatgaacccaaatggattcaactttactgaa

SEQ ID NO: 714773 - DNA, 33 bp, Homo sapien
tgttactgaaataagaatatcaggcaactggaa

SEQ ID NO: 714774 - DNA, 33 bp, Homo sapien
tgttactgaaataagagtatcaggcaactggaa

SEQ ID NO: 714775 - DNA, 33 bp, Homo sapien
tggaactgcacatttcccttgtaaaagatgcct

SEQ ID NO: 714776 - DNA, 33 bp, Homo sapien
tggaactgcacatttctcttgtaaaagatgcct

SEQ ID NO: 714777 - DNA, 33 bp, Homo sapien
acttggctttgtgttgcaaactatggttcatct

SEQ ID NO: 714778 - DNA, 33 bp, Homo sapien
acttggctttgtgttgtaaactatggttcatct

SEQ ID NO: 714779 - DNA, 33 bp, Homo sapien
atagtggcaacaatctcaatggctgtgtatctc

SEQ ID NO: 714780 - DNA, 33 bp, Homo sapien
atagtggcaacaatctgaatggctgtgtatctc

SEQ ID NO: 714781 - DNA, 33 bp, Homo sapien
tgaaaccatctcttccccatctttcaaaggtct

SEQ ID NO: 714782 - DNA, 33 bp, Homo sapien
tgaaaccatctcttcctcatctttcaaaggtct

SEQ ID NO: 714783 - DNA, 33 bp, Homo sapien
taatatattggtgcaaactttgagaggtatcta

SEQ ID NO: 714784 - DNA, 33 bp, Homo sapien
taatatattggtgcaagctttgagaggtatcta

SEQ ID NO: 714785 - DNA, 33 bp, Homo sapien
taagacctgtatttcaaaactctaggaaacttt

SEQ ID NO: 714786 - DNA, 33 bp, Homo sapien
taagacctgtatttcagaactctaggaaacttt

SEQ ID NO: 714787 - DNA, 33 bp, Homo sapien
atctcatggtccagagcagtgtggggaagggca

SEQ ID NO: 714788 - DNA, 33 bp, Homo sapien
atctcatggtccagagtagtgtggggaagggca

SEQ ID NO: 714789 - DNA, 33 bp, Homo sapien
cattttgcaatcctaacagcaacaagcaatagt

SEQ ID NO: 714790 - DNA, 33 bp, Homo sapien
cattttgcaatcctaatagcaacaagcaatagt

SEQ ID NO: 714791 - DNA, 33 bp, Homo sapien
tgaaattaaacaacaacgagatagccctataca

SEQ ID NO: 714792 - DNA, 33 bp, Homo sapien
tgaaattaaacaacaatgagatagccctataca

SEQ ID NO: 714793 - DNA, 33 bp, Homo sapien
tgttctccaactaagacgaccagctctttgtct

SEQ ID NO: 714794 - DNA, 33 bp, Homo sapien
tgttctccaactaagatgaccagctctttgtct

SEQ ID NO: 714795 - DNA, 33 bp, Homo sapien
atcctcatgtagaacaacttcagctcagaatca

SEQ ID NO: 714796 - DNA, 33 bp, Homo sapien
atcctcatgtagaacaccttcagctcagaatca

SEQ ID NO: 714797 - DNA, 33 bp, Homo sapien
tgtgtgactttcctaacgtggcttcttttgctc

SEQ ID NO: 714798 - DNA, 33 bp, Homo sapien
tgtgtgactttcctaatgtggcttcttttgctc

SEQ ID NO: 714799 - DNA, 33 bp, Homo sapien
ggggaggggatctgaaattagtagagtactgca

SEQ ID NO: 714800 - DNA, 33 bp, Homo sapien
ggggaggggatctgaacttagtagagtactgca

SEQ ID NO: 714801 - DNA, 33 bp, Homo sapien
gactcacagttaagaccgcacagacttatgtcc

SEQ ID NO: 714802 - DNA, 33 bp, Homo sapien
gactcacagttaagactgcacagacttatgtcc

SEQ ID NO: 714803 - DNA, 33 bp, Homo sapien
tcaaggaaccctgcagaagacatatatgagtta

SEQ ID NO: 714804 - DNA, 33 bp, Homo sapien
tcaaggaaccctgcaggagacatatatgagtta

SEQ ID NO: 714805 - DNA, 33 bp, Homo sapien
ttttagtggtgatagactagctcattatcttga

SEQ ID NO: 714806 - DNA, 33 bp, Homo sapien
ttttagtggtgatagattagctcattatcttga

SEQ ID NO: 714807 - DNA, 33 bp, Homo sapien
caaatgagaaatagaaatgtcaaattcccactg

SEQ ID NO: 714808 - DNA, 33 bp, Homo sapien
caaatgagaaatagaagtgtcaaattcccactg

SEQ ID NO: 714809 - DNA, 33 bp, Homo sapien
aggtaaaaatctttgtcaatacagcagactagc

SEQ ID NO: 714810 - DNA, 33 bp, Homo sapien
aggtaaaaatctttgtgaatacagcagactagc

SEQ ID NO: 714811 - DNA, 33 bp, Homo sapien
gaaaatctgtatgtcacgggaaaggtttggact

SEQ ID NO: 714812 - DNA, 33 bp, Homo sapien
gaaaatctgtatgtcatgggaaaggtttggact

SEQ ID NO: 714813 - DNA, 33 bp, Homo sapien
gacttcagaaaatgtacgtcttaccagatttaa

SEQ ID NO: 714814 - DNA, 33 bp, Homo sapien
gacttcagaaaatgtatgtcttaccagatttaa

SEQ ID NO: 714815 - DNA, 33 bp, Homo sapien
ctaagagttaaaaaggaagataacgaaatgcat

SEQ ID NO: 714816 - DNA, 33 bp, Homo sapien
ctaagagttaaaaagggagataacgaaatgcat

SEQ ID NO: 714817 - DNA, 33 bp, Homo sapien
aaaaaggtatgcataagcactgtgtcaaatcac

SEQ ID NO: 714818 - DNA, 33 bp, Homo sapien
aaaaaggtatgcataatcactgtgtcaaatcac

SEQ ID NO: 714819 - DNA, 33 bp, Homo sapien
ataaagaaacatgataaaacagtactactaaat

SEQ ID NO: 714820 - DNA, 33 bp, Homo sapien
ataaagaaacatgatataacagtactactaaat

SEQ ID NO: 714821 - DNA, 33 bp, Homo sapien
tactgtcaacaacaatcagggtcacatgaagtc

SEQ ID NO: 714822 - DNA, 33 bp, Homo sapien
tactgtcaacaacaatgagggtcacatgaagtc

SEQ ID NO: 714823 - DNA, 33 bp, Homo sapien
ttttgttagactactacggcatccctagagcta

SEQ ID NO: 714824 - DNA, 33 bp, Homo sapien
ttttgttagactactatggcatccctagagcta

SEQ ID NO: 714825 - DNA, 33 bp, Homo sapien
aggctgcagctgctaaatagtgtagtaaggtag

SEQ ID NO: 714826 - DNA, 33 bp, Homo sapien
aggctgcagctgctaagtagtgtagtaaggtag

SEQ ID NO: 714827 - DNA, 33 bp, Homo sapien
taatagacaaaagtaaaacacctgttaatcatt

SEQ ID NO: 714828 - DNA, 33 bp, Homo sapien
taatagacaaaagtaagacacctgttaatcatt

SEQ ID NO: 714829 - DNA, 33 bp, Homo sapien
tttgtaaagttgcctaggtattattctttgcta

SEQ ID NO: 714830 - DNA, 33 bp, Homo sapien
tttgtaaagttgcctatgtattattctttgcta

SEQ ID NO: 714831 - DNA, 33 bp, Homo sapien
agaaaccaaaagacatcaagtggttattttata

SEQ ID NO: 714832 - DNA, 33 bp, Homo sapien
agaaaccaaaagacatgaagtggttattttata

SEQ ID NO: 714833 - DNA, 33 bp, Homo sapien
caatcacgccattcaaaattcagaaccagtgat

SEQ ID NO: 714834 - DNA, 33 bp, Homo sapien
caatcacgccattcaagattcagaaccagtgat

SEQ ID NO: 714835 - DNA, 33 bp, Homo sapien
gttcactatagagttacgtgaagtttatgttcc

SEQ ID NO: 714836 - DNA, 33 bp, Homo sapien
gttcactatagagttatgtgaagtttatgttcc

SEQ ID NO: 714837 - DNA, 33 bp, Homo sapien
aaaatcttatccatgacgtgacttgatatagga

SEQ ID NO: 714838 - DNA, 33 bp, Homo sapien
aaaatcttatccatgaggtgacttgatatagga

SEQ ID NO: 714839 - DNA, 33 bp, Homo sapien
atggtctgaggaagaaacaacgagaaaagtgaa

SEQ ID NO: 714840 - DNA, 33 bp, Homo sapien
atggtctgaggaagaagcaacgagaaaagtgaa

SEQ ID NO: 714841 - DNA, 33 bp, Homo sapien
accttttaatatgaagactctatatgcttccaa

SEQ ID NO: 714842 - DNA, 33 bp, Homo sapien
accttttaatatgaagtctctatatgcttccaa

SEQ ID NO: 714843 - DNA, 33 bp, Homo sapien
gagcaatgcagttttaactctctgggacaagag

SEQ ID NO: 714844 - DNA, 33 bp, Homo sapien
gagcaatgcagttttagctctctgggacaagag

SEQ ID NO: 714845 - DNA, 33 bp, Homo sapien
gattttaattaacatcaaacaactctcaggtaa

SEQ ID NO: 714846 - DNA, 33 bp, Homo sapien
gattttaattaacatcgaacaactctcaggtaa

SEQ ID NO: 714847 - DNA, 33 bp, Homo sapien
gtcagaaaaacaatatcagaactcacagcttcc

SEQ ID NO: 714848 - DNA, 33 bp, Homo sapien
gtcagaaaaacaatattagaactcacagcttcc

SEQ ID NO: 714849 - DNA, 33 bp, Homo sapien
cccccattgttctccactcctaaaggacaagct

SEQ ID NO: 714850 - DNA, 33 bp, Homo sapien
cccccattgttctccattcctaaaggacaagct

SEQ ID NO: 714851 - DNA, 33 bp, Homo sapien
ctctgtttccctttgaacaaaatacaaattcct

SEQ ID NO: 714852 - DNA, 33 bp, Homo sapien
ctctgtttccctttgagcaaaatacaaattcct

SEQ ID NO: 714853 - DNA, 33 bp, Homo sapien
atgttacttgctaagcagatgaaatttatttta

SEQ ID NO: 714854 - DNA, 33 bp, Homo sapien
atgttacttgctaagcggatgaaatttatttta

SEQ ID NO: 714855 - DNA, 33 bp, Homo sapien
atacatacattttttacctgcagtgttggacag

SEQ ID NO: 714856 - DNA, 33 bp, Homo sapien
atacatacattttttagctgcagtgttggacag

SEQ ID NO: 714857 - DNA, 33 bp, Homo sapien
tctacttatacatttaccatctagttgtctacc

SEQ ID NO: 714858 - DNA, 33 bp, Homo sapien
tctacttatacatttatcatctagttgtctacc

SEQ ID NO: 714859 - DNA, 33 bp, Homo sapien
ttggggtgctgtcctacagtacataaaataagc

SEQ ID NO: 714860 - DNA, 33 bp, Homo sapien
ttggggtgctgtcctatagtacataaaataagc

SEQ ID NO: 714861 - DNA, 33 bp, Homo sapien
agggttctgtttctagcaagctaactcagtcct

SEQ ID NO: 714862 - DNA, 33 bp, Homo sapien
agggttctgtttctaggaagctaactcagtcct

SEQ ID NO: 714863 - DNA, 33 bp, Homo sapien
tagcatattgaaaaggccatctgattcccaaga

SEQ ID NO: 714864 - DNA, 33 bp, Homo sapien
tagcatattgaaaaggtcatctgattcccaaga

SEQ ID NO: 714865 - DNA, 33 bp, Homo sapien
gtctttgggtaggaccactagcctgtctggcgt

SEQ ID NO: 714866 - DNA, 33 bp, Homo sapien
gtctttgggtaggaccgctagcctgtctggcgt

SEQ ID NO: 714867 - DNA, 33 bp, Homo sapien
actggacaaggggaccaaggccagaagactgtg

SEQ ID NO: 714868 - DNA, 33 bp, Homo sapien
actggacaaggggaccgaggccagaagactgtg

SEQ ID NO: 714869 - DNA, 33 bp, Homo sapien
agtcaatattttggggacaagatgaactgaaat

SEQ ID NO: 714870 - DNA, 33 bp, Homo sapien
agtcaatattttgggggcaagatgaactgaaat

SEQ ID NO: 714871 - DNA, 33 bp, Homo sapien
tgtttgatgagcactcaaagtgtagttagcctt

SEQ ID NO: 714872 - DNA, 33 bp, Homo sapien
tgtttgatgagcactcgaagtgtagttagcctt

SEQ ID NO: 714873 - DNA, 33 bp, Homo sapien
gtgatgatgaagaatccccggactgcttccact

SEQ ID NO: 714874 - DNA, 33 bp, Homo sapien
gtgatgatgaagaatctccggactgcttccact

SEQ ID NO: 714875 - DNA, 33 bp, Homo sapien
tgttttgatgaaggtacaattaaaaatcagtgt

SEQ ID NO: 714876 - DNA, 33 bp, Homo sapien
tgttttgatgaaggtagaattaaaaatcagtgt

SEQ ID NO: 714877 - DNA, 33 bp, Homo sapien
atagtacctggtaaatcataagctcttaataaa

SEQ ID NO: 714878 - DNA, 33 bp, Homo sapien
atagtacctggtaaattataagctcttaataaa

SEQ ID NO: 714879 - DNA, 33 bp, Homo sapien
tgcctaaaagtacacaaaatttcctgaaagaca

SEQ ID NO: 714880 - DNA, 33 bp, Homo sapien
tgcctaaaagtacacagaatttcctgaaagaca

SEQ ID NO: 714881 - DNA, 33 bp, Homo sapien
tcggtcaaagaggacgaccatccccgagagaga

SEQ ID NO: 714882 - DNA, 33 bp, Homo sapien
tcggtcaaagaggacgtccatccccgagagaga

SEQ ID NO: 714883 - DNA, 33 bp, Homo sapien
aataaagactacagaaaagtcactaggcttgac

SEQ ID NO: 714884 - DNA, 33 bp, Homo sapien
aataaagactacagaagagtcactaggcttgac

SEQ ID NO: 714885 - DNA, 33 bp, Homo sapien
ttctttccctgcttctaaactggcttcatatat

SEQ ID NO: 714886 - DNA, 33 bp, Homo sapien
ttctttccctgcttctgaactggcttcatatat

SEQ ID NO: 714887 - DNA, 33 bp, Homo sapien
tttctaacccagcaataaagttgaccagttaag

SEQ ID NO: 714888 - DNA, 33 bp, Homo sapien
tttctaacccagcaatgaagttgaccagttaag

SEQ ID NO: 714889 - DNA, 33 bp, Homo sapien
taagcttgtattactacctaggcaatttttttt

SEQ ID NO: 714890 - DNA, 33 bp, Homo sapien
taagcttgtattactatctaggcaatttttttt

SEQ ID NO: 714891 - DNA, 33 bp, Homo sapien
tattcatcatttcaaaaacagttctcttattcc

SEQ ID NO: 714892 - DNA, 33 bp, Homo sapien
tattcatcatttcaaagacagttctcttattcc

SEQ ID NO: 714893 - DNA, 33 bp, Homo sapien
ttctccatttctcaaaccgttcttatgtttgcc

SEQ ID NO: 714894 - DNA, 33 bp, Homo sapien
ttctccatttctcaaatcgttcttatgtttgcc

SEQ ID NO: 714895 - DNA, 33 bp, Homo sapien
caaagcctattcaaaaagagtgatataattctt

SEQ ID NO: 714896 - DNA, 33 bp, Homo sapien
caaagcctattcaaaaggagtgatataattctt

SEQ ID NO: 714897 - DNA, 33 bp, Homo sapien
agattaaatgaatttcaaaagactagcaggcaa

SEQ ID NO: 714898 - DNA, 33 bp, Homo sapien
agattaaatgaatttcgaaagactagcaggcaa

SEQ ID NO: 714899 - DNA, 33 bp, Homo sapien
tactgccaccatgcagactgagttcctgggagc

SEQ ID NO: 714900 - DNA, 33 bp, Homo sapien
tactgccaccatgcaggctgagttcctgggagc

SEQ ID NO: 714901 - DNA, 33 bp, Homo sapien
aagctcagatgctcaaataattccatggggtcc

SEQ ID NO: 714902 - DNA, 33 bp, Homo sapien
aagctcagatgctcaagtaattccatggggtcc

SEQ ID NO: 714903 - DNA, 33 bp, Homo sapien
tgtgtgtgaggtcctaactttacatattttgta

SEQ ID NO: 714904 - DNA, 33 bp, Homo sapien
tgtgtgtgaggtcctacctttacatattttgta

SEQ ID NO: 714905 - DNA, 33 bp, Homo sapien
aaaacttcaaccaacaagagatgggaacctgca

SEQ ID NO: 714906 - DNA, 33 bp, Homo sapien
aaaacttcaaccaacaggagatgggaacctgca

SEQ ID NO: 714907 - DNA, 33 bp, Homo sapien
tatcaggaaagccatacagaatcactaatctat

SEQ ID NO: 714908 - DNA, 33 bp, Homo sapien
tatcaggaaagccatatagaatcactaatctat

SEQ ID NO: 714909 - DNA, 33 bp, Homo sapien
tataatgactagttaaacacttgtaagtcccaa

SEQ ID NO: 714910 - DNA, 33 bp, Homo sapien
tataatgactagttaaccacttgtaagtcccaa

SEQ ID NO: 714911 - DNA, 33 bp, Homo sapien
aaacagtattgagttacctagtcattttaatgt

SEQ ID NO: 714912 - DNA, 33 bp, Homo sapien
aaacagtattgagttatctagtcattttaatgt

SEQ ID NO: 714913 - DNA, 33 bp, Homo sapien
aaagattagcacatacgctctagcaatactgga

SEQ ID NO: 714914 - DNA, 33 bp, Homo sapien
aaagattagcacatactctctagcaatactgga

SEQ ID NO: 714915 - DNA, 33 bp, Homo sapien
ggccacagagttctagaatttaataccataact

SEQ ID NO: 714916 - DNA, 33 bp, Homo sapien
ggccacagagttctaggatttaataccataact

SEQ ID NO: 714917 - DNA, 33 bp, Homo sapien
accacagctttattgaacttggggctgacgtcc

SEQ ID NO: 714918 - DNA, 33 bp, Homo sapien
accacagctttattgagcttggggctgacgtcc

SEQ ID NO: 714919 - DNA, 33 bp, Homo sapien
attgtgagggcatcccaaaccacgtgtaactgt

SEQ ID NO: 714920 - DNA, 33 bp, Homo sapien
attgtgagggcatccccaaccacgtgtaactgt

SEQ ID NO: 714921 - DNA, 33 bp, Homo sapien
gcaagaattcagctacaaataaaaaccctgcac

SEQ ID NO: 714922 - DNA, 33 bp, Homo sapien
gcaagaattcagctacgaataaaaaccctgcac

SEQ ID NO: 714923 - DNA, 33 bp, Homo sapien
ctccttcctgattttagaggtgcaagacaaatc

SEQ ID NO: 714924 - DNA, 33 bp, Homo sapien
ctccttcctgattttataggtgcaagacaaatc

SEQ ID NO: 714925 - DNA, 33 bp, Homo sapien
tgctgtcttttagttaaaattggagcttattgt

SEQ ID NO: 714926 - DNA, 33 bp, Homo sapien
tgctgtcttttagttataattggagcttattgt

SEQ ID NO: 714927 - DNA, 33 bp, Homo sapien
ttgtctcttattttaccccatgtttcccttcaa

SEQ ID NO: 714928 - DNA, 33 bp, Homo sapien
ttgtctcttattttactccatgtttcccttcaa

SEQ ID NO: 714929 - DNA, 33 bp, Homo sapien
gggtagcacctatgtcaagaattaagtcatctg

SEQ ID NO: 714930 - DNA, 33 bp, Homo sapien
gggtagcacctatgtcgagaattaagtcatctg

SEQ ID NO: 714931 - DNA, 33 bp, Homo sapien
catgtggacttctgaaatgcaaattaaaaggtt

SEQ ID NO: 714932 - DNA, 33 bp, Homo sapien
catgtggacttctgaagtgcaaattaaaaggtt

SEQ ID NO: 714933 - DNA, 33 bp, Homo sapien
ccggcactaccgtgccacgatttgcgcagagct

SEQ ID NO: 714934 - DNA, 33 bp, Homo sapien
ccggcactaccgtgccgcgatttgcgcagagct

SEQ ID NO: 714935 - DNA, 33 bp, Homo sapien
agtgccataagttataaggaggacagcagcttc

SEQ ID NO: 714936 - DNA, 33 bp, Homo sapien
agtgccataagttatagggaggacagcagcttc

SEQ ID NO: 714937 - DNA, 33 bp, Homo sapien
gcctgtactgtggtcaatacaaaaaatgaactt

SEQ ID NO: 714938 - DNA, 33 bp, Homo sapien
gcctgtactgtggtcactacaaaaaatgaactt

SEQ ID NO: 714939 - DNA, 33 bp, Homo sapien; identical to SEQ ID NO: 714937

SEQ ID NO: 714940 - DNA, 33 bp, Homo sapien; identical to SEQ ID NO: 714938

SEQ ID NO: 714941 - DNA, 33 bp, Homo sapien
ttttcaagctggatgaagtcaatgatgccttcc

SEQ ID NO: 714942 - DNA, 33 bp, Homo sapien
ttttcaagctggatgaggtcaatgatgccttcc

SEQ ID NO: 714943 - DNA, 33 bp, Homo sapien
ttaactttgctgctcaggtgaggatttatttaa

SEQ ID NO: 714944 - DNA, 33 bp, Homo sapien
ttaactttgctgctcatgtgaggatttatttaa

SEQ ID NO: 714945 - DNA, 33 bp, Homo sapien
attatctgctcttaaaaatttgaggaaggagaa

SEQ ID NO: 714946 - DNA, 33 bp, Homo sapien
attatctgctcttaaagatttgaggaaggagaa

SEQ ID NO: 714947 - DNA, 33 bp, Homo sapien
gagctcaggcagtaacactcggtcgcccactgc

SEQ ID NO: 714948 - DNA, 33 bp, Homo sapien
gagctcaggcagtaacgctcggtcgcccactgc

SEQ ID NO: 714949 - DNA, 33 bp, Homo sapien
gctatgaagataacaacggtaatgacaaacact

SEQ ID NO: 714950 - DNA, 33 bp, Homo sapien
gctatgaagataacaatggtaatgacaaacact

SEQ ID NO: 714951 - DNA, 33 bp, Homo sapien
ggaagaaggcttacaaatgagggcaaagttccc

SEQ ID NO: 714952 - DNA, 33 bp, Homo sapien
ggaagaaggcttacaagtgagggcaaagttccc

SEQ ID NO: 714953 - DNA, 33 bp, Homo sapien
tattaggatcagtgaacgttgtaagtttagggg

SEQ ID NO: 714954 - DNA, 33 bp, Homo sapien
tattaggatcagtgaatgttgtaagtttagggg

SEQ ID NO: 714955 - DNA, 33 bp, Homo sapien
tcatctttcaagcaccggacagaaaaaaatcta

SEQ ID NO: 714956 - DNA, 33 bp, Homo sapien
tcatctttcaagcacctgacagaaaaaaatcta

SEQ ID NO: 714957 - DNA, 33 bp, Homo sapien
ctatgctaaatatgacacataatacttaatgac

SEQ ID NO: 714958 - DNA, 33 bp, Homo sapien
ctatgctaaatatgacgcataatacttaatgac

SEQ ID NO: 714959 - DNA, 33 bp, Homo sapien
atgacagatttgaataaaaaggtcagtgttaaa

SEQ ID NO: 714960 - DNA, 33 bp, Homo sapien
atgacagatttgaatagaaaggtcagtgttaaa

SEQ ID NO: 714961 - DNA, 33 bp, Homo sapien
gctaaggtcatacaaaatatctttcatatgtaa

SEQ ID NO: 714962 - DNA, 33 bp, Homo sapien
gctaaggtcatacaaagtatctttcatatgtaa

SEQ ID NO: 714963 - DNA, 33 bp, Homo sapien
gtacctgataaatttaagttgaaaaaccaatgc

SEQ ID NO: 714964 - DNA, 33 bp, Homo sapien
gtacctgataaatttacgttgaaaaaccaatgc

SEQ ID NO: 714965 - DNA, 33 bp, Homo sapien
aaatgatatgccagaccggagctttagccagtg

SEQ ID NO: 714966 - DNA, 33 bp, Homo sapien
aaatgatatgccagactggagctttagccagtg

SEQ ID NO: 714967 - DNA, 33 bp, Homo sapien
attttctccttgttcaagtttcctattaaggag

SEQ ID NO: 714968 - DNA, 33 bp, Homo sapien
attttctccttgttcacgtttcctattaaggag

SEQ ID NO: 714969 - DNA, 33 bp, Homo sapien
atggaaaacagtgaaccgagcttggacaccatc

SEQ ID NO: 714970 - DNA, 33 bp, Homo sapien
atggaaaacagtgaactgagcttggacaccatc

SEQ ID NO: 714971 - DNA, 33 bp, Homo sapien
ggaatctaccaaggccaggaaacattaatccta

SEQ ID NO: 714972 - DNA, 33 bp, Homo sapien
ggaatctaccaaggccgggaaacattaatccta

SEQ ID NO: 714973 - DNA, 33 bp, Homo sapien
actggagtgggaatccaactgcactgctgggtg

SEQ ID NO: 714974 - DNA, 33 bp, Homo sapien
actggagtgggaatccgactgcactgctgggtg

SEQ ID NO: 714975 - DNA, 33 bp, Homo sapien
aagcctggttgcaaggaaagagctatttaagca

SEQ ID NO: 714976 - DNA, 33 bp, Homo sapien
aagcctggttgcaagggaagagctatttaagca

SEQ ID NO: 714977 - DNA, 33 bp, Homo sapien
tgaattgggctttgccaaatgatatggtttcgc

SEQ ID NO: 714978 - DNA, 33 bp, Homo sapien
tgaattgggctttgccgaatgatatggtttcgc

SEQ ID NO: 714979 - DNA, 33 bp, Homo sapien
ttttttgcttacagaactaaatgcttcagagat

SEQ ID NO: 714980 - DNA, 33 bp, Homo sapien
ttttttgcttacagaattaaatgcttcagagat

SEQ ID NO: 714981 - DNA, 33 bp, Homo sapien
caggaaactgaagctaccctagtaatagtcaca

SEQ ID NO: 714982 - DNA, 33 bp, Homo sapien
caggaaactgaagctagcctagtaatagtcaca

SEQ ID NO: 714983 - DNA, 33 bp, Homo sapien
tccaagatatatttagaaaagttgcaaaactac

SEQ ID NO: 714984 - DNA, 33 bp, Homo sapien
tccaagatatatttaggaaagttgcaaaactac

SEQ ID NO: 714985 - DNA, 33 bp, Homo sapien
tatgcttaagccctagaatgattcctttctgtt

SEQ ID NO: 714986 - DNA, 33 bp, Homo sapien
tatgcttaagccctagtatgattcctttctgtt

SEQ ID NO: 714987 - DNA, 33 bp, Homo sapien
gtagcaggttgggttacgaactgacaaggagag

SEQ ID NO: 714988 - DNA, 33 bp, Homo sapien
gtagcaggttgggttatgaactgacaaggagag

SEQ ID NO: 714989 - DNA, 33 bp, Homo sapien
atgtttttgtgggcaagtctccatgttttgtgc

SEQ ID NO: 714990 - DNA, 33 bp, Homo sapien
atgtttttgtgggcaattctccatgttttgtgc

SEQ ID NO: 714991 - DNA, 33 bp, Homo sapien
aaaattgtatttcctacgagttttgcaggatgg

SEQ ID NO: 714992 - DNA, 33 bp, Homo sapien
aaaattgtatttcctatgagttttgcaggatgg

SEQ ID NO: 714993 - DNA, 33 bp, Homo sapien
ggaggaaattcacttacagcaggaatggccctc

SEQ ID NO: 714994 - DNA, 33 bp, Homo sapien
ggaggaaattcacttatagcaggaatggccctc

SEQ ID NO: 714995 - DNA, 33 bp, Homo sapien
cctatacaatgaggaacccaaagatttttaaga

SEQ ID NO: 714996 - DNA, 33 bp, Homo sapien
cctatacaatgaggaatccaaagatttttaaga

SEQ ID NO: 714997 - DNA, 33 bp, Homo sapien
tgattctagaggcaatcatagggagtatcagcc

SEQ ID NO: 714998 - DNA, 33 bp, Homo sapien
tgattctagaggcaattatagggagtatcagcc

SEQ ID NO: 714999 - DNA, 33 bp, Homo sapien
ccactaagactgtatacccaagatttggtgagg

SEQ ID NO: 715000 - DNA, 33 bp, Homo sapien
ccactaagactgtatatccaagatttggtgagg

SEQ ID NO: 715001 - DNA, 33 bp, Homo sapien
ctggtaacattttgacaaccacaaagggacctc

SEQ ID NO: 715002 - DNA, 33 bp, Homo sapien
ctggtaacattttgacgaccacaaagggacctc

SEQ ID NO: 715003 - DNA, 33 bp, Homo sapien
taaaattgatagaacactagtgagacaagaaga

SEQ ID NO: 715004 - DNA, 33 bp, Homo sapien
taaaattgatagaacattagtgagacaagaaga

SEQ ID NO: 715005 - DNA, 33 bp, Homo sapien
tatttgctagtcactaagtgcattatatatttt

SEQ ID NO: 715006 - DNA, 33 bp, Homo sapien
tatttgctagtcactaggtgcattatatatttt

SEQ ID NO: 715007 - DNA, 33 bp, Homo sapien
acagacataatagtaacgatagcagctacttca

SEQ ID NO: 715008 - DNA, 33 bp, Homo sapien
acagacataatagtaatgatagcagctacttca

SEQ ID NO: 715009 - DNA, 33 bp, Homo sapien
atgaagtatcactcaaattaatctcttgctgag

SEQ ID NO: 715010 - DNA, 33 bp, Homo sapien
atgaagtatcactcaagttaatctcttgctgag

SEQ ID NO: 715011 - DNA, 33 bp, Homo sapien
tacattggatgatgaccgggtgtcaacaatctt

SEQ ID NO: 715012 - DNA, 33 bp, Homo sapien
tacattggatgatgactgggtgtcaacaatctt

SEQ ID NO: 715013 - DNA, 33 bp, Homo sapien
aagttctatcagataacatcctaaggccacaca

SEQ ID NO: 715014 - DNA, 33 bp, Homo sapien
aagttctatcagataatatcctaaggccacaca

SEQ ID NO: 715015 - DNA, 33 bp, Homo sapien
tctagtgtaaaagacacggttggccatttccaa

SEQ ID NO: 715016 - DNA, 33 bp, Homo sapien
tctagtgtaaaagacatggttggccatttccaa

SEQ ID NO: 715017 - DNA, 33 bp, Homo sapien
actatattttcaagaacctttgtatagtgagca

SEQ ID NO: 715018 - DNA, 33 bp, Homo sapien
actatattttcaagaatctttgtatagtgagca

SEQ ID NO: 715019 - DNA, 33 bp, Homo sapien
agtcagacttgtgtcactcctagctctcctact

SEQ ID NO: 715020 - DNA, 33 bp, Homo sapien
agtcagacttgtgtcagtcctagctctcctact

SEQ ID NO: 715021 - DNA, 33 bp, Homo sapien
atcattggttctgtaaggtgtgctactgggttg

SEQ ID NO: 715022 - DNA, 33 bp, Homo sapien
atcattggttctgtaatgtgtgctactgggttg

SEQ ID NO: 715023 - DNA, 33 bp, Homo sapien
agatggtctgatgacaatactttgcagaacaat

SEQ ID NO: 715024 - DNA, 33 bp, Homo sapien
agatggtctgatgacagtactttgcagaacaat

SEQ ID NO: 715025 - DNA, 33 bp, Homo sapien
caataaagacaatgtgacaataaagtgagtctc

SEQ ID NO: 715026 - DNA, 33 bp, Homo sapien
caataaagacaatgtgtcaataaagtgagtctc

SEQ ID NO: 715027 - DNA, 33 bp, Homo sapien
gacaaatacgtgtcaacgactgatgctgaatag

SEQ ID NO: 715028 - DNA, 33 bp, Homo sapien
gacaaatacgtgtcaatgactgatgctgaatag

SEQ ID NO: 715029 - DNA, 33 bp, Homo sapien
ttagcaattaaacaggacattgcattcttgtag

SEQ ID NO: 715030 - DNA, 33 bp, Homo sapien
ttagcaattaaacaggtcattgcattcttgtag

SEQ ID NO: 715031 - DNA, 33 bp, Homo sapien
ctattacttctgtaacaaattgccagaaactta

SEQ ID NO: 715032 - DNA, 33 bp, Homo sapien
ctattacttctgtaaccaattgccagaaactta

SEQ ID NO: 715033 - DNA, 33 bp, Homo sapien
ccttggcagtcacaacgaacctattatttctct

SEQ ID NO: 715034 - DNA, 33 bp, Homo sapien
ccttggcagtcacaactaacctattatttctct

SEQ ID NO: 715035 - DNA, 33 bp, Homo sapien
ggatttgcaggttctaaataagggaactgtaac

SEQ ID NO: 715036 - DNA, 33 bp, Homo sapien
ggatttgcaggttctagataagggaactgtaac

SEQ ID NO: 715037 - DNA, 33 bp, Homo sapien
aggtcataaataaagaacgggtagttacactga

SEQ ID NO: 715038 - DNA, 33 bp, Homo sapien
aggtcataaataaagaccgggtagttacactga

SEQ ID NO: 715039 - DNA, 33 bp, Homo sapien
atgtgacttattgaagcagtgctgccaggagaa

SEQ ID NO: 715040 - DNA, 33 bp, Homo sapien
atgtgacttattgaaggagtgctgccaggagaa

SEQ ID NO: 715041 - DNA, 33 bp, Homo sapien
tcctgaatagcttttaggttgcactgggaatac

SEQ ID NO: 715042 - DNA, 33 bp, Homo sapien
tcctgaatagcttttatgttgcactgggaatac

SEQ ID NO: 715043 - DNA, 33 bp, Homo sapien
agtaaacttcttagcagggccacaatatctgat

SEQ ID NO: 715044 - DNA, 33 bp, Homo sapien
agtaaacttcttagcatggccacaatatctgat

SEQ ID NO: 715045 - DNA, 33 bp, Homo sapien
tagcataaggtcacataataactgagcgaaatc

SEQ ID NO: 715046 - DNA, 33 bp, Homo sapien
tagcataaggtcacatcataactgagcgaaatc

SEQ ID NO: 715047 - DNA, 33 bp, Homo sapien
ccctttgagatctagtaaaggccttctttttac

SEQ ID NO: 715048 - DNA, 33 bp, Homo sapien
ccctttgagatctagtgaaggccttctttttac

SEQ ID NO: 715049 - DNA, 33 bp, Homo sapien
accatcctcgacctgacgcaaatgaactcaaag

SEQ ID NO: 715050 - DNA, 33 bp, Homo sapien
accatcctcgacctgatgcaaatgaactcaaag

SEQ ID NO: 715051 - DNA, 33 bp, Homo sapien
aagaatgccaattaaaaagaacaatgagactga

SEQ ID NO: 715052 - DNA, 33 bp, Homo sapien
aagaatgccaattaaacagaacaatgagactga

SEQ ID NO: 715053 - DNA, 33 bp, Homo sapien
acaggaaacaaacgcacggcctgaactgtacag

SEQ ID NO: 715054 - DNA, 33 bp, Homo sapien
acaggaaacaaacgcatggcctgaactgtacag

SEQ ID NO: 715055 - DNA, 33 bp, Homo sapien
gcttaaagatgagtaccgaagaagaaatctcta

SEQ ID NO: 715056 - DNA, 33 bp, Homo sapien
gcttaaagatgagtacggaagaagaaatctcta

SEQ ID NO: 715057 - DNA, 33 bp, Homo sapien
ggtcctaataaatacaatatttgaacagcacaa

SEQ ID NO: 715058 - DNA, 33 bp, Homo sapien
ggtcctaataaatacagtatttgaacagcacaa

SEQ ID NO: 715059 - DNA, 33 bp, Homo sapien
agcagaaacactgttacgtattgatggggaagt

SEQ ID NO: 715060 - DNA, 33 bp, Homo sapien
agcagaaacactgttatgtattgatggggaagt

SEQ ID NO: 715061 - DNA, 33 bp, Homo sapien
gtttcaatgtttttggaaccagaagtatgccat

SEQ ID NO: 715062 - DNA, 33 bp, Homo sapien
gtttcaatgtttttgggaccagaagtatgccat

SEQ ID NO: 715063 - DNA, 33 bp, Homo sapien
atttctcttattttgagaattgcatattttctt

SEQ ID NO: 715064 - DNA, 33 bp, Homo sapien
atttctcttattttgataattgcatattttctt

SEQ ID NO: 715065 - DNA, 33 bp, Homo sapien
tgacacaggtataggcagatagaccaacagaac

SEQ ID NO: 715066 - DNA, 33 bp, Homo sapien
tgacacaggtataggcggatagaccaacagaac

SEQ ID NO: 715067 - DNA, 33 bp, Homo sapien
ctcaacaaaattataaagtccactatgttaatt

SEQ ID NO: 715068 - DNA, 33 bp, Homo sapien
ctcaacaaaattataacgtccactatgttaatt

SEQ ID NO: 715069 - DNA, 33 bp, Homo sapien
gcctggaagcccttacaaagcagcaattcgatt

SEQ ID NO: 715070 - DNA, 33 bp, Homo sapien
gcctggaagcccttacgaagcagcaattcgatt

SEQ ID NO: 715071 - DNA, 33 bp, Homo sapien
aatgatgcccagttaaatggtctttttcccaaa

SEQ ID NO: 715072 - DNA, 33 bp, Homo sapien
aatgatgcccagttaattggtctttttcccaaa

SEQ ID NO: 715073 - DNA, 33 bp, Homo sapien
attgcaaactctgttacgtgtagagaatatggc

SEQ ID NO: 715074 - DNA, 33 bp, Homo sapien
attgcaaactctgttatgtgtagagaatatggc

SEQ ID NO: 715075 - DNA, 33 bp, Homo sapien
cctaggccaccagttacagtaattcaggttgct

SEQ ID NO: 715076 - DNA, 33 bp, Homo sapien
cctaggccaccagttatagtaattcaggttgct

SEQ ID NO: 715077 - DNA, 33 bp, Homo sapien
agaccaatattcaaagacacaacaatttattgc

SEQ ID NO: 715078 - DNA, 33 bp, Homo sapien
agaccaatattcaaaggcacaacaatttattgc

SEQ ID NO: 715079 - DNA, 33 bp, Homo sapien
ctaagccttatcttaccaaccagatggaaaacc

SEQ ID NO: 715080 - DNA, 33 bp, Homo sapien
ctaagccttatcttacgaaccagatggaaaacc

SEQ ID NO: 715081 - DNA, 33 bp, Homo sapien
cttatagctgcttataacttctagactggtatc

SEQ ID NO: 715082 - DNA, 33 bp, Homo sapien
cttatagctgcttatagcttctagactggtatc

SEQ ID NO: 715083 - DNA, 33 bp, Homo sapien
cacacagctagtaaaagaatagaaccagaattc

SEQ ID NO: 715084 - DNA, 33 bp, Homo sapien
cacacagctagtaaaataatagaaccagaattc

SEQ ID NO: 715085 - DNA, 33 bp, Homo sapien
tccagttagtccttacaattgttacaactccct

SEQ ID NO: 715086 - DNA, 33 bp, Homo sapien
tccagttagtccttactattgttacaactccct

SEQ ID NO: 715087 - DNA, 33 bp, Homo sapien
agaatgaggctcatgcactaggtcctttatgaa

SEQ ID NO: 715088 - DNA, 33 bp, Homo sapien
agaatgaggctcatgcgctaggtcctttatgaa

SEQ ID NO: 715089 - DNA, 33 bp, Homo sapien
ccaagtggtgtgtgtacgtaaattcatgtgtgt

SEQ ID NO: 715090 - DNA, 33 bp, Homo sapien
ccaagtggtgtgtgtatgtaaattcatgtgtgt

SEQ ID NO: 715091 - DNA, 33 bp, Homo sapien
actttctcaaggtcaaattaattccaaagacat

SEQ ID NO: 715092 - DNA, 33 bp, Homo sapien
actttctcaaggtcaagttaattccaaagacat

SEQ ID NO: 715093 - DNA, 33 bp, Homo sapien
cttccattgagaagtgaatggcatttagaagtc

SEQ ID NO: 715094 - DNA, 33 bp, Homo sapien
cttccattgagaagtggatggcatttagaagtc

SEQ ID NO: 715095 - DNA, 33 bp, Homo sapien
tttttcatcgataggcacatagatatagaaata

SEQ ID NO: 715096 - DNA, 33 bp, Homo sapien
tttttcatcgataggcccatagatatagaaata

SEQ ID NO: 715097 - DNA, 33 bp, Homo sapien
cactgcacgattccataaatagaagttctagat

SEQ ID NO: 715098 - DNA, 33 bp, Homo sapien
cactgcacgattccattaatagaagttctagat

SEQ ID NO: 715099 - DNA, 33 bp, Homo sapien
attcaagttgaaccaaataagagatttaatagc

SEQ ID NO: 715100 - DNA, 33 bp, Homo sapien
attcaagttgaaccaagtaagagatttaatagc

SEQ ID NO: 715101 - DNA, 33 bp, Homo sapien
accaatattaatgctgaatgtaaatgggctcaa

SEQ ID NO: 715102 - DNA, 33 bp, Homo sapien
accaatattaatgctggatgtaaatgggctcaa

SEQ ID NO: 715103 - DNA, 33 bp, Homo sapien
ccactgagaatataagacaaccacaaaaacaag

SEQ ID NO: 715104 - DNA, 33 bp, Homo sapien
ccactgagaatataaggcaaccacaaaaacaag

SEQ ID NO: 715105 - DNA, 33 bp, Homo sapien
ttcacagtgtgggcagaaggtggcctatattag

SEQ ID NO: 715106 - DNA, 33 bp, Homo sapien
ttcacagtgtgggcaggaggtggcctatattag

SEQ ID NO: 715107 - DNA, 33 bp, Homo sapien
ggtctgggagagtccccagtcactgcacaccct

SEQ ID NO: 715108 - DNA, 33 bp, Homo sapien
ggtctgggagagtcccgagtcactgcacaccct

SEQ ID NO: 715109 - DNA, 33 bp, Homo sapien
agggatgggagagcaacggcagtaatgaaggag

SEQ ID NO: 715110 - DNA, 33 bp, Homo sapien
agggatgggagagcaatggcagtaatgaaggag

SEQ ID NO: 715111 - DNA, 33 bp, Homo sapien
ctgttgtctcgtagaaaagtaaggcacttagta

SEQ ID NO: 715112 - DNA, 33 bp, Homo sapien
ctgttgtctcgtagaagagtaaggcacttagta

SEQ ID NO: 715113 - DNA, 33 bp, Homo sapien
cagtagttagaatagaaataagttgtggcttca

SEQ ID NO: 715114 - DNA, 33 bp, Homo sapien
cagtagttagaatagagataagttgtggcttca

SEQ ID NO: 715115 - DNA, 33 bp, Homo sapien
tcatttattaaaacacagcatgattagaccact

SEQ ID NO: 715116 - DNA, 33 bp, Homo sapien
tcatttattaaaacacggcatgattagaccact

SEQ ID NO: 715117 - DNA, 33 bp, Homo sapien
tataaggaggtggtgaagtttacagaatctcta

SEQ ID NO: 715118 - DNA, 33 bp, Homo sapien
tataaggaggtggtgaggtttacagaatctcta

SEQ ID NO: 715119 - DNA, 33 bp, Homo sapien
ctccttatagttttgcagagtgaagcttctgtg

SEQ ID NO: 715120 - DNA, 33 bp, Homo sapien
ctccttatagttttgcggagtgaagcttctgtg

SEQ ID NO: 715121 - DNA, 33 bp, Homo sapien
tagtcaagtcaatcaggcctaccatctcctatc

SEQ ID NO: 715122 - DNA, 33 bp, Homo sapien
tagtcaagtcaatcagtcctaccatctcctatc

SEQ ID NO: 715123 - DNA, 33 bp, Homo sapien
atgcaaaatgcacatagtagtaattagtcaaac

SEQ ID NO: 715124 - DNA, 33 bp, Homo sapien
atgcaaaatgcacatattagtaattagtcaaac

SEQ ID NO: 715125 - DNA, 33 bp, Homo sapien
tgcaaaatatctctaccgaattacaaaatcagt

SEQ ID NO: 715126 - DNA, 33 bp, Homo sapien
tgcaaaatatctctactgaattacaaaatcagt

SEQ ID NO: 715127 - DNA, 33 bp, Homo sapien
atcttttagatcatcactacaaagtcaacccta

SEQ ID NO: 715128 - DNA, 33 bp, Homo sapien
atcttttagatcatcattacaaagtcaacccta

SEQ ID NO: 715129 - DNA, 33 bp, Homo sapien
caaataatgcttggaaatgtgctttagttttct

SEQ ID NO: 715130 - DNA, 33 bp, Homo sapien
caaataatgcttggaagtgtgctttagttttct

SEQ ID NO: 715131 - DNA, 33 bp, Homo sapien
tgcatcaatttgaatacattgccctgtgaattt

SEQ ID NO: 715132 - DNA, 33 bp, Homo sapien
tgcatcaatttgaatatattgccctgtgaattt

SEQ ID NO: 715133 - DNA, 33 bp, Homo sapien
aatgaaacattccatacagaaaatgccaaaatt

SEQ ID NO: 715134 - DNA, 33 bp, Homo sapien
aatgaaacattccatatagaaaatgccaaaatt

SEQ ID NO: 715135 - DNA, 33 bp, Homo sapien
ttggaaaagctatttcaagggtttgcaggtcct

SEQ ID NO: 715136 - DNA, 33 bp, Homo sapien
ttggaaaagctatttcgagggtttgcaggtcct

SEQ ID NO: 715137 - DNA, 33 bp, Homo sapien
atttatccaatcaacacacttgcctgagcacaa

SEQ ID NO: 715138 - DNA, 33 bp, Homo sapien
atttatccaatcaacatacttgcctgagcacaa

SEQ ID NO: 715139 - DNA, 33 bp, Homo sapien
gcagtctgtagaacaaaatgttgccctagactg

SEQ ID NO: 715140 - DNA, 33 bp, Homo sapien
gcagtctgtagaacaagatgttgccctagactg

SEQ ID NO: 715141 - DNA, 33 bp, Homo sapien
aactccctacatttacaaggtcacattaggaag

SEQ ID NO: 715142 - DNA, 33 bp, Homo sapien
aactccctacatttaccaggtcacattaggaag

SEQ ID NO: 715143 - DNA, 33 bp, Homo sapien
gtacatattttcatcagacatttgccatagact

SEQ ID NO: 715144 - DNA, 33 bp, Homo sapien
gtacatattttcatcatacatttgccatagact

SEQ ID NO: 715145 - DNA, 33 bp, Homo sapien
gaaaagacaaatgggcaaagcttagaataagaa

SEQ ID NO: 715146 - DNA, 33 bp, Homo sapien
gaaaagacaaatgggccaagcttagaataagaa

SEQ ID NO: 715147 - DNA, 33 bp, Homo sapien
tagagatcagagaacagatggtaagacaacaaa

SEQ ID NO: 715148 - DNA, 33 bp, Homo sapien
tagagatcagagaacatatggtaagacaacaaa

SEQ ID NO: 715149 - DNA, 33 bp, Homo sapien
actatatgctaatttgccaaaaatcatttgtac

SEQ ID NO: 715150 - DNA, 33 bp, Homo sapien
actatatgctaatttgtcaaaaatcatttgtac

SEQ ID NO: 715151 - DNA, 33 bp, Homo sapien
tcctgaaatatttcggaagcctgatttctcctc

SEQ ID NO: 715152 - DNA, 33 bp, Homo sapien
tcctgaaatatttcgggagcctgatttctcctc

SEQ ID NO: 715153 - DNA, 33 bp, Homo sapien
tgatttctctagctaaatcatcacagcagttct

SEQ ID NO: 715154 - DNA, 33 bp, Homo sapien
tgatttctctagctaagtcatcacagcagttct

SEQ ID NO: 715155 - DNA, 33 bp, Homo sapien
aggcctgtccattcaaagtcttcttgatctctc

SEQ ID NO: 715156 - DNA, 33 bp, Homo sapien
aggcctgtccattcaatgtcttcttgatctctc

SEQ ID NO: 715157 - DNA, 33 bp, Homo sapien
gagcccttgctcaaaaccatactatattattgc

SEQ ID NO: 715158 - DNA, 33 bp, Homo sapien
gagcccttgctcaaaatcatactatattattgc

SEQ ID NO: 715159 - DNA, 33 bp, Homo sapien
tttcatgaaaagaacaccacattggttttaaga

SEQ ID NO: 715160 - DNA, 33 bp, Homo sapien
tttcatgaaaagaacatcacattggttttaaga

SEQ ID NO: 715161 - DNA, 33 bp, Homo sapien
cctcagttatatcttacagaagtcctgccaaga

SEQ ID NO: 715162 - DNA, 33 bp, Homo sapien
cctcagttatatcttatagaagtcctgccaaga

SEQ ID NO: 715163 - DNA, 33 bp, Homo sapien
actggagttttggaaacagatacatgagcttca

SEQ ID NO: 715164 - DNA, 33 bp, Homo sapien
actggagttttggaaatagatacatgagcttca

SEQ ID NO: 715165 - DNA, 33 bp, Homo sapien
aacctgaaggataagcagaagttggccttgaag

SEQ ID NO: 715166 - DNA, 33 bp, Homo sapien
aacctgaaggataagcggaagttggccttgaag

SEQ ID NO: 715167 - DNA, 33 bp, Homo sapien
gatgttgtgtagcataaatttgggggtgttgta

SEQ ID NO: 715168 - DNA, 33 bp, Homo sapien
gatgttgtgtagcatagatttgggggtgttgta

SEQ ID NO: 715169 - DNA, 33 bp, Homo sapien
tcatgctgcataccatgacctttcttatacaca

SEQ ID NO: 715170 - DNA, 33 bp, Homo sapien
tcatgctgcataccattacctttcttatacaca

SEQ ID NO: 715171 - DNA, 33 bp, Homo sapien
agatttgagcctacgacgtattttgttttcacc

SEQ ID NO: 715172 - DNA, 33 bp, Homo sapien
agatttgagcctacgaggtattttgttttcacc

SEQ ID NO: 715173 - DNA, 33 bp, Homo sapien
gtttggaaaatatgaaatctctgtgaactctct

SEQ ID NO: 715174 - DNA, 33 bp, Homo sapien
gtttggaaaatatgaagtctctgtgaactctct

SEQ ID NO: 715175 - DNA, 33 bp, Homo sapien
aaagcaatggcttgcacgtgtgtctgttgctaa

SEQ ID NO: 715176 - DNA, 33 bp, Homo sapien
aaagcaatggcttgcatgtgtgtctgttgctaa

SEQ ID NO: 715177 - DNA, 33 bp, Homo sapien
cagcattatctcacacactacaggtgctatgtg

SEQ ID NO: 715178 - DNA, 33 bp, Homo sapien
cagcattatctcacactctacaggtgctatgtg

SEQ ID NO: 715179 - DNA, 33 bp, Homo sapien
gcatgacttctgtccaacttagacagctcaatt

SEQ ID NO: 715180 - DNA, 33 bp, Homo sapien
gcatgacttctgtccagcttagacagctcaatt

SEQ ID NO: 715181 - DNA, 33 bp, Homo sapien
atgttttggtgaaaacacagaacaaaatacaga

SEQ ID NO: 715182 - DNA, 33 bp, Homo sapien
atgttttggtgaaaacgcagaacaaaatacaga

SEQ ID NO: 715183 - DNA, 33 bp, Homo sapien
cctatataccaacaacagtcaagacacaaacca

SEQ ID NO: 715184 - DNA, 33 bp, Homo sapien
cctatataccaacaactgtcaagacacaaacca

SEQ ID NO: 715185 - DNA, 33 bp, Homo sapien
tctgactggtatgagaaggtgtcccattgtgat

SEQ ID NO: 715186 - DNA, 33 bp, Homo sapien
tctgactggtatgagacggtgtcccattgtgat

SEQ ID NO: 715187 - DNA, 33 bp, Homo sapien
atctgtggcaagaaaccgtgttcaattactaaa

SEQ ID NO: 715188 - DNA, 33 bp, Homo sapien
atctgtggcaagaaactgtgttcaattactaaa

SEQ ID NO: 715189 - DNA, 33 bp, Homo sapien
aatgagttatatcaggaacactcaaaatactac

SEQ ID NO: 715190 - DNA, 33 bp, Homo sapien
aatgagttatatcagggacactcaaaatactac

SEQ ID NO: 715191 - DNA, 33 bp, Homo sapien
aaattaaatgagcccaaaatgataatgcttctc

SEQ ID NO: 715192 - DNA, 33 bp, Homo sapien
aaattaaatgagcccagaatgataatgcttctc

SEQ ID NO: 715193 - DNA, 33 bp, Homo sapien
tcttgatctcactttcaaacctctgtctaatct

SEQ ID NO: 715194 - DNA, 33 bp, Homo sapien
tcttgatctcactttcgaacctctgtctaatct

SEQ ID NO: 715195 - DNA, 33 bp, Homo sapien
ctactagtgtggttacaaattgtgtcgcttttg

SEQ ID NO: 715196 - DNA, 33 bp, Homo sapien
ctactagtgtggttacgaattgtgtcgcttttg

SEQ ID NO: 715197 - DNA, 33 bp, Homo sapien
aggttaatgaaaaccaatggataggtaaaacac

SEQ ID NO: 715198 - DNA, 33 bp, Homo sapien
aggttaatgaaaaccagtggataggtaaaacac

SEQ ID NO: 715199 - DNA, 33 bp, Homo sapien
taaatcttaaagtcaccggcttccccaaattcc

SEQ ID NO: 715200 - DNA, 33 bp, Homo sapien
taaatcttaaagtcactggcttccccaaattcc

SEQ ID NO: 715201 - DNA, 33 bp, Homo sapien
aacccaagaaattgtacgttagaagtattcctc

SEQ ID NO: 715202 - DNA, 33 bp, Homo sapien
aacccaagaaattgtatgttagaagtattcctc

SEQ ID NO: 715203 - DNA, 33 bp, Homo sapien
tctgccaagacatcaaatccctcagttaaactt

SEQ ID NO: 715204 - DNA, 33 bp, Homo sapien
tctgccaagacatcaagtccctcagttaaactt

SEQ ID NO: 715205 - DNA, 33 bp, Homo sapien
ttgagggataaggaaaagttgaagaattgatca

SEQ ID NO: 715206 - DNA, 33 bp, Homo sapien
ttgagggataaggaaaggttgaagaattgatca

SEQ ID NO: 715207 - DNA, 33 bp, Homo sapien
attaattcacatttagccatggattccatcatg

SEQ ID NO: 715208 - DNA, 33 bp, Homo sapien
attaattcacatttagtcatggattccatcatg

SEQ ID NO: 715209 - DNA, 33 bp, Homo sapien
ttcaaaaaataacttcacatgctcatatttcag

SEQ ID NO: 715210 - DNA, 33 bp, Homo sapien
ttcaaaaaataacttcgcatgctcatatttcag

SEQ ID NO: 715211 - DNA, 33 bp, Homo sapien
atagacaactgtcaacactctgggatccaattc

SEQ ID NO: 715212 - DNA, 33 bp, Homo sapien
atagacaactgtcaacgctctgggatccaattc

SEQ ID NO: 715213 - DNA, 33 bp, Homo sapien
ctaatgtcatttcaaccaacatacatttggggc

SEQ ID NO: 715214 - DNA, 33 bp, Homo sapien
ctaatgtcatttcaactaacatacatttggggc

SEQ ID NO: 715215 - DNA, 33 bp, Homo sapien
aagcaaacctatgaaaaggaagatgaaatactg

SEQ ID NO: 715216 - DNA, 33 bp, Homo sapien
aagcaaacctatgaaatggaagatgaaatactg

SEQ ID NO: 715217 - DNA, 33 bp, Homo sapien
gtgtatgtatgcaaaacggtggtacaaattcac

SEQ ID NO: 715218 - DNA, 33 bp, Homo sapien
gtgtatgtatgcaaaatggtggtacaaattcac

SEQ ID NO: 715219 - DNA, 33 bp, Homo sapien
tttgtcccctaaaatacagaagcctttagaaga

SEQ ID NO: 715220 - DNA, 33 bp, Homo sapien
tttgtcccctaaaatagagaagcctttagaaga

SEQ ID NO: 715221 - DNA, 33 bp, Homo sapien
aataatgtccttaaatcatagcattgttaaatt

SEQ ID NO: 715222 - DNA, 33 bp, Homo sapien
aataatgtccttaaattatagcattgttaaatt

SEQ ID NO: 715223 - DNA, 33 bp, Homo sapien
tggtctttgaactacaaaatcagaccacataga

SEQ ID NO: 715224 - DNA, 33 bp, Homo sapien
tggtctttgaactacataatcagaccacataga

SEQ ID NO: 715225 - DNA, 33 bp, Homo sapien
tgagaacttgaaaagaagctaggaattaaataa

SEQ ID NO: 715226 - DNA, 33 bp, Homo sapien
tgagaacttgaaaagatgctaggaattaaataa

SEQ ID NO: 715227 - DNA, 33 bp, Homo sapien
atcacctaccaaacaacaattccatagctcttg

SEQ ID NO: 715228 - DNA, 33 bp, Homo sapien
atcacctaccaaacaataattccatagctcttg

SEQ ID NO: 715229 - DNA, 33 bp, Homo sapien
cttaaaggtagtccaaccattagagggaattag

SEQ ID NO: 715230 - DNA, 33 bp, Homo sapien
cttaaaggtagtccaatcattagagggaattag

SEQ ID NO: 715231 - DNA, 33 bp, Homo sapien
tctaatgggctacagagtaccaaactaagtgta

SEQ ID NO: 715232 - DNA, 33 bp, Homo sapien
tctaatgggctacagattaccaaactaagtgta

SEQ ID NO: 715233 - DNA, 33 bp, Homo sapien
gggaaaatttctattacgtggcaagaatctata

SEQ ID NO: 715234 - DNA, 33 bp, Homo sapien
gggaaaatttctattatgtggcaagaatctata

SEQ ID NO: 715235 - DNA, 33 bp, Homo sapien
ctgagagctttggaaaaacatttggcaatgtat

SEQ ID NO: 715236 - DNA, 33 bp, Homo sapien
ctgagagctttggaaacacatttggcaatgtat

SEQ ID NO: 715237 - DNA, 33 bp, Homo sapien
tttcctctctgtaaaactgcactaataacactc

SEQ ID NO: 715238 - DNA, 33 bp, Homo sapien
tttcctctctgtaaaattgcactaataacactc

SEQ ID NO: 715239 - DNA, 33 bp, Homo sapien
aaaatcatgtgattccaatgtgtgggtcaaatg

SEQ ID NO: 715240 - DNA, 33 bp, Homo sapien
aaaatcatgtgattccgatgtgtgggtcaaatg

SEQ ID NO: 715241 - DNA, 33 bp, Homo sapien
ctacattacggagcaaccatcagtatcattaag

SEQ ID NO: 715242 - DNA, 33 bp, Homo sapien
ctacattacggagcaagcatcagtatcattaag

SEQ ID NO: 715243 - DNA, 33 bp, Homo sapien
aggagtttactaacaacgagagtttctggaaga

SEQ ID NO: 715244 - DNA, 33 bp, Homo sapien
aggagtttactaacaatgagagtttctggaaga

SEQ ID NO: 715245 - DNA, 33 bp, Homo sapien
gcattcccaagcaataataatgtgatggagtca

SEQ ID NO: 715246 - DNA, 33 bp, Homo sapien
gcattcccaagcaatattaatgtgatggagtca

SEQ ID NO: 715247 - DNA, 33 bp, Homo sapien
aaggctgaaagccgagcaacaataaatttacac

SEQ ID NO: 715248 - DNA, 33 bp, Homo sapien
aaggctgaaagccgaggaacaataaatttacac

SEQ ID NO: 715249 - DNA, 33 bp, Homo sapien
ctatatgccaaagaacaggtatcatttttcttt

SEQ ID NO: 715250 - DNA, 33 bp, Homo sapien
ctatatgccaaagaactggtatcatttttcttt

SEQ ID NO: 715251 - DNA, 33 bp, Homo sapien
gagttgagcaggcaaagtaaaatctgaaaaaaa

SEQ ID NO: 715252 - DNA, 33 bp, Homo sapien
gagttgagcaggcaaattaaaatctgaaaaaaa

SEQ ID NO: 715253 - DNA, 33 bp, Homo sapien
agctagttgctctaaaacccgtgacctcgttct

SEQ ID NO: 715254 - DNA, 33 bp, Homo sapien
agctagttgctctaaagcccgtgacctcgttct

SEQ ID NO: 715255 - DNA, 33 bp, Homo sapien
tatactaggacagccaatggaaacgagaatgaa

SEQ ID NO: 715256 - DNA, 33 bp, Homo sapien
tatactaggacagccagtggaaacgagaatgaa

SEQ ID NO: 715257 - DNA, 33 bp, Homo sapien
ggaagacaggcaaaagccaggctcaggaatttg

SEQ ID NO: 715258 - DNA, 33 bp, Homo sapien
ggaagacaggcaaaagtcaggctcaggaatttg

SEQ ID NO: 715259 - DNA, 33 bp, Homo sapien
tgccttcatgtttatggacttaagttagatgtt

SEQ ID NO: 715260 - DNA, 33 bp, Homo sapien
tgccttcatgtttatgtacttaagttagatgtt

SEQ ID NO: 715261 - DNA, 33 bp, Homo sapien
taatattaggtatgccacttgggatttgtttag

SEQ ID NO: 715262 - DNA, 33 bp, Homo sapien
taatattaggtatgcctcttgggatttgtttag

SEQ ID NO: 715263 - DNA, 33 bp, Homo sapien
gcattgtgcatctggaagaaggggacgtttgtt

SEQ ID NO: 715264 - DNA, 33 bp, Homo sapien
gcattgtgcatctggaggaaggggacgtttgtt

SEQ ID NO: 715265 - DNA, 33 bp, Homo sapien
gaatctccactttagacggtttaatagagcttc

SEQ ID NO: 715266 - DNA, 33 bp, Homo sapien
gaatctccactttagatggtttaatagagcttc

SEQ ID NO: 715267 - DNA, 33 bp, Homo sapien
gcccatatcttagaacaggtgttactttctggg

SEQ ID NO: 715268 - DNA, 33 bp, Homo sapien
gcccatatcttagaacgggtgttactttctggg

SEQ ID NO: 715269 - DNA, 33 bp, Homo sapien
tttacaaggttctagaccataaaaggaaattaa

SEQ ID NO: 715270 - DNA, 33 bp, Homo sapien
tttacaaggttctagatcataaaaggaaattaa

SEQ ID NO: 715271 - DNA, 33 bp, Homo sapien
caaaaatgatagttaaaaattgtagcaaattga

SEQ ID NO: 715272 - DNA, 33 bp, Homo sapien
caaaaatgatagttaataattgtagcaaattga

SEQ ID NO: 715273 - DNA, 33 bp, Homo sapien
tgttcttgttttgtccacatgtatctgcaacta

SEQ ID NO: 715274 - DNA, 33 bp, Homo sapien
tgttcttgttttgtccgcatgtatctgcaacta

SEQ ID NO: 715275 - DNA, 33 bp, Homo sapien
agtttatagcaaatacaaatgcaagttgattag

SEQ ID NO: 715276 - DNA, 33 bp, Homo sapien
agtttatagcaaatacgaatgcaagttgattag

SEQ ID NO: 715277 - DNA, 33 bp, Homo sapien
atcatttgtgatcaagacacattttaatataat

SEQ ID NO: 715278 - DNA, 33 bp, Homo sapien
atcatttgtgatcaaggcacattttaatataat

SEQ ID NO: 715279 - DNA, 33 bp, Homo sapien
ttaattgttgaaaatacgtataattgttgaaaa

SEQ ID NO: 715280 - DNA, 33 bp, Homo sapien
ttaattgttgaaaatatgtataattgttgaaaa

SEQ ID NO: 715281 - DNA, 33 bp, Homo sapien
cagcaacagaatccaaattaattaaaactgaca

SEQ ID NO: 715282 - DNA, 33 bp, Homo sapien
cagcaacagaatccaagttaattaaaactgaca

SEQ ID NO: 715283 - DNA, 33 bp, Homo sapien
aactttttcttaactcacatagaaagcattaca

SEQ ID NO: 715284 - DNA, 33 bp, Homo sapien
aactttttcttaactcgcatagaaagcattaca

SEQ ID NO: 715285 - DNA, 33 bp, Homo sapien
gagacatacaaatgacagatagtgctgtaagcc

SEQ ID NO: 715286 - DNA, 33 bp, Homo sapien
gagacatacaaatgacggatagtgctgtaagcc

SEQ ID NO: 715287 - DNA, 33 bp, Homo sapien
cttaggcagaactttaaaatggtgggagaagga

SEQ ID NO: 715288 - DNA, 33 bp, Homo sapien
cttaggcagaactttagaatggtgggagaagga

SEQ ID NO: 715289 - DNA, 33 bp, Homo sapien
tatctatcaagaggtacgtgcttggtggggagg

SEQ ID NO: 715290 - DNA, 33 bp, Homo sapien
tatctatcaagaggtatgtgcttggtggggagg

SEQ ID NO: 715291 - DNA, 33 bp, Homo sapien
ccaccacttcctaatccctaatctctaatgctg

SEQ ID NO: 715292 - DNA, 33 bp, Homo sapien
ccaccacttcctaatctctaatctctaatgctg

SEQ ID NO: 715293 - DNA, 33 bp, Homo sapien
ctgcaatttacagagacggtctctccaaagacc

SEQ ID NO: 715294 - DNA, 33 bp, Homo sapien
ctgcaatttacagagatggtctctccaaagacc

SEQ ID NO: 715295 - DNA, 33 bp, Homo sapien
tggcttgcttcataaagtagtcaatgattcttt

SEQ ID NO: 715296 - DNA, 33 bp, Homo sapien
tggcttgcttcataaattagtcaatgattcttt

SEQ ID NO: 715297 - DNA, 33 bp, Homo sapien
ggaacactttgagtaacgaaacaaagtattggc

SEQ ID NO: 715298 - DNA, 33 bp, Homo sapien
ggaacactttgagtaatgaaacaaagtattggc

SEQ ID NO: 715299 - DNA, 33 bp, Homo sapien
attcactgaaagtttcactattttgacacctac

SEQ ID NO: 715300 - DNA, 33 bp, Homo sapien
attcactgaaagtttcgctattttgacacctac

SEQ ID NO: 715301 - DNA, 33 bp, Homo sapien
tacatacacatattccacgaaacctaagctaaa

SEQ ID NO: 715302 - DNA, 33 bp, Homo sapien
tacatacacatattccgcgaaacctaagctaaa

SEQ ID NO: 715303 - DNA, 33 bp, Homo sapien
agtgtagtaaattgagaactaagcagtgccaag

SEQ ID NO: 715304 - DNA, 33 bp, Homo sapien
agtgtagtaaattgagtactaagcagtgccaag

SEQ ID NO: 715305 - DNA, 33 bp, Homo sapien
tgactctctggtccctaaataagtctgttcatt

SEQ ID NO: 715306 - DNA, 33 bp, Homo sapien
tgactctctggtccctgaataagtctgttcatt

SEQ ID NO: 715307 - DNA, 33 bp, Homo sapien
tcacaccagggttaatgaccaagcttacaggag

SEQ ID NO: 715308 - DNA, 33 bp, Homo sapien
tcacaccagggttaattaccaagcttacaggag

SEQ ID NO: 715309 - DNA, 33 bp, Homo sapien
caagatcatccagatcagacaagattgatagtg

SEQ ID NO: 715310 - DNA, 33 bp, Homo sapien
caagatcatccagatcggacaagattgatagtg

SEQ ID NO: 715311 - DNA, 33 bp, Homo sapien
cttgaagtttcacttgcatagcaaacactgtac

SEQ ID NO: 715312 - DNA, 33 bp, Homo sapien
cttgaagtttcacttggatagcaaacactgtac

SEQ ID NO: 715313 - DNA, 33 bp, Homo sapien
ttcagaactatgtgtgaaccagattgagtgtga

SEQ ID NO: 715314 - DNA, 33 bp, Homo sapien
ttcagaactatgtgtggaccagattgagtgtga

SEQ ID NO: 715315 - DNA, 33 bp, Homo sapien
gtaactcccatatccaatcacgatgtcctggtg

SEQ ID NO: 715316 - DNA, 33 bp, Homo sapien
gtaactcccatatccagtcacgatgtcctggtg

SEQ ID NO: 715317 - DNA, 33 bp, Homo sapien
cattaataatcctccaaacatctcatgttacaa

SEQ ID NO: 715318 - DNA, 33 bp, Homo sapien
cattaataatcctccagacatctcatgttacaa

SEQ ID NO: 715319 - DNA, 33 bp, Homo sapien
gtgaccttaattagtacccaaacaaagaatgag

SEQ ID NO: 715320 - DNA, 33 bp, Homo sapien
gtgaccttaattagtatccaaacaaagaatgag

SEQ ID NO: 715321 - DNA, 33 bp, Homo sapien
ttaatggcacgacccaagaactatcaatgagtt

SEQ ID NO: 715322 - DNA, 33 bp, Homo sapien
ttaatggcacgacccacgaactatcaatgagtt

SEQ ID NO: 715323 - DNA, 33 bp, Homo sapien
taaagaattttaatagacgtgtactccccattc

SEQ ID NO: 715324 - DNA, 33 bp, Homo sapien
taaagaattttaatagtcgtgtactccccattc

SEQ ID NO: 715325 - DNA, 33 bp, Homo sapien
gcgatgaagaaagggacgttttgctttagacgt

SEQ ID NO: 715326 - DNA, 33 bp, Homo sapien
gcgatgaagaaagggatgttttgctttagacgt

SEQ ID NO: 715327 - DNA, 33 bp, Homo sapien
ttgaatatcgatactaagttactaaacattatt

SEQ ID NO: 715328 - DNA, 33 bp, Homo sapien
ttgaatatcgatactaggttactaaacattatt

SEQ ID NO: 715329 - DNA, 33 bp, Homo sapien
gttgctggcaaatatcagaatttaagagacagg

SEQ ID NO: 715330 - DNA, 33 bp, Homo sapien
gttgctggcaaatatcggaatttaagagacagg

SEQ ID NO: 715331 - DNA, 33 bp, Homo sapien
gaaattcaactcttcaataaaagggaaaaacta

SEQ ID NO: 715332 - DNA, 33 bp, Homo sapien
gaaattcaactcttcagtaaaagggaaaaacta

SEQ ID NO: 715333 - DNA, 33 bp, Homo sapien
atcttagaatattagacaagcaattatgcttag

SEQ ID NO: 715334 - DNA, 33 bp, Homo sapien
atcttagaatattagagaagcaattatgcttag

SEQ ID NO: 715335 - DNA, 33 bp, Homo sapien
atttctactcagttacactgacaattaacacca

SEQ ID NO: 715336 - DNA, 33 bp, Homo sapien
atttctactcagttactctgacaattaacacca

SEQ ID NO: 715337 - DNA, 33 bp, Homo sapien
atttttttagatcttacgtgtgagaaaaaaagc

SEQ ID NO: 715338 - DNA, 33 bp, Homo sapien
atttttttagatcttatgtgtgagaaaaaaagc

SEQ ID NO: 715339 - DNA, 33 bp, Homo sapien
tttgcaaagacactgaagataacagaattagaa

SEQ ID NO: 715340 - DNA, 33 bp, Homo sapien
tttgcaaagacactgaggataacagaattagaa

SEQ ID NO: 715341 - DNA, 33 bp, Homo sapien
actactgtgtgtgtgacgagttatagagcaaat

SEQ ID NO: 715342 - DNA, 33 bp, Homo sapien
actactgtgtgtgtgatgagttatagagcaaat

SEQ ID NO: 715343 - DNA, 33 bp, Homo sapien
ctctccattttagtccccatttaatctttggag

SEQ ID NO: 715344 - DNA, 33 bp, Homo sapien
ctctccattttagtcctcatttaatctttggag

SEQ ID NO: 715345 - DNA, 33 bp, Homo sapien
aggaagctgtcaagctcaaggttttgaatacat

SEQ ID NO: 715346 - DNA, 33 bp, Homo sapien
aggaagctgtcaagctgaaggttttgaatacat

SEQ ID NO: 715347 - DNA, 33 bp, Homo sapien
tgcaaatagtatgttaacagccaagaataatga

SEQ ID NO: 715348 - DNA, 33 bp, Homo sapien
tgcaaatagtatgttatcagccaagaataatga

SEQ ID NO: 715349 - DNA, 33 bp, Homo sapien
ctatgggccagagttacgggcagggaactgact

SEQ ID NO: 715350 - DNA, 33 bp, Homo sapien
ctatgggccagagttaggggcagggaactgact

SEQ ID NO: 715351 - DNA, 33 bp, Homo sapien
tttgcagtttccattacatatgactgtctagta

SEQ ID NO: 715352 - DNA, 33 bp, Homo sapien
tttgcagtttccattatatatgactgtctagta

SEQ ID NO: 715353 - DNA, 33 bp, Homo sapien
gcatggagggatttaacagcaagaagatacaat

SEQ ID NO: 715354 - DNA, 33 bp, Homo sapien
gcatggagggatttaagagcaagaagatacaat

SEQ ID NO: 715355 - DNA, 33 bp, Homo sapien
gaggtcactgcacttgaattagtttactttgca

SEQ ID NO: 715356 - DNA, 33 bp, Homo sapien
gaggtcactgcacttgcattagtttactttgca

SEQ ID NO: 715357 - DNA, 33 bp, Homo sapien
tctacagacagaaatgaaggtcagttttagaag

SEQ ID NO: 715358 - DNA, 33 bp, Homo sapien
tctacagacagaaatgcaggtcagttttagaag

SEQ ID NO: 715359 - DNA, 33 bp, Homo sapien
ctggacaactgaacacaatgatcatattcaatt

SEQ ID NO: 715360 - DNA, 33 bp, Homo sapien
ctggacaactgaacactatgatcatattcaatt

SEQ ID NO: 715361 - DNA, 33 bp, Homo sapien
agccagatactttgcacgatgtgaggccccagc

SEQ ID NO: 715362 - DNA, 33 bp, Homo sapien
agccagatactttgcaggatgtgaggccccagc

SEQ ID NO: 715363 - DNA, 33 bp, Homo sapien
taaaccacttgatttacagtatttgttcgacgg

SEQ ID NO: 715364 - DNA, 33 bp, Homo sapien
taaaccacttgatttatagtatttgttcgacgg

SEQ ID NO: 715365 - DNA, 33 bp, Homo sapien
acatctttcgctcactaaataagcatcacttta

SEQ ID NO: 715366 - DNA, 33 bp, Homo sapien
acatctttcgctcactgaataagcatcacttta

SEQ ID NO: 715367 - DNA, 33 bp, Homo sapien
acattataagccaagtcacagtatgtagaaaac

SEQ ID NO: 715368 - DNA, 33 bp, Homo sapien
acattataagccaagttacagtatgtagaaaac

SEQ ID NO: 715369 - DNA, 33 bp, Homo sapien
cttatagttataacaaactactttaagctgata

SEQ ID NO: 715370 - DNA, 33 bp, Homo sapien
cttatagttataacaagctactttaagctgata

SEQ ID NO: 715371 - DNA, 33 bp, Homo sapien
atacaaatgaaacataactaggcaaatgacaag

SEQ ID NO: 715372 - DNA, 33 bp, Homo sapien
atacaaatgaaacatagctaggcaaatgacaag

SEQ ID NO: 715373 - DNA, 33 bp, Homo sapien
taagtacttgcaatgcaaaaagcatggaattat

SEQ ID NO: 715374 - DNA, 33 bp, Homo sapien
taagtacttgcaatgcgaaaagcatggaattat

SEQ ID NO: 715375 - DNA, 33 bp, Homo sapien
aaagctactgcttctcagaattttaagttaact

SEQ ID NO: 715376 - DNA, 33 bp, Homo sapien
aaagctactgcttctcggaattttaagttaact

SEQ ID NO: 715377 - DNA, 33 bp, Homo sapien
ctgttgctctctgaaaagctgaggtatggctaa

SEQ ID NO: 715378 - DNA, 33 bp, Homo sapien
ctgttgctctctgaaaggctgaggtatggctaa

SEQ ID NO: 715379 - DNA, 33 bp, Homo sapien
ctacaaccaacaatcgaaagagtgacatcaaca

SEQ ID NO: 715380 - DNA, 33 bp, Homo sapien
ctacaaccaacaatcgcaagagtgacatcaaca

SEQ ID NO: 715381 - DNA, 33 bp, Homo sapien
ctctaactctggttcaatattcatcaagagggc

SEQ ID NO: 715382 - DNA, 33 bp, Homo sapien
ctctaactctggttcagtattcatcaagagggc

SEQ ID NO: 715383 - DNA, 33 bp, Homo sapien
gtgcattacagtggtcacaactaagaagagaaa

SEQ ID NO: 715384 - DNA, 33 bp, Homo sapien
gtgcattacagtggtcgcaactaagaagagaaa

SEQ ID NO: 715385 - DNA, 33 bp, Homo sapien
gaaatctctctcttgaactacacttggttactc

SEQ ID NO: 715386 - DNA, 33 bp, Homo sapien
gaaatctctctcttgagctacacttggttactc

SEQ ID NO: 715387 - DNA, 33 bp, Homo sapien
tagcattaagttctgccaattgttgcttatttt

SEQ ID NO: 715388 - DNA, 33 bp, Homo sapien
tagcattaagttctgcgaattgttgcttatttt

SEQ ID NO: 715389 - DNA, 33 bp, Homo sapien
tccagcagaatgaatacatacctacctaaatac

SEQ ID NO: 715390 - DNA, 33 bp, Homo sapien
tccagcagaatgaatatatacctacctaaatac

SEQ ID NO: 715391 - DNA, 33 bp, Homo sapien
ggacatgaaccagacactaataaatgctttttc

SEQ ID NO: 715392 - DNA, 33 bp, Homo sapien
ggacatgaaccagacattaataaatgctttttc

SEQ ID NO: 715393 - DNA, 33 bp, Homo sapien
atagtaataaaagggacgtgaaaattatcttta

SEQ ID NO: 715394 - DNA, 33 bp, Homo sapien
atagtaataaaagggatgtgaaaattatcttta

SEQ ID NO: 715395 - DNA, 33 bp, Homo sapien
tttctaaagttcttaaggctttacatacatgag

SEQ ID NO: 715396 - DNA, 33 bp, Homo sapien
tttctaaagttcttaatgctttacatacatgag

SEQ ID NO: 715397 - DNA, 33 bp, Homo sapien
gtacagtgacttgaacacttctctcttccactg

SEQ ID NO: 715398 - DNA, 33 bp, Homo sapien
gtacagtgacttgaacccttctctcttccactg

SEQ ID NO: 715399 - DNA, 33 bp, Homo sapien
gggacagccattgccacctgttatttagcataa

SEQ ID NO: 715400 - DNA, 33 bp, Homo sapien
gggacagccattgccatctgttatttagcataa

SEQ ID NO: 715401 - DNA, 33 bp, Homo sapien
tattttcattgtggaagtaaagtcagtttatag

SEQ ID NO: 715402 - DNA, 33 bp, Homo sapien
tattttcattgtggaattaaagtcagtttatag

SEQ ID NO: 715403 - DNA, 33 bp, Homo sapien
ctactaaaagtcacgacaatttcagatttataa

SEQ ID NO: 715404 - DNA, 33 bp, Homo sapien
ctactaaaagtcacgataatttcagatttataa

SEQ ID NO: 715405 - DNA, 33 bp, Homo sapien
ttttaaaatacagaaagtctttgtgtagggtgt

SEQ ID NO: 715406 - DNA, 33 bp, Homo sapien
ttttaaaatacagaaattctttgtgtagggtgt

SEQ ID NO: 715407 - DNA, 33 bp, Homo sapien
tctctcatctccctaaactgtaattgttgcagt

SEQ ID NO: 715408 - DNA, 33 bp, Homo sapien
tctctcatctccctaacctgtaattgttgcagt

SEQ ID NO: 715409 - DNA, 33 bp, Homo sapien
tcttgagagtaaaagaaagcactgtcaattata

SEQ ID NO: 715410 - DNA, 33 bp, Homo sapien
tcttgagagtaaaagagagcactgtcaattata

SEQ ID NO: 715411 - DNA, 33 bp, Homo sapien
acagagatggttgttacgtaattcactggcagg

SEQ ID NO: 715412 - DNA, 33 bp, Homo sapien
acagagatggttgttatgtaattcactggcagg

SEQ ID NO: 715413 - DNA, 33 bp, Homo sapien
gacgtgctgcacaaccgaagtgggatggagcaa

SEQ ID NO: 715414 - DNA, 33 bp, Homo sapien
gacgtgctgcacaacctaagtgggatggagcaa

SEQ ID NO: 715415 - DNA, 33 bp, Homo sapien
actctccagcgttctcaacaattcctacctcac

SEQ ID NO: 715416 - DNA, 33 bp, Homo sapien
actctccagcgttctcgacaattcctacctcac

SEQ ID NO: 715417 - DNA, 33 bp, Homo sapien
gtgaaacaagtatcaaatatgacaacatctctt

SEQ ID NO: 715418 - DNA, 33 bp, Homo sapien
gtgaaacaagtatcaattatgacaacatctctt

SEQ ID NO: 715419 - DNA, 33 bp, Homo sapien
gcgtgcagggagcttcaaagacattagctatgt

SEQ ID NO: 715420 - DNA, 33 bp, Homo sapien
gcgtgcagggagcttcgaagacattagctatgt

SEQ ID NO: 715421 - DNA, 33 bp, Homo sapien
tataatttttgccagacagtaaccactactttg

SEQ ID NO: 715422 - DNA, 33 bp, Homo sapien
tataatttttgccagatagtaaccactactttg

SEQ ID NO: 715423 - DNA, 33 bp, Homo sapien
aactttttctgttatgacaaaatacacagaaca

SEQ ID NO: 715424 - DNA, 33 bp, Homo sapien
aactttttctgttatggcaaaatacacagaaca

SEQ ID NO: 715425 - DNA, 33 bp, Homo sapien
gtggagaatacaaggacgttacatgctgagtat

SEQ ID NO: 715426 - DNA, 33 bp, Homo sapien
gtggagaatacaaggatgttacatgctgagtat

SEQ ID NO: 715427 - DNA, 33 bp, Homo sapien
tgaggggcagatgctacacactttgaaagaacc

SEQ ID NO: 715428 - DNA, 33 bp, Homo sapien
tgaggggcagatgctatacactttgaaagaacc

SEQ ID NO: 715429 - DNA, 33 bp, Homo sapien
agaggatgatgctatacaacactcaaatcctct

SEQ ID NO: 715430 - DNA, 33 bp, Homo sapien
agaggatgatgctatataacactcaaatcctct

SEQ ID NO: 715431 - DNA, 33 bp, Homo sapien
aaatggccctctgctaaaaggagcttctgggcc

SEQ ID NO: 715432 - DNA, 33 bp, Homo sapien
aaatggccctctgctataaggagcttctgggcc

SEQ ID NO: 715433 - DNA, 33 bp, Homo sapien
acttctaaacttcatcaaaccttctccaggagc

SEQ ID NO: 715434 - DNA, 33 bp, Homo sapien
acttctaaacttcatccaaccttctccaggagc

SEQ ID NO: 715435 - DNA, 33 bp, Homo sapien
tatagtgaaaggctgcaaagtgaattagcaaaa

SEQ ID NO: 715436 - DNA, 33 bp, Homo sapien
tatagtgaaaggctgcgaagtgaattagcaaaa

SEQ ID NO: 715437 - DNA, 33 bp, Homo sapien
atatagagttacattcacagttaggatttatta

SEQ ID NO: 715438 - DNA, 33 bp, Homo sapien
atatagagttacattcgcagttaggatttatta

SEQ ID NO: 715439 - DNA, 33 bp, Homo sapien
ttaaaatgcactatgaacttgaaatacaacttt

SEQ ID NO: 715440 - DNA, 33 bp, Homo sapien
ttaaaatgcactatgatcttgaaatacaacttt

SEQ ID NO: 715441 - DNA, 33 bp, Homo sapien
ttaccagtggcaggttaaaagatcactaatttc

SEQ ID NO: 715442 - DNA, 33 bp, Homo sapien
ttaccagtggcaggttgaaagatcactaatttc

SEQ ID NO: 715443 - DNA, 33 bp, Homo sapien
attatagtagaaagtcactcatcttttactgaa

SEQ ID NO: 715444 - DNA, 33 bp, Homo sapien
attatagtagaaagtcgctcatcttttactgaa

SEQ ID NO: 715445 - DNA, 33 bp, Homo sapien
atatttgattgaagttcaaaatgcctctaaaac

SEQ ID NO: 715446 - DNA, 33 bp, Homo sapien
atatttgattgaagtttaaaatgcctctaaaac

SEQ ID NO: 715447 - DNA, 33 bp, Homo sapien
agagggtcatatcacaaaagctgtgacctttgc

SEQ ID NO: 715448 - DNA, 33 bp, Homo sapien
agagggtcatatcacagaagctgtgacctttgc

SEQ ID NO: 715449 - DNA, 33 bp, Homo sapien
atttattaaaaagaagcctggtatccgtgccat

SEQ ID NO: 715450 - DNA, 33 bp, Homo sapien
atttattaaaaagaaggctggtatccgtgccat

SEQ ID NO: 715451 - DNA, 33 bp, Homo sapien
aggtggctgaaggcaaagtagcccttggtcttt

SEQ ID NO: 715452 - DNA, 33 bp, Homo sapien
aggtggctgaaggcaatgtagcccttggtcttt

SEQ ID NO: 715453 - DNA, 33 bp, Homo sapien
ttaagatgggctgttacataggtttcctgtaag

SEQ ID NO: 715454 - DNA, 33 bp, Homo sapien
ttaagatgggctgttatataggtttcctgtaag

SEQ ID NO: 715455 - DNA, 33 bp, Homo sapien
agatacacaatattaacacacctgatcccaagc

SEQ ID NO: 715456 - DNA, 33 bp, Homo sapien
agatacacaatattaagacacctgatcccaagc

SEQ ID NO: 715457 - DNA, 33 bp, Homo sapien
agtgatatctaacaaaaatcatttcccaaattc

SEQ ID NO: 715458 - DNA, 33 bp, Homo sapien
agtgatatctaacaaagatcatttcccaaattc

SEQ ID NO: 715459 - DNA, 33 bp, Homo sapien
gaagctgttccttaaagagtttctcatgacaca

SEQ ID NO: 715460 - DNA, 33 bp, Homo sapien
gaagctgttccttaaatagtttctcatgacaca

SEQ ID NO: 715461 - DNA, 33 bp, Homo sapien
ctggagttaacaagtagagaacattccagtcaa

SEQ ID NO: 715462 - DNA, 33 bp, Homo sapien
ctggagttaacaagtatagaacattccagtcaa

SEQ ID NO: 715463 - DNA, 33 bp, Homo sapien
agatgggtagttatgacctgcactctagctaag

SEQ ID NO: 715464 - DNA, 33 bp, Homo sapien
agatgggtagttatgatctgcactctagctaag

SEQ ID NO: 715465 - DNA, 33 bp, Homo sapien
gaaaagaaggagaaagcatcattgcctatcaga

SEQ ID NO: 715466 - DNA, 33 bp, Homo sapien
gaaaagaaggagaaagtatcattgcctatcaga

SEQ ID NO: 715467 - DNA, 33 bp, Homo sapien
gtttgtcccttccaacactgttacttgataaaa

SEQ ID NO: 715468 - DNA, 33 bp, Homo sapien
gtttgtcccttccaacgctgttacttgataaaa

SEQ ID NO: 715469 - DNA, 33 bp, Homo sapien
agaggaatatatgaaaaagcaatgaataaaatt

SEQ ID NO: 715470 - DNA, 33 bp, Homo sapien
agaggaatatatgaaagagcaatgaataaaatt

SEQ ID NO: 715471 - DNA, 33 bp, Homo sapien
gaaagttaaagcaaaactgtgcattagcaagtc

SEQ ID NO: 715472 - DNA, 33 bp, Homo sapien
gaaagttaaagcaaaattgtgcattagcaagtc

SEQ ID NO: 715473 - DNA, 33 bp, Homo sapien
tcattctttaattcaaactgtgtgcaacttaat

SEQ ID NO: 715474 - DNA, 33 bp, Homo sapien
tcattctttaattcaatctgtgtgcaacttaat

SEQ ID NO: 715475 - DNA, 33 bp, Homo sapien
agatgaatattggacccaaatagagccttaaaa

SEQ ID NO: 715476 - DNA, 33 bp, Homo sapien
agatgaatattggacctaaatagagccttaaaa

SEQ ID NO: 715477 - DNA, 33 bp, Homo sapien
cagtgcacagtgggaacattttttaacagaccc

SEQ ID NO: 715478 - DNA, 33 bp, Homo sapien
cagtgcacagtgggaagattttttaacagaccc

SEQ ID NO: 715479 - DNA, 33 bp, Homo sapien
ctctcacctgtggaccaaaaagcatttgcggat

SEQ ID NO: 715480 - DNA, 33 bp, Homo sapien
ctctcacctgtggaccgaaaagcatttgcggat

SEQ ID NO: 715481 - DNA, 33 bp, Homo sapien
actaaataccaagtgacgaagcaacttaatttt

SEQ ID NO: 715482 - DNA, 33 bp, Homo sapien
actaaataccaagtgatgaagcaacttaatttt

SEQ ID NO: 715483 - DNA, 33 bp, Homo sapien
ttctctgcataaaacactagcatttaccaaggt

SEQ ID NO: 715484 - DNA, 33 bp, Homo sapien
ttctctgcataaaacattagcatttaccaaggt

SEQ ID NO: 715485 - DNA, 33 bp, Homo sapien
tagttattaacaaaccactgtctgcagaaaaat

SEQ ID NO: 715486 - DNA, 33 bp, Homo sapien
tagttattaacaaaccgctgtctgcagaaaaat

SEQ ID NO: 715487 - DNA, 33 bp, Homo sapien
cttttcctgtactgaactgtctgctggtgttac

SEQ ID NO: 715488 - DNA, 33 bp, Homo sapien
cttttcctgtactgaattgtctgctggtgttac

SEQ ID NO: 715489 - DNA, 33 bp, Homo sapien
tagggacaacaacttcaaattaacccaaggatc

SEQ ID NO: 715490 - DNA, 33 bp, Homo sapien
tagggacaacaacttcgaattaacccaaggatc

SEQ ID NO: 715491 - DNA, 33 bp, Homo sapien
gaagattctaaaagcaccaaagtcacacttatg

SEQ ID NO: 715492 - DNA, 33 bp, Homo sapien
gaagattctaaaagcatcaaagtcacacttatg

SEQ ID NO: 715493 - DNA, 33 bp, Homo sapien
agagtcagatcaaaacccaggcattctggctcc

SEQ ID NO: 715494 - DNA, 33 bp, Homo sapien
agagtcagatcaaaactcaggcattctggctcc

SEQ ID NO: 715495 - DNA, 33 bp, Homo sapien
tgcttgcagaaatacactcatgtaagtatcaga

SEQ ID NO: 715496 - DNA, 33 bp, Homo sapien
tgcttgcagaaatacagtcatgtaagtatcaga

SEQ ID NO: 715497 - DNA, 33 bp, Homo sapien
tatatagtaagacttacgtatagcaagccttta

SEQ ID NO: 715498 - DNA, 33 bp, Homo sapien
tatatagtaagacttatgtatagcaagccttta

SEQ ID NO: 715499 - DNA, 33 bp, Homo sapien
tatatgaaaaaaattaaccattagaagcacatg

SEQ ID NO: 715500 - DNA, 33 bp, Homo sapien
tatatgaaaaaaattagccattagaagcacatg

SEQ ID NO: 715501 - DNA, 33 bp, Homo sapien
gatatcacagagaagaggtagctatttgtgtta

SEQ ID NO: 715502 - DNA, 33 bp, Homo sapien
gatatcacagagaagatgtagctatttgtgtta

SEQ ID NO: 715503 - DNA, 33 bp, Homo sapien
gaaacttctaaggaccacaaagcagctcattaa

SEQ ID NO: 715504 - DNA, 33 bp, Homo sapien
gaaacttctaaggaccgcaaagcagctcattaa

SEQ ID NO: 715505 - DNA, 33 bp, Homo sapien
taaacctaaaatgtacgatgattcaaaaggtat

SEQ ID NO: 715506 - DNA, 33 bp, Homo sapien
taaacctaaaatgtactatgattcaaaaggtat

SEQ ID NO: 715507 - DNA, 33 bp, Homo sapien
atacataattcttgtacagccttatttgttcaa

SEQ ID NO: 715508 - DNA, 33 bp, Homo sapien
atacataattcttgtagagccttatttgttcaa

SEQ ID NO: 715509 - DNA, 33 bp, Homo sapien
atagtaactactcataagttccaaattagatgc

SEQ ID NO: 715510 - DNA, 33 bp, Homo sapien
atagtaactactcataggttccaaattagatgc

SEQ ID NO: 715511 - DNA, 33 bp, Homo sapien
aatttgaattctattaacttcagagcatacaaa

SEQ ID NO: 715512 - DNA, 33 bp, Homo sapien
aatttgaattctattatcttcagagcatacaaa

SEQ ID NO: 715513 - DNA, 33 bp, Homo sapien
tggtaggactgtaaaactgtacaatgattttgg

SEQ ID NO: 715514 - DNA, 33 bp, Homo sapien
tggtaggactgtaaaattgtacaatgattttgg

SEQ ID NO: 715515 - DNA, 33 bp, Homo sapien
taagggtcaaggtttcacatgggtttgaaggca

SEQ ID NO: 715516 - DNA, 33 bp, Homo sapien
taagggtcaaggtttcccatgggtttgaaggca

SEQ ID NO: 715517 - DNA, 33 bp, Homo sapien
tttctgggcactactacgtgaatatctgcccag

SEQ ID NO: 715518 - DNA, 33 bp, Homo sapien
tttctgggcactactatgtgaatatctgcccag

SEQ ID NO: 715519 - DNA, 33 bp, Homo sapien
ttttcatctttctcacactgtatacctgagttt

SEQ ID NO: 715520 - DNA, 33 bp, Homo sapien
ttttcatctttctcacgctgtatacctgagttt

SEQ ID NO: 715521 - DNA, 33 bp, Homo sapien
cattaatttgctccggcataagattatcttctc

SEQ ID NO: 715522 - DNA, 33 bp, Homo sapien
cattaatttgctccggtataagattatcttctc

SEQ ID NO: 715523 - DNA, 33 bp, Homo sapien
gcaatattctcttaaccattggaaaaaatgaat

SEQ ID NO: 715524 - DNA, 33 bp, Homo sapien
gcaatattctcttaactattggaaaaaatgaat

SEQ ID NO: 715525 - DNA, 33 bp, Homo sapien
gatagtgactgtcttcacctattgggttatggg

SEQ ID NO: 715526 - DNA, 33 bp, Homo sapien
gatagtgactgtcttctcctattgggttatggg

SEQ ID NO: 715527 - DNA, 33 bp, Homo sapien
tgatttacaacttgtaagcctgtttggttgctt

SEQ ID NO: 715528 - DNA, 33 bp, Homo sapien
tgatttacaacttgtaggcctgtttggttgctt

SEQ ID NO: 715529 - DNA, 33 bp, Homo sapien
ctccagaacaatgaaccaaataaatatcttttc

SEQ ID NO: 715530 - DNA, 33 bp, Homo sapien
ctccagaacaatgaacgaaataaatatcttttc

SEQ ID NO: 715531 - DNA, 33 bp, Homo sapien
tgctccaccttcaggacaaaatgaccagaaggt

SEQ ID NO: 715532 - DNA, 33 bp, Homo sapien
tgctccaccttcaggataaaatgaccagaaggt

SEQ ID NO: 715533 - DNA, 33 bp, Homo sapien
taccttcattggcccaaaagtgaagaaaggctg

SEQ ID NO: 715534 - DNA, 33 bp, Homo sapien
taccttcattggcccataagtgaagaaaggctg

SEQ ID NO: 715535 - DNA, 33 bp, Homo sapien
aaccggatatctaaaccccagtgaattgcatgc

SEQ ID NO: 715536 - DNA, 33 bp, Homo sapien
aaccggatatctaaactccagtgaattgcatgc

SEQ ID NO: 715537 - DNA, 33 bp, Homo sapien
tacatgacttaaggaaatgaaggtgcagtagat

SEQ ID NO: 715538 - DNA, 33 bp, Homo sapien
tacatgacttaaggaagtgaaggtgcagtagat

SEQ ID NO: 715539 - DNA, 33 bp, Homo sapien
agtctattcacatccaatatagtacagtgattt

SEQ ID NO: 715540 - DNA, 33 bp, Homo sapien
agtctattcacatccagtatagtacagtgattt

SEQ ID NO: 715541 - DNA, 33 bp, Homo sapien
atgtttgaaattttccacaataacgagttgcat

SEQ ID NO: 715542 - DNA, 33 bp, Homo sapien
atgtttgaaattttccgcaataacgagttgcat

SEQ ID NO: 715543 - DNA, 33 bp, Homo sapien
ctttaggctgttacaacgtcaccctataaagta

SEQ ID NO: 715544 - DNA, 33 bp, Homo sapien
ctttaggctgttacaatgtcaccctataaagta

SEQ ID NO: 715545 - DNA, 33 bp, Homo sapien
taaagcaaaggatttacctgcttcagttcaatt

SEQ ID NO: 715546 - DNA, 33 bp, Homo sapien
taaagcaaaggatttatctgcttcagttcaatt

SEQ ID NO: 715547 - DNA, 33 bp, Homo sapien
actgtgcccggcctcacgcaaaactttctaact

SEQ ID NO: 715548 - DNA, 33 bp, Homo sapien
actgtgcccggcctcatgcaaaactttctaact

SEQ ID NO: 715549 - DNA, 33 bp, Homo sapien
atatgtaaattgcccaatggaaaattaaattaa

SEQ ID NO: 715550 - DNA, 33 bp, Homo sapien
atatgtaaattgcccagtggaaaattaaattaa

SEQ ID NO: 715551 - DNA, 33 bp, Homo sapien
ctcttgtccatgttgcaaaagcattcatgacag

SEQ ID NO: 715552 - DNA, 33 bp, Homo sapien
ctcttgtccatgttgcgaaagcattcatgacag

SEQ ID NO: 715553 - DNA, 33 bp, Homo sapien
tctgaaataatcttgcacaagcaaaattctcca

SEQ ID NO: 715554 - DNA, 33 bp, Homo sapien
tctgaaataatcttgctcaagcaaaattctcca

SEQ ID NO: 715555 - DNA, 33 bp, Homo sapien
aggaagcaggtaaatcaagatacaaactgtcac

SEQ ID NO: 715556 - DNA, 33 bp, Homo sapien
aggaagcaggtaaatcgagatacaaactgtcac

SEQ ID NO: 715557 - DNA, 33 bp, Homo sapien
tgataaaatttagacacagcatttgtatctgtg

SEQ ID NO: 715558 - DNA, 33 bp, Homo sapien
tgataaaatttagacatagcatttgtatctgtg

SEQ ID NO: 715559 - DNA, 33 bp, Homo sapien
tgcaagtaaatcaaggaccaaacttctagatgc

SEQ ID NO: 715560 - DNA, 33 bp, Homo sapien
tgcaagtaaatcaagggccaaacttctagatgc

SEQ ID NO: 715561 - DNA, 33 bp, Homo sapien
atgcccaggccaatcactatttcaggaaaacat

SEQ ID NO: 715562 - DNA, 33 bp, Homo sapien
atgcccaggccaatcattatttcaggaaaacat

SEQ ID NO: 715563 - DNA, 33 bp, Homo sapien
ttagcgcttgcgttcacgttactatgtgtaggt

SEQ ID NO: 715564 - DNA, 33 bp, Homo sapien
ttagcgcttgcgttcaggttactatgtgtaggt

SEQ ID NO: 715565 - DNA, 33 bp, Homo sapien
aagatcttatagggtaagtcaggcagatagttc

SEQ ID NO: 715566 - DNA, 33 bp, Homo sapien
aagatcttatagggtaggtcaggcagatagttc

SEQ ID NO: 715567 - DNA, 33 bp, Homo sapien
aaatgtttggcacaggaacataaaacactgtaa

SEQ ID NO: 715568 - DNA, 33 bp, Homo sapien
aaatgtttggcacagggacataaaacactgtaa

SEQ ID NO: 715569 - DNA, 33 bp, Homo sapien
ggttccaaggtaagctaaactactgcttaattc

SEQ ID NO: 715570 - DNA, 33 bp, Homo sapien
ggttccaaggtaagctgaactactgcttaattc

SEQ ID NO: 715571 - DNA, 33 bp, Homo sapien
atttaaaactgaaaacccttatcctgaatttct

SEQ ID NO: 715572 - DNA, 33 bp, Homo sapien
atttaaaactgaaaacgcttatcctgaatttct

SEQ ID NO: 715573 - DNA, 33 bp, Homo sapien
accctctctgaaaccaaacttggggtactccag

SEQ ID NO: 715574 - DNA, 33 bp, Homo sapien
accctctctgaaaccacacttggggtactccag

SEQ ID NO: 715575 - DNA, 33 bp, Homo sapien
ttttaatactgccacaccgggtttaagtttcaa

SEQ ID NO: 715576 - DNA, 33 bp, Homo sapien
ttttaatactgccacatcgggtttaagtttcaa

SEQ ID NO: 715577 - DNA, 33 bp, Homo sapien
catccctctactttcactatctcaagaaatctc

SEQ ID NO: 715578 - DNA, 33 bp, Homo sapien
catccctctactttcagtatctcaagaaatctc

SEQ ID NO: 715579 - DNA, 33 bp, Homo sapien
atgtagtggcttatgacacaaagttcaaaggaa

SEQ ID NO: 715580 - DNA, 33 bp, Homo sapien
atgtagtggcttatgatacaaagttcaaaggaa

SEQ ID NO: 715581 - DNA, 33 bp, Homo sapien
tacgggatagccagcccaaacttctcaaaactg

SEQ ID NO: 715582 - DNA, 33 bp, Homo sapien
tacgggatagccagcctaaacttctcaaaactg

SEQ ID NO: 715583 - DNA, 33 bp, Homo sapien
caagctcaagttcccccacttcctctgccacac

SEQ ID NO: 715584 - DNA, 33 bp, Homo sapien
caagctcaagttccccgacttcctctgccacac

SEQ ID NO: 715585 - DNA, 33 bp, Homo sapien
attgtcctgtttggcaatattagtttttaatgt

SEQ ID NO: 715586 - DNA, 33 bp, Homo sapien
attgtcctgtttggcagtattagtttttaatgt

SEQ ID NO: 715587 - DNA, 33 bp, Homo sapien
ctacccctcaccaccacgtttagtgagtaaatg

SEQ ID NO: 715588 - DNA, 33 bp, Homo sapien
ctacccctcaccaccatgtttagtgagtaaatg

SEQ ID NO: 715589 - DNA, 33 bp, Homo sapien
tctgccacttcctaaccgtggttctttgggtaa

SEQ ID NO: 715590 - DNA, 33 bp, Homo sapien
tctgccacttcctaactgtggttctttgggtaa

SEQ ID NO: 715591 - DNA, 33 bp, Homo sapien
aactacaatgacaaaacagcacgatgtcagttg

SEQ ID NO: 715592 - DNA, 33 bp, Homo sapien
aactacaatgacaaaatagcacgatgtcagttg

SEQ ID NO: 715593 - DNA, 33 bp, Homo sapien
tctgatatgccacttaaaacagcagagccccta

SEQ ID NO: 715594 - DNA, 33 bp, Homo sapien
tctgatatgccacttacaacagcagagccccta

SEQ ID NO: 715595 - DNA, 33 bp, Homo sapien
tttctttctttatcaaatagggttagctgtatg

SEQ ID NO: 715596 - DNA, 33 bp, Homo sapien
tttctttctttatcaagtagggttagctgtatg

SEQ ID NO: 715597 - DNA, 33 bp, Homo sapien
tacagtgcatggaacacagtggagggttaatat

SEQ ID NO: 715598 - DNA, 33 bp, Homo sapien
tacagtgcatggaacatagtggagggttaatat

SEQ ID NO: 715599 - DNA, 33 bp, Homo sapien
agctgtatcatcaagaacctactacagtgcatg

SEQ ID NO: 715600 - DNA, 33 bp, Homo sapien
agctgtatcatcaagagcctactacagtgcatg

SEQ ID NO: 715601 - DNA, 33 bp, Homo sapien
acccaaatgcctttcacggccaacaaagcctcc

SEQ ID NO: 715602 - DNA, 33 bp, Homo sapien
acccaaatgcctttcatggccaacaaagcctcc

SEQ ID NO: 715603 - DNA, 33 bp, Homo sapien
gttcctaacatgatgtcacaagaggccacaagg

SEQ ID NO: 715604 - DNA, 33 bp, Homo sapien
gttcctaacatgatgtgacaagaggccacaagg

SEQ ID NO: 715605 - DNA, 33 bp, Homo sapien
ttaaagtgtttcttcaaaagattgccaggttca

SEQ ID NO: 715606 - DNA, 33 bp, Homo sapien
ttaaagtgtttcttcataagattgccaggttca

SEQ ID NO: 715607 - DNA, 33 bp, Homo sapien
aaatgcttgaattgaccgagagaacattaacag

SEQ ID NO: 715608 - DNA, 33 bp, Homo sapien
aaatgcttgaattgacggagagaacattaacag

SEQ ID NO: 715609 - DNA, 33 bp, Homo sapien
cctacaagtctttaaaagtatgattcaggcatt

SEQ ID NO: 715610 - DNA, 33 bp, Homo sapien
cctacaagtctttaaatgtatgattcaggcatt

SEQ ID NO: 715611 - DNA, 33 bp, Homo sapien
tatatataatgcctaaaagcctcatctaattat

SEQ ID NO: 715612 - DNA, 33 bp, Homo sapien
tatatataatgcctaagagcctcatctaattat

SEQ ID NO: 715613 - DNA, 33 bp, Homo sapien
ggcaaccgttctaataataacaacaaaagcaac

SEQ ID NO: 715614 - DNA, 33 bp, Homo sapien
ggcaaccgttctaatagtaacaacaaaagcaac

SEQ ID NO: 715615 - DNA, 33 bp, Homo sapien
gagatcatatggaaaaaaggcaaccgttctaat

SEQ ID NO: 715616 - DNA, 33 bp, Homo sapien
gagatcatatggaaaataggcaaccgttctaat

SEQ ID NO: 715617 - DNA, 33 bp, Homo sapien
tgatatttttaagatgcagaagtcttcaaattt

SEQ ID NO: 715618 - DNA, 33 bp, Homo sapien
tgatatttttaagatgtagaagtcttcaaattt

SEQ ID NO: 715619 - DNA, 33 bp, Homo sapien
tcacacaccctcctaaaatgctaatatatttgt

SEQ ID NO: 715620 - DNA, 33 bp, Homo sapien
tcacacaccctcctaagatgctaatatatttgt

SEQ ID NO: 715621 - DNA, 33 bp, Homo sapien
agactaggaatccaataaaaatatttggcaacc

SEQ ID NO: 715622 - DNA, 33 bp, Homo sapien
agactaggaatccaatcaaaatatttggcaacc

SEQ ID NO: 715623 - DNA, 33 bp, Homo sapien
gtaatttaatatagaactggttgctaatttgca

SEQ ID NO: 715624 - DNA, 33 bp, Homo sapien
gtaatttaatatagaattggttgctaatttgca

SEQ ID NO: 715625 - DNA, 33 bp, Homo sapien
gtaggtattaaatggaacaaaaagagcagagtt

SEQ ID NO: 715626 - DNA, 33 bp, Homo sapien
gtaggtattaaatggaccaaaaagagcagagtt

SEQ ID NO: 715627 - DNA, 33 bp, Homo sapien
ttgctgcattaatacaatcatccaccagtacca

SEQ ID NO: 715628 - DNA, 33 bp, Homo sapien
ttgctgcattaatacagtcatccaccagtacca

SEQ ID NO: 715629 - DNA, 33 bp, Homo sapien
acatgctggttgacaaaaattcctcactgttag

SEQ ID NO: 715630 - DNA, 33 bp, Homo sapien
acatgctggttgacaagaattcctcactgttag

SEQ ID NO: 715631 - DNA, 33 bp, Homo sapien
ctccacagcactaggaagttgtagtgaataaga

SEQ ID NO: 715632 - DNA, 33 bp, Homo sapien
ctccacagcactaggatgttgtagtgaataaga

SEQ ID NO: 715633 - DNA, 33 bp, Homo sapien
gagggacttaagagaactggggccattattaag

SEQ ID NO: 715634 - DNA, 33 bp, Homo sapien
gagggacttaagagaattggggccattattaag

SEQ ID NO: 715635 - DNA, 33 bp, Homo sapien
ctccagctgttgcaagaatcaaatggcattttt

SEQ ID NO: 715636 - DNA, 33 bp, Homo sapien
ctccagctgttgcaaggatcaaatggcattttt

SEQ ID NO: 715637 - DNA, 33 bp, Homo sapien
ggacaatttctcatcacagtaacaaggaattga

SEQ ID NO: 715638 - DNA, 33 bp, Homo sapien
ggacaatttctcatcagagtaacaaggaattga

SEQ ID NO: 715639 - DNA, 33 bp, Homo sapien
ggactccacacgatcaccttgcctgggttctaa

SEQ ID NO: 715640 - DNA, 33 bp, Homo sapien
ggactccacacgatcatcttgcctgggttctaa

SEQ ID NO: 715641 - DNA, 33 bp, Homo sapien
cctaaccaaatgtaaaatgtgattaaatctaca

SEQ ID NO: 715642 - DNA, 33 bp, Homo sapien
cctaaccaaatgtaaagtgtgattaaatctaca

SEQ ID NO: 715643 - DNA, 33 bp, Homo sapien
tttgaacagtgtcaaaataggtaatacggttgt

SEQ ID NO: 715644 - DNA, 33 bp, Homo sapien
tttgaacagtgtcaaagtaggtaatacggttgt

SEQ ID NO: 715645 - DNA, 33 bp, Homo sapien
atttgtcttcataaggaaaacataacatattga

SEQ ID NO: 715646 - DNA, 33 bp, Homo sapien
atttgtcttcataagggaaacataacatattga

SEQ ID NO: 715647 - DNA, 33 bp, Homo sapien
ataaagcctaggtcaaaagaacagaaagctcaa

SEQ ID NO: 715648 - DNA, 33 bp, Homo sapien
ataaagcctaggtcaagagaacagaaagctcaa

SEQ ID NO: 715649 - DNA, 33 bp, Homo sapien
aaggtggccatctcgacggggaacacggtacct

SEQ ID NO: 715650 - DNA, 33 bp, Homo sapien
aaggtggccatctcgagggggaacacggtacct

SEQ ID NO: 715651 - DNA, 33 bp, Homo sapien
atatatacagtaatacacaaccaggccagtgca

SEQ ID NO: 715652 - DNA, 33 bp, Homo sapien
atatatacagtaatacgcaaccaggccagtgca

SEQ ID NO: 715653 - DNA, 33 bp, Homo sapien
acaaagggaggctgccagctgacgaattggtcc

SEQ ID NO: 715654 - DNA, 33 bp, Homo sapien
acaaagggaggctgccggctgacgaattggtcc

SEQ ID NO: 715655 - DNA, 33 bp, Homo sapien
agaactgtgctgtcaaatagaaatagaatataa

SEQ ID NO: 715656 - DNA, 33 bp, Homo sapien
agaactgtgctgtcaagtagaaatagaatataa

SEQ ID NO: 715657 - DNA, 33 bp, Homo sapien
ggaagtttcgttctaaatgcacatgagaattaa

SEQ ID NO: 715658 - DNA, 33 bp, Homo sapien
ggaagtttcgttctaagtgcacatgagaattaa

SEQ ID NO: 715659 - DNA, 33 bp, Homo sapien
cttgaaaaagtaacaaatgtgcatagatcaatt

SEQ ID NO: 715660 - DNA, 33 bp, Homo sapien
cttgaaaaagtaacaagtgtgcatagatcaatt

SEQ ID NO: 715661 - DNA, 33 bp, Homo sapien
tacggttgtatatagaagtctgaaggattttta

SEQ ID NO: 715662 - DNA, 33 bp, Homo sapien
tacggttgtatatagaggtctgaaggattttta

SEQ ID NO: 715663 - DNA, 33 bp, Homo sapien
ctataaattatcctctaagaaacactaccaacc

SEQ ID NO: 715664 - DNA, 33 bp, Homo sapien
ctataaattatcctctgagaaacactaccaacc

SEQ ID NO: 715665 - DNA, 33 bp, Homo sapien
taggatggaaaaattacattctcgtgtatatgt

SEQ ID NO: 715666 - DNA, 33 bp, Homo sapien
taggatggaaaaattatattctcgtgtatatgt

SEQ ID NO: 715667 - DNA, 33 bp, Homo sapien
agtacaggaataggcaatccataaagtcacaca

SEQ ID NO: 715668 - DNA, 33 bp, Homo sapien
agtacaggaataggcagtccataaagtcacaca

SEQ ID NO: 715669 - DNA, 33 bp, Homo sapien
ttgactggaggcaatcaaccttgtacaaccttc

SEQ ID NO: 715670 - DNA, 33 bp, Homo sapien
ttgactggaggcaatccaccttgtacaaccttc

SEQ ID NO: 715671 - DNA, 33 bp, Homo sapien
gtttcaaagtacaagcaatggaaggtacgtagg

SEQ ID NO: 715672 - DNA, 33 bp, Homo sapien
gtttcaaagtacaagccatggaaggtacgtagg

SEQ ID NO: 715673 - DNA, 33 bp, Homo sapien
attctcttataagtagcagaagtaatgctgaat

SEQ ID NO: 715674 - DNA, 33 bp, Homo sapien
attctcttataagtaggagaagtaatgctgaat

SEQ ID NO: 715675 - DNA, 33 bp, Homo sapien
tctggagatcttgttacattgcaaaggaggggc

SEQ ID NO: 715676 - DNA, 33 bp, Homo sapien
tctggagatcttgttatattgcaaaggaggggc

SEQ ID NO: 715677 - DNA, 33 bp, Homo sapien
cactgaaatggacaccaatgtttgtttaagcta

SEQ ID NO: 715678 - DNA, 33 bp, Homo sapien
cactgaaatggacaccgatgtttgtttaagcta

SEQ ID NO: 715679 - DNA, 33 bp, Homo sapien
catacgtggccatgaactaaaaatcttaagttt

SEQ ID NO: 715680 - DNA, 33 bp, Homo sapien
catacgtggccatgaattaaaaatcttaagttt

SEQ ID NO: 715681 - DNA, 33 bp, Homo sapien
cacaaggcaatataatcacaagccactctactg

SEQ ID NO: 715682 - DNA, 33 bp, Homo sapien
cacaaggcaatataattacaagccactctactg

SEQ ID NO: 715683 - DNA, 33 bp, Homo sapien
ttcaaaagtcaccagcactagtaattttcaaaa

SEQ ID NO: 715684 - DNA, 33 bp, Homo sapien
ttcaaaagtcaccagcgctagtaattttcaaaa

SEQ ID NO: 715685 - DNA, 33 bp, Homo sapien
acctttttcgcactcaataaggttcttctctaa

SEQ ID NO: 715686 - DNA, 33 bp, Homo sapien
acctttttcgcactcagtaaggttcttctctaa

SEQ ID NO: 715687 - DNA, 33 bp, Homo sapien
gcattatgcatgatgactagggaagacctgagg

SEQ ID NO: 715688 - DNA, 33 bp, Homo sapien
gcattatgcatgatgagtagggaagacctgagg

SEQ ID NO: 715689 - DNA, 33 bp, Homo sapien
gttcaattccagcagaacctagagatcacaggt

SEQ ID NO: 715690 - DNA, 33 bp, Homo sapien
gttcaattccagcagagcctagagatcacaggt

SEQ ID NO: 715691 - DNA, 33 bp, Homo sapien
ttctttaatgtcttcaaggtcaactgtcagcac

SEQ ID NO: 715692 - DNA, 33 bp, Homo sapien
ttctttaatgtcttcagggtcaactgtcagcac

SEQ ID NO: 715693 - DNA, 33 bp, Homo sapien
acatcttcatggccacagcatcattaggcaata

SEQ ID NO: 715694 - DNA, 33 bp, Homo sapien
acatcttcatggccacggcatcattaggcaata

SEQ ID NO: 715695 - DNA, 33 bp, Homo sapien
cttggatattgctgtccctctgataacggttgt

SEQ ID NO: 715696 - DNA, 33 bp, Homo sapien
cttggatattgctgtctctctgataacggttgt

SEQ ID NO: 715697 - DNA, 33 bp, Homo sapien
tcaccagcatagaaaagaatactctcaaatgtg

SEQ ID NO: 715698 - DNA, 33 bp, Homo sapien
tcaccagcatagaaaataatactctcaaatgtg

SEQ ID NO: 715699 - DNA, 33 bp, Homo sapien
ggaccaatataatccaaagatgagagtctttct

SEQ ID NO: 715700 - DNA, 33 bp, Homo sapien
ggaccaatataatccagagatgagagtctttct

SEQ ID NO: 715701 - DNA, 33 bp, Homo sapien
tgtttatcatgtgccacgtatcgtttatcatat

SEQ ID NO: 715702 - DNA, 33 bp, Homo sapien
tgtttatcatgtgccaggtatcgtttatcatat

SEQ ID NO: 715703 - DNA, 33 bp, Homo sapien
gcatcagaataactgaaggcaatgtctagcact

SEQ ID NO: 715704 - DNA, 33 bp, Homo sapien
gcatcagaataactgagggcaatgtctagcact

SEQ ID NO: 715705 - DNA, 33 bp, Homo sapien
cagtggtatcccacgcagaaatagaaaacgatg

SEQ ID NO: 715706 - DNA, 33 bp, Homo sapien
cagtggtatcccacgccgaaatagaaaacgatg

SEQ ID NO: 715707 - DNA, 33 bp, Homo sapien
atttctgcatggtgaaactatccataaatttag

SEQ ID NO: 715708 - DNA, 33 bp, Homo sapien
atttctgcatggtgaagctatccataaatttag

SEQ ID NO: 715709 - DNA, 33 bp, Homo sapien
acaactctcaataataaactggaaaacttcaag

SEQ ID NO: 715710 - DNA, 33 bp, Homo sapien
acaactctcaataatagactggaaaacttcaag

SEQ ID NO: 715711 - DNA, 33 bp, Homo sapien
gtcctctgctttcacacactctagtgttccttc

SEQ ID NO: 715712 - DNA, 33 bp, Homo sapien
gtcctctgctttcacatactctagtgttccttc

SEQ ID NO: 715713 - DNA, 33 bp, Homo sapien
attatctccccagtgaacttgtcaactcataag

SEQ ID NO: 715714 - DNA, 33 bp, Homo sapien
attatctccccagtgagcttgtcaactcataag

SEQ ID NO: 715715 - DNA, 33 bp, Homo sapien
ggaaatgtattagaccagctctgttcatcaagt

SEQ ID NO: 715716 - DNA, 33 bp, Homo sapien
ggaaatgtattagaccggctctgttcatcaagt

SEQ ID NO: 715717 - DNA, 33 bp, Homo sapien
aagctaatataaatgaagtaagcctgattacaa

SEQ ID NO: 715718 - DNA, 33 bp, Homo sapien
aagctaatataaatgaggtaagcctgattacaa

SEQ ID NO: 715719 - DNA, 33 bp, Homo sapien
aaggatctactggtgacgtgtgtagaatattgt

SEQ ID NO: 715720 - DNA, 33 bp, Homo sapien
aaggatctactggtgatgtgtgtagaatattgt

SEQ ID NO: 715721 - DNA, 33 bp, Homo sapien
atttaatgatttctaacaggtccacttctaata

SEQ ID NO: 715722 - DNA, 33 bp, Homo sapien
atttaatgatttctaataggtccacttctaata

SEQ ID NO: 715723 - DNA, 33 bp, Homo sapien
caaactaggttgctgggaacagtgaagttgtat

SEQ ID NO: 715724 - DNA, 33 bp, Homo sapien
caaactaggttgctggtaacagtgaagttgtat

SEQ ID NO: 715725 - DNA, 33 bp, Homo sapien
cctgtgaagacagaaaacttgtgaatcaacatc

SEQ ID NO: 715726 - DNA, 33 bp, Homo sapien
cctgtgaagacagaaaccttgtgaatcaacatc

SEQ ID NO: 715727 - DNA, 33 bp, Homo sapien
gggaccatcccattgaccttctcttaagggact

SEQ ID NO: 715728 - DNA, 33 bp, Homo sapien
gggaccatcccattgatcttctcttaagggact

SEQ ID NO: 715729 - DNA, 33 bp, Homo sapien
ctctgctccccactaacatttccttcttgactg

SEQ ID NO: 715730 - DNA, 33 bp, Homo sapien
ctctgctccccactaatatttccttcttgactg

SEQ ID NO: 715731 - DNA, 33 bp, Homo sapien
gattaagtggatagcagtatcatagtggttctg

SEQ ID NO: 715732 - DNA, 33 bp, Homo sapien
gattaagtggatagcattatcatagtggttctg

SEQ ID NO: 715733 - DNA, 33 bp, Homo sapien
ctcagtttcatacttacacctggataggccatc

SEQ ID NO: 715734 - DNA, 33 bp, Homo sapien
ctcagtttcatacttagacctggataggccatc

SEQ ID NO: 715735 - DNA, 33 bp, Homo sapien
tgatgatgataatgacagaggaaaatatgaaga

SEQ ID NO: 715736 - DNA, 33 bp, Homo sapien
tgatgatgataatgacggaggaaaatatgaaga

SEQ ID NO: 715737 - DNA, 33 bp, Homo sapien
attatgagcaaatacaaggatgtgattttaagc

SEQ ID NO: 715738 - DNA, 33 bp, Homo sapien
attatgagcaaatacagggatgtgattttaagc

SEQ ID NO: 715739 - DNA, 33 bp, Homo sapien
agagagaaaatgttaaaaagatgccttcaagca

SEQ ID NO: 715740 - DNA, 33 bp, Homo sapien
agagagaaaatgttaagaagatgccttcaagca

SEQ ID NO: 715741 - DNA, 33 bp, Homo sapien
ggaggaactgaaacagaaacgtaataaaaagtt

SEQ ID NO: 715742 - DNA, 33 bp, Homo sapien
ggaggaactgaaacaggaacgtaataaaaagtt

SEQ ID NO: 715743 - DNA, 33 bp, Homo sapien
ggataagtgaggactacgtgcacttcagatctt

SEQ ID NO: 715744 - DNA, 33 bp, Homo sapien
ggataagtgaggactatgtgcacttcagatctt

SEQ ID NO: 715745 - DNA, 33 bp, Homo sapien
gcactagttgattggacgataagtagatgaaat

SEQ ID NO: 715746 - DNA, 33 bp, Homo sapien
gcactagttgattggatgataagtagatgaaat

SEQ ID NO: 715747 - DNA, 33 bp, Homo sapien
ttaaggacgcgtccggaagataggtctatgctt

SEQ ID NO: 715748 - DNA, 33 bp, Homo sapien
ttaaggacgcgtccgggagataggtctatgctt

SEQ ID NO: 715749 - DNA, 33 bp, Homo sapien
ccttcttgtctgatggaccagatccccatgaat

SEQ ID NO: 715750 - DNA, 33 bp, Homo sapien
ccttcttgtctgatgggccagatccccatgaat

SEQ ID NO: 715751 - DNA, 33 bp, Homo sapien
ctccaaactctgtaggaaaaaatccaaaagaat

SEQ ID NO: 715752 - DNA, 33 bp, Homo sapien
ctccaaactctgtagggaaaaatccaaaagaat

SEQ ID NO: 715753 - DNA, 33 bp, Homo sapien
tcctgatggttccttacacattacccttcctga

SEQ ID NO: 715754 - DNA, 33 bp, Homo sapien
tcctgatggttccttatacattacccttcctga

SEQ ID NO: 715755 - DNA, 33 bp, Homo sapien
ctgtgttcacagagacggtaactttcacctctc

SEQ ID NO: 715756 - DNA, 33 bp, Homo sapien
ctgtgttcacagagactgtaactttcacctctc

SEQ ID NO: 715757 - DNA, 33 bp, Homo sapien
gtgagagaaattgagcaagagggactgcacatc

SEQ ID NO: 715758 - DNA, 33 bp, Homo sapien
gtgagagaaattgagcgagagggactgcacatc

SEQ ID NO: 715759 - DNA, 33 bp, Homo sapien
cagggctctggtttcacgcaaaggtaaaacaat

SEQ ID NO: 715760 - DNA, 33 bp, Homo sapien
cagggctctggtttcatgcaaaggtaaaacaat

SEQ ID NO: 715761 - DNA, 33 bp, Homo sapien
agctccaaaatgcaccagacatattgctgccac

SEQ ID NO: 715762 - DNA, 33 bp, Homo sapien
agctccaaaatgcaccggacatattgctgccac

SEQ ID NO: 715763 - DNA, 33 bp, Homo sapien
ttgccaacccctgagacgtggtaaagggaatca

SEQ ID NO: 715764 - DNA, 33 bp, Homo sapien
ttgccaacccctgagatgtggtaaagggaatca

SEQ ID NO: 715765 - DNA, 33 bp, Homo sapien
acaaaaaatagttgataaaatactgaatcaaga

SEQ ID NO: 715766 - DNA, 33 bp, Homo sapien
acaaaaaatagttgatgaaatactgaatcaaga

SEQ ID NO: 715767 - DNA, 33 bp, Homo sapien
agccaccacgccccaacagagcttcagttttac

SEQ ID NO: 715768 - DNA, 33 bp, Homo sapien
agccaccacgccccaatagagcttcagttttac

SEQ ID NO: 715769 - DNA, 33 bp, Homo sapien
ctttcttcttattgcccgagaggtagatatgat

SEQ ID NO: 715770 - DNA, 33 bp, Homo sapien
ctttcttcttattgcctgagaggtagatatgat

SEQ ID NO: 715771 - DNA, 33 bp, Homo sapien
atgagtacccttcccccgggcaagctttgtcag

SEQ ID NO: 715772 - DNA, 33 bp, Homo sapien
atgagtacccttcccctgggcaagctttgtcag

SEQ ID NO: 715773 - DNA, 33 bp, Homo sapien
actgtgaaccacagaaatatagcccactcaact

SEQ ID NO: 715774 - DNA, 33 bp, Homo sapien
actgtgaaccacagaagtatagcccactcaact

SEQ ID NO: 715775 - DNA, 33 bp, Homo sapien
gttgaaccaaatgtcccagtggtttacctgctc

SEQ ID NO: 715776 - DNA, 33 bp, Homo sapien
gttgaaccaaatgtcctagtggtttacctgctc

SEQ ID NO: 715777 - DNA, 33 bp, Homo sapien
agcgtctgccacaaaacagtcacctaataaatg

SEQ ID NO: 715778 - DNA, 33 bp, Homo sapien
agcgtctgccacaaaagagtcacctaataaatg

SEQ ID NO: 715779 - DNA, 33 bp, Homo sapien
atctgcaacgaactgacacaagtttacaagaaa

SEQ ID NO: 715780 - DNA, 33 bp, Homo sapien
atctgcaacgaactgatacaagtttacaagaaa

SEQ ID NO: 715781 - DNA, 33 bp, Homo sapien
aaaagctcatcatcaccggtatttagagaaatg

SEQ ID NO: 715782 - DNA, 33 bp, Homo sapien
aaaagctcatcatcactggtatttagagaaatg

SEQ ID NO: 715783 - DNA, 33 bp, Homo sapien
aatagagacccaggtagctctccttagtcagtg

SEQ ID NO: 715784 - DNA, 33 bp, Homo sapien
aatagagacccaggtatctctccttagtcagtg

SEQ ID NO: 715785 - DNA, 33 bp, Homo sapien
gtagttattggaaaaaaaactgaatacaggaca

SEQ ID NO: 715786 - DNA, 33 bp, Homo sapien
gtagttattggaaaaacaactgaatacaggaca

SEQ ID NO: 715787 - DNA, 33 bp, Homo sapien
tttaaagcctcactgaaaatccacaggattatc

SEQ ID NO: 715788 - DNA, 33 bp, Homo sapien
tttaaagcctcactgagaatccacaggattatc

SEQ ID NO: 715789 - DNA, 33 bp, Homo sapien
atatcttagctctgtcactatagagacctaaaa

SEQ ID NO: 715790 - DNA, 33 bp, Homo sapien
atatcttagctctgtcgctatagagacctaaaa

SEQ ID NO: 715791 - DNA, 33 bp, Homo sapien
ttaaaatgtggcaaacagggaatgattaagtgt

SEQ ID NO: 715792 - DNA, 33 bp, Homo sapien
ttaaaatgtggcaaacggggaatgattaagtgt

SEQ ID NO: 715793 - DNA, 33 bp, Homo sapien
tcattagcagtttcaacatttgcaatgaaatca

SEQ ID NO: 715794 - DNA, 33 bp, Homo sapien
tcattagcagtttcaatatttgcaatgaaatca

SEQ ID NO: 715795 - DNA, 33 bp, Homo sapien
aacagaaaagtggacaaagacatagtggaatag

SEQ ID NO: 715796 - DNA, 33 bp, Homo sapien
aacagaaaagtggacagagacatagtggaatag

SEQ ID NO: 715797 - DNA, 33 bp, Homo sapien
atttgaggagatttgaaaccagcattgtgcatc

SEQ ID NO: 715798 - DNA, 33 bp, Homo sapien
atttgaggagatttgacaccagcattgtgcatc

SEQ ID NO: 715799 - DNA, 33 bp, Homo sapien
gcagcagagcatcaaactgaaggatctctgcag

SEQ ID NO: 715800 - DNA, 33 bp, Homo sapien
gcagcagagcatcaaattgaaggatctctgcag

SEQ ID NO: 715801 - DNA, 33 bp, Homo sapien
atttgaaggagagggtaaaatcacttgaaagtg

SEQ ID NO: 715802 - DNA, 33 bp, Homo sapien
atttgaaggagagggttaaatcacttgaaagtg

SEQ ID NO: 715803 - DNA, 33 bp, Homo sapien
attttacagagtgcttaaagaaagttatagtcc

SEQ ID NO: 715804 - DNA, 33 bp, Homo sapien
attttacagagtgcttcaagaaagttatagtcc

SEQ ID NO: 715805 - DNA, 33 bp, Homo sapien
tgattttaaacaaatacgatgagctaattgctt

SEQ ID NO: 715806 - DNA, 33 bp, Homo sapien
tgattttaaacaaatatgatgagctaattgctt

SEQ ID NO: 715807 - DNA, 33 bp, Homo sapien
cttcccaatgcaggacaagaacttgggcaaagg

SEQ ID NO: 715808 - DNA, 33 bp, Homo sapien
cttcccaatgcaggacgagaacttgggcaaagg

SEQ ID NO: 715809 - DNA, 33 bp, Homo sapien
tcaagaatttcccacactgctagatgatcctga

SEQ ID NO: 715810 - DNA, 33 bp, Homo sapien
tcaagaatttcccacagtgctagatgatcctga

SEQ ID NO: 715811 - DNA, 33 bp, Homo sapien
ccaagtttattactcaggctgttcaaatatcct

SEQ ID NO: 715812 - DNA, 33 bp, Homo sapien
ccaagtttattactcatgctgttcaaatatcct

SEQ ID NO: 715813 - DNA, 33 bp, Homo sapien
gaaaacaagcataagaaacaactaatcaacaac

SEQ ID NO: 715814 - DNA, 33 bp, Homo sapien
gaaaacaagcataagatacaactaatcaacaac

SEQ ID NO: 715815 - DNA, 33 bp, Homo sapien
catattgaaatacaagcctcatttgctgtgcta

SEQ ID NO: 715816 - DNA, 33 bp, Homo sapien
catattgaaatacaaggctcatttgctgtgcta

SEQ ID NO: 715817 - DNA, 33 bp, Homo sapien
agagttgtgtgctccaataagtcagggggaaga

SEQ ID NO: 715818 - DNA, 33 bp, Homo sapien
agagttgtgtgctccagtaagtcagggggaaga

SEQ ID NO: 715819 - DNA, 33 bp, Homo sapien
agatttatagttagcaagccaatttggttggcc

SEQ ID NO: 715820 - DNA, 33 bp, Homo sapien
agatttatagttagcaggccaatttggttggcc

SEQ ID NO: 715821 - DNA, 33 bp, Homo sapien
aactaaatacattgaactgagctgtcagcaaaa

SEQ ID NO: 715822 - DNA, 33 bp, Homo sapien
aactaaatacattgaattgagctgtcagcaaaa

SEQ ID NO: 715823 - DNA, 33 bp, Homo sapien
aaactcagttcctctacgtttttgcttaatgtt

SEQ ID NO: 715824 - DNA, 33 bp, Homo sapien
aaactcagttcctctatgtttttgcttaatgtt

SEQ ID NO: 715825 - DNA, 33 bp, Homo sapien
ttacatttgagtagcaaaatccaataaaattag

SEQ ID NO: 715826 - DNA, 33 bp, Homo sapien
ttacatttgagtagcataatccaataaaattag

SEQ ID NO: 715827 - DNA, 33 bp, Homo sapien
agaagcaaataatgaacgaggctctcaccaaaa

SEQ ID NO: 715828 - DNA, 33 bp, Homo sapien
agaagcaaataatgaatgaggctctcaccaaaa

SEQ ID NO: 715829 - DNA, 33 bp, Homo sapien
gcctattgccatgtaagacgtgatactgaatgg

SEQ ID NO: 715830 - DNA, 33 bp, Homo sapien
gcctattgccatgtaatacgtgatactgaatgg

SEQ ID NO: 715831 - DNA, 33 bp, Homo sapien
gatttctcaacagtgacgatagaaacaactaca

SEQ ID NO: 715832 - DNA, 33 bp, Homo sapien
gatttctcaacagtgatgatagaaacaactaca

SEQ ID NO: 715833 - DNA, 33 bp, Homo sapien
caatctgcgtttttccggctggtggtaggatta

SEQ ID NO: 715834 - DNA, 33 bp, Homo sapien
caatctgcgtttttcctgctggtggtaggatta

SEQ ID NO: 715835 - DNA, 33 bp, Homo sapien
cacacattaggtcatgccatcactggaggcttc

SEQ ID NO: 715836 - DNA, 33 bp, Homo sapien
cacacattaggtcatgtcatcactggaggcttc

SEQ ID NO: 715837 - DNA, 33 bp, Homo sapien
aaaaagaagaaaccagccattatgtgtaccttc

SEQ ID NO: 715838 - DNA, 33 bp, Homo sapien
aaaaagaagaaaccaggcattatgtgtaccttc

SEQ ID NO: 715839 - DNA, 33 bp, Homo sapien
taagaggtagagtcaaattagtgggagagtcaa

SEQ ID NO: 715840 - DNA, 33 bp, Homo sapien
taagaggtagagtcaagttagtgggagagtcaa

SEQ ID NO: 715841 - DNA, 33 bp, Homo sapien
aagtagtgacacatgaagttggtcagataggca

SEQ ID NO: 715842 - DNA, 33 bp, Homo sapien
aagtagtgacacatgaggttggtcagataggca

SEQ ID NO: 715843 - DNA, 33 bp, Homo sapien
tggaattggtcaacaactgataaaactgtccac

SEQ ID NO: 715844 - DNA, 33 bp, Homo sapien
tggaattggtcaacaagtgataaaactgtccac

SEQ ID NO: 715845 - DNA, 33 bp, Homo sapien
gccccactctctagcgcaggcttgctgaggtca

SEQ ID NO: 715846 - DNA, 33 bp, Homo sapien
gccccactctctagcgtaggcttgctgaggtca

SEQ ID NO: 715847 - DNA, 33 bp, Homo sapien
ggtagaacttatgaaagactgttttgtttgtgt

SEQ ID NO: 715848 - DNA, 33 bp, Homo sapien
ggtagaacttatgaaatactgttttgtttgtgt

SEQ ID NO: 715849 - DNA, 33 bp, Homo sapien
aagtaacaaacctatactagaataagcctttcc

SEQ ID NO: 715850 - DNA, 33 bp, Homo sapien
aagtaacaaacctatattagaataagcctttcc

SEQ ID NO: 715851 - DNA, 33 bp, Homo sapien
accatctgccatctaacacccttctgacctcat

SEQ ID NO: 715852 - DNA, 33 bp, Homo sapien
accatctgccatctaatacccttctgacctcat

SEQ ID NO: 715853 - DNA, 33 bp, Homo sapien
gaacagactcagataaacctgcagccatatgac

SEQ ID NO: 715854 - DNA, 33 bp, Homo sapien
gaacagactcagataagcctgcagccatatgac

SEQ ID NO: 715855 - DNA, 33 bp, Homo sapien
tatttgtgaattctaaagcaagttatttgatct

SEQ ID NO: 715856 - DNA, 33 bp, Homo sapien
tatttgtgaattctaaggcaagttatttgatct

SEQ ID NO: 715857 - DNA, 33 bp, Homo sapien
ataagcaagttatacacagtctatacacacaca

SEQ ID NO: 715858 - DNA, 33 bp, Homo sapien
ataagcaagttatacatagtctatacacacaca

SEQ ID NO: 715859 - DNA, 33 bp, Homo sapien
cataggaatatataaacacccttccccttggca

SEQ ID NO: 715860 - DNA, 33 bp, Homo sapien
cataggaatatataaagacccttccccttggca

SEQ ID NO: 715861 - DNA, 33 bp, Homo sapien
acaacaatatcttaccacaaagcattgccagtt

SEQ ID NO: 715862 - DNA, 33 bp, Homo sapien
acaacaatatcttaccgcaaagcattgccagtt

SEQ ID NO: 715863 - DNA, 33 bp, Homo sapien
atttgtttttctttcaagcaacgtctatttaaa

SEQ ID NO: 715864 - DNA, 33 bp, Homo sapien
atttgtttttctttcaggcaacgtctatttaaa

SEQ ID NO: 715865 - DNA, 33 bp, Homo sapien
caataaacatgtgctgaattatgagatctgaca

SEQ ID NO: 715866 - DNA, 33 bp, Homo sapien
caataaacatgtgctgcattatgagatctgaca

SEQ ID NO: 715867 - DNA, 33 bp, Homo sapien
gtatttcttgcaacaccccaatactgtgggatc

SEQ ID NO: 715868 - DNA, 33 bp, Homo sapien
gtatttcttgcaacactccaatactgtgggatc

SEQ ID NO: 715869 - DNA, 33 bp, Homo sapien
accctcctgtggttataagaagtactaccattt

SEQ ID NO: 715870 - DNA, 33 bp, Homo sapien
accctcctgtggttatgagaagtactaccattt

SEQ ID NO: 715871 - DNA, 33 bp, Homo sapien
gaaatatccatgaacactgaagcttagagagag

SEQ ID NO: 715872 - DNA, 33 bp, Homo sapien
gaaatatccatgaacagtgaagcttagagagag

SEQ ID NO: 715873 - DNA, 33 bp, Homo sapien
ggacagtcagtagtcaagagtgaggcccatgcc

SEQ ID NO: 715874 - DNA, 33 bp, Homo sapien
ggacagtcagtagtcaggagtgaggcccatgcc

SEQ ID NO: 715875 - DNA, 33 bp, Homo sapien
catcaggctgcgctaacctcagttaaaaaaaaa

SEQ ID NO: 715876 - DNA, 33 bp, Homo sapien
catcaggctgcgctaatctcagttaaaaaaaaa

SEQ ID NO: 715877 - DNA, 33 bp, Homo sapien
ttagctcagttgaaaagtatttattgaacgacc

SEQ ID NO: 715878 - DNA, 33 bp, Homo sapien
ttagctcagttgaaaattatttattgaacgacc

SEQ ID NO: 715879 - DNA, 33 bp, Homo sapien
aaaatatggtattagacggcccaaaggaaaagg

SEQ ID NO: 715880 - DNA, 33 bp, Homo sapien
aaaatatggtattagatggcccaaaggaaaagg

SEQ ID NO: 715881 - DNA, 33 bp, Homo sapien
aattttaaagcagtgaaccataaatttctagtg

SEQ ID NO: 715882 - DNA, 33 bp, Homo sapien
aattttaaagcagtgatccataaatttctagtg

SEQ ID NO: 715883 - DNA, 33 bp, Homo sapien
gtacagaaaactgtgaaaatgtagacttaaaaa

SEQ ID NO: 715884 - DNA, 33 bp, Homo sapien
gtacagaaaactgtgataatgtagacttaaaaa

SEQ ID NO: 715885 - DNA, 33 bp, Homo sapien
agagcctaagaggtcacagtggagactttgttg

SEQ ID NO: 715886 - DNA, 33 bp, Homo sapien
agagcctaagaggtcagagtggagactttgttg

SEQ ID NO: 715887 - DNA, 33 bp, Homo sapien
tgtgccaatgcttatccgaacaacctgataatt

SEQ ID NO: 715888 - DNA, 33 bp, Homo sapien
tgtgccaatgcttatctgaacaacctgataatt

SEQ ID NO: 715889 - DNA, 33 bp, Homo sapien
gtatgaagtcctacaacggtaagatttgatgta

SEQ ID NO: 715890 - DNA, 33 bp, Homo sapien
gtatgaagtcctacaatggtaagatttgatgta

SEQ ID NO: 715891 - DNA, 33 bp, Homo sapien
tgggtgttttgaagtacccatcaggaaggattt

SEQ ID NO: 715892 - DNA, 33 bp, Homo sapien
tgggtgttttgaagtatccatcaggaaggattt

SEQ ID NO: 715893 - DNA, 33 bp, Homo sapien
aatttcaagtctaggaagttgagttgaccataa

SEQ ID NO: 715894 - DNA, 33 bp, Homo sapien
aatttcaagtctaggaggttgagttgaccataa

SEQ ID NO: 715895 - DNA, 33 bp, Homo sapien
ttgtaatatcatttctcacctttggttcatatt

SEQ ID NO: 715896 - DNA, 33 bp, Homo sapien
ttgtaatatcatttcttacctttggttcatatt

SEQ ID NO: 715897 - DNA, 33 bp, Homo sapien
taggctggaaagttaacagtgaggaagaatgaa

SEQ ID NO: 715898 - DNA, 33 bp, Homo sapien
taggctggaaagttaagagtgaggaagaatgaa

SEQ ID NO: 715899 - DNA, 33 bp, Homo sapien
aactcgtaactcccaacgaaagtctgctctctc

SEQ ID NO: 715900 - DNA, 33 bp, Homo sapien
aactcgtaactcccaatgaaagtctgctctctc

SEQ ID NO: 715901 - DNA, 33 bp, Homo sapien
atagagatgatagagacgttacaattatctaac

SEQ ID NO: 715902 - DNA, 33 bp, Homo sapien
atagagatgatagagatgttacaattatctaac

SEQ ID NO: 715903 - DNA, 33 bp, Homo sapien
ggtcatgaagtcagcaaatatcggagatgaaat

SEQ ID NO: 715904 - DNA, 33 bp, Homo sapien
ggtcatgaagtcagcagatatcggagatgaaat

SEQ ID NO: 715905 - DNA, 33 bp, Homo sapien
ccatcaaacatgactacgggaatctggtaattt

SEQ ID NO: 715906 - DNA, 33 bp, Homo sapien
ccatcaaacatgactatgggaatctggtaattt

SEQ ID NO: 715907 - DNA, 33 bp, Homo sapien
aggaaacataacatccaaaaagatgctccccag

SEQ ID NO: 715908 - DNA, 33 bp, Homo sapien
aggaaacataacatccgaaaagatgctccccag

SEQ ID NO: 715909 - DNA, 33 bp, Homo sapien
gtcaatatatatccaccgcattgccatattccc

SEQ ID NO: 715910 - DNA, 33 bp, Homo sapien
gtcaatatatatccactgcattgccatattccc

SEQ ID NO: 715911 - DNA, 33 bp, Homo sapien
tcatctgacattcaaaatcaaccatgatcttat

SEQ ID NO: 715912 - DNA, 33 bp, Homo sapien
tcatctgacattcaaagtcaaccatgatcttat

SEQ ID NO: 715913 - DNA, 33 bp, Homo sapien
acagagaatcctacgactaaagacagccaatga

SEQ ID NO: 715914 - DNA, 33 bp, Homo sapien
acagagaatcctacgagtaaagacagccaatga

SEQ ID NO: 715915 - DNA, 33 bp, Homo sapien
agtgtttccaatgagacaatcgtgagctctttc

SEQ ID NO: 715916 - DNA, 33 bp, Homo sapien
agtgtttccaatgagataatcgtgagctctttc

SEQ ID NO: 715917 - DNA, 33 bp, Homo sapien
ttaatatcaaaggcgactatttcagggtatatt

SEQ ID NO: 715918 - DNA, 33 bp, Homo sapien
ttaatatcaaaggcgattatttcagggtatatt

SEQ ID NO: 715919 - DNA, 33 bp, Homo sapien
ggacataaaaataaaaacatccttcttgctttt

SEQ ID NO: 715920 - DNA, 33 bp, Homo sapien
ggacataaaaataaaaccatccttcttgctttt

SEQ ID NO: 715921 - DNA, 33 bp, Homo sapien
ttaagactgtatagtaggcacaaacaaagtgtt

SEQ ID NO: 715922 - DNA, 33 bp, Homo sapien
ttaagactgtatagtatgcacaaacaaagtgtt

SEQ ID NO: 715923 - DNA, 33 bp, Homo sapien
atctatacagggcaagaagacaacaaaaataag

SEQ ID NO: 715924 - DNA, 33 bp, Homo sapien
atctatacagggcaaggagacaacaaaaataag

SEQ ID NO: 715925 - DNA, 33 bp, Homo sapien
gaggaaaatgaacttcacaaaatgagcttgctg

SEQ ID NO: 715926 - DNA, 33 bp, Homo sapien
gaggaaaatgaacttcccaaaatgagcttgctg

SEQ ID NO: 715927 - DNA, 33 bp, Homo sapien
ttcaagatctgagctaggaaaagctaaatattt

SEQ ID NO: 715928 - DNA, 33 bp, Homo sapien
ttcaagatctgagctatgaaaagctaaatattt

SEQ ID NO: 715929 - DNA, 33 bp, Homo sapien
tttgttgcctattttaaccttttgactcttgct

SEQ ID NO: 715930 - DNA, 33 bp, Homo sapien
tttgttgcctattttagccttttgactcttgct

SEQ ID NO: 715931 - DNA, 33 bp, Homo sapien
gatattaaaaatggctaaaatgccaggcatggt

SEQ ID NO: 715932 - DNA, 33 bp, Homo sapien
gatattaaaaatggcttaaatgccaggcatggt

SEQ ID NO: 715933 - DNA, 33 bp, Homo sapien
atactttcatagaataaggaaacatgaaatggg

SEQ ID NO: 715934 - DNA, 33 bp, Homo sapien
atactttcatagaatacggaaacatgaaatggg

SEQ ID NO: 715935 - DNA, 33 bp, Homo sapien
tttatggaaactgctacctaaacatcctattaa

SEQ ID NO: 715936 - DNA, 33 bp, Homo sapien
tttatggaaactgctatctaaacatcctattaa

SEQ ID NO: 715937 - DNA, 33 bp, Homo sapien
taaacaaggtgaaatacggcctgttggggcact

SEQ ID NO: 715938 - DNA, 33 bp, Homo sapien
taaacaaggtgaaatatggcctgttggggcact

SEQ ID NO: 715939 - DNA, 33 bp, Homo sapien
ctctgtgaagtgtgaaataacagagtaaataac

SEQ ID NO: 715940 - DNA, 33 bp, Homo sapien
ctctgtgaagtgtgaagtaacagagtaaataac

SEQ ID NO: 715941 - DNA, 33 bp, Homo sapien
aggattcattttcttcacaaaacatttatcagc

SEQ ID NO: 715942 - DNA, 33 bp, Homo sapien
aggattcattttcttcgcaaaacatttatcagc

SEQ ID NO: 715943 - DNA, 33 bp, Homo sapien
gcagtttcaccagtaaaatttacatgagagcac

SEQ ID NO: 715944 - DNA, 33 bp, Homo sapien
gcagtttcaccagtaatatttacatgagagcac

SEQ ID NO: 715945 - DNA, 33 bp, Homo sapien
caccaaatgacaactacgtattaaacattttcc

SEQ ID NO: 715946 - DNA, 33 bp, Homo sapien
caccaaatgacaactatgtattaaacattttcc

SEQ ID NO: 715947 - DNA, 33 bp, Homo sapien
ttaaaagttgcatttgcacttctcatggaaaag

SEQ ID NO: 715948 - DNA, 33 bp, Homo sapien
ttaaaagttgcatttgtacttctcatggaaaag

SEQ ID NO: 715949 - DNA, 33 bp, Homo sapien
cgggcctgacactctcaactgccaggccaggcc

SEQ ID NO: 715950 - DNA, 33 bp, Homo sapien
cgggcctgacactctcgactgccaggccaggcc

SEQ ID NO: 715951 - DNA, 33 bp, Homo sapien
catttaaggcaataaaccttcatcggtgctatg

SEQ ID NO: 715952 - DNA, 33 bp, Homo sapien
catttaaggcaataaagcttcatcggtgctatg

SEQ ID NO: 715953 - DNA, 33 bp, Homo sapien
ttgaacagaataaaggccaaaatagagctgcct

SEQ ID NO: 715954 - DNA, 33 bp, Homo sapien
ttgaacagaataaaggtcaaaatagagctgcct

SEQ ID NO: 715955 - DNA, 33 bp, Homo sapien
aggactccattgactcaaacgactctgatgatg

SEQ ID NO: 715956 - DNA, 33 bp, Homo sapien
aggactccattgactcgaacgactctgatgatg

SEQ ID NO: 715957 - DNA, 33 bp, Homo sapien
tttaatctgaaaataactgatccaggatttcaa

SEQ ID NO: 715958 - DNA, 33 bp, Homo sapien
tttaatctgaaaataagtgatccaggatttcaa

SEQ ID NO: 715959 - DNA, 33 bp, Homo sapien
ttaggtagaagaaataagatctagcatttgaca

SEQ ID NO: 715960 - DNA, 33 bp, Homo sapien
ttaggtagaagaaataggatctagcatttgaca

SEQ ID NO: 715961 - DNA, 33 bp, Homo sapien
ttctgagacttttatacctatgtctgagacact

SEQ ID NO: 715962 - DNA, 33 bp, Homo sapien
ttctgagacttttatatctatgtctgagacact

SEQ ID NO: 715963 - DNA, 33 bp, Homo sapien
tccttgtaccaccaaaaatgaggataatgataa

SEQ ID NO: 715964 - DNA, 33 bp, Homo sapien
tccttgtaccaccaaagatgaggataatgataa

SEQ ID NO: 715965 - DNA, 33 bp, Homo sapien
aggttatattgcagaaccaaagctgcttatttg

SEQ ID NO: 715966 - DNA, 33 bp, Homo sapien
aggttatattgcagaatcaaagctgcttatttg

SEQ ID NO: 715967 - DNA, 33 bp, Homo sapien
gcctcaacaggcctcaaacatgtcttctttctt

SEQ ID NO: 715968 - DNA, 33 bp, Homo sapien
gcctcaacaggcctcacacatgtcttctttctt

SEQ ID NO: 715969 - DNA, 33 bp, Homo sapien
taattgagtgacattaagtagatttattatatt

SEQ ID NO: 715970 - DNA, 33 bp, Homo sapien
taattgagtgacattaggtagatttattatatt

SEQ ID NO: 715971 - DNA, 33 bp, Homo sapien
taaatggacttaacacaatttatttccagaact

SEQ ID NO: 715972 - DNA, 33 bp, Homo sapien
taaatggacttaacacgatttatttccagaact

SEQ ID NO: 715973 - DNA, 33 bp, Homo sapien
cctccttgtattcccccctcattcttcaaaatg

SEQ ID NO: 715974 - DNA, 33 bp, Homo sapien
cctccttgtattcccctctcattcttcaaaatg

SEQ ID NO: 715975 - DNA, 33 bp, Homo sapien
tccatcccagctcatacgccttagttccagccc

SEQ ID NO: 715976 - DNA, 33 bp, Homo sapien
tccatcccagctcatatgccttagttccagccc

SEQ ID NO: 715977 - DNA, 33 bp, Homo sapien
gtgtggtaaagtcacactgctggttacttggaa

SEQ ID NO: 715978 - DNA, 33 bp, Homo sapien
gtgtggtaaagtcacattgctggttacttggaa

SEQ ID NO: 715979 - DNA, 33 bp, Homo sapien
ctgtccttgaggtaacaagtgatttctcatgcg

SEQ ID NO: 715980 - DNA, 33 bp, Homo sapien
ctgtccttgaggtaacgagtgatttctcatgcg

SEQ ID NO: 715981 - DNA, 33 bp, Homo sapien
ttaatcagttcaagcccaataattccttgattt

SEQ ID NO: 715982 - DNA, 33 bp, Homo sapien
ttaatcagttcaagcctaataattccttgattt

SEQ ID NO: 715983 - DNA, 33 bp, Homo sapien
tgcattgaaatgatgaagccaaatgaacaattt

SEQ ID NO: 715984 - DNA, 33 bp, Homo sapien
tgcattgaaatgatgaggccaaatgaacaattt

SEQ ID NO: 715985 - DNA, 33 bp, Homo sapien
aaataaggtaagatatgaaacactcagcacagt

SEQ ID NO: 715986 - DNA, 33 bp, Homo sapien
aaataaggtaagatattaaacactcagcacagt

SEQ ID NO: 715987 - DNA, 33 bp, Homo sapien
ggtatactgttaactacgttggaatttgtgaca

SEQ ID NO: 715988 - DNA, 33 bp, Homo sapien
ggtatactgttaactatgttggaatttgtgaca

SEQ ID NO: 715989 - DNA, 33 bp, Homo sapien
aaatgaaattttcaaacgctcagataattaatt

SEQ ID NO: 715990 - DNA, 33 bp, Homo sapien
aaatgaaattttcaaaggctcagataattaatt

SEQ ID NO: 715991 - DNA, 33 bp, Homo sapien
cactaagttatttaacacaagttttctggttca

SEQ ID NO: 715992 - DNA, 33 bp, Homo sapien
cactaagttatttaacgcaagttttctggttca

SEQ ID NO: 715993 - DNA, 33 bp, Homo sapien
ataggtgggtactcaacagatgtctgattgtct

SEQ ID NO: 715994 - DNA, 33 bp, Homo sapien
ataggtgggtactcaatagatgtctgattgtct

SEQ ID NO: 715995 - DNA, 33 bp, Homo sapien
gacctttaaacttctagagattttcctacaaca

SEQ ID NO: 715996 - DNA, 33 bp, Homo sapien
gacctttaaacttctatagattttcctacaaca

SEQ ID NO: 715997 - DNA, 33 bp, Homo sapien
gttctactgtcttgaaacttaaatttacatcca

SEQ ID NO: 715998 - DNA, 33 bp, Homo sapien
gttctactgtcttgaatcttaaatttacatcca

SEQ ID NO: 715999 - DNA, 33 bp, Homo sapien
cttttccttctttgacaggggctttccttgaag

SEQ ID NO: 716000 - DNA, 33 bp, Homo sapien
cttttccttctttgacgggggctttccttgaag

SEQ ID NO: 716001 - DNA, 33 bp, Homo sapien
gcaaaaacagtaccatcatctgtgataactagt

SEQ ID NO: 716002 - DNA, 33 bp, Homo sapien
gcaaaaacagtaccatgatctgtgataactagt

SEQ ID NO: 716003 - DNA, 33 bp, Homo sapien
tacaacctttggaagaggcattatcagaggcca

SEQ ID NO: 716004 - DNA, 33 bp, Homo sapien
tacaacctttggaagatgcattatcagaggcca

SEQ ID NO: 716005 - DNA, 33 bp, Homo sapien
ggctgaactagagcaaacaatctaaaggcaaga

SEQ ID NO: 716006 - DNA, 33 bp, Homo sapien
ggctgaactagagcaagcaatctaaaggcaaga

SEQ ID NO: 716007 - DNA, 33 bp, Homo sapien
gttcactgtaggtaaactaaaaagctgtctttt

SEQ ID NO: 716008 - DNA, 33 bp, Homo sapien
gttcactgtaggtaaattaaaaagctgtctttt

SEQ ID NO: 716009 - DNA, 33 bp, Homo sapien
gagtcagtgagctattgaaattcaagcaataag

SEQ ID NO: 716010 - DNA, 33 bp, Homo sapien
gagtcagtgagctatttaaattcaagcaataag

SEQ ID NO: 716011 - DNA, 33 bp, Homo sapien
gctcactgactcaagacggaaattttaaagaca

SEQ ID NO: 716012 - DNA, 33 bp, Homo sapien
gctcactgactcaagatggaaattttaaagaca

SEQ ID NO: 716013 - DNA, 33 bp, Homo sapien
tgttgttttgagttgcacaatttgagctttcca

SEQ ID NO: 716014 - DNA, 33 bp, Homo sapien
tgttgttttgagttgcgcaatttgagctttcca

SEQ ID NO: 716015 - DNA, 33 bp, Homo sapien
gcccctccactttcaaaacagtttgagtccttc

SEQ ID NO: 716016 - DNA, 33 bp, Homo sapien
gcccctccactttcaacacagtttgagtccttc

SEQ ID NO: 716017 - DNA, 33 bp, Homo sapien
gatgtactcttgtcaaatgattggacttgaatc

SEQ ID NO: 716018 - DNA, 33 bp, Homo sapien
gatgtactcttgtcaactgattggacttgaatc

SEQ ID NO: 716019 - DNA, 33 bp, Homo sapien
aatttgttcacctcaaagtccagtatgttcaaa

SEQ ID NO: 716020 - DNA, 33 bp, Homo sapien
aatttgttcacctcaaggtccagtatgttcaaa

SEQ ID NO: 716021 - DNA, 33 bp, Homo sapien
gttgttatatatggaggattggaaacatggcat

SEQ ID NO: 716022 - DNA, 33 bp, Homo sapien
gttgttatatatggagtattggaaacatggcat

SEQ ID NO: 716023 - DNA, 33 bp, Homo sapien
atttggaaatgtttaaagaactaagattgtaaa

SEQ ID NO: 716024 - DNA, 33 bp, Homo sapien
atttggaaatgtttaatgaactaagattgtaaa

SEQ ID NO: 716025 - DNA, 33 bp, Homo sapien
accccattattcccacggaaatgaaagcacaca

SEQ ID NO: 716026 - DNA, 33 bp, Homo sapien
accccattattcccactgaaatgaaagcacaca

SEQ ID NO: 716027 - DNA, 33 bp, Homo sapien
acggtgagaagggttacagacagatgcatagta

SEQ ID NO: 716028 - DNA, 33 bp, Homo sapien
acggtgagaagggttagagacagatgcatagta

SEQ ID NO: 716029 - DNA, 33 bp, Homo sapien
aaagtacatttactaacacaacctccaggtgga

SEQ ID NO: 716030 - DNA, 33 bp, Homo sapien
aaagtacatttactaatacaacctccaggtgga

SEQ ID NO: 716031 - DNA, 33 bp, Homo sapien
aattgcttcactgggaccttcatttctccattc

SEQ ID NO: 716032 - DNA, 33 bp, Homo sapien
aattgcttcactgggagcttcatttctccattc

SEQ ID NO: 716033 - DNA, 33 bp, Homo sapien
gggtatttggctgaacacatgatttatgttgag

SEQ ID NO: 716034 - DNA, 33 bp, Homo sapien
gggtatttggctgaactcatgatttatgttgag

SEQ ID NO: 716035 - DNA, 33 bp, Homo sapien
ccaggtgatacatatgcaagttagtgtatgaga

SEQ ID NO: 716036 - DNA, 33 bp, Homo sapien
ccaggtgatacatatgtaagttagtgtatgaga

SEQ ID NO: 716037 - DNA, 33 bp, Homo sapien
accaatttaagtgacacatttgttaaagcacat

SEQ ID NO: 716038 - DNA, 33 bp, Homo sapien
accaatttaagtgacatatttgttaaagcacat

SEQ ID NO: 716039 - DNA, 33 bp, Homo sapien
aagccatttgctagaactggtttttatccttcc

SEQ ID NO: 716040 - DNA, 33 bp, Homo sapien
aagccatttgctagaattggtttttatccttcc

SEQ ID NO: 716041 - DNA, 33 bp, Homo sapien
atattagaagaaattcaatcagtcagggaaaga

SEQ ID NO: 716042 - DNA, 33 bp, Homo sapien
atattagaagaaattcgatcagtcagggaaaga

SEQ ID NO: 716043 - DNA, 33 bp, Homo sapien
ggcagggaatagattacgaagaaagtgtctttc

SEQ ID NO: 716044 - DNA, 33 bp, Homo sapien
ggcagggaatagattatgaagaaagtgtctttc

SEQ ID NO: 716045 - DNA, 33 bp, Homo sapien
ctctaaggattgcagtcaaggaatttgcctggg

SEQ ID NO: 716046 - DNA, 33 bp, Homo sapien
ctctaaggattgcagttaaggaatttgcctggg

SEQ ID NO: 716047 - DNA, 33 bp, Homo sapien
tgttgtgggttagcaacggctatctggaccagt

SEQ ID NO: 716048 - DNA, 33 bp, Homo sapien
tgttgtgggttagcaatggctatctggaccagt

SEQ ID NO: 716049 - DNA, 33 bp, Homo sapien
agcttcaatgtcaaaaatggaacagtatgtgaa

SEQ ID NO: 716050 - DNA, 33 bp, Homo sapien
agcttcaatgtcaaaagtggaacagtatgtgaa

SEQ ID NO: 716051 - DNA, 33 bp, Homo sapien
ccactctcccaaggataagcacccagatagcct

SEQ ID NO: 716052 - DNA, 33 bp, Homo sapien
ccactctcccaaggatgagcacccagatagcct

SEQ ID NO: 716053 - DNA, 33 bp, Homo sapien
ttgtcttactgatggacgctttttgatgttttc

SEQ ID NO: 716054 - DNA, 33 bp, Homo sapien
ttgtcttactgatggatgctttttgatgttttc

SEQ ID NO: 716055 - DNA, 33 bp, Homo sapien
tcttatccaaggcaccaatctctcctgttgtct

SEQ ID NO: 716056 - DNA, 33 bp, Homo sapien
tcttatccaaggcaccgatctctcctgttgtct

SEQ ID NO: 716057 - DNA, 33 bp, Homo sapien
aacaaaacagttatccaatacacagagattgag

SEQ ID NO: 716058 - DNA, 33 bp, Homo sapien
aacaaaacagttatcccatacacagagattgag

SEQ ID NO: 716059 - DNA, 33 bp, Homo sapien
cacagtgtatatggcaactctcttttcacactt

SEQ ID NO: 716060 - DNA, 33 bp, Homo sapien
cacagtgtatatggcacctctcttttcacactt

SEQ ID NO: 716061 - DNA, 33 bp, Homo sapien
acatgtgtactggccactgctagaagagcgtct

SEQ ID NO: 716062 - DNA, 33 bp, Homo sapien
acatgtgtactggccattgctagaagagcgtct

SEQ ID NO: 716063 - DNA, 33 bp, Homo sapien
acttgaacatccacgaagtctaaaagaaagtca

SEQ ID NO: 716064 - DNA, 33 bp, Homo sapien
acttgaacatccacgaggtctaaaagaaagtca

SEQ ID NO: 716065 - DNA, 33 bp, Homo sapien
agctgggtaaggaggacgaaagagggtgatgaa

SEQ ID NO: 716066 - DNA, 33 bp, Homo sapien
agctgggtaaggaggatgaaagagggtgatgaa

SEQ ID NO: 716067 - DNA, 33 bp, Homo sapien
aatgatgacgtggaataattattaatgaaaata

SEQ ID NO: 716068 - DNA, 33 bp, Homo sapien
aatgatgacgtggaatcattattaatgaaaata

SEQ ID NO: 716069 - DNA, 33 bp, Homo sapien
taatgtgcaatctgcccgagtccattattcact

SEQ ID NO: 716070 - DNA, 33 bp, Homo sapien
taatgtgcaatctgcctgagtccattattcact

SEQ ID NO: 716071 - DNA, 33 bp, Homo sapien
ttggaaatatgcatcacaggacattctgggaga

SEQ ID NO: 716072 - DNA, 33 bp, Homo sapien
ttggaaatatgcatcataggacattctgggaga

SEQ ID NO: 716073 - DNA, 33 bp, Homo sapien
ggatatccaaacagccaataagcatataaagtg

SEQ ID NO: 716074 - DNA, 33 bp, Homo sapien
ggatatccaaacagccgataagcatataaagtg

SEQ ID NO: 716075 - DNA, 33 bp, Homo sapien
tatccttcagatggccaaaacaaggctggtaac

SEQ ID NO: 716076 - DNA, 33 bp, Homo sapien
tatccttcagatggcccaaacaaggctggtaac

SEQ ID NO: 716077 - DNA, 33 bp, Homo sapien
taagttcaatacagaacaaggagagttttctgg

SEQ ID NO: 716078 - DNA, 33 bp, Homo sapien
taagttcaatacagaagaaggagagttttctgg

SEQ ID NO: 716079 - DNA, 33 bp, Homo sapien
tcttccattagtaaaactttatttggcagctga

SEQ ID NO: 716080 - DNA, 33 bp, Homo sapien
tcttccattagtaaaagtttatttggcagctga

SEQ ID NO: 716081 - DNA, 33 bp, Homo sapien
ttttcccattctcaaccaattcttcccatcttt

SEQ ID NO: 716082 - DNA, 33 bp, Homo sapien
ttttcccattctcaactaattcttcccatcttt

SEQ ID NO: 716083 - DNA, 33 bp, Homo sapien
gccaataaataggacaaaagccccacacctcaa

SEQ ID NO: 716084 - DNA, 33 bp, Homo sapien
gccaataaataggacataagccccacacctcaa

SEQ ID NO: 716085 - DNA, 33 bp, Homo sapien
tccctagtttagagataagaaaaatgatcctta

SEQ ID NO: 716086 - DNA, 33 bp, Homo sapien
tccctagtttagagatgagaaaaatgatcctta

SEQ ID NO: 716087 - DNA, 33 bp, Homo sapien
ggtaagtgggatgatacaagttttagggcaatg

SEQ ID NO: 716088 - DNA, 33 bp, Homo sapien
ggtaagtgggatgatataagttttagggcaatg

SEQ ID NO: 716089 - DNA, 33 bp, Homo sapien
cctgataggcctttgacgtccttaggcttgtga

SEQ ID NO: 716090 - DNA, 33 bp, Homo sapien
cctgataggcctttgatgtccttaggcttgtga

SEQ ID NO: 716091 - DNA, 33 bp, Homo sapien
tcattagtctaaaggaccttgaaccaaaacaga

SEQ ID NO: 716092 - DNA, 33 bp, Homo sapien
tcattagtctaaaggatcttgaaccaaaacaga

SEQ ID NO: 716093 - DNA, 33 bp, Homo sapien
aggcaagaagcgggtaggatctgaacaaataat

SEQ ID NO: 716094 - DNA, 33 bp, Homo sapien
aggcaagaagcgggtatgatctgaacaaataat

SEQ ID NO: 716095 - DNA, 33 bp, Homo sapien
ctgactttgcatagaagagccaattagctgtct

SEQ ID NO: 716096 - DNA, 33 bp, Homo sapien
ctgactttgcatagaatagccaattagctgtct

SEQ ID NO: 716097 - DNA, 33 bp, Homo sapien
ggaggctcttttgaacagtgcagggattccttc

SEQ ID NO: 716098 - DNA, 33 bp, Homo sapien
ggaggctcttttgaacggtgcagggattccttc

SEQ ID NO: 716099 - DNA, 33 bp, Homo sapien
aaaccgactaatacaacgggcaaaatctatttt

SEQ ID NO: 716100 - DNA, 33 bp, Homo sapien
aaaccgactaatacaatgggcaaaatctatttt

SEQ ID NO: 716101 - DNA, 33 bp, Homo sapien
caggtctgtgatttcaacttggtatcattgccc

SEQ ID NO: 716102 - DNA, 33 bp, Homo sapien
caggtctgtgatttcagcttggtatcattgccc

SEQ ID NO: 716103 - DNA, 33 bp, Homo sapien
taaaattcttgtttcacgaagcaaaccattttg

SEQ ID NO: 716104 - DNA, 33 bp, Homo sapien
taaaattcttgtttcatgaagcaaaccattttg

SEQ ID NO: 716105 - DNA, 33 bp, Homo sapien
cacaacaattagaaatgactgcaatgatccagg

SEQ ID NO: 716106 - DNA, 33 bp, Homo sapien
cacaacaattagaaattactgcaatgatccagg

SEQ ID NO: 716107 - DNA, 33 bp, Homo sapien
atcattacataagaaactagcttatacatagag

SEQ ID NO: 716108 - DNA, 33 bp, Homo sapien
atcattacataagaaattagcttatacatagag

SEQ ID NO: 716109 - DNA, 33 bp, Homo sapien
attacattgctgttaaaaaaaatactggaaaga

SEQ ID NO: 716110 - DNA, 33 bp, Homo sapien
attacattgctgttaagaaaaatactggaaaga

SEQ ID NO: 716111 - DNA, 33 bp, Homo sapien
ggctggcatttttataacataccaccagcctta

SEQ ID NO: 716112 - DNA, 33 bp, Homo sapien
ggctggcatttttatagcataccaccagcctta

SEQ ID NO: 716113 - DNA, 33 bp, Homo sapien
ggggaaaaaatggtaaactcattgccagcttag

SEQ ID NO: 716114 - DNA, 33 bp, Homo sapien
ggggaaaaaatggtaatctcattgccagcttag

SEQ ID NO: 716115 - DNA, 33 bp, Homo sapien
tagtcttgacggaatgaatcaaaagagactgca

SEQ ID NO: 716116 - DNA, 33 bp, Homo sapien
tagtcttgacggaatggatcaaaagagactgca

SEQ ID NO: 716117 - DNA, 33 bp, Homo sapien
tcatttgttgatgaccaaaacacaattaaggtt

SEQ ID NO: 716118 - DNA, 33 bp, Homo sapien
tcatttgttgatgaccgaaacacaattaaggtt

SEQ ID NO: 716119 - DNA, 33 bp, Homo sapien
tatggatgacttccaaaactttgatttgtatat

SEQ ID NO: 716120 - DNA, 33 bp, Homo sapien
tatggatgacttccaagactttgatttgtatat

SEQ ID NO: 716121 - DNA, 33 bp, Homo sapien
agctgcaggtcagagaagtcgtgtagacccagt

SEQ ID NO: 716122 - DNA, 33 bp, Homo sapien
agctgcaggtcagagaggtcgtgtagacccagt

SEQ ID NO: 716123 - DNA, 33 bp, Homo sapien
tacccttaaagatacaatgaagtcctatggtgt

SEQ ID NO: 716124 - DNA, 33 bp, Homo sapien
tacccttaaagatacagtgaagtcctatggtgt

SEQ ID NO: 716125 - DNA, 33 bp, Homo sapien
gtagactcaggcaaaaatttccaagaagttctt

SEQ ID NO: 716126 - DNA, 33 bp, Homo sapien
gtagactcaggcaaaagtttccaagaagttctt

SEQ ID NO: 716127 - DNA, 33 bp, Homo sapien
gctctctcactcacaaagttactagctcaagtg

SEQ ID NO: 716128 - DNA, 33 bp, Homo sapien
gctctctcactcacaacgttactagctcaagtg

SEQ ID NO: 716129 - DNA, 33 bp, Homo sapien
tacgaaatctgtgatactaaggatgaacaacct

SEQ ID NO: 716130 - DNA, 33 bp, Homo sapien
tacgaaatctgtgatattaaggatgaacaacct

SEQ ID NO: 716131 - DNA, 33 bp, Homo sapien
ttttattttttttcaaactgacatctgtgtatt

SEQ ID NO: 716132 - DNA, 33 bp, Homo sapien
ttttattttttttcaatctgacatctgtgtatt

SEQ ID NO: 716133 - DNA, 33 bp, Homo sapien
catcctatgtacgctacaggagtagactttctg

SEQ ID NO: 716134 - DNA, 33 bp, Homo sapien
catcctatgtacgctataggagtagactttctg

SEQ ID NO: 716135 - DNA, 33 bp, Homo sapien
attaacaaatgtggtacgttcaagagcaggata

SEQ ID NO: 716136 - DNA, 33 bp, Homo sapien
attaacaaatgtggtatgttcaagagcaggata

SEQ ID NO: 716137 - DNA, 33 bp, Homo sapien
aggttgactgatgggcacaaattacattttgat

SEQ ID NO: 716138 - DNA, 33 bp, Homo sapien
aggttgactgatgggcgcaaattacattttgat

SEQ ID NO: 716139 - DNA, 33 bp, Homo sapien
ctaatgttttctgactcaagttctgattattct

SEQ ID NO: 716140 - DNA, 33 bp, Homo sapien
ctaatgttttctgacttaagttctgattattct

SEQ ID NO: 716141 - DNA, 33 bp, Homo sapien
atacagtaatgtaagcactgtagtaatcaagat

SEQ ID NO: 716142 - DNA, 33 bp, Homo sapien
atacagtaatgtaagcgctgtagtaatcaagat

SEQ ID NO: 716143 - DNA, 33 bp, Homo sapien
acagaagttatcgagacagatggcaatcaggct

SEQ ID NO: 716144 - DNA, 33 bp, Homo sapien
acagaagttatcgagagagatggcaatcaggct

SEQ ID NO: 716145 - DNA, 33 bp, Homo sapien
gaaaatcagggaggacacagggtacgaaaagga

SEQ ID NO: 716146 - DNA, 33 bp, Homo sapien
gaaaatcagggaggacgcagggtacgaaaagga

SEQ ID NO: 716147 - DNA, 33 bp, Homo sapien
gtgaggaccaagctgtcaacaatcccagacctg

SEQ ID NO: 716148 - DNA, 33 bp, Homo sapien
gtgaggaccaagctgttaacaatcccagacctg

SEQ ID NO: 716149 - DNA, 33 bp, Homo sapien
agaagacaatgtgacccgacttaggcattttgt

SEQ ID NO: 716150 - DNA, 33 bp, Homo sapien
agaagacaatgtgacctgacttaggcattttgt

SEQ ID NO: 716151 - DNA, 33 bp, Homo sapien
atgtgcatttcatagccctcttatcattaagaa

SEQ ID NO: 716152 - DNA, 33 bp, Homo sapien
atgtgcatttcatagctctcttatcattaagaa

SEQ ID NO: 716153 - DNA, 33 bp, Homo sapien
cgcttctggttctgaacggcagctggaacttct

SEQ ID NO: 716154 - DNA, 33 bp, Homo sapien
cgcttctggttctgaatggcagctggaacttct

SEQ ID NO: 716155 - DNA, 33 bp, Homo sapien
gctgtacatccttcaccaaacaaccgaggagtc

SEQ ID NO: 716156 - DNA, 33 bp, Homo sapien
gctgtacatccttcactaaacaaccgaggagtc

SEQ ID NO: 716157 - DNA, 33 bp, Homo sapien
aaaaacaaattccacaatctaaaatgaactttt

SEQ ID NO: 716158 - DNA, 33 bp, Homo sapien
aaaaacaaattccacagtctaaaatgaactttt

SEQ ID NO: 716159 - DNA, 33 bp, Homo sapien
attttatgagactgtaaacttcaggaaggcaga

SEQ ID NO: 716160 - DNA, 33 bp, Homo sapien
attttatgagactgtatacttcaggaaggcaga

SEQ ID NO: 716161 - DNA, 33 bp, Homo sapien
ctgaaactaacaagtacagactgttcaacatgt

SEQ ID NO: 716162 - DNA, 33 bp, Homo sapien
ctgaaactaacaagtagagactgttcaacatgt

SEQ ID NO: 716163 - DNA, 33 bp, Homo sapien
ataggtctcttatctacgaacaacttcctttta

SEQ ID NO: 716164 - DNA, 33 bp, Homo sapien
ataggtctcttatctatgaacaacttcctttta

SEQ ID NO: 716165 - DNA, 33 bp, Homo sapien
agagattaaaatgagcaaataaacccaaagaag

SEQ ID NO: 716166 - DNA, 33 bp, Homo sapien
agagattaaaatgagcgaataaacccaaagaag

SEQ ID NO: 716167 - DNA, 33 bp, Homo sapien
ttggtttggtcccaatcaagaacattaaaaaaa

SEQ ID NO: 716168 - DNA, 33 bp, Homo sapien
ttggtttggtcccaatgaagaacattaaaaaaa

SEQ ID NO: 716169 - DNA, 33 bp, Homo sapien
aatttctgttctgtgaatactaacaacttcagc

SEQ ID NO: 716170 - DNA, 33 bp, Homo sapien
aatttctgttctgtgagtactaacaacttcagc

SEQ ID NO: 716171 - DNA, 33 bp, Homo sapien
gtgaactatcctcataagcagtcgagatacaat

SEQ ID NO: 716172 - DNA, 33 bp, Homo sapien
gtgaactatcctcataggcagtcgagatacaat

SEQ ID NO: 716173 - DNA, 33 bp, Homo sapien
acaacaaatctggaaacgagacaagcctctgag

SEQ ID NO: 716174 - DNA, 33 bp, Homo sapien
acaacaaatctggaaatgagacaagcctctgag

SEQ ID NO: 716175 - DNA, 33 bp, Homo sapien
cttattttatgagggaaattttggagttaaaga

SEQ ID NO: 716176 - DNA, 33 bp, Homo sapien
cttattttatgagggagattttggagttaaaga

SEQ ID NO: 716177 - DNA, 33 bp, Homo sapien
tggtgaactcccataccatccccatgttatcaa

SEQ ID NO: 716178 - DNA, 33 bp, Homo sapien
tggtgaactcccatactatccccatgttatcaa

SEQ ID NO: 716179 - DNA, 33 bp, Homo sapien
ccaacccagcttagccactgtaagaagacgttc

SEQ ID NO: 716180 - DNA, 33 bp, Homo sapien
ccaacccagcttagccgctgtaagaagacgttc

SEQ ID NO: 716181 - DNA, 33 bp, Homo sapien
ctgcagagaaatgttacgagccttgtaaaacaa

SEQ ID NO: 716182 - DNA, 33 bp, Homo sapien
ctgcagagaaatgttatgagccttgtaaaacaa

SEQ ID NO: 716183 - DNA, 33 bp, Homo sapien
atgtagttattatagaatcaggctgagattaaa

SEQ ID NO: 716184 - DNA, 33 bp, Homo sapien
atgtagttattatagagtcaggctgagattaaa

SEQ ID NO: 716185 - DNA, 33 bp, Homo sapien
aagacaaaatatgacacgtgatcggatcatgaa

SEQ ID NO: 716186 - DNA, 33 bp, Homo sapien
aagacaaaatatgacatgtgatcggatcatgaa

SEQ ID NO: 716187 - DNA, 33 bp, Homo sapien
gtaggctaggcacaagaaagccattatatagtt

SEQ ID NO: 716188 - DNA, 33 bp, Homo sapien
gtaggctaggcacaagtaagccattatatagtt

SEQ ID NO: 716189 - DNA, 33 bp, Homo sapien
gaaggctcttacttgcactgaattgctccaaag

SEQ ID NO: 716190 - DNA, 33 bp, Homo sapien
gaaggctcttacttgcgctgaattgctccaaag

SEQ ID NO: 716191 - DNA, 33 bp, Homo sapien
ggcaacacgcaatggaaatgttattaaaaacta

SEQ ID NO: 716192 - DNA, 33 bp, Homo sapien
ggcaacacgcaatggatatgttattaaaaacta

SEQ ID NO: 716193 - DNA, 33 bp, Homo sapien
tccttttccttgggtacaataactggttacatt

SEQ ID NO: 716194 - DNA, 33 bp, Homo sapien
tccttttccttgggtataataactggttacatt

SEQ ID NO: 716195 - DNA, 33 bp, Homo sapien
ccaaatattaaagcaactgatagtcccaatctt

SEQ ID NO: 716196 - DNA, 33 bp, Homo sapien
ccaaatattaaagcaattgatagtcccaatctt

SEQ ID NO: 716197 - DNA, 33 bp, Homo sapien
caataataggagtgtccgaagaatttttggctg

SEQ ID NO: 716198 - DNA, 33 bp, Homo sapien
caataataggagtgtctgaagaatttttggctg

SEQ ID NO: 716199 - DNA, 33 bp, Homo sapien
gatatatcattattccaacaataaaatccaaat

SEQ ID NO: 716200 - DNA, 33 bp, Homo sapien
gatatatcattattccgacaataaaatccaaat

SEQ ID NO: 716201 - DNA, 33 bp, Homo sapien
attaatgctaaaaggaagggaaatgtgaagttg

SEQ ID NO: 716202 - DNA, 33 bp, Homo sapien
attaatgctaaaaggaggggaaatgtgaagttg

SEQ ID NO: 716203 - DNA, 33 bp, Homo sapien
catagcacttgacaataaagtttgatttaattt

SEQ ID NO: 716204 - DNA, 33 bp, Homo sapien
catagcacttgacaatgaagtttgatttaattt

SEQ ID NO: 716205 - DNA, 33 bp, Homo sapien
taagtatagctactcccgcttggttttggtttc

SEQ ID NO: 716206 - DNA, 33 bp, Homo sapien
taagtatagctactcctgcttggttttggtttc

SEQ ID NO: 716207 - DNA, 33 bp, Homo sapien
taaagcattaaagtacaaagatttcccagtcca

SEQ ID NO: 716208 - DNA, 33 bp, Homo sapien
taaagcattaaagtacgaagatttcccagtcca

SEQ ID NO: 716209 - DNA, 33 bp, Homo sapien
caggatagatgcctgacgtaggtgtaccttttt

SEQ ID NO: 716210 - DNA, 33 bp, Homo sapien
caggatagatgcctgatgtaggtgtaccttttt

SEQ ID NO: 716211 - DNA, 33 bp, Homo sapien
cactatactagatttccattactgatataacaa

SEQ ID NO: 716212 - DNA, 33 bp, Homo sapien
cactatactagatttctattactgatataacaa

SEQ ID NO: 716213 - DNA, 33 bp, Homo sapien
agaatgcaagctgtaaatcttggtggcttctat

SEQ ID NO: 716214 - DNA, 33 bp, Homo sapien
agaatgcaagctgtaagtcttggtggcttctat

SEQ ID NO: 716215 - DNA, 33 bp, Homo sapien
atctagtcataatgaaccaccacactagcacat

SEQ ID NO: 716216 - DNA, 33 bp, Homo sapien
atctagtcataatgaatcaccacactagcacat

SEQ ID NO: 716217 - DNA, 33 bp, Homo sapien
gtttttctggtgccaacgcctagaacatagtcc

SEQ ID NO: 716218 - DNA, 33 bp, Homo sapien
gtttttctggtgccaatgcctagaacatagtcc

SEQ ID NO: 716219 - DNA, 33 bp, Homo sapien
taatgaccattgtaaccgactgccggggattca

SEQ ID NO: 716220 - DNA, 33 bp, Homo sapien
taatgaccattgtaactgactgccggggattca

SEQ ID NO: 716221 - DNA, 33 bp, Homo sapien
agcctgggttagagaacattgagaccaggtatc

SEQ ID NO: 716222 - DNA, 33 bp, Homo sapien
agcctgggttagagaatattgagaccaggtatc

SEQ ID NO: 716223 - DNA, 33 bp, Homo sapien
ttgtttccaggtagagaaaatgttcagtgcaaa

SEQ ID NO: 716224 - DNA, 33 bp, Homo sapien
ttgtttccaggtagaggaaatgttcagtgcaaa

SEQ ID NO: 716225 - DNA, 33 bp, Homo sapien
caccctatttcagtcacaaaacagtgctggtca

SEQ ID NO: 716226 - DNA, 33 bp, Homo sapien
caccctatttcagtcataaaacagtgctggtca

SEQ ID NO: 716227 - DNA, 33 bp, Homo sapien
tattatattagaggaaaatctgggggctgaggt

SEQ ID NO: 716228 - DNA, 33 bp, Homo sapien
tattatattagaggaatatctgggggctgaggt

SEQ ID NO: 716229 - DNA, 33 bp, Homo sapien
aacttatttttgacaaaagtgctgagataattc

SEQ ID NO: 716230 - DNA, 33 bp, Homo sapien
aacttatttttgacaagagtgctgagataattc

SEQ ID NO: 716231 - DNA, 33 bp, Homo sapien
aaataaaaacctctgcacttaaaaggacatgat

SEQ ID NO: 716232 - DNA, 33 bp, Homo sapien
aaataaaaacctctgcgcttaaaaggacatgat

SEQ ID NO: 716233 - DNA, 33 bp, Homo sapien
taatttgagcacaggaaaatttaatgttgttca

SEQ ID NO: 716234 - DNA, 33 bp, Homo sapien
taatttgagcacaggagaatttaatgttgttca

SEQ ID NO: 716235 - DNA, 33 bp, Homo sapien
gcaaactaagcatcaacaagtgtgagacaactt

SEQ ID NO: 716236 - DNA, 33 bp, Homo sapien
gcaaactaagcatcaataagtgtgagacaactt

SEQ ID NO: 716237 - DNA, 33 bp, Homo sapien
ttctctgtgtacagtaccttgatcactaagttt

SEQ ID NO: 716238 - DNA, 33 bp, Homo sapien
ttctctgtgtacagtatcttgatcactaagttt

SEQ ID NO: 716239 - DNA, 33 bp, Homo sapien
cactcttggacccttggattttccaggggctct

SEQ ID NO: 716240 - DNA, 33 bp, Homo sapien
cactcttggacccttgtattttccaggggctct

SEQ ID NO: 716241 - DNA, 33 bp, Homo sapien
atacaacttgtattaacagaaaatcaatctaca

SEQ ID NO: 716242 - DNA, 33 bp, Homo sapien
atacaacttgtattaatagaaaatcaatctaca

SEQ ID NO: 716243 - DNA, 33 bp, Homo sapien
cagtacccagctgttacctttactgttcctctc

SEQ ID NO: 716244 - DNA, 33 bp, Homo sapien
cagtacccagctgttatctttactgttcctctc

SEQ ID NO: 716245 - DNA, 33 bp, Homo sapien
gtgactggcattattccaagttctttagtatct

SEQ ID NO: 716246 - DNA, 33 bp, Homo sapien
gtgactggcattattctaagttctttagtatct

SEQ ID NO: 716247 - DNA, 33 bp, Homo sapien
gccatctgaagaagcccacagaaaaaggaatta

SEQ ID NO: 716248 - DNA, 33 bp, Homo sapien
gccatctgaagaagcctacagaaaaaggaatta

SEQ ID NO: 716249 - DNA, 33 bp, Homo sapien
ttgggggccgtgacgaggagttcattttaaatg

SEQ ID NO: 716250 - DNA, 33 bp, Homo sapien
ttgggggccgtgacgatgagttcattttaaatg

SEQ ID NO: 716251 - DNA, 33 bp, Homo sapien
tgcatgctacgtgactcaggccacatattctca

SEQ ID NO: 716252 - DNA, 33 bp, Homo sapien
tgcatgctacgtgacttaggccacatattctca

SEQ ID NO: 716253 - DNA, 33 bp, Homo sapien
tctgcttctctgattacagattaactttcctct

SEQ ID NO: 716254 - DNA, 33 bp, Homo sapien
tctgcttctctgattatagattaactttcctct

SEQ ID NO: 716255 - DNA, 33 bp, Homo sapien
actgcaactttaagtaaaatgatgtatcaggaa

SEQ ID NO: 716256 - DNA, 33 bp, Homo sapien
actgcaactttaagtacaatgatgtatcaggaa

SEQ ID NO: 716257 - DNA, 33 bp, Homo sapien
aactaaggcataagcacagatgtgagtctaggc

SEQ ID NO: 716258 - DNA, 33 bp, Homo sapien
aactaaggcataagcatagatgtgagtctaggc

SEQ ID NO: 716259 - DNA, 33 bp, Homo sapien
tcaatttttacctcacaaaatgaacaaaattat

SEQ ID NO: 716260 - DNA, 33 bp, Homo sapien
tcaatttttacctcacgaaatgaacaaaattat

SEQ ID NO: 716261 - DNA, 33 bp, Homo sapien
aattacagtgttgagagaatcatatgctgagat

SEQ ID NO: 716262 - DNA, 33 bp, Homo sapien
aattacagtgttgagataatcatatgctgagat

SEQ ID NO: 716263 - DNA, 33 bp, Homo sapien
atcattgtctgtaaacaacagaagactggaaac

SEQ ID NO: 716264 - DNA, 33 bp, Homo sapien
atcattgtctgtaaacgacagaagactggaaac

SEQ ID NO: 716265 - DNA, 33 bp, Homo sapien
atgagtacaaatatcacggaatgctgactttta

SEQ ID NO: 716266 - DNA, 33 bp, Homo sapien
atgagtacaaatatcatggaatgctgactttta

SEQ ID NO: 716267 - DNA, 33 bp, Homo sapien
aggaatccctcaaagagactcccagctaacaaa

SEQ ID NO: 716268 - DNA, 33 bp, Homo sapien
aggaatccctcaaagatactcccagctaacaaa

SEQ ID NO: 716269 - DNA, 33 bp, Homo sapien
ttttggatttttttcaggacctgccattccttt

SEQ ID NO: 716270 - DNA, 33 bp, Homo sapien
ttttggatttttttcatgacctgccattccttt

SEQ ID NO: 716271 - DNA, 33 bp, Homo sapien
taagccctgtcaaagaagataaacctaacctca

SEQ ID NO: 716272 - DNA, 33 bp, Homo sapien
taagccctgtcaaagacgataaacctaacctca

SEQ ID NO: 716273 - DNA, 33 bp, Homo sapien
cttctgtagtcttaccacctggtaccatcaact

SEQ ID NO: 716274 - DNA, 33 bp, Homo sapien
cttctgtagtcttaccgcctggtaccatcaact

SEQ ID NO: 716275 - DNA, 33 bp, Homo sapien
atatcctgatgccacactggatagaacagcagg

SEQ ID NO: 716276 - DNA, 33 bp, Homo sapien
atatcctgatgccacattggatagaacagcagg

SEQ ID NO: 716277 - DNA, 33 bp, Homo sapien
ctcctacagtaaaaccaagacagcacaatcaaa

SEQ ID NO: 716278 - DNA, 33 bp, Homo sapien
ctcctacagtaaaaccgagacagcacaatcaaa

SEQ ID NO: 716279 - DNA, 33 bp, Homo sapien
aagagaagcaaaaccactcttcctaaaatgtta

SEQ ID NO: 716280 - DNA, 33 bp, Homo sapien
aagagaagcaaaaccattcttcctaaaatgtta

SEQ ID NO: 716281 - DNA, 33 bp, Homo sapien
ttatggttgtctagaagtatgttgtttatgttt

SEQ ID NO: 716282 - DNA, 33 bp, Homo sapien
ttatggttgtctagaattatgttgtttatgttt

SEQ ID NO: 716283 - DNA, 33 bp, Homo sapien
ctaactgacttttcaacaactttctcttccaca

SEQ ID NO: 716284 - DNA, 33 bp, Homo sapien
ctaactgacttttcaataactttctcttccaca

SEQ ID NO: 716285 - DNA, 33 bp, Homo sapien
agctgccttgcaatcccagaccaactagactct

SEQ ID NO: 716286 - DNA, 33 bp, Homo sapien
agctgccttgcaatcctagaccaactagactct

SEQ ID NO: 716287 - DNA, 33 bp, Homo sapien
tctgaaatcagagtctgaaatattttttcctga

SEQ ID NO: 716288 - DNA, 33 bp, Homo sapien
tctgaaatcagagtcttaaatattttttcctga

SEQ ID NO: 716289 - DNA, 33 bp, Homo sapien
ccagctctttctcactaagtataccagcttgga

SEQ ID NO: 716290 - DNA, 33 bp, Homo sapien
ccagctctttctcactgagtataccagcttgga

SEQ ID NO: 716291 - DNA, 33 bp, Homo sapien
gaggactcttatgcccactaatgttcttgaata

SEQ ID NO: 716292 - DNA, 33 bp, Homo sapien
gaggactcttatgccctctaatgttcttgaata

SEQ ID NO: 716293 - DNA, 33 bp, Homo sapien
tatgagatccagcctagatttcttattctgata

SEQ ID NO: 716294 - DNA, 33 bp, Homo sapien
tatgagatccagcctatatttcttattctgata

SEQ ID NO: 716295 - DNA, 33 bp, Homo sapien
agaacactggagtaataactaataattcagtct

SEQ ID NO: 716296 - DNA, 33 bp, Homo sapien
agaacactggagtaatgactaataattcagtct

SEQ ID NO: 716297 - DNA, 33 bp, Homo sapien
cctccatctttcctgacagtcatgatatcctag

SEQ ID NO: 716298 - DNA, 33 bp, Homo sapien
cctccatctttcctgatagtcatgatatcctag

SEQ ID NO: 716299 - DNA, 33 bp, Homo sapien
agatatcctattctataacaaagctatcttgca

SEQ ID NO: 716300 - DNA, 33 bp, Homo sapien
agatatcctattctattacaaagctatcttgca

SEQ ID NO: 716301 - DNA, 33 bp, Homo sapien
atcccttataataaacaagcaaatgcaagaaaa

SEQ ID NO: 716302 - DNA, 33 bp, Homo sapien
atcccttataataaaccagcaaatgcaagaaaa

SEQ ID NO: 716303 - DNA, 33 bp, Homo sapien
tgagaagggctatggcacagctacaggtatggg

SEQ ID NO: 716304 - DNA, 33 bp, Homo sapien
tgagaagggctatggcgcagctacaggtatggg

SEQ ID NO: 716305 - DNA, 33 bp, Homo sapien
tctctttggacatttccaggtgattaaatctgt

SEQ ID NO: 716306 - DNA, 33 bp, Homo sapien
tctctttggacatttctaggtgattaaatctgt

SEQ ID NO: 716307 - DNA, 33 bp, Homo sapien
gagttaatgtccttgacggtagacatttccaaa

SEQ ID NO: 716308 - DNA, 33 bp, Homo sapien
gagttaatgtccttgatggtagacatttccaaa

SEQ ID NO: 716309 - DNA, 33 bp, Homo sapien
cgctttatggctaatacgcttctctggattcag

SEQ ID NO: 716310 - DNA, 33 bp, Homo sapien
cgctttatggctaatatgcttctctggattcag

SEQ ID NO: 716311 - DNA, 33 bp, Homo sapien
gtgttaattaaatctgcagttatggctgatgga

SEQ ID NO: 716312 - DNA, 33 bp, Homo sapien
gtgttaattaaatctgtagttatggctgatgga

SEQ ID NO: 716313 - DNA, 33 bp, Homo sapien
aaactgtgaatagccaaacctaagttctgttat

SEQ ID NO: 716314 - DNA, 33 bp, Homo sapien
aaactgtgaatagccagacctaagttctgttat

SEQ ID NO: 716315 - DNA, 33 bp, Homo sapien
aactttccaggaaagcaaaaatagagtatcaga

SEQ ID NO: 716316 - DNA, 33 bp, Homo sapien
aactttccaggaaagcgaaaatagagtatcaga

SEQ ID NO: 716317 - DNA, 33 bp, Homo sapien
agaatgcagaagataaagttgagaaaagcaggt

SEQ ID NO: 716318 - DNA, 33 bp, Homo sapien
agaatgcagaagataaggttgagaaaagcaggt

SEQ ID NO: 716319 - DNA, 33 bp, Homo sapien
ggatctggagacacttaaaccccttcctccttt

SEQ ID NO: 716320 - DNA, 33 bp, Homo sapien
ggatctggagacacttcaaccccttcctccttt

SEQ ID NO: 716321 - DNA, 33 bp, Homo sapien
ggtacgctgtgtgctacatggtagattaaggtt

SEQ ID NO: 716322 - DNA, 33 bp, Homo sapien
ggtacgctgtgtgctatatggtagattaaggtt

SEQ ID NO: 716323 - DNA, 33 bp, Homo sapien
gggcatgactcagtccaagtgtgaaggtctcaa

SEQ ID NO: 716324 - DNA, 33 bp, Homo sapien
gggcatgactcagtccgagtgtgaaggtctcaa

SEQ ID NO: 716325 - DNA, 33 bp, Homo sapien
tcgatttcctctttgaaaaataaagcagttgaa

SEQ ID NO: 716326 - DNA, 33 bp, Homo sapien
tcgatttcctctttgagaaataaagcagttgaa

SEQ ID NO: 716327 - DNA, 33 bp, Homo sapien
acagagaatgtgaaagcataaatgactgtgggc

SEQ ID NO: 716328 - DNA, 33 bp, Homo sapien
acagagaatgtgaaaggataaatgactgtgggc

SEQ ID NO: 716329 - DNA, 33 bp, Homo sapien
ctcttggctattataaataatgatacgatgaac

SEQ ID NO: 716330 - DNA, 33 bp, Homo sapien
ctcttggctattataagtaatgatacgatgaac

SEQ ID NO: 716331 - DNA, 33 bp, Homo sapien
tatataccaaaaaatcaatttcctagagttcac

SEQ ID NO: 716332 - DNA, 33 bp, Homo sapien
tatataccaaaaaatccatttcctagagttcac

SEQ ID NO: 716333 - DNA, 33 bp, Homo sapien
ttttgaaagcatatacagattgagcatcccaaa

SEQ ID NO: 716334 - DNA, 33 bp, Homo sapien
ttttgaaagcatatacggattgagcatcccaaa

SEQ ID NO: 716335 - DNA, 33 bp, Homo sapien
tacatttttcagtacaatcaatttaggaaataa

SEQ ID NO: 716336 - DNA, 33 bp, Homo sapien
tacatttttcagtacagtcaatttaggaaataa

SEQ ID NO: 716337 - DNA, 33 bp, Homo sapien
ctgtcagtatctaccaggtactgggcactgtgg

SEQ ID NO: 716338 - DNA, 33 bp, Homo sapien
ctgtcagtatctaccatgtactgggcactgtgg

SEQ ID NO: 716339 - DNA, 33 bp, Homo sapien
ggaaagaggcgcaaaacgtgaggagtgggccag

SEQ ID NO: 716340 - DNA, 33 bp, Homo sapien
ggaaagaggcgcaaaatgtgaggagtgggccag

SEQ ID NO: 716341 - DNA, 33 bp, Homo sapien
gttctaactcagccataaaagaggatcagagaa

SEQ ID NO: 716342 - DNA, 33 bp, Homo sapien
gttctaactcagccatgaaagaggatcagagaa

SEQ ID NO: 716343 - DNA, 33 bp, Homo sapien
ctcatcatctttgaatgaaggctctataagcag

SEQ ID NO: 716344 - DNA, 33 bp, Homo sapien
ctcatcatctttgaattaaggctctataagcag

SEQ ID NO: 716345 - DNA, 33 bp, Homo sapien
caaactgaggcttaaacagtttaaacatcttgc

SEQ ID NO: 716346 - DNA, 33 bp, Homo sapien
caaactgaggcttaaatagtttaaacatcttgc

SEQ ID NO: 716347 - DNA, 33 bp, Homo sapien
ggagcaccatgtgagcacctaccaaggtcatgc

SEQ ID NO: 716348 - DNA, 33 bp, Homo sapien
ggagcaccatgtgagcgcctaccaaggtcatgc

SEQ ID NO: 716349 - DNA, 33 bp, Homo sapien
actgcctgttttcaaaagactaaagtgtttcaa

SEQ ID NO: 716350 - DNA, 33 bp, Homo sapien
actgcctgttttcaaatgactaaagtgtttcaa

SEQ ID NO: 716351 - DNA, 33 bp, Homo sapien
actgcaattgaattcccagtcagtttggcagga

SEQ ID NO: 716352 - DNA, 33 bp, Homo sapien
actgcaattgaattcctagtcagtttggcagga

SEQ ID NO: 716353 - DNA, 33 bp, Homo sapien
tactggacagatgccacatttataagagcaatc

SEQ ID NO: 716354 - DNA, 33 bp, Homo sapien
tactggacagatgccagatttataagagcaatc

SEQ ID NO: 716355 - DNA, 33 bp, Homo sapien
tctagtagcaatgcaaagaatgtgttcttggtt

SEQ ID NO: 716356 - DNA, 33 bp, Homo sapien
tctagtagcaatgcaacgaatgtgttcttggtt

SEQ ID NO: 716357 - DNA, 33 bp, Homo sapien
acactgctattttgaaacatttgtctaatattt

SEQ ID NO: 716358 - DNA, 33 bp, Homo sapien
acactgctattttgaagcatttgtctaatattt

SEQ ID NO: 716359 - DNA, 33 bp, Homo sapien
caaattcatttgtgttcaaatatttcacagaca

SEQ ID NO: 716360 - DNA, 33 bp, Homo sapien
caaattcatttgtgtttaaatatttcacagaca

SEQ ID NO: 716361 - DNA, 33 bp, Homo sapien
cagaattgttaagcaacgcactttggatttagg

SEQ ID NO: 716362 - DNA, 33 bp, Homo sapien
cagaattgttaagcaatgcactttggatttagg

SEQ ID NO: 716363 - DNA, 33 bp, Homo sapien
attaacctgaatataacggtaaagaagcaatca

SEQ ID NO: 716364 - DNA, 33 bp, Homo sapien
attaacctgaatataatggtaaagaagcaatca

SEQ ID NO: 716365 - DNA, 33 bp, Homo sapien
agttcttgacaaaggacagtgctccatgcagca

SEQ ID NO: 716366 - DNA, 33 bp, Homo sapien
agttcttgacaaaggatagtgctccatgcagca

SEQ ID NO: 716367 - DNA, 33 bp, Homo sapien
aagtagacatatatggaaaagtcctactgcctt

SEQ ID NO: 716368 - DNA, 33 bp, Homo sapien
aagtagacatatatggcaaagtcctactgcctt

SEQ ID NO: 716369 - DNA, 33 bp, Homo sapien
atacacatagaacttacgtccatccttcaccca

SEQ ID NO: 716370 - DNA, 33 bp, Homo sapien
atacacatagaacttatgtccatccttcaccca

SEQ ID NO: 716371 - DNA, 33 bp, Homo sapien
taactcaatgtttcggcaactcagagaattatt

SEQ ID NO: 716372 - DNA, 33 bp, Homo sapien
taactcaatgtttcggtaactcagagaattatt

SEQ ID NO: 716373 - DNA, 33 bp, Homo sapien
gtttgagtcttggtgccaccatttactcactat

SEQ ID NO: 716374 - DNA, 33 bp, Homo sapien
gtttgagtcttggtgctaccatttactcactat

SEQ ID NO: 716375 - DNA, 33 bp, Homo sapien
atctgcattttggctcaacatccataaaacagg

SEQ ID NO: 716376 - DNA, 33 bp, Homo sapien
atctgcattttggctcgacatccataaaacagg

SEQ ID NO: 716377 - DNA, 33 bp, Homo sapien
ggagtaacaccattaactgggggggcatctcat

SEQ ID NO: 716378 - DNA, 33 bp, Homo sapien
ggagtaacaccattaattgggggggcatctcat

SEQ ID NO: 716379 - DNA, 33 bp, Homo sapien
aatatgccagggctaagtaaccatgccattagt

SEQ ID NO: 716380 - DNA, 33 bp, Homo sapien
aatatgccagggctaattaaccatgccattagt

SEQ ID NO: 716381 - DNA, 33 bp, Homo sapien
catcattttaagacacaatggaaaacattagga

SEQ ID NO: 716382 - DNA, 33 bp, Homo sapien
catcattttaagacacgatggaaaacattagga

SEQ ID NO: 716383 - DNA, 33 bp, Homo sapien
aataacctctctcaaaataaatccagtgcatct

SEQ ID NO: 716384 - DNA, 33 bp, Homo sapien
aataacctctctcaaagtaaatccagtgcatct

SEQ ID NO: 716385 - DNA, 33 bp, Homo sapien
ctgatttcaccatgtacacaaaaacagagtggg

SEQ ID NO: 716386 - DNA, 33 bp, Homo sapien
ctgatttcaccatgtagacaaaaacagagtggg

SEQ ID NO: 716387 - DNA, 33 bp, Homo sapien
attgcttaaatatatacgctggagtaaaaaggt

SEQ ID NO: 716388 - DNA, 33 bp, Homo sapien
attgcttaaatatatatgctggagtaaaaaggt

SEQ ID NO: 716389 - DNA, 33 bp, Homo sapien
gataacaaatcaataccactctccaatctgtct

SEQ ID NO: 716390 - DNA, 33 bp, Homo sapien
gataacaaatcaatactactctccaatctgtct

SEQ ID NO: 716391 - DNA, 33 bp, Homo sapien
agttatactttttaaacgttcgatttgcctgac

SEQ ID NO: 716392 - DNA, 33 bp, Homo sapien
agttatactttttaaatgttcgatttgcctgac

SEQ ID NO: 716393 - DNA, 33 bp, Homo sapien
tttaaatgttggaccacgtaagatggactctct

SEQ ID NO: 716394 - DNA, 33 bp, Homo sapien
tttaaatgttggaccatgtaagatggactctct

SEQ ID NO: 716395 - DNA, 33 bp, Homo sapien
atatttgtcaggcaaaccaagtagatggtaaga

SEQ ID NO: 716396 - DNA, 33 bp, Homo sapien
atatttgtcaggcaaatcaagtagatggtaaga

SEQ ID NO: 716397 - DNA, 33 bp, Homo sapien
catatgttgaccttgcagactactatgctttag

SEQ ID NO: 716398 - DNA, 33 bp, Homo sapien
catatgttgaccttgcggactactatgctttag

SEQ ID NO: 716399 - DNA, 33 bp, Homo sapien
cagctgtctcactcacccttaatgcaatagcaa

SEQ ID NO: 716400 - DNA, 33 bp, Homo sapien
cagctgtctcactcacgcttaatgcaatagcaa

SEQ ID NO: 716401 - DNA, 33 bp, Homo sapien
ctaatatgttatggtacgtgtccctccttccaa

SEQ ID NO: 716402 - DNA, 33 bp, Homo sapien
ctaatatgttatggtatgtgtccctccttccaa

SEQ ID NO: 716403 - DNA, 33 bp, Homo sapien
atccactgggcagaaacgtgatttcattgctac

SEQ ID NO: 716404 - DNA, 33 bp, Homo sapien
atccactgggcagaaaggtgatttcattgctac

SEQ ID NO: 716405 - DNA, 33 bp, Homo sapien
cattctttcatccttcacattcaatcagagggc

SEQ ID NO: 716406 - DNA, 33 bp, Homo sapien
cattctttcatccttcgcattcaatcagagggc

SEQ ID NO: 716407 - DNA, 33 bp, Homo sapien
ctatgacagatggtataacagggtacccaccac

SEQ ID NO: 716408 - DNA, 33 bp, Homo sapien
ctatgacagatggtatcacagggtacccaccac

SEQ ID NO: 716409 - DNA, 33 bp, Homo sapien
atcttgaaaatggaaacgttctcagaagacaca

SEQ ID NO: 716410 - DNA, 33 bp, Homo sapien
atcttgaaaatggaaaggttctcagaagacaca

SEQ ID NO: 716411 - DNA, 33 bp, Homo sapien
attaacttttatattgcaggatgatgcatacct

SEQ ID NO: 716412 - DNA, 33 bp, Homo sapien
attaacttttatattgtaggatgatgcatacct

SEQ ID NO: 716413 - DNA, 33 bp, Homo sapien
ttgacattgaacaactaaattcacacagctcca

SEQ ID NO: 716414 - DNA, 33 bp, Homo sapien
ttgacattgaacaactgaattcacacagctcca

SEQ ID NO: 716415 - DNA, 33 bp, Homo sapien
cctaggaaaagcaagacgagaccatggctgcat

SEQ ID NO: 716416 - DNA, 33 bp, Homo sapien
cctaggaaaagcaagatgagaccatggctgcat

SEQ ID NO: 716417 - DNA, 33 bp, Homo sapien
aaagccagtcgcaaaaaaccacatactgcagaa

SEQ ID NO: 716418 - DNA, 33 bp, Homo sapien
aaagccagtcgcaaaagaccacatactgcagaa

SEQ ID NO: 716419 - DNA, 33 bp, Homo sapien
tcatactttgatattgaatgtgtcaagacagaa

SEQ ID NO: 716420 - DNA, 33 bp, Homo sapien
tcatactttgatattgcatgtgtcaagacagaa

SEQ ID NO: 716421 - DNA, 33 bp, Homo sapien
cacagtgagaatcagaaacatttccttaataca

SEQ ID NO: 716422 - DNA, 33 bp, Homo sapien
cacagtgagaatcagagacatttccttaataca

SEQ ID NO: 716423 - DNA, 33 bp, Homo sapien
acatttccttaatacaacaaagtaatcacaaca

SEQ ID NO: 716424 - DNA, 33 bp, Homo sapien
acatttccttaatacagcaaagtaatcacaaca

SEQ ID NO: 716425 - DNA, 33 bp, Homo sapien
tataataggatcttcacggatatcaggagagag

SEQ ID NO: 716426 - DNA, 33 bp, Homo sapien
tataataggatcttcatggatatcaggagagag

SEQ ID NO: 716427 - DNA, 33 bp, Homo sapien
gtcagctattccttacaaaaacctcttgcaata

SEQ ID NO: 716428 - DNA, 33 bp, Homo sapien
gtcagctattccttacgaaaacctcttgcaata

SEQ ID NO: 716429 - DNA, 33 bp, Homo sapien
atgctttttatggcaaggttgataatctgtaaa

SEQ ID NO: 716430 - DNA, 33 bp, Homo sapien
atgctttttatggcaatgttgataatctgtaaa

SEQ ID NO: 716431 - DNA, 33 bp, Homo sapien
catagtgttagtaaaacaagtatgtgggagaat

SEQ ID NO: 716432 - DNA, 33 bp, Homo sapien
catagtgttagtaaaagaagtatgtgggagaat

SEQ ID NO: 716433 - DNA, 33 bp, Homo sapien
ccattgaagacagtcaacctagaataacaaagc

SEQ ID NO: 716434 - DNA, 33 bp, Homo sapien
ccattgaagacagtcaccctagaataacaaagc

SEQ ID NO: 716435 - DNA, 33 bp, Homo sapien
aattctacttctaaaacaagactgtgctcattc

SEQ ID NO: 716436 - DNA, 33 bp, Homo sapien
aattctacttctaaaataagactgtgctcattc

SEQ ID NO: 716437 - DNA, 33 bp, Homo sapien
aacaggaactgaatacaatgggaaaataatacg

SEQ ID NO: 716438 - DNA, 33 bp, Homo sapien
aacaggaactgaatactatgggaaaataatacg

SEQ ID NO: 716439 - DNA, 33 bp, Homo sapien
atcagggaaggggacaagatgaccaggaagcat

SEQ ID NO: 716440 - DNA, 33 bp, Homo sapien
atcagggaaggggacaggatgaccaggaagcat

SEQ ID NO: 716441 - DNA, 33 bp, Homo sapien
attccagatgatgaaacaccagtgtcgagaatc

SEQ ID NO: 716442 - DNA, 33 bp, Homo sapien
attccagatgatgaaataccagtgtcgagaatc

SEQ ID NO: 716443 - DNA, 33 bp, Homo sapien
tttgaatttcgatttcaaggagcttgtatcaca

SEQ ID NO: 716444 - DNA, 33 bp, Homo sapien
tttgaatttcgatttcgaggagcttgtatcaca

SEQ ID NO: 716445 - DNA, 33 bp, Homo sapien
ttctggcaaatggaacaaggcggatgtgaggtt

SEQ ID NO: 716446 - DNA, 33 bp, Homo sapien
ttctggcaaatggaacgaggcggatgtgaggtt

SEQ ID NO: 716447 - DNA, 33 bp, Homo sapien
tcagggcagaatcagtcaattggtgttgctttt

SEQ ID NO: 716448 - DNA, 33 bp, Homo sapien
tcagggcagaatcagttaattggtgttgctttt

SEQ ID NO: 716449 - DNA, 33 bp, Homo sapien
atgcagcacatagtaaacccttgttctaagttc

SEQ ID NO: 716450 - DNA, 33 bp, Homo sapien
atgcagcacatagtaagcccttgttctaagttc

SEQ ID NO: 716451 - DNA, 33 bp, Homo sapien
atttggttctttatgcaatcatcaggaaataat

SEQ ID NO: 716452 - DNA, 33 bp, Homo sapien
atttggttctttatgccatcatcaggaaataat

SEQ ID NO: 716453 - DNA, 33 bp, Homo sapien
ataggtaaattgtcaccgaaatcttccatgcta

SEQ ID NO: 716454 - DNA, 33 bp, Homo sapien
ataggtaaattgtcactgaaatcttccatgcta

SEQ ID NO: 716455 - DNA, 33 bp, Homo sapien
caaactggagaccttacgtagttaattaacctg

SEQ ID NO: 716456 - DNA, 33 bp, Homo sapien
caaactggagaccttatgtagttaattaacctg

SEQ ID NO: 716457 - DNA, 33 bp, Homo sapien
tgtttcctttgtccttaaactggtttcccacag

SEQ ID NO: 716458 - DNA, 33 bp, Homo sapien
tgtttcctttgtccttgaactggtttcccacag

SEQ ID NO: 716459 - DNA, 33 bp, Homo sapien
aagaaaccacgaaagacactctgatggccagaa

SEQ ID NO: 716460 - DNA, 33 bp, Homo sapien
aagaaaccacgaaagatactctgatggccagaa

SEQ ID NO: 716461 - DNA, 33 bp, Homo sapien
acagccgtttgtgttgcactaagctctcaaggt

SEQ ID NO: 716462 - DNA, 33 bp, Homo sapien
acagccgtttgtgttgtactaagctctcaaggt

SEQ ID NO: 716463 - DNA, 33 bp, Homo sapien
ttgaatgaaaaagtgaccaatgaaacgacaaaa

SEQ ID NO: 716464 - DNA, 33 bp, Homo sapien
ttgaatgaaaaagtgatcaatgaaacgacaaaa

SEQ ID NO: 716465 - DNA, 33 bp, Homo sapien
gggtgagagagcataacgcccgggatttagaaa

SEQ ID NO: 716466 - DNA, 33 bp, Homo sapien
gggtgagagagcataatgcccgggatttagaaa

SEQ ID NO: 716467 - DNA, 33 bp, Homo sapien
cctctgagttaagatgcaatggcactggttggc

SEQ ID NO: 716468 - DNA, 33 bp, Homo sapien
cctctgagttaagatgtaatggcactggttggc

SEQ ID NO: 716469 - DNA, 33 bp, Homo sapien
ggggctaagataagaaagctcaggggtgagagg

SEQ ID NO: 716470 - DNA, 33 bp, Homo sapien
ggggctaagataagaacgctcaggggtgagagg

SEQ ID NO: 716471 - DNA, 33 bp, Homo sapien
tgcctgcctcactgtgaacacatcattctcatt

SEQ ID NO: 716472 - DNA, 33 bp, Homo sapien
tgcctgcctcactgtggacacatcattctcatt

SEQ ID NO: 716473 - DNA, 33 bp, Homo sapien
gcttgcaaagaaaaccaaacagttccatagagc

SEQ ID NO: 716474 - DNA, 33 bp, Homo sapien
gcttgcaaagaaaaccgaacagttccatagagc

SEQ ID NO: 716475 - DNA, 33 bp, Homo sapien
tataatgttttacctaacagacttgaagttttg

SEQ ID NO: 716476 - DNA, 33 bp, Homo sapien
tataatgttttacctatcagacttgaagttttg

SEQ ID NO: 716477 - DNA, 33 bp, Homo sapien
ttaatgcaggatcttcacatttcttatccacgc

SEQ ID NO: 716478 - DNA, 33 bp, Homo sapien
ttaatgcaggatcttcgcatttcttatccacgc

SEQ ID NO: 716479 - DNA, 33 bp, Homo sapien
caattgtgccccctgaaaaccaagcatgagtga

SEQ ID NO: 716480 - DNA, 33 bp, Homo sapien
caattgtgccccctgacaaccaagcatgagtga

SEQ ID NO: 716481 - DNA, 33 bp, Homo sapien
tatcatggaacatagacagatgtaaccagaatg

SEQ ID NO: 716482 - DNA, 33 bp, Homo sapien
tatcatggaacatagatagatgtaaccagaatg

SEQ ID NO: 716483 - DNA, 33 bp, Homo sapien
tttattgttcctatatcaattcacttaggttaa

SEQ ID NO: 716484 - DNA, 33 bp, Homo sapien
tttattgttcctatattaattcacttaggttaa

SEQ ID NO: 716485 - DNA, 33 bp, Homo sapien
ggaaaataaactgttacacatgcacatatatgt

SEQ ID NO: 716486 - DNA, 33 bp, Homo sapien
ggaaaataaactgttatacatgcacatatatgt

SEQ ID NO: 716487 - DNA, 33 bp, Homo sapien
aatttatgactcagtcacagaaacaattgaaac

SEQ ID NO: 716488 - DNA, 33 bp, Homo sapien
aatttatgactcagtcccagaaacaattgaaac

SEQ ID NO: 716489 - DNA, 33 bp, Homo sapien
aattccacctctttccacctctgcaagctaata

SEQ ID NO: 716490 - DNA, 33 bp, Homo sapien
aattccacctctttccgcctctgcaagctaata

SEQ ID NO: 716491 - DNA, 33 bp, Homo sapien
atacttttcaattccaagtcttatgagccaaaa

SEQ ID NO: 716492 - DNA, 33 bp, Homo sapien
atacttttcaattccaggtcttatgagccaaaa

SEQ ID NO: 716493 - DNA, 33 bp, Homo sapien
aagaatgagtgtctcaataatgtaccgcagtgt

SEQ ID NO: 716494 - DNA, 33 bp, Homo sapien
aagaatgagtgtctcagtaatgtaccgcagtgt

SEQ ID NO: 716495 - DNA, 33 bp, Homo sapien
ctactgacatcttaaacctgggatatcacagta

SEQ ID NO: 716496 - DNA, 33 bp, Homo sapien
ctactgacatcttaaatctgggatatcacagta

SEQ ID NO: 716497 - DNA, 33 bp, Homo sapien
gctttcagtggtcagacgaaggaaaaaggaaag

SEQ ID NO: 716498 - DNA, 33 bp, Homo sapien
gctttcagtggtcagatgaaggaaaaaggaaag

SEQ ID NO: 716499 - DNA, 33 bp, Homo sapien
gaaagaaaaaactgacaatatcaagggctagta

SEQ ID NO: 716500 - DNA, 33 bp, Homo sapien
gaaagaaaaaactgacgatatcaagggctagta

SEQ ID NO: 716501 - DNA, 33 bp, Homo sapien
cattttcaggagtgataagaacttcagggtgtc

SEQ ID NO: 716502 - DNA, 33 bp, Homo sapien
cattttcaggagtgatgagaacttcagggtgtc

SEQ ID NO: 716503 - DNA, 33 bp, Homo sapien
aacaaaagcattaggtaaaaatcaaagaaatgt

SEQ ID NO: 716504 - DNA, 33 bp, Homo sapien
aacaaaagcattaggtgaaaatcaaagaaatgt

SEQ ID NO: 716505 - DNA, 33 bp, Homo sapien
gaattaatttttagctcactgtaaatacatatg

SEQ ID NO: 716506 - DNA, 33 bp, Homo sapien
gaattaatttttagctgactgtaaatacatatg

SEQ ID NO: 716507 - DNA, 33 bp, Homo sapien
gtgtaaggaaggaagcccatagagaagatcctc

SEQ ID NO: 716508 - DNA, 33 bp, Homo sapien
gtgtaaggaaggaagctcatagagaagatcctc

SEQ ID NO: 716509 - DNA, 33 bp, Homo sapien
ttgagaaatcagataaaatggatggcagtttgc

SEQ ID NO: 716510 - DNA, 33 bp, Homo sapien
ttgagaaatcagataagatggatggcagtttgc

SEQ ID NO: 716511 - DNA, 33 bp, Homo sapien
ctctccatgccaagtaaaagactgtctctccat

SEQ ID NO: 716512 - DNA, 33 bp, Homo sapien
ctctccatgccaagtacaagactgtctctccat

SEQ ID NO: 716513 - DNA, 33 bp, Homo sapien
gctgtgaccactcctgcagttcctgcttcctga

SEQ ID NO: 716514 - DNA, 33 bp, Homo sapien
gctgtgaccactcctgtagttcctgcttcctga

SEQ ID NO: 716515 - DNA, 33 bp, Homo sapien
tttggctccaaaaacaagcatacagtgggcttc

SEQ ID NO: 716516 - DNA, 33 bp, Homo sapien
tttggctccaaaaacaggcatacagtgggcttc

SEQ ID NO: 716517 - DNA, 33 bp, Homo sapien
gatcctagacattaagcagaaatgatgaaagac

SEQ ID NO: 716518 - DNA, 33 bp, Homo sapien
gatcctagacattaaggagaaatgatgaaagac

SEQ ID NO: 716519 - DNA, 33 bp, Homo sapien
agcagtgaattagtgccattctatcagtaagtt

SEQ ID NO: 716520 - DNA, 33 bp, Homo sapien
agcagtgaattagtgctattctatcagtaagtt

SEQ ID NO: 716521 - DNA, 33 bp, Homo sapien
gaaagagggaccctacacgagaaagaaatagaa

SEQ ID NO: 716522 - DNA, 33 bp, Homo sapien
gaaagagggaccctacgcgagaaagaaatagaa

SEQ ID NO: 716523 - DNA, 33 bp, Homo sapien
gttctagtcctctgcacagggttttcgaaattt

SEQ ID NO: 716524 - DNA, 33 bp, Homo sapien
gttctagtcctctgcatagggttttcgaaattt

SEQ ID NO: 716525 - DNA, 33 bp, Homo sapien
aatgactcatattaacactgtagccaccctttg

SEQ ID NO: 716526 - DNA, 33 bp, Homo sapien
aatgactcatattaacgctgtagccaccctttg

SEQ ID NO: 716527 - DNA, 33 bp, Homo sapien
cataagcatctttacactagattcttctagaat

SEQ ID NO: 716528 - DNA, 33 bp, Homo sapien
cataagcatctttacagtagattcttctagaat

SEQ ID NO: 716529 - DNA, 33 bp, Homo sapien
ataacatggctgaatacagaattaaatactgaa

SEQ ID NO: 716530 - DNA, 33 bp, Homo sapien
ataacatggctgaatatagaattaaatactgaa

SEQ ID NO: 716531 - DNA, 33 bp, Homo sapien
gtgactaattggcttccattatttccctagagt

SEQ ID NO: 716532 - DNA, 33 bp, Homo sapien
gtgactaattggcttctattatttccctagagt

SEQ ID NO: 716533 - DNA, 33 bp, Homo sapien
gttgtttaagccactaaagttgagacaatttgt

SEQ ID NO: 716534 - DNA, 33 bp, Homo sapien
gttgtttaagccactatagttgagacaatttgt

SEQ ID NO: 716535 - DNA, 33 bp, Homo sapien
aaacaccatttgtagaacatctcctggattgct

SEQ ID NO: 716536 - DNA, 33 bp, Homo sapien
aaacaccatttgtagatcatctcctggattgct

SEQ ID NO: 716537 - DNA, 33 bp, Homo sapien
tgttgtgtggaatttcgcacaaaccctagtagg

SEQ ID NO: 716538 - DNA, 33 bp, Homo sapien
tgttgtgtggaatttctcacaaaccctagtagg

SEQ ID NO: 716539 - DNA, 33 bp, Homo sapien
aaatctgaaagatgcaaccatcaactctgatag

SEQ ID NO: 716540 - DNA, 33 bp, Homo sapien
aaatctgaaagatgcagccatcaactctgatag

SEQ ID NO: 716541 - DNA, 33 bp, Homo sapien
ataatctccattaagaacgctaggttaatttta

SEQ ID NO: 716542 - DNA, 33 bp, Homo sapien
ataatctccattaagagcgctaggttaatttta

SEQ ID NO: 716543 - DNA, 33 bp, Homo sapien
cattactagcatcaacaatattaattacatggc

SEQ ID NO: 716544 - DNA, 33 bp, Homo sapien
cattactagcatcaaccatattaattacatggc

SEQ ID NO: 716545 - DNA, 33 bp, Homo sapien
aggcccaacattacagcaccacagtctgtgctc

SEQ ID NO: 716546 - DNA, 33 bp, Homo sapien
aggcccaacattacagtaccacagtctgtgctc

SEQ ID NO: 716547 - DNA, 33 bp, Homo sapien
tcccgtaattcaaatcagacactatctacctgg

SEQ ID NO: 716548 - DNA, 33 bp, Homo sapien
tcccgtaattcaaatcggacactatctacctgg

SEQ ID NO: 716549 - DNA, 33 bp, Homo sapien
atgcaaagcaacaaaaagtatttagtgaagaat

SEQ ID NO: 716550 - DNA, 33 bp, Homo sapien
atgcaaagcaacaaaaggtatttagtgaagaat

SEQ ID NO: 716551 - DNA, 33 bp, Homo sapien
acccagcttgactatcaaattttttactttagg

SEQ ID NO: 716552 - DNA, 33 bp, Homo sapien
acccagcttgactatcgaattttttactttagg

SEQ ID NO: 716553 - DNA, 33 bp, Homo sapien
tgtgccctgattgttccaattaccacaatcaaa

SEQ ID NO: 716554 - DNA, 33 bp, Homo sapien
tgtgccctgattgttctaattaccacaatcaaa

SEQ ID NO: 716555 - DNA, 33 bp, Homo sapien
caatcagggcacaaaccgcaaggtcactggcaa

SEQ ID NO: 716556 - DNA, 33 bp, Homo sapien
caatcagggcacaaactgcaaggtcactggcaa

SEQ ID NO: 716557 - DNA, 33 bp, Homo sapien
agtccaagaggatacaactgagaaggcaggtag

SEQ ID NO: 716558 - DNA, 33 bp, Homo sapien
agtccaagaggatacagctgagaaggcaggtag

SEQ ID NO: 716559 - DNA, 33 bp, Homo sapien
attaattcaggaaaagacaagatgcgtggccct

SEQ ID NO: 716560 - DNA, 33 bp, Homo sapien
attaattcaggaaaaggcaagatgcgtggccct

SEQ ID NO: 716561 - DNA, 33 bp, Homo sapien
tatagtctctggccaaagaaagctgttcagtta

SEQ ID NO: 716562 - DNA, 33 bp, Homo sapien
tatagtctctggccaatgaaagctgttcagtta

SEQ ID NO: 716563 - DNA, 33 bp, Homo sapien
agaagaattagtatgcagaatgtaatcatacct

SEQ ID NO: 716564 - DNA, 33 bp, Homo sapien
agaagaattagtatgcggaatgtaatcatacct

SEQ ID NO: 716565 - DNA, 33 bp, Homo sapien
tgaggtaaaatgttaacaattaggaattctggg

SEQ ID NO: 716566 - DNA, 33 bp, Homo sapien
tgaggtaaaatgttaataattaggaattctggg

SEQ ID NO: 716567 - DNA, 33 bp, Homo sapien
ataaccaccataatcaccctggctttctctttc

SEQ ID NO: 716568 - DNA, 33 bp, Homo sapien
ataaccaccataatcatcctggctttctctttc

SEQ ID NO: 716569 - DNA, 33 bp, Homo sapien
ctggcatttcttttcacgtagcattatattaaa

SEQ ID NO: 716570 - DNA, 33 bp, Homo sapien
ctggcatttcttttcatgtagcattatattaaa

SEQ ID NO: 716571 - DNA, 33 bp, Homo sapien
gggaaacagggtatacaagtagaagtgacttgc

SEQ ID NO: 716572 - DNA, 33 bp, Homo sapien
gggaaacagggtatacgagtagaagtgacttgc

SEQ ID NO: 716573 - DNA, 33 bp, Homo sapien
gtattaagtactttttagcagttaagtccactc

SEQ ID NO: 716574 - DNA, 33 bp, Homo sapien
gtattaagtactttttcgcagttaagtccactc

SEQ ID NO: 716575 - DNA, 33 bp, Homo sapien
tggatcttgttgttaccatggatgacatttgtc

SEQ ID NO: 716576 - DNA, 33 bp, Homo sapien
tggatcttgttgttactatggatgacatttgtc

SEQ ID NO: 716577 - DNA, 33 bp, Homo sapien
aatagcagaaatgataactctaacttttaagag

SEQ ID NO: 716578 - DNA, 33 bp, Homo sapien
aatagcagaaatgatatctctaacttttaagag

SEQ ID NO: 716579 - DNA, 33 bp, Homo sapien
tttactgcacagccacaaatgccttggggtgaa

SEQ ID NO: 716580 - DNA, 33 bp, Homo sapien
tttactgcacagccacgaatgccttggggtgaa

SEQ ID NO: 716581 - DNA, 33 bp, Homo sapien
catcagccaattttacagctgcaatctacttag

SEQ ID NO: 716582 - DNA, 33 bp, Homo sapien
catcagccaattttacggctgcaatctacttag

SEQ ID NO: 716583 - DNA, 33 bp, Homo sapien
aatctccactaaatacgaatgactgcttatagt

SEQ ID NO: 716584 - DNA, 33 bp, Homo sapien
aatctccactaaatactaatgactgcttatagt

SEQ ID NO: 716585 - DNA, 33 bp, Homo sapien
ctttgtaggacaattacattaatcccaaagtta

SEQ ID NO: 716586 - DNA, 33 bp, Homo sapien
ctttgtaggacaattatattaatcccaaagtta

SEQ ID NO: 716587 - DNA, 33 bp, Homo sapien
cttcctacttatgtcacgtaactttgggattaa

SEQ ID NO: 716588 - DNA, 33 bp, Homo sapien
cttcctacttatgtcaggtaactttgggattaa

SEQ ID NO: 716589 - DNA, 33 bp, Homo sapien
gatggcaaatccttaccgggcttctagtgaagt

SEQ ID NO: 716590 - DNA, 33 bp, Homo sapien
gatggcaaatccttactgggcttctagtgaagt

SEQ ID NO: 716591 - DNA, 33 bp, Homo sapien
tttgtacaactacctaacaactccgtgccactt

SEQ ID NO: 716592 - DNA, 33 bp, Homo sapien
tttgtacaactacctaccaactccgtgccactt

SEQ ID NO: 716593 - DNA, 33 bp, Homo sapien
gtctccattagatcatcaggtgacagtaatagt

SEQ ID NO: 716594 - DNA, 33 bp, Homo sapien
gtctccattagatcattaggtgacagtaatagt

SEQ ID NO: 716595 - DNA, 33 bp, Homo sapien
ttcagcctggagtgaaatgacagattgagaccc

SEQ ID NO: 716596 - DNA, 33 bp, Homo sapien
ttcagcctggagtgaagtgacagattgagaccc

SEQ ID NO: 716597 - DNA, 33 bp, Homo sapien
attgaaaattggtgtacgcagataacaaaaatg

SEQ ID NO: 716598 - DNA, 33 bp, Homo sapien
attgaaaattggtgtatgcagataacaaaaatg

SEQ ID NO: 716599 - DNA, 33 bp, Homo sapien
tttttaactcattgaagaactaccttaatgatc

SEQ ID NO: 716600 - DNA, 33 bp, Homo sapien
tttttaactcattgaataactaccttaatgatc

SEQ ID NO: 716601 - DNA, 33 bp, Homo sapien
taatttcacttatggccgaagatgtttggtaga

SEQ ID NO: 716602 - DNA, 33 bp, Homo sapien
taatttcacttatggctgaagatgtttggtaga

SEQ ID NO: 716603 - DNA, 33 bp, Homo sapien
ctttggtcgcctccaacctttcaaactagttat

SEQ ID NO: 716604 - DNA, 33 bp, Homo sapien
ctttggtcgcctccaatctttcaaactagttat

SEQ ID NO: 716605 - DNA, 33 bp, Homo sapien
tcttattatgacattcccacaaaaactgcaagg

SEQ ID NO: 716606 - DNA, 33 bp, Homo sapien
tcttattatgacattctcacaaaaactgcaagg

SEQ ID NO: 716607 - DNA, 33 bp, Homo sapien
aactgcaaggtagttgaagttttctaaatcata

SEQ ID NO: 716608 - DNA, 33 bp, Homo sapien
aactgcaaggtagttgcagttttctaaatcata

SEQ ID NO: 716609 - DNA, 33 bp, Homo sapien
atccatcaaatgacacacatactaaaagaataa

SEQ ID NO: 716610 - DNA, 33 bp, Homo sapien
atccatcaaatgacacccatactaaaagaataa

SEQ ID NO: 716611 - DNA, 33 bp, Homo sapien
agattagtctttgataaagttacttcatgtgat

SEQ ID NO: 716612 - DNA, 33 bp, Homo sapien
agattagtctttgatagagttacttcatgtgat

SEQ ID NO: 716613 - DNA, 33 bp, Homo sapien
actgttctctgaaatacaattatgtaggtacag

SEQ ID NO: 716614 - DNA, 33 bp, Homo sapien
actgttctctgaaatagaattatgtaggtacag

SEQ ID NO: 716615 - DNA, 33 bp, Homo sapien
gtcagaggtatgtgtacgtaggtgaatgtgaac

SEQ ID NO: 716616 - DNA, 33 bp, Homo sapien
gtcagaggtatgtgtaggtaggtgaatgtgaac

SEQ ID NO: 716617 - DNA, 33 bp, Homo sapien
aatgatctcccaacaggatgcattaggctttct

SEQ ID NO: 716618 - DNA, 33 bp, Homo sapien
aatgatctcccaacagtatgcattaggctttct

SEQ ID NO: 716619 - DNA, 33 bp, Homo sapien
cactagtaatgagtagaagagctttaataagtc

SEQ ID NO: 716620 - DNA, 33 bp, Homo sapien
cactagtaatgagtagtagagctttaataagtc

SEQ ID NO: 716621 - DNA, 33 bp, Homo sapien
aatacagagaacagtcaactatcatcatcattt

SEQ ID NO: 716622 - DNA, 33 bp, Homo sapien
aatacagagaacagtcgactatcatcatcattt

SEQ ID NO: 716623 - DNA, 33 bp, Homo sapien
ttttactgtcttctaaagtcattaattggcaga

SEQ ID NO: 716624 - DNA, 33 bp, Homo sapien
ttttactgtcttctaaggtcattaattggcaga

SEQ ID NO: 716625 - DNA, 33 bp, Homo sapien
tcatttgttgctttaaaaaagaacagcaaagga

SEQ ID NO: 716626 - DNA, 33 bp, Homo sapien
tcatttgttgctttaacaaagaacagcaaagga

SEQ ID NO: 716627 - DNA, 33 bp, Homo sapien
tggtaaactaattcaaaactttctcctccctca

SEQ ID NO: 716628 - DNA, 33 bp, Homo sapien
tggtaaactaattcaatactttctcctccctca

SEQ ID NO: 716629 - DNA, 33 bp, Homo sapien
gtagcaatcagaggtgaagactgagagcaagcg

SEQ ID NO: 716630 - DNA, 33 bp, Homo sapien
gtagcaatcagaggtggagactgagagcaagcg

SEQ ID NO: 716631 - DNA, 33 bp, Homo sapien
agtttcaagagtggacaaaaatataaaatttgc

SEQ ID NO: 716632 - DNA, 33 bp, Homo sapien
agtttcaagagtggacgaaaatataaaatttgc

SEQ ID NO: 716633 - DNA, 33 bp, Homo sapien
tgcatctctaaatgtacagccatattcttatat

SEQ ID NO: 716634 - DNA, 33 bp, Homo sapien
tgcatctctaaatgtatagccatattcttatat

SEQ ID NO: 716635 - DNA, 33 bp, Homo sapien
acctgctatgtgaaagacatttagttaaagctg

SEQ ID NO: 716636 - DNA, 33 bp, Homo sapien
acctgctatgtgaaaggcatttagttaaagctg

SEQ ID NO: 716637 - DNA, 33 bp, Homo sapien
tcaaaaaatgttaatacgtgctatgagaaaaca

SEQ ID NO: 716638 - DNA, 33 bp, Homo sapien
tcaaaaaatgttaatatgtgctatgagaaaaca

SEQ ID NO: 716639 - DNA, 33 bp, Homo sapien
ctccaggacctcaaataagagaatccctacatg

SEQ ID NO: 716640 - DNA, 33 bp, Homo sapien
ctccaggacctcaaatgagagaatccctacatg

SEQ ID NO: 716641 - DNA, 33 bp, Homo sapien
tctaactgcctacttaacttttcccacaattcc

SEQ ID NO: 716642 - DNA, 33 bp, Homo sapien
tctaactgcctacttagcttttcccacaattcc

SEQ ID NO: 716643 - DNA, 33 bp, Homo sapien
aagctaagtaggaagcaaagcaatttggaaagg

SEQ ID NO: 716644 - DNA, 33 bp, Homo sapien
aagctaagtaggaagcgaagcaatttggaaagg

SEQ ID NO: 716645 - DNA, 33 bp, Homo sapien
tttataacactctgaaatctcataagctattct

SEQ ID NO: 716646 - DNA, 33 bp, Homo sapien
tttataacactctgaagtctcataagctattct

SEQ ID NO: 716647 - DNA, 33 bp, Homo sapien
ctaaccagttctgacacgaagaatatctttaag

SEQ ID NO: 716648 - DNA, 33 bp, Homo sapien
ctaaccagttctgacatgaagaatatctttaag

SEQ ID NO: 716649 - DNA, 33 bp, Homo sapien
cataatagcactgaaacttaagaatgtgtccat

SEQ ID NO: 716650 - DNA, 33 bp, Homo sapien
cataatagcactgaaagttaagaatgtgtccat

SEQ ID NO: 716651 - DNA, 33 bp, Homo sapien
gtcataaagaaaatgacgctttattggagtttg

SEQ ID NO: 716652 - DNA, 33 bp, Homo sapien
gtcataaagaaaatgatgctttattggagtttg

SEQ ID NO: 716653 - DNA, 33 bp, Homo sapien
aagaaactgtggaaaaaattagatttatctgca

SEQ ID NO: 716654 - DNA, 33 bp, Homo sapien
aagaaactgtggaaaacattagatttatctgca

SEQ ID NO: 716655 - DNA, 33 bp, Homo sapien
tgtgctataaggagaacttaagaaactgtggaa

SEQ ID NO: 716656 - DNA, 33 bp, Homo sapien
tgtgctataaggagaatttaagaaactgtggaa

SEQ ID NO: 716657 - DNA, 33 bp, Homo sapien
tcccgcgacagacaaagggttacgcaaactttc

SEQ ID NO: 716658 - DNA, 33 bp, Homo sapien
tcccgcgacagacaaatggttacgcaaactttc

SEQ ID NO: 716659 - DNA, 33 bp, Homo sapien
catggaaaatacctcaatccaactgaccaaccg

SEQ ID NO: 716660 - DNA, 33 bp, Homo sapien
catggaaaatacctcagtccaactgaccaaccg

SEQ ID NO: 716661 - DNA, 33 bp, Homo sapien
atatacatgtagtatgaacaagacttccgtatc

SEQ ID NO: 716662 - DNA, 33 bp, Homo sapien
atatacatgtagtatggacaagacttccgtatc

SEQ ID NO: 716663 - DNA, 33 bp, Homo sapien
gctacagaaagtccccaaagattgctgaaatgg

SEQ ID NO: 716664 - DNA, 33 bp, Homo sapien
gctacagaaagtccccgaagattgctgaaatgg

SEQ ID NO: 716665 - DNA, 33 bp, Homo sapien
ggctttcctatcaataactaagggatgaagata

SEQ ID NO: 716666 - DNA, 33 bp, Homo sapien
ggctttcctatcaatatctaagggatgaagata

SEQ ID NO: 716667 - DNA, 33 bp, Homo sapien
ctcaagaatgtactggaaaaagtcattggtaat

SEQ ID NO: 716668 - DNA, 33 bp, Homo sapien
ctcaagaatgtactgggaaaagtcattggtaat

SEQ ID NO: 716669 - DNA, 33 bp, Homo sapien
ttttaaaaaattatgacggagtaagtcaagatg

SEQ ID NO: 716670 - DNA, 33 bp, Homo sapien
ttttaaaaaattatgatggagtaagtcaagatg

SEQ ID NO: 716671 - DNA, 33 bp, Homo sapien
ataattccataaacaccgtcttcttggttttga

SEQ ID NO: 716672 - DNA, 33 bp, Homo sapien
ataattccataaacactgtcttcttggttttga

SEQ ID NO: 716673 - DNA, 33 bp, Homo sapien
ccttgtctccggagaaataaggaagaaggtttg

SEQ ID NO: 716674 - DNA, 33 bp, Homo sapien
ccttgtctccggagaagtaaggaagaaggtttg

SEQ ID NO: 716675 - DNA, 33 bp, Homo sapien
tgaactgaagataaaaccccaagtcttcaggat

SEQ ID NO: 716676 - DNA, 33 bp, Homo sapien
tgaactgaagataaaatcccaagtcttcaggat

SEQ ID NO: 716677 - DNA, 33 bp, Homo sapien
gctgataggtagtacaagcaggaaacccacaga

SEQ ID NO: 716678 - DNA, 33 bp, Homo sapien
gctgataggtagtacaggcaggaaacccacaga

SEQ ID NO: 716679 - DNA, 33 bp, Homo sapien
cctgatggatcaatgaagtgtggataagtagaa

SEQ ID NO: 716680 - DNA, 33 bp, Homo sapien
cctgatggatcaatgaggtgtggataagtagaa

SEQ ID NO: 716681 - DNA, 33 bp, Homo sapien
tctagaatttatcaccaatttctttagacattt

SEQ ID NO: 716682 - DNA, 33 bp, Homo sapien
tctagaatttatcacctatttctttagacattt

SEQ ID NO: 716683 - DNA, 33 bp, Homo sapien
aggaaatgcaatcatacaaggtgtgcagaaagt

SEQ ID NO: 716684 - DNA, 33 bp, Homo sapien
aggaaatgcaatcatataaggtgtgcagaaagt

SEQ ID NO: 716685 - DNA, 33 bp, Homo sapien
gaggaagagacacgaaagtagttccagaagtgg

SEQ ID NO: 716686 - DNA, 33 bp, Homo sapien
gaggaagagacacgaacgtagttccagaagtgg

SEQ ID NO: 716687 - DNA, 33 bp, Homo sapien
aaatgactagaaatgcacttgagttggactaaa

SEQ ID NO: 716688 - DNA, 33 bp, Homo sapien
aaatgactagaaatgctcttgagttggactaaa

SEQ ID NO: 716689 - DNA, 33 bp, Homo sapien
agattgcaaaattgaaaggattgtctgttgccc

SEQ ID NO: 716690 - DNA, 33 bp, Homo sapien
agattgcaaaattgaagggattgtctgttgccc

SEQ ID NO: 716691 - DNA, 33 bp, Homo sapien
ttagcacagtgctcaaaaacgtttggttgatct

SEQ ID NO: 716692 - DNA, 33 bp, Homo sapien
ttagcacagtgctcaataacgtttggttgatct

SEQ ID NO: 716693 - DNA, 33 bp, Homo sapien
ccataatcatctgtgcaaatactttataataaa

SEQ ID NO: 716694 - DNA, 33 bp, Homo sapien
ccataatcatctgtgcgaatactttataataaa

SEQ ID NO: 716695 - DNA, 33 bp, Homo sapien
ttatgatgacacaacaaaaagaaagataggtac

SEQ ID NO: 716696 - DNA, 33 bp, Homo sapien
ttatgatgacacaacagaaagaaagataggtac

SEQ ID NO: 716697 - DNA, 33 bp, Homo sapien
aattgtaacatcttggaaaaagcttttaaaaaa

SEQ ID NO: 716698 - DNA, 33 bp, Homo sapien
aattgtaacatcttggcaaaagcttttaaaaaa

SEQ ID NO: 716699 - DNA, 33 bp, Homo sapien
gacaaaattcatgtcactcttagttgggcgtag

SEQ ID NO: 716700 - DNA, 33 bp, Homo sapien
gacaaaattcatgtcattcttagttgggcgtag

SEQ ID NO: 716701 - DNA, 33 bp, Homo sapien
ttcatgctattttaaactctcactaccatgtac

SEQ ID NO: 716702 - DNA, 33 bp, Homo sapien
ttcatgctattttaaattctcactaccatgtac

SEQ ID NO: 716703 - DNA, 33 bp, Homo sapien
gacatggggaagaggaatagaagcagtctgtga

SEQ ID NO: 716704 - DNA, 33 bp, Homo sapien
gacatggggaagaggagtagaagcagtctgtga

SEQ ID NO: 716705 - DNA, 33 bp, Homo sapien
gagagaacacacaatagggaaaaattaggggta

SEQ ID NO: 716706 - DNA, 33 bp, Homo sapien
gagagaacacacaatatggaaaaattaggggta

SEQ ID NO: 716707 - DNA, 33 bp, Homo sapien
ttcacagtgaagtagacagcttgtagagaaaaa

SEQ ID NO: 716708 - DNA, 33 bp, Homo sapien
ttcacagtgaagtagatagcttgtagagaaaaa

SEQ ID NO: 716709 - DNA, 33 bp, Homo sapien
ctatgttccagcacccacttaaaaagaaatcag

SEQ ID NO: 716710 - DNA, 33 bp, Homo sapien
ctatgttccagcacccgcttaaaaagaaatcag

SEQ ID NO: 716711 - DNA, 33 bp, Homo sapien
taaaggagaaacttacgcatacatatatgcaca

SEQ ID NO: 716712 - DNA, 33 bp, Homo sapien
taaaggagaaacttactcatacatatatgcaca

SEQ ID NO: 716713 - DNA, 33 bp, Homo sapien
ttttctttgaagtgtactaagttctgtgagttt

SEQ ID NO: 716714 - DNA, 33 bp, Homo sapien
ttttctttgaagtgtattaagttctgtgagttt

SEQ ID NO: 716715 - DNA, 33 bp, Homo sapien
ttacttggtgcaataaatcagcgtatttatttt

SEQ ID NO: 716716 - DNA, 33 bp, Homo sapien
ttacttggtgcaataagtcagcgtatttatttt

SEQ ID NO: 716717 - DNA, 33 bp, Homo sapien
gtagctccttttcctaaatacctgtgagcaaca

SEQ ID NO: 716718 - DNA, 33 bp, Homo sapien
gtagctccttttcctatatacctgtgagcaaca

SEQ ID NO: 716719 - DNA, 33 bp, Homo sapien
tccactataaaataaacgtgcgtaaattgtgtg

SEQ ID NO: 716720 - DNA, 33 bp, Homo sapien
tccactataaaataaatgtgcgtaaattgtgtg

SEQ ID NO: 716721 - DNA, 33 bp, Homo sapien
ggatctataccaaaagcaggagagacaaatcca

SEQ ID NO: 716722 - DNA, 33 bp, Homo sapien
ggatctataccaaaagtaggagagacaaatcca

SEQ ID NO: 716723 - DNA, 33 bp, Homo sapien
ccaccttgttgagatacgtgactgttgtggagg

SEQ ID NO: 716724 - DNA, 33 bp, Homo sapien
ccaccttgttgagatatgtgactgttgtggagg

SEQ ID NO: 716725 - DNA, 33 bp, Homo sapien
tgatcagcttgaaaaacgtagagggcaactcaa

SEQ ID NO: 716726 - DNA, 33 bp, Homo sapien
tgatcagcttgaaaaatgtagagggcaactcaa

SEQ ID NO: 716727 - DNA, 33 bp, Homo sapien
tttgatatgaggtatacgaattattgacagagc

SEQ ID NO: 716728 - DNA, 33 bp, Homo sapien
tttgatatgaggtatatgaattattgacagagc

SEQ ID NO: 716729 - DNA, 33 bp, Homo sapien
atatagatccatgtacacatttggaaatataac

SEQ ID NO: 716730 - DNA, 33 bp, Homo sapien
atatagatccatgtacccatttggaaatataac

SEQ ID NO: 716731 - DNA, 33 bp, Homo sapien
ataaaagaagtgcaaaagaggaattcatatata

SEQ ID NO: 716732 - DNA, 33 bp, Homo sapien
ataaaagaagtgcaaaggaggaattcatatata

SEQ ID NO: 716733 - DNA, 33 bp, Homo sapien
aagtgcaaattttgcaaaagaaaaatacagact

SEQ ID NO: 716734 - DNA, 33 bp, Homo sapien
aagtgcaaattttgcagaagaaaaatacagact

SEQ ID NO: 716735 - DNA, 33 bp, Homo sapien
tagattttcaatccaaatggtatctgtttataa

SEQ ID NO: 716736 - DNA, 33 bp, Homo sapien
tagattttcaatccaagtggtatctgtttataa

SEQ ID NO: 716737 - DNA, 33 bp, Homo sapien
tcagggagcaaagaacggacaatattatgaaca

SEQ ID NO: 716738 - DNA, 33 bp, Homo sapien
tcagggagcaaagaactgacaatattatgaaca

SEQ ID NO: 716739 - DNA, 33 bp, Homo sapien
gtagatgattttcataactattctaagagctac

SEQ ID NO: 716740 - DNA, 33 bp, Homo sapien
gtagatgattttcatagctattctaagagctac

SEQ ID NO: 716741 - DNA, 33 bp, Homo sapien
taaacatagaatttcaaagttttaaatgcatga

SEQ ID NO: 716742 - DNA, 33 bp, Homo sapien
taaacatagaatttcagagttttaaatgcatga

SEQ ID NO: 716743 - DNA, 33 bp, Homo sapien
atggtgtcaaaggggagcctcatgttcagcatt

SEQ ID NO: 716744 - DNA, 33 bp, Homo sapien
atggtgtcaaaggggatcctcatgttcagcatt

SEQ ID NO: 716745 - DNA, 33 bp, Homo sapien
agcttatgaggaccaacgtgaaatgcccatcca

SEQ ID NO: 716746 - DNA, 33 bp, Homo sapien
agcttatgaggaccaatgtgaaatgcccatcca

SEQ ID NO: 716747 - DNA, 33 bp, Homo sapien
atgaaaatatgttaaaacggatttccaattgat

SEQ ID NO: 716748 - DNA, 33 bp, Homo sapien
atgaaaatatgttaaagcggatttccaattgat

SEQ ID NO: 716749 - DNA, 33 bp, Homo sapien
ttaattaattaagtgtaaagtaactgctcaggt

SEQ ID NO: 716750 - DNA, 33 bp, Homo sapien
ttaattaattaagtgtgaagtaactgctcaggt

SEQ ID NO: 716751 - DNA, 33 bp, Homo sapien
ttgtatggccagtttacaactatcgtactcata

SEQ ID NO: 716752 - DNA, 33 bp, Homo sapien
ttgtatggccagtttataactatcgtactcata

SEQ ID NO: 716753 - DNA, 33 bp, Homo sapien
gctgtcacaatttgtacgtttgttgggcaaaat

SEQ ID NO: 716754 - DNA, 33 bp, Homo sapien
gctgtcacaatttgtatgtttgttgggcaaaat

SEQ ID NO: 716755 - DNA, 33 bp, Homo sapien
cactttagttatgccacgtcgctacagttttca

SEQ ID NO: 716756 - DNA, 33 bp, Homo sapien
cactttagttatgccatgtcgctacagttttca

SEQ ID NO: 716757 - DNA, 33 bp, Homo sapien
atattctcttacatcacaaagtaagtatcaaaa

SEQ ID NO: 716758 - DNA, 33 bp, Homo sapien
atattctcttacatcagaaagtaagtatcaaaa

SEQ ID NO: 716759 - DNA, 33 bp, Homo sapien
aagaacatagcactaaccaggaattagacaaga

SEQ ID NO: 716760 - DNA, 33 bp, Homo sapien
aagaacatagcactaatcaggaattagacaaga

SEQ ID NO: 716761 - DNA, 33 bp, Homo sapien
taattgatggaagtgaatagagaactggtacat

SEQ ID NO: 716762 - DNA, 33 bp, Homo sapien
taattgatggaagtgagtagagaactggtacat

SEQ ID NO: 716763 - DNA, 33 bp, Homo sapien
ccatttcagttatcgacgatccagcccagtggc

SEQ ID NO: 716764 - DNA, 33 bp, Homo sapien
ccatttcagttatcgatgatccagcccagtggc

SEQ ID NO: 716765 - DNA, 33 bp, Homo sapien
tcaaagatgattacaacaagagatatttttcat

SEQ ID NO: 716766 - DNA, 33 bp, Homo sapien
tcaaagatgattacaagaagagatatttttcat

SEQ ID NO: 716767 - DNA, 33 bp, Homo sapien
tcttattaccatttggacaatttcacgtctctt

SEQ ID NO: 716768 - DNA, 33 bp, Homo sapien
tcttattaccatttgggcaatttcacgtctctt

SEQ ID NO: 716769 - DNA, 33 bp, Homo sapien
tttatgactggaatgaaaaaaataatgctgaat

SEQ ID NO: 716770 - DNA, 33 bp, Homo sapien
tttatgactggaatgagaaaaataatgctgaat

SEQ ID NO: 716771 - DNA, 33 bp, Homo sapien
tactatgtgcaatacaatgtagctggaatatag

SEQ ID NO: 716772 - DNA, 33 bp, Homo sapien
tactatgtgcaatacagtgtagctggaatatag

SEQ ID NO: 716773 - DNA, 33 bp, Homo sapien
atataattttagcagtcaaaagatcttaggaat

SEQ ID NO: 716774 - DNA, 33 bp, Homo sapien
atataattttagcagtgaaaagatcttaggaat

SEQ ID NO: 716775 - DNA, 33 bp, Homo sapien
ttcttcagtccctctaccttgcagaatcaccct

SEQ ID NO: 716776 - DNA, 33 bp, Homo sapien
ttcttcagtccctctatcttgcagaatcaccct

SEQ ID NO: 716777 - DNA, 33 bp, Homo sapien
ctcttatagagaagacaaatatgaactgagcat

SEQ ID NO: 716778 - DNA, 33 bp, Homo sapien
ctcttatagagaagacgaatatgaactgagcat

SEQ ID NO: 716779 - DNA, 33 bp, Homo sapien
gaattctgttagttaaaggtttccaagaaaatt

SEQ ID NO: 716780 - DNA, 33 bp, Homo sapien
gaattctgttagttaatggtttccaagaaaatt

SEQ ID NO: 716781 - DNA, 33 bp, Homo sapien
agattgacatcttcacagaaactgcagacgtgg

SEQ ID NO: 716782 - DNA, 33 bp, Homo sapien
agattgacatcttcacggaaactgcagacgtgg

SEQ ID NO: 716783 - DNA, 33 bp, Homo sapien
tatggagtccataaaaagtatgctgattttcac

SEQ ID NO: 716784 - DNA, 33 bp, Homo sapien
tatggagtccataaaaggtatgctgattttcac

SEQ ID NO: 716785 - DNA, 33 bp, Homo sapien
taattttcactttatacgtctcgtcacttcatt

SEQ ID NO: 716786 - DNA, 33 bp, Homo sapien
taattttcactttatatgtctcgtcacttcatt

SEQ ID NO: 716787 - DNA, 33 bp, Homo sapien
aaataaatgaatgcaaagcacataactaccatt

SEQ ID NO: 716788 - DNA, 33 bp, Homo sapien
aaataaatgaatgcaaggcacataactaccatt

SEQ ID NO: 716789 - DNA, 33 bp, Homo sapien
aagtgacgtttttccacgaaggataagtgggta

SEQ ID NO: 716790 - DNA, 33 bp, Homo sapien
aagtgacgtttttccatgaaggataagtgggta

SEQ ID NO: 716791 - DNA, 33 bp, Homo sapien
gtatcgcactttccacaaagagttccaagtttc

SEQ ID NO: 716792 - DNA, 33 bp, Homo sapien
gtatcgcactttccacgaagagttccaagtttc

SEQ ID NO: 716793 - DNA, 33 bp, Homo sapien
aggttaaatatgtgaaagaaagtatctagtgct

SEQ ID NO: 716794 - DNA, 33 bp, Homo sapien
aggttaaatatgtgaaggaaagtatctagtgct

SEQ ID NO: 716795 - DNA, 33 bp, Homo sapien
ggcccatttgcaacacaaactgcaacaactatc

SEQ ID NO: 716796 - DNA, 33 bp, Homo sapien
ggcccatttgcaacacgaactgcaacaactatc

SEQ ID NO: 716797 - DNA, 33 bp, Homo sapien; identical to SEQ ID NO: 716795

SEQ ID NO: 716798 - DNA, 33 bp, Homo sapien; identical to SEQ ID NO: 716796

SEQ ID NO: 716799 - DNA, 33 bp, Homo sapien
gtcatatgttcagagcaagcattctattttgta

SEQ ID NO: 716800 - DNA, 33 bp, Homo sapien
gtcatatgttcagagcgagcattctattttgta

SEQ ID NO: 716801 - DNA, 33 bp, Homo sapien
taatactatgggtagacagttttccaaattcat

SEQ ID NO: 716802 - DNA, 33 bp, Homo sapien
taatactatgggtagatagttttccaaattcat

SEQ ID NO: 716803 - DNA, 33 bp, Homo sapien
acggtctagagatataaagctacaaaaatatcc

SEQ ID NO: 716804 - DNA, 33 bp, Homo sapien
acggtctagagatatatagctacaaaaatatcc

SEQ ID NO: 716805 - DNA, 33 bp, Homo sapien
tctcatatttaggggaggctaagctctcgaaga

SEQ ID NO: 716806 - DNA, 33 bp, Homo sapien
tctcatatttaggggatgctaagctctcgaaga

SEQ ID NO: 716807 - DNA, 33 bp, Homo sapien
ctaaatgcaatcccccaaggacaggagctaaag

SEQ ID NO: 716808 - DNA, 33 bp, Homo sapien
ctaaatgcaatcccccgaggacaggagctaaag

SEQ ID NO: 716809 - DNA, 33 bp, Homo sapien
attatatgatatgcaaattctttttatgccagg

SEQ ID NO: 716810 - DNA, 33 bp, Homo sapien
attatatgatatgcaacttctttttatgccagg

SEQ ID NO: 716811 - DNA, 33 bp, Homo sapien
cctctgtttgagaatgaaggtcaagaaaatcac

SEQ ID NO: 716812 - DNA, 33 bp, Homo sapien
cctctgtttgagaatggaggtcaagaaaatcac

SEQ ID NO: 716813 - DNA, 33 bp, Homo sapien
tgtaataaatacctgaaccaaactttaaatgta

SEQ ID NO: 716814 - DNA, 33 bp, Homo sapien
tgtaataaatacctgatccaaactttaaatgta

SEQ ID NO: 716815 - DNA, 33 bp, Homo sapien
tatgaagcgaaagaggcaaactgaaaaggctac

SEQ ID NO: 716816 - DNA, 33 bp, Homo sapien
tatgaagcgaaagaggtaaactgaaaaggctac

SEQ ID NO: 716817 - DNA, 33 bp, Homo sapien
atattggaaaaaaatcacctcctacttctagca

SEQ ID NO: 716818 - DNA, 33 bp, Homo sapien
atattggaaaaaaatcgcctcctacttctagca

SEQ ID NO: 716819 - DNA, 33 bp, Homo sapien
tgtctgacacataagacaccgtacatagaggat

SEQ ID NO: 716820 - DNA, 33 bp, Homo sapien
tgtctgacacataagagaccgtacatagaggat

SEQ ID NO: 716821 - DNA, 33 bp, Homo sapien
gatataaaattaacaaccctagatatctaatgt

SEQ ID NO: 716822 - DNA, 33 bp, Homo sapien
gatataaaattaacaagcctagatatctaatgt

SEQ ID NO: 716823 - DNA, 33 bp, Homo sapien
gaattgctcaaaagtaacacagataataaatgg

SEQ ID NO: 716824 - DNA, 33 bp, Homo sapien
gaattgctcaaaagtaccacagataataaatgg

SEQ ID NO: 716825 - DNA, 33 bp, Homo sapien
tgttataaatatgggccgataaagttgatattt

SEQ ID NO: 716826 - DNA, 33 bp, Homo sapien
tgttataaatatgggctgataaagttgatattt

SEQ ID NO: 716827 - DNA, 33 bp, Homo sapien
aagagagtagaataaaatgtttgcaaccaaata

SEQ ID NO: 716828 - DNA, 33 bp, Homo sapien
aagagagtagaataaagtgtttgcaaccaaata

SEQ ID NO: 716829 - DNA, 33 bp, Homo sapien
gcaggaaaaaacaaacagacattcacatggaaa

SEQ ID NO: 716830 - DNA, 33 bp, Homo sapien
gcaggaaaaaacaaacggacattcacatggaaa

SEQ ID NO: 716831 - DNA, 33 bp, Homo sapien
tcttagaagctggtcacaggagtgtaagaaagg

SEQ ID NO: 716832 - DNA, 33 bp, Homo sapien
tcttagaagctggtcataggagtgtaagaaagg

SEQ ID NO: 716833 - DNA, 33 bp, Homo sapien
acatctccattggatcacagatactcaggttta

SEQ ID NO: 716834 - DNA, 33 bp, Homo sapien
acatctccattggatcgcagatactcaggttta

SEQ ID NO: 716835 - DNA, 33 bp, Homo sapien
tcaatatataaaacaacctattctaagtgttaa

SEQ ID NO: 716836 - DNA, 33 bp, Homo sapien
tcaatatataaaacaagctattctaagtgttaa

SEQ ID NO: 716837 - DNA, 33 bp, Homo sapien
actagcagataatataagtacacataccagaaa

SEQ ID NO: 716838 - DNA, 33 bp, Homo sapien
actagcagataatataggtacacataccagaaa

SEQ ID NO: 716839 - DNA, 33 bp, Homo sapien
acaggtatacagcagacggcaccctgcagaatc

SEQ ID NO: 716840 - DNA, 33 bp, Homo sapien
acaggtatacagcagatggcaccctgcagaatc

SEQ ID NO: 716841 - DNA, 33 bp, Homo sapien
cattatgttatctaaacttgtaacatcatattt

SEQ ID NO: 716842 - DNA, 33 bp, Homo sapien
cattatgttatctaaagttgtaacatcatattt

SEQ ID NO: 716843 - DNA, 33 bp, Homo sapien
agaaatttcaatgaggccaaatttaacctgaca

SEQ ID NO: 716844 - DNA, 33 bp, Homo sapien
agaaatttcaatgaggtcaaatttaacctgaca

SEQ ID NO: 716845 - DNA, 33 bp, Homo sapien
cttgaataatagtagacgagaaaggctaattac

SEQ ID NO: 716846 - DNA, 33 bp, Homo sapien
cttgaataatagtagatgagaaaggctaattac

SEQ ID NO: 716847 - DNA, 33 bp, Homo sapien
gttctgctagcatttaggaaactggggcatact

SEQ ID NO: 716848 - DNA, 33 bp, Homo sapien
gttctgctagcatttatgaaactggggcatact

SEQ ID NO: 716849 - DNA, 33 bp, Homo sapien
ttatattatctgacaaacttaaacaatttttaa

SEQ ID NO: 716850 - DNA, 33 bp, Homo sapien
ttatattatctgacaaccttaaacaatttttaa

SEQ ID NO: 716851 - DNA, 33 bp, Homo sapien
tgctttagtgaattcccctgaactttctcactt

SEQ ID NO: 716852 - DNA, 33 bp, Homo sapien
tgctttagtgaattccgctgaactttctcactt

SEQ ID NO: 716853 - DNA, 33 bp, Homo sapien
aaatgagaaaggatgaagtaacttgttcaaggt

SEQ ID NO: 716854 - DNA, 33 bp, Homo sapien
aaatgagaaaggatgaggtaacttgttcaaggt

SEQ ID NO: 716855 - DNA, 33 bp, Homo sapien
cactattcatcaatgacgaaaatgaaatgagaa

SEQ ID NO: 716856 - DNA, 33 bp, Homo sapien
cactattcatcaatgaggaaaatgaaatgagaa

SEQ ID NO: 716857 - DNA, 33 bp, Homo sapien
cttattccaccttttaccatttgttcacacctt

SEQ ID NO: 716858 - DNA, 33 bp, Homo sapien
cttattccaccttttatcatttgttcacacctt

SEQ ID NO: 716859 - DNA, 33 bp, Homo sapien
aaaattgtgggttaaaatagggactcagcctcc

SEQ ID NO: 716860 - DNA, 33 bp, Homo sapien
aaaattgtgggttaaagtagggactcagcctcc

SEQ ID NO: 716861 - DNA, 33 bp, Homo sapien
ctgaatagctaggtaactagaaaataaaaggtt

SEQ ID NO: 716862 - DNA, 33 bp, Homo sapien
ctgaatagctaggtaattagaaaataaaaggtt

SEQ ID NO: 716863 - DNA, 33 bp, Homo sapien
aatataattcagatagcagttttgaaatttact

SEQ ID NO: 716864 - DNA, 33 bp, Homo sapien
aatataattcagatagtagttttgaaatttact

SEQ ID NO: 716865 - DNA, 33 bp, Homo sapien
acaacggaactgatggaaagctactgctgagac

SEQ ID NO: 716866 - DNA, 33 bp, Homo sapien
acaacggaactgatgggaagctactgctgagac

SEQ ID NO: 716867 - DNA, 33 bp, Homo sapien
ctacattaacttaagcccatgcatggaaacatt

SEQ ID NO: 716868 - DNA, 33 bp, Homo sapien
ctacattaacttaagctcatgcatggaaacatt

SEQ ID NO: 716869 - DNA, 33 bp, Homo sapien
gcttaagttaatgtagaattcaaacatttgagt

SEQ ID NO: 716870 - DNA, 33 bp, Homo sapien
gcttaagttaatgtagtattcaaacatttgagt

SEQ ID NO: 716871 - DNA, 33 bp, Homo sapien
tctttcaaggctgccaatcaaaaagcattataa

SEQ ID NO: 716872 - DNA, 33 bp, Homo sapien
tctttcaaggctgccattcaaaaagcattataa

SEQ ID NO: 716873 - DNA, 33 bp, Homo sapien
agaagagaaattagaacgtcttgaggtaatagc

SEQ ID NO: 716874 - DNA, 33 bp, Homo sapien
agaagagaaattagaatgtcttgaggtaatagc

SEQ ID NO: 716875 - DNA, 33 bp, Homo sapien
aagaacatactcaaaaaaggagacgttagatcg

SEQ ID NO: 716876 - DNA, 33 bp, Homo sapien
aagaacatactcaaaagaggagacgttagatcg

SEQ ID NO: 716877 - DNA, 33 bp, Homo sapien
tgatgagcctggcatacgaaacaatttcctaca

SEQ ID NO: 716878 - DNA, 33 bp, Homo sapien
tgatgagcctggcatatgaaacaatttcctaca

SEQ ID NO: 716879 - DNA, 33 bp, Homo sapien
ggacagctatcatgaaatcagacttaaggattt

SEQ ID NO: 716880 - DNA, 33 bp, Homo sapien
ggacagctatcatgaagtcagacttaaggattt

SEQ ID NO: 716881 - DNA, 33 bp, Homo sapien
atattatcttgaacaccgtgctgcttaaagcta

SEQ ID NO: 716882 - DNA, 33 bp, Homo sapien
atattatcttgaacactgtgctgcttaaagcta

SEQ ID NO: 716883 - DNA, 33 bp, Homo sapien
agttggttttgataagcctggagctgtggaatg

SEQ ID NO: 716884 - DNA, 33 bp, Homo sapien
agttggttttgataagtctggagctgtggaatg

SEQ ID NO: 716885 - DNA, 33 bp, Homo sapien
gaagctacagtatgggaagagagtgtgcaggct

SEQ ID NO: 716886 - DNA, 33 bp, Homo sapien
gaagctacagtatggggagagagtgtgcaggct

SEQ ID NO: 716887 - DNA, 33 bp, Homo sapien
tagaatgagttactacacaacataaattagttt

SEQ ID NO: 716888 - DNA, 33 bp, Homo sapien
tagaatgagttactacgcaacataaattagttt

SEQ ID NO: 716889 - DNA, 33 bp, Homo sapien
atgagaaccaaatttcccagggtcatagaatga

SEQ ID NO: 716890 - DNA, 33 bp, Homo sapien
atgagaaccaaatttctcagggtcatagaatga

SEQ ID NO: 716891 - DNA, 33 bp, Homo sapien
ggttttacctgctctacattgcaaaggaaatat

SEQ ID NO: 716892 - DNA, 33 bp, Homo sapien
ggttttacctgctctatattgcaaaggaaatat

SEQ ID NO: 716893 - DNA, 33 bp, Homo sapien
acttcttccatactgaactacaaagaatgtata

SEQ ID NO: 716894 - DNA, 33 bp, Homo sapien
acttcttccatactgagctacaaagaatgtata

SEQ ID NO: 716895 - DNA, 33 bp, Homo sapien
gctcatgactgtttaacattagcaagttcagtt

SEQ ID NO: 716896 - DNA, 33 bp, Homo sapien
gctcatgactgtttaatattagcaagttcagtt

SEQ ID NO: 716897 - DNA, 33 bp, Homo sapien
tttcacaaagcataaagacactgagaaactgaa

SEQ ID NO: 716898 - DNA, 33 bp, Homo sapien
tttcacaaagcataaatacactgagaaactgaa

SEQ ID NO: 716899 - DNA, 33 bp, Homo sapien
gagtaatttaacaaacacaacaatttaagtagt

SEQ ID NO: 716900 - DNA, 33 bp, Homo sapien
gagtaatttaacaaacgcaacaatttaagtagt

SEQ ID NO: 716901 - DNA, 33 bp, Homo sapien
actgcaaaatagagtacggattgtgaatttagt

SEQ ID NO: 716902 - DNA, 33 bp, Homo sapien
actgcaaaatagagtagggattgtgaatttagt

SEQ ID NO: 716903 - DNA, 33 bp, Homo sapien
atttgaggcagccaaaaacacccttcctttttt

SEQ ID NO: 716904 - DNA, 33 bp, Homo sapien
atttgaggcagccaaacacacccttcctttttt

SEQ ID NO: 716905 - DNA, 33 bp, Homo sapien
gaattcaataaaaaaaactgatacgtgagaaat

SEQ ID NO: 716906 - DNA, 33 bp, Homo sapien
gaattcaataaaaaaacctgatacgtgagaaat

SEQ ID NO: 716907 - DNA, 33 bp, Homo sapien
catatttgatttgtacactggttttgtggatca

SEQ ID NO: 716908 - DNA, 33 bp, Homo sapien
catatttgatttgtaccctggttttgtggatca

SEQ ID NO: 716909 - DNA, 33 bp, Homo sapien
tccttgacaatggctaacactgtgaattttaca

SEQ ID NO: 716910 - DNA, 33 bp, Homo sapien
tccttgacaatggctagcactgtgaattttaca

SEQ ID NO: 716911 - DNA, 33 bp, Homo sapien
acttaaagagtataaccggactatttgcaacac

SEQ ID NO: 716912 - DNA, 33 bp, Homo sapien
acttaaagagtataactggactatttgcaacac

SEQ ID NO: 716913 - DNA, 33 bp, Homo sapien
gcagtaaccatttaacagtgttctctcttccag

SEQ ID NO: 716914 - DNA, 33 bp, Homo sapien
gcagtaaccatttaactgtgttctctcttccag

SEQ ID NO: 716915 - DNA, 33 bp, Homo sapien
atcaaatgaataacgaagtctttcatagacaaa

SEQ ID NO: 716916 - DNA, 33 bp, Homo sapien
atcaaatgaataacgatgtctttcatagacaaa

SEQ ID NO: 716917 - DNA, 33 bp, Homo sapien
ttttgtttcactaggcaatcagatttcattaag

SEQ ID NO: 716918 - DNA, 33 bp, Homo sapien
ttttgtttcactaggctatcagatttcattaag

SEQ ID NO: 716919 - DNA, 33 bp, Homo sapien
cttaaagaaaactgcaagaaaattaaataatta

SEQ ID NO: 716920 - DNA, 33 bp, Homo sapien
cttaaagaaaactgcaggaaaattaaataatta

SEQ ID NO: 716921 - DNA, 33 bp, Homo sapien
tgtcatatgttaaaaagtgagatagctttatgt

SEQ ID NO: 716922 - DNA, 33 bp, Homo sapien
tgtcatatgttaaaaattgagatagctttatgt

SEQ ID NO: 716923 - DNA, 33 bp, Homo sapien
ccatattctccagctacgtttcagcagctcaac

SEQ ID NO: 716924 - DNA, 33 bp, Homo sapien
ccatattctccagctatgtttcagcagctcaac

SEQ ID NO: 716925 - DNA, 33 bp, Homo sapien
gtcagaattaattcacaatgacagtgttatttc

SEQ ID NO: 716926 - DNA, 33 bp, Homo sapien
gtcagaattaattcacgatgacagtgttatttc

SEQ ID NO: 716927 - DNA, 33 bp, Homo sapien
cataaacaaagtaaacggcatctttctgccctt

SEQ ID NO: 716928 - DNA, 33 bp, Homo sapien
cataaacaaagtaaactgcatctttctgccctt

SEQ ID NO: 716929 - DNA, 33 bp, Homo sapien
caaggatttcactttaaactcaacactgaaaaa

SEQ ID NO: 716930 - DNA, 33 bp, Homo sapien
caaggatttcactttacactcaacactgaaaaa

SEQ ID NO: 716931 - DNA, 33 bp, Homo sapien
cacaaaagcctgtaccaaaaacagagatgactt

SEQ ID NO: 716932 - DNA, 33 bp, Homo sapien
cacaaaagcctgtaccgaaaacagagatgactt

SEQ ID NO: 716933 - DNA, 33 bp, Homo sapien
atgcctcttggctctacagttacacaaaagcct

SEQ ID NO: 716934 - DNA, 33 bp, Homo sapien
atgcctcttggctctatagttacacaaaagcct

SEQ ID NO: 716935 - DNA, 33 bp, Homo sapien
tgacaattacctaatcacctcagtatcctctcc

SEQ ID NO: 716936 - DNA, 33 bp, Homo sapien
tgacaattacctaatcgcctcagtatcctctcc

SEQ ID NO: 716937 - DNA, 33 bp, Homo sapien
tgtaagagctggaaaactagtcctaagaggctg

SEQ ID NO: 716938 - DNA, 33 bp, Homo sapien
tgtaagagctggaaaattagtcctaagaggctg

SEQ ID NO: 716939 - DNA, 33 bp, Homo sapien
tttccataaataaaaacgtgtattgatattgcc

SEQ ID NO: 716940 - DNA, 33 bp, Homo sapien
tttccataaataaaaatgtgtattgatattgcc

SEQ ID NO: 716941 - DNA, 33 bp, Homo sapien
aggtaggaattcactacgctttcagttttctcc

SEQ ID NO: 716942 - DNA, 33 bp, Homo sapien
aggtaggaattcactatgctttcagttttctcc

SEQ ID NO: 716943 - DNA, 33 bp, Homo sapien
gaggaaatctgcaaggaatgcatatcacaagct

SEQ ID NO: 716944 - DNA, 33 bp, Homo sapien
gaggaaatctgcaagggatgcatatcacaagct

SEQ ID NO: 716945 - DNA, 33 bp, Homo sapien
actcctatcatgaaggaaagtaaaattcaacta

SEQ ID NO: 716946 - DNA, 33 bp, Homo sapien
actcctatcatgaagggaagtaaaattcaacta

SEQ ID NO: 716947 - DNA, 33 bp, Homo sapien
tgttttctgtcaaatacaagacttgcttttttt

SEQ ID NO: 716948 - DNA, 33 bp, Homo sapien
tgttttctgtcaaatataagacttgcttttttt

SEQ ID NO: 716949 - DNA, 33 bp, Homo sapien
ggagcagggacgatccagaaatatatagagcat

SEQ ID NO: 716950 - DNA, 33 bp, Homo sapien
ggagcagggacgatccggaaatatatagagcat

SEQ ID NO: 716951 - DNA, 33 bp, Homo sapien
gtggctttactcataacacttaacaaccagaag

SEQ ID NO: 716952 - DNA, 33 bp, Homo sapien
gtggctttactcataatacttaacaaccagaag

SEQ ID NO: 716953 - DNA, 33 bp, Homo sapien
acacttccttcatttgaatattaataataagaa

SEQ ID NO: 716954 - DNA, 33 bp, Homo sapien
acacttccttcatttgcatattaataataagaa

SEQ ID NO: 716955 - DNA, 33 bp, Homo sapien
ctcctggcaggaggccaactcgtacaaaaataa

SEQ ID NO: 716956 - DNA, 33 bp, Homo sapien
ctcctggcaggaggcccactcgtacaaaaataa

SEQ ID NO: 716957 - DNA, 33 bp, Homo sapien
atcaaagagctacaaccacaaatctttctaaca

SEQ ID NO: 716958 - DNA, 33 bp, Homo sapien
atcaaagagctacaactacaaatctttctaaca

SEQ ID NO: 716959 - DNA, 33 bp, Homo sapien
tatagaactatcaaataattgtgtttttttctc

SEQ ID NO: 716960 - DNA, 33 bp, Homo sapien
tatagaactatcaaatgattgtgtttttttctc

SEQ ID NO: 716961 - DNA, 33 bp, Homo sapien
ggatacttatttctaacgccaagttgggaaata

SEQ ID NO: 716962 - DNA, 33 bp, Homo sapien
ggatacttatttctaatgccaagttgggaaata

SEQ ID NO: 716963 - DNA, 33 bp, Homo sapien
gtcaaaccacatacaaaccaaattgtgcagagg

SEQ ID NO: 716964 - DNA, 33 bp, Homo sapien
gtcaaaccacatacaagccaaattgtgcagagg

SEQ ID NO: 716965 - DNA, 33 bp, Homo sapien
tagaatatattcagcagaatgacattgcaacag

SEQ ID NO: 716966 - DNA, 33 bp, Homo sapien
tagaatatattcagcataatgacattgcaacag

SEQ ID NO: 716967 - DNA, 33 bp, Homo sapien
ggaactgttaacaagcactaaagaaacaagtag

SEQ ID NO: 716968 - DNA, 33 bp, Homo sapien
ggaactgttaacaagctctaaagaaacaagtag

SEQ ID NO: 716969 - DNA, 33 bp, Homo sapien
gttaagggataatgaaaaattgtgtatgcaggc

SEQ ID NO: 716970 - DNA, 33 bp, Homo sapien
gttaagggataatgaagaattgtgtatgcaggc

SEQ ID NO: 716971 - DNA, 33 bp, Homo sapien
gttgcattattattcccagatccaatttctgta

SEQ ID NO: 716972 - DNA, 33 bp, Homo sapien
gttgcattattattccgagatccaatttctgta

SEQ ID NO: 716973 - DNA, 33 bp, Homo sapien
cctcttgaagtaaaagccttcagtacactccag

SEQ ID NO: 716974 - DNA, 33 bp, Homo sapien
cctcttgaagtaaaaggcttcagtacactccag

SEQ ID NO: 716975 - DNA, 33 bp, Homo sapien
ataaatggccaaggtaacacttatgacaaatct

SEQ ID NO: 716976 - DNA, 33 bp, Homo sapien
ataaatggccaaggtagcacttatgacaaatct

SEQ ID NO: 716977 - DNA, 33 bp, Homo sapien
tagaaattccagactcccagaaggaaagcagct

SEQ ID NO: 716978 - DNA, 33 bp, Homo sapien
tagaaattccagactcgcagaaggaaagcagct

SEQ ID NO: 716979 - DNA, 33 bp, Homo sapien
ttcaggcacttaaccaagcttcacttttaaggt

SEQ ID NO: 716980 - DNA, 33 bp, Homo sapien
ttcaggcacttaaccatgcttcacttttaaggt

SEQ ID NO: 716981 - DNA, 33 bp, Homo sapien
gcccacccagaattccaccaggactggattgcc

SEQ ID NO: 716982 - DNA, 33 bp, Homo sapien
gcccacccagaattccgccaggactggattgcc

SEQ ID NO: 716983 - DNA, 33 bp, Homo sapien
gattaactgattgcctaaagttatgtaatgcat

SEQ ID NO: 716984 - DNA, 33 bp, Homo sapien
gattaactgattgcctgaagttatgtaatgcat

SEQ ID NO: 716985 - DNA, 33 bp, Homo sapien
atatctcagcaataccagaatataacttttaga

SEQ ID NO: 716986 - DNA, 33 bp, Homo sapien
atatctcagcaataccggaatataacttttaga

SEQ ID NO: 716987 - DNA, 33 bp, Homo sapien
aagctgtattagataaaaacttaagaaccgtca

SEQ ID NO: 716988 - DNA, 33 bp, Homo sapien
aagctgtattagataagaacttaagaaccgtca

SEQ ID NO: 716989 - DNA, 33 bp, Homo sapien
ttcaattggcccttcaactttgacattatgcta

SEQ ID NO: 716990 - DNA, 33 bp, Homo sapien
ttcaattggcccttcacctttgacattatgcta

SEQ ID NO: 716991 - DNA, 33 bp, Homo sapien
tagcagggatttgttcccgggcattctggttcc

SEQ ID NO: 716992 - DNA, 33 bp, Homo sapien
tagcagggatttgttcgcgggcattctggttcc

SEQ ID NO: 716993 - DNA, 33 bp, Homo sapien
ttacttcaacctgcataaagaattagttttacc

SEQ ID NO: 716994 - DNA, 33 bp, Homo sapien
ttacttcaacctgcatgaagaattagttttacc

SEQ ID NO: 716995 - DNA, 33 bp, Homo sapien
ttccaatgctgtgatactagcacttgcatatcc

SEQ ID NO: 716996 - DNA, 33 bp, Homo sapien
ttccaatgctgtgatattagcacttgcatatcc

SEQ ID NO: 716997 - DNA, 33 bp, Homo sapien
attgccctgcaattaaaatgagatctgaagaat

SEQ ID NO: 716998 - DNA, 33 bp, Homo sapien
attgccctgcaattaatatgagatctgaagaat

SEQ ID NO: 716999 - DNA, 33 bp, Homo sapien
attaagaaatattagacgcacagacacctacac

SEQ ID NO: 717000 - DNA, 33 bp, Homo sapien
attaagaaatattagatgcacagacacctacac

SEQ ID NO: 717001 - DNA, 33 bp, Homo sapien
taaggaaaggactctcaattcaataaatgatgt

SEQ ID NO: 717002 - DNA, 33 bp, Homo sapien
taaggaaaggactctcgattcaataaatgatgt

SEQ ID NO: 717003 - DNA, 33 bp, Homo sapien
caagcattacagtgacaccgaagagagatttaa

SEQ ID NO: 717004 - DNA, 33 bp, Homo sapien
caagcattacagtgacgccgaagagagatttaa

SEQ ID NO: 717005 - DNA, 33 bp, Homo sapien
actatcagaaaactgacaagaatgtggagtggg

SEQ ID NO: 717006 - DNA, 33 bp, Homo sapien
actatcagaaaactgagaagaatgtggagtggg

SEQ ID NO: 717007 - DNA, 33 bp, Homo sapien
gaaagacactataggaaccgttttgattctcta

SEQ ID NO: 717008 - DNA, 33 bp, Homo sapien
gaaagacactataggagccgttttgattctcta

SEQ ID NO: 717009 - DNA, 33 bp, Homo sapien
cataacacgcgaggcaaaagcaatatttctaca

SEQ ID NO: 717010 - DNA, 33 bp, Homo sapien
cataacacgcgaggcagaagcaatatttctaca

SEQ ID NO: 717011 - DNA, 33 bp, Homo sapien
atatgtattcagtaagaaaactagcagagagag

SEQ ID NO: 717012 - DNA, 33 bp, Homo sapien
atatgtattcagtaaggaaactagcagagagag

SEQ ID NO: 717013 - DNA, 33 bp, Homo sapien
gcattcattgtgtccacataagagtcaggacat

SEQ ID NO: 717014 - DNA, 33 bp, Homo sapien
gcattcattgtgtccatataagagtcaggacat

SEQ ID NO: 717015 - DNA, 33 bp, Homo sapien
aatactggataattaccggccaaccaattggat

SEQ ID NO: 717016 - DNA, 33 bp, Homo sapien
aatactggataattactggccaaccaattggat

SEQ ID NO: 717017 - DNA, 33 bp, Homo sapien
ctgcctttaagaaacaaaaatccaatccattta

SEQ ID NO: 717018 - DNA, 33 bp, Homo sapien
ctgcctttaagaaacagaaatccaatccattta

SEQ ID NO: 717019 - DNA, 33 bp, Homo sapien
aagaagacagtaattacccaacagcataacaca

SEQ ID NO: 717020 - DNA, 33 bp, Homo sapien
aagaagacagtaattatccaacagcataacaca

SEQ ID NO: 717021 - DNA, 33 bp, Homo sapien
tcatttaatattcacaaaagttacaagaggtag

SEQ ID NO: 717022 - DNA, 33 bp, Homo sapien
tcatttaatattcacagaagttacaagaggtag

SEQ ID NO: 717023 - DNA, 33 bp, Homo sapien
tactagtgatcttgccaactaaattgcatattt

SEQ ID NO: 717024 - DNA, 33 bp, Homo sapien
tactagtgatcttgccgactaaattgcatattt

SEQ ID NO: 717025 - DNA, 33 bp, Homo sapien
atattaggtttaataacaatgcaaggcaattgc

SEQ ID NO: 717026 - DNA, 33 bp, Homo sapien
atattaggtttaataagaatgcaaggcaattgc

SEQ ID NO: 717027 - DNA, 33 bp, Homo sapien
attttttttaacacagaagcaaccaaataaatg

SEQ ID NO: 717028 - DNA, 33 bp, Homo sapien
attttttttaacacaggagcaaccaaataaatg

SEQ ID NO: 717029 - DNA, 33 bp, Homo sapien
agtaaccactttttgaccatattcaaataattt

SEQ ID NO: 717030 - DNA, 33 bp, Homo sapien
agtaaccactttttgagcatattcaaataattt

SEQ ID NO: 717031 - DNA, 33 bp, Homo sapien
tctggatttggaagaacgatacgttagtgtatt

SEQ ID NO: 717032 - DNA, 33 bp, Homo sapien
tctggatttggaagaatgatacgttagtgtatt

SEQ ID NO: 717033 - DNA, 33 bp, Homo sapien
cacgggatgtggcataagagtgtctaaaactag

SEQ ID NO: 717034 - DNA, 33 bp, Homo sapien
cacgggatgtggcataggagtgtctaaaactag

SEQ ID NO: 717035 - DNA, 33 bp, Homo sapien
gctttttgatcaaataaactgtaaggatagaag

SEQ ID NO: 717036 - DNA, 33 bp, Homo sapien
gctttttgatcaaatagactgtaaggatagaag

SEQ ID NO: 717037 - DNA, 33 bp, Homo sapien
agccaacaggaagatacccaaccaggctggaag

SEQ ID NO: 717038 - DNA, 33 bp, Homo sapien
agccaacaggaagatatccaaccaggctggaag

SEQ ID NO: 717039 - DNA, 33 bp, Homo sapien
attagaaatgaacgtccatcttcaaaattccta

SEQ ID NO: 717040 - DNA, 33 bp, Homo sapien
attagaaatgaacgtctatcttcaaaattccta

SEQ ID NO: 717041 - DNA, 33 bp, Homo sapien
attagagaattcaaaactcagaaaagcaaattt

SEQ ID NO: 717042 - DNA, 33 bp, Homo sapien
attagagaattcaaaagtcagaaaagcaaattt

SEQ ID NO: 717043 - DNA, 33 bp, Homo sapien
atgtcccaggctgaacaaagccagacagcacaa

SEQ ID NO: 717044 - DNA, 33 bp, Homo sapien
atgtcccaggctgaacgaagccagacagcacaa

SEQ ID NO: 717045 - DNA, 33 bp, Homo sapien
catctttttaaatgtgaaaaatcaacgctcaaa

SEQ ID NO: 717046 - DNA, 33 bp, Homo sapien
catctttttaaatgtgcaaaatcaacgctcaaa

SEQ ID NO: 717047 - DNA, 33 bp, Homo sapien
tacctccttttgtagcactgtaataaatcctta

SEQ ID NO: 717048 - DNA, 33 bp, Homo sapien
tacctccttttgtagcgctgtaataaatcctta

SEQ ID NO: 717049 - DNA, 33 bp, Homo sapien
tatttagcagcagaaaaaaaggtgatgttacta

SEQ ID NO: 717050 - DNA, 33 bp, Homo sapien
tatttagcagcagaaagaaaggtgatgttacta

SEQ ID NO: 717051 - DNA, 33 bp, Homo sapien
aggcatagcgtagcaaatactaggcttatacct

SEQ ID NO: 717052 - DNA, 33 bp, Homo sapien
aggcatagcgtagcaagtactaggcttatacct

SEQ ID NO: 717053 - DNA, 33 bp, Homo sapien
gaaatatacaacgttaaccccctccagacttca

SEQ ID NO: 717054 - DNA, 33 bp, Homo sapien
gaaatatacaacgttagccccctccagacttca

SEQ ID NO: 717055 - DNA, 33 bp, Homo sapien
ttttaatgatgttacaatggttaatttcaacaa

SEQ ID NO: 717056 - DNA, 33 bp, Homo sapien
ttttaatgatgttacagtggttaatttcaacaa

SEQ ID NO: 717057 - DNA, 33 bp, Homo sapien
caaggcttttaaggacagaatgactcctgttag

SEQ ID NO: 717058 - DNA, 33 bp, Homo sapien
caaggcttttaaggacggaatgactcctgttag

SEQ ID NO: 717059 - DNA, 33 bp, Homo sapien
tgtctctctctttataaaggtatgtttgtgtgt

SEQ ID NO: 717060 - DNA, 33 bp, Homo sapien
tgtctctctctttatataggtatgtttgtgtgt

SEQ ID NO: 717061 - DNA, 33 bp, Homo sapien
tccagcataaaggctacgttaggtacatcttct

SEQ ID NO: 717062 - DNA, 33 bp, Homo sapien
tccagcataaaggctatgttaggtacatcttct

SEQ ID NO: 717063 - DNA, 33 bp, Homo sapien
aataattctgatctaccctgagctaagaaactt

SEQ ID NO: 717064 - DNA, 33 bp, Homo sapien
aataattctgatctactctgagctaagaaactt

SEQ ID NO: 717065 - DNA, 33 bp, Homo sapien
catgaaaggtcaagaaacttcagaatgaaattt

SEQ ID NO: 717066 - DNA, 33 bp, Homo sapien
catgaaaggtcaagaagcttcagaatgaaattt

SEQ ID NO: 717067 - DNA, 33 bp, Homo sapien
agaattgcttgtgatacattttgtctcattcaa

SEQ ID NO: 717068 - DNA, 33 bp, Homo sapien
agaattgcttgtgatatattttgtctcattcaa

SEQ ID NO: 717069 - DNA, 33 bp, Homo sapien
tttccttagtcttcaaatggcatcttttctgtc

SEQ ID NO: 717070 - DNA, 33 bp, Homo sapien
tttccttagtcttcaagtggcatcttttctgtc

SEQ ID NO: 717071 - DNA, 33 bp, Homo sapien
ataatatttgtaacagaaaaacagtatagtatt

SEQ ID NO: 717072 - DNA, 33 bp, Homo sapien
ataatatttgtaacaggaaaacagtatagtatt

SEQ ID NO: 717073 - DNA, 33 bp, Homo sapien
cgtcttaagcttgctaaggaaatctcttgaggc

SEQ ID NO: 717074 - DNA, 33 bp, Homo sapien
cgtcttaagcttgctagggaaatctcttgaggc

SEQ ID NO: 717075 - DNA, 33 bp, Homo sapien
atattatgtgtaacctcaaaagtcactggactt

SEQ ID NO: 717076 - DNA, 33 bp, Homo sapien
atattatgtgtaaccttaaaagtcactggactt

SEQ ID NO: 717077 - DNA, 33 bp, Homo sapien
tgtctgcttcgtgtcacagaacataatgccttt

SEQ ID NO: 717078 - DNA, 33 bp, Homo sapien
tgtctgcttcgtgtcatagaacataatgccttt

SEQ ID NO: 717079 - DNA, 33 bp, Homo sapien
ccagaaatgatacagccaaagtgataacagaaa

SEQ ID NO: 717080 - DNA, 33 bp, Homo sapien
ccagaaatgatacagcgaaagtgataacagaaa

SEQ ID NO: 717081 - DNA, 33 bp, Homo sapien
gatcttattttccataactaaggacaatgtaag

SEQ ID NO: 717082 - DNA, 33 bp, Homo sapien
gatcttattttccatagctaaggacaatgtaag

SEQ ID NO: 717083 - DNA, 33 bp, Homo sapien
actgatggaggaaagaatagtccttgaagtaga

SEQ ID NO: 717084 - DNA, 33 bp, Homo sapien
actgatggaggaaagagtagtccttgaagtaga

SEQ ID NO: 717085 - DNA, 33 bp, Homo sapien
ctttcacggtgtgctcaaagagtaaacactggg

SEQ ID NO: 717086 - DNA, 33 bp, Homo sapien
ctttcacggtgtgctcgaagagtaaacactggg

SEQ ID NO: 717087 - DNA, 33 bp, Homo sapien
ctgtgcattgtcaaaccccttaccaggacgtcc

SEQ ID NO: 717088 - DNA, 33 bp, Homo sapien
ctgtgcattgtcaaacgccttaccaggacgtcc

SEQ ID NO: 717089 - DNA, 33 bp, Homo sapien
ataaatcaatccaataagtatgctacattgttt

SEQ ID NO: 717090 - DNA, 33 bp, Homo sapien
ataaatcaatccaataggtatgctacattgttt

SEQ ID NO: 717091 - DNA, 33 bp, Homo sapien
catagcaggccagaaggatttttcagctaaaat

SEQ ID NO: 717092 - DNA, 33 bp, Homo sapien
catagcaggccagaagtatttttcagctaaaat

SEQ ID NO: 717093 - DNA, 33 bp, Homo sapien
tttcaaattaacttcacggactttcagattgaa

SEQ ID NO: 717094 - DNA, 33 bp, Homo sapien
tttcaaattaacttcatggactttcagattgaa

SEQ ID NO: 717095 - DNA, 33 bp, Homo sapien
tatcaagacttcacaagcacattatatgttagt

SEQ ID NO: 717096 - DNA, 33 bp, Homo sapien
tatcaagacttcacaatcacattatatgttagt

SEQ ID NO: 717097 - DNA, 33 bp, Homo sapien
atatgatgggaaattaaatgtcagctatactca

SEQ ID NO: 717098 - DNA, 33 bp, Homo sapien
atatgatgggaaattagatgtcagctatactca

SEQ ID NO: 717099 - DNA, 33 bp, Homo sapien
aggagaatagggcagagaagtatgtgaaactac

SEQ ID NO: 717100 - DNA, 33 bp, Homo sapien
aggagaatagggcagataagtatgtgaaactac

SEQ ID NO: 717101 - DNA, 33 bp, Homo sapien
ttctcaccagtataaaagcattcatttttctcc

SEQ ID NO: 717102 - DNA, 33 bp, Homo sapien
ttctcaccagtataaaggcattcatttttctcc

SEQ ID NO: 717103 - DNA, 33 bp, Homo sapien
actgtctcatcacgcaagtatgaggcatagtac

SEQ ID NO: 717104 - DNA, 33 bp, Homo sapien
actgtctcatcacgcaggtatgaggcatagtac

SEQ ID NO: 717105 - DNA, 33 bp, Homo sapien
attctatcacagtagaaggtatgaaccatttat

SEQ ID NO: 717106 - DNA, 33 bp, Homo sapien
attctatcacagtagacggtatgaaccatttat

SEQ ID NO: 717107 - DNA, 33 bp, Homo sapien
ccatatgtgctgaacaatgaaacttgtgcagat

SEQ ID NO: 717108 - DNA, 33 bp, Homo sapien
ccatatgtgctgaacactgaaacttgtgcagat

SEQ ID NO: 717109 - DNA, 33 bp, Homo sapien
acagtttatctctcaacggtaatgaagaaggaa

SEQ ID NO: 717110 - DNA, 33 bp, Homo sapien
acagtttatctctcaatggtaatgaagaaggaa

SEQ ID NO: 717111 - DNA, 33 bp, Homo sapien
cattcacaggcaatcaataatagtagaataatt

SEQ ID NO: 717112 - DNA, 33 bp, Homo sapien
cattcacaggcaatcagtaatagtagaataatt

SEQ ID NO: 717113 - DNA, 33 bp, Homo sapien
tagattgatgttgctaccatataatttccaatt

SEQ ID NO: 717114 - DNA, 33 bp, Homo sapien
tagattgatgttgctatcatataatttccaatt

SEQ ID NO: 717115 - DNA, 33 bp, Homo sapien
tactaatcacccactacgtttcagacaaaatat

SEQ ID NO: 717116 - DNA, 33 bp, Homo sapien
tactaatcacccactatgtttcagacaaaatat

SEQ ID NO: 717117 - DNA, 33 bp, Homo sapien
cttggaaatgtgtaagcactagctctgtatcta

SEQ ID NO: 717118 - DNA, 33 bp, Homo sapien
cttggaaatgtgtaagtactagctctgtatcta

SEQ ID NO: 717119 - DNA, 33 bp, Homo sapien
aaattgatttaggcagaaaagccattttaaaga

SEQ ID NO: 717120 - DNA, 33 bp, Homo sapien
aaattgatttaggcagcaaagccattttaaaga

SEQ ID NO: 717121 - DNA, 33 bp, Homo sapien
ttccttggtgtctcacaagataagacccactga

SEQ ID NO: 717122 - DNA, 33 bp, Homo sapien
ttccttggtgtctcacgagataagacccactga

SEQ ID NO: 717123 - DNA, 33 bp, Homo sapien
taattgaactaggttgaattgccttgaagactt

SEQ ID NO: 717124 - DNA, 33 bp, Homo sapien
taattgaactaggttgcattgccttgaagactt

SEQ ID NO: 717125 - DNA, 33 bp, Homo sapien
tgtcatggcaatataaacattttttcaaaattt

SEQ ID NO: 717126 - DNA, 33 bp, Homo sapien
tgtcatggcaatataagcattttttcaaaattt

SEQ ID NO: 717127 - DNA, 33 bp, Homo sapien
tagggcctatcacagaataagaagaatttagat

SEQ ID NO: 717128 - DNA, 33 bp, Homo sapien
tagggcctatcacagactaagaagaatttagat

SEQ ID NO: 717129 - DNA, 33 bp, Homo sapien
tttaaaatatgtctgacggtccaattaggtaac

SEQ ID NO: 717130 - DNA, 33 bp, Homo sapien
tttaaaatatgtctgatggtccaattaggtaac

SEQ ID NO: 717131 - DNA, 33 bp, Homo sapien
ccacctcttgatgaaccattactgccatctcac

SEQ ID NO: 717132 - DNA, 33 bp, Homo sapien
ccacctcttgatgaacgattactgccatctcac

SEQ ID NO: 717133 - DNA, 33 bp, Homo sapien
ttttaattctcgtggaacataataagtttccaa

SEQ ID NO: 717134 - DNA, 33 bp, Homo sapien
ttttaattctcgtggatcataataagtttccaa

SEQ ID NO: 717135 - DNA, 33 bp, Homo sapien
ttcacttcaatgcactcactgggaatttggatc

SEQ ID NO: 717136 - DNA, 33 bp, Homo sapien
ttcacttcaatgcactgactgggaatttggatc

SEQ ID NO: 717137 - DNA, 33 bp, Homo sapien
ccattgacattgattacattggaagaagtcata

SEQ ID NO: 717138 - DNA, 33 bp, Homo sapien
ccattgacattgattatattggaagaagtcata

SEQ ID NO: 717139 - DNA, 33 bp, Homo sapien
tacggttttgtgcgaactgaaaaactaaatgga

SEQ ID NO: 717140 - DNA, 33 bp, Homo sapien
tacggttttgtgcgaattgaaaaactaaatgga

SEQ ID NO: 717141 - DNA, 33 bp, Homo sapien
ccactccacttcactcacttttcatcagccata

SEQ ID NO: 717142 - DNA, 33 bp, Homo sapien
ccactccacttcactcgcttttcatcagccata

SEQ ID NO: 717143 - DNA, 33 bp, Homo sapien
atccatggaacaaaacaatctatgaatcagtta

SEQ ID NO: 717144 - DNA, 33 bp, Homo sapien
atccatggaacaaaactatctatgaatcagtta

SEQ ID NO: 717145 - DNA, 33 bp, Homo sapien
catttctatgcaccaacaatgatctagttgaaa

SEQ ID NO: 717146 - DNA, 33 bp, Homo sapien
catttctatgcaccaataatgatctagttgaaa

SEQ ID NO: 717147 - DNA, 33 bp, Homo sapien
gattgtaaatgagtgtaaattgagtccatttgg

SEQ ID NO: 717148 - DNA, 33 bp, Homo sapien
gattgtaaatgagtgttaattgagtccatttgg

SEQ ID NO: 717149 - DNA, 33 bp, Homo sapien
aatgaactaaaatagtaaattcgtgccacagca

SEQ ID NO: 717150 - DNA, 33 bp, Homo sapien
aatgaactaaaatagtcaattcgtgccacagca

SEQ ID NO: 717151 - DNA, 33 bp, Homo sapien
ggaggcttcagaggaaatactgaacaattagaa

SEQ ID NO: 717152 - DNA, 33 bp, Homo sapien
ggaggcttcagaggaattactgaacaattagaa

SEQ ID NO: 717153 - DNA, 33 bp, Homo sapien
ctattattaacaagacaaatgataaccagtgtt

SEQ ID NO: 717154 - DNA, 33 bp, Homo sapien
ctattattaacaagacgaatgataaccagtgtt

SEQ ID NO: 717155 - DNA, 33 bp, Homo sapien
ccatcaagacagacaaatcaacaatactaagga

SEQ ID NO: 717156 - DNA, 33 bp, Homo sapien
ccatcaagacagacaactcaacaatactaagga

SEQ ID NO: 717157 - DNA, 33 bp, Homo sapien
ggtatttaagttgaaagtaaagtcaggcagagg

SEQ ID NO: 717158 - DNA, 33 bp, Homo sapien
ggtatttaagttgaaattaaagtcaggcagagg

SEQ ID NO: 717159 - DNA, 33 bp, Homo sapien
attatctatgtatgtccctttgaaagaatgact

SEQ ID NO: 717160 - DNA, 33 bp, Homo sapien
attatctatgtatgtctctttgaaagaatgact

SEQ ID NO: 717161 - DNA, 33 bp, Homo sapien
gtgtaagaataagtcaaagttgtcaaaatgact

SEQ ID NO: 717162 - DNA, 33 bp, Homo sapien
gtgtaagaataagtcagagttgtcaaaatgact

SEQ ID NO: 717163 - DNA, 33 bp, Homo sapien
aatgtctctatccatcacctacgagtctgtaga

SEQ ID NO: 717164 - DNA, 33 bp, Homo sapien
aatgtctctatccatctcctacgagtctgtaga

SEQ ID NO: 717165 - DNA, 33 bp, Homo sapien
aatattatgtttataccgaagatggttagaggt

SEQ ID NO: 717166 - DNA, 33 bp, Homo sapien
aatattatgtttatactgaagatggttagaggt

SEQ ID NO: 717167 - DNA, 33 bp, Homo sapien
cagcccttgcatattcaccttctgttggttgtt

SEQ ID NO: 717168 - DNA, 33 bp, Homo sapien
cagcccttgcatattcgccttctgttggttgtt

SEQ ID NO: 717169 - DNA, 33 bp, Homo sapien
aacctggaaactatgcaaaattaagagagataa

SEQ ID NO: 717170 - DNA, 33 bp, Homo sapien
aacctggaaactatgcgaaattaagagagataa

SEQ ID NO: 717171 - DNA, 33 bp, Homo sapien
tttaatgctctcaattaaatatgcaaacatgat

SEQ ID NO: 717172 - DNA, 33 bp, Homo sapien
tttaatgctctcaattgaatatgcaaacatgat

SEQ ID NO: 717173 - DNA, 33 bp, Homo sapien
taagtggcaggcccacagtatggtcgccactgt

SEQ ID NO: 717174 - DNA, 33 bp, Homo sapien
taagtggcaggcccactgtatggtcgccactgt

SEQ ID NO: 717175 - DNA, 33 bp, Homo sapien
gtctctttctttcacacgaactacttttcccaa

SEQ ID NO: 717176 - DNA, 33 bp, Homo sapien
gtctctttctttcacatgaactacttttcccaa

SEQ ID NO: 717177 - DNA, 33 bp, Homo sapien
tttctgtggtctttgtaaagatactgacaaaca

SEQ ID NO: 717178 - DNA, 33 bp, Homo sapien
tttctgtggtctttgttaagatactgacaaaca

SEQ ID NO: 717179 - DNA, 33 bp, Homo sapien
tcaaaaataaattgaccgcccatgcatggatct

SEQ ID NO: 717180 - DNA, 33 bp, Homo sapien
tcaaaaataaattgactgcccatgcatggatct

SEQ ID NO: 717181 - DNA, 33 bp, Homo sapien
atagggtacccagggaagtagtcaagatatcat

SEQ ID NO: 717182 - DNA, 33 bp, Homo sapien
atagggtacccagggaggtagtcaagatatcat

SEQ ID NO: 717183 - DNA, 33 bp, Homo sapien
gagtcatgataaagaccagagcttggtgcccag

SEQ ID NO: 717184 - DNA, 33 bp, Homo sapien
gagtcatgataaagactagagcttggtgcccag

SEQ ID NO: 717185 - DNA, 33 bp, Homo sapien
attttactaccactaccatcattgtaaagcaga

SEQ ID NO: 717186 - DNA, 33 bp, Homo sapien
attttactaccactacgatcattgtaaagcaga

SEQ ID NO: 717187 - DNA, 33 bp, Homo sapien
ctcaacaatcaaattcactcttaactgacattg

SEQ ID NO: 717188 - DNA, 33 bp, Homo sapien
ctcaacaatcaaattcgctcttaactgacattg

SEQ ID NO: 717189 - DNA, 33 bp, Homo sapien
aacaagaccagtagcactaatgaaattgcatgg

SEQ ID NO: 717190 - DNA, 33 bp, Homo sapien
aacaagaccagtagcattaatgaaattgcatgg

SEQ ID NO: 717191 - DNA, 33 bp, Homo sapien
tgggaaaatgtaggaaaagagacccaaagcaaa

SEQ ID NO: 717192 - DNA, 33 bp, Homo sapien
tgggaaaatgtaggaagagagacccaaagcaaa

SEQ ID NO: 717193 - DNA, 33 bp, Homo sapien
tttcaaagaagagataccagagaatacagcttt

SEQ ID NO: 717194 - DNA, 33 bp, Homo sapien
tttcaaagaagagatatcagagaatacagcttt

SEQ ID NO: 717195 - DNA, 33 bp, Homo sapien
caaaatatactccgaaacatatcatatccaaat

SEQ ID NO: 717196 - DNA, 33 bp, Homo sapien
caaaatatactccgaagcatatcatatccaaat

SEQ ID NO: 717197 - DNA, 33 bp, Homo sapien
gcatggaccagcttgaaattaaaactcccggga

SEQ ID NO: 717198 - DNA, 33 bp, Homo sapien
gcatggaccagcttgagattaaaactcccggga

SEQ ID NO: 717199 - DNA, 33 bp, Homo sapien
aattggaaagacgggtcaacacaaagaatcaca

SEQ ID NO: 717200 - DNA, 33 bp, Homo sapien
aattggaaagacgggtgaacacaaagaatcaca

SEQ ID NO: 717201 - DNA, 33 bp, Homo sapien
tcctataacccagggactccactgttggatata

SEQ ID NO: 717202 - DNA, 33 bp, Homo sapien
tcctataacccagggattccactgttggatata

SEQ ID NO: 717203 - DNA, 33 bp, Homo sapien
cttcctaatgtctacacccagaaaattaacctt

SEQ ID NO: 717204 - DNA, 33 bp, Homo sapien
cttcctaatgtctacatccagaaaattaacctt

SEQ ID NO: 717205 - DNA, 33 bp, Homo sapien
accttgtattgggcaaaaatttagtgatatgat

SEQ ID NO: 717206 - DNA, 33 bp, Homo sapien
accttgtattgggcaacaatttagtgatatgat

SEQ ID NO: 717207 - DNA, 33 bp, Homo sapien
taccatgtctctttccaaacccagaagaaaatc

SEQ ID NO: 717208 - DNA, 33 bp, Homo sapien
taccatgtctctttccgaacccagaagaaaatc

SEQ ID NO: 717209 - DNA, 33 bp, Homo sapien
aaatgaattctaatcacgaattattgtgaatga

SEQ ID NO: 717210 - DNA, 33 bp, Homo sapien
aaatgaattctaatcaggaattattgtgaatga

SEQ ID NO: 717211 - DNA, 33 bp, Homo sapien
aaagaggtgcctattaaaattacttctatttga

SEQ ID NO: 717212 - DNA, 33 bp, Homo sapien
aaagaggtgcctattataattacttctatttga

SEQ ID NO: 717213 - DNA, 33 bp, Homo sapien
cacaggaaatgttaaacgaagtacttcaatcag

SEQ ID NO: 717214 - DNA, 33 bp, Homo sapien
cacaggaaatgttaaaggaagtacttcaatcag

SEQ ID NO: 717215 - DNA, 33 bp, Homo sapien
tatgagacactttcaaaattttcacacaaaatc

SEQ ID NO: 717216 - DNA, 33 bp, Homo sapien
tatgagacactttcaatattttcacacaaaatc

SEQ ID NO: 717217 - DNA, 33 bp, Homo sapien
tgtacaactcttcaaacgtacgatcttatccca

SEQ ID NO: 717218 - DNA, 33 bp, Homo sapien
tgtacaactcttcaaatgtacgatcttatccca

SEQ ID NO: 717219 - DNA, 33 bp, Homo sapien
tcttgtttgtaatcaacaacttgtctaaatacc

SEQ ID NO: 717220 - DNA, 33 bp, Homo sapien
tcttgtttgtaatcaagaacttgtctaaatacc

SEQ ID NO: 717221 - DNA, 33 bp, Homo sapien
gctaaataaaaacacaagaatatagtgaagaca

SEQ ID NO: 717222 - DNA, 33 bp, Homo sapien
gctaaataaaaacacaggaatatagtgaagaca

SEQ ID NO: 717223 - DNA, 33 bp, Homo sapien
cagtgcaagaaaccaacgtcatctgtattgaca

SEQ ID NO: 717224 - DNA, 33 bp, Homo sapien
cagtgcaagaaaccaatgtcatctgtattgaca

SEQ ID NO: 717225 - DNA, 33 bp, Homo sapien
atgcataatatcatccaaaattcaatatgttca

SEQ ID NO: 717226 - DNA, 33 bp, Homo sapien
atgcataatatcatcccaaattcaatatgttca

SEQ ID NO: 717227 - DNA, 33 bp, Homo sapien
tactatgcctatttagaaaatcgtctttggctt

SEQ ID NO: 717228 - DNA, 33 bp, Homo sapien
tactatgcctatttagcaaatcgtctttggctt

SEQ ID NO: 717229 - DNA, 33 bp, Homo sapien
acccaattcatatatacacctccaaaaccatca

SEQ ID NO: 717230 - DNA, 33 bp, Homo sapien
acccaattcatatatatacctccaaaaccatca

SEQ ID NO: 717231 - DNA, 33 bp, Homo sapien
ttaacagcaaagatgaaatactgcttacgttgg

SEQ ID NO: 717232 - DNA, 33 bp, Homo sapien
ttaacagcaaagatgacatactgcttacgttgg

SEQ ID NO: 717233 - DNA, 33 bp, Homo sapien
accgatgatctaaaaacgtccacttaaaaaata

SEQ ID NO: 717234 - DNA, 33 bp, Homo sapien
accgatgatctaaaaatgtccacttaaaaaata

SEQ ID NO: 717235 - DNA, 33 bp, Homo sapien
tataataatttggccacagatgagggttccaaa

SEQ ID NO: 717236 - DNA, 33 bp, Homo sapien
tataataatttggccagagatgagggttccaaa

SEQ ID NO: 717237 - DNA, 33 bp, Homo sapien
gttgggaatagctccacgcaaaacacatatact

SEQ ID NO: 717238 - DNA, 33 bp, Homo sapien
gttgggaatagctccatgcaaaacacatatact

SEQ ID NO: 717239 - DNA, 33 bp, Homo sapien
ttacttttattaatacaccaggcaggttttagg

SEQ ID NO: 717240 - DNA, 33 bp, Homo sapien
ttacttttattaatacgccaggcaggttttagg

SEQ ID NO: 717241 - DNA, 33 bp, Homo sapien
ggctattctggtgtgaacactttctgaaaattc

SEQ ID NO: 717242 - DNA, 33 bp, Homo sapien
ggctattctggtgtgatcactttctgaaaattc

SEQ ID NO: 717243 - DNA, 33 bp, Homo sapien
tagagacttgtagtgcccaaaagacaggaagat

SEQ ID NO: 717244 - DNA, 33 bp, Homo sapien
tagagacttgtagtgctcaaaagacaggaagat

SEQ ID NO: 717245 - DNA, 33 bp, Homo sapien
taattctaaactgagaaataagtagacacagga

SEQ ID NO: 717246 - DNA, 33 bp, Homo sapien
taattctaaactgagacataagtagacacagga

SEQ ID NO: 717247 - DNA, 33 bp, Homo sapien
cttggctcttttacaacggaccgacttattaag

SEQ ID NO: 717248 - DNA, 33 bp, Homo sapien
cttggctcttttacaatggaccgacttattaag

SEQ ID NO: 717249 - DNA, 33 bp, Homo sapien
tataaatattgcccaactagtatgatagatcca

SEQ ID NO: 717250 - DNA, 33 bp, Homo sapien
tataaatattgcccaagtagtatgatagatcca

SEQ ID NO: 717251 - DNA, 33 bp, Homo sapien
aacacaaatactagaaaacagatcaatgctcag

SEQ ID NO: 717252 - DNA, 33 bp, Homo sapien
aacacaaatactagaagacagatcaatgctcag

SEQ ID NO: 717253 - DNA, 33 bp, Homo sapien
ggacattcacctgagaactcagacaatacacta

SEQ ID NO: 717254 - DNA, 33 bp, Homo sapien
ggacattcacctgagacctcagacaatacacta

SEQ ID NO: 717255 - DNA, 33 bp, Homo sapien
caattaatggctcaacaacacaataacaatata

SEQ ID NO: 717256 - DNA, 33 bp, Homo sapien
caattaatggctcaacgacacaataacaatata

SEQ ID NO: 717257 - DNA, 33 bp, Homo sapien
agcctaaatagtcatagaaatgggtcctggagt

SEQ ID NO: 717258 - DNA, 33 bp, Homo sapien
agcctaaatagtcatataaatgggtcctggagt

SEQ ID NO: 717259 - DNA, 33 bp, Homo sapien
ttagttagagaccaaactactcatccagtttct

SEQ ID NO: 717260 - DNA, 33 bp, Homo sapien
ttagttagagaccaaattactcatccagtttct

SEQ ID NO: 717261 - DNA, 33 bp, Homo sapien
gtcttttcaacttgaaatcatatcgaaagatga

SEQ ID NO: 717262 - DNA, 33 bp, Homo sapien
gtcttttcaacttgaagtcatatcgaaagatga

SEQ ID NO: 717263 - DNA, 33 bp, Homo sapien
acttaggctcttttgacatttggacaatacagg

SEQ ID NO: 717264 - DNA, 33 bp, Homo sapien
acttaggctcttttgatatttggacaatacagg

SEQ ID NO: 717265 - DNA, 33 bp, Homo sapien
tgctataactgtatacgccccaagtctaacata

SEQ ID NO: 717266 - DNA, 33 bp, Homo sapien
tgctataactgtatactccccaagtctaacata

SEQ ID NO: 717267 - DNA, 33 bp, Homo sapien
tatggtttcttcagtgcatgataaaagcattac

SEQ ID NO: 717268 - DNA, 33 bp, Homo sapien
tatggtttcttcagtggatgataaaagcattac

SEQ ID NO: 717269 - DNA, 33 bp, Homo sapien
aatattgtgaggttaacgtttttgatagcttta

SEQ ID NO: 717270 - DNA, 33 bp, Homo sapien
aatattgtgaggttaatgtttttgatagcttta

SEQ ID NO: 717271 - DNA, 33 bp, Homo sapien
taacacatattcattgaaaaccttctacatacc

SEQ ID NO: 717272 - DNA, 33 bp, Homo sapien
taacacatattcattgcaaaccttctacatacc

SEQ ID NO: 717273 - DNA, 33 bp, Homo sapien
tgaatggaaattataccaatttgtacagggaca

SEQ ID NO: 717274 - DNA, 33 bp, Homo sapien
tgaatggaaattatacgaatttgtacagggaca

SEQ ID NO: 717275 - DNA, 33 bp, Homo sapien
gatttagaacaaagaaacgactttagtggagca

SEQ ID NO: 717276 - DNA, 33 bp, Homo sapien
gatttagaacaaagaagcgactttagtggagca

SEQ ID NO: 717277 - DNA, 33 bp, Homo sapien
ttcaagagcagaaacaaaggagatagggattcc

SEQ ID NO: 717278 - DNA, 33 bp, Homo sapien
ttcaagagcagaaacagaggagatagggattcc

SEQ ID NO: 717279 - DNA, 33 bp, Homo sapien
aacattttgttgagagaaactcctccaagaatt

SEQ ID NO: 717280 - DNA, 33 bp, Homo sapien
aacattttgttgagaggaactcctccaagaatt

SEQ ID NO: 717281 - DNA, 33 bp, Homo sapien
agatttgagcaatataccttcatctaaatcatg

SEQ ID NO: 717282 - DNA, 33 bp, Homo sapien
agatttgagcaatatagcttcatctaaatcatg

SEQ ID NO: 717283 - DNA, 33 bp, Homo sapien
ctggcacagttaatttaaaaaaagctgctcaac

SEQ ID NO: 717284 - DNA, 33 bp, Homo sapien
ctggcacagttaattttaaaaaagctgctcaac

SEQ ID NO: 717285 - DNA, 33 bp, Homo sapien
ggaaaagtgtgataacaaaaaataatctaaatg

SEQ ID NO: 717286 - DNA, 33 bp, Homo sapien
ggaaaagtgtgataacgaaaaataatctaaatg

SEQ ID NO: 717287 - DNA, 33 bp, Homo sapien
tcatggagagaaaagcaacggcccataaaaaga

SEQ ID NO: 717288 - DNA, 33 bp, Homo sapien
tcatggagagaaaagccacggcccataaaaaga

SEQ ID NO: 717289 - DNA, 33 bp, Homo sapien
aatctcagtttactaaagtgcatttctatgttt

SEQ ID NO: 717290 - DNA, 33 bp, Homo sapien
aatctcagtttactaaggtgcatttctatgttt

SEQ ID NO: 717291 - DNA, 33 bp, Homo sapien
tatcttcagtaaggtaagctaattctattattc

SEQ ID NO: 717292 - DNA, 33 bp, Homo sapien
tatcttcagtaaggtacgctaattctattattc

SEQ ID NO: 717293 - DNA, 33 bp, Homo sapien
ataagaaagaaacagacaaatcgagtaatatga

SEQ ID NO: 717294 - DNA, 33 bp, Homo sapien
ataagaaagaaacagagaaatcgagtaatatga

SEQ ID NO: 717295 - DNA, 33 bp, Homo sapien
tcaaagctaaggacaaaaggtgagaaaattgag

SEQ ID NO: 717296 - DNA, 33 bp, Homo sapien
tcaaagctaaggacaagaggtgagaaaattgag

SEQ ID NO: 717297 - DNA, 33 bp, Homo sapien
cacaaatgctaactgcagataactctcatgggt

SEQ ID NO: 717298 - DNA, 33 bp, Homo sapien
cacaaatgctaactgcggataactctcatgggt

SEQ ID NO: 717299 - DNA, 33 bp, Homo sapien
attattttcttatcaacttcaccactttattgt

SEQ ID NO: 717300 - DNA, 33 bp, Homo sapien
attattttcttatcaatttcaccactttattgt

SEQ ID NO: 717301 - DNA, 33 bp, Homo sapien
cacatttatccttcctaaagaaggcaccatttt

SEQ ID NO: 717302 - DNA, 33 bp, Homo sapien
cacatttatccttcctcaagaaggcaccatttt

SEQ ID NO: 717303 - DNA, 33 bp, Homo sapien
tctcaagaatggactaaatttttaacatagata

SEQ ID NO: 717304 - DNA, 33 bp, Homo sapien
tctcaagaatggactacatttttaacatagata

SEQ ID NO: 717305 - DNA, 33 bp, Homo sapien
actataggtcttggaaaccagagagttttagat

SEQ ID NO: 717306 - DNA, 33 bp, Homo sapien
actataggtcttggaacccagagagttttagat

SEQ ID NO: 717307 - DNA, 33 bp, Homo sapien
cttctgaaaacactagaagcttaataactggca

SEQ ID NO: 717308 - DNA, 33 bp, Homo sapien
cttctgaaaacactaggagcttaataactggca

SEQ ID NO: 717309 - DNA, 33 bp, Homo sapien
ctactaggtagtaagaaaaattagcagtattat

SEQ ID NO: 717310 - DNA, 33 bp, Homo sapien
ctactaggtagtaagagaaattagcagtattat

SEQ ID NO: 717311 - DNA, 33 bp, Homo sapien
tatgaaatccaacgaaatatttatgcacaaatg

SEQ ID NO: 717312 - DNA, 33 bp, Homo sapien
tatgaaatccaacgaagtatttatgcacaaatg

SEQ ID NO: 717313 - DNA, 33 bp, Homo sapien
aataaccaatcaataaagcaggaaaggaacacc

SEQ ID NO: 717314 - DNA, 33 bp, Homo sapien
aataaccaatcaataaggcaggaaaggaacacc

SEQ ID NO: 717315 - DNA, 33 bp, Homo sapien
attagcatgattttacactcagttttattttat

SEQ ID NO: 717316 - DNA, 33 bp, Homo sapien
attagcatgattttactctcagttttattttat

SEQ ID NO: 717317 - DNA, 33 bp, Homo sapien
ttttggttcaattcaaatggcaatgaaattatc

SEQ ID NO: 717318 - DNA, 33 bp, Homo sapien
ttttggttcaattcaagtggcaatgaaattatc

SEQ ID NO: 717319 - DNA, 33 bp, Homo sapien
aatctttgtgaggcacccttactgtgttttgta

SEQ ID NO: 717320 - DNA, 33 bp, Homo sapien
aatctttgtgaggcactcttactgtgttttgta

SEQ ID NO: 717321 - DNA, 33 bp, Homo sapien
caaaggactatcagtaagagtaagtttaaaacg

SEQ ID NO: 717322 - DNA, 33 bp, Homo sapien
caaaggactatcagtaggagtaagtttaaaacg

SEQ ID NO: 717323 - DNA, 33 bp, Homo sapien
ggcttggcttgttcaactgtgatgtgtgaagtc

SEQ ID NO: 717324 - DNA, 33 bp, Homo sapien
ggcttggcttgttcaattgtgatgtgtgaagtc

SEQ ID NO: 717325 - DNA, 33 bp, Homo sapien
ttcaactgccagttcaataacatgatttaaaaa

SEQ ID NO: 717326 - DNA, 33 bp, Homo sapien
ttcaactgccagttcagtaacatgatttaaaaa

SEQ ID NO: 717327 - DNA, 33 bp, Homo sapien
aatcagtgaactctataaaaatatgtgcagata

SEQ ID NO: 717328 - DNA, 33 bp, Homo sapien
aatcagtgaactctatgaaaatatgtgcagata

SEQ ID NO: 717329 - DNA, 33 bp, Homo sapien
tgatgatgggaaccaaaaacagcttagaataaa

SEQ ID NO: 717330 - DNA, 33 bp, Homo sapien
tgatgatgggaaccaagaacagcttagaataaa

SEQ ID NO: 717331 - DNA, 33 bp, Homo sapien
agacacgggtttaaggaatattttatggatgcg

SEQ ID NO: 717332 - DNA, 33 bp, Homo sapien
agacacgggtttaagggatattttatggatgcg

SEQ ID NO: 717333 - DNA, 33 bp, Homo sapien
tcatttctaaccattgccaatacaaacacaata

SEQ ID NO: 717334 - DNA, 33 bp, Homo sapien
tcatttctaaccattgtcaatacaaacacaata

SEQ ID NO: 717335 - DNA, 33 bp, Homo sapien
ctcaaatttttccttacgagattgtatttgtgg

SEQ ID NO: 717336 - DNA, 33 bp, Homo sapien
ctcaaatttttccttatgagattgtatttgtgg

SEQ ID NO: 717337 - DNA, 33 bp, Homo sapien
tattcttgagccttaaaaaggaagaccattctg

SEQ ID NO: 717338 - DNA, 33 bp, Homo sapien
tattcttgagccttaagaaggaagaccattctg

SEQ ID NO: 717339 - DNA, 33 bp, Homo sapien
ctttcctcaaactgacagtaactccgtgaaccc

SEQ ID NO: 717340 - DNA, 33 bp, Homo sapien
ctttcctcaaactgacggtaactccgtgaaccc

SEQ ID NO: 717341 - DNA, 33 bp, Homo sapien
taaaaatgactccccaatgaacaaatgtgtgaa

SEQ ID NO: 717342 - DNA, 33 bp, Homo sapien
taaaaatgactccccagtgaacaaatgtgtgaa

SEQ ID NO: 717343 - DNA, 33 bp, Homo sapien
aatggagaaggtataaatgaggatcaagtattt

SEQ ID NO: 717344 - DNA, 33 bp, Homo sapien
aatggagaaggtataagtgaggatcaagtattt

SEQ ID NO: 717345 - DNA, 33 bp, Homo sapien
tacaagggcacagtacagcactcggctaatttt

SEQ ID NO: 717346 - DNA, 33 bp, Homo sapien
tacaagggcacagtacggcactcggctaatttt

SEQ ID NO: 717347 - DNA, 33 bp, Homo sapien
tttcaatacctgatcacggaagcgtttcttgtt

SEQ ID NO: 717348 - DNA, 33 bp, Homo sapien
tttcaatacctgatcatggaagcgtttcttgtt

SEQ ID NO: 717349 - DNA, 33 bp, Homo sapien
ggcaaggttaaaagaaaagcatgaattcaagac

SEQ ID NO: 717350 - DNA, 33 bp, Homo sapien
ggcaaggttaaaagaagagcatgaattcaagac

SEQ ID NO: 717351 - DNA, 33 bp, Homo sapien
atatttatatggataactccctacctcctcttt

SEQ ID NO: 717352 - DNA, 33 bp, Homo sapien
atatttatatggataattccctacctcctcttt

SEQ ID NO: 717353 - DNA, 33 bp, Homo sapien
aggttatatttaaaaaatggtgcagtaggccaa

SEQ ID NO: 717354 - DNA, 33 bp, Homo sapien
aggttatatttaaaaagtggtgcagtaggccaa

SEQ ID NO: 717355 - DNA, 33 bp, Homo sapien
gaggttttaaaacttaggctcagacatcatcac

SEQ ID NO: 717356 - DNA, 33 bp, Homo sapien
gaggttttaaaacttatgctcagacatcatcac

SEQ ID NO: 717357 - DNA, 33 bp, Homo sapien
ggagtgtttatgagtcccaggattgctttaggt

SEQ ID NO: 717358 - DNA, 33 bp, Homo sapien
ggagtgtttatgagtctcaggattgctttaggt

SEQ ID NO: 717359 - DNA, 33 bp, Homo sapien
gatacagtgcataaaaaactgtttcagcaatga

SEQ ID NO: 717360 - DNA, 33 bp, Homo sapien
gatacagtgcataaaagactgtttcagcaatga

SEQ ID NO: 717361 - DNA, 33 bp, Homo sapien
ttcactaagtcactcaatataccagagacaata

SEQ ID NO: 717362 - DNA, 33 bp, Homo sapien
ttcactaagtcactcagtataccagagacaata

SEQ ID NO: 717363 - DNA, 33 bp, Homo sapien
gaggaatttccttttagagaatttgagtcgttt

SEQ ID NO: 717364 - DNA, 33 bp, Homo sapien
gaggaatttccttttatagaatttgagtcgttt

SEQ ID NO: 717365 - DNA, 33 bp, Homo sapien
cggtcctctaaagtgaaggtctgctgatttttc

SEQ ID NO: 717366 - DNA, 33 bp, Homo sapien
cggtcctctaaagtgagggtctgctgatttttc

SEQ ID NO: 717367 - DNA, 33 bp, Homo sapien
cctcttccaaaattgggatagattcatatgcaa

SEQ ID NO: 717368 - DNA, 33 bp, Homo sapien
cctcttccaaaattggtatagattcatatgcaa

SEQ ID NO: 717369 - DNA, 33 bp, Homo sapien
ataactgaattgcctaactcaaagtttaatcca

SEQ ID NO: 717370 - DNA, 33 bp, Homo sapien
ataactgaattgcctagctcaaagtttaatcca

SEQ ID NO: 717371 - DNA, 33 bp, Homo sapien
ccacaatatgaaatggccaaacaataaacaaca

SEQ ID NO: 717372 - DNA, 33 bp, Homo sapien
ccacaatatgaaatggtcaaacaataaacaaca

SEQ ID NO: 717373 - DNA, 33 bp, Homo sapien
attccctggatgcaaccaaatcctgtggtgaga

SEQ ID NO: 717374 - DNA, 33 bp, Homo sapien
attccctggatgcaactaaatcctgtggtgaga

SEQ ID NO: 717375 - DNA, 33 bp, Homo sapien
ggtcaccctctgataaagataaagatgaataaa

SEQ ID NO: 717376 - DNA, 33 bp, Homo sapien
ggtcaccctctgataaggataaagatgaataaa

SEQ ID NO: 717377 - DNA, 33 bp, Homo sapien
attctcagctagatacaaactttattcatcagg

SEQ ID NO: 717378 - DNA, 33 bp, Homo sapien
attctcagctagatacgaactttattcatcagg

SEQ ID NO: 717379 - DNA, 33 bp, Homo sapien
catgtgcggaacttctcaaagatttcaaataag

SEQ ID NO: 717380 - DNA, 33 bp, Homo sapien
catgtgcggaacttcttaaagatttcaaataag

SEQ ID NO: 717381 - DNA, 33 bp, Homo sapien
aataattttgggctccaatcatactattactag

SEQ ID NO: 717382 - DNA, 33 bp, Homo sapien
aataattttgggctccgatcatactattactag

SEQ ID NO: 717383 - DNA, 33 bp, Homo sapien
gttgtggcagcatgtacagttttaacgaaacat

SEQ ID NO: 717384 - DNA, 33 bp, Homo sapien
gttgtggcagcatgtatagttttaacgaaacat

SEQ ID NO: 717385 - DNA, 33 bp, Homo sapien
aaagttagcaaaagtaaaaatatatgtgttgaa

SEQ ID NO: 717386 - DNA, 33 bp, Homo sapien
aaagttagcaaaagtagaaatatatgtgttgaa

SEQ ID NO: 717387 - DNA, 33 bp, Homo sapien
ctgataattctgtatacgaaggattctgtttca

SEQ ID NO: 717388 - DNA, 33 bp, Homo sapien
ctgataattctgtatatgaaggattctgtttca

SEQ ID NO: 717389 - DNA, 33 bp, Homo sapien
tattttttaatcaatacggaaattcagcctgga

SEQ ID NO: 717390 - DNA, 33 bp, Homo sapien
tattttttaatcaatatggaaattcagcctgga

SEQ ID NO: 717391 - DNA, 33 bp, Homo sapien
tatattagtgtatgaaatatgtgttaataatct

SEQ ID NO: 717392 - DNA, 33 bp, Homo sapien
tatattagtgtatgaactatgtgttaataatct

SEQ ID NO: 717393 - DNA, 33 bp, Homo sapien
ctgaaagtgttcgttggagtttgcttaggtcat

SEQ ID NO: 717394 - DNA, 33 bp, Homo sapien
ctgaaagtgttcgttgtagtttgcttaggtcat

SEQ ID NO: 717395 - DNA, 33 bp, Homo sapien
actatttttctattctaacgagcacctcctctt

SEQ ID NO: 717396 - DNA, 33 bp, Homo sapien
actatttttctattctgacgagcacctcctctt

SEQ ID NO: 717397 - DNA, 33 bp, Homo sapien
tatggaatgagcaataccgtgtcatatttctga

SEQ ID NO: 717398 - DNA, 33 bp, Homo sapien
tatggaatgagcaatagcgtgtcatatttctga

SEQ ID NO: 717399 - DNA, 33 bp, Homo sapien
tgctcctagctcctagcattgtgtctaatattc

SEQ ID NO: 717400 - DNA, 33 bp, Homo sapien
tgctcctagctcctagtattgtgtctaatattc

SEQ ID NO: 717401 - DNA, 33 bp, Homo sapien
attcactcagctccagaaatagtatgaattatg

SEQ ID NO: 717402 - DNA, 33 bp, Homo sapien
attcactcagctccaggaatagtatgaattatg

SEQ ID NO: 717403 - DNA, 33 bp, Homo sapien
actatttctgcccaaacttattttccagactag

SEQ ID NO: 717404 - DNA, 33 bp, Homo sapien
actatttctgcccaaatttattttccagactag

SEQ ID NO: 717405 - DNA, 33 bp, Homo sapien
agcacagcaattgcagccagggtagatgggagt

SEQ ID NO: 717406 - DNA, 33 bp, Homo sapien
agcacagcaattgcagtcagggtagatgggagt

SEQ ID NO: 717407 - DNA, 33 bp, Homo sapien
ttttttctgagtacacaggaaattttgataaaa

SEQ ID NO: 717408 - DNA, 33 bp, Homo sapien
ttttttctgagtacacgggaaattttgataaaa

SEQ ID NO: 717409 - DNA, 33 bp, Homo sapien
gttgtttcaacaagcaagacagagtttgtcctg

SEQ ID NO: 717410 - DNA, 33 bp, Homo sapien
gttgtttcaacaagcaggacagagtttgtcctg

SEQ ID NO: 717411 - DNA, 33 bp, Homo sapien
catcaaatatttatcacactcgtctaatttcct

SEQ ID NO: 717412 - DNA, 33 bp, Homo sapien
catcaaatatttatcatactcgtctaatttcct

SEQ ID NO: 717413 - DNA, 33 bp, Homo sapien
aagagataaaaaatacaaccatgcatgcacaaa

SEQ ID NO: 717414 - DNA, 33 bp, Homo sapien
aagagataaaaaataccaccatgcatgcacaaa

SEQ ID NO: 717415 - DNA, 33 bp, Homo sapien
gtaagacaagacacaccgattaatacgcttttt

SEQ ID NO: 717416 - DNA, 33 bp, Homo sapien
gtaagacaagacacactgattaatacgcttttt

SEQ ID NO: 717417 - DNA, 33 bp, Homo sapien
ccatcaggtaaataagcacatctttacattaac

SEQ ID NO: 717418 - DNA, 33 bp, Homo sapien
ccatcaggtaaataaggacatctttacattaac

SEQ ID NO: 717419 - DNA, 33 bp, Homo sapien
aagactgagaatgtgacaaccacggaaaggaaa

SEQ ID NO: 717420 - DNA, 33 bp, Homo sapien
aagactgagaatgtgagaaccacggaaaggaaa

SEQ ID NO: 717421 - DNA, 33 bp, Homo sapien
agaataatttaatagcagacacagtttttgtac

SEQ ID NO: 717422 - DNA, 33 bp, Homo sapien
agaataatttaatagcggacacagtttttgtac

SEQ ID NO: 717423 - DNA, 33 bp, Homo sapien
aacatagatctttctcaaactttagttcaacta

SEQ ID NO: 717424 - DNA, 33 bp, Homo sapien
aacatagatctttctccaactttagttcaacta

SEQ ID NO: 717425 - DNA, 33 bp, Homo sapien
tagatgcttgaataaactgatataatagattga

SEQ ID NO: 717426 - DNA, 33 bp, Homo sapien
tagatgcttgaataaattgatataatagattga

SEQ ID NO: 717427 - DNA, 33 bp, Homo sapien
aagcacttacacgaagacatgggaaacctggga

SEQ ID NO: 717428 - DNA, 33 bp, Homo sapien
aagcacttacacgaaggcatgggaaacctggga

SEQ ID NO: 717429 - DNA, 33 bp, Homo sapien
aacactgcgagttcaaatcatataatgtagcct

SEQ ID NO: 717430 - DNA, 33 bp, Homo sapien
aacactgcgagttcaagtcatataatgtagcct

SEQ ID NO: 717431 - DNA, 33 bp, Homo sapien
atgcactcccttgcgccagagcatcatctccta

SEQ ID NO: 717432 - DNA, 33 bp, Homo sapien
atgcactcccttgcgctagagcatcatctccta

SEQ ID NO: 717433 - DNA, 33 bp, Homo sapien
cttcacatagcattcacggtgaatagttcatag

SEQ ID NO: 717434 - DNA, 33 bp, Homo sapien
cttcacatagcattcatggtgaatagttcatag

SEQ ID NO: 717435 - DNA, 33 bp, Homo sapien
ggaaccaagtctcgctaaaaagctaaatatgta

SEQ ID NO: 717436 - DNA, 33 bp, Homo sapien
ggaaccaagtctcgctgaaaagctaaatatgta

SEQ ID NO: 717437 - DNA, 33 bp, Homo sapien
ataagtcacttattccacaagatgctgctcaga

SEQ ID NO: 717438 - DNA, 33 bp, Homo sapien
ataagtcacttattccgcaagatgctgctcaga

SEQ ID NO: 717439 - DNA, 33 bp, Homo sapien
aaaaagaaacttgaataaatctgaccagcaaga

SEQ ID NO: 717440 - DNA, 33 bp, Homo sapien
aaaaagaaacttgaatgaatctgaccagcaaga

SEQ ID NO: 717441 - DNA, 33 bp, Homo sapien
agaaatagattagcacagagtattgagaaacct

SEQ ID NO: 717442 - DNA, 33 bp, Homo sapien
agaaatagattagcactgagtattgagaaacct

SEQ ID NO: 717443 - DNA, 33 bp, Homo sapien
taataacaggaagatgaacttttgcccatactg

SEQ ID NO: 717444 - DNA, 33 bp, Homo sapien
taataacaggaagatggacttttgcccatactg

SEQ ID NO: 717445 - DNA, 33 bp, Homo sapien
accacattaccagaaaactgtgatttatgtggc

SEQ ID NO: 717446 - DNA, 33 bp, Homo sapien
accacattaccagaaagctgtgatttatgtggc

SEQ ID NO: 717447 - DNA, 33 bp, Homo sapien
ttgctacaatacataacagtttttgaacaggaa

SEQ ID NO: 717448 - DNA, 33 bp, Homo sapien
ttgctacaatacataatagtttttgaacaggaa

SEQ ID NO: 717449 - DNA, 33 bp, Homo sapien
tataagatgctatctcacagtgctatacagaga

SEQ ID NO: 717450 - DNA, 33 bp, Homo sapien
tataagatgctatctctcagtgctatacagaga

SEQ ID NO: 717451 - DNA, 33 bp, Homo sapien
ggttttagcaaatttaactagtgcaaagggcta

SEQ ID NO: 717452 - DNA, 33 bp, Homo sapien
ggttttagcaaatttagctagtgcaaagggcta

SEQ ID NO: 717453 - DNA, 33 bp, Homo sapien
tcagatattccataacaatctcatcttgaaatt

SEQ ID NO: 717454 - DNA, 33 bp, Homo sapien
tcagatattccataacgatctcatcttgaaatt

SEQ ID NO: 717455 - DNA, 33 bp, Homo sapien
tgtacaaatgctgttaccaaaggatgtatgagt

SEQ ID NO: 717456 - DNA, 33 bp, Homo sapien
tgtacaaatgctgttatcaaaggatgtatgagt

SEQ ID NO: 717457 - DNA, 33 bp, Homo sapien
tttgacttgaattagcagataactgtttacaga

SEQ ID NO: 717458 - DNA, 33 bp, Homo sapien
tttgacttgaattagcggataactgtttacaga

SEQ ID NO: 717459 - DNA, 33 bp, Homo sapien
atgcttacgtctgaataaggtgaaagtgagttt

SEQ ID NO: 717460 - DNA, 33 bp, Homo sapien
atgcttacgtctgaatgaggtgaaagtgagttt

SEQ ID NO: 717461 - DNA, 33 bp, Homo sapien
ctttgaaagaatccaacttccagttagggactt

SEQ ID NO: 717462 - DNA, 33 bp, Homo sapien
ctttgaaagaatccaagttccagttagggactt

SEQ ID NO: 717463 - DNA, 33 bp, Homo sapien
taaatgaggtaatgaacgtaaagtgataaggat

SEQ ID NO: 717464 - DNA, 33 bp, Homo sapien
taaatgaggtaatgaatgtaaagtgataaggat

SEQ ID NO: 717465 - DNA, 33 bp, Homo sapien
gcagtataaatccgaaagcaaatatattgcaat

SEQ ID NO: 717466 - DNA, 33 bp, Homo sapien
gcagtataaatccgaaggcaaatatattgcaat

SEQ ID NO: 717467 - DNA, 33 bp, Homo sapien
tgatacaatggagcataactaataagcaatata

SEQ ID NO: 717468 - DNA, 33 bp, Homo sapien
tgatacaatggagcatgactaataagcaatata

SEQ ID NO: 717469 - DNA, 33 bp, Homo sapien
aaaatagaatagccaaatgttgaaaatagacca

SEQ ID NO: 717470 - DNA, 33 bp, Homo sapien
aaaatagaatagccaagtgttgaaaatagacca

SEQ ID NO: 717471 - DNA, 33 bp, Homo sapien
gtattcatgacacaaaatcggcacagaacatta

SEQ ID NO: 717472 - DNA, 33 bp, Homo sapien
gtattcatgacacaaagtcggcacagaacatta

SEQ ID NO: 717473 - DNA, 33 bp, Homo sapien
gaacaaaggttggagagaagactagagaaaatg

SEQ ID NO: 717474 - DNA, 33 bp, Homo sapien
gaacaaaggttggagataagactagagaaaatg

SEQ ID NO: 717475 - DNA, 33 bp, Homo sapien
ctaagtaatcaaggtaaagtgagattgtaagca

SEQ ID NO: 717476 - DNA, 33 bp, Homo sapien
ctaagtaatcaaggtatagtgagattgtaagca

SEQ ID NO: 717477 - DNA, 33 bp, Homo sapien
tgaattctcactccaacttatttaatgcaatta

SEQ ID NO: 717478 - DNA, 33 bp, Homo sapien
tgaattctcactccaatttatttaatgcaatta

SEQ ID NO: 717479 - DNA, 33 bp, Homo sapien
cattttacaatgttaccgctgattataggatga

SEQ ID NO: 717480 - DNA, 33 bp, Homo sapien
cattttacaatgttactgctgattataggatga

SEQ ID NO: 717481 - DNA, 33 bp, Homo sapien
tcatcctatctgaagacaaagtgcgattctgga

SEQ ID NO: 717482 - DNA, 33 bp, Homo sapien
tcatcctatctgaagagaaagtgcgattctgga

SEQ ID NO: 717483 - DNA, 33 bp, Homo sapien
tcaacgacatttcctccagttaggtaaacaaat

SEQ ID NO: 717484 - DNA, 33 bp, Homo sapien
tcaacgacatttcctcgagttaggtaaacaaat

SEQ ID NO: 717485 - DNA, 33 bp, Homo sapien
ctgtatcctgatagtgccacaatttgcttttcc

SEQ ID NO: 717486 - DNA, 33 bp, Homo sapien
ctgtatcctgatagtgtcacaatttgcttttcc

SEQ ID NO: 717487 - DNA, 33 bp, Homo sapien
cttcttcattggttcacgtgtgtactccttgtt

SEQ ID NO: 717488 - DNA, 33 bp, Homo sapien
cttcttcattggttcatgtgtgtactccttgtt

SEQ ID NO: 717489 - DNA, 33 bp, Homo sapien
aagagatatgctttccagaagaaaaggaacata

SEQ ID NO: 717490 - DNA, 33 bp, Homo sapien
aagagatatgctttccggaagaaaaggaacata

SEQ ID NO: 717491 - DNA, 33 bp, Homo sapien
caatagcacccactgacgcacaaaaattgtttc

SEQ ID NO: 717492 - DNA, 33 bp, Homo sapien
caatagcacccactgatgcacaaaaattgtttc

SEQ ID NO: 717493 - DNA, 33 bp, Homo sapien
gaaatgatagacagaaagaaacttcatagagga

SEQ ID NO: 717494 - DNA, 33 bp, Homo sapien
gaaatgatagacagaaggaaacttcatagagga

SEQ ID NO: 717495 - DNA, 33 bp, Homo sapien
ccaaatatggatgtagccaaaaatcacagtagt

SEQ ID NO: 717496 - DNA, 33 bp, Homo sapien
ccaaatatggatgtaggcaaaaatcacagtagt

SEQ ID NO: 717497 - DNA, 33 bp, Homo sapien
atgctatatttaatccaaatccaattcaaatca

SEQ ID NO: 717498 - DNA, 33 bp, Homo sapien
atgctatatttaatcctaatccaattcaaatca

SEQ ID NO: 717499 - DNA, 33 bp, Homo sapien
tgtgagacagctgatacgatatctaattcacag

SEQ ID NO: 717500 - DNA, 33 bp, Homo sapien
tgtgagacagctgataggatatctaattcacag

SEQ ID NO: 717501 - DNA, 33 bp, Homo sapien
aagagtattgtcctcccgattcaaatcaaaatt

SEQ ID NO: 717502 - DNA, 33 bp, Homo sapien
aagagtattgtcctcctgattcaaatcaaaatt

SEQ ID NO: 717503 - DNA, 33 bp, Homo sapien
aaaattggtgagataaaaggtagcgataagtct

SEQ ID NO: 717504 - DNA, 33 bp, Homo sapien
aaaattggtgagataacaggtagcgataagtct

SEQ ID NO: 717505 - DNA, 33 bp, Homo sapien
gagataagtcaagtacaaaattgttgtaacacg

SEQ ID NO: 717506 - DNA, 33 bp, Homo sapien
gagataagtcaagtactaaattgttgtaacacg

SEQ ID NO: 717507 - DNA, 33 bp, Homo sapien
gaggttatagtgagccaaaagtgaaatacatat

SEQ ID NO: 717508 - DNA, 33 bp, Homo sapien
gaggttatagtgagccgaaagtgaaatacatat

SEQ ID NO: 717509 - DNA, 33 bp, Homo sapien
ccaagtgctttacagacggattccctatggcat

SEQ ID NO: 717510 - DNA, 33 bp, Homo sapien
ccaagtgctttacagatggattccctatggcat

SEQ ID NO: 717511 - DNA, 33 bp, Homo sapien
tggagtttcttggtaacgacaccctgcatcctg

SEQ ID NO: 717512 - DNA, 33 bp, Homo sapien
tggagtttcttggtaatgacaccctgcatcctg

SEQ ID NO: 717513 - DNA, 33 bp, Homo sapien
agatcatcaaatttaaccattttagtacactgt

SEQ ID NO: 717514 - DNA, 33 bp, Homo sapien
agatcatcaaatttaagcattttagtacactgt

SEQ ID NO: 717515 - DNA, 33 bp, Homo sapien
attttcaagtgcagtgcaaatttgtggttttaa

SEQ ID NO: 717516 - DNA, 33 bp, Homo sapien
attttcaagtgcagtgtaaatttgtggttttaa

SEQ ID NO: 717517 - DNA, 33 bp, Homo sapien
aatcacatttttaacactcaaaacactcattct

SEQ ID NO: 717518 - DNA, 33 bp, Homo sapien
aatcacatttttaacattcaaaacactcattct

SEQ ID NO: 717519 - DNA, 33 bp, Homo sapien
tcagtatcgtcccataactttcaattttcaata

SEQ ID NO: 717520 - DNA, 33 bp, Homo sapien
tcagtatcgtcccatagctttcaattttcaata

SEQ ID NO: 717521 - DNA, 33 bp, Homo sapien
aatgacagaagcagaacggattattatgaaaaa

SEQ ID NO: 717522 - DNA, 33 bp, Homo sapien
aatgacagaagcagaatggattattatgaaaaa

SEQ ID NO: 717523 - DNA, 33 bp, Homo sapien
tattcagtaaagtgacccaaaatcattcattaa

SEQ ID NO: 717524 - DNA, 33 bp, Homo sapien
tattcagtaaagtgactcaaaatcattcattaa

SEQ ID NO: 717525 - DNA, 33 bp, Homo sapien
tgactataaaatgaaacgataatagcagctctt

SEQ ID NO: 717526 - DNA, 33 bp, Homo sapien
tgactataaaatgaaatgataatagcagctctt

SEQ ID NO: 717527 - DNA, 33 bp, Homo sapien
aacatagaaaagttacaagaaaaatgcagtatt

SEQ ID NO: 717528 - DNA, 33 bp, Homo sapien
aacatagaaaagttacgagaaaaatgcagtatt

SEQ ID NO: 717529 - DNA, 33 bp, Homo sapien
ttttatttgtaaaacacggtagttgcaagtaac

SEQ ID NO: 717530 - DNA, 33 bp, Homo sapien
ttttatttgtaaaacatggtagttgcaagtaac

SEQ ID NO: 717531 - DNA, 33 bp, Homo sapien
tatagggaaactgaacaaagcaactgaaaaaac

SEQ ID NO: 717532 - DNA, 33 bp, Homo sapien
tatagggaaactgaacgaagcaactgaaaaaac

SEQ ID NO: 717533 - DNA, 33 bp, Homo sapien
ttcaaggatgtttgtaaagccaacacacttggg

SEQ ID NO: 717534 - DNA, 33 bp, Homo sapien
ttcaaggatgtttgtatagccaacacacttggg

SEQ ID NO: 717535 - DNA, 33 bp, Homo sapien
gtgctgccatttgtgccgactacacagctgatt

SEQ ID NO: 717536 - DNA, 33 bp, Homo sapien
gtgctgccatttgtgctgactacacagctgatt

SEQ ID NO: 717537 - DNA, 33 bp, Homo sapien
gaaaacaaccatgtcaataacaaagacaactag

SEQ ID NO: 717538 - DNA, 33 bp, Homo sapien
gaaaacaaccatgtcactaacaaagacaactag

SEQ ID NO: 717539 - DNA, 33 bp, Homo sapien
taaagatactaagcctcaattatcatgattaaa

SEQ ID NO: 717540 - DNA, 33 bp, Homo sapien
taaagatactaagcctgaattatcatgattaaa

SEQ ID NO: 717541 - DNA, 33 bp, Homo sapien
tatgtctaacattttgaatcagcttatttatat

SEQ ID NO: 717542 - DNA, 33 bp, Homo sapien
tatgtctaacattttgcatcagcttatttatat

SEQ ID NO: 717543 - DNA, 33 bp, Homo sapien
ctttgacatctgcttcaccgtactagaaactct

SEQ ID NO: 717544 - DNA, 33 bp, Homo sapien
ctttgacatctgcttcgccgtactagaaactct

SEQ ID NO: 717545 - DNA, 33 bp, Homo sapien
ctctctaagccgctcaacttcttaaatgtgaaa

SEQ ID NO: 717546 - DNA, 33 bp, Homo sapien
ctctctaagccgctcagcttcttaaatgtgaaa

SEQ ID NO: 717547 - DNA, 33 bp, Homo sapien
aaatgtgaaaagacaacgctatcttcctcttat

SEQ ID NO: 717548 - DNA, 33 bp, Homo sapien
aaatgtgaaaagacaatgctatcttcctcttat

SEQ ID NO: 717549 - DNA, 33 bp, Homo sapien
ataacttcacaaagaacgtatttacacactgct

SEQ ID NO: 717550 - DNA, 33 bp, Homo sapien
ataacttcacaaagaatgtatttacacactgct

SEQ ID NO: 717551 - DNA, 33 bp, Homo sapien
gtaacactttagaaaaatgagttaaaatattag

SEQ ID NO: 717552 - DNA, 33 bp, Homo sapien
gtaacactttagaaaactgagttaaaatattag

SEQ ID NO: 717553 - DNA, 33 bp, Homo sapien
agaactgtatatgagccattttcctgaatataa

SEQ ID NO: 717554 - DNA, 33 bp, Homo sapien
agaactgtatatgagcgattttcctgaatataa

SEQ ID NO: 717555 - DNA, 33 bp, Homo sapien
accttgagaatcattaaaaattcattgtctaac

SEQ ID NO: 717556 - DNA, 33 bp, Homo sapien
accttgagaatcattagaaattcattgtctaac

SEQ ID NO: 717557 - DNA, 33 bp, Homo sapien
tgaacttgattctagaaatgtgtttgaagtgac

SEQ ID NO: 717558 - DNA, 33 bp, Homo sapien
tgaacttgattctagatatgtgtttgaagtgac

SEQ ID NO: 717559 - DNA, 33 bp, Homo sapien
acagacaggagatccaagatgagacaagactga

SEQ ID NO: 717560 - DNA, 33 bp, Homo sapien
acagacaggagatccaggatgagacaagactga

SEQ ID NO: 717561 - DNA, 33 bp, Homo sapien
aaagtgcagagtgttacgcagtaagtacaaaag

SEQ ID NO: 717562 - DNA, 33 bp, Homo sapien
aaagtgcagagtgttatgcagtaagtacaaaag

SEQ ID NO: 717563 - DNA, 33 bp, Homo sapien
ttcagcctgttgattacactactgcaggaagag

SEQ ID NO: 717564 - DNA, 33 bp, Homo sapien
ttcagcctgttgattatactactgcaggaagag

SEQ ID NO: 717565 - DNA, 33 bp, Homo sapien
agttgagtgccaagaaaaatcttgcttttgaaa

SEQ ID NO: 717566 - DNA, 33 bp, Homo sapien
agttgagtgccaagaagaatcttgcttttgaaa

SEQ ID NO: 717567 - DNA, 33 bp, Homo sapien
taaaaggaatagcctacctttctatgtgtctat

SEQ ID NO: 717568 - DNA, 33 bp, Homo sapien
taaaaggaatagcctatctttctatgtgtctat

SEQ ID NO: 717569 - DNA, 33 bp, Homo sapien
tttgccaatgttatcaaaacaaggaagtgtgtt

SEQ ID NO: 717570 - DNA, 33 bp, Homo sapien
tttgccaatgttatcagaacaaggaagtgtgtt

SEQ ID NO: 717571 - DNA, 33 bp, Homo sapien
tgcacctgctctgtaggaggcaatatggaggat

SEQ ID NO: 717572 - DNA, 33 bp, Homo sapien
tgcacctgctctgtagtaggcaatatggaggat

SEQ ID NO: 717573 - DNA, 33 bp, Homo sapien
cagttttatttctcaaatattgggcgttaatac

SEQ ID NO: 717574 - DNA, 33 bp, Homo sapien
cagttttatttctcaagtattgggcgttaatac

SEQ ID NO: 717575 - DNA, 33 bp, Homo sapien
atacaaaactctattcacacatgatgttttttt

SEQ ID NO: 717576 - DNA, 33 bp, Homo sapien
atacaaaactctattctcacatgatgttttttt

SEQ ID NO: 717577 - DNA, 33 bp, Homo sapien
aaagtaaactggtagcaattcatcaaatgaaat

SEQ ID NO: 717578 - DNA, 33 bp, Homo sapien
aaagtaaactggtagcgattcatcaaatgaaat

SEQ ID NO: 717579 - DNA, 33 bp, Homo sapien
tggacaataatttcggcatgtgctgaacttctg

SEQ ID NO: 717580 - DNA, 33 bp, Homo sapien
tggacaataatttcggtatgtgctgaacttctg

SEQ ID NO: 717581 - DNA, 33 bp, Homo sapien
attaaattggatagctaaacactctttacaagt

SEQ ID NO: 717582 - DNA, 33 bp, Homo sapien
attaaattggatagcttaacactctttacaagt

SEQ ID NO: 717583 - DNA, 33 bp, Homo sapien
tatttccaaaacatgaccagaaatagcaaagcc

SEQ ID NO: 717584 - DNA, 33 bp, Homo sapien
tatttccaaaacatgatcagaaatagcaaagcc

SEQ ID NO: 717585 - DNA, 33 bp, Homo sapien
catcttactagataacaagtgtggacccatgtc

SEQ ID NO: 717586 - DNA, 33 bp, Homo sapien
catcttactagataaccagtgtggacccatgtc

SEQ ID NO: 717587 - DNA, 33 bp, Homo sapien
ggcacgccctgcggcaaaaagaacttcccagga

SEQ ID NO: 717588 - DNA, 33 bp, Homo sapien
ggcacgccctgcggcagaaagaacttcccagga

SEQ ID NO: 717589 - DNA, 33 bp, Homo sapien
ggtgcaatatagatacagcagtaaagatgttaa

SEQ ID NO: 717590 - DNA, 33 bp, Homo sapien
ggtgcaatatagatacggcagtaaagatgttaa

SEQ ID NO: 717591 - DNA, 33 bp, Homo sapien
ttttaaacaggacacagggtcagaatttggggg

SEQ ID NO: 717592 - DNA, 33 bp, Homo sapien
ttttaaacaggacacatggtcagaatttggggg

SEQ ID NO: 717593 - DNA, 33 bp, Homo sapien
ttatcaactgcattacacttttaaacaggacac

SEQ ID NO: 717594 - DNA, 33 bp, Homo sapien
ttatcaactgcattacgcttttaaacaggacac

SEQ ID NO: 717595 - DNA, 33 bp, Homo sapien
cacctaaatgcgcttacgatcttttgcacaagg

SEQ ID NO: 717596 - DNA, 33 bp, Homo sapien
cacctaaatgcgcttatgatcttttgcacaagg

SEQ ID NO: 717597 - DNA, 33 bp, Homo sapien
attctaatacagcagaagagttgtttgctgcac

SEQ ID NO: 717598 - DNA, 33 bp, Homo sapien
attctaatacagcagaggagttgtttgctgcac

SEQ ID NO: 717599 - DNA, 33 bp, Homo sapien
aagagtgctagaacagactaacaatggccataa

SEQ ID NO: 717600 - DNA, 33 bp, Homo sapien
aagagtgctagaacaggctaacaatggccataa

SEQ ID NO: 717601 - DNA, 33 bp, Homo sapien
ttatagtattgtattacgtagagaagatgaaga

SEQ ID NO: 717602 - DNA, 33 bp, Homo sapien
ttatagtattgtattaggtagagaagatgaaga

SEQ ID NO: 717603 - DNA, 33 bp, Homo sapien
ttaacataccactggacctggatatcagccagc

SEQ ID NO: 717604 - DNA, 33 bp, Homo sapien
ttaacataccactggatctggatatcagccagc

SEQ ID NO: 717605 - DNA, 33 bp, Homo sapien
atgaagaaatgtgtcaccaaatccttgctttaa

SEQ ID NO: 717606 - DNA, 33 bp, Homo sapien
atgaagaaatgtgtcatcaaatccttgctttaa

SEQ ID NO: 717607 - DNA, 33 bp, Homo sapien
tgatttttgatttgtcaactccctgtctgtcta

SEQ ID NO: 717608 - DNA, 33 bp, Homo sapien
tgatttttgatttgtcgactccctgtctgtcta

SEQ ID NO: 717609 - DNA, 33 bp, Homo sapien
cttctgaaagcccccacagaagaatcacagcaa

SEQ ID NO: 717610 - DNA, 33 bp, Homo sapien
cttctgaaagcccccatagaagaatcacagcaa

SEQ ID NO: 717611 - DNA, 33 bp, Homo sapien
ctccaccactcttccactctttcatggtcttct

SEQ ID NO: 717612 - DNA, 33 bp, Homo sapien
ctccaccactcttccagtctttcatggtcttct

SEQ ID NO: 717613 - DNA, 33 bp, Homo sapien
aaggtgtttgagtctaatactacactaacagct

SEQ ID NO: 717614 - DNA, 33 bp, Homo sapien
aaggtgtttgagtctattactacactaacagct

SEQ ID NO: 717615 - DNA, 33 bp, Homo sapien
cttgatctgtctttcaaaatcttgacactttta

SEQ ID NO: 717616 - DNA, 33 bp, Homo sapien
cttgatctgtctttcacaatcttgacactttta

SEQ ID NO: 717617 - DNA, 33 bp, Homo sapien
actgcaaaggctcggacgctcaggatcggaggc

SEQ ID NO: 717618 - DNA, 33 bp, Homo sapien
actgcaaaggctcggaggctcaggatcggaggc

SEQ ID NO: 717619 - DNA, 33 bp, Homo sapien
atctagaaattttcccgcaggttatttagcccc

SEQ ID NO: 717620 - DNA, 33 bp, Homo sapien
atctagaaattttccctcaggttatttagcccc

SEQ ID NO: 717621 - DNA, 33 bp, Homo sapien
aaggaattctgtggccaggcagaacacatacag

SEQ ID NO: 717622 - DNA, 33 bp, Homo sapien
aaggaattctgtggccgggcagaacacatacag

SEQ ID NO: 717623 - DNA, 33 bp, Homo sapien
ggggtttcagagattaagcaaaaagttaaagaa

SEQ ID NO: 717624 - DNA, 33 bp, Homo sapien
ggggtttcagagattaggcaaaaagttaaagaa

SEQ ID NO: 717625 - DNA, 33 bp, Homo sapien
tgctttcagcaacaaacaaccaccaagcaataa

SEQ ID NO: 717626 - DNA, 33 bp, Homo sapien
tgctttcagcaacaaataaccaccaagcaataa

SEQ ID NO: 717627 - DNA, 33 bp, Homo sapien
tcgcagcatctagaaaacaatcggcccacacaa

SEQ ID NO: 717628 - DNA, 33 bp, Homo sapien
tcgcagcatctagaaagcaatcggcccacacaa

SEQ ID NO: 717629 - DNA, 33 bp, Homo sapien
tcaatgagagatgacacagattggagttggggt

SEQ ID NO: 717630 - DNA, 33 bp, Homo sapien
tcaatgagagatgacagagattggagttggggt

SEQ ID NO: 717631 - DNA, 33 bp, Homo sapien
ccccatcttttgctaacatagtcctggctgctt

SEQ ID NO: 717632 - DNA, 33 bp, Homo sapien
ccccatcttttgctaatatagtcctggctgctt

SEQ ID NO: 717633 - DNA, 33 bp, Homo sapien
ctatgtcagatagggacgttttcacctctcaaa

SEQ ID NO: 717634 - DNA, 33 bp, Homo sapien
ctatgtcagatagggatgttttcacctctcaaa

SEQ ID NO: 717635 - DNA, 33 bp, Homo sapien
aagaataggagcacaccggagaacaaactgtaa

SEQ ID NO: 717636 - DNA, 33 bp, Homo sapien
aagaataggagcacactggagaacaaactgtaa

SEQ ID NO: 717637 - DNA, 33 bp, Homo sapien
ttatcaggcttctacaccgtaaagttacacttt

SEQ ID NO: 717638 - DNA, 33 bp, Homo sapien
ttatcaggcttctacatcgtaaagttacacttt

SEQ ID NO: 717639 - DNA, 33 bp, Homo sapien
acatttccaacaaacaaggacagtctgctacat

SEQ ID NO: 717640 - DNA, 33 bp, Homo sapien
acatttccaacaaacagggacagtctgctacat

SEQ ID NO: 717641 - DNA, 33 bp, Homo sapien
agcagtcattggtccacagaaattataaaatcc

SEQ ID NO: 717642 - DNA, 33 bp, Homo sapien
agcagtcattggtccatagaaattataaaatcc

SEQ ID NO: 717643 - DNA, 33 bp, Homo sapien
taaagtttcatgagcaaaataagcactgcaaaa

SEQ ID NO: 717644 - DNA, 33 bp, Homo sapien
taaagtttcatgagcagaataagcactgcaaaa

SEQ ID NO: 717645 - DNA, 33 bp, Homo sapien
aattatggaattactaacagacttggctttctg

SEQ ID NO: 717646 - DNA, 33 bp, Homo sapien
aattatggaattactatcagacttggctttctg

SEQ ID NO: 717647 - DNA, 33 bp, Homo sapien
attcaagtggacttgaggaagaaaatttattta

SEQ ID NO: 717648 - DNA, 33 bp, Homo sapien
attcaagtggacttgatgaagaaaatttattta

SEQ ID NO: 717649 - DNA, 33 bp, Homo sapien
gtaagccattaggaaacggctccctattcaata

SEQ ID NO: 717650 - DNA, 33 bp, Homo sapien
gtaagccattaggaaagggctccctattcaata

SEQ ID NO: 717651 - DNA, 33 bp, Homo sapien
tttttcagttttcctcacgttattgacttctag

SEQ ID NO: 717652 - DNA, 33 bp, Homo sapien
tttttcagttttcctcgcgttattgacttctag

SEQ ID NO: 717653 - DNA, 33 bp, Homo sapien
tggaaccgaatggagaacctagaattaaatcca

SEQ ID NO: 717654 - DNA, 33 bp, Homo sapien
tggaaccgaatggagagcctagaattaaatcca

SEQ ID NO: 717655 - DNA, 33 bp, Homo sapien
ctgtgatgtcacatacaatttccacagcaggca

SEQ ID NO: 717656 - DNA, 33 bp, Homo sapien
ctgtgatgtcacataccatttccacagcaggca

SEQ ID NO: 717657 - DNA, 33 bp, Homo sapien
tgtggtaaactccaaactgataattatgacaaa

SEQ ID NO: 717658 - DNA, 33 bp, Homo sapien
tgtggtaaactccaaattgataattatgacaaa

SEQ ID NO: 717659 - DNA, 33 bp, Homo sapien
tgtttccagtactctcaaaataaagatttgcac

SEQ ID NO: 717660 - DNA, 33 bp, Homo sapien
tgtttccagtactctcgaaataaagatttgcac

SEQ ID NO: 717661 - DNA, 33 bp, Homo sapien
aaagagtctgtctgtgccaaggctagagtgtag

SEQ ID NO: 717662 - DNA, 33 bp, Homo sapien
aaagagtctgtctgtgtcaaggctagagtgtag

SEQ ID NO: 717663 - DNA, 33 bp, Homo sapien
gctacccagcaagcaacacacgtaaacaactat

SEQ ID NO: 717664 - DNA, 33 bp, Homo sapien
gctacccagcaagcaagacacgtaaacaactat

SEQ ID NO: 717665 - DNA, 33 bp, Homo sapien
actaccttctaattccacacattttaacagtct

SEQ ID NO: 717666 - DNA, 33 bp, Homo sapien
actaccttctaattccgcacattttaacagtct

SEQ ID NO: 717667 - DNA, 33 bp, Homo sapien
gttacagctttcagttaaaaatgcagaaacgta

SEQ ID NO: 717668 - DNA, 33 bp, Homo sapien
gttacagctttcagttgaaaatgcagaaacgta

SEQ ID NO: 717669 - DNA, 33 bp, Homo sapien
ccactgcttcctacaaagagaattcaataagtt

SEQ ID NO: 717670 - DNA, 33 bp, Homo sapien
ccactgcttcctacaatgagaattcaataagtt

SEQ ID NO: 717671 - DNA, 33 bp, Homo sapien
cctcaaccatcagtgaaagttaatcattgcact

SEQ ID NO: 717672 - DNA, 33 bp, Homo sapien
cctcaaccatcagtgagagttaatcattgcact

SEQ ID NO: 717673 - DNA, 33 bp, Homo sapien
atcattctgatccaaaacaggtaagaagtgcag

SEQ ID NO: 717674 - DNA, 33 bp, Homo sapien
atcattctgatccaaatcaggtaagaagtgcag

SEQ ID NO: 717675 - DNA, 33 bp, Homo sapien
tctgtatggaaattaaaaccttagcctctggcc

SEQ ID NO: 717676 - DNA, 33 bp, Homo sapien
tctgtatggaaattaagaccttagcctctggcc

SEQ ID NO: 717677 - DNA, 33 bp, Homo sapien
tctagataatacaaccacaggtgtacatggttc

SEQ ID NO: 717678 - DNA, 33 bp, Homo sapien
tctagataatacaaccgcaggtgtacatggttc

SEQ ID NO: 717679 - DNA, 33 bp, Homo sapien
aataaaacattcactcagaagtttgaggcgtga

SEQ ID NO: 717680 - DNA, 33 bp, Homo sapien
aataaaacattcactcggaagtttgaggcgtga

SEQ ID NO: 717681 - DNA, 33 bp, Homo sapien
aattgagatgatgcaaatacctttccatataat

SEQ ID NO: 717682 - DNA, 33 bp, Homo sapien
aattgagatgatgcaattacctttccatataat

SEQ ID NO: 717683 - DNA, 33 bp, Homo sapien
atgtgtaggagctaaacagtagcaatatattct

SEQ ID NO: 717684 - DNA, 33 bp, Homo sapien
atgtgtaggagctaaagagtagcaatatattct

SEQ ID NO: 717685 - DNA, 33 bp, Homo sapien
ggggcaagtcctttaaatgacaaactgctatgg

SEQ ID NO: 717686 - DNA, 33 bp, Homo sapien
ggggcaagtcctttaagtgacaaactgctatgg

SEQ ID NO: 717687 - DNA, 33 bp, Homo sapien
atatgtgggggatctaaggttgtactcagtata

SEQ ID NO: 717688 - DNA, 33 bp, Homo sapien
atatgtgggggatctagggttgtactcagtata

SEQ ID NO: 717689 - DNA, 33 bp, Homo sapien
actggataggtctctaaaagtctgtatcagtta

SEQ ID NO: 717690 - DNA, 33 bp, Homo sapien
actggataggtctctacaagtctgtatcagtta

SEQ ID NO: 717691 - DNA, 33 bp, Homo sapien
agagagtcttccatacaggttacaaagaaaggg

SEQ ID NO: 717692 - DNA, 33 bp, Homo sapien
agagagtcttccatacgggttacaaagaaaggg

SEQ ID NO: 717693 - DNA, 33 bp, Homo sapien
ctcatgatcccagacactagtcagggcggtgat

SEQ ID NO: 717694 - DNA, 33 bp, Homo sapien
ctcatgatcccagacattagtcagggcggtgat

SEQ ID NO: 717695 - DNA, 33 bp, Homo sapien
tattgctcattaaggcccttcaacaaagaaagg

SEQ ID NO: 717696 - DNA, 33 bp, Homo sapien
tattgctcattaaggctcttcaacaaagaaagg

SEQ ID NO: 717697 - DNA, 33 bp, Homo sapien
agtcttggtctgtcacacaatcctcctgggttc

SEQ ID NO: 717698 - DNA, 33 bp, Homo sapien
agtcttggtctgtcacgcaatcctcctgggttc

SEQ ID NO: 717699 - DNA, 33 bp, Homo sapien
cggagacgggtacgaactaccatgacaacagcg

SEQ ID NO: 717700 - DNA, 33 bp, Homo sapien
cggagacgggtacgaattaccatgacaacagcg

SEQ ID NO: 717701 - DNA, 33 bp, Homo sapien
acttgataatgacctacgagagaattaatgaca

SEQ ID NO: 717702 - DNA, 33 bp, Homo sapien
acttgataatgacctatgagagaattaatgaca

SEQ ID NO: 717703 - DNA, 33 bp, Homo sapien
cgtattaaagtaaacacagtgcctggtctagga

SEQ ID NO: 717704 - DNA, 33 bp, Homo sapien
cgtattaaagtaaacagagtgcctggtctagga

SEQ ID NO: 717705 - DNA, 33 bp, Homo sapien
tgtctgttcaaaaacaagtcaataaagtattac

SEQ ID NO: 717706 - DNA, 33 bp, Homo sapien
tgtctgttcaaaaacaggtcaataaagtattac

SEQ ID NO: 717707 - DNA, 33 bp, Homo sapien
taacaagactttagtgcaaactgcaaaataaca

SEQ ID NO: 717708 - DNA, 33 bp, Homo sapien
taacaagactttagtggaaactgcaaaataaca

SEQ ID NO: 717709 - DNA, 33 bp, Homo sapien
acacatgataggcacaacatctactaaatattt

SEQ ID NO: 717710 - DNA, 33 bp, Homo sapien
acacatgataggcacaccatctactaaatattt

SEQ ID NO: 717711 - DNA, 33 bp, Homo sapien
taagcaagctaatgtgaaatcagaaaaatcaaa

SEQ ID NO: 717712 - DNA, 33 bp, Homo sapien
taagcaagctaatgtggaatcagaaaaatcaaa

SEQ ID NO: 717713 - DNA, 33 bp, Homo sapien
aacccatctggagaaaacatttcaaaatcttca

SEQ ID NO: 717714 - DNA, 33 bp, Homo sapien
aacccatctggagaaaccatttcaaaatcttca

SEQ ID NO: 717715 - DNA, 33 bp, Homo sapien
accagagctaacatggaataaagcctaaggtta

SEQ ID NO: 717716 - DNA, 33 bp, Homo sapien
accagagctaacatggtataaagcctaaggtta

SEQ ID NO: 717717 - DNA, 33 bp, Homo sapien
atgaaattggagattaaaagactgagagcaaaa

SEQ ID NO: 717718 - DNA, 33 bp, Homo sapien
atgaaattggagattagaagactgagagcaaaa

SEQ ID NO: 717719 - DNA, 33 bp, Homo sapien
gctacgcaagaaagacaagtaattatttgatca

SEQ ID NO: 717720 - DNA, 33 bp, Homo sapien
gctacgcaagaaagactagtaattatttgatca

SEQ ID NO: 717721 - DNA, 33 bp, Homo sapien
gtaatctttttgcgctaaaggacaatacattcc

SEQ ID NO: 717722 - DNA, 33 bp, Homo sapien
gtaatctttttgcgctgaaggacaatacattcc

SEQ ID NO: 717723 - DNA, 33 bp, Homo sapien
aggacttatgatagtacaggttaagcattccta

SEQ ID NO: 717724 - DNA, 33 bp, Homo sapien
aggacttatgatagtataggttaagcattccta

SEQ ID NO: 717725 - DNA, 33 bp, Homo sapien
acaatccggaagccaactatccccttcaagttt

SEQ ID NO: 717726 - DNA, 33 bp, Homo sapien
acaatccggaagccaagtatccccttcaagttt

SEQ ID NO: 717727 - DNA, 33 bp, Homo sapien
aaagaaaagcggcccaactggagagagttgact

SEQ ID NO: 717728 - DNA, 33 bp, Homo sapien
aaagaaaagcggcccagctggagagagttgact

SEQ ID NO: 717729 - DNA, 33 bp, Homo sapien
tacaatgtggaaggaacgtgagctatctcacac

SEQ ID NO: 717730 - DNA, 33 bp, Homo sapien
tacaatgtggaaggaatgtgagctatctcacac

SEQ ID NO: 717731 - DNA, 33 bp, Homo sapien
gttaatatgcctgttaccatagtagtgttgttt

SEQ ID NO: 717732 - DNA, 33 bp, Homo sapien
gttaatatgcctgttatcatagtagtgttgttt

SEQ ID NO: 717733 - DNA, 33 bp, Homo sapien
agaactgagtttcaaacccaggtcagtttaata

SEQ ID NO: 717734 - DNA, 33 bp, Homo sapien
agaactgagtttcaaatccaggtcagtttaata

SEQ ID NO: 717735 - DNA, 33 bp, Homo sapien
agcgattgtttacaaacgaaatgtactcctgtt

SEQ ID NO: 717736 - DNA, 33 bp, Homo sapien
agcgattgtttacaaatgaaatgtactcctgtt

SEQ ID NO: 717737 - DNA, 33 bp, Homo sapien
aagcagtactcacaaaattgtttatgaaaagac

SEQ ID NO: 717738 - DNA, 33 bp, Homo sapien
aagcagtactcacaaacttgtttatgaaaagac

SEQ ID NO: 717739 - DNA, 33 bp, Homo sapien
ggttgggactggtaccaagatggagaaattgga

SEQ ID NO: 717740 - DNA, 33 bp, Homo sapien
ggttgggactggtacccagatggagaaattgga

SEQ ID NO: 717741 - DNA, 33 bp, Homo sapien
cattgggtttagtaaccgtgatgtgatgagtga

SEQ ID NO: 717742 - DNA, 33 bp, Homo sapien
cattgggtttagtaactgtgatgtgatgagtga

SEQ ID NO: 717743 - DNA, 33 bp, Homo sapien
tgttcttaagagataaacggcgaaggagattct

SEQ ID NO: 717744 - DNA, 33 bp, Homo sapien
tgttcttaagagataaccggcgaaggagattct

SEQ ID NO: 717745 - DNA, 33 bp, Homo sapien
ttgcactaatggccacaatttgtccaagcctcc

SEQ ID NO: 717746 - DNA, 33 bp, Homo sapien
ttgcactaatggccacgatttgtccaagcctcc

SEQ ID NO: 717747 - DNA, 33 bp, Homo sapien
ccagatctaaagtgcagtagcgctctcagcact

SEQ ID NO: 717748 - DNA, 33 bp, Homo sapien
ccagatctaaagtgcattagcgctctcagcact

SEQ ID NO: 717749 - DNA, 33 bp, Homo sapien
aaaagttaaatgtaagacccaaaattataaaaa

SEQ ID NO: 717750 - DNA, 33 bp, Homo sapien
aaaagttaaatgtaagtcccaaaattataaaaa

SEQ ID NO: 717751 - DNA, 33 bp, Homo sapien
taactcactattctaaattacaggtctcagatg

SEQ ID NO: 717752 - DNA, 33 bp, Homo sapien
taactcactattctaagttacaggtctcagatg

SEQ ID NO: 717753 - DNA, 33 bp, Homo sapien
aatgtagaaataaaaacggcaaagtatgtgaga

SEQ ID NO: 717754 - DNA, 33 bp, Homo sapien
aatgtagaaataaaaatggcaaagtatgtgaga

SEQ ID NO: 717755 - DNA, 33 bp, Homo sapien
atgataacatatattaaactctctaaaccagct

SEQ ID NO: 717756 - DNA, 33 bp, Homo sapien
atgataacatatattagactctctaaaccagct

SEQ ID NO: 717757 - DNA, 33 bp, Homo sapien
aaaaaagacagcgagaaaaaaggactaactctt

SEQ ID NO: 717758 - DNA, 33 bp, Homo sapien
aaaaaagacagcgagagaaaaggactaactctt

SEQ ID NO: 717759 - DNA, 33 bp, Homo sapien
cctaactgagccatgacctgtacatttgtaata

SEQ ID NO: 717760 - DNA, 33 bp, Homo sapien
cctaactgagccatgagctgtacatttgtaata

SEQ ID NO: 717761 - DNA, 33 bp, Homo sapien
aagagaaatgaacttgaaaactagaagggattg

SEQ ID NO: 717762 - DNA, 33 bp, Homo sapien
aagagaaatgaacttggaaactagaagggattg

SEQ ID NO: 717763 - DNA, 33 bp, Homo sapien
tttaggaaagtgtgaccaaaaagttaacaccta

SEQ ID NO: 717764 - DNA, 33 bp, Homo sapien
tttaggaaagtgtgactaaaaagttaacaccta

SEQ ID NO: 717765 - DNA, 33 bp, Homo sapien
aattactttgtacgccacccattaacagttagg

SEQ ID NO: 717766 - DNA, 33 bp, Homo sapien
aattactttgtacgccgcccattaacagttagg

SEQ ID NO: 717767 - DNA, 33 bp, Homo sapien
ggagtgccaaatcttccagggctacttatagtt

SEQ ID NO: 717768 - DNA, 33 bp, Homo sapien
ggagtgccaaatcttctagggctacttatagtt

SEQ ID NO: 717769 - DNA, 33 bp, Homo sapien
catattcacagttcacaactttcacacatatgg

SEQ ID NO: 717770 - DNA, 33 bp, Homo sapien
catattcacagttcacgactttcacacatatgg

SEQ ID NO: 717771 - DNA, 33 bp, Homo sapien
tttttgttttgaaataactttagcttgtgggtt

SEQ ID NO: 717772 - DNA, 33 bp, Homo sapien
tttttgttttgaaatatctttagcttgtgggtt

SEQ ID NO: 717773 - DNA, 33 bp, Homo sapien
ccattaacttcagtaccaaaggatctaatatca

SEQ ID NO: 717774 - DNA, 33 bp, Homo sapien
ccattaacttcagtacgaaaggatctaatatca

SEQ ID NO: 717775 - DNA, 33 bp, Homo sapien
gtgtgcttgcaactgaagtgagaccacaaagta

SEQ ID NO: 717776 - DNA, 33 bp, Homo sapien
gtgtgcttgcaactgaggtgagaccacaaagta

SEQ ID NO: 717777 - DNA, 33 bp, Homo sapien
gtttcactgtttttcaagtctgaatagcttgca

SEQ ID NO: 717778 - DNA, 33 bp, Homo sapien
gtttcactgtttttcaggtctgaatagcttgca

SEQ ID NO: 717779 - DNA, 33 bp, Homo sapien
tgggttgtctcagatacaaagagtttcccttct

SEQ ID NO: 717780 - DNA, 33 bp, Homo sapien
tgggttgtctcagatataaagagtttcccttct

SEQ ID NO: 717781 - DNA, 33 bp, Homo sapien
tggactcaacaggaaggattgtttagcagatct

SEQ ID NO: 717782 - DNA, 33 bp, Homo sapien
tggactcaacaggaagtattgtttagcagatct

SEQ ID NO: 717783 - DNA, 33 bp, Homo sapien
ctcagaactgagtgcacctttgcttaagctgtg

SEQ ID NO: 717784 - DNA, 33 bp, Homo sapien
ctcagaactgagtgcatctttgcttaagctgtg

SEQ ID NO: 717785 - DNA, 33 bp, Homo sapien
cttcaaagacaagcaaatcataggtacattttt

SEQ ID NO: 717786 - DNA, 33 bp, Homo sapien
cttcaaagacaagcaactcataggtacattttt

SEQ ID NO: 717787 - DNA, 33 bp, Homo sapien
gaataataccactatcacacagcctgtatcatg

SEQ ID NO: 717788 - DNA, 33 bp, Homo sapien
gaataataccactatcgcacagcctgtatcatg

SEQ ID NO: 717789 - DNA, 33 bp, Homo sapien
cttactttggctccaaagatcccctaaaagact

SEQ ID NO: 717790 - DNA, 33 bp, Homo sapien
cttactttggctccaaggatcccctaaaagact

SEQ ID NO: 717791 - DNA, 33 bp, Homo sapien
tatcttactataggaactaatacgtacatcttt

SEQ ID NO: 717792 - DNA, 33 bp, Homo sapien
tatcttactataggaattaatacgtacatcttt

SEQ ID NO: 717793 - DNA, 33 bp, Homo sapien
taaaattgtgatgtaccggttagaataatgtat

SEQ ID NO: 717794 - DNA, 33 bp, Homo sapien
taaaattgtgatgtactggttagaataatgtat

SEQ ID NO: 717795 - DNA, 33 bp, Homo sapien
ttaggaaaaccagtccacttttgactcatgtct

SEQ ID NO: 717796 - DNA, 33 bp, Homo sapien
ttaggaaaaccagtccgcttttgactcatgtct

SEQ ID NO: 717797 - DNA, 33 bp, Homo sapien
aagaaatttcagtccaacaaaattaaaattatt

SEQ ID NO: 717798 - DNA, 33 bp, Homo sapien
aagaaatttcagtccatcaaaattaaaattatt

SEQ ID NO: 717799 - DNA, 33 bp, Homo sapien
ttggaagattaaaaaaaaatgatgtggtagtaa

SEQ ID NO: 717800 - DNA, 33 bp, Homo sapien
ttggaagattaaaaaagaatgatgtggtagtaa

SEQ ID NO: 717801 - DNA, 33 bp, Homo sapien
ggactggaacaactcaatctcgctctttccgaa

SEQ ID NO: 717802 - DNA, 33 bp, Homo sapien
ggactggaacaactcagtctcgctctttccgaa

SEQ ID NO: 717803 - DNA, 33 bp, Homo sapien
taaataaataagacacagtaaaggatcatgttt

SEQ ID NO: 717804 - DNA, 33 bp, Homo sapien
taaataaataagacacggtaaaggatcatgttt

SEQ ID NO: 717805 - DNA, 33 bp, Homo sapien
ttgctcattactcttaagctgcctgtgatgaag

SEQ ID NO: 717806 - DNA, 33 bp, Homo sapien
ttgctcattactcttaggctgcctgtgatgaag

SEQ ID NO: 717807 - DNA, 33 bp, Homo sapien
aattgtcagagattaacgtcaaggactagcata

SEQ ID NO: 717808 - DNA, 33 bp, Homo sapien
aattgtcagagattaatgtcaaggactagcata

SEQ ID NO: 717809 - DNA, 33 bp, Homo sapien
aattcctctgtcagaacgcctttaaaagacctg

SEQ ID NO: 717810 - DNA, 33 bp, Homo sapien
aattcctctgtcagaatgcctttaaaagacctg

SEQ ID NO: 717811 - DNA, 33 bp, Homo sapien
tttctttgctgctttaacttaatccaaatgtag

SEQ ID NO: 717812 - DNA, 33 bp, Homo sapien
tttctttgctgctttagcttaatccaaatgtag

SEQ ID NO: 717813 - DNA, 33 bp, Homo sapien
agcaggtgctcactctaaaaaatacaatttaaa

SEQ ID NO: 717814 - DNA, 33 bp, Homo sapien
agcaggtgctcactctgaaaaatacaatttaaa

SEQ ID NO: 717815 - DNA, 33 bp, Homo sapien
ttttaacgagcctatcaatgaatttcattcttt

SEQ ID NO: 717816 - DNA, 33 bp, Homo sapien
ttttaacgagcctatcgatgaatttcattcttt

SEQ ID NO: 717817 - DNA, 33 bp, Homo sapien
ttggaatacctccttcaatcagcacagagcttt

SEQ ID NO: 717818 - DNA, 33 bp, Homo sapien
ttggaatacctccttctatcagcacagagcttt

SEQ ID NO: 717819 - DNA, 33 bp, Homo sapien
caatgaaacgtgaataaagaggaatcgccgcag

SEQ ID NO: 717820 - DNA, 33 bp, Homo sapien
caatgaaacgtgaatatagaggaatcgccgcag

SEQ ID NO: 717821 - DNA, 33 bp, Homo sapien
tcagcagcaacgataaataatgcagaattcagc

SEQ ID NO: 717822 - DNA, 33 bp, Homo sapien
tcagcagcaacgataagtaatgcagaattcagc

SEQ ID NO: 717823 - DNA, 33 bp, Homo sapien
gtattctataacatacaagactgtaaagatgtg

SEQ ID NO: 717824 - DNA, 33 bp, Homo sapien
gtattctataacatacgagactgtaaagatgtg

SEQ ID NO: 717825 - DNA, 33 bp, Homo sapien
tggagggccaactggacaagcataagcagggga

SEQ ID NO: 717826 - DNA, 33 bp, Homo sapien
tggagggccaactggagaagcataagcagggga

SEQ ID NO: 717827 - DNA, 33 bp, Homo sapien
agttttagactctaaacggaacctgaattaata

SEQ ID NO: 717828 - DNA, 33 bp, Homo sapien
agttttagactctaaatggaacctgaattaata

SEQ ID NO: 717829 - DNA, 33 bp, Homo sapien
catccagaacttcccacatacaggcacaaacaa

SEQ ID NO: 717830 - DNA, 33 bp, Homo sapien
catccagaacttcccagatacaggcacaaacaa

SEQ ID NO: 717831 - DNA, 33 bp, Homo sapien
gatgggtgagtgcacaaaaagagttgggtgccg

SEQ ID NO: 717832 - DNA, 33 bp, Homo sapien
gatgggtgagtgcacagaaagagttgggtgccg

SEQ ID NO: 717833 - DNA, 33 bp, Homo sapien
gtagagttataaaaaccatcagtatgtgggcca

SEQ ID NO: 717834 - DNA, 33 bp, Homo sapien
gtagagttataaaaacgatcagtatgtgggcca

SEQ ID NO: 717835 - DNA, 33 bp, Homo sapien
agactgtgttacatgaagaagagaaggaatagc

SEQ ID NO: 717836 - DNA, 33 bp, Homo sapien
agactgtgttacatgaggaagagaaggaatagc

SEQ ID NO: 717837 - DNA, 33 bp, Homo sapien
actttgatttaactacactgaaagacataagta

SEQ ID NO: 717838 - DNA, 33 bp, Homo sapien
actttgatttaactactctgaaagacataagta

SEQ ID NO: 717839 - DNA, 33 bp, Homo sapien
ctgcaagtgggatggcacttcagaggtgtcctg

SEQ ID NO: 717840 - DNA, 33 bp, Homo sapien
ctgcaagtgggatggcccttcagaggtgtcctg

SEQ ID NO: 717841 - DNA, 33 bp, Homo sapien
gaacagagagtatcccaagatgttgtttgatgc

SEQ ID NO: 717842 - DNA, 33 bp, Homo sapien
gaacagagagtatccccagatgttgtttgatgc

SEQ ID NO: 717843 - DNA, 33 bp, Homo sapien
tatgctgccaaattacacagggcttgataataa

SEQ ID NO: 717844 - DNA, 33 bp, Homo sapien
tatgctgccaaattacgcagggcttgataataa

SEQ ID NO: 717845 - DNA, 33 bp, Homo sapien
agtttagagtaaaactcacagcttctaattata

SEQ ID NO: 717846 - DNA, 33 bp, Homo sapien
agtttagagtaaaacttacagcttctaattata

SEQ ID NO: 717847 - DNA, 33 bp, Homo sapien
gcagaattcctctaatcaggtctgagtgtcatt

SEQ ID NO: 717848 - DNA, 33 bp, Homo sapien
gcagaattcctctaattaggtctgagtgtcatt

SEQ ID NO: 717849 - DNA, 33 bp, Homo sapien
tcaggaggacttgataacaaattttaaaagtaa

SEQ ID NO: 717850 - DNA, 33 bp, Homo sapien
tcaggaggacttgataccaaattttaaaagtaa

SEQ ID NO: 717851 - DNA, 33 bp, Homo sapien
agctccttttcatgataactaaggcccttatcc

SEQ ID NO: 717852 - DNA, 33 bp, Homo sapien
agctccttttcatgatgactaaggcccttatcc

SEQ ID NO: 717853 - DNA, 33 bp, Homo sapien
ctttctctgtgctctaacagcaccttccacatg

SEQ ID NO: 717854 - DNA, 33 bp, Homo sapien
ctttctctgtgctctatcagcaccttccacatg

SEQ ID NO: 717855 - DNA, 33 bp, Homo sapien
gctatggccttgcaagaaatcgcggtaagctac

SEQ ID NO: 717856 - DNA, 33 bp, Homo sapien
gctatggccttgcaaggaatcgcggtaagctac

SEQ ID NO: 717857 - DNA, 33 bp, Homo sapien
ttctcatttttcaagcaatcaaagtactaaaaa

SEQ ID NO: 717858 - DNA, 33 bp, Homo sapien
ttctcatttttcaagcgatcaaagtactaaaaa

SEQ ID NO: 717859 - DNA, 33 bp, Homo sapien
gaccgtctctatgccaaatatcaccacttttac

SEQ ID NO: 717860 - DNA, 33 bp, Homo sapien
gaccgtctctatgccagatatcaccacttttac

SEQ ID NO: 717861 - DNA, 33 bp, Homo sapien
atattaggtgcttaacagtccttgtctttttca

SEQ ID NO: 717862 - DNA, 33 bp, Homo sapien
atattaggtgcttaacggtccttgtctttttca

SEQ ID NO: 717863 - DNA, 33 bp, Homo sapien
ttctatttctcctaacagttaattgagcactac

SEQ ID NO: 717864 - DNA, 33 bp, Homo sapien
ttctatttctcctaacggttaattgagcactac

SEQ ID NO: 717865 - DNA, 33 bp, Homo sapien
aagataaaccaagtagcaaacaatgcagtagct

SEQ ID NO: 717866 - DNA, 33 bp, Homo sapien
aagataaaccaagtagtaaacaatgcagtagct

SEQ ID NO: 717867 - DNA, 33 bp, Homo sapien
ttctagggggaagataaaccatgaactttggca

SEQ ID NO: 717868 - DNA, 33 bp, Homo sapien
ttctagggggaagatacaccatgaactttggca

SEQ ID NO: 717869 - DNA, 33 bp, Homo sapien
tgcagagtgttccatgaataagtattttaaact

SEQ ID NO: 717870 - DNA, 33 bp, Homo sapien
tgcagagtgttccatggataagtattttaaact

SEQ ID NO: 717871 - DNA, 33 bp, Homo sapien
ctaactggataaacagactgtgtacctacctga

SEQ ID NO: 717872 - DNA, 33 bp, Homo sapien
ctaactggataaacaggctgtgtacctacctga

SEQ ID NO: 717873 - DNA, 33 bp, Homo sapien
ctaggagagaaggtgcgcttagaaaccaagtgc

SEQ ID NO: 717874 - DNA, 33 bp, Homo sapien
ctaggagagaaggtgctcttagaaaccaagtgc

SEQ ID NO: 717875 - DNA, 33 bp, Homo sapien
ctctccatttgttccaaccctttattagaaacc

SEQ ID NO: 717876 - DNA, 33 bp, Homo sapien
ctctccatttgttccatccctttattagaaacc

SEQ ID NO: 717877 - DNA, 33 bp, Homo sapien
ccttattttcaaagtaataatgtaaacaatctt

SEQ ID NO: 717878 - DNA, 33 bp, Homo sapien
ccttattttcaaagtagtaatgtaaacaatctt

SEQ ID NO: 717879 - DNA, 33 bp, Homo sapien
tcatctattgaataaggcctttcgtatcctgaa

SEQ ID NO: 717880 - DNA, 33 bp, Homo sapien
tcatctattgaataagtcctttcgtatcctgaa

SEQ ID NO: 717881 - DNA, 33 bp, Homo sapien
aaaaagctactctttacgtgatccccttgagaa

SEQ ID NO: 717882 - DNA, 33 bp, Homo sapien
aaaaagctactctttatgtgatccccttgagaa

SEQ ID NO: 717883 - DNA, 33 bp, Homo sapien
agagaatacacaatgtaaaacaacctctgatta

SEQ ID NO: 717884 - DNA, 33 bp, Homo sapien
agagaatacacaatgtgaaacaacctctgatta

SEQ ID NO: 717885 - DNA, 33 bp, Homo sapien
atccagagaagggttaaccatgctagaatgaga

SEQ ID NO: 717886 - DNA, 33 bp, Homo sapien
atccagagaagggttagccatgctagaatgaga

SEQ ID NO: 717887 - DNA, 33 bp, Homo sapien
aagccttaaaatagcaaaaaagattagtaacag

SEQ ID NO: 717888 - DNA, 33 bp, Homo sapien
aagccttaaaatagcagaaaagattagtaacag

SEQ ID NO: 717889 - DNA, 33 bp, Homo sapien
attctctagtatgaaactgtaagtgaacaatat

SEQ ID NO: 717890 - DNA, 33 bp, Homo sapien
attctctagtatgaaattgtaagtgaacaatat

SEQ ID NO: 717891 - DNA, 33 bp, Homo sapien
cattttaaagcaaatccatccattatacttttc

SEQ ID NO: 717892 - DNA, 33 bp, Homo sapien
cattttaaagcaaatctatccattatacttttc

SEQ ID NO: 717893 - DNA, 33 bp, Homo sapien
cacatatattagtgaacgttaacttggagactc

SEQ ID NO: 717894 - DNA, 33 bp, Homo sapien
cacatatattagtgaatgttaacttggagactc

SEQ ID NO: 717895 - DNA, 33 bp, Homo sapien
acctcccaaagaatcaaatgtaaacactcaaat

SEQ ID NO: 717896 - DNA, 33 bp, Homo sapien
acctcccaaagaatcatatgtaaacactcaaat

SEQ ID NO: 717897 - DNA, 33 bp, Homo sapien
tgtgtggaaaagatgcaacatcgtaattctgaa

SEQ ID NO: 717898 - DNA, 33 bp, Homo sapien
tgtgtggaaaagatgccacatcgtaattctgaa

SEQ ID NO: 717899 - DNA, 33 bp, Homo sapien
cagaagaatttggcaacgagaggagctgggttc

SEQ ID NO: 717900 - DNA, 33 bp, Homo sapien
cagaagaatttggcaatgagaggagctgggttc

SEQ ID NO: 717901 - DNA, 33 bp, Homo sapien
cacttataaaccactacaggatatctcagccta

SEQ ID NO: 717902 - DNA, 33 bp, Homo sapien
cacttataaaccactataggatatctcagccta

SEQ ID NO: 717903 - DNA, 33 bp, Homo sapien
tccctatgaaaatcacaaacactgtatctttca

SEQ ID NO: 717904 - DNA, 33 bp, Homo sapien
tccctatgaaaatcacgaacactgtatctttca

SEQ ID NO: 717905 - DNA, 33 bp, Homo sapien
gattcagtttgcactgccaaccaaatcagagca

SEQ ID NO: 717906 - DNA, 33 bp, Homo sapien
gattcagtttgcactgtcaaccaaatcagagca

SEQ ID NO: 717907 - DNA, 33 bp, Homo sapien
taatgttaacatgataagatgcaaaaactctgt

SEQ ID NO: 717908 - DNA, 33 bp, Homo sapien
taatgttaacatgataggatgcaaaaactctgt

SEQ ID NO: 717909 - DNA, 33 bp, Homo sapien
tatgcaattagctccacgccaagatttagtaca

SEQ ID NO: 717910 - DNA, 33 bp, Homo sapien
tatgcaattagctccatgccaagatttagtaca

SEQ ID NO: 717911 - DNA, 33 bp, Homo sapien
ggctgccgtaacgaaacactttagagtgggtgg

SEQ ID NO: 717912 - DNA, 33 bp, Homo sapien
ggctgccgtaacgaaatactttagagtgggtgg

SEQ ID NO: 717913 - DNA, 33 bp, Homo sapien
ataaaacttggttctacgaaacaatcacatcct

SEQ ID NO: 717914 - DNA, 33 bp, Homo sapien
ataaaacttggttctatgaaacaatcacatcct

SEQ ID NO: 717915 - DNA, 33 bp, Homo sapien
gtttttaagtgaaatacgagagcaacattacaa

SEQ ID NO: 717916 - DNA, 33 bp, Homo sapien
gtttttaagtgaaatatgagagcaacattacaa

SEQ ID NO: 717917 - DNA, 33 bp, Homo sapien
ggtatagattgtcagaaatatatacctgaaact

SEQ ID NO: 717918 - DNA, 33 bp, Homo sapien
ggtatagattgtcagacatatatacctgaaact

SEQ ID NO: 717919 - DNA, 33 bp, Homo sapien
taacttgaacctaagacgtcaattagctggatg

SEQ ID NO: 717920 - DNA, 33 bp, Homo sapien
taacttgaacctaagatgtcaattagctggatg

SEQ ID NO: 717921 - DNA, 33 bp, Homo sapien
gaaagtgcaattcttacgaaaaatatcttcttg

SEQ ID NO: 717922 - DNA, 33 bp, Homo sapien
gaaagtgcaattcttatgaaaaatatcttcttg

SEQ ID NO: 717923 - DNA, 33 bp, Homo sapien
attctgacatactatcaaaccttctaattcagt

SEQ ID NO: 717924 - DNA, 33 bp, Homo sapien
attctgacatactatcgaaccttctaattcagt

SEQ ID NO: 717925 - DNA, 33 bp, Homo sapien
cattaaagcattcaccgaagtcagatatcttct

SEQ ID NO: 717926 - DNA, 33 bp, Homo sapien
cattaaagcattcacctaagtcagatatcttct

SEQ ID NO: 717927 - DNA, 33 bp, Homo sapien
gcttatttctattgtaccgtgaaattaaactac

SEQ ID NO: 717928 - DNA, 33 bp, Homo sapien
gcttatttctattgtatcgtgaaattaaactac

SEQ ID NO: 717929 - DNA, 33 bp, Homo sapien
cccaaattatctttgaaccgaaagatcatctaa

SEQ ID NO: 717930 - DNA, 33 bp, Homo sapien
cccaaattatctttgagccgaaagatcatctaa

SEQ ID NO: 717931 - DNA, 33 bp, Homo sapien
actactccaagttttacaatgttgagaaagcaa

SEQ ID NO: 717932 - DNA, 33 bp, Homo sapien
actactccaagttttataatgttgagaaagcaa

SEQ ID NO: 717933 - DNA, 33 bp, Homo sapien
ataaaagaactacacacacccattcggaagatt

SEQ ID NO: 717934 - DNA, 33 bp, Homo sapien
ataaaagaactacacatacccattcggaagatt

SEQ ID NO: 717935 - DNA, 33 bp, Homo sapien
atgatttgtgacacaactctatgaacagttttc

SEQ ID NO: 717936 - DNA, 33 bp, Homo sapien
atgatttgtgacacaattctatgaacagttttc

SEQ ID NO: 717937 - DNA, 33 bp, Homo sapien
agttacagaggagcaaatatgatgtgagaacat

SEQ ID NO: 717938 - DNA, 33 bp, Homo sapien
agttacagaggagcaagtatgatgtgagaacat

SEQ ID NO: 717939 - DNA, 33 bp, Homo sapien
gctaagtcatagcaaactatcatctttttaagg

SEQ ID NO: 717940 - DNA, 33 bp, Homo sapien
gctaagtcatagcaaattatcatctttttaagg

SEQ ID NO: 717941 - DNA, 33 bp, Homo sapien
gtatacaccaatctaccgctgactcacgtgcat

SEQ ID NO: 717942 - DNA, 33 bp, Homo sapien
gtatacaccaatctactgctgactcacgtgcat

SEQ ID NO: 717943 - DNA, 33 bp, Homo sapien
ttagagctccacagcacgaataccacggtcaga

SEQ ID NO: 717944 - DNA, 33 bp, Homo sapien
ttagagctccacagcatgaataccacggtcaga

SEQ ID NO: 717945 - DNA, 33 bp, Homo sapien
tctgtgtcccttagcgaagatcctcactgtttc

SEQ ID NO: 717946 - DNA, 33 bp, Homo sapien
tctgtgtcccttagcgcagatcctcactgtttc

SEQ ID NO: 717947 - DNA, 33 bp, Homo sapien
aaacagacacatggaaagtatatagtttgttct

SEQ ID NO: 717948 - DNA, 33 bp, Homo sapien
aaacagacacatggaaggtatatagtttgttct

SEQ ID NO: 717949 - DNA, 33 bp, Homo sapien
ccagtctttcgctttacccagtttcttaaaatc

SEQ ID NO: 717950 - DNA, 33 bp, Homo sapien
ccagtctttcgctttatccagtttcttaaaatc

SEQ ID NO: 717951 - DNA, 33 bp, Homo sapien
aggcaagtacctgtcacgatggtgaattaagct

SEQ ID NO: 717952 - DNA, 33 bp, Homo sapien
aggcaagtacctgtcatgatggtgaattaagct

SEQ ID NO: 717953 - DNA, 33 bp, Homo sapien
acctgaaaagtgggaacgtgatcagtaccgtta

SEQ ID NO: 717954 - DNA, 33 bp, Homo sapien
acctgaaaagtgggaatgtgatcagtaccgtta

SEQ ID NO: 717955 - DNA, 33 bp, Homo sapien
gtttgtatgatgaaaaataactggtaaagctca

SEQ ID NO: 717956 - DNA, 33 bp, Homo sapien
gtttgtatgatgaaaactaactggtaaagctca

SEQ ID NO: 717957 - DNA, 33 bp, Homo sapien
ttaactcttcaaaaaggctcagtttcagtgtaa

SEQ ID NO: 717958 - DNA, 33 bp, Homo sapien
ttaactcttcaaaaagtctcagtttcagtgtaa

SEQ ID NO: 717959 - DNA, 33 bp, Homo sapien
tgatgcattcctgtgaagagctaaaggaacagt

SEQ ID NO: 717960 - DNA, 33 bp, Homo sapien
tgatgcattcctgtgaggagctaaaggaacagt

SEQ ID NO: 717961 - DNA, 33 bp, Homo sapien
atcttgattccatctacgcttcttatttcatat

SEQ ID NO: 717962 - DNA, 33 bp, Homo sapien
atcttgattccatctatgcttcttatttcatat

SEQ ID NO: 717963 - DNA, 33 bp, Homo sapien
gaaataatgttagcacacttgagtatggaaaga

SEQ ID NO: 717964 - DNA, 33 bp, Homo sapien
gaaataatgttagcacgcttgagtatggaaaga

SEQ ID NO: 717965 - DNA, 33 bp, Homo sapien
acactaatttggttatcacacatcatatgcttt

SEQ ID NO: 717966 - DNA, 33 bp, Homo sapien
acactaatttggttattacacatcatatgcttt

SEQ ID NO: 717967 - DNA, 33 bp, Homo sapien
aaactacatcagagttaaaaacctaagtttgat

SEQ ID NO: 717968 - DNA, 33 bp, Homo sapien
aaactacatcagagttgaaaacctaagtttgat

SEQ ID NO: 717969 - DNA, 33 bp, Homo sapien
gaaaaaggccattacacacaacattcagaaagt

SEQ ID NO: 717970 - DNA, 33 bp, Homo sapien
gaaaaaggccattacatacaacattcagaaagt

SEQ ID NO: 717971 - DNA, 33 bp, Homo sapien
aggctatatggaccatcaaaaggactttagctt

SEQ ID NO: 717972 - DNA, 33 bp, Homo sapien
aggctatatggaccattaaaaggactttagctt

SEQ ID NO: 717973 - DNA, 33 bp, Homo sapien
actgattccattaaaactacccattcaactgcc

SEQ ID NO: 717974 - DNA, 33 bp, Homo sapien
actgattccattaaaattacccattcaactgcc

SEQ ID NO: 717975 - DNA, 33 bp, Homo sapien
ttaacatctcctcctacgcattaatagttcttt

SEQ ID NO: 717976 - DNA, 33 bp, Homo sapien
ttaacatctcctcctatgcattaatagttcttt

SEQ ID NO: 717977 - DNA, 33 bp, Homo sapien
tgtataagcaatgaaacaatttttgaacatata

SEQ ID NO: 717978 - DNA, 33 bp, Homo sapien
tgtataagcaatgaaagaatttttgaacatata

SEQ ID NO: 717979 - DNA, 33 bp, Homo sapien
acctcacatagctaatcagtgataaggtcatga

SEQ ID NO: 717980 - DNA, 33 bp, Homo sapien
acctcacatagctaatgagtgataaggtcatga

SEQ ID NO: 717981 - DNA, 33 bp, Homo sapien
ctttaactcaaggcaaacaattttgcttcagta

SEQ ID NO: 717982 - DNA, 33 bp, Homo sapien
ctttaactcaaggcaagcaattttgcttcagta

SEQ ID NO: 717983 - DNA, 33 bp, Homo sapien
acaacgttctactgaaataattcgcagttcttt

SEQ ID NO: 717984 - DNA, 33 bp, Homo sapien
acaacgttctactgaagtaattcgcagttcttt

SEQ ID NO: 717985 - DNA, 33 bp, Homo sapien
ctaaccaattttcatacggccaagcaatttcca

SEQ ID NO: 717986 - DNA, 33 bp, Homo sapien
ctaaccaattttcatatggccaagcaatttcca

SEQ ID NO: 717987 - DNA, 33 bp, Homo sapien
gtttgtgatggtgataaaatttgaactttcaag

SEQ ID NO: 717988 - DNA, 33 bp, Homo sapien
gtttgtgatggtgatacaatttgaactttcaag

SEQ ID NO: 717989 - DNA, 33 bp, Homo sapien
catgttcatatctaaaagcaatgttagtgtggg

SEQ ID NO: 717990 - DNA, 33 bp, Homo sapien
catgttcatatctaaaggcaatgttagtgtggg

SEQ ID NO: 717991 - DNA, 33 bp, Homo sapien
tcttggcacttagcatcagtatttcaatatttc

SEQ ID NO: 717992 - DNA, 33 bp, Homo sapien
tcttggcacttagcattagtatttcaatatttc

SEQ ID NO: 717993 - DNA, 33 bp, Homo sapien
taatcccatacaactcaatacttgcatgcccat

SEQ ID NO: 717994 - DNA, 33 bp, Homo sapien
taatcccatacaactccatacttgcatgcccat

SEQ ID NO: 717995 - DNA, 33 bp, Homo sapien
tggagtctaaaatgctaaatcagttatctgaag

SEQ ID NO: 717996 - DNA, 33 bp, Homo sapien
tggagtctaaaatgctgaatcagttatctgaag

SEQ ID NO: 717997 - DNA, 33 bp, Homo sapien
actggatgataaatgccgagccatcatgtcaag

SEQ ID NO: 717998 - DNA, 33 bp, Homo sapien
actggatgataaatgctgagccatcatgtcaag

SEQ ID NO: 717999 - DNA, 33 bp, Homo sapien
ctctcaccattgatgacgttaagaagatgccaa

SEQ ID NO: 718000 - DNA, 33 bp, Homo sapien
ctctcaccattgatgatgttaagaagatgccaa

SEQ ID NO: 718001 - DNA, 33 bp, Homo sapien
tgctttgaagctggcaatatttttaacataatc

SEQ ID NO: 718002 - DNA, 33 bp, Homo sapien
tgctttgaagctggcagtatttttaacataatc

SEQ ID NO: 718003 - DNA, 33 bp, Homo sapien
ttcaataggccaagtcacacgtgtaacaggata

SEQ ID NO: 718004 - DNA, 33 bp, Homo sapien
ttcaataggccaagtctcacgtgtaacaggata

SEQ ID NO: 718005 - DNA, 33 bp, Homo sapien
atagaggttttgaatgacaaatacaatttttag

SEQ ID NO: 718006 - DNA, 33 bp, Homo sapien
atagaggttttgaatggcaaatacaatttttag

SEQ ID NO: 718007 - DNA, 33 bp, Homo sapien
ttagcagtattgttcaaaggcatggcctctact

SEQ ID NO: 718008 - DNA, 33 bp, Homo sapien
ttagcagtattgttcacaggcatggcctctact

SEQ ID NO: 718009 - DNA, 33 bp, Homo sapien
ctatctaccatatcacagagtctctctacttta

SEQ ID NO: 718010 - DNA, 33 bp, Homo sapien
ctatctaccatatcaccgagtctctctacttta

SEQ ID NO: 718011 - DNA, 33 bp, Homo sapien
atggatagactatagacccagcatttaaactca

SEQ ID NO: 718012 - DNA, 33 bp, Homo sapien
atggatagactatagagccagcatttaaactca

SEQ ID NO: 718013 - DNA, 33 bp, Homo sapien
aataaaaaagaaatggaacagaaaaagctggta

SEQ ID NO: 718014 - DNA, 33 bp, Homo sapien
aataaaaaagaaatggcacagaaaaagctggta

SEQ ID NO: 718015 - DNA, 33 bp, Homo sapien
gtgcagctcatgactacactaaaaatgggctgg

SEQ ID NO: 718016 - DNA, 33 bp, Homo sapien
gtgcagctcatgactatactaaaaatgggctgg

SEQ ID NO: 718017 - DNA, 33 bp, Homo sapien
ttagtgttttcagatgcagattactttcattaa

SEQ ID NO: 718018 - DNA, 33 bp, Homo sapien
ttagtgttttcagatggagattactttcattaa

SEQ ID NO: 718019 - DNA, 33 bp, Homo sapien
ttaagcagagagcatcaaatggtactaaatttg

SEQ ID NO: 718020 - DNA, 33 bp, Homo sapien
ttaagcagagagcatcgaatggtactaaatttg

SEQ ID NO: 718021 - DNA, 33 bp, Homo sapien
gcaatcaaaattgtacaagtaaggctaggcaca

SEQ ID NO: 718022 - DNA, 33 bp, Homo sapien
gcaatcaaaattgtacgagtaaggctaggcaca

SEQ ID NO: 718023 - DNA, 33 bp, Homo sapien
cctacacattctggacaaaatccccctttctaa

SEQ ID NO: 718024 - DNA, 33 bp, Homo sapien
cctacacattctggacgaaatccccctttctaa

SEQ ID NO: 718025 - DNA, 33 bp, Homo sapien
agtaagagtctcatgaaagtcctaagcacagcc

SEQ ID NO: 718026 - DNA, 33 bp, Homo sapien
agtaagagtctcatgacagtcctaagcacagcc

SEQ ID NO: 718027 - DNA, 33 bp, Homo sapien
cctcccaaatccaaataaacattaaggagctaa

SEQ ID NO: 718028 - DNA, 33 bp, Homo sapien
cctcccaaatccaaatcaacattaaggagctaa

SEQ ID NO: 718029 - DNA, 33 bp, Homo sapien
ataatgttatttgttacgcaggctaaacactga

SEQ ID NO: 718030 - DNA, 33 bp, Homo sapien
ataatgttatttgttatgcaggctaaacactga

SEQ ID NO: 718031 - DNA, 33 bp, Homo sapien
tgtcaacaaagataggaaatgagggtgatcgtg

SEQ ID NO: 718032 - DNA, 33 bp, Homo sapien
tgtcaacaaagatagggaatgagggtgatcgtg

SEQ ID NO: 718033 - DNA, 33 bp, Homo sapien
aagagcaagaaatctacagctggtgtaaaatac

SEQ ID NO: 718034 - DNA, 33 bp, Homo sapien
aagagcaagaaatctatagctggtgtaaaatac

SEQ ID NO: 718035 - DNA, 33 bp, Homo sapien
tcctgtcacctcattgaattcatctgtggtagg

SEQ ID NO: 718036 - DNA, 33 bp, Homo sapien
tcctgtcacctcattgtattcatctgtggtagg

SEQ ID NO: 718037 - DNA, 33 bp, Homo sapien
taggaaccatgacttacgaagactggctgttaa

SEQ ID NO: 718038 - DNA, 33 bp, Homo sapien
taggaaccatgacttatgaagactggctgttaa

SEQ ID NO: 718039 - DNA, 33 bp, Homo sapien
tccttagaaatggcataagaactagtgagtggt

SEQ ID NO: 718040 - DNA, 33 bp, Homo sapien
tccttagaaatggcatgagaactagtgagtggt

SEQ ID NO: 718041 - DNA, 33 bp, Homo sapien
tgtaggaactagaccaatgagagtgagaatgga

SEQ ID NO: 718042 - DNA, 33 bp, Homo sapien
tgtaggaactagaccagtgagagtgagaatgga

SEQ ID NO: 718043 - DNA, 33 bp, Homo sapien
ggacatcagtgaggaaggtgacaggtagcagga

SEQ ID NO: 718044 - DNA, 33 bp, Homo sapien
ggacatcagtgaggaatgtgacaggtagcagga

SEQ ID NO: 718045 - DNA, 33 bp, Homo sapien
caaaaagagactgtcaggtattgtaccctttgg

SEQ ID NO: 718046 - DNA, 33 bp, Homo sapien
caaaaagagactgtcatgtattgtaccctttgg

SEQ ID NO: 718047 - DNA, 33 bp, Homo sapien
ctttcattatttgcaaagacttaaatcctagta

SEQ ID NO: 718048 - DNA, 33 bp, Homo sapien
ctttcattatttgcaatgacttaaatcctagta

SEQ ID NO: 718049 - DNA, 33 bp, Homo sapien
aaatggtcacctgaaacttaaaagctgtgttta

SEQ ID NO: 718050 - DNA, 33 bp, Homo sapien
aaatggtcacctgaaatttaaaagctgtgttta

SEQ ID NO: 718051 - DNA, 33 bp, Homo sapien
aagtgggcatgagtagaagtagaaccatccagc

SEQ ID NO: 718052 - DNA, 33 bp, Homo sapien
aagtgggcatgagtagcagtagaaccatccagc

SEQ ID NO: 718053 - DNA, 33 bp, Homo sapien
gctccagatggaaataacctgatattcagaaaa

SEQ ID NO: 718054 - DNA, 33 bp, Homo sapien
gctccagatggaaataccctgatattcagaaaa

SEQ ID NO: 718055 - DNA, 33 bp, Homo sapien
tttaaacagaaaaaagacatgattgaaaataca

SEQ ID NO: 718056 - DNA, 33 bp, Homo sapien
tttaaacagaaaaaaggcatgattgaaaataca

SEQ ID NO: 718057 - DNA, 33 bp, Homo sapien
ggtgagaaatgccacaatggctgacatgcaaag

SEQ ID NO: 718058 - DNA, 33 bp, Homo sapien
ggtgagaaatgccacagtggctgacatgcaaag

SEQ ID NO: 718059 - DNA, 33 bp, Homo sapien
tcattttatcccattcaaagctttaagggatat

SEQ ID NO: 718060 - DNA, 33 bp, Homo sapien
tcattttatcccattcgaagctttaagggatat

SEQ ID NO: 718061 - DNA, 33 bp, Homo sapien
tttatgagggctgtgaaggagcgggttagcatt

SEQ ID NO: 718062 - DNA, 33 bp, Homo sapien
tttatgagggctgtgagggagcgggttagcatt

SEQ ID NO: 718063 - DNA, 33 bp, Homo sapien
aggaagagaatcatgcaaataatttaggatcac

SEQ ID NO: 718064 - DNA, 33 bp, Homo sapien
aggaagagaatcatgcgaataatttaggatcac

SEQ ID NO: 718065 - DNA, 33 bp, Homo sapien
tagtattagatgtagaagagtaccagagtatcc

SEQ ID NO: 718066 - DNA, 33 bp, Homo sapien
tagtattagatgtagacgagtaccagagtatcc

SEQ ID NO: 718067 - DNA, 33 bp, Homo sapien
acatattactgaaatacaggtgctaagtggagg

SEQ ID NO: 718068 - DNA, 33 bp, Homo sapien
acatattactgaaatataggtgctaagtggagg

SEQ ID NO: 718069 - DNA, 33 bp, Homo sapien
aaattaacctagcctagcagtaaatttgtgaag

SEQ ID NO: 718070 - DNA, 33 bp, Homo sapien
aaattaacctagcctatcagtaaatttgtgaag

SEQ ID NO: 718071 - DNA, 33 bp, Homo sapien
tgagtggattgccccaagtctcacaactaagtg

SEQ ID NO: 718072 - DNA, 33 bp, Homo sapien
tgagtggattgccccacgtctcacaactaagtg

SEQ ID NO: 718073 - DNA, 33 bp, Homo sapien
tgatatcagactggaaagaggttccaaatggtg

SEQ ID NO: 718074 - DNA, 33 bp, Homo sapien
tgatatcagactggaaggaggttccaaatggtg

SEQ ID NO: 718075 - DNA, 33 bp, Homo sapien
tttcaagtgaccattgaaattataaaggaattt

SEQ ID NO: 718076 - DNA, 33 bp, Homo sapien
tttcaagtgaccattgcaattataaaggaattt

SEQ ID NO: 718077 - DNA, 33 bp, Homo sapien
gctatacaaacatccacgcataaacatgagaaa

SEQ ID NO: 718078 - DNA, 33 bp, Homo sapien
gctatacaaacatccatgcataaacatgagaaa

SEQ ID NO: 718079 - DNA, 33 bp, Homo sapien
tgaaatttctacttaactgatgcttctgaagct

SEQ ID NO: 718080 - DNA, 33 bp, Homo sapien
tgaaatttctacttaattgatgcttctgaagct

SEQ ID NO: 718081 - DNA, 33 bp, Homo sapien
tgggatgcaataaaaggaatcagagagaaggaa

SEQ ID NO: 718082 - DNA, 33 bp, Homo sapien
tgggatgcaataaaagtaatcagagagaaggaa

SEQ ID NO: 718083 - DNA, 33 bp, Homo sapien
ttctcctgatgcaaaagaagggagctttgaggg

SEQ ID NO: 718084 - DNA, 33 bp, Homo sapien
ttctcctgatgcaaaataagggagctttgaggg

SEQ ID NO: 718085 - DNA, 33 bp, Homo sapien
tctttttgactgagaaagcaagaacaggcatgg

SEQ ID NO: 718086 - DNA, 33 bp, Homo sapien
tctttttgactgagaaggcaagaacaggcatgg

SEQ ID NO: 718087 - DNA, 33 bp, Homo sapien
gacttgcaggaatacacactaaaggagattcga

SEQ ID NO: 718088 - DNA, 33 bp, Homo sapien
gacttgcaggaatacagactaaaggagattcga

SEQ ID NO: 718089 - DNA, 33 bp, Homo sapien
gagcaagggttgattcaatcacttatatggaag

SEQ ID NO: 718090 - DNA, 33 bp, Homo sapien
gagcaagggttgattctatcacttatatggaag

SEQ ID NO: 718091 - DNA, 33 bp, Homo sapien
gagagaagagggcttacagaagcagcaggcact

SEQ ID NO: 718092 - DNA, 33 bp, Homo sapien
gagagaagagggcttatagaagcagcaggcact

SEQ ID NO: 718093 - DNA, 33 bp, Homo sapien
atgaaaggataggctcagacaacctcagccctt

SEQ ID NO: 718094 - DNA, 33 bp, Homo sapien
atgaaaggataggctcggacaacctcagccctt

SEQ ID NO: 718095 - DNA, 33 bp, Homo sapien
tgttaccaagcaagaaattctaccaggggagaa

SEQ ID NO: 718096 - DNA, 33 bp, Homo sapien
tgttaccaagcaagaatttctaccaggggagaa

SEQ ID NO: 718097 - DNA, 33 bp, Homo sapien
tctccctgaagaagcaagaaaattaatacaccc

SEQ ID NO: 718098 - DNA, 33 bp, Homo sapien
tctccctgaagaagcaggaaaattaatacaccc

SEQ ID NO: 718099 - DNA, 33 bp, Homo sapien
tttggcttgatcctaaaaaaagtgttattaaag

SEQ ID NO: 718100 - DNA, 33 bp, Homo sapien
tttggcttgatcctaacaaaagtgttattaaag

SEQ ID NO: 718101 - DNA, 33 bp, Homo sapien
cagagattttgcttgacagtagctatttcattc

SEQ ID NO: 718102 - DNA, 33 bp, Homo sapien
cagagattttgcttgatagtagctatttcattc

SEQ ID NO: 718103 - DNA, 33 bp, Homo sapien
gtgcctatctctgaaacggaaaaataatactaa

SEQ ID NO: 718104 - DNA, 33 bp, Homo sapien
gtgcctatctctgaaatggaaaaataatactaa

SEQ ID NO: 718105 - DNA, 33 bp, Homo sapien
agtatccattgtgagaaaagaggaaaatatgta

SEQ ID NO: 718106 - DNA, 33 bp, Homo sapien
agtatccattgtgagagaagaggaaaatatgta

SEQ ID NO: 718107 - DNA, 33 bp, Homo sapien
ttagaacctgctgatacggattttctacatttt

SEQ ID NO: 718108 - DNA, 33 bp, Homo sapien
ttagaacctgctgatatggattttctacatttt

SEQ ID NO: 718109 - DNA, 33 bp, Homo sapien
atccttgccttctggcactctccaaatacctac

SEQ ID NO: 718110 - DNA, 33 bp, Homo sapien
atccttgccttctggcgctctccaaatacctac

SEQ ID NO: 718111 - DNA, 33 bp, Homo sapien
ttcaaactgaaaagtacagtagtctagatcatg

SEQ ID NO: 718112 - DNA, 33 bp, Homo sapien
ttcaaactgaaaagtatagtagtctagatcatg

SEQ ID NO: 718113 - DNA, 33 bp, Homo sapien
agtccagggatgttgccaagtatcctgctatgc

SEQ ID NO: 718114 - DNA, 33 bp, Homo sapien
agtccagggatgttgctaagtatcctgctatgc

SEQ ID NO: 718115 - DNA, 33 bp, Homo sapien
aattcttcttagaatacggtgcaatttttggca

SEQ ID NO: 718116 - DNA, 33 bp, Homo sapien
aattcttcttagaatatggtgcaatttttggca

SEQ ID NO: 718117 - DNA, 33 bp, Homo sapien
taattgagaatggcgacagctacaggcatctac

SEQ ID NO: 718118 - DNA, 33 bp, Homo sapien
taattgagaatggcgatagctacaggcatctac

SEQ ID NO: 718119 - DNA, 33 bp, Homo sapien
acttcttcctgaaaaacgcttttaattcctgcc

SEQ ID NO: 718120 - DNA, 33 bp, Homo sapien
acttcttcctgaaaaatgcttttaattcctgcc

SEQ ID NO: 718121 - DNA, 33 bp, Homo sapien
aggcagagtgaacacaagggtgacgaatgaata

SEQ ID NO: 718122 - DNA, 33 bp, Homo sapien
aggcagagtgaacacaggggtgacgaatgaata

SEQ ID NO: 718123 - DNA, 33 bp, Homo sapien
gaaacgtaataagtacaagagtgtagaggcaat

SEQ ID NO: 718124 - DNA, 33 bp, Homo sapien
gaaacgtaataagtacgagagtgtagaggcaat

SEQ ID NO: 718125 - DNA, 33 bp, Homo sapien
caatagagttgcccctcaggatcctgtcacgcc

SEQ ID NO: 718126 - DNA, 33 bp, Homo sapien
caatagagttgccccttaggatcctgtcacgcc

SEQ ID NO: 718127 - DNA, 33 bp, Homo sapien
tggaaaaagcaaactaccttgaatttgaaatgc

SEQ ID NO: 718128 - DNA, 33 bp, Homo sapien
tggaaaaagcaaactatcttgaatttgaaatgc

SEQ ID NO: 718129 - DNA, 33 bp, Homo sapien
caaagatccaatcagaaggttgcatttgaatct

SEQ ID NO: 718130 - DNA, 33 bp, Homo sapien
caaagatccaatcagagggttgcatttgaatct

SEQ ID NO: 718131 - DNA, 33 bp, Homo sapien
tatgcctgggattaaaaactttattttctgttg

SEQ ID NO: 718132 - DNA, 33 bp, Homo sapien
tatgcctgggattaaacactttattttctgttg

SEQ ID NO: 718133 - DNA, 33 bp, Homo sapien
ccaggcatagaataaacttaattgtagcttaga

SEQ ID NO: 718134 - DNA, 33 bp, Homo sapien
ccaggcatagaataaatttaattgtagcttaga

SEQ ID NO: 718135 - DNA, 33 bp, Homo sapien
ctacaccaatattcctaaaactatgtctcagaa

SEQ ID NO: 718136 - DNA, 33 bp, Homo sapien
ctacaccaatattcctgaaactatgtctcagaa

SEQ ID NO: 718137 - DNA, 33 bp, Homo sapien
aaagggattgtgaaaactgttaatgagaaagca

SEQ ID NO: 718138 - DNA, 33 bp, Homo sapien
aaagggattgtgaaaattgttaatgagaaagca

SEQ ID NO: 718139 - DNA, 33 bp, Homo sapien
ctatggtatagagttacatggatagagctcctg

SEQ ID NO: 718140 - DNA, 33 bp, Homo sapien
ctatggtatagagttatatggatagagctcctg

SEQ ID NO: 718141 - DNA, 33 bp, Homo sapien
gcattactagagagctgaaaacaaacacagagg

SEQ ID NO: 718142 - DNA, 33 bp, Homo sapien
gcattactagagagcttaaaacaaacacagagg

SEQ ID NO: 718143 - DNA, 33 bp, Homo sapien
catgggctggtttttacatctccaaaaggtact

SEQ ID NO: 718144 - DNA, 33 bp, Homo sapien
catgggctggtttttatatctccaaaaggtact

SEQ ID NO: 718145 - DNA, 33 bp, Homo sapien
catgtagtacatgaaggctgtttcactgagtta

SEQ ID NO: 718146 - DNA, 33 bp, Homo sapien
catgtagtacatgaagtctgtttcactgagtta

SEQ ID NO: 718147 - DNA, 33 bp, Homo sapien
gccaaaataaagaagacgtaggtggctatttag

SEQ ID NO: 718148 - DNA, 33 bp, Homo sapien
gccaaaataaagaagatgtaggtggctatttag

SEQ ID NO: 718149 - DNA, 33 bp, Homo sapien
gctaattggccaaagagcaaaggccttcaagaa

SEQ ID NO: 718150 - DNA, 33 bp, Homo sapien
gctaattggccaaagatcaaaggccttcaagaa

SEQ ID NO: 718151 - DNA, 33 bp, Homo sapien
ctcctttgcttcttcacagagaaaaaaatattt

SEQ ID NO: 718152 - DNA, 33 bp, Homo sapien
ctcctttgcttcttcatagagaaaaaaatattt

SEQ ID NO: 718153 - DNA, 33 bp, Homo sapien
agcaaacagctgagccagagttcttcttaaaaa

SEQ ID NO: 718154 - DNA, 33 bp, Homo sapien
agcaaacagctgagcctgagttcttcttaaaaa

SEQ ID NO: 718155 - DNA, 33 bp, Homo sapien
actcagaaaataactccaccagatgtcttcaaa

SEQ ID NO: 718156 - DNA, 33 bp, Homo sapien
actcagaaaataactctaccagatgtcttcaaa

SEQ ID NO: 718157 - DNA, 33 bp, Homo sapien
attttcaagccaaagaatatcaagcatgacaaa

SEQ ID NO: 718158 - DNA, 33 bp, Homo sapien
attttcaagccaaagattatcaagcatgacaaa

SEQ ID NO: 718159 - DNA, 33 bp, Homo sapien
atatatatgtttccaacttaaaagaactccagg

SEQ ID NO: 718160 - DNA, 33 bp, Homo sapien
atatatatgtttccaatttaaaagaactccagg

SEQ ID NO: 718161 - DNA, 33 bp, Homo sapien
tctgatgaacccattcactattacacttgaaat

SEQ ID NO: 718162 - DNA, 33 bp, Homo sapien
tctgatgaacccattcgctattacacttgaaat

SEQ ID NO: 718163 - DNA, 33 bp, Homo sapien
tacagtacaggttcacaggcttattcttcacaa

SEQ ID NO: 718164 - DNA, 33 bp, Homo sapien
tacagtacaggttcacgggcttattcttcacaa

SEQ ID NO: 718165 - DNA, 33 bp, Homo sapien
gcacataggtagtaaaaagcagagctgaaactg

SEQ ID NO: 718166 - DNA, 33 bp, Homo sapien
gcacataggtagtaaatagcagagctgaaactg

SEQ ID NO: 718167 - DNA, 33 bp, Homo sapien
ctagataaacttttaacgattgattctgcagaa

SEQ ID NO: 718168 - DNA, 33 bp, Homo sapien
ctagataaacttttaatgattgattctgcagaa

SEQ ID NO: 718169 - DNA, 33 bp, Homo sapien
aattaagcacgttaaaatgaatgtcaagtacta

SEQ ID NO: 718170 - DNA, 33 bp, Homo sapien
aattaagcacgttaaagtgaatgtcaagtacta

SEQ ID NO: 718171 - DNA, 33 bp, Homo sapien
caaactactggaataacaagtgtgcacccaacc

SEQ ID NO: 718172 - DNA, 33 bp, Homo sapien
caaactactggaataagaagtgtgcacccaacc

SEQ ID NO: 718173 - DNA, 33 bp, Homo sapien
taagctaccatcatacaatatttacaaaaaaac

SEQ ID NO: 718174 - DNA, 33 bp, Homo sapien
taagctaccatcatacgatatttacaaaaaaac

SEQ ID NO: 718175 - DNA, 33 bp, Homo sapien
taccttttcaacaatacgtttatacatgctata

SEQ ID NO: 718176 - DNA, 33 bp, Homo sapien
taccttttcaacaataggtttatacatgctata

SEQ ID NO: 718177 - DNA, 33 bp, Homo sapien
atgctgttgtaaacgacctctgagtcataaaat

SEQ ID NO: 718178 - DNA, 33 bp, Homo sapien
atgctgttgtaaacgatctctgagtcataaaat

SEQ ID NO: 718179 - DNA, 33 bp, Homo sapien
ttacctgctggttttacggagaaggcaggggag

SEQ ID NO: 718180 - DNA, 33 bp, Homo sapien
ttacctgctggttttatggagaaggcaggggag

SEQ ID NO: 718181 - DNA, 33 bp, Homo sapien
aatgctcaaatgtgtcaaagtgccaattgatct

SEQ ID NO: 718182 - DNA, 33 bp, Homo sapien
aatgctcaaatgtgtcgaagtgccaattgatct

SEQ ID NO: 718183 - DNA, 33 bp, Homo sapien
aaccaccatcatctcactatctcttgtcttgta

SEQ ID NO: 718184 - DNA, 33 bp, Homo sapien
aaccaccatcatctcagtatctcttgtcttgta

SEQ ID NO: 718185 - DNA, 33 bp, Homo sapien
tcataccaatatgaaaatcctccgctgtctcaa

SEQ ID NO: 718186 - DNA, 33 bp, Homo sapien
tcataccaatatgaaagtcctccgctgtctcaa

SEQ ID NO: 718187 - DNA, 33 bp, Homo sapien
agcattcgttcttcccagcaaaggtgaacatat

SEQ ID NO: 718188 - DNA, 33 bp, Homo sapien
agcattcgttcttcccggcaaaggtgaacatat

SEQ ID NO: 718189 - DNA, 33 bp, Homo sapien
ttatcactacaaagtactaaaaagcatcttaag

SEQ ID NO: 718190 - DNA, 33 bp, Homo sapien
ttatcactacaaagtattaaaaagcatcttaag

SEQ ID NO: 718191 - DNA, 33 bp, Homo sapien
gaatttgtccaggttaaatctatagagttctct

SEQ ID NO: 718192 - DNA, 33 bp, Homo sapien
gaatttgtccaggttagatctatagagttctct

SEQ ID NO: 718193 - DNA, 33 bp, Homo sapien
ggttctttgtctagggaagaattaactaaatcc

SEQ ID NO: 718194 - DNA, 33 bp, Homo sapien
ggttctttgtctaggggagaattaactaaatcc

SEQ ID NO: 718195 - DNA, 33 bp, Homo sapien
ccaacaaacatctatcaagtgtccatgattctg

SEQ ID NO: 718196 - DNA, 33 bp, Homo sapien
ccaacaaacatctatcgagtgtccatgattctg

SEQ ID NO: 718197 - DNA, 33 bp, Homo sapien
gaaagagaattacaaaatggtcatcaggaagat

SEQ ID NO: 718198 - DNA, 33 bp, Homo sapien
gaaagagaattacaaagtggtcatcaggaagat

SEQ ID NO: 718199 - DNA, 33 bp, Homo sapien
caagattgcttcatacgcctactatacactctc

SEQ ID NO: 718200 - DNA, 33 bp, Homo sapien
caagattgcttcatactcctactatacactctc

SEQ ID NO: 718201 - DNA, 33 bp, Homo sapien
ctaaatactgaaagacaaaaatctcaaaatgta

SEQ ID NO: 718202 - DNA, 33 bp, Homo sapien
ctaaatactgaaagacgaaaatctcaaaatgta

SEQ ID NO: 718203 - DNA, 33 bp, Homo sapien
gtaacactggggtaaaagttctcgaacatcttt

SEQ ID NO: 718204 - DNA, 33 bp, Homo sapien
gtaacactggggtaaacgttctcgaacatcttt

SEQ ID NO: 718205 - DNA, 33 bp, Homo sapien
cactctaactttctaactgaagacggtgaacct

SEQ ID NO: 718206 - DNA, 33 bp, Homo sapien
cactctaactttctaattgaagacggtgaacct

SEQ ID NO: 718207 - DNA, 33 bp, Homo sapien
tgagatacctgttagacgtttgaagggttatgt

SEQ ID NO: 718208 - DNA, 33 bp, Homo sapien
tgagatacctgttagatgtttgaagggttatgt

SEQ ID NO: 718209 - DNA, 33 bp, Homo sapien
tccttaactcgatccactatgtgccatcactag

SEQ ID NO: 718210 - DNA, 33 bp, Homo sapien
tccttaactcgatccattatgtgccatcactag

SEQ ID NO: 718211 - DNA, 33 bp, Homo sapien
tattgacttcctgtaacgtgtatggtggtatgc

SEQ ID NO: 718212 - DNA, 33 bp, Homo sapien
tattgacttcctgtaaggtgtatggtggtatgc

SEQ ID NO: 718213 - DNA, 33 bp, Homo sapien
atctcaaggacaagaacatcaaggtctgtatga

SEQ ID NO: 718214 - DNA, 33 bp, Homo sapien
atctcaaggacaagaatatcaaggtctgtatga

SEQ ID NO: 718215 - DNA, 33 bp, Homo sapien
ctatggacatggtggacgtagtctaaatacatg

SEQ ID NO: 718216 - DNA, 33 bp, Homo sapien
ctatggacatggtggatgtagtctaaatacatg

SEQ ID NO: 718217 - DNA, 33 bp, Homo sapien
ggtttcagacactggtaaatttaatctcatttc

SEQ ID NO: 718218 - DNA, 33 bp, Homo sapien
ggtttcagacactggtgaatttaatctcatttc

SEQ ID NO: 718219 - DNA, 33 bp, Homo sapien
ttgtgcttttcccagacagatgaaaagtgacaa

SEQ ID NO: 718220 - DNA, 33 bp, Homo sapien
ttgtgcttttcccagagagatgaaaagtgacaa

SEQ ID NO: 718221 - DNA, 33 bp, Homo sapien
tatatcaggaggaagccatcatgtggtccatcc

SEQ ID NO: 718222 - DNA, 33 bp, Homo sapien
tatatcaggaggaagcgatcatgtggtccatcc

SEQ ID NO: 718223 - DNA, 33 bp, Homo sapien
acttcttaatgcaaagcatctttttcctccaag

SEQ ID NO: 718224 - DNA, 33 bp, Homo sapien
acttcttaatgcaaagtatctttttcctccaag

SEQ ID NO: 718225 - DNA, 33 bp, Homo sapien
aattaactgttaacaaagacacattttcctata

SEQ ID NO: 718226 - DNA, 33 bp, Homo sapien
aattaactgttaacaatgacacattttcctata

SEQ ID NO: 718227 - DNA, 33 bp, Homo sapien
aatggattttcttgaacgcggttatattttatg

SEQ ID NO: 718228 - DNA, 33 bp, Homo sapien
aatggattttcttgaatgcggttatattttatg

SEQ ID NO: 718229 - DNA, 33 bp, Homo sapien
caattatacattgtcacacttacttggagatct

SEQ ID NO: 718230 - DNA, 33 bp, Homo sapien
caattatacattgtcatacttacttggagatct

SEQ ID NO: 718231 - DNA, 33 bp, Homo sapien
ttatatctgcatgagcaatttgtctctccagta

SEQ ID NO: 718232 - DNA, 33 bp, Homo sapien
ttatatctgcatgagccatttgtctctccagta

SEQ ID NO: 718233 - DNA, 33 bp, Homo sapien
tttacaacaatagaacaggccaaatatccttgt

SEQ ID NO: 718234 - DNA, 33 bp, Homo sapien
tttacaacaatagaacgggccaaatatccttgt

SEQ ID NO: 718235 - DNA, 33 bp, Homo sapien
aatgatttggagtcaaagaattttagaaagtga

SEQ ID NO: 718236 - DNA, 33 bp, Homo sapien
aatgatttggagtcaaggaattttagaaagtga

SEQ ID NO: 718237 - DNA, 33 bp, Homo sapien
cctccaaactgctaccagagttattattccaaa

SEQ ID NO: 718238 - DNA, 33 bp, Homo sapien
cctccaaactgctaccggagttattattccaaa

SEQ ID NO: 718239 - DNA, 33 bp, Homo sapien
aaagggaagcggaacacgatttcatggcaatca

SEQ ID NO: 718240 - DNA, 33 bp, Homo sapien
aaagggaagcggaacatgatttcatggcaatca

SEQ ID NO: 718241 - DNA, 33 bp, Homo sapien
gtaaaataagcattcaatcacattttattgctt

SEQ ID NO: 718242 - DNA, 33 bp, Homo sapien
gtaaaataagcattcagtcacattttattgctt

SEQ ID NO: 718243 - DNA, 33 bp, Homo sapien
tattactaaaagatcagcataaccacaaatata

SEQ ID NO: 718244 - DNA, 33 bp, Homo sapien
tattactaaaagatcatcataaccacaaatata

SEQ ID NO: 718245 - DNA, 33 bp, Homo sapien
tgtttgtcctttagcacaagtgaaaaacttcag

SEQ ID NO: 718246 - DNA, 33 bp, Homo sapien
tgtttgtcctttagcataagtgaaaaacttcag

SEQ ID NO: 718247 - DNA, 33 bp, Homo sapien
acctagtacaatgaaacgagacctgcctggcta

SEQ ID NO: 718248 - DNA, 33 bp, Homo sapien
acctagtacaatgaaatgagacctgcctggcta

SEQ ID NO: 718249 - DNA, 33 bp, Homo sapien
tgcaataataaattcaagtaaatgtgaaatgac

SEQ ID NO: 718250 - DNA, 33 bp, Homo sapien
tgcaataataaattcaggtaaatgtgaaatgac

SEQ ID NO: 718251 - DNA, 33 bp, Homo sapien
atacactaaatgactacaaattgcacttaaatc

SEQ ID NO: 718252 - DNA, 33 bp, Homo sapien
atacactaaatgactagaaattgcacttaaatc

SEQ ID NO: 718253 - DNA, 33 bp, Homo sapien
attaggatagataaacaacagctgctaactctg

SEQ ID NO: 718254 - DNA, 33 bp, Homo sapien
attaggatagataaacgacagctgctaactctg

SEQ ID NO: 718255 - DNA, 33 bp, Homo sapien
caaaaaagagaaccagcaagaggggtggcagtt

SEQ ID NO: 718256 - DNA, 33 bp, Homo sapien
caaaaaagagaaccaggaagaggggtggcagtt

SEQ ID NO: 718257 - DNA, 33 bp, Homo sapien
tcttgggatccgctaaatgctacaagtgtgtag

SEQ ID NO: 718258 - DNA, 33 bp, Homo sapien
tcttgggatccgctaagtgctacaagtgtgtag

SEQ ID NO: 718259 - DNA, 33 bp, Homo sapien
attaacaacaagatgacagagaaattatgatac

SEQ ID NO: 718260 - DNA, 33 bp, Homo sapien
attaacaacaagatgatagagaaattatgatac

SEQ ID NO: 718261 - DNA, 33 bp, Homo sapien
attcaatctgaaaacacaggtaaacattactac

SEQ ID NO: 718262 - DNA, 33 bp, Homo sapien
attcaatctgaaaacataggtaaacattactac

SEQ ID NO: 718263 - DNA, 33 bp, Homo sapien
gagcagtttcacaaaaattggagatcatgtgtg

SEQ ID NO: 718264 - DNA, 33 bp, Homo sapien
gagcagtttcacaaaatttggagatcatgtgtg

SEQ ID NO: 718265 - DNA, 33 bp, Homo sapien
ttcatagtggacgctgaagcctttagagtggag

SEQ ID NO: 718266 - DNA, 33 bp, Homo sapien
ttcatagtggacgctggagcctttagagtggag

SEQ ID NO: 718267 - DNA, 33 bp, Homo sapien
atattagttggtgtgaaaagctccaaaatgcat

SEQ ID NO: 718268 - DNA, 33 bp, Homo sapien
atattagttggtgtgacaagctccaaaatgcat

SEQ ID NO: 718269 - DNA, 33 bp, Homo sapien
aaaatacttgccaaaaatgtggactctaaaaag

SEQ ID NO: 718270 - DNA, 33 bp, Homo sapien
aaaatacttgccaaaattgtggactctaaaaag

SEQ ID NO: 718271 - DNA, 33 bp, Homo sapien
tgagtcactataatgcacccaatctttcatgca

SEQ ID NO: 718272 - DNA, 33 bp, Homo sapien
tgagtcactataatgcgcccaatctttcatgca

SEQ ID NO: 718273 - DNA, 33 bp, Homo sapien
tactctaatgtgttggcagtccatatacataca

SEQ ID NO: 718274 - DNA, 33 bp, Homo sapien
tactctaatgtgttggtagtccatatacataca

SEQ ID NO: 718275 - DNA, 33 bp, Homo sapien
ctgcactaatgagacaaaaacatctctttggaa

SEQ ID NO: 718276 - DNA, 33 bp, Homo sapien
ctgcactaatgagacagaaacatctctttggaa

SEQ ID NO: 718277 - DNA, 33 bp, Homo sapien
agactctatttaggtaaaagtttcaagtcagag

SEQ ID NO: 718278 - DNA, 33 bp, Homo sapien
agactctatttaggtagaagtttcaagtcagag

SEQ ID NO: 718279 - DNA, 33 bp, Homo sapien
gcaaggaaagtgttaacggtggctcaagataaa

SEQ ID NO: 718280 - DNA, 33 bp, Homo sapien
gcaaggaaagtgttaatggtggctcaagataaa

SEQ ID NO: 718281 - DNA, 33 bp, Homo sapien
agtttctctcggtatcacatcaccacccttgtc

SEQ ID NO: 718282 - DNA, 33 bp, Homo sapien
agtttctctcggtatcgcatcaccacccttgtc

SEQ ID NO: 718283 - DNA, 33 bp, Homo sapien
ttgatttaagctttaaactggaaactttttcag

SEQ ID NO: 718284 - DNA, 33 bp, Homo sapien
ttgatttaagctttaagctggaaactttttcag

SEQ ID NO: 718285 - DNA, 33 bp, Homo sapien
gggatcctagagtggaaccacaatataacaggg

SEQ ID NO: 718286 - DNA, 33 bp, Homo sapien
gggatcctagagtggacccacaatataacaggg

SEQ ID NO: 718287 - DNA, 33 bp, Homo sapien
tgaaacacttgaccacggtagaggtgcgctggt

SEQ ID NO: 718288 - DNA, 33 bp, Homo sapien
tgaaacacttgaccactgtagaggtgcgctggt

SEQ ID NO: 718289 - DNA, 33 bp, Homo sapien
tgagtggatgtagcatcagatcatttatgaaat

SEQ ID NO: 718290 - DNA, 33 bp, Homo sapien
tgagtggatgtagcattagatcatttatgaaat

SEQ ID NO: 718291 - DNA, 33 bp, Homo sapien
gattccaacacagaaacgcttgctctctgctct

SEQ ID NO: 718292 - DNA, 33 bp, Homo sapien
gattccaacacagaaatgcttgctctctgctct

SEQ ID NO: 718293 - DNA, 33 bp, Homo sapien
tgcagatagttgtcaacatttggtgtttttgca

SEQ ID NO: 718294 - DNA, 33 bp, Homo sapien
tgcagatagttgtcaatatttggtgtttttgca

SEQ ID NO: 718295 - DNA, 33 bp, Homo sapien
aaaccatctagcataaataatacctgaaaccca

SEQ ID NO: 718296 - DNA, 33 bp, Homo sapien
aaaccatctagcataagtaatacctgaaaccca

SEQ ID NO: 718297 - DNA, 33 bp, Homo sapien
acgtggggtacacatgaacgtaaagagaggtca

SEQ ID NO: 718298 - DNA, 33 bp, Homo sapien
acgtggggtacacatggacgtaaagagaggtca

SEQ ID NO: 718299 - DNA, 33 bp, Homo sapien
atgaattcagttttaaaaaagtcgtttgaggat

SEQ ID NO: 718300 - DNA, 33 bp, Homo sapien
atgaattcagttttaagaaagtcgtttgaggat

SEQ ID NO: 718301 - DNA, 33 bp, Homo sapien
tagaaacaaaattttaccttgacactgatgtag

SEQ ID NO: 718302 - DNA, 33 bp, Homo sapien
tagaaacaaaattttagcttgacactgatgtag

SEQ ID NO: 718303 - DNA, 33 bp, Homo sapien
ggctgctaccacagtacgctctatttttctgat

SEQ ID NO: 718304 - DNA, 33 bp, Homo sapien
ggctgctaccacagtatgctctatttttctgat

SEQ ID NO: 718305 - DNA, 33 bp, Homo sapien
gtgtagcaaaacaaaaaatttcagaaagcaagc

SEQ ID NO: 718306 - DNA, 33 bp, Homo sapien
gtgtagcaaaacaaaagatttcagaaagcaagc

SEQ ID NO: 718307 - DNA, 33 bp, Homo sapien
ataaagttgaatactgaagacacaaatgcaggt

SEQ ID NO: 718308 - DNA, 33 bp, Homo sapien
ataaagttgaatactggagacacaaatgcaggt

SEQ ID NO: 718309 - DNA, 33 bp, Homo sapien
tctaaacattaaacccaaaagagaacaagtagg

SEQ ID NO: 718310 - DNA, 33 bp, Homo sapien
tctaaacattaaaccccaaagagaacaagtagg

SEQ ID NO: 718311 - DNA, 33 bp, Homo sapien
aagtcgataggtaatacgaagctttagtttcaa

SEQ ID NO: 718312 - DNA, 33 bp, Homo sapien
aagtcgataggtaataggaagctttagtttcaa

SEQ ID NO: 718313 - DNA, 33 bp, Homo sapien
ttacccattactgcccaaatttaatatttgacg

SEQ ID NO: 718314 - DNA, 33 bp, Homo sapien
ttacccattactgcccgaatttaatatttgacg

SEQ ID NO: 718315 - DNA, 33 bp, Homo sapien
aatggggaaagtaaaccatgaggagtgtatcca

SEQ ID NO: 718316 - DNA, 33 bp, Homo sapien
aatggggaaagtaaacgatgaggagtgtatcca

SEQ ID NO: 718317 - DNA, 33 bp, Homo sapien
tttccagagtccaaagaaaattatcaatataac

SEQ ID NO: 718318 - DNA, 33 bp, Homo sapien
tttccagagtccaaaggaaattatcaatataac

SEQ ID NO: 718319 - DNA, 33 bp, Homo sapien
ataatctaaagctggaatcactagggccatttt

SEQ ID NO: 718320 - DNA, 33 bp, Homo sapien
ataatctaaagctggactcactagggccatttt

SEQ ID NO: 718321 - DNA, 33 bp, Homo sapien
ctcaaacataaatttaactcaagcaccaaaata

SEQ ID NO: 718322 - DNA, 33 bp, Homo sapien
ctcaaacataaatttatctcaagcaccaaaata

SEQ ID NO: 718323 - DNA, 33 bp, Homo sapien
gcctgcctatctgaaacagcactagttcattaa

SEQ ID NO: 718324 - DNA, 33 bp, Homo sapien
gcctgcctatctgaaatagcactagttcattaa

SEQ ID NO: 718325 - DNA, 33 bp, Homo sapien
gtaacaacagaccttgaaggtttttgccactat

SEQ ID NO: 718326 - DNA, 33 bp, Homo sapien
gtaacaacagaccttgcaggtttttgccactat

SEQ ID NO: 718327 - DNA, 33 bp, Homo sapien
tttttaattgcaatgactatacctgagtctgaa

SEQ ID NO: 718328 - DNA, 33 bp, Homo sapien
tttttaattgcaatgagtatacctgagtctgaa

SEQ ID NO: 718329 - DNA, 33 bp, Homo sapien
tgagcgctgtctctacaccatagccattgcatt

SEQ ID NO: 718330 - DNA, 33 bp, Homo sapien
tgagcgctgtctctacgccatagccattgcatt

SEQ ID NO: 718331 - DNA, 33 bp, Homo sapien
cctcccacactagaagaatgggtcaaggaagaa

SEQ ID NO: 718332 - DNA, 33 bp, Homo sapien
cctcccacactagaaggatgggtcaaggaagaa

SEQ ID NO: 718333 - DNA, 33 bp, Homo sapien
cttaaactcatataacagggtaacactccatct

SEQ ID NO: 718334 - DNA, 33 bp, Homo sapien
cttaaactcatataacggggtaacactccatct

SEQ ID NO: 718335 - DNA, 33 bp, Homo sapien
cagatttgaattttaaccaattacccatgattt

SEQ ID NO: 718336 - DNA, 33 bp, Homo sapien
cagatttgaattttaagcaattacccatgattt

SEQ ID NO: 718337 - DNA, 33 bp, Homo sapien
atcttgcaaatagagaggctggatatacaaatt

SEQ ID NO: 718338 - DNA, 33 bp, Homo sapien
atcttgcaaatagagatgctggatatacaaatt

SEQ ID NO: 718339 - DNA, 33 bp, Homo sapien
gtaaactaatggtagcccaaaatctgatggaat

SEQ ID NO: 718340 - DNA, 33 bp, Homo sapien
gtaaactaatggtagctcaaaatctgatggaat

SEQ ID NO: 718341 - DNA, 33 bp, Homo sapien
gtgacacttgagccaaaccttcaagaagtgggg

SEQ ID NO: 718342 - DNA, 33 bp, Homo sapien
gtgacacttgagccaatccttcaagaagtgggg

SEQ ID NO: 718343 - DNA, 33 bp, Homo sapien
atgtactttttagatgccaatttctgttgtgtt

SEQ ID NO: 718344 - DNA, 33 bp, Homo sapien
atgtactttttagatgtcaatttctgttgtgtt

SEQ ID NO: 718345 - DNA, 33 bp, Homo sapien
actcacttattgaaccaacaaatatttatcatg

SEQ ID NO: 718346 - DNA, 33 bp, Homo sapien
actcacttattgaaccgacaaatatttatcatg

SEQ ID NO: 718347 - DNA, 33 bp, Homo sapien
agtatggagagagaagaaccagctgcaatagaa

SEQ ID NO: 718348 - DNA, 33 bp, Homo sapien
agtatggagagagaagcaccagctgcaatagaa

SEQ ID NO: 718349 - DNA, 33 bp, Homo sapien
taaatgtggaggaaatcagaagaagtgagtgct

SEQ ID NO: 718350 - DNA, 33 bp, Homo sapien
taaatgtggaggaaattagaagaagtgagtgct

SEQ ID NO: 718351 - DNA, 33 bp, Homo sapien
ctccagatcaaaacaaaatgcctctcttcagtt

SEQ ID NO: 718352 - DNA, 33 bp, Homo sapien
ctccagatcaaaacaagatgcctctcttcagtt

SEQ ID NO: 718353 - DNA, 33 bp, Homo sapien
gcctcataagccatatcactctagcagttttcc

SEQ ID NO: 718354 - DNA, 33 bp, Homo sapien
gcctcataagccatattactctagcagttttcc

SEQ ID NO: 718355 - DNA, 33 bp, Homo sapien
gggtcaggctgaaaaactatttgataaagtcat

SEQ ID NO: 718356 - DNA, 33 bp, Homo sapien
gggtcaggctgaaaaagtatttgataaagtcat

SEQ ID NO: 718357 - DNA, 33 bp, Homo sapien
aaaattattgtaaccacaaaagtaggccagagc

SEQ ID NO: 718358 - DNA, 33 bp, Homo sapien
aaaattattgtaaccagaaaagtaggccagagc

SEQ ID NO: 718359 - DNA, 33 bp, Homo sapien
attggagtagtataacaccacctcttaaagctg

SEQ ID NO: 718360 - DNA, 33 bp, Homo sapien
attggagtagtataaccccacctcttaaagctg

SEQ ID NO: 718361 - DNA, 33 bp, Homo sapien
tggatatttgaaaaaactctgtctattctggac

SEQ ID NO: 718362 - DNA, 33 bp, Homo sapien
tggatatttgaaaaaattctgtctattctggac

SEQ ID NO: 718363 - DNA, 33 bp, Homo sapien
acattaaaatcaggcactaaactgtcttcttga

SEQ ID NO: 718364 - DNA, 33 bp, Homo sapien
acattaaaatcaggcattaaactgtcttcttga

SEQ ID NO: 718365 - DNA, 33 bp, Homo sapien
ttacctctgaaactctcaagaaacttatcactt

SEQ ID NO: 718366 - DNA, 33 bp, Homo sapien
ttacctctgaaactctgaagaaacttatcactt

SEQ ID NO: 718367 - DNA, 33 bp, Homo sapien
atctgctgaaggataacacacttcctccatgat

SEQ ID NO: 718368 - DNA, 33 bp, Homo sapien
atctgctgaaggataatacacttcctccatgat

SEQ ID NO: 718369 - DNA, 33 bp, Homo sapien
caaaaacaaaaactagaagaggtgtgactgcag

SEQ ID NO: 718370 - DNA, 33 bp, Homo sapien
caaaaacaaaaactaggagaggtgtgactgcag

SEQ ID NO: 718371 - DNA, 33 bp, Homo sapien
cgcaggtttgcttacactcttgggagatagaga

SEQ ID NO: 718372 - DNA, 33 bp, Homo sapien
cgcaggtttgcttacagtcttgggagatagaga

SEQ ID NO: 718373 - DNA, 33 bp, Homo sapien
atctgcctagtggacacctcatataaatggaca

SEQ ID NO: 718374 - DNA, 33 bp, Homo sapien
atctgcctagtggacatctcatataaatggaca

SEQ ID NO: 718375 - DNA, 33 bp, Homo sapien
cattttctatcacaaaattctgtaaaatctacc

SEQ ID NO: 718376 - DNA, 33 bp, Homo sapien
cattttctatcacaaagttctgtaaaatctacc

SEQ ID NO: 718377 - DNA, 33 bp, Homo sapien
actcgtattatgtttgcaccctagtcctctagg

SEQ ID NO: 718378 - DNA, 33 bp, Homo sapien
actcgtattatgtttgtaccctagtcctctagg

SEQ ID NO: 718379 - DNA, 33 bp, Homo sapien
ttcatataagccaaggaaatttttctctccagt

SEQ ID NO: 718380 - DNA, 33 bp, Homo sapien
ttcatataagccaaggcaatttttctctccagt

SEQ ID NO: 718381 - DNA, 33 bp, Homo sapien
tgcaattcataatagcggaggaaatgtcatttt

SEQ ID NO: 718382 - DNA, 33 bp, Homo sapien
tgcaattcataatagctgaggaaatgtcatttt

SEQ ID NO: 718383 - DNA, 33 bp, Homo sapien
aataaattttgctccacagagtacctctgtagc

SEQ ID NO: 718384 - DNA, 33 bp, Homo sapien
aataaattttgctccagagagtacctctgtagc

SEQ ID NO: 718385 - DNA, 33 bp, Homo sapien
cctctcttatttcctccaatggtagtttgtagt

SEQ ID NO: 718386 - DNA, 33 bp, Homo sapien
cctctcttatttcctcgaatggtagtttgtagt

SEQ ID NO: 718387 - DNA, 33 bp, Homo sapien
gcttaaagacaacacaaaggctttggcaaactg

SEQ ID NO: 718388 - DNA, 33 bp, Homo sapien
gcttaaagacaacacagaggctttggcaaactg

SEQ ID NO: 718389 - DNA, 33 bp, Homo sapien
ttctgtaaaattcacactgaagaaaacaagcaa

SEQ ID NO: 718390 - DNA, 33 bp, Homo sapien
ttctgtaaaattcacattgaagaaaacaagcaa

SEQ ID NO: 718391 - DNA, 33 bp, Homo sapien
ctgtatgtattagcaaacatgatttataatgca

SEQ ID NO: 718392 - DNA, 33 bp, Homo sapien
ctgtatgtattagcaaccatgatttataatgca

SEQ ID NO: 718393 - DNA, 33 bp, Homo sapien
attcatactgttagaaacatacacgctataaga

SEQ ID NO: 718394 - DNA, 33 bp, Homo sapien
attcatactgttagaaccatacacgctataaga

SEQ ID NO: 718395 - DNA, 33 bp, Homo sapien
aatagctaggtacattgaagcaatgccttcctg

SEQ ID NO: 718396 - DNA, 33 bp, Homo sapien
aatagctaggtacatttaagcaatgccttcctg

SEQ ID NO: 718397 - DNA, 33 bp, Homo sapien
tgtggtggctagcggaagaaagaagagggaaga

SEQ ID NO: 718398 - DNA, 33 bp, Homo sapien
tgtggtggctagcggacgaaagaagagggaaga

SEQ ID NO: 718399 - DNA, 33 bp, Homo sapien
gaatattagaattgcacagacatccaagacttt

SEQ ID NO: 718400 - DNA, 33 bp, Homo sapien
gaatattagaattgcatagacatccaagacttt

SEQ ID NO: 718401 - DNA, 33 bp, Homo sapien
attagatatgccaagtcacctgatgtccatacc

SEQ ID NO: 718402 - DNA, 33 bp, Homo sapien
attagatatgccaagtgacctgatgtccatacc

SEQ ID NO: 718403 - DNA, 33 bp, Homo sapien
cattcattaagaaaaaatgctgagtactttgtg

SEQ ID NO: 718404 - DNA, 33 bp, Homo sapien
cattcattaagaaaaagtgctgagtactttgtg

SEQ ID NO: 718405 - DNA, 33 bp, Homo sapien
aacgtctaatattacacgtactctgccagtgtt

SEQ ID NO: 718406 - DNA, 33 bp, Homo sapien
aacgtctaatattacaggtactctgccagtgtt

SEQ ID NO: 718407 - DNA, 33 bp, Homo sapien
tcctgatcttgttaatgaagtgacttgcaaaac

SEQ ID NO: 718408 - DNA, 33 bp, Homo sapien
tcctgatcttgttaattaagtgacttgcaaaac

SEQ ID NO: 718409 - DNA, 33 bp, Homo sapien
cagtctctgtctcacaaaagttgctctatcaat

SEQ ID NO: 718410 - DNA, 33 bp, Homo sapien
cagtctctgtctcacagaagttgctctatcaat

SEQ ID NO: 718411 - DNA, 33 bp, Homo sapien
agacactccatcttgtcaaagtcatgactattt

SEQ ID NO: 718412 - DNA, 33 bp, Homo sapien
agacactccatcttgttaaagtcatgactattt

SEQ ID NO: 718413 - DNA, 33 bp, Homo sapien
ctatcaaagttgtaagcagtcttactgaggagg

SEQ ID NO: 718414 - DNA, 33 bp, Homo sapien
ctatcaaagttgtaaggagtcttactgaggagg

SEQ ID NO: 718415 - DNA, 33 bp, Homo sapien
caggttattggatacactgacctagagcttggt

SEQ ID NO: 718416 - DNA, 33 bp, Homo sapien
caggttattggatacattgacctagagcttggt

SEQ ID NO: 718417 - DNA, 33 bp, Homo sapien
ttctgttgacaaaaagcatcacaatgaaaaata

SEQ ID NO: 718418 - DNA, 33 bp, Homo sapien
ttctgttgacaaaaagtatcacaatgaaaaata

SEQ ID NO: 718419 - DNA, 33 bp, Homo sapien
cagagtctctgtaagcaaatatggtgtctctgc

SEQ ID NO: 718420 - DNA, 33 bp, Homo sapien
cagagtctctgtaagccaatatggtgtctctgc

SEQ ID NO: 718421 - DNA, 33 bp, Homo sapien
tgttttatcctgacataatagtagtgggttcct

SEQ ID NO: 718422 - DNA, 33 bp, Homo sapien
tgttttatcctgacatcatagtagtgggttcct

SEQ ID NO: 718423 - DNA, 33 bp, Homo sapien
acagtattcacagtcaataatcacagcgaaatt

SEQ ID NO: 718424 - DNA, 33 bp, Homo sapien
acagtattcacagtcagtaatcacagcgaaatt

SEQ ID NO: 718425 - DNA, 33 bp, Homo sapien
agatatagagtacggaaatttagatacagatac

SEQ ID NO: 718426 - DNA, 33 bp, Homo sapien
agatatagagtacggagatttagatacagatac

SEQ ID NO: 718427 - DNA, 33 bp, Homo sapien
ctgaattgaagagaacactgctttatttggtag

SEQ ID NO: 718428 - DNA, 33 bp, Homo sapien
ctgaattgaagagaactctgctttatttggtag

SEQ ID NO: 718429 - DNA, 33 bp, Homo sapien
agtatcacaaactcaacggtgaactgaattgaa

SEQ ID NO: 718430 - DNA, 33 bp, Homo sapien
agtatcacaaactcaatggtgaactgaattgaa

SEQ ID NO: 718431 - DNA, 33 bp, Homo sapien
tgacagagtgttcatacctatgtgtcctgttag

SEQ ID NO: 718432 - DNA, 33 bp, Homo sapien
tgacagagtgttcatatctatgtgtcctgttag

SEQ ID NO: 718433 - DNA, 33 bp, Homo sapien
gagcaggggtgctaccaattcaagtgagggctg

SEQ ID NO: 718434 - DNA, 33 bp, Homo sapien
gagcaggggtgctaccgattcaagtgagggctg

SEQ ID NO: 718435 - DNA, 33 bp, Homo sapien
aagaactgagatagaacctaggttgtgaaagcc

SEQ ID NO: 718436 - DNA, 33 bp, Homo sapien
aagaactgagatagaatctaggttgtgaaagcc

SEQ ID NO: 718437 - DNA, 33 bp, Homo sapien
gaaatgctctggggggaaaatctctaaagatac

SEQ ID NO: 718438 - DNA, 33 bp, Homo sapien
gaaatgctctgggggggaaatctctaaagatac

SEQ ID NO: 718439 - DNA, 33 bp, Homo sapien
aaaagaatttattcaccgagtacataaacccag

SEQ ID NO: 718440 - DNA, 33 bp, Homo sapien
aaaagaatttattcactgagtacataaacccag

SEQ ID NO: 718441 - DNA, 33 bp, Homo sapien
tgtccaaaggctggcaacttctcttgagcaaag

SEQ ID NO: 718442 - DNA, 33 bp, Homo sapien
tgtccaaaggctggcagcttctcttgagcaaag

SEQ ID NO: 718443 - DNA, 33 bp, Homo sapien
gaatctcttgtatttaaaagacagcctcatttc

SEQ ID NO: 718444 - DNA, 33 bp, Homo sapien
gaatctcttgtatttagaagacagcctcatttc

SEQ ID NO: 718445 - DNA, 33 bp, Homo sapien
caccccgacttgagaacgactgagttttacccc

SEQ ID NO: 718446 - DNA, 33 bp, Homo sapien
caccccgacttgagaatgactgagttttacccc

SEQ ID NO: 718447 - DNA, 33 bp, Homo sapien
tactgaacaccaggtgaacttcgaatgctgatt

SEQ ID NO: 718448 - DNA, 33 bp, Homo sapien
tactgaacaccaggtgcacttcgaatgctgatt

SEQ ID NO: 718449 - DNA, 33 bp, Homo sapien
caagagtaatttgtaacagaaaggaagactatc

SEQ ID NO: 718450 - DNA, 33 bp, Homo sapien
caagagtaatttgtaatagaaaggaagactatc

SEQ ID NO: 718451 - DNA, 33 bp, Homo sapien
caataaagtaaaacaacagacaatacactaaac

SEQ ID NO: 718452 - DNA, 33 bp, Homo sapien
caataaagtaaaacaagagacaatacactaaac

SEQ ID NO: 718453 - DNA, 33 bp, Homo sapien
taggcaaaaagtggaaactgattgggcctctca

SEQ ID NO: 718454 - DNA, 33 bp, Homo sapien
taggcaaaaagtggaatctgattgggcctctca

SEQ ID NO: 718455 - DNA, 33 bp, Homo sapien
ttttattgattgcttaacatataatactgtgct

SEQ ID NO: 718456 - DNA, 33 bp, Homo sapien
ttttattgattgcttagcatataatactgtgct

SEQ ID NO: 718457 - DNA, 33 bp, Homo sapien
atctaaatcgctataccctatatggactcaaga

SEQ ID NO: 718458 - DNA, 33 bp, Homo sapien
atctaaatcgctatactctatatggactcaaga

SEQ ID NO: 718459 - DNA, 33 bp, Homo sapien
catcttctgtgggaacccgtagtacagatattt

SEQ ID NO: 718460 - DNA, 33 bp, Homo sapien
catcttctgtgggaacgcgtagtacagatattt

SEQ ID NO: 718461 - DNA, 33 bp, Homo sapien
aagcccagtgtgtcaaacctaaacccgactcat

SEQ ID NO: 718462 - DNA, 33 bp, Homo sapien
aagcccagtgtgtcaagcctaaacccgactcat

SEQ ID NO: 718463 - DNA, 33 bp, Homo sapien
gcacactttactgtacagctcttgtgttcctgg

SEQ ID NO: 718464 - DNA, 33 bp, Homo sapien
gcacactttactgtacggctcttgtgttcctgg

SEQ ID NO: 718465 - DNA, 33 bp, Homo sapien
tgcaagtggaagataaactgctcaattaaggct

SEQ ID NO: 718466 - DNA, 33 bp, Homo sapien
tgcaagtggaagataagctgctcaattaaggct

SEQ ID NO: 718467 - DNA, 33 bp, Homo sapien
ttctatttcttgtctacagtactgggttactca

SEQ ID NO: 718468 - DNA, 33 bp, Homo sapien
ttctatttcttgtctatagtactgggttactca

SEQ ID NO: 718469 - DNA, 33 bp, Homo sapien
actaaactaaaattacagcacaggaactgagct

SEQ ID NO: 718470 - DNA, 33 bp, Homo sapien
actaaactaaaattaccgcacaggaactgagct

SEQ ID NO: 718471 - DNA, 33 bp, Homo sapien
gatactagaagacaacaggtagcctctgctgcc

SEQ ID NO: 718472 - DNA, 33 bp, Homo sapien
gatactagaagacaactggtagcctctgctgcc

SEQ ID NO: 718473 - DNA, 33 bp, Homo sapien
caaagaattaacaagaccatgtgtaaagcactc

SEQ ID NO: 718474 - DNA, 33 bp, Homo sapien
caaagaattaacaagatcatgtgtaaagcactc

SEQ ID NO: 718475 - DNA, 33 bp, Homo sapien
gatcggtagaacagtaaatagtccagaaataaa

SEQ ID NO: 718476 - DNA, 33 bp, Homo sapien
gatcggtagaacagtagatagtccagaaataaa

SEQ ID NO: 718477 - DNA, 33 bp, Homo sapien
ttcaaactttcaacaaatactttaatcaatatg

SEQ ID NO: 718478 - DNA, 33 bp, Homo sapien
ttcaaactttcaacaagtactttaatcaatatg

SEQ ID NO: 718479 - DNA, 33 bp, Homo sapien
ttatgattattttcatcataaaggagagagtgt

SEQ ID NO: 718480 - DNA, 33 bp, Homo sapien
ttatgattattttcattataaaggagagagtgt

SEQ ID NO: 718481 - DNA, 33 bp, Homo sapien
ttattttgctctgcaaccttttttttgcagggg

SEQ ID NO: 718482 - DNA, 33 bp, Homo sapien
ttattttgctctgcaagcttttttttgcagggg

SEQ ID NO: 718483 - DNA, 33 bp, Homo sapien
taattaaaagctaacccccaagatgtatgtata

SEQ ID NO: 718484 - DNA, 33 bp, Homo sapien
taattaaaagctaacctccaagatgtatgtata

SEQ ID NO: 718485 - DNA, 33 bp, Homo sapien
ggtgggaagtatccgacgggagcccctattgcc

SEQ ID NO: 718486 - DNA, 33 bp, Homo sapien
ggtgggaagtatccgatgggagcccctattgcc

SEQ ID NO: 718487 - DNA, 33 bp, Homo sapien
tgattcctcatggtaagaaactacaagatgatg

SEQ ID NO: 718488 - DNA, 33 bp, Homo sapien
tgattcctcatggtaataaactacaagatgatg

SEQ ID NO: 718489 - DNA, 33 bp, Homo sapien
agtgaaccgcggtaatcaggttgatagttcatg

SEQ ID NO: 718490 - DNA, 33 bp, Homo sapien
agtgaaccgcggtaatgaggttgatagttcatg

SEQ ID NO: 718491 - DNA, 33 bp, Homo sapien
tccaggagcttctagacagttgactgtgtgaaa

SEQ ID NO: 718492 - DNA, 33 bp, Homo sapien
tccaggagcttctagatagttgactgtgtgaaa

SEQ ID NO: 718493 - DNA, 33 bp, Homo sapien
ctctgcttagaaaagacgctcaaatgctcttta

SEQ ID NO: 718494 - DNA, 33 bp, Homo sapien
ctctgcttagaaaagatgctcaaatgctcttta

SEQ ID NO: 718495 - DNA, 33 bp, Homo sapien
tagcttactgttcctgaatagtctgagatactt

SEQ ID NO: 718496 - DNA, 33 bp, Homo sapien
tagcttactgttcctggatagtctgagatactt

SEQ ID NO: 718497 - DNA, 33 bp, Homo sapien
atttcgtaagaattcacggaaaaaataatgaca

SEQ ID NO: 718498 - DNA, 33 bp, Homo sapien
atttcgtaagaattcatggaaaaaataatgaca

SEQ ID NO: 718499 - DNA, 33 bp, Homo sapien
agaagaatagggtcaacagaatatggcagattc

SEQ ID NO: 718500 - DNA, 33 bp, Homo sapien
agaagaatagggtcaatagaatatggcagattc

SEQ ID NO: 718501 - DNA, 33 bp, Homo sapien
aagaattacagccccccgggatctctcggtcat

SEQ ID NO: 718502 - DNA, 33 bp, Homo sapien
aagaattacagccccctgggatctctcggtcat

SEQ ID NO: 718503 - DNA, 33 bp, Homo sapien
tcccagttctctactcacttattcccactcttt

SEQ ID NO: 718504 - DNA, 33 bp, Homo sapien
tcccagttctctactcccttattcccactcttt

SEQ ID NO: 718505 - DNA, 33 bp, Homo sapien
aaagacatgaaaagtaaccaaatttctaaagta

SEQ ID NO: 718506 - DNA, 33 bp, Homo sapien
aaagacatgaaaagtagccaaatttctaaagta

SEQ ID NO: 718507 - DNA, 33 bp, Homo sapien
tctttaagtctctgaactgtgtaggtttcatat

SEQ ID NO: 718508 - DNA, 33 bp, Homo sapien
tctttaagtctctgaattgtgtaggtttcatat

SEQ ID NO: 718509 - DNA, 33 bp, Homo sapien
tgccaaatgtcacagcacaattaactccctcct

SEQ ID NO: 718510 - DNA, 33 bp, Homo sapien
tgccaaatgtcacagcgcaattaactccctcct

SEQ ID NO: 718511 - DNA, 33 bp, Homo sapien
atcagttatttctttacagagcaatttagagac

SEQ ID NO: 718512 - DNA, 33 bp, Homo sapien
atcagttatttctttatagagcaatttagagac

SEQ ID NO: 718513 - DNA, 33 bp, Homo sapien
ttcaaagggctcaatactatctcatggtattta

SEQ ID NO: 718514 - DNA, 33 bp, Homo sapien
ttcaaagggctcaatattatctcatggtattta

SEQ ID NO: 718515 - DNA, 33 bp, Homo sapien
cctgtcacttgtaagaatacataaatgtgtctt

SEQ ID NO: 718516 - DNA, 33 bp, Homo sapien
cctgtcacttgtaagattacataaatgtgtctt

SEQ ID NO: 718517 - DNA, 33 bp, Homo sapien
gtgtttgagtgaaaaaaaagtgtggtacatttt

SEQ ID NO: 718518 - DNA, 33 bp, Homo sapien
gtgtttgagtgaaaaagaagtgtggtacatttt

SEQ ID NO: 718519 - DNA, 33 bp, Homo sapien
tgactatgtcacatacacagaaagagtgtcttg

SEQ ID NO: 718520 - DNA, 33 bp, Homo sapien
tgactatgtcacatacgcagaaagagtgtcttg

SEQ ID NO: 718521 - DNA, 33 bp, Homo sapien
tgttctagttgtatggaaaaggatactattcac

SEQ ID NO: 718522 - DNA, 33 bp, Homo sapien
tgttctagttgtatggcaaaggatactattcac

SEQ ID NO: 718523 - DNA, 33 bp, Homo sapien
gtcagtttttggttaacagtgtagtctttgaaa

SEQ ID NO: 718524 - DNA, 33 bp, Homo sapien
gtcagtttttggttaagagtgtagtctttgaaa

SEQ ID NO: 718525 - DNA, 33 bp, Homo sapien
tggttgattctgcctgcaatcttagagcttgaa

SEQ ID NO: 718526 - DNA, 33 bp, Homo sapien
tggttgattctgcctgtaatcttagagcttgaa

SEQ ID NO: 718527 - DNA, 33 bp, Homo sapien
agagttagaaaaaatgaaacatctgcttgtgaa

SEQ ID NO: 718528 - DNA, 33 bp, Homo sapien
agagttagaaaaaatggaacatctgcttgtgaa

SEQ ID NO: 718529 - DNA, 33 bp, Homo sapien
ctcctacctgcaatagccaaagtggtgatatca

SEQ ID NO: 718530 - DNA, 33 bp, Homo sapien
ctcctacctgcaatagtcaaagtggtgatatca

SEQ ID NO: 718531 - DNA, 33 bp, Homo sapien
aatgtcttcaaggacaaattttcttccatatct

SEQ ID NO: 718532 - DNA, 33 bp, Homo sapien
aatgtcttcaaggacagattttcttccatatct

SEQ ID NO: 718533 - DNA, 33 bp, Homo sapien
atatagaatctattcaatcatttgggcctcaaa

SEQ ID NO: 718534 - DNA, 33 bp, Homo sapien
atatagaatctattcattcatttgggcctcaaa

SEQ ID NO: 718535 - DNA, 33 bp, Homo sapien
gcttttacttatatcaaagctgtatctccagaa

SEQ ID NO: 718536 - DNA, 33 bp, Homo sapien
gcttttacttatatcacagctgtatctccagaa

SEQ ID NO: 718537 - DNA, 33 bp, Homo sapien
gaagtccaacattaaggcactgccagatttgga

SEQ ID NO: 718538 - DNA, 33 bp, Homo sapien
gaagtccaacattaagtcactgccagatttgga

SEQ ID NO: 718539 - DNA, 33 bp, Homo sapien
tatagtgagtgtaggaaaagtagtctaggaaat

SEQ ID NO: 718540 - DNA, 33 bp, Homo sapien
tatagtgagtgtaggacaagtagtctaggaaat

SEQ ID NO: 718541 - DNA, 33 bp, Homo sapien
gagggtaggacagagaagcgagacaacaaataa

SEQ ID NO: 718542 - DNA, 33 bp, Homo sapien
gagggtaggacagagatgcgagacaacaaataa

SEQ ID NO: 718543 - DNA, 33 bp, Homo sapien
cattgcactgagcctaaaggtttcatgccatag

SEQ ID NO: 718544 - DNA, 33 bp, Homo sapien
cattgcactgagcctagaggtttcatgccatag

SEQ ID NO: 718545 - DNA, 33 bp, Homo sapien
gaaaaaggagtggcataacaacactatagttaa

SEQ ID NO: 718546 - DNA, 33 bp, Homo sapien
gaaaaaggagtggcatgacaacactatagttaa

SEQ ID NO: 718547 - DNA, 33 bp, Homo sapien
atacaactcagactccaagagaaaattactcta

SEQ ID NO: 718548 - DNA, 33 bp, Homo sapien
atacaactcagactccgagagaaaattactcta

SEQ ID NO: 718549 - DNA, 33 bp, Homo sapien
tgaagggaatgaccaactagatagatatggttg

SEQ ID NO: 718550 - DNA, 33 bp, Homo sapien
tgaagggaatgaccaagtagatagatatggttg

SEQ ID NO: 718551 - DNA, 33 bp, Homo sapien
agtttggaaactaaaaatgagacagcaataaca

SEQ ID NO: 718552 - DNA, 33 bp, Homo sapien
agtttggaaactaaaagtgagacagcaataaca

SEQ ID NO: 718553 - DNA, 33 bp, Homo sapien
tcacaatttgagcaggaaaagtttaatataaaa

SEQ ID NO: 718554 - DNA, 33 bp, Homo sapien
tcacaatttgagcagggaaagtttaatataaaa

SEQ ID NO: 718555 - DNA, 33 bp, Homo sapien
aaaattacagcttaaaccaaacatacagtttaa

SEQ ID NO: 718556 - DNA, 33 bp, Homo sapien
aaaattacagcttaaatcaaacatacagtttaa

SEQ ID NO: 718557 - DNA, 33 bp, Homo sapien
tctttttgcactctcaagtcttcaattctcctc

SEQ ID NO: 718558 - DNA, 33 bp, Homo sapien
tctttttgcactctcaggtcttcaattctcctc

SEQ ID NO: 718559 - DNA, 33 bp, Homo sapien
ttatttagtcaacatcacacagatatcccattg

SEQ ID NO: 718560 - DNA, 33 bp, Homo sapien
ttatttagtcaacatcgcacagatatcccattg

SEQ ID NO: 718561 - DNA, 33 bp, Homo sapien
gcagaaaatgttgcaacgaaggtgaaataacta

SEQ ID NO: 718562 - DNA, 33 bp, Homo sapien
gcagaaaatgttgcaatgaaggtgaaataacta

SEQ ID NO: 718563 - DNA, 33 bp, Homo sapien
atgtaagcaaaagtacagacgcatataacagat

SEQ ID NO: 718564 - DNA, 33 bp, Homo sapien
atgtaagcaaaagtacggacgcatataacagat

SEQ ID NO: 718565 - DNA, 33 bp, Homo sapien
aacaatatggaaactacggatatcataagctaa

SEQ ID NO: 718566 - DNA, 33 bp, Homo sapien
aacaatatggaaactatggatatcataagctaa

SEQ ID NO: 718567 - DNA, 33 bp, Homo sapien
gaccaacgaaagagaacggaaaatccagatata

SEQ ID NO: 718568 - DNA, 33 bp, Homo sapien
gaccaacgaaagagaatggaaaatccagatata

SEQ ID NO: 718569 - DNA, 33 bp, Homo sapien
cacaaaccaaccctcaatcttgaatcttcttta

SEQ ID NO: 718570 - DNA, 33 bp, Homo sapien
cacaaaccaaccctcagtcttgaatcttcttta

SEQ ID NO: 718571 - DNA, 33 bp, Homo sapien
cagttgaagtctgaacgctaaggcacctcttta

SEQ ID NO: 718572 - DNA, 33 bp, Homo sapien
cagttgaagtctgaactctaaggcacctcttta

SEQ ID NO: 718573 - DNA, 33 bp, Homo sapien
tctaatgtaatttgctaaactatggaagcacaa

SEQ ID NO: 718574 - DNA, 33 bp, Homo sapien
tctaatgtaatttgctgaactatggaagcacaa

SEQ ID NO: 718575 - DNA, 33 bp, Homo sapien
cctttatgttgtagaaaaatgaatcatagatga

SEQ ID NO: 718576 - DNA, 33 bp, Homo sapien
cctttatgttgtagaagaatgaatcatagatga

SEQ ID NO: 718577 - DNA, 33 bp, Homo sapien
agaaattttttcaatgcactggaatatgcacat

SEQ ID NO: 718578 - DNA, 33 bp, Homo sapien
agaaattttttcaatgtactggaatatgcacat

SEQ ID NO: 718579 - DNA, 33 bp, Homo sapien
ttcagatatagtgaagcagaaattttttcaatg

SEQ ID NO: 718580 - DNA, 33 bp, Homo sapien
ttcagatatagtgaaggagaaattttttcaatg

SEQ ID NO: 718581 - DNA, 33 bp, Homo sapien
ttgcttgttttgtcaccgaacaaaaatgaaaca

SEQ ID NO: 718582 - DNA, 33 bp, Homo sapien
ttgcttgttttgtcactgaacaaaaatgaaaca

SEQ ID NO: 718583 - DNA, 33 bp, Homo sapien
tgattggcataatccggaaccacaggaatctag

SEQ ID NO: 718584 - DNA, 33 bp, Homo sapien
tgattggcataatccgtaaccacaggaatctag

SEQ ID NO: 718585 - DNA, 33 bp, Homo sapien
aattagatagcggtaaaagctgcataactttgt

SEQ ID NO: 718586 - DNA, 33 bp, Homo sapien
aattagatagcggtaatagctgcataactttgt

SEQ ID NO: 718587 - DNA, 33 bp, Homo sapien
aagcattaatgctaaacccaaaatctcatctaa

SEQ ID NO: 718588 - DNA, 33 bp, Homo sapien
aagcattaatgctaaatccaaaatctcatctaa

SEQ ID NO: 718589 - DNA, 33 bp, Homo sapien
tttacatagaaacagcaagtttggctagaagct

SEQ ID NO: 718590 - DNA, 33 bp, Homo sapien
tttacatagaaacagcgagtttggctagaagct

SEQ ID NO: 718591 - DNA, 33 bp, Homo sapien
agtttttagcaataaacttctatgatgagttcc

SEQ ID NO: 718592 - DNA, 33 bp, Homo sapien
agtttttagcaataaagttctatgatgagttcc

SEQ ID NO: 718593 - DNA, 33 bp, Homo sapien
taatgtttttgtgttacagtgtgatcactttat

SEQ ID NO: 718594 - DNA, 33 bp, Homo sapien
taatgtttttgtgttatagtgtgatcactttat

SEQ ID NO: 718595 - DNA, 33 bp, Homo sapien
tcattatggcccatcaagaattattggcatcta

SEQ ID NO: 718596 - DNA, 33 bp, Homo sapien
tcattatggcccatcaggaattattggcatcta

SEQ ID NO: 718597 - DNA, 33 bp, Homo sapien
tgctgggaagtttgaaaaaattggaattctact

SEQ ID NO: 718598 - DNA, 33 bp, Homo sapien
tgctgggaagtttgaacaaattggaattctact

SEQ ID NO: 718599 - DNA, 33 bp, Homo sapien
ataataaaatgcagatcaacagggaaataagag

SEQ ID NO: 718600 - DNA, 33 bp, Homo sapien
ataataaaatgcagatgaacagggaaataagag

SEQ ID NO: 718601 - DNA, 33 bp, Homo sapien
ctcttccgttactttccaccatgattatgaggc

SEQ ID NO: 718602 - DNA, 33 bp, Homo sapien
ctcttccgttactttctaccatgattatgaggc

SEQ ID NO: 718603 - DNA, 33 bp, Homo sapien
ttacggaaggtaaatactaagctggcaacaaca

SEQ ID NO: 718604 - DNA, 33 bp, Homo sapien
ttacggaaggtaaatagtaagctggcaacaaca

SEQ ID NO: 718605 - DNA, 33 bp, Homo sapien
tttaaagatataaaaaactgggtggcttatact

SEQ ID NO: 718606 - DNA, 33 bp, Homo sapien
tttaaagatataaaaatctgggtggcttatact

SEQ ID NO: 718607 - DNA, 33 bp, Homo sapien
aagaaaaaaaagaccccactatatgtgcctaat

SEQ ID NO: 718608 - DNA, 33 bp, Homo sapien
aagaaaaaaaagaccctactatatgtgcctaat

SEQ ID NO: 718609 - DNA, 33 bp, Homo sapien
catctcaagccagttaaaacggagatccttaag

SEQ ID NO: 718610 - DNA, 33 bp, Homo sapien
catctcaagccagttataacggagatccttaag

SEQ ID NO: 718611 - DNA, 33 bp, Homo sapien
tacttttgtccacttaccagaaaaattaatcat

SEQ ID NO: 718612 - DNA, 33 bp, Homo sapien
tacttttgtccacttatcagaaaaattaatcat

SEQ ID NO: 718613 - DNA, 33 bp, Homo sapien
aactctaaaagaaccacagcatgactgggcttt

SEQ ID NO: 718614 - DNA, 33 bp, Homo sapien
aactctaaaagaaccatagcatgactgggcttt

SEQ ID NO: 718615 - DNA, 33 bp, Homo sapien
gaaaacttgaacaacacaggcaattgatttgac

SEQ ID NO: 718616 - DNA, 33 bp, Homo sapien
gaaaacttgaacaacataggcaattgatttgac

SEQ ID NO: 718617 - DNA, 33 bp, Homo sapien
aatgaaattaaaatgcaaatcaatcaataacag

SEQ ID NO: 718618 - DNA, 33 bp, Homo sapien
aatgaaattaaaatgcgaatcaatcaataacag

SEQ ID NO: 718619 - DNA, 33 bp, Homo sapien
ataactgtgtgaatccagaggtttgaagttatc

SEQ ID NO: 718620 - DNA, 33 bp, Homo sapien
ataactgtgtgaatcccgaggtttgaagttatc

SEQ ID NO: 718621 - DNA, 33 bp, Homo sapien
aaatgtattctgagaaagcaactgtgaaatgaa

SEQ ID NO: 718622 - DNA, 33 bp, Homo sapien
aaatgtattctgagaaggcaactgtgaaatgaa

SEQ ID NO: 718623 - DNA, 33 bp, Homo sapien
agatatactgagaaaactccctgacagaactga

SEQ ID NO: 718624 - DNA, 33 bp, Homo sapien
agatatactgagaaaattccctgacagaactga

SEQ ID NO: 718625 - DNA, 33 bp, Homo sapien
attgaagttaacttgacagtgtgacagtgataa

SEQ ID NO: 718626 - DNA, 33 bp, Homo sapien
attgaagttaacttgatagtgtgacagtgataa

SEQ ID NO: 718627 - DNA, 33 bp, Homo sapien
agatgtctgatttttccacatttcctaactacc

SEQ ID NO: 718628 - DNA, 33 bp, Homo sapien
agatgtctgatttttctacatttcctaactacc

SEQ ID NO: 718629 - DNA, 33 bp, Homo sapien
agggaatatatgggtaagcaaaagaaacaatag

SEQ ID NO: 718630 - DNA, 33 bp, Homo sapien
agggaatatatgggtaggcaaaagaaacaatag

SEQ ID NO: 718631 - DNA, 33 bp, Homo sapien
ccgttaccaggaatgaagatacgttgatttgaa

SEQ ID NO: 718632 - DNA, 33 bp, Homo sapien
ccgttaccaggaatgatgatacgttgatttgaa

SEQ ID NO: 718633 - DNA, 33 bp, Homo sapien
gttcatattaggtcaccgtacatgaagacagtg

SEQ ID NO: 718634 - DNA, 33 bp, Homo sapien
gttcatattaggtcacggtacatgaagacagtg

SEQ ID NO: 718635 - DNA, 33 bp, Homo sapien
gcgtagtacctggcagcaagctttctaatcctc

SEQ ID NO: 718636 - DNA, 33 bp, Homo sapien
gcgtagtacctggcaggaagctttctaatcctc

SEQ ID NO: 718637 - DNA, 33 bp, Homo sapien
ttacaggcaagcaacgaagtgggaaaacctaat

SEQ ID NO: 718638 - DNA, 33 bp, Homo sapien
ttacaggcaagcaacggagtgggaaaacctaat

SEQ ID NO: 718639 - DNA, 33 bp, Homo sapien
gtttctaatgtcaacaatgttaaaagatattaa

SEQ ID NO: 718640 - DNA, 33 bp, Homo sapien
gtttctaatgtcaacagtgttaaaagatattaa

SEQ ID NO: 718641 - DNA, 33 bp, Homo sapien
gtatctacatataagaactaccctatgccaggc

SEQ ID NO: 718642 - DNA, 33 bp, Homo sapien
gtatctacatataagacctaccctatgccaggc

SEQ ID NO: 718643 - DNA, 33 bp, Homo sapien
actacatttgtaagaccggaaaactaaacacca

SEQ ID NO: 718644 - DNA, 33 bp, Homo sapien
actacatttgtaagacgggaaaactaaacacca

SEQ ID NO: 718645 - DNA, 33 bp, Homo sapien
gataaaggaaactgtgaaccagacagattaatt

SEQ ID NO: 718646 - DNA, 33 bp, Homo sapien
gataaaggaaactgtggaccagacagattaatt

SEQ ID NO: 718647 - DNA, 33 bp, Homo sapien
tagttcttgtccaggccattctgtctggtttat

SEQ ID NO: 718648 - DNA, 33 bp, Homo sapien
tagttcttgtccaggctattctgtctggtttat

SEQ ID NO: 718649 - DNA, 33 bp, Homo sapien
ggcagagtaatataaaagctgaagagtcaagta

SEQ ID NO: 718650 - DNA, 33 bp, Homo sapien
ggcagagtaatataaaggctgaagagtcaagta

SEQ ID NO: 718651 - DNA, 33 bp, Homo sapien
agataaaggtgttgcactaactatttttgtaaa

SEQ ID NO: 718652 - DNA, 33 bp, Homo sapien
agataaaggtgttgcattaactatttttgtaaa

SEQ ID NO: 718653 - DNA, 33 bp, Homo sapien
tttaagttacactgaacggacatagatgtttta

SEQ ID NO: 718654 - DNA, 33 bp, Homo sapien
tttaagttacactgaatggacatagatgtttta

SEQ ID NO: 718655 - DNA, 33 bp, Homo sapien
caggcaacagacgagaaataggccaggagttgg

SEQ ID NO: 718656 - DNA, 33 bp, Homo sapien
caggcaacagacgagagataggccaggagttgg

SEQ ID NO: 718657 - DNA, 33 bp, Homo sapien
gattaccaatatgagacggagaattagccttag

SEQ ID NO: 718658 - DNA, 33 bp, Homo sapien
gattaccaatatgagatggagaattagccttag

SEQ ID NO: 718659 - DNA, 33 bp, Homo sapien
atggagaaatctagaacgtgccaacttaagcaa

SEQ ID NO: 718660 - DNA, 33 bp, Homo sapien
atggagaaatctagaatgtgccaacttaagcaa

SEQ ID NO: 718661 - DNA, 33 bp, Homo sapien
caagcaagggcaattacccaacccagaacttaa

SEQ ID NO: 718662 - DNA, 33 bp, Homo sapien
caagcaagggcaattatccaacccagaacttaa

SEQ ID NO: 718663 - DNA, 33 bp, Homo sapien
agatgtgtttttcccaacatttcgacatagttt

SEQ ID NO: 718664 - DNA, 33 bp, Homo sapien
agatgtgtttttcccaccatttcgacatagttt

SEQ ID NO: 718665 - DNA, 33 bp, Homo sapien
ttgtccttttcaatcaatctcttcctacagagt

SEQ ID NO: 718666 - DNA, 33 bp, Homo sapien
ttgtccttttcaatcagtctcttcctacagagt

SEQ ID NO: 718667 - DNA, 33 bp, Homo sapien
tgtgctcttgttctttaaaaacttgcttatcaa

SEQ ID NO: 718668 - DNA, 33 bp, Homo sapien
tgtgctcttgttctttgaaaacttgcttatcaa

SEQ ID NO: 718669 - DNA, 33 bp, Homo sapien
ttatcatacacatctaactttgtaacctgcctt

SEQ ID NO: 718670 - DNA, 33 bp, Homo sapien
ttatcatacacatctagctttgtaacctgcctt

SEQ ID NO: 718671 - DNA, 33 bp, Homo sapien
ttatgaaatgatggcaaactcctttctcacaaa

SEQ ID NO: 718672 - DNA, 33 bp, Homo sapien
ttatgaaatgatggcagactcctttctcacaaa

SEQ ID NO: 718673 - DNA, 33 bp, Homo sapien
ttgcctgccaccacataagataggactttggtt

SEQ ID NO: 718674 - DNA, 33 bp, Homo sapien
ttgcctgccaccacatgagataggactttggtt

SEQ ID NO: 718675 - DNA, 33 bp, Homo sapien
ttcagtctagatgtaaaagaagccatgtcttag

SEQ ID NO: 718676 - DNA, 33 bp, Homo sapien
ttcagtctagatgtaagagaagccatgtcttag

SEQ ID NO: 718677 - DNA, 33 bp, Homo sapien
ttccacatccctggagacctagcaacatctcct

SEQ ID NO: 718678 - DNA, 33 bp, Homo sapien
ttccacatccctggagccctagcaacatctcct

SEQ ID NO: 718679 - DNA, 33 bp, Homo sapien
tcatttactctttcccaatactaaggagccttt

SEQ ID NO: 718680 - DNA, 33 bp, Homo sapien
tcatttactctttccccatactaaggagccttt

SEQ ID NO: 718681 - DNA, 33 bp, Homo sapien
gatgaagacatatttcacatccagagggttcaa

SEQ ID NO: 718682 - DNA, 33 bp, Homo sapien
gatgaagacatatttcgcatccagagggttcaa

SEQ ID NO: 718683 - DNA, 33 bp, Homo sapien
tccacattagtaggtgcaccctggcaataagtg

SEQ ID NO: 718684 - DNA, 33 bp, Homo sapien
tccacattagtaggtgtaccctggcaataagtg

SEQ ID NO: 718685 - DNA, 33 bp, Homo sapien
acatggaatactgacaatgatacattcaagata

SEQ ID NO: 718686 - DNA, 33 bp, Homo sapien
acatggaatactgacagtgatacattcaagata

SEQ ID NO: 718687 - DNA, 33 bp, Homo sapien
gctctgaaggaaaacactctgcttagtagtttc

SEQ ID NO: 718688 - DNA, 33 bp, Homo sapien
gctctgaaggaaaacattctgcttagtagtttc

SEQ ID NO: 718689 - DNA, 33 bp, Homo sapien
attaccaagtcatagaccgaaactttggctaag

SEQ ID NO: 718690 - DNA, 33 bp, Homo sapien
attaccaagtcatagatcgaaactttggctaag

SEQ ID NO: 718691 - DNA, 33 bp, Homo sapien
tttgtactagtcctgtaaacatatcagcctcca

SEQ ID NO: 718692 - DNA, 33 bp, Homo sapien
tttgtactagtcctgtgaacatatcagcctcca

SEQ ID NO: 718693 - DNA, 33 bp, Homo sapien
cagcctacttagtctaactgcatcaacacaaaa

SEQ ID NO: 718694 - DNA, 33 bp, Homo sapien
cagcctacttagtctagctgcatcaacacaaaa

SEQ ID NO: 718695 - DNA, 33 bp, Homo sapien
aaatcctccaaatgaaagatactgggtcgcagt

SEQ ID NO: 718696 - DNA, 33 bp, Homo sapien
aaatcctccaaatgaaggatactgggtcgcagt

SEQ ID NO: 718697 - DNA, 33 bp, Homo sapien
attgttttacaatgaacgtagcgataaaaccta

SEQ ID NO: 718698 - DNA, 33 bp, Homo sapien
attgttttacaatgaatgtagcgataaaaccta

SEQ ID NO: 718699 - DNA, 33 bp, Homo sapien
tggtggctacttctgagagtctgacctttgtgt

SEQ ID NO: 718700 - DNA, 33 bp, Homo sapien
tggtggctacttctgatagtctgacctttgtgt

SEQ ID NO: 718701 - DNA, 33 bp, Homo sapien
gaagataaagcacctcaagctatagagagtgtt

SEQ ID NO: 718702 - DNA, 33 bp, Homo sapien
gaagataaagcacctcgagctatagagagtgtt

SEQ ID NO: 718703 - DNA, 33 bp, Homo sapien
ttcctaaacttctaccaactttgtactcttttt

SEQ ID NO: 718704 - DNA, 33 bp, Homo sapien
ttcctaaacttctaccgactttgtactcttttt

SEQ ID NO: 718705 - DNA, 33 bp, Homo sapien
gattaataaggtacaacggatactttcaaattt

SEQ ID NO: 718706 - DNA, 33 bp, Homo sapien
gattaataaggtacaatggatactttcaaattt

SEQ ID NO: 718707 - DNA, 33 bp, Homo sapien
ttttgcgttcctttccaccaggacagtaaggga

SEQ ID NO: 718708 - DNA, 33 bp, Homo sapien
ttttgcgttcctttccgccaggacagtaaggga

SEQ ID NO: 718709 - DNA, 33 bp, Homo sapien
ctggctaagaatcttcaaatttaagtgcccttt

SEQ ID NO: 718710 - DNA, 33 bp, Homo sapien
ctggctaagaatcttccaatttaagtgcccttt

SEQ ID NO: 718711 - DNA, 33 bp, Homo sapien
agtgtctgaacaataaatgacaaactagttttt

SEQ ID NO: 718712 - DNA, 33 bp, Homo sapien
agtgtctgaacaataagtgacaaactagttttt

SEQ ID NO: 718713 - DNA, 33 bp, Homo sapien
acctgatcattccatgcagaaaggcatactaca

SEQ ID NO: 718714 - DNA, 33 bp, Homo sapien
acctgatcattccatggagaaaggcatactaca

SEQ ID NO: 718715 - DNA, 33 bp, Homo sapien
gccaaactgggataataaaagacagtagctaaa

SEQ ID NO: 718716 - DNA, 33 bp, Homo sapien
gccaaactgggataatgaaagacagtagctaaa

SEQ ID NO: 718717 - DNA, 33 bp, Homo sapien
gagctgagaactacaaactctacatttagcata

SEQ ID NO: 718718 - DNA, 33 bp, Homo sapien
gagctgagaactacaacctctacatttagcata

SEQ ID NO: 718719 - DNA, 33 bp, Homo sapien
agttcacttgaaagcacaacctgagctaaggac

SEQ ID NO: 718720 - DNA, 33 bp, Homo sapien
agttcacttgaaagcagaacctgagctaaggac

SEQ ID NO: 718721 - DNA, 33 bp, Homo sapien
gagtctaacagaataacaagcagaatgtaatat

SEQ ID NO: 718722 - DNA, 33 bp, Homo sapien
gagtctaacagaataagaagcagaatgtaatat

SEQ ID NO: 718723 - DNA, 33 bp, Homo sapien
ttagaaatcatgtgaaaatgtaaggaatctagg

SEQ ID NO: 718724 - DNA, 33 bp, Homo sapien
ttagaaatcatgtgaagatgtaaggaatctagg

SEQ ID NO: 718725 - DNA, 33 bp, Homo sapien
tcttgaaaatggtctaaggatatacagcaaatg

SEQ ID NO: 718726 - DNA, 33 bp, Homo sapien
tcttgaaaatggtctagggatatacagcaaatg

SEQ ID NO: 718727 - DNA, 33 bp, Homo sapien
caaataaatggggtaagaatcagtaaaatttta

SEQ ID NO: 718728 - DNA, 33 bp, Homo sapien
caaataaatggggtaataatcagtaaaatttta

SEQ ID NO: 718729 - DNA, 33 bp, Homo sapien
tcagcccttcaggatccaactcagctgctgaga

SEQ ID NO: 718730 - DNA, 33 bp, Homo sapien
tcagcccttcaggatctaactcagctgctgaga

SEQ ID NO: 718731 - DNA, 33 bp, Homo sapien
caaaaagccagtgagcacttgtagcttttctct

SEQ ID NO: 718732 - DNA, 33 bp, Homo sapien
caaaaagccagtgagcgcttgtagcttttctct

SEQ ID NO: 718733 - DNA, 33 bp, Homo sapien
ctaccatttactatgaagtattcaagaagtcag

SEQ ID NO: 718734 - DNA, 33 bp, Homo sapien
ctaccatttactatgaggtattcaagaagtcag

SEQ ID NO: 718735 - DNA, 33 bp, Homo sapien
cataaatctaattgcaccataagtatcaatcta

SEQ ID NO: 718736 - DNA, 33 bp, Homo sapien
cataaatctaattgcatcataagtatcaatcta

SEQ ID NO: 718737 - DNA, 33 bp, Homo sapien
aataacaaaaagcagagaaatttcctgtatgtc

SEQ ID NO: 718738 - DNA, 33 bp, Homo sapien
aataacaaaaagcagataaatttcctgtatgtc

SEQ ID NO: 718739 - DNA, 33 bp, Homo sapien
ctgtcaccatgtgacaacctcattgctttccaa

SEQ ID NO: 718740 - DNA, 33 bp, Homo sapien
ctgtcaccatgtgacatcctcattgctttccaa

SEQ ID NO: 718741 - DNA, 33 bp, Homo sapien
aaacatctaattgctacctggatatttccagtc

SEQ ID NO: 718742 - DNA, 33 bp, Homo sapien
aaacatctaattgctatctggatatttccagtc

SEQ ID NO: 718743 - DNA, 33 bp, Homo sapien
atcattatgaagagacaaaaaggtggatttaca

SEQ ID NO: 718744 - DNA, 33 bp, Homo sapien
atcattatgaagagacgaaaaggtggatttaca

SEQ ID NO: 718745 - DNA, 33 bp, Homo sapien
agggaactcagtgactaagggaacacgcacatt

SEQ ID NO: 718746 - DNA, 33 bp, Homo sapien
agggaactcagtgactgagggaacacgcacatt

SEQ ID NO: 718747 - DNA, 33 bp, Homo sapien
ttctaccatgaaaacacaaacacacatatattc

SEQ ID NO: 718748 - DNA, 33 bp, Homo sapien
ttctaccatgaaaacagaaacacacatatattc

SEQ ID NO: 718749 - DNA, 33 bp, Homo sapien
caatctggtccattctcactaaaatatctttta

SEQ ID NO: 718750 - DNA, 33 bp, Homo sapien
caatctggtccattcttactaaaatatctttta

SEQ ID NO: 718751 - DNA, 33 bp, Homo sapien
gctccctgtcctgcaaagggcctgagaatgtgt

SEQ ID NO: 718752 - DNA, 33 bp, Homo sapien
gctccctgtcctgcaaggggcctgagaatgtgt

SEQ ID NO: 718753 - DNA, 33 bp, Homo sapien
caacagggaaatatgacgaacctggaaatgcaa

SEQ ID NO: 718754 - DNA, 33 bp, Homo sapien
caacagggaaatatgatgaacctggaaatgcaa

SEQ ID NO: 718755 - DNA, 33 bp, Homo sapien
attttaaatggcataaacaagtaggagttattt

SEQ ID NO: 718756 - DNA, 33 bp, Homo sapien
attttaaatggcataagcaagtaggagttattt

SEQ ID NO: 718757 - DNA, 33 bp, Homo sapien
ccgatcaggaacataaactggcctgaatacaat

SEQ ID NO: 718758 - DNA, 33 bp, Homo sapien
ccgatcaggaacataagctggcctgaatacaat

SEQ ID NO: 718759 - DNA, 33 bp, Homo sapien
gacaactgattgggagaaaaataatattaatgg

SEQ ID NO: 718760 - DNA, 33 bp, Homo sapien
gacaactgattgggaggaaaataatattaatgg

SEQ ID NO: 718761 - DNA, 33 bp, Homo sapien
attagtgtagcccagaaaaaatggtgagtttag

SEQ ID NO: 718762 - DNA, 33 bp, Homo sapien
attagtgtagcccagagaaaatggtgagtttag

SEQ ID NO: 718763 - DNA, 33 bp, Homo sapien
cactacttctaagaccaaccaacaaccaaagac

SEQ ID NO: 718764 - DNA, 33 bp, Homo sapien
cactacttctaagaccgaccaacaaccaaagac

SEQ ID NO: 718765 - DNA, 33 bp, Homo sapien
tgaatacacactaaacacttggcactgcaattt

SEQ ID NO: 718766 - DNA, 33 bp, Homo sapien
tgaatacacactaaactcttggcactgcaattt

SEQ ID NO: 718767 - DNA, 33 bp, Homo sapien
cctgcagaatccaaaccatatcctgacagcatt

SEQ ID NO: 718768 - DNA, 33 bp, Homo sapien
cctgcagaatccaaactatatcctgacagcatt

SEQ ID NO: 718769 - DNA, 33 bp, Homo sapien
ttggactccacattcacgacctttccaggaggc

SEQ ID NO: 718770 - DNA, 33 bp, Homo sapien
ttggactccacattcatgacctttccaggaggc

SEQ ID NO: 718771 - DNA, 33 bp, Homo sapien
tacaaattcaatgcaactgccatcaaaatatta

SEQ ID NO: 718772 - DNA, 33 bp, Homo sapien
tacaaattcaatgcaagtgccatcaaaatatta

SEQ ID NO: 718773 - DNA, 33 bp, Homo sapien
catgtgtatcaataagcaggtgactctggaatt

SEQ ID NO: 718774 - DNA, 33 bp, Homo sapien
catgtgtatcaataaggaggtgactctggaatt

SEQ ID NO: 718775 - DNA, 33 bp, Homo sapien
cgtaccaaatggaatgcaccacatttctgtaaa

SEQ ID NO: 718776 - DNA, 33 bp, Homo sapien
cgtaccaaatggaatggaccacatttctgtaaa

SEQ ID NO: 718777 - DNA, 33 bp, Homo sapien
aatcctggaagccaaaagaaagggcatttccaa

SEQ ID NO: 718778 - DNA, 33 bp, Homo sapien
aatcctggaagccaaaggaaagggcatttccaa

SEQ ID NO: 718779 - DNA, 33 bp, Homo sapien
actcaaagatagacaaaaaacagtttgccctga

SEQ ID NO: 718780 - DNA, 33 bp, Homo sapien
actcaaagatagacaacaaacagtttgccctga

SEQ ID NO: 718781 - DNA, 33 bp, Homo sapien
tattcagttaatgagacggtaaactacaatttg

SEQ ID NO: 718782 - DNA, 33 bp, Homo sapien
tattcagttaatgagatggtaaactacaatttg

SEQ ID NO: 718783 - DNA, 33 bp, Homo sapien
ggtaggaagcacctggccattgttgaaatgtta

SEQ ID NO: 718784 - DNA, 33 bp, Homo sapien
ggtaggaagcacctggtcattgttgaaatgtta

SEQ ID NO: 718785 - DNA, 33 bp, Homo sapien
gagatctgtaccaaggaacccaaccaagagacc

SEQ ID NO: 718786 - DNA, 33 bp, Homo sapien
gagatctgtaccaagggacccaaccaagagacc

SEQ ID NO: 718787 - DNA, 33 bp, Homo sapien
aaatttcctcagatggacaggaataatattaaa

SEQ ID NO: 718788 - DNA, 33 bp, Homo sapien
aaatttcctcagatggtcaggaataatattaaa

SEQ ID NO: 718789 - DNA, 33 bp, Homo sapien
gcatcacagcagctaccggcaattaggagcatc

SEQ ID NO: 718790 - DNA, 33 bp, Homo sapien
gcatcacagcagctactggcaattaggagcatc

SEQ ID NO: 718791 - DNA, 33 bp, Homo sapien
ttagtgagaaactgaacggataactggttttct

SEQ ID NO: 718792 - DNA, 33 bp, Homo sapien
ttagtgagaaactgaatggataactggttttct

SEQ ID NO: 718793 - DNA, 33 bp, Homo sapien
ataatcatgcttcaggacataaacttatcgcca

SEQ ID NO: 718794 - DNA, 33 bp, Homo sapien
ataatcatgcttcagggcataaacttatcgcca

SEQ ID NO: 718795 - DNA, 33 bp, Homo sapien
attttaggtgaactgaacttaaatcttcttaag

SEQ ID NO: 718796 - DNA, 33 bp, Homo sapien
attttaggtgaactgaccttaaatcttcttaag

SEQ ID NO: 718797 - DNA, 33 bp, Homo sapien
ccttttctgcctgctacgagtatttgggtattt

SEQ ID NO: 718798 - DNA, 33 bp, Homo sapien
ccttttctgcctgctatgagtatttgggtattt

SEQ ID NO: 718799 - DNA, 33 bp, Homo sapien
tattgtgatattttgaggtggcacattttgatc

SEQ ID NO: 718800 - DNA, 33 bp, Homo sapien
tattgtgatattttgatgtggcacattttgatc

SEQ ID NO: 718801 - DNA, 33 bp, Homo sapien
ggtaagttttatccgacctgattttatttattt

SEQ ID NO: 718802 - DNA, 33 bp, Homo sapien
ggtaagttttatccgatctgattttatttattt

SEQ ID NO: 718803 - DNA, 33 bp, Homo sapien
gacacacacttcactaaagaagagaaacaaatc

SEQ ID NO: 718804 - DNA, 33 bp, Homo sapien
gacacacacttcactacagaagagaaacaaatc

SEQ ID NO: 718805 - DNA, 33 bp, Homo sapien
atatgtaaagactgtaggtgaattactcctatg

SEQ ID NO: 718806 - DNA, 33 bp, Homo sapien
atatgtaaagactgtatgtgaattactcctatg

SEQ ID NO: 718807 - DNA, 33 bp, Homo sapien
attagcgatgggtgaaatacaatcataaagaaa

SEQ ID NO: 718808 - DNA, 33 bp, Homo sapien
attagcgatgggtgaactacaatcataaagaaa

SEQ ID NO: 718809 - DNA, 33 bp, Homo sapien
aaaagcaaaaggcagccgaactctggttaataa

SEQ ID NO: 718810 - DNA, 33 bp, Homo sapien
aaaagcaaaaggcagctgaactctggttaataa

SEQ ID NO: 718811 - DNA, 33 bp, Homo sapien
aagtgaatgtaggtaacgtcctgagttcatgga

SEQ ID NO: 718812 - DNA, 33 bp, Homo sapien
aagtgaatgtaggtaatgtcctgagttcatgga

SEQ ID NO: 718813 - DNA, 33 bp, Homo sapien
ctgaggtccatttccaagtaaacttcagatcta

SEQ ID NO: 718814 - DNA, 33 bp, Homo sapien
ctgaggtccatttccaggtaaacttcagatcta

SEQ ID NO: 718815 - DNA, 33 bp, Homo sapien
tcagatctatcaacacaaattgtcatatttaac

SEQ ID NO: 718816 - DNA, 33 bp, Homo sapien
tcagatctatcaacacgaattgtcatatttaac

SEQ ID NO: 718817 - DNA, 33 bp, Homo sapien
gcaaattccatttatacggttgccactgataca

SEQ ID NO: 718818 - DNA, 33 bp, Homo sapien
gcaaattccatttatagggttgccactgataca

SEQ ID NO: 718819 - DNA, 33 bp, Homo sapien
gtgagaaaaaccatagacatttgccaaaatcaa

SEQ ID NO: 718820 - DNA, 33 bp, Homo sapien
gtgagaaaaaccataggcatttgccaaaatcaa

SEQ ID NO: 718821 - DNA, 33 bp, Homo sapien
cattccttttgtcttcaaatcatacatctgtgt

SEQ ID NO: 718822 - DNA, 33 bp, Homo sapien
cattccttttgtcttcgaatcatacatctgtgt

SEQ ID NO: 718823 - DNA, 33 bp, Homo sapien
catgcaattacatatccaggtggtcaattagga

SEQ ID NO: 718824 - DNA, 33 bp, Homo sapien
catgcaattacatatctaggtggtcaattagga

SEQ ID NO: 718825 - DNA, 33 bp, Homo sapien
gcaatagaggattcagaaaagttgggagaaaag

SEQ ID NO: 718826 - DNA, 33 bp, Homo sapien
gcaatagaggattcaggaaagttgggagaaaag

SEQ ID NO: 718827 - DNA, 33 bp, Homo sapien
caaagccaaattcttagaatgacctacacagca

SEQ ID NO: 718828 - DNA, 33 bp, Homo sapien
caaagccaaattcttataatgacctacacagca

SEQ ID NO: 718829 - DNA, 33 bp, Homo sapien
caagaagttttggaaaatcacaacagtactgaa

SEQ ID NO: 718830 - DNA, 33 bp, Homo sapien
caagaagttttggaaagtcacaacagtactgaa

SEQ ID NO: 718831 - DNA, 33 bp, Homo sapien
ttatatagctggcaaaaactggggaaggattaa

SEQ ID NO: 718832 - DNA, 33 bp, Homo sapien
ttatatagctggcaaacactggggaaggattaa

SEQ ID NO: 718833 - DNA, 33 bp, Homo sapien
ctctggtgctctggaaaactgaaattcacagtc

SEQ ID NO: 718834 - DNA, 33 bp, Homo sapien
ctctggtgctctggaacactgaaattcacagtc

SEQ ID NO: 718835 - DNA, 33 bp, Homo sapien
ggttaaagttgggtaaccatgcttctaggttag

SEQ ID NO: 718836 - DNA, 33 bp, Homo sapien
ggttaaagttgggtaatcatgcttctaggttag

SEQ ID NO: 718837 - DNA, 33 bp, Homo sapien
agttgttacttctagacagcgaaattttagttg

SEQ ID NO: 718838 - DNA, 33 bp, Homo sapien
agttgttacttctagatagcgaaattttagttg

SEQ ID NO: 718839 - DNA, 33 bp, Homo sapien
caatttggagtacttacatagtgttcaaaaagt

SEQ ID NO: 718840 - DNA, 33 bp, Homo sapien
caatttggagtacttatatagtgttcaaaaagt

SEQ ID NO: 718841 - DNA, 33 bp, Homo sapien
cacattgtagctcagacggtcataattaaatag

SEQ ID NO: 718842 - DNA, 33 bp, Homo sapien
cacattgtagctcagatggtcataattaaatag

SEQ ID NO: 718843 - DNA, 33 bp, Homo sapien
cctggatggttatcaactaatagtacttgcaat

SEQ ID NO: 718844 - DNA, 33 bp, Homo sapien
cctggatggttatcaattaatagtacttgcaat

SEQ ID NO: 718845 - DNA, 33 bp, Homo sapien
aagcaaatgaccaagcagaactattcagggctg

SEQ ID NO: 718846 - DNA, 33 bp, Homo sapien
aagcaaatgaccaagcggaactattcagggctg

SEQ ID NO: 718847 - DNA, 33 bp, Homo sapien
tagtacacatctcaaacctttcatgtccaaaac

SEQ ID NO: 718848 - DNA, 33 bp, Homo sapien
tagtacacatctcaaatctttcatgtccaaaac

SEQ ID NO: 718849 - DNA, 33 bp, Homo sapien
aagctagttaggtaaactattctgccttccttt

SEQ ID NO: 718850 - DNA, 33 bp, Homo sapien
aagctagttaggtaaattattctgccttccttt

SEQ ID NO: 718851 - DNA, 33 bp, Homo sapien
ctctactcttgctgaaaatgcctaagtcacaaa

SEQ ID NO: 718852 - DNA, 33 bp, Homo sapien
ctctactcttgctgaagatgcctaagtcacaaa

SEQ ID NO: 718853 - DNA, 33 bp, Homo sapien
ccaatcgatctagaaaccttctgcttatataaa

SEQ ID NO: 718854 - DNA, 33 bp, Homo sapien
ccaatcgatctagaaatcttctgcttatataaa

SEQ ID NO: 718855 - DNA, 33 bp, Homo sapien
attaccaacaatttagacagtgaatcattctcc

SEQ ID NO: 718856 - DNA, 33 bp, Homo sapien
attaccaacaatttaggcagtgaatcattctcc

SEQ ID NO: 718857 - DNA, 33 bp, Homo sapien
gacaggccttctcaatgacaagtctggcaattg

SEQ ID NO: 718858 - DNA, 33 bp, Homo sapien
gacaggccttctcaattacaagtctggcaattg

SEQ ID NO: 718859 - DNA, 33 bp, Homo sapien
gttctagcacttaacccatgaaccctggtcttt

SEQ ID NO: 718860 - DNA, 33 bp, Homo sapien
gttctagcacttaacctatgaaccctggtcttt

SEQ ID NO: 718861 - DNA, 33 bp, Homo sapien
aattttataaacaagccaactgcagatcagaga

SEQ ID NO: 718862 - DNA, 33 bp, Homo sapien
aattttataaacaagctaactgcagatcagaga

SEQ ID NO: 718863 - DNA, 33 bp, Homo sapien
gcctgtaccttaaggaatcagacatgataaacc

SEQ ID NO: 718864 - DNA, 33 bp, Homo sapien
gcctgtaccttaaggagtcagacatgataaacc

SEQ ID NO: 718865 - DNA, 33 bp, Homo sapien
tctttattcatgaacaagttttgcatattacat

SEQ ID NO: 718866 - DNA, 33 bp, Homo sapien
tctttattcatgaacacgttttgcatattacat

SEQ ID NO: 718867 - DNA, 33 bp, Homo sapien
cagtcaaatgtttcccactgctagaaaaaatgt

SEQ ID NO: 718868 - DNA, 33 bp, Homo sapien
cagtcaaatgtttcccgctgctagaaaaaatgt

SEQ ID NO: 718869 - DNA, 33 bp, Homo sapien
atcataacgtgtaccccctatgtttgtgtaggc

SEQ ID NO: 718870 - DNA, 33 bp, Homo sapien
atcataacgtgtacccgctatgtttgtgtaggc

SEQ ID NO: 718871 - DNA, 33 bp, Homo sapien
agtctctacttgtgaactctgtatgattaagtg

SEQ ID NO: 718872 - DNA, 33 bp, Homo sapien
agtctctacttgtgaattctgtatgattaagtg

SEQ ID NO: 718873 - DNA, 33 bp, Homo sapien
cagagcagcgcaccacggtagatcatttgggat

SEQ ID NO: 718874 - DNA, 33 bp, Homo sapien
cagagcagcgcaccactgtagatcatttgggat

SEQ ID NO: 718875 - DNA, 33 bp, Homo sapien
aaaattatttcatttcgaccatattccattgta

SEQ ID NO: 718876 - DNA, 33 bp, Homo sapien
aaaattatttcatttctaccatattccattgta

SEQ ID NO: 718877 - DNA, 33 bp, Homo sapien
gaacacattcctattacggcagaaaatgaaatt

SEQ ID NO: 718878 - DNA, 33 bp, Homo sapien
gaacacattcctattatggcagaaaatgaaatt

SEQ ID NO: 718879 - DNA, 33 bp, Homo sapien
aaacaacctactaagacgagttcaaaatttgtt

SEQ ID NO: 718880 - DNA, 33 bp, Homo sapien
aaacaacctactaagatgagttcaaaatttgtt

SEQ ID NO: 718881 - DNA, 33 bp, Homo sapien
gtacactgcttgaataaaatgctttctgaacat

SEQ ID NO: 718882 - DNA, 33 bp, Homo sapien
gtacactgcttgaatacaatgctttctgaacat

SEQ ID NO: 718883 - DNA, 33 bp, Homo sapien
gaactggatgtgagaaatatgaaacagaaattt

SEQ ID NO: 718884 - DNA, 33 bp, Homo sapien
gaactggatgtgagaagtatgaaacagaaattt

SEQ ID NO: 718885 - DNA, 33 bp, Homo sapien
ggaaataaaggcaagactagccatgggaagagt

SEQ ID NO: 718886 - DNA, 33 bp, Homo sapien
ggaaataaaggcaagagtagccatgggaagagt

SEQ ID NO: 718887 - DNA, 33 bp, Homo sapien
tacacctccagacaaacggaaggtatctacagc

SEQ ID NO: 718888 - DNA, 33 bp, Homo sapien
tacacctccagacaaatggaaggtatctacagc

SEQ ID NO: 718889 - DNA, 33 bp, Homo sapien
atgcacaaatgttcaacagtcacaaaaaaataa

SEQ ID NO: 718890 - DNA, 33 bp, Homo sapien
atgcacaaatgttcaatagtcacaaaaaaataa

SEQ ID NO: 718891 - DNA, 33 bp, Homo sapien
ttaagtcctatgtgtcaaggttcatagaactga

SEQ ID NO: 718892 - DNA, 33 bp, Homo sapien
ttaagtcctatgtgtcgaggttcatagaactga

SEQ ID NO: 718893 - DNA, 33 bp, Homo sapien
ataaaaaagcatttgaaggaagaaatctttagt

SEQ ID NO: 718894 - DNA, 33 bp, Homo sapien
ataaaaaagcatttgagggaagaaatctttagt

SEQ ID NO: 718895 - DNA, 33 bp, Homo sapien
agttttactgccttaaaaaagctctatgctcta

SEQ ID NO: 718896 - DNA, 33 bp, Homo sapien
agttttactgccttaataaagctctatgctcta

SEQ ID NO: 718897 - DNA, 33 bp, Homo sapien
ccatttgtatttccaaatgcagctcaagcccta

SEQ ID NO: 718898 - DNA, 33 bp, Homo sapien
ccatttgtatttccaagtgcagctcaagcccta

SEQ ID NO: 718899 - DNA, 33 bp, Homo sapien
atgaatgaagaaaaaaaattacgtctccctatc

SEQ ID NO: 718900 - DNA, 33 bp, Homo sapien
atgaatgaagaaaaaatattacgtctccctatc

SEQ ID NO: 718901 - DNA, 33 bp, Homo sapien
cttgaaacatttgatacagtagacctctaacat

SEQ ID NO: 718902 - DNA, 33 bp, Homo sapien
cttgaaacatttgatatagtagacctctaacat

SEQ ID NO: 718903 - DNA, 33 bp, Homo sapien
tgcacagtctattaaactgagctataggtaaga

SEQ ID NO: 718904 - DNA, 33 bp, Homo sapien
tgcacagtctattaaattgagctataggtaaga

SEQ ID NO: 718905 - DNA, 33 bp, Homo sapien
ctctctaatctgtgaaggttattttgattacta

SEQ ID NO: 718906 - DNA, 33 bp, Homo sapien
ctctctaatctgtgaatgttattttgattacta

SEQ ID NO: 718907 - DNA, 33 bp, Homo sapien
gtttgggtggttaataggtctctcaaaaacaca

SEQ ID NO: 718908 - DNA, 33 bp, Homo sapien
gtttgggtggttaatatgtctctcaaaaacaca

SEQ ID NO: 718909 - DNA, 33 bp, Homo sapien
ttaaaggagacaatgaataggcaatggagggga

SEQ ID NO: 718910 - DNA, 33 bp, Homo sapien
ttaaaggagacaatgagtaggcaatggagggga

SEQ ID NO: 718911 - DNA, 33 bp, Homo sapien
aagagatacagaaagactaaattttgccagaaa

SEQ ID NO: 718912 - DNA, 33 bp, Homo sapien
aagagatacagaaagattaaattttgccagaaa

SEQ ID NO: 718913 - DNA, 33 bp, Homo sapien
taaggtaggcaaggaaagtcttactgcgaaagt

SEQ ID NO: 718914 - DNA, 33 bp, Homo sapien
taaggtaggcaaggaaggtcttactgcgaaagt

SEQ ID NO: 718915 - DNA, 33 bp, Homo sapien
ttgtcatttctaaaaaatacagtattctcataa

SEQ ID NO: 718916 - DNA, 33 bp, Homo sapien
ttgtcatttctaaaaactacagtattctcataa

SEQ ID NO: 718917 - DNA, 33 bp, Homo sapien
gcttggctaaataaagaatttttgtaagtcaat

SEQ ID NO: 718918 - DNA, 33 bp, Homo sapien
gcttggctaaataaaggatttttgtaagtcaat

SEQ ID NO: 718919 - DNA, 33 bp, Homo sapien
ctgttgaatactcatccctttctgttgtttttg

SEQ ID NO: 718920 - DNA, 33 bp, Homo sapien
ctgttgaatactcatctctttctgttgtttttg

SEQ ID NO: 718921 - DNA, 33 bp, Homo sapien
catgtgttgaataaaacgtaggtgtttttgatg

SEQ ID NO: 718922 - DNA, 33 bp, Homo sapien
catgtgttgaataaaatgtaggtgtttttgatg

SEQ ID NO: 718923 - DNA, 33 bp, Homo sapien
ttaggagcaatgagtaaaaggaatcaaaggtga

SEQ ID NO: 718924 - DNA, 33 bp, Homo sapien
ttaggagcaatgagtacaaggaatcaaaggtga

SEQ ID NO: 718925 - DNA, 33 bp, Homo sapien
atcactttctggtacaacaatcaaaggtagatt

SEQ ID NO: 718926 - DNA, 33 bp, Homo sapien
atcactttctggtacagcaatcaaaggtagatt

SEQ ID NO: 718927 - DNA, 33 bp, Homo sapien
aagcttctttctgaaccgagaagaaagtccgag

SEQ ID NO: 718928 - DNA, 33 bp, Homo sapien
aagcttctttctgaactgagaagaaagtccgag

SEQ ID NO: 718929 - DNA, 33 bp, Homo sapien
ccctattctgaaccaaatgaatcaatttctgga

SEQ ID NO: 718930 - DNA, 33 bp, Homo sapien
ccctattctgaaccaactgaatcaatttctgga

SEQ ID NO: 718931 - DNA, 33 bp, Homo sapien
atttaacttgggaagaatattaaccttcaggtg

SEQ ID NO: 718932 - DNA, 33 bp, Homo sapien
atttaacttgggaagagtattaaccttcaggtg

SEQ ID NO: 718933 - DNA, 33 bp, Homo sapien
tctctagagtataaaacagtacctgaaacacag

SEQ ID NO: 718934 - DNA, 33 bp, Homo sapien
tctctagagtataaaagagtacctgaaacacag

SEQ ID NO: 718935 - DNA, 33 bp, Homo sapien
ttattttatcatcaccaaactattttctagtca

SEQ ID NO: 718936 - DNA, 33 bp, Homo sapien
ttattttatcatcaccgaactattttctagtca

SEQ ID NO: 718937 - DNA, 33 bp, Homo sapien
tttgctgaattttgtcaaacactttttatgcat

SEQ ID NO: 718938 - DNA, 33 bp, Homo sapien
tttgctgaattttgtccaacactttttatgcat

SEQ ID NO: 718939 - DNA, 33 bp, Homo sapien
cagcctttacttctcacagcctctcctcatgtt

SEQ ID NO: 718940 - DNA, 33 bp, Homo sapien
cagcctttacttctcatagcctctcctcatgtt

SEQ ID NO: 718941 - DNA, 33 bp, Homo sapien
aagggacattttgggacgattccacctcttttt

SEQ ID NO: 718942 - DNA, 33 bp, Homo sapien
aagggacattttgggatgattccacctcttttt

SEQ ID NO: 718943 - DNA, 33 bp, Homo sapien
acaaagctctatagtacgttcaggctgcattgc

SEQ ID NO: 718944 - DNA, 33 bp, Homo sapien
acaaagctctatagtatgttcaggctgcattgc

SEQ ID NO: 718945 - DNA, 33 bp, Homo sapien
aaaaaaaagtgttccacataaatgtcaaatctc

SEQ ID NO: 718946 - DNA, 33 bp, Homo sapien
aaaaaaaagtgttccatataaatgtcaaatctc

SEQ ID NO: 718947 - DNA, 33 bp, Homo sapien
gatcatactgaaaaaaatctgtagagaaagtcc

SEQ ID NO: 718948 - DNA, 33 bp, Homo sapien
gatcatactgaaaaaattctgtagagaaagtcc

SEQ ID NO: 718949 - DNA, 33 bp, Homo sapien
tagaacctccactgcacgctggttttaggtctt

SEQ ID NO: 718950 - DNA, 33 bp, Homo sapien
tagaacctccactgcaggctggttttaggtctt

SEQ ID NO: 718951 - DNA, 33 bp, Homo sapien
agcaaagcagtgggttgaaagagtgtgtggtct

SEQ ID NO: 718952 - DNA, 33 bp, Homo sapien
agcaaagcagtgggtttaaagagtgtgtggtct

SEQ ID NO: 718953 - DNA, 33 bp, Homo sapien
acactcatttagtctcccagagaaatacaaata

SEQ ID NO: 718954 - DNA, 33 bp, Homo sapien
acactcatttagtctctcagagaaatacaaata

SEQ ID NO: 718955 - DNA, 33 bp, Homo sapien
ggcctttaattagctcacatctggcagctgatg

SEQ ID NO: 718956 - DNA, 33 bp, Homo sapien
ggcctttaattagctctcatctggcagctgatg

SEQ ID NO: 718957 - DNA, 33 bp, Homo sapien
catcatgatgttagccaattattttgaagactt

SEQ ID NO: 718958 - DNA, 33 bp, Homo sapien
catcatgatgttagccgattattttgaagactt

SEQ ID NO: 718959 - DNA, 33 bp, Homo sapien; identical to SEQ ID NO: 718957

SEQ ID NO: 718960 - DNA, 33 bp, Homo sapien; identical to SEQ ID NO: 718958

SEQ ID NO: 718961 - DNA, 33 bp, Homo sapien
aacattggaccaaatgaatctagtacatgtcta

SEQ ID NO: 718962 - DNA, 33 bp, Homo sapien
aacattggaccaaatggatctagtacatgtcta

SEQ ID NO: 718963 - DNA, 33 bp, Homo sapien
tctaactcaatgataaatgacagatgggatttg

SEQ ID NO: 718964 - DNA, 33 bp, Homo sapien
tctaactcaatgataagtgacagatgggatttg

SEQ ID NO: 718965 - DNA, 33 bp, Homo sapien
atttgtcctaccaagaaattcttttcactttca

SEQ ID NO: 718966 - DNA, 33 bp, Homo sapien
atttgtcctaccaagacattcttttcactttca

SEQ ID NO: 718967 - DNA, 33 bp, Homo sapien
gttgatatcttgtgggccagtcagtggagaagt

SEQ ID NO: 718968 - DNA, 33 bp, Homo sapien
gttgatatcttgtgggtcagtcagtggagaagt

SEQ ID NO: 718969 - DNA, 33 bp, Homo sapien
ggggactgaatttcaagagagttgttactacct

SEQ ID NO: 718970 - DNA, 33 bp, Homo sapien
ggggactgaatttcaatagagttgttactacct

SEQ ID NO: 718971 - DNA, 33 bp, Homo sapien
ggggtcatggataaagactacctactgggtaca

SEQ ID NO: 718972 - DNA, 33 bp, Homo sapien
ggggtcatggataaagtctacctactgggtaca

SEQ ID NO: 718973 - DNA, 33 bp, Homo sapien
aaagtattcccttttcactagatccatgccaac

SEQ ID NO: 718974 - DNA, 33 bp, Homo sapien
aaagtattcccttttcgctagatccatgccaac

SEQ ID NO: 718975 - DNA, 33 bp, Homo sapien
tattgaggttaggtaacgtgattcctccagttt

SEQ ID NO: 718976 - DNA, 33 bp, Homo sapien
tattgaggttaggtaatgtgattcctccagttt

SEQ ID NO: 718977 - DNA, 33 bp, Homo sapien
ttagccctacaatacacgtttctactcttgccc

SEQ ID NO: 718978 - DNA, 33 bp, Homo sapien
ttagccctacaatacaggtttctactcttgccc

SEQ ID NO: 718979 - DNA, 33 bp, Homo sapien
aagcagaaatgtgaaagtattgttatttttgca

SEQ ID NO: 718980 - DNA, 33 bp, Homo sapien
aagcagaaatgtgaaattattgttatttttgca

SEQ ID NO: 718981 - DNA, 33 bp, Homo sapien
gtttactagcagtggacgtattttaggatcttg

SEQ ID NO: 718982 - DNA, 33 bp, Homo sapien
gtttactagcagtggatgtattttaggatcttg

SEQ ID NO: 718983 - DNA, 33 bp, Homo sapien
attgtttctttctttgatggtagagaatattgg

SEQ ID NO: 718984 - DNA, 33 bp, Homo sapien
attgtttctttctttggtggtagagaatattgg

SEQ ID NO: 718985 - DNA, 33 bp, Homo sapien
taacttggccaaggacaaataactattaagtgg

SEQ ID NO: 718986 - DNA, 33 bp, Homo sapien
taacttggccaaggactaataactattaagtgg

SEQ ID NO: 718987 - DNA, 33 bp, Homo sapien
gacatacctggtcttccaggccttgactgtccc

SEQ ID NO: 718988 - DNA, 33 bp, Homo sapien
gacatacctggtcttctaggccttgactgtccc

SEQ ID NO: 718989 - DNA, 33 bp, Homo sapien
taattctggtaacatgaaaagtaaggataatat

SEQ ID NO: 718990 - DNA, 33 bp, Homo sapien
taattctggtaacatggaaagtaaggataatat

SEQ ID NO: 718991 - DNA, 33 bp, Homo sapien
cctgaaccagttttaccatgatgcttatcaaat

SEQ ID NO: 718992 - DNA, 33 bp, Homo sapien
cctgaaccagttttactatgatgcttatcaaat

SEQ ID NO: 718993 - DNA, 33 bp, Homo sapien
aactgcaacctgcatccatatcgatcacttcaa

SEQ ID NO: 718994 - DNA, 33 bp, Homo sapien
aactgcaacctgcatctatatcgatcacttcaa

SEQ ID NO: 718995 - DNA, 33 bp, Homo sapien
gccattttcatccccaccaaaagtgattagaag

SEQ ID NO: 718996 - DNA, 33 bp, Homo sapien
gccattttcatccccatcaaaagtgattagaag

SEQ ID NO: 718997 - DNA, 33 bp, Homo sapien
gcagactgaccttcaaataagttacaaagacca

SEQ ID NO: 718998 - DNA, 33 bp, Homo sapien
gcagactgaccttcaagtaagttacaaagacca

SEQ ID NO: 718999 - DNA, 33 bp, Homo sapien
acaaagaccacaagacaagaaatccttaaaagt

SEQ ID NO: 719000 - DNA, 33 bp, Homo sapien
acaaagaccacaagaccagaaatccttaaaagt

SEQ ID NO: 719001 - DNA, 33 bp, Homo sapien
tattcaacaaggtagaaaaaagatgaacatgat

SEQ ID NO: 719002 - DNA, 33 bp, Homo sapien
tattcaacaaggtagagaaaagatgaacatgat

SEQ ID NO: 719003 - DNA, 33 bp, Homo sapien
tttcacaagaggaaaagaccttagagccttaga

SEQ ID NO: 719004 - DNA, 33 bp, Homo sapien
tttcacaagaggaaaataccttagagccttaga

SEQ ID NO: 719005 - DNA, 33 bp, Homo sapien
ttggtagaatgctttgcacttacatattccaag

SEQ ID NO: 719006 - DNA, 33 bp, Homo sapien
ttggtagaatgctttgtacttacatattccaag

SEQ ID NO: 719007 - DNA, 33 bp, Homo sapien
ctcactagtacactccgcagagaatgttatact

SEQ ID NO: 719008 - DNA, 33 bp, Homo sapien
ctcactagtacactcctcagagaatgttatact

SEQ ID NO: 719009 - DNA, 33 bp, Homo sapien
gacacacctgaaactacaattagtgcaatgtat

SEQ ID NO: 719010 - DNA, 33 bp, Homo sapien
gacacacctgaaactataattagtgcaatgtat

SEQ ID NO: 719011 - DNA, 33 bp, Homo sapien
tagtgtaatacattgcactaattgtagtaattg

SEQ ID NO: 719012 - DNA, 33 bp, Homo sapien
tagtgtaatacattgcgctaattgtagtaattg

SEQ ID NO: 719013 - DNA, 33 bp, Homo sapien
catattatcatcattacgaaagcaactgagtgt

SEQ ID NO: 719014 - DNA, 33 bp, Homo sapien
catattatcatcattatgaaagcaactgagtgt

SEQ ID NO: 719015 - DNA, 33 bp, Homo sapien
aaaacaacttgtggaaaaagagagaattacatc

SEQ ID NO: 719016 - DNA, 33 bp, Homo sapien
aaaacaacttgtggaataagagagaattacatc

SEQ ID NO: 719017 - DNA, 33 bp, Homo sapien
tttagaaaatagtatccaggactggtcatcagg

SEQ ID NO: 719018 - DNA, 33 bp, Homo sapien
tttagaaaatagtatctaggactggtcatcagg

SEQ ID NO: 719019 - DNA, 33 bp, Homo sapien
ttctcttctctgaagccgaacacatcacaaata

SEQ ID NO: 719020 - DNA, 33 bp, Homo sapien
ttctcttctctgaagctgaacacatcacaaata

SEQ ID NO: 719021 - DNA, 33 bp, Homo sapien
cctgccaaattacagaagcttgaataaggttta

SEQ ID NO: 719022 - DNA, 33 bp, Homo sapien
cctgccaaattacagaggcttgaataaggttta

SEQ ID NO: 719023 - DNA, 33 bp, Homo sapien
tactggcaagagagaaaggatagctataatttt

SEQ ID NO: 719024 - DNA, 33 bp, Homo sapien
tactggcaagagagaatggatagctataatttt

SEQ ID NO: 719025 - DNA, 33 bp, Homo sapien
caaaagaaggcaaagcgaattaatgtttataga

SEQ ID NO: 719026 - DNA, 33 bp, Homo sapien
caaaagaaggcaaagctaattaatgtttataga

SEQ ID NO: 719027 - DNA, 33 bp, Homo sapien
accaggatactataacaagatgacattgcaaaa

SEQ ID NO: 719028 - DNA, 33 bp, Homo sapien
accaggatactataactagatgacattgcaaaa

SEQ ID NO: 719029 - DNA, 33 bp, Homo sapien
ggcaattacctccacacatttccatttctctct

SEQ ID NO: 719030 - DNA, 33 bp, Homo sapien
ggcaattacctccacagatttccatttctctct

SEQ ID NO: 719031 - DNA, 33 bp, Homo sapien
cacgaacctagccatccagaataagcagttttg

SEQ ID NO: 719032 - DNA, 33 bp, Homo sapien
cacgaacctagccatctagaataagcagttttg

SEQ ID NO: 719033 - DNA, 33 bp, Homo sapien
attgcagcagtaataaataggcgttccttagac

SEQ ID NO: 719034 - DNA, 33 bp, Homo sapien
attgcagcagtaataagtaggcgttccttagac

SEQ ID NO: 719035 - DNA, 33 bp, Homo sapien
ttggagctgaatgaagcataaaggccaaatgag

SEQ ID NO: 719036 - DNA, 33 bp, Homo sapien
ttggagctgaatgaagtataaaggccaaatgag

SEQ ID NO: 719037 - DNA, 33 bp, Homo sapien
gattattcaggtacccaactctttaaggacaga

SEQ ID NO: 719038 - DNA, 33 bp, Homo sapien
gattattcaggtacccgactctttaaggacaga

SEQ ID NO: 719039 - DNA, 33 bp, Homo sapien
aattatttctttaccactagtttgttcagtcct

SEQ ID NO: 719040 - DNA, 33 bp, Homo sapien
aattatttctttaccattagtttgttcagtcct

SEQ ID NO: 719041 - DNA, 33 bp, Homo sapien
tcattttgagtagcaggatgaactctctcattt

SEQ ID NO: 719042 - DNA, 33 bp, Homo sapien
tcattttgagtagcagtatgaactctctcattt

SEQ ID NO: 719043 - DNA, 33 bp, Homo sapien
gaggcagttatagaaacatctgaggaaagagca

SEQ ID NO: 719044 - DNA, 33 bp, Homo sapien
gaggcagttatagaaatatctgaggaaagagca

SEQ ID NO: 719045 - DNA, 33 bp, Homo sapien
actacagcccattgcccacgtaaaatttttgta

SEQ ID NO: 719046 - DNA, 33 bp, Homo sapien
actacagcccattgcctacgtaaaatttttgta

SEQ ID NO: 719047 - DNA, 33 bp, Homo sapien
atatgaatgtaatcaacctgtcctatgtgtgag

SEQ ID NO: 719048 - DNA, 33 bp, Homo sapien
atatgaatgtaatcaatctgtcctatgtgtgag

SEQ ID NO: 719049 - DNA, 33 bp, Homo sapien
ataattaacctggaacaaaagaggtgtatctag

SEQ ID NO: 719050 - DNA, 33 bp, Homo sapien
ataattaacctggaacgaaagaggtgtatctag

SEQ ID NO: 719051 - DNA, 33 bp, Homo sapien
atagatgtgtgtgtaactggtgaataggcacag

SEQ ID NO: 719052 - DNA, 33 bp, Homo sapien
atagatgtgtgtgtaagtggtgaataggcacag

SEQ ID NO: 719053 - DNA, 33 bp, Homo sapien
ttattgagcacttgaacggcaaagttgaaattg

SEQ ID NO: 719054 - DNA, 33 bp, Homo sapien
ttattgagcacttgaatggcaaagttgaaattg

SEQ ID NO: 719055 - DNA, 33 bp, Homo sapien
gttattaagtatgttacctggtatcactacaaa

SEQ ID NO: 719056 - DNA, 33 bp, Homo sapien
gttattaagtatgttagctggtatcactacaaa

SEQ ID NO: 719057 - DNA, 33 bp, Homo sapien
ttaaacctcattgaaaactctattctttcaact

SEQ ID NO: 719058 - DNA, 33 bp, Homo sapien
ttaaacctcattgaaacctctattctttcaact

SEQ ID NO: 719059 - DNA, 33 bp, Homo sapien
tgcctctgtacattaactatgttgtggaatttt

SEQ ID NO: 719060 - DNA, 33 bp, Homo sapien
tgcctctgtacattaagtatgttgtggaatttt

SEQ ID NO: 719061 - DNA, 33 bp, Homo sapien
actggcaaacaaaagacagacttgttaccgaaa

SEQ ID NO: 719062 - DNA, 33 bp, Homo sapien
actggcaaacaaaagatagacttgttaccgaaa

SEQ ID NO: 719063 - DNA, 33 bp, Homo sapien
cagcatagtttctcaaagggtaaaaacatttta

SEQ ID NO: 719064 - DNA, 33 bp, Homo sapien
cagcatagtttctcaacgggtaaaaacatttta

SEQ ID NO: 719065 - DNA, 33 bp, Homo sapien
tacgttggactttgtaaatttcatattaaaatg

SEQ ID NO: 719066 - DNA, 33 bp, Homo sapien
tacgttggactttgtacatttcatattaaaatg

SEQ ID NO: 719067 - DNA, 33 bp, Homo sapien
cagaacacttctctacacactgggataccctat

SEQ ID NO: 719068 - DNA, 33 bp, Homo sapien
cagaacacttctctacgcactgggataccctat

SEQ ID NO: 719069 - DNA, 33 bp, Homo sapien
tataaaaaaaaagtaccgagagtggtcacaaaa

SEQ ID NO: 719070 - DNA, 33 bp, Homo sapien
tataaaaaaaaagtactgagagtggtcacaaaa

SEQ ID NO: 719071 - DNA, 33 bp, Homo sapien
tatcatacgtagataacgaacatcaactaacat

SEQ ID NO: 719072 - DNA, 33 bp, Homo sapien
tatcatacgtagataaggaacatcaactaacat

SEQ ID NO: 719073 - DNA, 33 bp, Homo sapien
gtgctttgctttagatcactggtttgtttctat

SEQ ID NO: 719074 - DNA, 33 bp, Homo sapien
gtgctttgctttagatgactggtttgtttctat

SEQ ID NO: 719075 - DNA, 33 bp, Homo sapien
taaaatattagaaaaaccggctgtatttgtaga

SEQ ID NO: 719076 - DNA, 33 bp, Homo sapien
taaaatattagaaaaatcggctgtatttgtaga

SEQ ID NO: 719077 - DNA, 33 bp, Homo sapien
tttttgttaagtggctcaccaactcaatggcta

SEQ ID NO: 719078 - DNA, 33 bp, Homo sapien
tttttgttaagtggctgaccaactcaatggcta

SEQ ID NO: 719079 - DNA, 33 bp, Homo sapien
tttgattgaaattccactgagtccttatctttt

SEQ ID NO: 719080 - DNA, 33 bp, Homo sapien
tttgattgaaattccattgagtccttatctttt

SEQ ID NO: 719081 - DNA, 33 bp, Homo sapien
aattgaccatacgaaaacttctaaatggaactg

SEQ ID NO: 719082 - DNA, 33 bp, Homo sapien
aattgaccatacgaaaccttctaaatggaactg

SEQ ID NO: 719083 - DNA, 33 bp, Homo sapien
ccatgtgtactgctggaagaaatgtacaatggt

SEQ ID NO: 719084 - DNA, 33 bp, Homo sapien
ccatgtgtactgctggtagaaatgtacaatggt

SEQ ID NO: 719085 - DNA, 33 bp, Homo sapien
aatgggcaattggcaaccctgagaactcctctg

SEQ ID NO: 719086 - DNA, 33 bp, Homo sapien
aatgggcaattggcaatcctgagaactcctctg

SEQ ID NO: 719087 - DNA, 33 bp, Homo sapien
tatcagtctgtggaacgctgggaaaaccacagg

SEQ ID NO: 719088 - DNA, 33 bp, Homo sapien
tatcagtctgtggaactctgggaaaaccacagg

SEQ ID NO: 719089 - DNA, 33 bp, Homo sapien
caggaaagggagatgacggattcagattcacag

SEQ ID NO: 719090 - DNA, 33 bp, Homo sapien
caggaaagggagatgatggattcagattcacag

SEQ ID NO: 719091 - DNA, 33 bp, Homo sapien
aatcatagaacggtctcaaagttgaaaggaatc

SEQ ID NO: 719092 - DNA, 33 bp, Homo sapien
aatcatagaacggtcttaaagttgaaaggaatc

SEQ ID NO: 719093 - DNA, 33 bp, Homo sapien
ggagttgtttctttaccgcaattgggaagagca

SEQ ID NO: 719094 - DNA, 33 bp, Homo sapien
ggagttgtttctttactgcaattgggaagagca

SEQ ID NO: 719095 - DNA, 33 bp, Homo sapien
ggtgcagaaaagacaccagagcggggccagatg

SEQ ID NO: 719096 - DNA, 33 bp, Homo sapien
ggtgcagaaaagacacgagagcggggccagatg

SEQ ID NO: 719097 - DNA, 33 bp, Homo sapien
gggtaaatccccaaaccggatcatagctggaag

SEQ ID NO: 719098 - DNA, 33 bp, Homo sapien
gggtaaatccccaaactggatcatagctggaag

SEQ ID NO: 719099 - DNA, 33 bp, Homo sapien
ctgaagtaacaatacaagtgctcaacagagaat

SEQ ID NO: 719100 - DNA, 33 bp, Homo sapien
ctgaagtaacaatacacgtgctcaacagagaat

SEQ ID NO: 719101 - DNA, 33 bp, Homo sapien
taacaagaatcttatcaatgtaacccaaagaaa

SEQ ID NO: 719102 - DNA, 33 bp, Homo sapien
taacaagaatcttatcgatgtaacccaaagaaa

SEQ ID NO: 719103 - DNA, 33 bp, Homo sapien
agtgtaaagtgcaggccgaattttgaaaactta

SEQ ID NO: 719104 - DNA, 33 bp, Homo sapien
agtgtaaagtgcaggctgaattttgaaaactta

SEQ ID NO: 719105 - DNA, 33 bp, Homo sapien
agcacttcccattttaaaaaattccctgcatct

SEQ ID NO: 719106 - DNA, 33 bp, Homo sapien
agcacttcccattttagaaaattccctgcatct

SEQ ID NO: 719107 - DNA, 33 bp, Homo sapien
agatttgtatcagaaccgaaatagcatatacta

SEQ ID NO: 719108 - DNA, 33 bp, Homo sapien
agatttgtatcagaactgaaatagcatatacta

SEQ ID NO: 719109 - DNA, 33 bp, Homo sapien
tctcaacctaatgtcagtctttttcacatacac

SEQ ID NO: 719110 - DNA, 33 bp, Homo sapien
tctcaacctaatgtcattctttttcacatacac

SEQ ID NO: 719111 - DNA, 33 bp, Homo sapien
tttcttcctgctagtgaaacagaaacctagagc

SEQ ID NO: 719112 - DNA, 33 bp, Homo sapien
tttcttcctgctagtggaacagaaacctagagc

SEQ ID NO: 719113 - DNA, 33 bp, Homo sapien
ctagatgtttctgttacgtcaatcagtaaattc

SEQ ID NO: 719114 - DNA, 33 bp, Homo sapien
ctagatgtttctgttatgtcaatcagtaaattc

SEQ ID NO: 719115 - DNA, 33 bp, Homo sapien
tatgtgaaagggtaaaaaagagagcatggagtg

SEQ ID NO: 719116 - DNA, 33 bp, Homo sapien
tatgtgaaagggtaaagaagagagcatggagtg

SEQ ID NO: 719117 - DNA, 33 bp, Homo sapien
agcagctagagagcaaaatttcagcccatcttc

SEQ ID NO: 719118 - DNA, 33 bp, Homo sapien
agcagctagagagcaacatttcagcccatcttc

SEQ ID NO: 719119 - DNA, 33 bp, Homo sapien
aggattctttacattaactggataattgcttct

SEQ ID NO: 719120 - DNA, 33 bp, Homo sapien
aggattctttacattagctggataattgcttct

SEQ ID NO: 719121 - DNA, 33 bp, Homo sapien
ttctcgccatattccaaactttttcattgctat

SEQ ID NO: 719122 - DNA, 33 bp, Homo sapien
ttctcgccatattccatactttttcattgctat

SEQ ID NO: 719123 - DNA, 33 bp, Homo sapien
ccccacctcaggtaacaaggacaagctggattc

SEQ ID NO: 719124 - DNA, 33 bp, Homo sapien
ccccacctcaggtaaccaggacaagctggattc

SEQ ID NO: 719125 - DNA, 33 bp, Homo sapien
gggccttattctttagccccgtaagtcagactc

SEQ ID NO: 719126 - DNA, 33 bp, Homo sapien
gggccttattctttagtcccgtaagtcagactc

SEQ ID NO: 719127 - DNA, 33 bp, Homo sapien
tgggagttaaagctgccagatagaatgcatgga

SEQ ID NO: 719128 - DNA, 33 bp, Homo sapien
tgggagttaaagctgctagatagaatgcatgga

SEQ ID NO: 719129 - DNA, 33 bp, Homo sapien
ctcagacctaaggcacggtgaacttactttcca

SEQ ID NO: 719130 - DNA, 33 bp, Homo sapien
ctcagacctaaggcactgtgaacttactttcca

SEQ ID NO: 719131 - DNA, 33 bp, Homo sapien
ttgtgttctttgccaaccagaaatattccagta

SEQ ID NO: 719132 - DNA, 33 bp, Homo sapien
ttgtgttctttgccaagcagaaatattccagta

SEQ ID NO: 719133 - DNA, 33 bp, Homo sapien
acttatatgtaatacaccggcatttggtttctt

SEQ ID NO: 719134 - DNA, 33 bp, Homo sapien
acttatatgtaatacatcggcatttggtttctt

SEQ ID NO: 719135 - DNA, 33 bp, Homo sapien
tagtatctacagaacactacagtttccgtaaaa

SEQ ID NO: 719136 - DNA, 33 bp, Homo sapien
tagtatctacagaacattacagtttccgtaaaa

SEQ ID NO: 719137 - DNA, 33 bp, Homo sapien
gactggccaggccatgccaggaatggacgtggt

SEQ ID NO: 719138 - DNA, 33 bp, Homo sapien
gactggccaggccatgtcaggaatggacgtggt

SEQ ID NO: 719139 - DNA, 33 bp, Homo sapien
gggtaatattagtggcaacctctaggatcattg

SEQ ID NO: 719140 - DNA, 33 bp, Homo sapien
gggtaatattagtggcgacctctaggatcattg

SEQ ID NO: 719141 - DNA, 33 bp, Homo sapien
gttcgtcaccacagaaccttcaaacacctaata

SEQ ID NO: 719142 - DNA, 33 bp, Homo sapien
gttcgtcaccacagaagcttcaaacacctaata

SEQ ID NO: 719143 - DNA, 33 bp, Homo sapien
ctcctctcctctttcaagttactataggtattg

SEQ ID NO: 719144 - DNA, 33 bp, Homo sapien
ctcctctcctctttcaggttactataggtattg

SEQ ID NO: 719145 - DNA, 33 bp, Homo sapien
tgagatacaatttcccaaagcattttccttctc

SEQ ID NO: 719146 - DNA, 33 bp, Homo sapien
tgagatacaatttcccgaagcattttccttctc

SEQ ID NO: 719147 - DNA, 33 bp, Homo sapien
aaacagtatatgtagacctaacactctaaaacc

SEQ ID NO: 719148 - DNA, 33 bp, Homo sapien
aaacagtatatgtagatctaacactctaaaacc

SEQ ID NO: 719149 - DNA, 33 bp, Homo sapien
tctttgagatgcttacaagaaaaacatcattag

SEQ ID NO: 719150 - DNA, 33 bp, Homo sapien
tctttgagatgcttacgagaaaaacatcattag

SEQ ID NO: 719151 - DNA, 33 bp, Homo sapien
aagcccagtgtcttgcacattgtctgaaacaca

SEQ ID NO: 719152 - DNA, 33 bp, Homo sapien
aagcccagtgtcttgcgcattgtctgaaacaca

SEQ ID NO: 719153 - DNA, 33 bp, Homo sapien
ttgttgtgccaactccgcaagaattgaaacacc

SEQ ID NO: 719154 - DNA, 33 bp, Homo sapien
ttgttgtgccaactcctcaagaattgaaacacc

SEQ ID NO: 719155 - DNA, 33 bp, Homo sapien
taattctttggaccaactgctaatcaggaaatc

SEQ ID NO: 719156 - DNA, 33 bp, Homo sapien
taattctttggaccaattgctaatcaggaaatc

SEQ ID NO: 719157 - DNA, 33 bp, Homo sapien
ccatgatatggtcccaacttactctccagcctt

SEQ ID NO: 719158 - DNA, 33 bp, Homo sapien
ccatgatatggtcccaccttactctccagcctt

SEQ ID NO: 719159 - DNA, 33 bp, Homo sapien
attcattttgtgttgaaactttctagcttcaga

SEQ ID NO: 719160 - DNA, 33 bp, Homo sapien
attcattttgtgttgagactttctagcttcaga

SEQ ID NO: 719161 - DNA, 33 bp, Homo sapien
gctccccaaaaacagacgctgcagatgagcttc

SEQ ID NO: 719162 - DNA, 33 bp, Homo sapien
gctccccaaaaacagatgctgcagatgagcttc

SEQ ID NO: 719163 - DNA, 33 bp, Homo sapien
gcctagtgcaaggaggaatgctattcaaaaata

SEQ ID NO: 719164 - DNA, 33 bp, Homo sapien
gcctagtgcaaggagggatgctattcaaaaata

SEQ ID NO: 719165 - DNA, 33 bp, Homo sapien
agacctgacaaatgagaagcactcagatctagg

SEQ ID NO: 719166 - DNA, 33 bp, Homo sapien
agacctgacaaatgaggagcactcagatctagg

SEQ ID NO: 719167 - DNA, 33 bp, Homo sapien
caccggtatgtctccaactttaatgaccagttg

SEQ ID NO: 719168 - DNA, 33 bp, Homo sapien
caccggtatgtctccacctttaatgaccagttg

SEQ ID NO: 719169 - DNA, 33 bp, Homo sapien
gaacttaccgatcagaaaacggacaaaaggcat

SEQ ID NO: 719170 - DNA, 33 bp, Homo sapien
gaacttaccgatcagagaacggacaaaaggcat

SEQ ID NO: 719171 - DNA, 33 bp, Homo sapien
gtcatttcattctgcacgccctttctcctccac

SEQ ID NO: 719172 - DNA, 33 bp, Homo sapien
gtcatttcattctgcaggccctttctcctccac

SEQ ID NO: 719173 - DNA, 33 bp, Homo sapien
tcccaccagtaggaatcaggaaggcaggtagct

SEQ ID NO: 719174 - DNA, 33 bp, Homo sapien
tcccaccagtaggaattaggaaggcaggtagct

SEQ ID NO: 719175 - DNA, 33 bp, Homo sapien
tggagaggcataaggcagattgagagaccaaag

SEQ ID NO: 719176 - DNA, 33 bp, Homo sapien
tggagaggcataaggcggattgagagaccaaag

SEQ ID NO: 719177 - DNA, 33 bp, Homo sapien
atttgactggttaataccatggaggcagcactg

SEQ ID NO: 719178 - DNA, 33 bp, Homo sapien
atttgactggttaatatcatggaggcagcactg

SEQ ID NO: 719179 - DNA, 33 bp, Homo sapien
tttgaaaaagcctgagccataaagtccaggaat

SEQ ID NO: 719180 - DNA, 33 bp, Homo sapien
tttgaaaaagcctgagtcataaagtccaggaat

SEQ ID NO: 719181 - DNA, 33 bp, Homo sapien
tggtttggttcacacaacgttttattttttatt

SEQ ID NO: 719182 - DNA, 33 bp, Homo sapien
tggtttggttcacacatcgttttattttttatt

SEQ ID NO: 719183 - DNA, 33 bp, Homo sapien
tcacaggtctgtctgaatagaacccataatgct

SEQ ID NO: 719184 - DNA, 33 bp, Homo sapien
tcacaggtctgtctgactagaacccataatgct

SEQ ID NO: 719185 - DNA, 33 bp, Homo sapien
tatttcttactgcaaaattagacacaggccaca

SEQ ID NO: 719186 - DNA, 33 bp, Homo sapien
tatttcttactgcaaagttagacacaggccaca

SEQ ID NO: 719187 - DNA, 33 bp, Homo sapien
agtgaagaaaatcatcaaggattgaaaaaaatt

SEQ ID NO: 719188 - DNA, 33 bp, Homo sapien
agtgaagaaaatcatctaggattgaaaaaaatt

SEQ ID NO: 719189 - DNA, 33 bp, Homo sapien
ctggaggagccaaccaatcacaggcaacgtgca

SEQ ID NO: 719190 - DNA, 33 bp, Homo sapien
ctggaggagccaaccagtcacaggcaacgtgca

SEQ ID NO: 719191 - DNA, 33 bp, Homo sapien
ctagcctctgcccttaacaaagaaaaaggaaga

SEQ ID NO: 719192 - DNA, 33 bp, Homo sapien
ctagcctctgcccttagcaaagaaaaaggaaga

SEQ ID NO: 719193 - DNA, 33 bp, Homo sapien
tacagtggaatgctgaaggctaaacgttcagtg

SEQ ID NO: 719194 - DNA, 33 bp, Homo sapien
tacagtggaatgctgagggctaaacgttcagtg

SEQ ID NO: 719195 - DNA, 33 bp, Homo sapien
tcacagaagatctttaactttggagcatataaa

SEQ ID NO: 719196 - DNA, 33 bp, Homo sapien
tcacagaagatctttagctttggagcatataaa

SEQ ID NO: 719197 - DNA, 33 bp, Homo sapien
tcatttcatccttgtaataactctgatagtact

SEQ ID NO: 719198 - DNA, 33 bp, Homo sapien
tcatttcatccttgtagtaactctgatagtact

SEQ ID NO: 719199 - DNA, 33 bp, Homo sapien
tactttagcctcaataatatgaattttaaaaag

SEQ ID NO: 719200 - DNA, 33 bp, Homo sapien
tactttagcctcaatattatgaattttaaaaag

SEQ ID NO: 719201 - DNA, 33 bp, Homo sapien
tgtgtttcactgctcaaaggagcccaactgagt

SEQ ID NO: 719202 - DNA, 33 bp, Homo sapien
tgtgtttcactgctcataggagcccaactgagt

SEQ ID NO: 719203 - DNA, 33 bp, Homo sapien
gtcagtttagcaaacactattgtgagctgactg

SEQ ID NO: 719204 - DNA, 33 bp, Homo sapien
gtcagtttagcaaacattattgtgagctgactg

SEQ ID NO: 719205 - DNA, 33 bp, Homo sapien
agagaatatgggagacaatgttcaagatggaag

SEQ ID NO: 719206 - DNA, 33 bp, Homo sapien
agagaatatgggagacgatgttcaagatggaag

SEQ ID NO: 719207 - DNA, 33 bp, Homo sapien
cagtgaacttatttaaactcttcaagcctcagt

SEQ ID NO: 719208 - DNA, 33 bp, Homo sapien
cagtgaacttatttaatctcttcaagcctcagt

SEQ ID NO: 719209 - DNA, 33 bp, Homo sapien
gtcatcacttccaatccaacaaaacagggttca

SEQ ID NO: 719210 - DNA, 33 bp, Homo sapien
gtcatcacttccaatctaacaaaacagggttca

SEQ ID NO: 719211 - DNA, 33 bp, Homo sapien
atcacacaactggaaacttctcaccctccatgt

SEQ ID NO: 719212 - DNA, 33 bp, Homo sapien
atcacacaactggaaatttctcaccctccatgt

SEQ ID NO: 719213 - DNA, 33 bp, Homo sapien
acagataaatggataaatagaacattgtacatc

SEQ ID NO: 719214 - DNA, 33 bp, Homo sapien
acagataaatggataagtagaacattgtacatc

SEQ ID NO: 719215 - DNA, 33 bp, Homo sapien
gagggaagaaagtgtgaaacagctgtagaggaa

SEQ ID NO: 719216 - DNA, 33 bp, Homo sapien
gagggaagaaagtgtgcaacagctgtagaggaa

SEQ ID NO: 719217 - DNA, 33 bp, Homo sapien
ctcgaaaattctgttccctaatcatcacaggat

SEQ ID NO: 719218 - DNA, 33 bp, Homo sapien
ctcgaaaattctgttctctaatcatcacaggat

SEQ ID NO: 719219 - DNA, 33 bp, Homo sapien
tgtgaactctggggtcaacagcagctctcccat

SEQ ID NO: 719220 - DNA, 33 bp, Homo sapien
tgtgaactctggggtccacagcagctctcccat

SEQ ID NO: 719221 - DNA, 33 bp, Homo sapien
cccttgaaaagagagaagtgaagagaagcagct

SEQ ID NO: 719222 - DNA, 33 bp, Homo sapien
cccttgaaaagagagacgtgaagagaagcagct

SEQ ID NO: 719223 - DNA, 33 bp, Homo sapien
actgactagataaagaagattgagactagcatt

SEQ ID NO: 719224 - DNA, 33 bp, Homo sapien
actgactagataaagaggattgagactagcatt

SEQ ID NO: 719225 - DNA, 33 bp, Homo sapien
tacttggacaatcatacagagttcagtaatata

SEQ ID NO: 719226 - DNA, 33 bp, Homo sapien
tacttggacaatcatatagagttcagtaatata

SEQ ID NO: 719227 - DNA, 33 bp, Homo sapien
cactttcctccttcctaaattccttctgatata

SEQ ID NO: 719228 - DNA, 33 bp, Homo sapien
cactttcctccttcctgaattccttctgatata

SEQ ID NO: 719229 - DNA, 33 bp, Homo sapien
taggtattcctcccagaacaataatgattaatg

SEQ ID NO: 719230 - DNA, 33 bp, Homo sapien
taggtattcctcccaggacaataatgattaatg

SEQ ID NO: 719231 - DNA, 33 bp, Homo sapien
tatatcagagttcctcaataatccacgtaaatt

SEQ ID NO: 719232 - DNA, 33 bp, Homo sapien
tatatcagagttcctcgataatccacgtaaatt

SEQ ID NO: 719233 - DNA, 33 bp, Homo sapien
atgacatcttattgcaaacattttggacattgc

SEQ ID NO: 719234 - DNA, 33 bp, Homo sapien
atgacatcttattgcagacattttggacattgc

SEQ ID NO: 719235 - DNA, 33 bp, Homo sapien
caagagctgacaaaaaagctgaaggcaagagtc

SEQ ID NO: 719236 - DNA, 33 bp, Homo sapien
caagagctgacaaaaaggctgaaggcaagagtc

SEQ ID NO: 719237 - DNA, 33 bp, Homo sapien
tctatattcagtccacccttcgtactgtcgaaa

SEQ ID NO: 719238 - DNA, 33 bp, Homo sapien
tctatattcagtccactcttcgtactgtcgaaa

SEQ ID NO: 719239 - DNA, 33 bp, Homo sapien
caaatggtctttttttccacaagaacatgagat

SEQ ID NO: 719240 - DNA, 33 bp, Homo sapien
caaatggtcttttttttcacaagaacatgagat

SEQ ID NO: 719241 - DNA, 33 bp, Homo sapien
tggcggagacagcatacgtgtttgtgcattact

SEQ ID NO: 719242 - DNA, 33 bp, Homo sapien
tggcggagacagcatatgtgtttgtgcattact

SEQ ID NO: 719243 - DNA, 33 bp, Homo sapien
ttccaataagtcaccaatatgtgtactctcttc

SEQ ID NO: 719244 - DNA, 33 bp, Homo sapien
ttccaataagtcaccagtatgtgtactctcttc

SEQ ID NO: 719245 - DNA, 33 bp, Homo sapien
tacaaaattttttgcacatctgtagagaactga

SEQ ID NO: 719246 - DNA, 33 bp, Homo sapien
tacaaaattttttgcatatctgtagagaactga

SEQ ID NO: 719247 - DNA, 33 bp, Homo sapien
cctgagttatcagaaaagacaagaatcaagctc

SEQ ID NO: 719248 - DNA, 33 bp, Homo sapien
cctgagttatcagaaatgacaagaatcaagctc

SEQ ID NO: 719249 - DNA, 33 bp, Homo sapien
aatacattgtataataagtcagcagaaatcaat

SEQ ID NO: 719250 - DNA, 33 bp, Homo sapien
aatacattgtataatacgtcagcagaaatcaat

SEQ ID NO: 719251 - DNA, 33 bp, Homo sapien
tgagatctatgtacaaatatagcaaaactaccg

SEQ ID NO: 719252 - DNA, 33 bp, Homo sapien
tgagatctatgtacaagtatagcaaaactaccg

SEQ ID NO: 719253 - DNA, 33 bp, Homo sapien
ctgtgtgggacctgaaattaagaaacagtgttt

SEQ ID NO: 719254 - DNA, 33 bp, Homo sapien
ctgtgtgggacctgaacttaagaaacagtgttt

SEQ ID NO: 719255 - DNA, 33 bp, Homo sapien
ggggtaattaatgacaagtccaagttttgaatg

SEQ ID NO: 719256 - DNA, 33 bp, Homo sapien
ggggtaattaatgacaggtccaagttttgaatg

SEQ ID NO: 719257 - DNA, 33 bp, Homo sapien
tcagttccttagaaataacatatttggactctc

SEQ ID NO: 719258 - DNA, 33 bp, Homo sapien
tcagttccttagaaattacatatttggactctc

SEQ ID NO: 719259 - DNA, 33 bp, Homo sapien
gaatatgtcagcgataaattaaaaagtgtacaa

SEQ ID NO: 719260 - DNA, 33 bp, Homo sapien
gaatatgtcagcgatacattaaaaagtgtacaa

SEQ ID NO: 719261 - DNA, 33 bp, Homo sapien
ctccccatatagttaccaaaatccactgacgct

SEQ ID NO: 719262 - DNA, 33 bp, Homo sapien
ctccccatatagttacgaaaatccactgacgct

SEQ ID NO: 719263 - DNA, 33 bp, Homo sapien
ttatttaatgtcagaaatgaaagctgtccacag

SEQ ID NO: 719264 - DNA, 33 bp, Homo sapien
ttatttaatgtcagaagtgaaagctgtccacag

SEQ ID NO: 719265 - DNA, 33 bp, Homo sapien
aagacctttcaccagcaagaggattacaactca

SEQ ID NO: 719266 - DNA, 33 bp, Homo sapien
aagacctttcaccagccagaggattacaactca

SEQ ID NO: 719267 - DNA, 33 bp, Homo sapien
gatctatagtctctcaaagaatgactgtaatat

SEQ ID NO: 719268 - DNA, 33 bp, Homo sapien
gatctatagtctctcacagaatgactgtaatat

SEQ ID NO: 719269 - DNA, 33 bp, Homo sapien
ctactgtattttttgcccccgagattcactgca

SEQ ID NO: 719270 - DNA, 33 bp, Homo sapien
ctactgtattttttgcgcccgagattcactgca

SEQ ID NO: 719271 - DNA, 33 bp, Homo sapien
caatctgcttaagagcccattacgctgctttgt

SEQ ID NO: 719272 - DNA, 33 bp, Homo sapien
caatctgcttaagagctcattacgctgctttgt

SEQ ID NO: 719273 - DNA, 33 bp, Homo sapien
gaaatcttgtataataaaggactttgctcatct

SEQ ID NO: 719274 - DNA, 33 bp, Homo sapien
gaaatcttgtataatagaggactttgctcatct

SEQ ID NO: 719275 - DNA, 33 bp, Homo sapien
atttatgggatgatgacgtcgtttgggatagag

SEQ ID NO: 719276 - DNA, 33 bp, Homo sapien
atttatgggatgatgatgtcgtttgggatagag

SEQ ID NO: 719277 - DNA, 33 bp, Homo sapien
ctcattataggctaatcatagtgcatttgtaca

SEQ ID NO: 719278 - DNA, 33 bp, Homo sapien
ctcattataggctaattatagtgcatttgtaca

SEQ ID NO: 719279 - DNA, 33 bp, Homo sapien
tacagtgcatatgcaaaagcaggttaagaacac

SEQ ID NO: 719280 - DNA, 33 bp, Homo sapien
tacagtgcatatgcaagagcaggttaagaacac

SEQ ID NO: 719281 - DNA, 33 bp, Homo sapien
tctctttgcttacagacgacatttatctattta

SEQ ID NO: 719282 - DNA, 33 bp, Homo sapien
tctctttgcttacagatgacatttatctattta

SEQ ID NO: 719283 - DNA, 33 bp, Homo sapien
tgtaaactggtttaaccatcgttgaagacagtg

SEQ ID NO: 719284 - DNA, 33 bp, Homo sapien
tgtaaactggtttaactatcgttgaagacagtg

SEQ ID NO: 719285 - DNA, 33 bp, Homo sapien
agctgtggactgcggaaggactctctggtgaag

SEQ ID NO: 719286 - DNA, 33 bp, Homo sapien
agctgtggactgcggagggactctctggtgaag

SEQ ID NO: 719287 - DNA, 33 bp, Homo sapien
ataaggttaaactagccagaagccaaattaaaa

SEQ ID NO: 719288 - DNA, 33 bp, Homo sapien
ataaggttaaactagcgagaagccaaattaaaa

SEQ ID NO: 719289 - DNA, 33 bp, Homo sapien
tatattgaaagattcaaatgtccctcagattat

SEQ ID NO: 719290 - DNA, 33 bp, Homo sapien
tatattgaaagattcagatgtccctcagattat

SEQ ID NO: 719291 - DNA, 33 bp, Homo sapien
ccccgtacgggccaccaaatattacgggtggat

SEQ ID NO: 719292 - DNA, 33 bp, Homo sapien
ccccgtacgggccaccgaatattacgggtggat

SEQ ID NO: 719293 - DNA, 33 bp, Homo sapien
gaagcatgatggagaacctcgagttttagagca

SEQ ID NO: 719294 - DNA, 33 bp, Homo sapien
gaagcatgatggagaagctcgagttttagagca

SEQ ID NO: 719295 - DNA, 33 bp, Homo sapien
gaatatgaactattcacacacgaggatagaatt

SEQ ID NO: 719296 - DNA, 33 bp, Homo sapien
gaatatgaactattcagacacgaggatagaatt

SEQ ID NO: 719297 - DNA, 33 bp, Homo sapien
catgtacttgaaaaaccagcaatggaaacggcg

SEQ ID NO: 719298 - DNA, 33 bp, Homo sapien
catgtacttgaaaaactagcaatggaaacggcg

SEQ ID NO: 719299 - DNA, 33 bp, Homo sapien
tttaatcaaaatcctaccacacgccgtttccat

SEQ ID NO: 719300 - DNA, 33 bp, Homo sapien
tttaatcaaaatcctatcacacgccgtttccat

SEQ ID NO: 719301 - DNA, 33 bp, Homo sapien
aaatggaaggtttcaaattattatactcgagat

SEQ ID NO: 719302 - DNA, 33 bp, Homo sapien
aaatggaaggtttcaagttattatactcgagat

SEQ ID NO: 719303 - DNA, 33 bp, Homo sapien
tgtgttgtaaaaattaggaaagatcactgatca

SEQ ID NO: 719304 - DNA, 33 bp, Homo sapien
tgtgttgtaaaaattatgaaagatcactgatca

SEQ ID NO: 719305 - DNA, 33 bp, Homo sapien
aaatatttgtttaaacgcatggctttccttggt

SEQ ID NO: 719306 - DNA, 33 bp, Homo sapien
aaatatttgtttaaactcatggctttccttggt

SEQ ID NO: 719307 - DNA, 33 bp, Homo sapien
attgaggacccttactcaccttaggcagcgtcc

SEQ ID NO: 719308 - DNA, 33 bp, Homo sapien
attgaggacccttacttaccttaggcagcgtcc

SEQ ID NO: 719309 - DNA, 33 bp, Homo sapien
gcccactccctccttcaatgctcaactttgccc

SEQ ID NO: 719310 - DNA, 33 bp, Homo sapien
gcccactccctccttcgatgctcaactttgccc

SEQ ID NO: 719311 - DNA, 33 bp, Homo sapien
acagagattctccttccacaggtaggggtgtct

SEQ ID NO: 719312 - DNA, 33 bp, Homo sapien
acagagattctccttctacaggtaggggtgtct

SEQ ID NO: 719313 - DNA, 33 bp, Homo sapien
aaaaaaagtcacacaacgatagatttggctggg

SEQ ID NO: 719314 - DNA, 33 bp, Homo sapien
aaaaaaagtcacacaatgatagatttggctggg

SEQ ID NO: 719315 - DNA, 33 bp, Homo sapien
ctcaaaagaaaaatcaacatctacaaataatgc

SEQ ID NO: 719316 - DNA, 33 bp, Homo sapien
ctcaaaagaaaaatcagcatctacaaataatgc

SEQ ID NO: 719317 - DNA, 33 bp, Homo sapien
tcatagagtttaatagaaggctgtctttaattc

SEQ ID NO: 719318 - DNA, 33 bp, Homo sapien
tcatagagtttaatagcaggctgtctttaattc

SEQ ID NO: 719319 - DNA, 33 bp, Homo sapien
taattctccaaatttaagtagtaatgcatccat

SEQ ID NO: 719320 - DNA, 33 bp, Homo sapien
taattctccaaatttaggtagtaatgcatccat

SEQ ID NO: 719321 - DNA, 33 bp, Homo sapien
ctaggtaacctgataaaaaggactttctggatt

SEQ ID NO: 719322 - DNA, 33 bp, Homo sapien
ctaggtaacctgataagaaggactttctggatt

SEQ ID NO: 719323 - DNA, 33 bp, Homo sapien
gaacctccctgacatcaatctttattcctgact

SEQ ID NO: 719324 - DNA, 33 bp, Homo sapien
gaacctccctgacatcgatctttattcctgact

SEQ ID NO: 719325 - DNA, 33 bp, Homo sapien
gcaggttgagatgtccaattgtgagatccctct

SEQ ID NO: 719326 - DNA, 33 bp, Homo sapien
gcaggttgagatgtccgattgtgagatccctct

SEQ ID NO: 719327 - DNA, 33 bp, Homo sapien
tctagaactagagagacatcaaagagggatctc

SEQ ID NO: 719328 - DNA, 33 bp, Homo sapien
tctagaactagagagatatcaaagagggatctc

SEQ ID NO: 719329 - DNA, 33 bp, Homo sapien
gaataacagcaaatttaaaaaataacagcaaca

SEQ ID NO: 719330 - DNA, 33 bp, Homo sapien
gaataacagcaaattttaaaaataacagcaaca

SEQ ID NO: 719331 - DNA, 33 bp, Homo sapien
aaataataaatgccaaattcagaataatagcta

SEQ ID NO: 719332 - DNA, 33 bp, Homo sapien
aaataataaatgccaatttcagaataatagcta

SEQ ID NO: 719333 - DNA, 33 bp, Homo sapien
tacctaaatgaagcacaccaatagctgaaatta

SEQ ID NO: 719334 - DNA, 33 bp, Homo sapien
tacctaaatgaagcaccccaatagctgaaatta

SEQ ID NO: 719335 - DNA, 33 bp, Homo sapien
ccatgaagcaaagttacgaggttagctctaact

SEQ ID NO: 719336 - DNA, 33 bp, Homo sapien
ccatgaagcaaagttatgaggttagctctaact

SEQ ID NO: 719337 - DNA, 33 bp, Homo sapien
ggtcactttatttacacatagcactgagaaact

SEQ ID NO: 719338 - DNA, 33 bp, Homo sapien
ggtcactttatttacatatagcactgagaaact

SEQ ID NO: 719339 - DNA, 33 bp, Homo sapien
caaatttcatcgaacagcctaaaactttcaaga

SEQ ID NO: 719340 - DNA, 33 bp, Homo sapien
caaatttcatcgaacatcctaaaactttcaaga

SEQ ID NO: 719341 - DNA, 33 bp, Homo sapien
cctgggagattcattgcaaaaacatcatcacca

SEQ ID NO: 719342 - DNA, 33 bp, Homo sapien
cctgggagattcattgtaaaaacatcatcacca

SEQ ID NO: 719343 - DNA, 33 bp, Homo sapien
cagctaattaaacaaaaatttgtagagacaggg

SEQ ID NO: 719344 - DNA, 33 bp, Homo sapien
cagctaattaaacaaacatttgtagagacaggg

SEQ ID NO: 719345 - DNA, 33 bp, Homo sapien
tatgcactaccaaacactgagagttaatgttcc

SEQ ID NO: 719346 - DNA, 33 bp, Homo sapien
tatgcactaccaaacattgagagttaatgttcc

SEQ ID NO: 719347 - DNA, 33 bp, Homo sapien
tttgcaacgagctacaacataacaagacattca

SEQ ID NO: 719348 - DNA, 33 bp, Homo sapien
tttgcaacgagctacaccataacaagacattca

SEQ ID NO: 719349 - DNA, 33 bp, Homo sapien
tctgaccagtaaccacaatatttttcagcactg

SEQ ID NO: 719350 - DNA, 33 bp, Homo sapien
tctgaccagtaaccacgatatttttcagcactg

SEQ ID NO: 719351 - DNA, 33 bp, Homo sapien
aatttctcaaggcccaccaatggaagcccaaat

SEQ ID NO: 719352 - DNA, 33 bp, Homo sapien
aatttctcaaggcccatcaatggaagcccaaat

SEQ ID NO: 719353 - DNA, 33 bp, Homo sapien
aattacaaaatcccaaatacttcaggatattac

SEQ ID NO: 719354 - DNA, 33 bp, Homo sapien
aattacaaaatcccaattacttcaggatattac

SEQ ID NO: 719355 - DNA, 33 bp, Homo sapien
gtcaaaaatctggaaacagctgaactagttgct

SEQ ID NO: 719356 - DNA, 33 bp, Homo sapien
gtcaaaaatctggaaagagctgaactagttgct

SEQ ID NO: 719357 - DNA, 33 bp, Homo sapien
gaaatgtacttgaaaaaataaacacagttgaag

SEQ ID NO: 719358 - DNA, 33 bp, Homo sapien
gaaatgtacttgaaaatataaacacagttgaag

SEQ ID NO: 719359 - DNA, 33 bp, Homo sapien
ggaggtacaattgttgaaggaccaatgcttagt

SEQ ID NO: 719360 - DNA, 33 bp, Homo sapien
ggaggtacaattgttgcaggaccaatgcttagt

SEQ ID NO: 719361 - DNA, 33 bp, Homo sapien
accaacttgtgatctcaagacattatcaggtat

SEQ ID NO: 719362 - DNA, 33 bp, Homo sapien
accaacttgtgatctctagacattatcaggtat

SEQ ID NO: 719363 - DNA, 33 bp, Homo sapien
gtctcctgcatctatcgcaattttcactgtcgg

SEQ ID NO: 719364 - DNA, 33 bp, Homo sapien
gtctcctgcatctatctcaattttcactgtcgg

SEQ ID NO: 719365 - DNA, 33 bp, Homo sapien
acacgtttccattgccaagattttctagaaggt

SEQ ID NO: 719366 - DNA, 33 bp, Homo sapien
acacgtttccattgccgagattttctagaaggt

SEQ ID NO: 719367 - DNA, 33 bp, Homo sapien
gaaatgctgacaacaaactaagttattgatgtt

SEQ ID NO: 719368 - DNA, 33 bp, Homo sapien
gaaatgctgacaacaagctaagttattgatgtt

SEQ ID NO: 719369 - DNA, 33 bp, Homo sapien
tcaatcatatatgaccaaaatcaatatgaccaa

SEQ ID NO: 719370 - DNA, 33 bp, Homo sapien
tcaatcatatatgacccaaatcaatatgaccaa

SEQ ID NO: 719371 - DNA, 33 bp, Homo sapien
caagtagtgaaggtccaagagttctaaatacag

SEQ ID NO: 719372 - DNA, 33 bp, Homo sapien
caagtagtgaaggtccgagagttctaaatacag

SEQ ID NO: 719373 - DNA, 33 bp, Homo sapien
gcctcctctaccctacaagatctggagcaacag

SEQ ID NO: 719374 - DNA, 33 bp, Homo sapien
gcctcctctaccctacgagatctggagcaacag

SEQ ID NO: 719375 - DNA, 33 bp, Homo sapien
tagtaattcattcaacaattagagagcacctat

SEQ ID NO: 719376 - DNA, 33 bp, Homo sapien
tagtaattcattcaacgattagagagcacctat

SEQ ID NO: 719377 - DNA, 33 bp, Homo sapien
tacctttccaaactagaagcaactaaaatcata

SEQ ID NO: 719378 - DNA, 33 bp, Homo sapien
tacctttccaaactagcagcaactaaaatcata

SEQ ID NO: 719379 - DNA, 33 bp, Homo sapien
tggcttggggatggaaactttgaatatgatggg

SEQ ID NO: 719380 - DNA, 33 bp, Homo sapien
tggcttggggatggaacctttgaatatgatggg

SEQ ID NO: 719381 - DNA, 33 bp, Homo sapien
ataaggaggagtttgacggaagcaaaactagag

SEQ ID NO: 719382 - DNA, 33 bp, Homo sapien
ataaggaggagtttgatggaagcaaaactagag

SEQ ID NO: 719383 - DNA, 33 bp, Homo sapien
caactgcctatgacataagtttacctacataac

SEQ ID NO: 719384 - DNA, 33 bp, Homo sapien
caactgcctatgacatgagtttacctacataac

SEQ ID NO: 719385 - DNA, 33 bp, Homo sapien
tgactctagaatcaagaacttctatatatgctg

SEQ ID NO: 719386 - DNA, 33 bp, Homo sapien
tgactctagaatcaaggacttctatatatgctg

SEQ ID NO: 719387 - DNA, 33 bp, Homo sapien
tatgattcctggtaaacgagttacagctgtctc

SEQ ID NO: 719388 - DNA, 33 bp, Homo sapien
tatgattcctggtaaaggagttacagctgtctc

SEQ ID NO: 719389 - DNA, 33 bp, Homo sapien
atttagtgtctgaaccaaagtttgtcacatgaa

SEQ ID NO: 719390 - DNA, 33 bp, Homo sapien
atttagtgtctgaacctaagtttgtcacatgaa

SEQ ID NO: 719391 - DNA, 33 bp, Homo sapien
gtcctgacgttttgaaacaatacagatgccttc

SEQ ID NO: 719392 - DNA, 33 bp, Homo sapien
gtcctgacgttttgaagcaatacagatgccttc

SEQ ID NO: 719393 - DNA, 33 bp, Homo sapien
tacttagaaatcaatcccaatgtagttccacct

SEQ ID NO: 719394 - DNA, 33 bp, Homo sapien
tacttagaaatcaatctcaatgtagttccacct

SEQ ID NO: 719395 - DNA, 33 bp, Homo sapien
ctgtgattttttttgtcaaagcactgtaaaagc

SEQ ID NO: 719396 - DNA, 33 bp, Homo sapien
ctgtgattttttttgtgaaagcactgtaaaagc

SEQ ID NO: 719397 - DNA, 33 bp, Homo sapien
aatgctgtggatgtagcaaatgcccagaaaatg

SEQ ID NO: 719398 - DNA, 33 bp, Homo sapien
aatgctgtggatgtaggaaatgcccagaaaatg

SEQ ID NO: 719399 - DNA, 33 bp, Homo sapien
tactgaagctggctatcaagggatttcagcaat

SEQ ID NO: 719400 - DNA, 33 bp, Homo sapien
tactgaagctggctatgaagggatttcagcaat

SEQ ID NO: 719401 - DNA, 33 bp, Homo sapien
atggattgtgatttgacattcagcaggagattt

SEQ ID NO: 719402 - DNA, 33 bp, Homo sapien
atggattgtgatttgagattcagcaggagattt

SEQ ID NO: 719403 - DNA, 33 bp, Homo sapien
aagacaactgtttacccacaactattggctggt

SEQ ID NO: 719404 - DNA, 33 bp, Homo sapien
aagacaactgtttacctacaactattggctggt

SEQ ID NO: 719405 - DNA, 33 bp, Homo sapien
ccaaaacaattccaaacattcctgcctgaagga

SEQ ID NO: 719406 - DNA, 33 bp, Homo sapien
ccaaaacaattccaaatattcctgcctgaagga

SEQ ID NO: 719407 - DNA, 33 bp, Homo sapien
gcagagctatatcaagactataagagaagagag

SEQ ID NO: 719408 - DNA, 33 bp, Homo sapien
gcagagctatatcaagtctataagagaagagag

SEQ ID NO: 719409 - DNA, 33 bp, Homo sapien
gtatttgacagcataacagggggactataatca

SEQ ID NO: 719410 - DNA, 33 bp, Homo sapien
gtatttgacagcataatagggggactataatca

SEQ ID NO: 719411 - DNA, 33 bp, Homo sapien
tgttaaataaataaaccaggcagagaaagacaa

SEQ ID NO: 719412 - DNA, 33 bp, Homo sapien
tgttaaataaataaactaggcagagaaagacaa

SEQ ID NO: 719413 - DNA, 33 bp, Homo sapien
aaataacagctgaaaaattcccatgtcttcaga

SEQ ID NO: 719414 - DNA, 33 bp, Homo sapien
aaataacagctgaaaacttcccatgtcttcaga

SEQ ID NO: 719415 - DNA, 33 bp, Homo sapien
acttgagagccaaataacattcccattcacagg

SEQ ID NO: 719416 - DNA, 33 bp, Homo sapien
acttgagagccaaatagcattcccattcacagg

SEQ ID NO: 719417 - DNA, 33 bp, Homo sapien
atatttctctggccaccaatcatatgaatgttt

SEQ ID NO: 719418 - DNA, 33 bp, Homo sapien
atatttctctggccactaatcatatgaatgttt

SEQ ID NO: 719419 - DNA, 33 bp, Homo sapien
tcaggcagaaggaaaactgacagtggcagcaat

SEQ ID NO: 719420 - DNA, 33 bp, Homo sapien
tcaggcagaaggaaaattgacagtggcagcaat

SEQ ID NO: 719421 - DNA, 33 bp, Homo sapien
tatatagctcattatccgaccagtacaattttt

SEQ ID NO: 719422 - DNA, 33 bp, Homo sapien
tatatagctcattatctgaccagtacaattttt

SEQ ID NO: 719423 - DNA, 33 bp, Homo sapien
cagtattttctgcatcccatgaacggaagtgag

SEQ ID NO: 719424 - DNA, 33 bp, Homo sapien
cagtattttctgcatctcatgaacggaagtgag

SEQ ID NO: 719425 - DNA, 33 bp, Homo sapien
actctgaaactagatacggcctcatagcttcct

SEQ ID NO: 719426 - DNA, 33 bp, Homo sapien
actctgaaactagatatggcctcatagcttcct

SEQ ID NO: 719427 - DNA, 33 bp, Homo sapien
gtgagtcagttgaatccctttcctttataaatt

SEQ ID NO: 719428 - DNA, 33 bp, Homo sapien
gtgagtcagttgaatctctttcctttataaatt

SEQ ID NO: 719429 - DNA, 33 bp, Homo sapien
caactctacctccaatgaaaactcacagtagct

SEQ ID NO: 719430 - DNA, 33 bp, Homo sapien
caactctacctccaattaaaactcacagtagct

SEQ ID NO: 719431 - DNA, 33 bp, Homo sapien
cagctggtgcatctagaatcattgggattgacc

SEQ ID NO: 719432 - DNA, 33 bp, Homo sapien
cagctggtgcatctaggatcattgggattgacc

SEQ ID NO: 719433 - DNA, 33 bp, Homo sapien
gccacaacatccttaaatatcttgatgtaccat

SEQ ID NO: 719434 - DNA, 33 bp, Homo sapien
gccacaacatccttaattatcttgatgtaccat

SEQ ID NO: 719435 - DNA, 33 bp, Homo sapien
ggtgaggtactaagtacgtgcaaagctctgcaa

SEQ ID NO: 719436 - DNA, 33 bp, Homo sapien
ggtgaggtactaagtatgtgcaaagctctgcaa

SEQ ID NO: 719437 - DNA, 33 bp, Homo sapien
agacctggatctcaaaacatttcaaggagggag

SEQ ID NO: 719438 - DNA, 33 bp, Homo sapien
agacctggatctcaaatcatttcaaggagggag

SEQ ID NO: 719439 - DNA, 33 bp, Homo sapien
taactggaagggggtaagaaatgtgactaaggc

SEQ ID NO: 719440 - DNA, 33 bp, Homo sapien
taactggaagggggtacgaaatgtgactaaggc

SEQ ID NO: 719441 - DNA, 33 bp, Homo sapien
aaaaagaaaagcaacaagtcccaagtaggtcca

SEQ ID NO: 719442 - DNA, 33 bp, Homo sapien
aaaaagaaaagcaacaggtcccaagtaggtcca

SEQ ID NO: 719443 - DNA, 33 bp, Homo sapien
tggtgccaacatctaaagagggtcatccaaagg

SEQ ID NO: 719444 - DNA, 33 bp, Homo sapien
tggtgccaacatctaatgagggtcatccaaagg

SEQ ID NO: 719445 - DNA, 33 bp, Homo sapien
tgattgtgagatctgaatatgcaagttagaaat

SEQ ID NO: 719446 - DNA, 33 bp, Homo sapien
tgattgtgagatctgactatgcaagttagaaat

SEQ ID NO: 719447 - DNA, 33 bp, Homo sapien
tcctgatgcagtgtcacggctattcagattagg

SEQ ID NO: 719448 - DNA, 33 bp, Homo sapien
tcctgatgcagtgtcatggctattcagattagg

SEQ ID NO: 719449 - DNA, 33 bp, Homo sapien
tttttggtttatacaacttgaagttcaacattt

SEQ ID NO: 719450 - DNA, 33 bp, Homo sapien
tttttggtttatacaatttgaagttcaacattt

SEQ ID NO: 719451 - DNA, 33 bp, Homo sapien
aacactgatggggaaacgatgtcagacgaaaat

SEQ ID NO: 719452 - DNA, 33 bp, Homo sapien
aacactgatggggaaatgatgtcagacgaaaat

SEQ ID NO: 719453 - DNA, 33 bp, Homo sapien
agacatagttttgcaaagaaaagaggaagagat

SEQ ID NO: 719454 - DNA, 33 bp, Homo sapien
agacatagttttgcaaggaaaagaggaagagat

SEQ ID NO: 719455 - DNA, 33 bp, Homo sapien
ttccctctgtctcagactatgtagaggagcagg

SEQ ID NO: 719456 - DNA, 33 bp, Homo sapien
ttccctctgtctcagattatgtagaggagcagg

SEQ ID NO: 719457 - DNA, 33 bp, Homo sapien
catttgcccagcaaaaccatcaactcagtcatt

SEQ ID NO: 719458 - DNA, 33 bp, Homo sapien
catttgcccagcaaaatcatcaactcagtcatt

SEQ ID NO: 719459 - DNA, 33 bp, Homo sapien
caaagttatctttgaaacacacactttagactc

SEQ ID NO: 719460 - DNA, 33 bp, Homo sapien
caaagttatctttgaatcacacactttagactc

SEQ ID NO: 719461 - DNA, 33 bp, Homo sapien
gacctttgtgattgcaacaggcctgttatccag

SEQ ID NO: 719462 - DNA, 33 bp, Homo sapien
gacctttgtgattgcatcaggcctgttatccag

SEQ ID NO: 719463 - DNA, 33 bp, Homo sapien
attaggatctttgaacagacattattatgcctt

SEQ ID NO: 719464 - DNA, 33 bp, Homo sapien
attaggatctttgaacggacattattatgcctt

SEQ ID NO: 719465 - DNA, 33 bp, Homo sapien
ctttataattgccagtcactgctggatttcatc

SEQ ID NO: 719466 - DNA, 33 bp, Homo sapien
ctttataattgccagttactgctggatttcatc

SEQ ID NO: 719467 - DNA, 33 bp, Homo sapien
tgagcttgctttatgaacactgtaggttattaa

SEQ ID NO: 719468 - DNA, 33 bp, Homo sapien
tgagcttgctttatgatcactgtaggttattaa

SEQ ID NO: 719469 - DNA, 33 bp, Homo sapien
tcatctacttatctgacgatcaatgaaacacaa

SEQ ID NO: 719470 - DNA, 33 bp, Homo sapien
tcatctacttatctgatgatcaatgaaacacaa

SEQ ID NO: 719471 - DNA, 33 bp, Homo sapien
tttaagacggtgaaataatgtgaaacaatattt

SEQ ID NO: 719472 - DNA, 33 bp, Homo sapien
tttaagacggtgaaatcatgtgaaacaatattt

SEQ ID NO: 719473 - DNA, 33 bp, Homo sapien
atttcagcgttgcacacatgtaactttaaatta

SEQ ID NO: 719474 - DNA, 33 bp, Homo sapien
atttcagcgttgcacatatgtaactttaaatta

SEQ ID NO: 719475 - DNA, 33 bp, Homo sapien
ttagactggactaacccataaatgttggaatag

SEQ ID NO: 719476 - DNA, 33 bp, Homo sapien
ttagactggactaacctataaatgttggaatag

SEQ ID NO: 719477 - DNA, 33 bp, Homo sapien
cttctaaggcacaagagaattttcatgtagact

SEQ ID NO: 719478 - DNA, 33 bp, Homo sapien
cttctaaggcacaagataattttcatgtagact

SEQ ID NO: 719479 - DNA, 33 bp, Homo sapien
ttcactacacaagtcaccttttctgagcattac

SEQ ID NO: 719480 - DNA, 33 bp, Homo sapien
ttcactacacaagtcatcttttctgagcattac

SEQ ID NO: 719481 - DNA, 33 bp, Homo sapien
gggctgagaggagatacattcaagggccacttt

SEQ ID NO: 719482 - DNA, 33 bp, Homo sapien
gggctgagaggagatagattcaagggccacttt

SEQ ID NO: 719483 - DNA, 33 bp, Homo sapien
ttttcctcacaatttccagtctgttctctaccc

SEQ ID NO: 719484 - DNA, 33 bp, Homo sapien
ttttcctcacaatttctagtctgttctctaccc

SEQ ID NO: 719485 - DNA, 33 bp, Homo sapien
aaaacatccttcttaactggcacttcatcactc

SEQ ID NO: 719486 - DNA, 33 bp, Homo sapien
aaaacatccttcttaattggcacttcatcactc

SEQ ID NO: 719487 - DNA, 33 bp, Homo sapien
attagaaacaagagccagaagccagaggtgact

SEQ ID NO: 719488 - DNA, 33 bp, Homo sapien
attagaaacaagagccggaagccagaggtgact

SEQ ID NO: 719489 - DNA, 33 bp, Homo sapien
taatgagccaagctcaaatcagactccttaggt

SEQ ID NO: 719490 - DNA, 33 bp, Homo sapien
taatgagccaagctcagatcagactccttaggt

SEQ ID NO: 719491 - DNA, 33 bp, Homo sapien
ccgtatgtgggtttacagccccaacagggagta

SEQ ID NO: 719492 - DNA, 33 bp, Homo sapien
ccgtatgtgggtttacggccccaacagggagta

SEQ ID NO: 719493 - DNA, 33 bp, Homo sapien
tcttgaaatatctgaacggtagttacaactttt

SEQ ID NO: 719494 - DNA, 33 bp, Homo sapien
tcttgaaatatctgaatggtagttacaactttt

SEQ ID NO: 719495 - DNA, 33 bp, Homo sapien
attgtctcttcctgtcactgaaacctgggcaag

SEQ ID NO: 719496 - DNA, 33 bp, Homo sapien
attgtctcttcctgtcgctgaaacctgggcaag

SEQ ID NO: 719497 - DNA, 33 bp, Homo sapien
gtccagatacgtgggaacctgcttcgggcaact

SEQ ID NO: 719498 - DNA, 33 bp, Homo sapien
gtccagatacgtgggaccctgcttcgggcaact

SEQ ID NO: 719499 - DNA, 33 bp, Homo sapien
gttgtttgcctggcaccgtcggcagcagcgagg

SEQ ID NO: 719500 - DNA, 33 bp, Homo sapien
gttgtttgcctggcactgtcggcagcagcgagg

SEQ ID NO: 719501 - DNA, 33 bp, Homo sapien
caaagttacactctataaaacacgacctgtttg

SEQ ID NO: 719502 - DNA, 33 bp, Homo sapien
caaagttacactctatgaaacacgacctgtttg

SEQ ID NO: 719503 - DNA, 33 bp, Homo sapien
gtccattttatccgagacctctgtctgttatcc

SEQ ID NO: 719504 - DNA, 33 bp, Homo sapien
gtccattttatccgaggcctctgtctgttatcc

SEQ ID NO: 719505 - DNA, 33 bp, Homo sapien
tcaaaaagtgatgaggaaaatcaagagtaggtc

SEQ ID NO: 719506 - DNA, 33 bp, Homo sapien
tcaaaaagtgatgaggcaaatcaagagtaggtc

SEQ ID NO: 719507 - DNA, 33 bp, Homo sapien
ctgaccttttaaagaccatgtattcagtgagct

SEQ ID NO: 719508 - DNA, 33 bp, Homo sapien
ctgaccttttaaagactatgtattcagtgagct

SEQ ID NO: 719509 - DNA, 33 bp, Homo sapien
agaaaatgtccattcacggcaaaaggataaatg

SEQ ID NO: 719510 - DNA, 33 bp, Homo sapien
agaaaatgtccattcatggcaaaaggataaatg

SEQ ID NO: 719511 - DNA, 33 bp, Homo sapien
aacttttgaatcatcaagtgctattgttaaaat

SEQ ID NO: 719512 - DNA, 33 bp, Homo sapien
aacttttgaatcatcaggtgctattgttaaaat

SEQ ID NO: 719513 - DNA, 33 bp, Homo sapien
cttgctgtttcaggaaagtttgcataaaaaggg

SEQ ID NO: 719514 - DNA, 33 bp, Homo sapien
cttgctgtttcaggaaggtttgcataaaaaggg

SEQ ID NO: 719515 - DNA, 33 bp, Homo sapien
tatgaaaaatggaatcagaagtagccattattt

SEQ ID NO: 719516 - DNA, 33 bp, Homo sapien
tatgaaaaatggaatcggaagtagccattattt

SEQ ID NO: 719517 - DNA, 33 bp, Homo sapien
tgatctctgcttccaacctaggaccagagaaat

SEQ ID NO: 719518 - DNA, 33 bp, Homo sapien
tgatctctgcttccaatctaggaccagagaaat

SEQ ID NO: 719519 - DNA, 33 bp, Homo sapien
gaaggactaggtgatcaatttgaatacaaacaa

SEQ ID NO: 719520 - DNA, 33 bp, Homo sapien
gaaggactaggtgatcgatttgaatacaaacaa

SEQ ID NO: 719521 - DNA, 33 bp, Homo sapien
ttttgcacccgcacccaagttctcatccagtat

SEQ ID NO: 719522 - DNA, 33 bp, Homo sapien
ttttgcacccgcacccgagttctcatccagtat

SEQ ID NO: 719523 - DNA, 33 bp, Homo sapien
aagaggattatgggcccgcattattacctttag

SEQ ID NO: 719524 - DNA, 33 bp, Homo sapien
aagaggattatgggcctgcattattacctttag

SEQ ID NO: 719525 - DNA, 33 bp, Homo sapien
ggaagccctgttgtaaataaagtctgctaaata

SEQ ID NO: 719526 - DNA, 33 bp, Homo sapien
ggaagccctgttgtaagtaaagtctgctaaata

SEQ ID NO: 719527 - DNA, 33 bp, Homo sapien
catatttacttaaaacaatgaaccaagtgagct

SEQ ID NO: 719528 - DNA, 33 bp, Homo sapien
catatttacttaaaacgatgaaccaagtgagct

SEQ ID NO: 719529 - DNA, 33 bp, Homo sapien
cttgttctggcttgaaaggatgctacgttttga

SEQ ID NO: 719530 - DNA, 33 bp, Homo sapien
cttgttctggcttgaagggatgctacgttttga

SEQ ID NO: 719531 - DNA, 33 bp, Homo sapien
gagtgttccaaaccaaaagataacacacggaac

SEQ ID NO: 719532 - DNA, 33 bp, Homo sapien
gagtgttccaaaccaagagataacacacggaac

SEQ ID NO: 719533 - DNA, 33 bp, Homo sapien
cttttcatgttcattaaccatttgcatattgtc

SEQ ID NO: 719534 - DNA, 33 bp, Homo sapien
cttttcatgttcattagccatttgcatattgtc

SEQ ID NO: 719535 - DNA, 33 bp, Homo sapien
gcatctgttatgcccacgaggccaaagagggaa

SEQ ID NO: 719536 - DNA, 33 bp, Homo sapien
gcatctgttatgcccaggaggccaaagagggaa

SEQ ID NO: 719537 - DNA, 33 bp, Homo sapien
atttagaaacaacctgaaaaagatagttagcaa

SEQ ID NO: 719538 - DNA, 33 bp, Homo sapien
atttagaaacaacctgcaaaagatagttagcaa

SEQ ID NO: 719539 - DNA, 33 bp, Homo sapien
gttacattgtcaaggacgatgaaggatgttcag

SEQ ID NO: 719540 - DNA, 33 bp, Homo sapien
gttacattgtcaaggatgatgaaggatgttcag

SEQ ID NO: 719541 - DNA, 33 bp, Homo sapien
agctaagtgttatcacaaaggagtcaaaaagtt

SEQ ID NO: 719542 - DNA, 33 bp, Homo sapien
agctaagtgttatcacgaaggagtcaaaaagtt

SEQ ID NO: 719543 - DNA, 33 bp, Homo sapien
caaatccagccccgtaactgtttttgtgaataa

SEQ ID NO: 719544 - DNA, 33 bp, Homo sapien
caaatccagccccgtacctgtttttgtgaataa

SEQ ID NO: 719545 - DNA, 33 bp, Homo sapien
aagagtgtgtcttatccattctgttggatcttc

SEQ ID NO: 719546 - DNA, 33 bp, Homo sapien
aagagtgtgtcttatctattctgttggatcttc

SEQ ID NO: 719547 - DNA, 33 bp, Homo sapien
agtggcaggggaaaacagcggactggagccaca

SEQ ID NO: 719548 - DNA, 33 bp, Homo sapien
agtggcaggggaaaacggcggactggagccaca

SEQ ID NO: 719549 - DNA, 33 bp, Homo sapien
aaatggctggaagatacgagccaatcttacaac

SEQ ID NO: 719550 - DNA, 33 bp, Homo sapien
aaatggctggaagatatgagccaatcttacaac

SEQ ID NO: 719551 - DNA, 33 bp, Homo sapien
ttccatattgagcatgcaccatagtttaagtag

SEQ ID NO: 719552 - DNA, 33 bp, Homo sapien
ttccatattgagcatgtaccatagtttaagtag

SEQ ID NO: 719553 - DNA, 33 bp, Homo sapien
ggtggaacttggaccacggtcgttatgatgaag

SEQ ID NO: 719554 - DNA, 33 bp, Homo sapien
ggtggaacttggaccagggtcgttatgatgaag

SEQ ID NO: 719555 - DNA, 33 bp, Homo sapien
ttaatcactgctataaaaacctgtctcccaata

SEQ ID NO: 719556 - DNA, 33 bp, Homo sapien
ttaatcactgctataacaacctgtctcccaata

SEQ ID NO: 719557 - DNA, 33 bp, Homo sapien
acctatttccattcacaaataaagaaatacata

SEQ ID NO: 719558 - DNA, 33 bp, Homo sapien
acctatttccattcaccaataaagaaatacata

SEQ ID NO: 719559 - DNA, 33 bp, Homo sapien
gaggaagaggaaacaactaggaacaattcctag

SEQ ID NO: 719560 - DNA, 33 bp, Homo sapien
gaggaagaggaaacaagtaggaacaattcctag

SEQ ID NO: 719561 - DNA, 33 bp, Homo sapien
taaagtaagtgctgaaataaagcctttgcggaa

SEQ ID NO: 719562 - DNA, 33 bp, Homo sapien
taaagtaagtgctgaagtaaagcctttgcggaa

SEQ ID NO: 719563 - DNA, 33 bp, Homo sapien
atactcatttcatagacgcaaaaggtgacttca

SEQ ID NO: 719564 - DNA, 33 bp, Homo sapien
atactcatttcatagatgcaaaaggtgacttca

SEQ ID NO: 719565 - DNA, 33 bp, Homo sapien
tttaaaactgttcatcaaaagagtcaaaattaa

SEQ ID NO: 719566 - DNA, 33 bp, Homo sapien
tttaaaactgttcatcgaaagagtcaaaattaa

SEQ ID NO: 719567 - DNA, 33 bp, Homo sapien
tccctggggaccgaacagaaggatctcagtaca

SEQ ID NO: 719568 - DNA, 33 bp, Homo sapien
tccctggggaccgaacggaaggatctcagtaca

SEQ ID NO: 719569 - DNA, 33 bp, Homo sapien
atctgtgtgagctggcaagtctatcttggtctc

SEQ ID NO: 719570 - DNA, 33 bp, Homo sapien
atctgtgtgagctggcgagtctatcttggtctc

SEQ ID NO: 719571 - DNA, 33 bp, Homo sapien
gtctgagaaatgatgcaagaagctctggaagac

SEQ ID NO: 719572 - DNA, 33 bp, Homo sapien
gtctgagaaatgatgcgagaagctctggaagac

SEQ ID NO: 719573 - DNA, 33 bp, Homo sapien
cagattaaaccttagaatgtgaacgcctaatag

SEQ ID NO: 719574 - DNA, 33 bp, Homo sapien
cagattaaaccttagagtgtgaacgcctaatag

SEQ ID NO: 719575 - DNA, 33 bp, Homo sapien
acttcatggagcgggaaaatgataaactgcagt

SEQ ID NO: 719576 - DNA, 33 bp, Homo sapien
acttcatggagcgggagaatgataaactgcagt

SEQ ID NO: 719577 - DNA, 33 bp, Homo sapien
ttcagtgccacatatacagcctcaatatcctcc

SEQ ID NO: 719578 - DNA, 33 bp, Homo sapien
ttcagtgccacatatagagcctcaatatcctcc

SEQ ID NO: 719579 - DNA, 33 bp, Homo sapien
atctctcaccattcccaactgctgtccttcatc

SEQ ID NO: 719580 - DNA, 33 bp, Homo sapien
atctctcaccattcccgactgctgtccttcatc

SEQ ID NO: 719581 - DNA, 33 bp, Homo sapien
gagtttggctttttcccattaaaagtctggtgg

SEQ ID NO: 719582 - DNA, 33 bp, Homo sapien
gagtttggctttttcctattaaaagtctggtgg

SEQ ID NO: 719583 - DNA, 33 bp, Homo sapien
attactcaggctaaaagtttatgccacagggat

SEQ ID NO: 719584 - DNA, 33 bp, Homo sapien
attactcaggctaaaattttatgccacagggat

SEQ ID NO: 719585 - DNA, 33 bp, Homo sapien
ggaatgttgttttacaccctcatcatttagagt

SEQ ID NO: 719586 - DNA, 33 bp, Homo sapien
ggaatgttgttttacatcctcatcatttagagt

SEQ ID NO: 719587 - DNA, 33 bp, Homo sapien
atgatttatgactgtacggctttcatagtcaca

SEQ ID NO: 719588 - DNA, 33 bp, Homo sapien
atgatttatgactgtatggctttcatagtcaca

SEQ ID NO: 719589 - DNA, 33 bp, Homo sapien
gaccactgttctacaaaacgtaccaaagtggct

SEQ ID NO: 719590 - DNA, 33 bp, Homo sapien
gaccactgttctacaacacgtaccaaagtggct

SEQ ID NO: 719591 - DNA, 33 bp, Homo sapien
attacatgataattccagcttaagttaactgct

SEQ ID NO: 719592 - DNA, 33 bp, Homo sapien
attacatgataattccggcttaagttaactgct

SEQ ID NO: 719593 - DNA, 33 bp, Homo sapien
acttcatttttgaaataaggcagagtattaaac

SEQ ID NO: 719594 - DNA, 33 bp, Homo sapien
acttcatttttgaaatgaggcagagtattaaac

SEQ ID NO: 719595 - DNA, 33 bp, Homo sapien
tcaaatatccaagtcaagtcactatttttggag

SEQ ID NO: 719596 - DNA, 33 bp, Homo sapien
tcaaatatccaagtcaggtcactatttttggag

SEQ ID NO: 719597 - DNA, 33 bp, Homo sapien
tcctacactgactaacaggtatgtctctcctag

SEQ ID NO: 719598 - DNA, 33 bp, Homo sapien
tcctacactgactaactggtatgtctctcctag

SEQ ID NO: 719599 - DNA, 33 bp, Homo sapien
taaaaaagacctagacacaacattctgctagga

SEQ ID NO: 719600 - DNA, 33 bp, Homo sapien
taaaaaagacctagacgcaacattctgctagga

SEQ ID NO: 719601 - DNA, 33 bp, Homo sapien
ggatgttttgtgccaacggcagatcagagcagg

SEQ ID NO: 719602 - DNA, 33 bp, Homo sapien
ggatgttttgtgccaatggcagatcagagcagg

SEQ ID NO: 719603 - DNA, 33 bp, Homo sapien
agtcaagaatgtgctccgaatcacctttcccct

SEQ ID NO: 719604 - DNA, 33 bp, Homo sapien
agtcaagaatgtgctctgaatcacctttcccct

SEQ ID NO: 719605 - DNA, 33 bp, Homo sapien
ttcagctcaggaaaagcaattagagttgtctga

SEQ ID NO: 719606 - DNA, 33 bp, Homo sapien
ttcagctcaggaaaagtaattagagttgtctga

SEQ ID NO: 719607 - DNA, 33 bp, Homo sapien
acagtagctgtgaaagcaaattgagatcatgta

SEQ ID NO: 719608 - DNA, 33 bp, Homo sapien
acagtagctgtgaaagtaaattgagatcatgta

SEQ ID NO: 719609 - DNA, 33 bp, Homo sapien
tcttaactaaaatctcaagaatttcaacaactt

SEQ ID NO: 719610 - DNA, 33 bp, Homo sapien
tcttaactaaaatctcgagaatttcaacaactt

SEQ ID NO: 719611 - DNA, 33 bp, Homo sapien
ctttaggttcctaccaaattctaccttgcattt

SEQ ID NO: 719612 - DNA, 33 bp, Homo sapien
ctttaggttcctaccacattctaccttgcattt

SEQ ID NO: 719613 - DNA, 33 bp, Homo sapien
ttatagcaatgagaacgaacacagaactagcat

SEQ ID NO: 719614 - DNA, 33 bp, Homo sapien
ttatagcaatgagaactaacacagaactagcat

SEQ ID NO: 719615 - DNA, 33 bp, Homo sapien
aggcatgcaccattaccagataatttttatatt

SEQ ID NO: 719616 - DNA, 33 bp, Homo sapien
aggcatgcaccattactagataatttttatatt

SEQ ID NO: 719617 - DNA, 33 bp, Homo sapien
attgtagtttgcttggcagaagtctattaaaac

SEQ ID NO: 719618 - DNA, 33 bp, Homo sapien
attgtagtttgcttggtagaagtctattaaaac

SEQ ID NO: 719619 - DNA, 33 bp, Homo sapien
cagtagaaagagctagaaaatgttgtatgtata

SEQ ID NO: 719620 - DNA, 33 bp, Homo sapien
cagtagaaagagctaggaaatgttgtatgtata

SEQ ID NO: 719621 - DNA, 33 bp, Homo sapien
gagatttggagcagagaaaaattcctgtcctgc

SEQ ID NO: 719622 - DNA, 33 bp, Homo sapien
gagatttggagcagaggaaaattcctgtcctgc

SEQ ID NO: 719623 - DNA, 33 bp, Homo sapien
gtcgttggtgattaaccgcacttggctgaagtg

SEQ ID NO: 719624 - DNA, 33 bp, Homo sapien
gtcgttggtgattaactgcacttggctgaagtg

SEQ ID NO: 719625 - DNA, 33 bp, Homo sapien
atccaggtcatacttacgccagaggtgggctcc

SEQ ID NO: 719626 - DNA, 33 bp, Homo sapien
atccaggtcatacttatgccagaggtgggctcc

SEQ ID NO: 719627 - DNA, 33 bp, Homo sapien
catacagaaacacaaaatgagggtgacaaaagt

SEQ ID NO: 719628 - DNA, 33 bp, Homo sapien
catacagaaacacaaattgagggtgacaaaagt

SEQ ID NO: 719629 - DNA, 33 bp, Homo sapien
tgacctgagatggtcaaaaccaggcgacacatg

SEQ ID NO: 719630 - DNA, 33 bp, Homo sapien
tgacctgagatggtcacaaccaggcgacacatg

SEQ ID NO: 719631 - DNA, 33 bp, Homo sapien
caaagtgtgaaaacataaactattgtataatga

SEQ ID NO: 719632 - DNA, 33 bp, Homo sapien
caaagtgtgaaaacatgaactattgtataatga

SEQ ID NO: 719633 - DNA, 33 bp, Homo sapien
agggtctctagctaagcaacaggagatgacaaa

SEQ ID NO: 719634 - DNA, 33 bp, Homo sapien
agggtctctagctaaggaacaggagatgacaaa

SEQ ID NO: 719635 - DNA, 33 bp, Homo sapien
ccatctttctgtcctagcccacctgagttccct

SEQ ID NO: 719636 - DNA, 33 bp, Homo sapien
ccatctttctgtcctatcccacctgagttccct

SEQ ID NO: 719637 - DNA, 33 bp, Homo sapien
acaacagcaaaaattacagttagccactccatg

SEQ ID NO: 719638 - DNA, 33 bp, Homo sapien
acaacagcaaaaattatagttagccactccatg

SEQ ID NO: 719639 - DNA, 33 bp, Homo sapien
aaaggagataacaaaacgttcattatcactggg

SEQ ID NO: 719640 - DNA, 33 bp, Homo sapien
aaaggagataacaaaatgttcattatcactggg

SEQ ID NO: 719641 - DNA, 33 bp, Homo sapien
tcagccattacatgagaattgcaccaagacatt

SEQ ID NO: 719642 - DNA, 33 bp, Homo sapien
tcagccattacatgaggattgcaccaagacatt

SEQ ID NO: 719643 - DNA, 33 bp, Homo sapien
gaacaccatatgaaacagtgaagagtgggttca

SEQ ID NO: 719644 - DNA, 33 bp, Homo sapien
gaacaccatatgaaaccgtgaagagtgggttca

SEQ ID NO: 719645 - DNA, 33 bp, Homo sapien
agacacatttatgaaaacaaactaatatcacat

SEQ ID NO: 719646 - DNA, 33 bp, Homo sapien
agacacatttatgaaagcaaactaatatcacat

SEQ ID NO: 719647 - DNA, 33 bp, Homo sapien
ataacgaagtaccaaagactagagagcataaac

SEQ ID NO: 719648 - DNA, 33 bp, Homo sapien
ataacgaagtaccaaatactagagagcataaac

SEQ ID NO: 719649 - DNA, 33 bp, Homo sapien
tgtgaggataggaaatgagttctgagatctagt

SEQ ID NO: 719650 - DNA, 33 bp, Homo sapien
tgtgaggataggaaattagttctgagatctagt

SEQ ID NO: 719651 - DNA, 33 bp, Homo sapien
tcaacacttaagaacaagggaaactgagcttat

SEQ ID NO: 719652 - DNA, 33 bp, Homo sapien
tcaacacttaagaacaggggaaactgagcttat

SEQ ID NO: 719653 - DNA, 33 bp, Homo sapien
atattaagagctaagtcaaaggtggtcatccta

SEQ ID NO: 719654 - DNA, 33 bp, Homo sapien
atattaagagctaagttaaaggtggtcatccta

SEQ ID NO: 719655 - DNA, 33 bp, Homo sapien
aaatacagcttttatactaacttggtctctgac

SEQ ID NO: 719656 - DNA, 33 bp, Homo sapien
aaatacagcttttatattaacttggtctctgac

SEQ ID NO: 719657 - DNA, 33 bp, Homo sapien
acctgattcagtgactcaaaaacgtggctatta

SEQ ID NO: 719658 - DNA, 33 bp, Homo sapien
acctgattcagtgacttaaaaacgtggctatta

SEQ ID NO: 719659 - DNA, 33 bp, Homo sapien
aattctaaaatgcttacgtcttccagagtgatg

SEQ ID NO: 719660 - DNA, 33 bp, Homo sapien
aattctaaaatgcttaggtcttccagagtgatg

SEQ ID NO: 719661 - DNA, 33 bp, Homo sapien
aactcaaacacttacacacatttactggtttgc

SEQ ID NO: 719662 - DNA, 33 bp, Homo sapien
aactcaaacacttacatacatttactggtttgc

SEQ ID NO: 719663 - DNA, 33 bp, Homo sapien
cttcacagcgcctttcactcattcccaccctgg

SEQ ID NO: 719664 - DNA, 33 bp, Homo sapien
cttcacagcgcctttcgctcattcccaccctgg

SEQ ID NO: 719665 - DNA, 33 bp, Homo sapien
ttggagcatgaggcaccgtaaaggcgtgcaaac

SEQ ID NO: 719666 - DNA, 33 bp, Homo sapien
ttggagcatgaggcactgtaaaggcgtgcaaac

SEQ ID NO: 719667 - DNA, 33 bp, Homo sapien
tattgtttcctaaaaagaagagcattgagggat

SEQ ID NO: 719668 - DNA, 33 bp, Homo sapien
tattgtttcctaaaaataagagcattgagggat

SEQ ID NO: 719669 - DNA, 33 bp, Homo sapien
ggttccctttctgccaataaacaactccgtgac

SEQ ID NO: 719670 - DNA, 33 bp, Homo sapien
ggttccctttctgccagtaaacaactccgtgac

SEQ ID NO: 719671 - DNA, 33 bp, Homo sapien
caaactatccattgaacactgcgaatcgctatt

SEQ ID NO: 719672 - DNA, 33 bp, Homo sapien
caaactatccattgaatactgcgaatcgctatt

SEQ ID NO: 719673 - DNA, 33 bp, Homo sapien
tgatttttgcctgtacaccgtgaatagacttcc

SEQ ID NO: 719674 - DNA, 33 bp, Homo sapien
tgatttttgcctgtacgccgtgaatagacttcc

SEQ ID NO: 719675 - DNA, 33 bp, Homo sapien
gcccaagagctagaaccaagggttttccttgac

SEQ ID NO: 719676 - DNA, 33 bp, Homo sapien
gcccaagagctagaactaagggttttccttgac

SEQ ID NO: 719677 - DNA, 33 bp, Homo sapien
tcaaaagcttcaacaacaaagtaaatggagcag

SEQ ID NO: 719678 - DNA, 33 bp, Homo sapien
tcaaaagcttcaacaataaagtaaatggagcag

SEQ ID NO: 719679 - DNA, 33 bp, Homo sapien
tactacttcatacacacagaaacaataccaaat

SEQ ID NO: 719680 - DNA, 33 bp, Homo sapien
tactacttcatacacatagaaacaataccaaat

SEQ ID NO: 719681 - DNA, 33 bp, Homo sapien
ctgccattgcccataccacatctgctgcccaga

SEQ ID NO: 719682 - DNA, 33 bp, Homo sapien
ctgccattgcccatactacatctgctgcccaga

SEQ ID NO: 719683 - DNA, 33 bp, Homo sapien
tttcttttctgtaacaacagctttaggcaggtg

SEQ ID NO: 719684 - DNA, 33 bp, Homo sapien
tttcttttctgtaacagcagctttaggcaggtg

SEQ ID NO: 719685 - DNA, 33 bp, Homo sapien
ggaagcatgattgctgccaatagcttatacttc

SEQ ID NO: 719686 - DNA, 33 bp, Homo sapien
ggaagcatgattgctgtcaatagcttatacttc

SEQ ID NO: 719687 - DNA, 33 bp, Homo sapien
agtctcagggccgtgaaggttgaggtgctctct

SEQ ID NO: 719688 - DNA, 33 bp, Homo sapien
agtctcagggccgtgagggttgaggtgctctct

SEQ ID NO: 719689 - DNA, 33 bp, Homo sapien
aatgtcaaaggcacacggatgtaaaaccagtaa

SEQ ID NO: 719690 - DNA, 33 bp, Homo sapien
aatgtcaaaggcacactgatgtaaaaccagtaa

SEQ ID NO: 719691 - DNA, 33 bp, Homo sapien
actccatcttacatttaaaaagacatcaagcca

SEQ ID NO: 719692 - DNA, 33 bp, Homo sapien
actccatcttacatttcaaaagacatcaagcca

SEQ ID NO: 719693 - DNA, 33 bp, Homo sapien
aaggaacaggacttctcaagcttgacatggcca

SEQ ID NO: 719694 - DNA, 33 bp, Homo sapien
aaggaacaggacttcttaagcttgacatggcca

SEQ ID NO: 719695 - DNA, 33 bp, Homo sapien
agttctgtagtgaataacagatgagtgtcctaa

SEQ ID NO: 719696 - DNA, 33 bp, Homo sapien
agttctgtagtgaatagcagatgagtgtcctaa

SEQ ID NO: 719697 - DNA, 33 bp, Homo sapien
agcagtgtggagactgcagttgtggccatgact

SEQ ID NO: 719698 - DNA, 33 bp, Homo sapien
agcagtgtggagactgtagttgtggccatgact

SEQ ID NO: 719699 - DNA, 33 bp, Homo sapien
attgctttagttagacaggctatgatggatgat

SEQ ID NO: 719700 - DNA, 33 bp, Homo sapien
attgctttagttagactggctatgatggatgat

SEQ ID NO: 719701 - DNA, 33 bp, Homo sapien
tggaaatatcttctaccactttgtgtgttgtat

SEQ ID NO: 719702 - DNA, 33 bp, Homo sapien
tggaaatatcttctactactttgtgtgttgtat

SEQ ID NO: 719703 - DNA, 33 bp, Homo sapien
gagggcctccaagccacagtgctggtctgacac

SEQ ID NO: 719704 - DNA, 33 bp, Homo sapien
gagggcctccaagccatagtgctggtctgacac

SEQ ID NO: 719705 - DNA, 33 bp, Homo sapien
ttagtataatgcctaacataaagtagctactca

SEQ ID NO: 719706 - DNA, 33 bp, Homo sapien
ttagtataatgcctaagataaagtagctactca

SEQ ID NO: 719707 - DNA, 33 bp, Homo sapien
tggtggctgtgactacaacagggtaacacaagg

SEQ ID NO: 719708 - DNA, 33 bp, Homo sapien
tggtggctgtgactacgacagggtaacacaagg

SEQ ID NO: 719709 - DNA, 33 bp, Homo sapien
cttagcagatcaccatcaaccggctattggctg

SEQ ID NO: 719710 - DNA, 33 bp, Homo sapien
cttagcagatcaccattaaccggctattggctg

SEQ ID NO: 719711 - DNA, 33 bp, Homo sapien
atgtgaagaaagaacaatagagcaccaaaagag

SEQ ID NO: 719712 - DNA, 33 bp, Homo sapien
atgtgaagaaagaacagtagagcaccaaaagag

SEQ ID NO: 719713 - DNA, 33 bp, Homo sapien
caccagtatctcagtacagcagtaatgttaatc

SEQ ID NO: 719714 - DNA, 33 bp, Homo sapien
caccagtatctcagtagagcagtaatgttaatc

SEQ ID NO: 719715 - DNA, 33 bp, Homo sapien
actctttcctgaaagcaaggaatagctaaacaa

SEQ ID NO: 719716 - DNA, 33 bp, Homo sapien
actctttcctgaaagcgaggaatagctaaacaa

SEQ ID NO: 719717 - DNA, 33 bp, Homo sapien
ccatatttctagccacaacatcctaaatctcat

SEQ ID NO: 719718 - DNA, 33 bp, Homo sapien
ccatatttctagccacgacatcctaaatctcat

SEQ ID NO: 719719 - DNA, 33 bp, Homo sapien
ggagctgctacagatacagttgggaggacagag

SEQ ID NO: 719720 - DNA, 33 bp, Homo sapien
ggagctgctacagatagagttgggaggacagag

SEQ ID NO: 719721 - DNA, 33 bp, Homo sapien
tcatcataaagttatcagagcaaattggagctc

SEQ ID NO: 719722 - DNA, 33 bp, Homo sapien
tcatcataaagttatcggagcaaattggagctc

SEQ ID NO: 719723 - DNA, 33 bp, Homo sapien
cattattctgataaaaaccttttcccttagcac

SEQ ID NO: 719724 - DNA, 33 bp, Homo sapien
cattattctgataaaacccttttcccttagcac

SEQ ID NO: 719725 - DNA, 33 bp, Homo sapien
gttcttcatctgaaaacgactctaaaaaaattc

SEQ ID NO: 719726 - DNA, 33 bp, Homo sapien
gttcttcatctgaaaatgactctaaaaaaattc

SEQ ID NO: 719727 - DNA, 33 bp, Homo sapien
caggaccagcataacacggttctgtcagtggac

SEQ ID NO: 719728 - DNA, 33 bp, Homo sapien
caggaccagcataacatggttctgtcagtggac

SEQ ID NO: 719729 - DNA, 33 bp, Homo sapien
ctaagcaaaaagaacaaagttggagaagtcatg

SEQ ID NO: 719730 - DNA, 33 bp, Homo sapien
ctaagcaaaaagaacagagttggagaagtcatg

SEQ ID NO: 719731 - DNA, 33 bp, Homo sapien
atatatgcattgcctacaaaattctaactggtc

SEQ ID NO: 719732 - DNA, 33 bp, Homo sapien
atatatgcattgcctataaaattctaactggtc

SEQ ID NO: 719733 - DNA, 33 bp, Homo sapien
gagggggacagcccacaaagacagagagtgcag

SEQ ID NO: 719734 - DNA, 33 bp, Homo sapien
gagggggacagcccacgaagacagagagtgcag

SEQ ID NO: 719735 - DNA, 33 bp, Homo sapien
tgaattctaataatccgcatatgtcaagggcag

SEQ ID NO: 719736 - DNA, 33 bp, Homo sapien
tgaattctaataatcctcatatgtcaagggcag

SEQ ID NO: 719737 - DNA, 33 bp, Homo sapien
ttgttcattgtaaaaaatgcagttaaaaattga

SEQ ID NO: 719738 - DNA, 33 bp, Homo sapien
ttgttcattgtaaaaattgcagttaaaaattga

SEQ ID NO: 719739 - DNA, 33 bp, Homo sapien
tcatgtccaagagagaaaaaatgaagataaaat

SEQ ID NO: 719740 - DNA, 33 bp, Homo sapien
tcatgtccaagagagataaaatgaagataaaat

SEQ ID NO: 719741 - DNA, 33 bp, Homo sapien
gttcttatcacatcacaggatctgttaccccat

SEQ ID NO: 719742 - DNA, 33 bp, Homo sapien
gttcttatcacatcacgggatctgttaccccat

SEQ ID NO: 719743 - DNA, 33 bp, Homo sapien
actgttcatggtagaaaattcaaattgcatgaa

SEQ ID NO: 719744 - DNA, 33 bp, Homo sapien
actgttcatggtagaagattcaaattgcatgaa

SEQ ID NO: 719745 - DNA, 33 bp, Homo sapien
cgagagagaattaatgaaggtgagagttttctc

SEQ ID NO: 719746 - DNA, 33 bp, Homo sapien
cgagagagaattaatgcaggtgagagttttctc

SEQ ID NO: 719747 - DNA, 33 bp, Homo sapien
ccaaaactactcatcacgtcaagcagaaatcat

SEQ ID NO: 719748 - DNA, 33 bp, Homo sapien
ccaaaactactcatcatgtcaagcagaaatcat

SEQ ID NO: 719749 - DNA, 33 bp, Homo sapien
acacattgttagctccaagaaacataatttttc

SEQ ID NO: 719750 - DNA, 33 bp, Homo sapien
acacattgttagctcccagaaacataatttttc

SEQ ID NO: 719751 - DNA, 33 bp, Homo sapien
aaactgaatcttactaagaggttcttcaatgaa

SEQ ID NO: 719752 - DNA, 33 bp, Homo sapien
aaactgaatcttactatgaggttcttcaatgaa

SEQ ID NO: 719753 - DNA, 33 bp, Homo sapien
cctagagtatacacaactgtaggtaagccctaa

SEQ ID NO: 719754 - DNA, 33 bp, Homo sapien
cctagagtatacacaattgtaggtaagccctaa

SEQ ID NO: 719755 - DNA, 33 bp, Homo sapien
ttgtcaaaatacatcaccacaaaacaaatttta

SEQ ID NO: 719756 - DNA, 33 bp, Homo sapien
ttgtcaaaatacatcatcacaaaacaaatttta

SEQ ID NO: 719757 - DNA, 33 bp, Homo sapien
ggtaatataagaacaccgagaaaagtaggaaag

SEQ ID NO: 719758 - DNA, 33 bp, Homo sapien
ggtaatataagaacactgagaaaagtaggaaag

SEQ ID NO: 719759 - DNA, 33 bp, Homo sapien
aatccttcatgatttaccttgggaaacaaggct

SEQ ID NO: 719760 - DNA, 33 bp, Homo sapien
aatccttcatgatttatcttgggaaacaaggct

SEQ ID NO: 719761 - DNA, 33 bp, Homo sapien
caaggattaaggtctgccactttttgttcaact

SEQ ID NO: 719762 - DNA, 33 bp, Homo sapien
caaggattaaggtctgtcactttttgttcaact

SEQ ID NO: 719763 - DNA, 33 bp, Homo sapien
aaatggaaatagctaaaaatccacattgctgag

SEQ ID NO: 719764 - DNA, 33 bp, Homo sapien
aaatggaaatagctaacaatccacattgctgag

SEQ ID NO: 719765 - DNA, 33 bp, Homo sapien
aaacagctcaggccaacgttaaacctgctttgg

SEQ ID NO: 719766 - DNA, 33 bp, Homo sapien
aaacagctcaggccaatgttaaacctgctttgg

SEQ ID NO: 719767 - DNA, 33 bp, Homo sapien
aaactacctatgaaacaatcttcatacaaccac

SEQ ID NO: 719768 - DNA, 33 bp, Homo sapien
aaactacctatgaaacgatcttcatacaaccac

SEQ ID NO: 719769 - DNA, 33 bp, Homo sapien
ttagtttgagttgtgtgaaacacttggcacaag

SEQ ID NO: 719770 - DNA, 33 bp, Homo sapien
ttagtttgagttgtgttaaacacttggcacaag

SEQ ID NO: 719771 - DNA, 33 bp, Homo sapien
aagccttttgggcttaggctgaattctggagat

SEQ ID NO: 719772 - DNA, 33 bp, Homo sapien
aagccttttgggcttatgctgaattctggagat

SEQ ID NO: 719773 - DNA, 33 bp, Homo sapien
gttacttatttctccacgtgcctacctctcttg

SEQ ID NO: 719774 - DNA, 33 bp, Homo sapien
gttacttatttctccatgtgcctacctctcttg

SEQ ID NO: 719775 - DNA, 33 bp, Homo sapien
agatagtttgcaattaaggtaacatgacagctg

SEQ ID NO: 719776 - DNA, 33 bp, Homo sapien
agatagtttgcaattacggtaacatgacagctg

SEQ ID NO: 719777 - DNA, 33 bp, Homo sapien
ttgctccaagttctgacctgaagtttccaggct

SEQ ID NO: 719778 - DNA, 33 bp, Homo sapien
ttgctccaagttctgatctgaagtttccaggct

SEQ ID NO: 719779 - DNA, 33 bp, Homo sapien
tatgatttctgaacaggaagactcaacattgcc

SEQ ID NO: 719780 - DNA, 33 bp, Homo sapien
tatgatttctgaacagtaagactcaacattgcc

SEQ ID NO: 719781 - DNA, 33 bp, Homo sapien
gaatgatagcattttaaattgttaactgtggtt

SEQ ID NO: 719782 - DNA, 33 bp, Homo sapien
gaatgatagcattttagattgttaactgtggtt

SEQ ID NO: 719783 - DNA, 33 bp, Homo sapien
tcactgtcacaagaacagtatggaaaagacctg

SEQ ID NO: 719784 - DNA, 33 bp, Homo sapien
tcactgtcacaagaacggtatggaaaagacctg

SEQ ID NO: 719785 - DNA, 33 bp, Homo sapien
cgatttatcacaatccagaatagttccaggtac

SEQ ID NO: 719786 - DNA, 33 bp, Homo sapien
cgatttatcacaatccggaatagttccaggtac

SEQ ID NO: 719787 - DNA, 33 bp, Homo sapien
ttaatttagagtagaaaagttagtgagatttgt

SEQ ID NO: 719788 - DNA, 33 bp, Homo sapien
ttaatttagagtagaagagttagtgagatttgt

SEQ ID NO: 719789 - DNA, 33 bp, Homo sapien
tgtcatggtaatcttacgaattaagtaatcatg

SEQ ID NO: 719790 - DNA, 33 bp, Homo sapien
tgtcatggtaatcttatgaattaagtaatcatg

SEQ ID NO: 719791 - DNA, 33 bp, Homo sapien
ttgctgggaataaataaaaggtagcaatgcatg

SEQ ID NO: 719792 - DNA, 33 bp, Homo sapien
ttgctgggaataaatacaaggtagcaatgcatg

SEQ ID NO: 719793 - DNA, 33 bp, Homo sapien
atggggatacattctaagaaacgtcttgttagg

SEQ ID NO: 719794 - DNA, 33 bp, Homo sapien
atggggatacattctacgaaacgtcttgttagg

SEQ ID NO: 719795 - DNA, 33 bp, Homo sapien
taaggtagggtttaaacgcatatatgtttgtag

SEQ ID NO: 719796 - DNA, 33 bp, Homo sapien
taaggtagggtttaaatgcatatatgtttgtag

SEQ ID NO: 719797 - DNA, 33 bp, Homo sapien
acaatttctaagtgacaatttttgtgtgtgttt

SEQ ID NO: 719798 - DNA, 33 bp, Homo sapien
acaatttctaagtgactatttttgtgtgtgttt

SEQ ID NO: 719799 - DNA, 33 bp, Homo sapien
taagttttcacattaagaccgtgtttccttcca

SEQ ID NO: 719800 - DNA, 33 bp, Homo sapien
taagttttcacattaataccgtgtttccttcca

SEQ ID NO: 719801 - DNA, 33 bp, Homo sapien
cacagaaattattgcactagcttataagtaact

SEQ ID NO: 719802 - DNA, 33 bp, Homo sapien
cacagaaattattgcattagcttataagtaact

SEQ ID NO: 719803 - DNA, 33 bp, Homo sapien
ctgtatttttcccaacgatttttcagctctgat

SEQ ID NO: 719804 - DNA, 33 bp, Homo sapien
ctgtatttttcccaactatttttcagctctgat

SEQ ID NO: 719805 - DNA, 33 bp, Homo sapien
aactagtaccagccgcggaaaaaacatgccaaa

SEQ ID NO: 719806 - DNA, 33 bp, Homo sapien
aactagtaccagccgctgaaaaaacatgccaaa

SEQ ID NO: 719807 - DNA, 33 bp, Homo sapien
attctatgtagaacccaagacttgtcaatcaac

SEQ ID NO: 719808 - DNA, 33 bp, Homo sapien
attctatgtagaacccgagacttgtcaatcaac

SEQ ID NO: 719809 - DNA, 33 bp, Homo sapien
agttaagattactttcgctttctccactgtcgc

SEQ ID NO: 719810 - DNA, 33 bp, Homo sapien
agttaagattactttctctttctccactgtcgc

SEQ ID NO: 719811 - DNA, 33 bp, Homo sapien
tatgctagtttgtggacaattcttctaatcatt

SEQ ID NO: 719812 - DNA, 33 bp, Homo sapien
tatgctagtttgtggataattcttctaatcatt

SEQ ID NO: 719813 - DNA, 33 bp, Homo sapien
cccagagagaactgaacgtttttttcctgagtg

SEQ ID NO: 719814 - DNA, 33 bp, Homo sapien
cccagagagaactgaaggtttttttcctgagtg

SEQ ID NO: 719815 - DNA, 33 bp, Homo sapien
gaaagagaaaatagaactggaagctgcaggcta

SEQ ID NO: 719816 - DNA, 33 bp, Homo sapien
gaaagagaaaatagaagtggaagctgcaggcta

SEQ ID NO: 719817 - DNA, 33 bp, Homo sapien
gtttgagatggttcatcacttagggatagacaa

SEQ ID NO: 719818 - DNA, 33 bp, Homo sapien
gtttgagatggttcattacttagggatagacaa

SEQ ID NO: 719819 - DNA, 33 bp, Homo sapien
tttactgtacaaacaaacactttacacctgcaa

SEQ ID NO: 719820 - DNA, 33 bp, Homo sapien
tttactgtacaaacaatcactttacacctgcaa

SEQ ID NO: 719821 - DNA, 33 bp, Homo sapien
caacaaacagcatgataaaagcaacagtacctc

SEQ ID NO: 719822 - DNA, 33 bp, Homo sapien
caacaaacagcatgatgaaagcaacagtacctc

SEQ ID NO: 719823 - DNA, 33 bp, Homo sapien
aggatagacactggaacggtaacctaatgctga

SEQ ID NO: 719824 - DNA, 33 bp, Homo sapien
aggatagacactggaatggtaacctaatgctga

SEQ ID NO: 719825 - DNA, 33 bp, Homo sapien
catgtgatgagggctaagccagggcaagcagag

SEQ ID NO: 719826 - DNA, 33 bp, Homo sapien
catgtgatgagggctacgccagggcaagcagag

SEQ ID NO: 719827 - DNA, 33 bp, Homo sapien
tttttagtcacaacgtcaatgagtggaagcaga

SEQ ID NO: 719828 - DNA, 33 bp, Homo sapien
tttttagtcacaacgttaatgagtggaagcaga

SEQ ID NO: 719829 - DNA, 33 bp, Homo sapien
acatatgctcaggacgcatagtgaagaaactga

SEQ ID NO: 719830 - DNA, 33 bp, Homo sapien
acatatgctcaggacgtatagtgaagaaactga

SEQ ID NO: 719831 - DNA, 33 bp, Homo sapien
aaaaagaaacagaaagcaatggacttaatctgt

SEQ ID NO: 719832 - DNA, 33 bp, Homo sapien
aaaaagaaacagaaaggaatggacttaatctgt

SEQ ID NO: 719833 - DNA, 33 bp, Homo sapien
aaatttgtcacaggaaaagatggtcaacaatga

SEQ ID NO: 719834 - DNA, 33 bp, Homo sapien
aaatttgtcacaggaagagatggtcaacaatga

SEQ ID NO: 719835 - DNA, 33 bp, Homo sapien
acatttttcttatctcccaatgagtcaataaaa

SEQ ID NO: 719836 - DNA, 33 bp, Homo sapien
acatttttcttatctctcaatgagtcaataaaa

SEQ ID NO: 719837 - DNA, 33 bp, Homo sapien
aaggaaacactaaaaacaggaaaatatgtgtaa

SEQ ID NO: 719838 - DNA, 33 bp, Homo sapien
aaggaaacactaaaaagaggaaaatatgtgtaa

SEQ ID NO: 719839 - DNA, 33 bp, Homo sapien
tttccactttctgtcaaagataggggaaaatgg

SEQ ID NO: 719840 - DNA, 33 bp, Homo sapien
tttccactttctgtcagagataggggaaaatgg

SEQ ID NO: 719841 - DNA, 33 bp, Homo sapien
tttatccctgcacataaggcaatcaattttgcc

SEQ ID NO: 719842 - DNA, 33 bp, Homo sapien
tttatccctgcacatatggcaatcaattttgcc

SEQ ID NO: 719843 - DNA, 33 bp, Homo sapien
catatcttggaagtacacgtcattttgcatact

SEQ ID NO: 719844 - DNA, 33 bp, Homo sapien
catatcttggaagtacgcgtcattttgcatact

SEQ ID NO: 719845 - DNA, 33 bp, Homo sapien
actctagcataagataacttggtttaaatgggc

SEQ ID NO: 719846 - DNA, 33 bp, Homo sapien
actctagcataagatagcttggtttaaatgggc

SEQ ID NO: 719847 - DNA, 33 bp, Homo sapien
ggctacctggccttgaatatgatgaattcctta

SEQ ID NO: 719848 - DNA, 33 bp, Homo sapien
ggctacctggccttgagtatgatgaattcctta

SEQ ID NO: 719849 - DNA, 33 bp, Homo sapien
tggtaagtttaattgaaaaaacaggatattcca

SEQ ID NO: 719850 - DNA, 33 bp, Homo sapien
tggtaagtttaattgagaaaacaggatattcca

SEQ ID NO: 719851 - DNA, 33 bp, Homo sapien
cagtcactgctgcaagccaccaaagaaatgtca

SEQ ID NO: 719852 - DNA, 33 bp, Homo sapien
cagtcactgctgcaagtcaccaaagaaatgtca

SEQ ID NO: 719853 - DNA, 33 bp, Homo sapien
attccttgttgcaatgaacgcagtaccttcaag

SEQ ID NO: 719854 - DNA, 33 bp, Homo sapien
attccttgttgcaatgcacgcagtaccttcaag

SEQ ID NO: 719855 - DNA, 33 bp, Homo sapien
aaccctattttgtctactaagtcgcagcaacct

SEQ ID NO: 719856 - DNA, 33 bp, Homo sapien
aaccctattttgtctattaagtcgcagcaacct

SEQ ID NO: 719857 - DNA, 33 bp, Homo sapien
ttttgtttatgtgacacccaaattcatgcactt

SEQ ID NO: 719858 - DNA, 33 bp, Homo sapien
ttttgtttatgtgacatccaaattcatgcactt

SEQ ID NO: 719859 - DNA, 33 bp, Homo sapien
aagcataagtagctacaaagtatttataggcaa

SEQ ID NO: 719860 - DNA, 33 bp, Homo sapien
aagcataagtagctacgaagtatttataggcaa

SEQ ID NO: 719861 - DNA, 33 bp, Homo sapien
tatgagatgtaagaaaatatgagaaagtaaggg

SEQ ID NO: 719862 - DNA, 33 bp, Homo sapien
tatgagatgtaagaaagtatgagaaagtaaggg

SEQ ID NO: 719863 - DNA, 33 bp, Homo sapien
ccctgcagtcattagacaaatgctttgtacatg

SEQ ID NO: 719864 - DNA, 33 bp, Homo sapien
ccctgcagtcattagataaatgctttgtacatg

SEQ ID NO: 719865 - DNA, 33 bp, Homo sapien
ctaggaccagtcttaacactctcattttaactt

SEQ ID NO: 719866 - DNA, 33 bp, Homo sapien
ctaggaccagtcttaatactctcattttaactt

SEQ ID NO: 719867 - DNA, 33 bp, Homo sapien
accttctggacctccaaaattaacatccttctc

SEQ ID NO: 719868 - DNA, 33 bp, Homo sapien
accttctggacctccacaattaacatccttctc

SEQ ID NO: 719869 - DNA, 33 bp, Homo sapien
cccaaaagtctcaaacaattccaacatcaatgc

SEQ ID NO: 719870 - DNA, 33 bp, Homo sapien
cccaaaagtctcaaaccattccaacatcaatgc

SEQ ID NO: 719871 - DNA, 33 bp, Homo sapien
gatcacccaattcataggtatttgaggatgtaa

SEQ ID NO: 719872 - DNA, 33 bp, Homo sapien
gatcacccaattcatatgtatttgaggatgtaa

SEQ ID NO: 719873 - DNA, 33 bp, Homo sapien
tcaaagctattaaaaacgtgcatttgagaacac

SEQ ID NO: 719874 - DNA, 33 bp, Homo sapien
tcaaagctattaaaaatgtgcatttgagaacac

SEQ ID NO: 719875 - DNA, 33 bp, Homo sapien
tggtcaacttggttagaattagatggaatgatc

SEQ ID NO: 719876 - DNA, 33 bp, Homo sapien
tggtcaacttggttaggattagatggaatgatc

SEQ ID NO: 719877 - DNA, 33 bp, Homo sapien
tcgatgcacataaaaagctataaattctcaagg

SEQ ID NO: 719878 - DNA, 33 bp, Homo sapien
tcgatgcacataaaaatctataaattctcaagg

SEQ ID NO: 719879 - DNA, 33 bp, Homo sapien
cgacaacttgggtatcactagcccctgtacacc

SEQ ID NO: 719880 - DNA, 33 bp, Homo sapien
cgacaacttgggtatcgctagcccctgtacacc

SEQ ID NO: 719881 - DNA, 33 bp, Homo sapien
gaaataattacaatccactacaaaacacttata

SEQ ID NO: 719882 - DNA, 33 bp, Homo sapien
gaaataattacaatcctctacaaaacacttata

SEQ ID NO: 719883 - DNA, 33 bp, Homo sapien
atagagattagtgccacgatcaaggacttggaa

SEQ ID NO: 719884 - DNA, 33 bp, Homo sapien
atagagattagtgccatgatcaaggacttggaa

SEQ ID NO: 719885 - DNA, 33 bp, Homo sapien
accaaccacaagacataagattgggaaatggcg

SEQ ID NO: 719886 - DNA, 33 bp, Homo sapien
accaaccacaagacatgagattgggaaatggcg

SEQ ID NO: 719887 - DNA, 33 bp, Homo sapien
catttgccagtatctgaataagtgacccagtga

SEQ ID NO: 719888 - DNA, 33 bp, Homo sapien
catttgccagtatctgcataagtgacccagtga

SEQ ID NO: 719889 - DNA, 33 bp, Homo sapien
acaagtgcacagaaagaagggaaaagcatttct

SEQ ID NO: 719890 - DNA, 33 bp, Homo sapien
acaagtgcacagaaagtagggaaaagcatttct

SEQ ID NO: 719891 - DNA, 33 bp, Homo sapien
tgtgccatctctgtaccaagggctttgtttaga

SEQ ID NO: 719892 - DNA, 33 bp, Homo sapien
tgtgccatctctgtactaagggctttgtttaga

SEQ ID NO: 719893 - DNA, 33 bp, Homo sapien
gtgtgactttaccaacacaatcctcctggagat

SEQ ID NO: 719894 - DNA, 33 bp, Homo sapien
gtgtgactttaccaacgcaatcctcctggagat

SEQ ID NO: 719895 - DNA, 33 bp, Homo sapien
tagagttccagcaataaccaatagccaagggtc

SEQ ID NO: 719896 - DNA, 33 bp, Homo sapien
tagagttccagcaatacccaatagccaagggtc

SEQ ID NO: 719897 - DNA, 33 bp, Homo sapien
tgtttctccatctgcaacttacgaagatgtttc

SEQ ID NO: 719898 - DNA, 33 bp, Homo sapien
tgtttctccatctgcagcttacgaagatgtttc

SEQ ID NO: 719899 - DNA, 33 bp, Homo sapien
aaggcattccattttggataggatagctaatgc

SEQ ID NO: 719900 - DNA, 33 bp, Homo sapien
aaggcattccattttgtataggatagctaatgc

SEQ ID NO: 719901 - DNA, 33 bp, Homo sapien
atttatagatggggaaaattacttgatgcagga

SEQ ID NO: 719902 - DNA, 33 bp, Homo sapien
atttatagatggggaagattacttgatgcagga

SEQ ID NO: 719903 - DNA, 33 bp, Homo sapien
gtgtgtgatcttgggtaaaacattcaatgtctt

SEQ ID NO: 719904 - DNA, 33 bp, Homo sapien
gtgtgtgatcttgggtgaaacattcaatgtctt

SEQ ID NO: 719905 - DNA, 33 bp, Homo sapien
gcctcggctcaaattcaaatgttgaaatctaat

SEQ ID NO: 719906 - DNA, 33 bp, Homo sapien
gcctcggctcaaattcgaatgttgaaatctaat

SEQ ID NO: 719907 - DNA, 33 bp, Homo sapien
gctcattaggtgatcaagtaagttatagctatg

SEQ ID NO: 719908 - DNA, 33 bp, Homo sapien
gctcattaggtgatcaggtaagttatagctatg

SEQ ID NO: 719909 - DNA, 33 bp, Homo sapien
agaaatcagttaattgaaatttgcttaatgctt

SEQ ID NO: 719910 - DNA, 33 bp, Homo sapien
agaaatcagttaattggaatttgcttaatgctt

SEQ ID NO: 719911 - DNA, 33 bp, Homo sapien
gactacattcagaaccaaatctactaggacatt

SEQ ID NO: 719912 - DNA, 33 bp, Homo sapien
gactacattcagaacccaatctactaggacatt

SEQ ID NO: 719913 - DNA, 33 bp, Homo sapien
taggaaacacattacaagtatatgcattctgaa

SEQ ID NO: 719914 - DNA, 33 bp, Homo sapien
taggaaacacattacaggtatatgcattctgaa

SEQ ID NO: 719915 - DNA, 33 bp, Homo sapien
gtttcttttatgccacacaattgtatgtctctc

SEQ ID NO: 719916 - DNA, 33 bp, Homo sapien
gtttcttttatgccacgcaattgtatgtctctc

SEQ ID NO: 719917 - DNA, 33 bp, Homo sapien
agtggattgtgaataactaagaacgtgttataa

SEQ ID NO: 719918 - DNA, 33 bp, Homo sapien
agtggattgtgaataattaagaacgtgttataa

SEQ ID NO: 719919 - DNA, 33 bp, Homo sapien
tttttttaaggtacaaatgatatgctaagaaaa

SEQ ID NO: 719920 - DNA, 33 bp, Homo sapien
tttttttaaggtacaagtgatatgctaagaaaa

SEQ ID NO: 719921 - DNA, 33 bp, Homo sapien
aaaacaaagtgaagaactgacactacccaaatt

SEQ ID NO: 719922 - DNA, 33 bp, Homo sapien
aaaacaaagtgaagaagtgacactacccaaatt

SEQ ID NO: 719923 - DNA, 33 bp, Homo sapien
taagttggccagtgtaagtatgctggtttctca

SEQ ID NO: 719924 - DNA, 33 bp, Homo sapien
taagttggccagtgtaggtatgctggtttctca

SEQ ID NO: 719925 - DNA, 33 bp, Homo sapien
gggtgagcttacattcccctactaccactgcag

SEQ ID NO: 719926 - DNA, 33 bp, Homo sapien
gggtgagcttacattctcctactaccactgcag

SEQ ID NO: 719927 - DNA, 33 bp, Homo sapien
aaaaatatgaaaccagcctaaatgcttaccaac

SEQ ID NO: 719928 - DNA, 33 bp, Homo sapien
aaaaatatgaaaccagtctaaatgcttaccaac

SEQ ID NO: 719929 - DNA, 33 bp, Homo sapien
cactcacctagatcaccattctgagctgcatca

SEQ ID NO: 719930 - DNA, 33 bp, Homo sapien
cactcacctagatcactattctgagctgcatca

SEQ ID NO: 719931 - DNA, 33 bp, Homo sapien
ctctgcctatcgtataaaggactttgctcagtt

SEQ ID NO: 719932 - DNA, 33 bp, Homo sapien
ctctgcctatcgtatataggactttgctcagtt

SEQ ID NO: 719933 - DNA, 33 bp, Homo sapien
ttatttgcaaaggtaactccatgcaaacaagat

SEQ ID NO: 719934 - DNA, 33 bp, Homo sapien
ttatttgcaaaggtaattccatgcaaacaagat

SEQ ID NO: 719935 - DNA, 33 bp, Homo sapien
cagcaaaggagcttgtaaagaattcagaagcat

SEQ ID NO: 719936 - DNA, 33 bp, Homo sapien
cagcaaaggagcttgttaagaattcagaagcat

SEQ ID NO: 719937 - DNA, 33 bp, Homo sapien
ctgatggcctatcagtcaagctcctggcagggt

SEQ ID NO: 719938 - DNA, 33 bp, Homo sapien
ctgatggcctatcagttaagctcctggcagggt

SEQ ID NO: 719939 - DNA, 33 bp, Homo sapien
tcacagttacaagaaaagaccactggggcaaag

SEQ ID NO: 719940 - DNA, 33 bp, Homo sapien
tcacagttacaagaaaggaccactggggcaaag

SEQ ID NO: 719941 - DNA, 33 bp, Homo sapien
cagtaacaaaagtttacgtcatgctcttattac

SEQ ID NO: 719942 - DNA, 33 bp, Homo sapien
cagtaacaaaagtttatgtcatgctcttattac

SEQ ID NO: 719943 - DNA, 33 bp, Homo sapien
acaaagttaagtgagaaatcatctagccgaact

SEQ ID NO: 719944 - DNA, 33 bp, Homo sapien
acaaagttaagtgagagatcatctagccgaact

SEQ ID NO: 719945 - DNA, 33 bp, Homo sapien
ttctctaaccatattacaatttctgtagagtat

SEQ ID NO: 719946 - DNA, 33 bp, Homo sapien
ttctctaaccatattataatttctgtagagtat

SEQ ID NO: 719947 - DNA, 33 bp, Homo sapien
tcctactccagatcacagcaatctctttctttc

SEQ ID NO: 719948 - DNA, 33 bp, Homo sapien
tcctactccagatcactgcaatctctttctttc

SEQ ID NO: 719949 - DNA, 33 bp, Homo sapien
aaaccatagtgagccaaaagaataaagcactgg

SEQ ID NO: 719950 - DNA, 33 bp, Homo sapien
aaaccatagtgagccacaagaataaagcactgg

SEQ ID NO: 719951 - DNA, 33 bp, Homo sapien
gccacctgccaagttacgcagaatgggaaacac

SEQ ID NO: 719952 - DNA, 33 bp, Homo sapien
gccacctgccaagttatgcagaatgggaaacac

SEQ ID NO: 719953 - DNA, 33 bp, Homo sapien
tatgaggcaagcagtcaatatggcttgtgtaat

SEQ ID NO: 719954 - DNA, 33 bp, Homo sapien
tatgaggcaagcagtcgatatggcttgtgtaat

SEQ ID NO: 719955 - DNA, 33 bp, Homo sapien
agagctatcataaccaactattgaaaggggcct

SEQ ID NO: 719956 - DNA, 33 bp, Homo sapien
agagctatcataaccagctattgaaaggggcct

SEQ ID NO: 719957 - DNA, 33 bp, Homo sapien
agggtgaaaggagtacagactaagaaaagcagg

SEQ ID NO: 719958 - DNA, 33 bp, Homo sapien
agggtgaaaggagtacggactaagaaaagcagg

SEQ ID NO: 719959 - DNA, 33 bp, Homo sapien
gcaatgtgacataggacaggaccatgtgaaaag

SEQ ID NO: 719960 - DNA, 33 bp, Homo sapien
gcaatgtgacataggagaggaccatgtgaaaag

SEQ ID NO: 719961 - DNA, 33 bp, Homo sapien
gggagggatactaaatgaggtggtaggccagtg

SEQ ID NO: 719962 - DNA, 33 bp, Homo sapien
gggagggatactaaattaggtggtaggccagtg

SEQ ID NO: 719963 - DNA, 33 bp, Homo sapien
atagaaacaataatcaaaggcaaaatttcctgt

SEQ ID NO: 719964 - DNA, 33 bp, Homo sapien
atagaaacaataatcagaggcaaaatttcctgt

SEQ ID NO: 719965 - DNA, 33 bp, Homo sapien
ctttgactcactgacacagtttgagccctcttg

SEQ ID NO: 719966 - DNA, 33 bp, Homo sapien
ctttgactcactgacatagtttgagccctcttg

SEQ ID NO: 719967 - DNA, 33 bp, Homo sapien
ctgctccaaaccaatagacagtcatgaaatggg

SEQ ID NO: 719968 - DNA, 33 bp, Homo sapien
ctgctccaaaccaatatacagtcatgaaatggg

SEQ ID NO: 719969 - DNA, 33 bp, Homo sapien
tgctaattagcgaccacaggtacaaaaacatat

SEQ ID NO: 719970 - DNA, 33 bp, Homo sapien
tgctaattagcgaccataggtacaaaaacatat

SEQ ID NO: 719971 - DNA, 33 bp, Homo sapien
tgcataatgttaggcacagaacagttacccaat

SEQ ID NO: 719972 - DNA, 33 bp, Homo sapien
tgcataatgttaggcatagaacagttacccaat

SEQ ID NO: 719973 - DNA, 33 bp, Homo sapien
gcaagacccaatcatacgctgcctgtaggaaat

SEQ ID NO: 719974 - DNA, 33 bp, Homo sapien
gcaagacccaatcatatgctgcctgtaggaaat

SEQ ID NO: 719975 - DNA, 33 bp, Homo sapien
aagcaggaaaatacaactcatgttgaggggaaa

SEQ ID NO: 719976 - DNA, 33 bp, Homo sapien
aagcaggaaaatacaattcatgttgaggggaaa

SEQ ID NO: 719977 - DNA, 33 bp, Homo sapien
agaaggctggcttctaagaattcctttgccctc

SEQ ID NO: 719978 - DNA, 33 bp, Homo sapien
agaaggctggcttctatgaattcctttgccctc

SEQ ID NO: 719979 - DNA, 33 bp, Homo sapien
ctcttcagagtattgacacaacacaaggcacca

SEQ ID NO: 719980 - DNA, 33 bp, Homo sapien
ctcttcagagtattgatacaacacaaggcacca

SEQ ID NO: 719981 - DNA, 33 bp, Homo sapien
gaaggctctcactagacgtagcccctttacctt

SEQ ID NO: 719982 - DNA, 33 bp, Homo sapien
gaaggctctcactagatgtagcccctttacctt

SEQ ID NO: 719983 - DNA, 33 bp, Homo sapien
cctggaacaggattcaacctgtgaagtaaggca

SEQ ID NO: 719984 - DNA, 33 bp, Homo sapien
cctggaacaggattcagcctgtgaagtaaggca

SEQ ID NO: 719985 - DNA, 33 bp, Homo sapien
catcccccactggaagaaactttccatctgctg

SEQ ID NO: 719986 - DNA, 33 bp, Homo sapien
catcccccactggaaggaactttccatctgctg

SEQ ID NO: 719987 - DNA, 33 bp, Homo sapien
aagattatactgccttcaaggaacctgtcagac

SEQ ID NO: 719988 - DNA, 33 bp, Homo sapien
aagattatactgcctttaaggaacctgtcagac

SEQ ID NO: 719989 - DNA, 33 bp, Homo sapien
tctttgtctacagcacaagaaaaattattcttt

SEQ ID NO: 719990 - DNA, 33 bp, Homo sapien
tctttgtctacagcacgagaaaaattattcttt

SEQ ID NO: 719991 - DNA, 33 bp, Homo sapien
ggacatagttagactccacaaatgatggtgttg

SEQ ID NO: 719992 - DNA, 33 bp, Homo sapien
ggacatagttagactcgacaaatgatggtgttg

SEQ ID NO: 719993 - DNA, 33 bp, Homo sapien
gaaaaagctagctgaccaatctctgcaaataca

SEQ ID NO: 719994 - DNA, 33 bp, Homo sapien
gaaaaagctagctgactaatctctgcaaataca

SEQ ID NO: 719995 - DNA, 33 bp, Homo sapien
actaacttccttccccaaaattcagaaacaaca

SEQ ID NO: 719996 - DNA, 33 bp, Homo sapien
actaacttccttcccccaaattcagaaacaaca

SEQ ID NO: 719997 - DNA, 33 bp, Homo sapien
atatatgttcattgtcaagtatcagaaaatata

SEQ ID NO: 719998 - DNA, 33 bp, Homo sapien
atatatgttcattgtcgagtatcagaaaatata

SEQ ID NO: 719999 - DNA, 33 bp, Homo sapien
ggcaatttttaaagacacaacataatcaaatgg

SEQ ID NO: 720000 - DNA, 33 bp, Homo sapien
ggcaatttttaaagacgcaacataatcaaatgg

SEQ ID NO: 720001 - DNA, 33 bp, Homo sapien
taggatgtactcacaaagtttttccagtgtctg

SEQ ID NO: 720002 - DNA, 33 bp, Homo sapien
taggatgtactcacaaggtttttccagtgtctg

SEQ ID NO: 720003 - DNA, 33 bp, Homo sapien
aatgctttgaccctggaaagactgagaattaaa

SEQ ID NO: 720004 - DNA, 33 bp, Homo sapien
aatgctttgaccctgggaagactgagaattaaa

SEQ ID NO: 720005 - DNA, 33 bp, Homo sapien
ctttaagatacatgcaccatatgacattttagt

SEQ ID NO: 720006 - DNA, 33 bp, Homo sapien
ctttaagatacatgcatcatatgacattttagt

SEQ ID NO: 720007 - DNA, 33 bp, Homo sapien
ttacttagcaaagcgaataacttgatccaaatc

SEQ ID NO: 720008 - DNA, 33 bp, Homo sapien
ttacttagcaaagcgagtaacttgatccaaatc

SEQ ID NO: 720009 - DNA, 33 bp, Homo sapien
gattgagccgcgacagaagaagagcaggggggt

SEQ ID NO: 720010 - DNA, 33 bp, Homo sapien
gattgagccgcgacaggagaagagcaggggggt

SEQ ID NO: 720011 - DNA, 33 bp, Homo sapien
ggcagggctccacaacagttgcatcctgattga

SEQ ID NO: 720012 - DNA, 33 bp, Homo sapien
ggcagggctccacaactgttgcatcctgattga

SEQ ID NO: 720013 - DNA, 33 bp, Homo sapien
tcatttcttcggaggaatcataaggactaatct

SEQ ID NO: 720014 - DNA, 33 bp, Homo sapien
tcatttcttcggaggagtcataaggactaatct

SEQ ID NO: 720015 - DNA, 33 bp, Homo sapien
attgcattataaacaaagactaattatgaggaa

SEQ ID NO: 720016 - DNA, 33 bp, Homo sapien
attgcattataaacaaggactaattatgaggaa

SEQ ID NO: 720017 - DNA, 33 bp, Homo sapien
ggctatgtttttacaacgaacaaatgttttggg

SEQ ID NO: 720018 - DNA, 33 bp, Homo sapien
ggctatgtttttacaatgaacaaatgttttggg

SEQ ID NO: 720019 - DNA, 33 bp, Homo sapien
ccctaacttaccctgacatagcacacttcaagc

SEQ ID NO: 720020 - DNA, 33 bp, Homo sapien
ccctaacttaccctgatatagcacacttcaagc

SEQ ID NO: 720021 - DNA, 33 bp, Homo sapien
ttcccaagggtgtaagcatggttcaatacatga

SEQ ID NO: 720022 - DNA, 33 bp, Homo sapien
ttcccaagggtgtaaggatggttcaatacatga

SEQ ID NO: 720023 - DNA, 33 bp, Homo sapien
ccttgggaaagattccacttgatcacggtgaaa

SEQ ID NO: 720024 - DNA, 33 bp, Homo sapien
ccttgggaaagattccgcttgatcacggtgaaa

SEQ ID NO: 720025 - DNA, 33 bp, Homo sapien
tatcttaatcattctaagctattcactacacaa

SEQ ID NO: 720026 - DNA, 33 bp, Homo sapien
tatcttaatcattctaggctattcactacacaa

SEQ ID NO: 720027 - DNA, 33 bp, Homo sapien
caggattgaagctacgcacttttgattatggag

SEQ ID NO: 720028 - DNA, 33 bp, Homo sapien
caggattgaagctacgtacttttgattatggag

SEQ ID NO: 720029 - DNA, 33 bp, Homo sapien
gaaggtggctaattaacctcataacaaatgttt

SEQ ID NO: 720030 - DNA, 33 bp, Homo sapien
gaaggtggctaattaatctcataacaaatgttt

SEQ ID NO: 720031 - DNA, 33 bp, Homo sapien
attggcaggaatcagaccgtgaatacacttaca

SEQ ID NO: 720032 - DNA, 33 bp, Homo sapien
attggcaggaatcagatcgtgaatacacttaca

SEQ ID NO: 720033 - DNA, 33 bp, Homo sapien
gaactttgatttgcaaactgttggctagaagct

SEQ ID NO: 720034 - DNA, 33 bp, Homo sapien
gaactttgatttgcaagctgttggctagaagct

SEQ ID NO: 720035 - DNA, 33 bp, Homo sapien
ttctaaatatccatgcaattattcagtcttccg

SEQ ID NO: 720036 - DNA, 33 bp, Homo sapien
ttctaaatatccatgcgattattcagtcttccg

SEQ ID NO: 720037 - DNA, 33 bp, Homo sapien
agctgagaagaagaaccgaagaccaagacagag

SEQ ID NO: 720038 - DNA, 33 bp, Homo sapien
agctgagaagaagaactgaagaccaagacagag

SEQ ID NO: 720039 - DNA, 33 bp, Homo sapien
caaattcagtgcatccgactcttcccgataaat

SEQ ID NO: 720040 - DNA, 33 bp, Homo sapien
caaattcagtgcatcctactcttcccgataaat

SEQ ID NO: 720041 - DNA, 33 bp, Homo sapien
tggctcttttgatttcacctcttgctatttcta

SEQ ID NO: 720042 - DNA, 33 bp, Homo sapien
tggctcttttgatttctcctcttgctatttcta

SEQ ID NO: 720043 - DNA, 33 bp, Homo sapien
tttgattgtgtggatcaattaatatgccaacat

SEQ ID NO: 720044 - DNA, 33 bp, Homo sapien
tttgattgtgtggatccattaatatgccaacat

SEQ ID NO: 720045 - DNA, 33 bp, Homo sapien
gttcagctcctttacactgaattacacatcaat

SEQ ID NO: 720046 - DNA, 33 bp, Homo sapien
gttcagctcctttacattgaattacacatcaat

SEQ ID NO: 720047 - DNA, 33 bp, Homo sapien
tgctgtgatatttatacgccattggtaacagag

SEQ ID NO: 720048 - DNA, 33 bp, Homo sapien
tgctgtgatatttatatgccattggtaacagag

SEQ ID NO: 720049 - DNA, 33 bp, Homo sapien
cactcaaatgcccaataactgtcattatttggt

SEQ ID NO: 720050 - DNA, 33 bp, Homo sapien
cactcaaatgcccaattactgtcattatttggt

SEQ ID NO: 720051 - DNA, 33 bp, Homo sapien
ctttgcagtaggaccaaagcacctcacagccat

SEQ ID NO: 720052 - DNA, 33 bp, Homo sapien
ctttgcagtaggaccagagcacctcacagccat

SEQ ID NO: 720053 - DNA, 33 bp, Homo sapien
aaaggaattactagtgccaaacgctttttgcta

SEQ ID NO: 720054 - DNA, 33 bp, Homo sapien
aaaggaattactagtgtcaaacgctttttgcta

SEQ ID NO: 720055 - DNA, 33 bp, Homo sapien
gaattagtgtgactaacgttgtatcttactggt

SEQ ID NO: 720056 - DNA, 33 bp, Homo sapien
gaattagtgtgactaatgttgtatcttactggt

SEQ ID NO: 720057 - DNA, 33 bp, Homo sapien
cagatgacactactccaatttgatcagtgcaag

SEQ ID NO: 720058 - DNA, 33 bp, Homo sapien
cagatgacactactccgatttgatcagtgcaag

SEQ ID NO: 720059 - DNA, 33 bp, Homo sapien
aataaatgttcctataagtatcagagtaatgat

SEQ ID NO: 720060 - DNA, 33 bp, Homo sapien
aataaatgttcctatacgtatcagagtaatgat

SEQ ID NO: 720061 - DNA, 33 bp, Homo sapien
tgaagtgtaggaattacggggcatttaaaagtt

SEQ ID NO: 720062 - DNA, 33 bp, Homo sapien
tgaagtgtaggaattatggggcatttaaaagtt

SEQ ID NO: 720063 - DNA, 33 bp, Homo sapien
gtatttccgccaacataataataccgtctgcat

SEQ ID NO: 720064 - DNA, 33 bp, Homo sapien
gtatttccgccaacatgataataccgtctgcat

SEQ ID NO: 720065 - DNA, 33 bp, Homo sapien
tatgttacagatgtgacacagggtagattctgc

SEQ ID NO: 720066 - DNA, 33 bp, Homo sapien
tatgttacagatgtgatacagggtagattctgc

SEQ ID NO: 720067 - DNA, 33 bp, Homo sapien
tacctggtctaaaaaacagaatcaatggcagca

SEQ ID NO: 720068 - DNA, 33 bp, Homo sapien
tacctggtctaaaaaagagaatcaatggcagca

SEQ ID NO: 720069 - DNA, 33 bp, Homo sapien
aataaaatcagccacaatgaaaagtaaaaatat

SEQ ID NO: 720070 - DNA, 33 bp, Homo sapien
aataaaatcagccacagtgaaaagtaaaaatat

SEQ ID NO: 720071 - DNA, 33 bp, Homo sapien
tttcatcttattctgaatcacataggtaatgca

SEQ ID NO: 720072 - DNA, 33 bp, Homo sapien
tttcatcttattctgagtcacataggtaatgca

SEQ ID NO: 720073 - DNA, 33 bp, Homo sapien
gtgagagaacatgtatcaaactgctttgagaat

SEQ ID NO: 720074 - DNA, 33 bp, Homo sapien
gtgagagaacatgtattaaactgctttgagaat

SEQ ID NO: 720075 - DNA, 33 bp, Homo sapien
atatttggccagaacaatgattattcaaccatt

SEQ ID NO: 720076 - DNA, 33 bp, Homo sapien
atatttggccagaacattgattattcaaccatt

SEQ ID NO: 720077 - DNA, 33 bp, Homo sapien
tattttacttacaaacacttctgctagttattc

SEQ ID NO: 720078 - DNA, 33 bp, Homo sapien
tattttacttacaaacgcttctgctagttattc

SEQ ID NO: 720079 - DNA, 33 bp, Homo sapien
actctttctccttatcaaccaatcaaccagtca

SEQ ID NO: 720080 - DNA, 33 bp, Homo sapien
actctttctccttatcgaccaatcaaccagtca

SEQ ID NO: 720081 - DNA, 33 bp, Homo sapien
tacttcaacacatttcaagttaaaagatatttc

SEQ ID NO: 720082 - DNA, 33 bp, Homo sapien
tacttcaacacatttcgagttaaaagatatttc

SEQ ID NO: 720083 - DNA, 33 bp, Homo sapien
taagtacaaacctttacagtgactgcaatgatg

SEQ ID NO: 720084 - DNA, 33 bp, Homo sapien
taagtacaaacctttatagtgactgcaatgatg

SEQ ID NO: 720085 - DNA, 33 bp, Homo sapien
tcagattttgtcttgacattagcagatctaata

SEQ ID NO: 720086 - DNA, 33 bp, Homo sapien
tcagattttgtcttgatattagcagatctaata

SEQ ID NO: 720087 - DNA, 33 bp, Homo sapien
aattacatacagtttaaagtatcttgccctggg

SEQ ID NO: 720088 - DNA, 33 bp, Homo sapien
aattacatacagtttacagtatcttgccctggg

SEQ ID NO: 720089 - DNA, 33 bp, Homo sapien
tctttaaaaataccacaactttgacttgtgggc

SEQ ID NO: 720090 - DNA, 33 bp, Homo sapien
tctttaaaaataccactactttgacttgtgggc

SEQ ID NO: 720091 - DNA, 33 bp, Homo sapien
ttttaaagagatcacaaaagcatgtagcataga

SEQ ID NO: 720092 - DNA, 33 bp, Homo sapien
ttttaaagagatcacagaagcatgtagcataga

SEQ ID NO: 720093 - DNA, 33 bp, Homo sapien
gcagtatcccttacatcaaaaagagatacaaag

SEQ ID NO: 720094 - DNA, 33 bp, Homo sapien
gcagtatcccttacatgaaaaagagatacaaag

SEQ ID NO: 720095 - DNA, 33 bp, Homo sapien
ttgttttagacactggaaatagggcaatgaaaa

SEQ ID NO: 720096 - DNA, 33 bp, Homo sapien
ttgttttagacactgggaatagggcaatgaaaa

SEQ ID NO: 720097 - DNA, 33 bp, Homo sapien
acttgctagacatgtgaatagtatggcatagct

SEQ ID NO: 720098 - DNA, 33 bp, Homo sapien
acttgctagacatgtggatagtatggcatagct

SEQ ID NO: 720099 - DNA, 33 bp, Homo sapien
tttgctgctgactgagcatcttctctacgcact

SEQ ID NO: 720100 - DNA, 33 bp, Homo sapien
tttgctgctgactgagtatcttctctacgcact

SEQ ID NO: 720101 - DNA, 33 bp, Homo sapien
taatctgtttaataccaatttctgctaggatat

SEQ ID NO: 720102 - DNA, 33 bp, Homo sapien
taatctgtttaataccgatttctgctaggatat

SEQ ID NO: 720103 - DNA, 33 bp, Homo sapien
gaaaacatttcttctacacatggaagaataggc

SEQ ID NO: 720104 - DNA, 33 bp, Homo sapien
gaaaacatttcttctagacatggaagaataggc

SEQ ID NO: 720105 - DNA, 33 bp, Homo sapien
tgaggggcattagaagaatttcaagattgtttt

SEQ ID NO: 720106 - DNA, 33 bp, Homo sapien
tgaggggcattagaaggatttcaagattgtttt

SEQ ID NO: 720107 - DNA, 33 bp, Homo sapien
tgtttccaatcttatccatattccatcttctca

SEQ ID NO: 720108 - DNA, 33 bp, Homo sapien
tgtttccaatcttatcgatattccatcttctca

SEQ ID NO: 720109 - DNA, 33 bp, Homo sapien
ccactgcaggaaacagacaaaccagagagatta

SEQ ID NO: 720110 - DNA, 33 bp, Homo sapien
ccactgcaggaaacaggcaaaccagagagatta

SEQ ID NO: 720111 - DNA, 33 bp, Homo sapien
ttgtgaaagttgctacacttaatacaacaaaat

SEQ ID NO: 720112 - DNA, 33 bp, Homo sapien
ttgtgaaagttgctacgcttaatacaacaaaat

SEQ ID NO: 720113 - DNA, 33 bp, Homo sapien
gctttgagtcttacaaaaagttgctttcattga

SEQ ID NO: 720114 - DNA, 33 bp, Homo sapien
gctttgagtcttacaacaagttgctttcattga

SEQ ID NO: 720115 - DNA, 33 bp, Homo sapien
ttctgatattcttcaaaacaaactgttcaatag

SEQ ID NO: 720116 - DNA, 33 bp, Homo sapien
ttctgatattcttcaacacaaactgttcaatag

SEQ ID NO: 720117 - DNA, 33 bp, Homo sapien
ttcctcaccattaccagagtaaccatctagtct

SEQ ID NO: 720118 - DNA, 33 bp, Homo sapien
ttcctcaccattaccatagtaaccatctagtct

SEQ ID NO: 720119 - DNA, 33 bp, Homo sapien
agtgatcaaaggcaaacggccaaattttgttat

SEQ ID NO: 720120 - DNA, 33 bp, Homo sapien
agtgatcaaaggcaaagggccaaattttgttat

SEQ ID NO: 720121 - DNA, 33 bp, Homo sapien
ttgttatgctgttacaccttaaggatgaaaatg

SEQ ID NO: 720122 - DNA, 33 bp, Homo sapien
ttgttatgctgttacatcttaaggatgaaaatg

SEQ ID NO: 720123 - DNA, 33 bp, Homo sapien
ttttacacttaattgaagcaaagttcttccagt

SEQ ID NO: 720124 - DNA, 33 bp, Homo sapien
ttttacacttaattgatgcaaagttcttccagt

SEQ ID NO: 720125 - DNA, 33 bp, Homo sapien
gataaattataaatcaaatagtgattgtatggg

SEQ ID NO: 720126 - DNA, 33 bp, Homo sapien
gataaattataaatcagatagtgattgtatggg

SEQ ID NO: 720127 - DNA, 33 bp, Homo sapien
tatagagactccttcacgtagcaaaactttttt

SEQ ID NO: 720128 - DNA, 33 bp, Homo sapien
tatagagactccttcaggtagcaaaactttttt

SEQ ID NO: 720129 - DNA, 33 bp, Homo sapien
tgattcaagctacccaagatggaataaagttaa

SEQ ID NO: 720130 - DNA, 33 bp, Homo sapien
tgattcaagctacccatgatggaataaagttaa

SEQ ID NO: 720131 - DNA, 33 bp, Homo sapien
tatgctatggatgctacgtgttcataattttga

SEQ ID NO: 720132 - DNA, 33 bp, Homo sapien
tatgctatggatgctatgtgttcataattttga

SEQ ID NO: 720133 - DNA, 33 bp, Homo sapien
tgaaagagccatttcaatagaaaagatctggaa

SEQ ID NO: 720134 - DNA, 33 bp, Homo sapien
tgaaagagccatttcattagaaaagatctggaa

SEQ ID NO: 720135 - DNA, 33 bp, Homo sapien
agtggctccaaaacaagaatgactcaaaaccag

SEQ ID NO: 720136 - DNA, 33 bp, Homo sapien
agtggctccaaaacaataatgactcaaaaccag

SEQ ID NO: 720137 - DNA, 33 bp, Homo sapien
cagctcacctttatcaacctacaaactggaaga

SEQ ID NO: 720138 - DNA, 33 bp, Homo sapien
cagctcacctttatcaccctacaaactggaaga

SEQ ID NO: 720139 - DNA, 33 bp, Homo sapien
aattccaaacttaactaaatcatgtatagcaca

SEQ ID NO: 720140 - DNA, 33 bp, Homo sapien
aattccaaacttaactgaatcatgtatagcaca

SEQ ID NO: 720141 - DNA, 33 bp, Homo sapien
tcaccatatactgtacacttttaccattacttt

SEQ ID NO: 720142 - DNA, 33 bp, Homo sapien
tcaccatatactgtacgcttttaccattacttt

SEQ ID NO: 720143 - DNA, 33 bp, Homo sapien
atcatggaagatttcacggttgacgtataactt

SEQ ID NO: 720144 - DNA, 33 bp, Homo sapien
atcatggaagatttcatggttgacgtataactt

SEQ ID NO: 720145 - DNA, 33 bp, Homo sapien
tttcttccagctagctaaacgcagtgtacactt

SEQ ID NO: 720146 - DNA, 33 bp, Homo sapien
tttcttccagctagctgaacgcagtgtacactt

SEQ ID NO: 720147 - DNA, 33 bp, Homo sapien
catttctgaaggcaaaaagtaaaacaagatctc

SEQ ID NO: 720148 - DNA, 33 bp, Homo sapien
catttctgaaggcaaagagtaaaacaagatctc

SEQ ID NO: 720149 - DNA, 33 bp, Homo sapien
agtattaacttctttacacatttgcagcctggc

SEQ ID NO: 720150 - DNA, 33 bp, Homo sapien
agtattaacttctttatacatttgcagcctggc

SEQ ID NO: 720151 - DNA, 33 bp, Homo sapien
tattattttgtttaacactctcattaatgctgt

SEQ ID NO: 720152 - DNA, 33 bp, Homo sapien
tattattttgtttaacgctctcattaatgctgt

SEQ ID NO: 720153 - DNA, 33 bp, Homo sapien
aattatgaccatttaacagaccaatactgtcta

SEQ ID NO: 720154 - DNA, 33 bp, Homo sapien
aattatgaccatttaatagaccaatactgtcta

SEQ ID NO: 720155 - DNA, 33 bp, Homo sapien
aattatcaagttttggaaaacatgtagaatcct

SEQ ID NO: 720156 - DNA, 33 bp, Homo sapien
aattatcaagttttgggaaacatgtagaatcct

SEQ ID NO: 720157 - DNA, 33 bp, Homo sapien
ggagacagtcaccttcaagaaagccctttgccc

SEQ ID NO: 720158 - DNA, 33 bp, Homo sapien
ggagacagtcaccttcgagaaagccctttgccc

SEQ ID NO: 720159 - DNA, 33 bp, Homo sapien
acctcccctaccaaatgaatcagttaagtcaat

SEQ ID NO: 720160 - DNA, 33 bp, Homo sapien
acctcccctaccaaattaatcagttaagtcaat

SEQ ID NO: 720161 - DNA, 33 bp, Homo sapien
agagacagacaacccactacaagagtcaaatag

SEQ ID NO: 720162 - DNA, 33 bp, Homo sapien
agagacagacaacccagtacaagagtcaaatag

SEQ ID NO: 720163 - DNA, 33 bp, Homo sapien
gatgatgtttaagttgcaaccacatacctgtac

SEQ ID NO: 720164 - DNA, 33 bp, Homo sapien
gatgatgtttaagttgtaaccacatacctgtac

SEQ ID NO: 720165 - DNA, 33 bp, Homo sapien
tcctcttcctgacatcccaggtacaattggcca

SEQ ID NO: 720166 - DNA, 33 bp, Homo sapien
tcctcttcctgacatcgcaggtacaattggcca

SEQ ID NO: 720167 - DNA, 33 bp, Homo sapien
ccaataaagtatacaagaaaggtcctattcact

SEQ ID NO: 720168 - DNA, 33 bp, Homo sapien
ccaataaagtatacaataaaggtcctattcact

SEQ ID NO: 720169 - DNA, 33 bp, Homo sapien
gcatggagtagtccaaatccttgatgactttgt

SEQ ID NO: 720170 - DNA, 33 bp, Homo sapien
gcatggagtagtccaagtccttgatgactttgt

SEQ ID NO: 720171 - DNA, 33 bp, Homo sapien
tattatggaagtactgccaatttcatatcatct

SEQ ID NO: 720172 - DNA, 33 bp, Homo sapien
tattatggaagtactgtcaatttcatatcatct

SEQ ID NO: 720173 - DNA, 33 bp, Homo sapien
gcatgaaaatcactaccgctctggtctaaatgt

SEQ ID NO: 720174 - DNA, 33 bp, Homo sapien
gcatgaaaatcactactgctctggtctaaatgt

SEQ ID NO: 720175 - DNA, 33 bp, Homo sapien
aactattcttgtactaggatgaatgtttagggt

SEQ ID NO: 720176 - DNA, 33 bp, Homo sapien
aactattcttgtactatgatgaatgtttagggt

SEQ ID NO: 720177 - DNA, 33 bp, Homo sapien
tagagcgaatatcacaagaaagctagtcacaca

SEQ ID NO: 720178 - DNA, 33 bp, Homo sapien
tagagcgaatatcacaggaaagctagtcacaca

SEQ ID NO: 720179 - DNA, 33 bp, Homo sapien
ggcctcatcttgccctcaagttagtgttatggt

SEQ ID NO: 720180 - DNA, 33 bp, Homo sapien
ggcctcatcttgccctgaagttagtgttatggt

SEQ ID NO: 720181 - DNA, 33 bp, Homo sapien
ttgacactgaatttcccatgtcttgtatagcgc

SEQ ID NO: 720182 - DNA, 33 bp, Homo sapien
ttgacactgaatttccgatgtcttgtatagcgc

SEQ ID NO: 720183 - DNA, 33 bp, Homo sapien
gtgatcagtacacaaacgtctgatgagtcttga

SEQ ID NO: 720184 - DNA, 33 bp, Homo sapien
gtgatcagtacacaaatgtctgatgagtcttga

SEQ ID NO: 720185 - DNA, 33 bp, Homo sapien
tactgaatgaatggaaagtacgcgtatgctgga

SEQ ID NO: 720186 - DNA, 33 bp, Homo sapien
tactgaatgaatggaaggtacgcgtatgctgga

SEQ ID NO: 720187 - DNA, 33 bp, Homo sapien
aatgaaaagtcatttacaatggtacagtattga

SEQ ID NO: 720188 - DNA, 33 bp, Homo sapien
aatgaaaagtcatttataatggtacagtattga

SEQ ID NO: 720189 - DNA, 33 bp, Homo sapien
ctgcacatattcagtacacaagtagttatcttt

SEQ ID NO: 720190 - DNA, 33 bp, Homo sapien
ctgcacatattcagtatacaagtagttatcttt

SEQ ID NO: 720191 - DNA, 33 bp, Homo sapien
tagggagatcatgaaaagtcagattatgtaggg

SEQ ID NO: 720192 - DNA, 33 bp, Homo sapien
tagggagatcatgaaatgtcagattatgtaggg

SEQ ID NO: 720193 - DNA, 33 bp, Homo sapien
taagcaccagaatcagcaggtgaaaacttacag

SEQ ID NO: 720194 - DNA, 33 bp, Homo sapien
taagcaccagaatcagtaggtgaaaacttacag

SEQ ID NO: 720195 - DNA, 33 bp, Homo sapien
aaaaacagaactatgcacaaaacatatatcgat

SEQ ID NO: 720196 - DNA, 33 bp, Homo sapien
aaaaacagaactatgcgcaaaacatatatcgat

SEQ ID NO: 720197 - DNA, 33 bp, Homo sapien
tggttctggttttcaaagagtgcaggccgatgc

SEQ ID NO: 720198 - DNA, 33 bp, Homo sapien
tggttctggttttcaaggagtgcaggccgatgc

SEQ ID NO: 720199 - DNA, 33 bp, Homo sapien
tacagaaaaatgacaaaatatcacagcagaaaa

SEQ ID NO: 720200 - DNA, 33 bp, Homo sapien
tacagaaaaatgacaacatatcacagcagaaaa

SEQ ID NO: 720201 - DNA, 33 bp, Homo sapien
ggtgagacaggatagcaaaattgggtatctccc

SEQ ID NO: 720202 - DNA, 33 bp, Homo sapien
ggtgagacaggatagcgaaattgggtatctccc

SEQ ID NO: 720203 - DNA, 33 bp, Homo sapien
tcactgctgagaaatgcaaattactgctcaatt

SEQ ID NO: 720204 - DNA, 33 bp, Homo sapien
tcactgctgagaaatgtaaattactgctcaatt

SEQ ID NO: 720205 - DNA, 33 bp, Homo sapien
ctgatatcagttcacactcccttcaaataacaa

SEQ ID NO: 720206 - DNA, 33 bp, Homo sapien
ctgatatcagttcacattcccttcaaataacaa

SEQ ID NO: 720207 - DNA, 33 bp, Homo sapien
caggaataatgaggtacgtgaataagtggtggg

SEQ ID NO: 720208 - DNA, 33 bp, Homo sapien
caggaataatgaggtatgtgaataagtggtggg

SEQ ID NO: 720209 - DNA, 33 bp, Homo sapien
atatatggctattaaacatttgaaacgtggtag

SEQ ID NO: 720210 - DNA, 33 bp, Homo sapien
atatatggctattaaatatttgaaacgtggtag

SEQ ID NO: 720211 - DNA, 33 bp, Homo sapien
ttggtctgttcgggcccagtgtatgagctcact

SEQ ID NO: 720212 - DNA, 33 bp, Homo sapien
ttggtctgttcgggcctagtgtatgagctcact

SEQ ID NO: 720213 - DNA, 33 bp, Homo sapien
gtaattaaatttaataacatttgtaggacacta

SEQ ID NO: 720214 - DNA, 33 bp, Homo sapien
gtaattaaatttaatagcatttgtaggacacta

SEQ ID NO: 720215 - DNA, 33 bp, Homo sapien
atattttggttcttcaaatttctactcttacct

SEQ ID NO: 720216 - DNA, 33 bp, Homo sapien
atattttggttcttcagatttctactcttacct

SEQ ID NO: 720217 - DNA, 33 bp, Homo sapien
ctctgcactgagctaaagaggtaagagtagaaa

SEQ ID NO: 720218 - DNA, 33 bp, Homo sapien
ctctgcactgagctaaggaggtaagagtagaaa

SEQ ID NO: 720219 - DNA, 33 bp, Homo sapien
tatagtagcaatgaaaagagcatgattaaaaaa

SEQ ID NO: 720220 - DNA, 33 bp, Homo sapien
tatagtagcaatgaaacgagcatgattaaaaaa

SEQ ID NO: 720221 - DNA, 33 bp, Homo sapien
tactgccattttgacacggcatggaagtaagca

SEQ ID NO: 720222 - DNA, 33 bp, Homo sapien
tactgccattttgacagggcatggaagtaagca

SEQ ID NO: 720223 - DNA, 33 bp, Homo sapien; identical to SEQ ID NO: 720221

SEQ ID NO: 720224 - DNA, 33 bp, Homo sapien; identical to SEQ ID NO: 720222

SEQ ID NO: 720225 - DNA, 33 bp, Homo sapien
gagtggcagtgaccaacgtcatttctgagttga

SEQ ID NO: 720226 - DNA, 33 bp, Homo sapien
gagtggcagtgaccaatgtcatttctgagttga

SEQ ID NO: 720227 - DNA, 33 bp, Homo sapien
acataagctgaaaaaaataatacctcaggcttt

SEQ ID NO: 720228 - DNA, 33 bp, Homo sapien
acataagctgaaaaaactaatacctcaggcttt

SEQ ID NO: 720229 - DNA, 33 bp, Homo sapien
cacatctcatacaaaacaatagtggaagaagaa

SEQ ID NO: 720230 - DNA, 33 bp, Homo sapien
cacatctcatacaaaataatagtggaagaagaa

SEQ ID NO: 720231 - DNA, 33 bp, Homo sapien
cttggactatggcttacaaattaagttaggtgt

SEQ ID NO: 720232 - DNA, 33 bp, Homo sapien
cttggactatggcttataaattaagttaggtgt

SEQ ID NO: 720233 - DNA, 33 bp, Homo sapien
aagaagggtaaataaacgtcagtggtgatatgc

SEQ ID NO: 720234 - DNA, 33 bp, Homo sapien
aagaagggtaaataaaggtcagtggtgatatgc

SEQ ID NO: 720235 - DNA, 33 bp, Homo sapien
ataacatcagtgtttaggagtttacattcagaa

SEQ ID NO: 720236 - DNA, 33 bp, Homo sapien
ataacatcagtgtttatgagtttacattcagaa

SEQ ID NO: 720237 - DNA, 33 bp, Homo sapien
aggcatcagagtgcataagaccggaattggcaa

SEQ ID NO: 720238 - DNA, 33 bp, Homo sapien
aggcatcagagtgcatgagaccggaattggcaa

SEQ ID NO: 720239 - DNA, 33 bp, Homo sapien
ctcaaactgagaagccagaaaacccacttccat

SEQ ID NO: 720240 - DNA, 33 bp, Homo sapien
ctcaaactgagaagccggaaaacccacttccat

SEQ ID NO: 720241 - DNA, 33 bp, Homo sapien
gaacaaacatatccgaacaatctgtgtatatat

SEQ ID NO: 720242 - DNA, 33 bp, Homo sapien
gaacaaacatatccgagcaatctgtgtatatat

SEQ ID NO: 720243 - DNA, 33 bp, Homo sapien
gtgatattaaagcctacatgctccaagtagggg

SEQ ID NO: 720244 - DNA, 33 bp, Homo sapien
gtgatattaaagcctatatgctccaagtagggg

SEQ ID NO: 720245 - DNA, 33 bp, Homo sapien
agtctgccttgcatcaatctggttctgtctgaa

SEQ ID NO: 720246 - DNA, 33 bp, Homo sapien
agtctgccttgcatcagtctggttctgtctgaa

SEQ ID NO: 720247 - DNA, 33 bp, Homo sapien
atctttcttagtttgacgcccactgttttatct

SEQ ID NO: 720248 - DNA, 33 bp, Homo sapien
atctttcttagtttgatgcccactgttttatct

SEQ ID NO: 720249 - DNA, 33 bp, Homo sapien
aattccctgaattcaacgaggtaaacagaattt

SEQ ID NO: 720250 - DNA, 33 bp, Homo sapien
aattccctgaattcaatgaggtaaacagaattt

SEQ ID NO: 720251 - DNA, 33 bp, Homo sapien
tgcatttttgtgtgcccaagacatttgaaacgt

SEQ ID NO: 720252 - DNA, 33 bp, Homo sapien
tgcatttttgtgtgcctaagacatttgaaacgt

SEQ ID NO: 720253 - DNA, 33 bp, Homo sapien
aaactgtcattcctaaactgttagagaacagtg

SEQ ID NO: 720254 - DNA, 33 bp, Homo sapien
aaactgtcattcctaagctgttagagaacagtg

SEQ ID NO: 720255 - DNA, 33 bp, Homo sapien
cctcatggtgttgttccgaaagggcgagtttag

SEQ ID NO: 720256 - DNA, 33 bp, Homo sapien
cctcatggtgttgttctgaaagggcgagtttag

SEQ ID NO: 720257 - DNA, 33 bp, Homo sapien
gatacatgaaggtttgaattttcttaagtatct

SEQ ID NO: 720258 - DNA, 33 bp, Homo sapien
gatacatgaaggtttggattttcttaagtatct

SEQ ID NO: 720259 - DNA, 33 bp, Homo sapien
atctgacacctaaaaactgcaaagctttgaaac

SEQ ID NO: 720260 - DNA, 33 bp, Homo sapien
atctgacacctaaaaattgcaaagctttgaaac

SEQ ID NO: 720261 - DNA, 33 bp, Homo sapien
tgggctcttagagaaaattgctgtagtgaataa

SEQ ID NO: 720262 - DNA, 33 bp, Homo sapien
tgggctcttagagaaatttgctgtagtgaataa

SEQ ID NO: 720263 - DNA, 33 bp, Homo sapien
tttcattttgcaacaaaagaatccattcaaaaa

SEQ ID NO: 720264 - DNA, 33 bp, Homo sapien
tttcattttgcaacaagagaatccattcaaaaa

SEQ ID NO: 720265 - DNA, 33 bp, Homo sapien
ttaggattcttttccaatatgatctcagaacct

SEQ ID NO: 720266 - DNA, 33 bp, Homo sapien
ttaggattcttttccagtatgatctcagaacct

SEQ ID NO: 720267 - DNA, 33 bp, Homo sapien
tatccatgtaactaaaaaccacatcttccccag

SEQ ID NO: 720268 - DNA, 33 bp, Homo sapien
tatccatgtaactaaagaccacatcttccccag

SEQ ID NO: 720269 - DNA, 33 bp, Homo sapien
agaagacatttaggcaaccacatgaaaaaatgc

SEQ ID NO: 720270 - DNA, 33 bp, Homo sapien
agaagacatttaggcagccacatgaaaaaatgc

SEQ ID NO: 720271 - DNA, 33 bp, Homo sapien
atatttagaactcagaacaatggttgtatttag

SEQ ID NO: 720272 - DNA, 33 bp, Homo sapien
atatttagaactcagaccaatggttgtatttag

SEQ ID NO: 720273 - DNA, 33 bp, Homo sapien
catgagacagttgaaacgtctgaggagtccttg

SEQ ID NO: 720274 - DNA, 33 bp, Homo sapien
catgagacagttgaaatgtctgaggagtccttg

SEQ ID NO: 720275 - DNA, 33 bp, Homo sapien
agttgcaggtgaagacaaagtagacaatttgaa

SEQ ID NO: 720276 - DNA, 33 bp, Homo sapien
agttgcaggtgaagacgaagtagacaatttgaa

SEQ ID NO: 720277 - DNA, 33 bp, Homo sapien
atacctgtctgcagtaactaggctccatgatgg

SEQ ID NO: 720278 - DNA, 33 bp, Homo sapien
atacctgtctgcagtagctaggctccatgatgg

SEQ ID NO: 720279 - DNA, 33 bp, Homo sapien
gacaatgcaaaacttaacctagtcacagaactc

SEQ ID NO: 720280 - DNA, 33 bp, Homo sapien
gacaatgcaaaacttatcctagtcacagaactc

SEQ ID NO: 720281 - DNA, 33 bp, Homo sapien
gctagtcatttgcccacgtaccatgtgtagtgt

SEQ ID NO: 720282 - DNA, 33 bp, Homo sapien
gctagtcatttgcccatgtaccatgtgtagtgt

SEQ ID NO: 720283 - DNA, 33 bp, Homo sapien
agtcaagtttgcaataccaatagcttcttattc

SEQ ID NO: 720284 - DNA, 33 bp, Homo sapien
agtcaagtttgcaatagcaatagcttcttattc

SEQ ID NO: 720285 - DNA, 33 bp, Homo sapien
ctctagcaattgattaaagttcatgcatcccta

SEQ ID NO: 720286 - DNA, 33 bp, Homo sapien
ctctagcaattgattacagttcatgcatcccta

SEQ ID NO: 720287 - DNA, 33 bp, Homo sapien
tggttaaattctggccaatagattttgaattca

SEQ ID NO: 720288 - DNA, 33 bp, Homo sapien
tggttaaattctggccgatagattttgaattca

SEQ ID NO: 720289 - DNA, 33 bp, Homo sapien
cctttgttaccatcaccgtgaatatggcacact

SEQ ID NO: 720290 - DNA, 33 bp, Homo sapien
cctttgttaccatcactgtgaatatggcacact

SEQ ID NO: 720291 - DNA, 33 bp, Homo sapien
tcatgttttccacaaaatcttgatcgattgtcc

SEQ ID NO: 720292 - DNA, 33 bp, Homo sapien
tcatgttttccacaaattcttgatcgattgtcc

SEQ ID NO: 720293 - DNA, 33 bp, Homo sapien
ctcatatgacagtagtaaaaaatgggacaacag

SEQ ID NO: 720294 - DNA, 33 bp, Homo sapien
ctcatatgacagtagtgaaaaatgggacaacag

SEQ ID NO: 720295 - DNA, 33 bp, Homo sapien
tagtgacacaaaacgcaaatctagtgagtgaaa

SEQ ID NO: 720296 - DNA, 33 bp, Homo sapien
tagtgacacaaaacgcgaatctagtgagtgaaa

SEQ ID NO: 720297 - DNA, 33 bp, Homo sapien
caactcttgtattgtacggaatgtccttttatt

SEQ ID NO: 720298 - DNA, 33 bp, Homo sapien
caactcttgtattgtatggaatgtccttttatt

SEQ ID NO: 720299 - DNA, 33 bp, Homo sapien
ctaggttgaatgttgtcaaagtgttctttgttt

SEQ ID NO: 720300 - DNA, 33 bp, Homo sapien
ctaggttgaatgttgttaaagtgttctttgttt

SEQ ID NO: 720301 - DNA, 33 bp, Homo sapien
actgggaacctctaccaccgatctggggactgt

SEQ ID NO: 720302 - DNA, 33 bp, Homo sapien
actgggaacctctaccgccgatctggggactgt

SEQ ID NO: 720303 - DNA, 33 bp, Homo sapien
ttgcaatattgaaaacaggaattttatcagctt

SEQ ID NO: 720304 - DNA, 33 bp, Homo sapien
ttgcaatattgaaaacgggaattttatcagctt

SEQ ID NO: 720305 - DNA, 33 bp, Homo sapien
cggcgtaatcatcacaaatttgaggtattaagg

SEQ ID NO: 720306 - DNA, 33 bp, Homo sapien
cggcgtaatcatcacacatttgaggtattaagg

SEQ ID NO: 720307 - DNA, 33 bp, Homo sapien
atgatttctgaagatacagatgtagatgtaggg

SEQ ID NO: 720308 - DNA, 33 bp, Homo sapien
atgatttctgaagatatagatgtagatgtaggg

SEQ ID NO: 720309 - DNA, 33 bp, Homo sapien
tatagaatttagttgaacttctacttctcatgc

SEQ ID NO: 720310 - DNA, 33 bp, Homo sapien
tatagaatttagttgagcttctacttctcatgc

SEQ ID NO: 720311 - DNA, 33 bp, Homo sapien
attgaaagcaataaaacgaaagagaatctgggc

SEQ ID NO: 720312 - DNA, 33 bp, Homo sapien
attgaaagcaataaaaggaaagagaatctgggc

SEQ ID NO: 720313 - DNA, 33 bp, Homo sapien
ttggaacacttccttacgctattaatccataac

SEQ ID NO: 720314 - DNA, 33 bp, Homo sapien
ttggaacacttccttatgctattaatccataac

SEQ ID NO: 720315 - DNA, 33 bp, Homo sapien
gggtttttcttgttaacacaggaaaggcattga

SEQ ID NO: 720316 - DNA, 33 bp, Homo sapien
gggtttttcttgttaatacaggaaaggcattga

SEQ ID NO: 720317 - DNA, 33 bp, Homo sapien
atacaatacaatttatgagcttgacagaatgtt

SEQ ID NO: 720318 - DNA, 33 bp, Homo sapien
atacaatacaatttattagcttgacagaatgtt

SEQ ID NO: 720319 - DNA, 33 bp, Homo sapien
aaaattaatagataaggcctcagcaacacagta

SEQ ID NO: 720320 - DNA, 33 bp, Homo sapien
aaaattaatagataagtcctcagcaacacagta

SEQ ID NO: 720321 - DNA, 33 bp, Homo sapien
ctctatctgggagtgacgatttcactgggtacc

SEQ ID NO: 720322 - DNA, 33 bp, Homo sapien
ctctatctgggagtgatgatttcactgggtacc

SEQ ID NO: 720323 - DNA, 33 bp, Homo sapien
gccactatcctgatgaagttccctttggatgtg

SEQ ID NO: 720324 - DNA, 33 bp, Homo sapien
gccactatcctgatgaggttccctttggatgtg

SEQ ID NO: 720325 - DNA, 33 bp, Homo sapien
aaggcagaaataaagcaattagcatgcacaaca

SEQ ID NO: 720326 - DNA, 33 bp, Homo sapien
aaggcagaaataaagccattagcatgcacaaca

SEQ ID NO: 720327 - DNA, 33 bp, Homo sapien
tctgtgaagattataaaagcctcacactggccc

SEQ ID NO: 720328 - DNA, 33 bp, Homo sapien
tctgtgaagattataagagcctcacactggccc

SEQ ID NO: 720329 - DNA, 33 bp, Homo sapien
tagaaataccatttgaagagacagaaattctta

SEQ ID NO: 720330 - DNA, 33 bp, Homo sapien
tagaaataccatttgacgagacagaaattctta

SEQ ID NO: 720331 - DNA, 33 bp, Homo sapien
gttgtgacagtaactactaagcaaatgcaaaaa

SEQ ID NO: 720332 - DNA, 33 bp, Homo sapien
gttgtgacagtaactattaagcaaatgcaaaaa

SEQ ID NO: 720333 - DNA, 33 bp, Homo sapien
gttgctactgcagtgaaatcaagtgttgggagt

SEQ ID NO: 720334 - DNA, 33 bp, Homo sapien
gttgctactgcagtgagatcaagtgttgggagt

SEQ ID NO: 720335 - DNA, 33 bp, Homo sapien
taccaataacataaacaatttatcaacacatac

SEQ ID NO: 720336 - DNA, 33 bp, Homo sapien
taccaataacataaacgatttatcaacacatac

SEQ ID NO: 720337 - DNA, 33 bp, Homo sapien
attcttacacaattgacgcttgaacgatgcagg

SEQ ID NO: 720338 - DNA, 33 bp, Homo sapien
attcttacacaattgatgcttgaacgatgcagg

SEQ ID NO: 720339 - DNA, 33 bp, Homo sapien
tgagagttgccagaaacttaataaagctttgtt

SEQ ID NO: 720340 - DNA, 33 bp, Homo sapien
tgagagttgccagaaatttaataaagctttgtt

SEQ ID NO: 720341 - DNA, 33 bp, Homo sapien
tcctcaccaaactgcaggaagttggtcctgtta

SEQ ID NO: 720342 - DNA, 33 bp, Homo sapien
tcctcaccaaactgcatgaagttggtcctgtta

SEQ ID NO: 720343 - DNA, 33 bp, Homo sapien
ataataaataaggaaacgagccaaaacaatacc

SEQ ID NO: 720344 - DNA, 33 bp, Homo sapien
ataataaataaggaaatgagccaaaacaatacc

SEQ ID NO: 720345 - DNA, 33 bp, Homo sapien
taataatttaacctgccgatagcattgcaaata

SEQ ID NO: 720346 - DNA, 33 bp, Homo sapien
taataatttaacctgctgatagcattgcaaata

SEQ ID NO: 720347 - DNA, 33 bp, Homo sapien
gccatcctgttatatcacttggagaatttctct

SEQ ID NO: 720348 - DNA, 33 bp, Homo sapien
gccatcctgttatatcgcttggagaatttctct

SEQ ID NO: 720349 - DNA, 33 bp, Homo sapien
ggatgtccataatcaacaatctttacatctacc

SEQ ID NO: 720350 - DNA, 33 bp, Homo sapien
ggatgtccataatcaataatctttacatctacc

SEQ ID NO: 720351 - DNA, 33 bp, Homo sapien
ggggataagcctatgaagcagctagaacttggg

SEQ ID NO: 720352 - DNA, 33 bp, Homo sapien
ggggataagcctatgatgcagctagaacttggg

SEQ ID NO: 720353 - DNA, 33 bp, Homo sapien
aaaattgctggagttaccccttctcttatcagt

SEQ ID NO: 720354 - DNA, 33 bp, Homo sapien
aaaattgctggagttagcccttctcttatcagt

SEQ ID NO: 720355 - DNA, 33 bp, Homo sapien
ttagtttttctacaaactcacaaaagtattgag

SEQ ID NO: 720356 - DNA, 33 bp, Homo sapien
ttagtttttctacaaattcacaaaagtattgag

SEQ ID NO: 720357 - DNA, 33 bp, Homo sapien
gtataagcatcatttcacagaccagcagaaggc

SEQ ID NO: 720358 - DNA, 33 bp, Homo sapien
gtataagcatcatttcgcagaccagcagaaggc

SEQ ID NO: 720359 - DNA, 33 bp, Homo sapien
aactcctttcacaggcacatcttttccatgtct

SEQ ID NO: 720360 - DNA, 33 bp, Homo sapien
aactcctttcacaggcgcatcttttccatgtct

SEQ ID NO: 720361 - DNA, 33 bp, Homo sapien
ttatctactcaattagcactgtaaaaagcaact

SEQ ID NO: 720362 - DNA, 33 bp, Homo sapien
ttatctactcaattaggactgtaaaaagcaact

SEQ ID NO: 720363 - DNA, 33 bp, Homo sapien
cctctgctttaggaaaggaatggaagagtgggg

SEQ ID NO: 720364 - DNA, 33 bp, Homo sapien
cctctgctttaggaaatgaatggaagagtgggg

SEQ ID NO: 720365 - DNA, 33 bp, Homo sapien
agttctaacactttagcccatcgatttttcttt

SEQ ID NO: 720366 - DNA, 33 bp, Homo sapien
agttctaacactttagtccatcgatttttcttt

SEQ ID NO: 720367 - DNA, 33 bp, Homo sapien
agctctttttcctctccactcattaacactttg

SEQ ID NO: 720368 - DNA, 33 bp, Homo sapien
agctctttttcctctctactcattaacactttg

SEQ ID NO: 720369 - DNA, 33 bp, Homo sapien
agcaggcttcagagtcacttgaaggatatgtta

SEQ ID NO: 720370 - DNA, 33 bp, Homo sapien
agcaggcttcagagtcgcttgaaggatatgtta

SEQ ID NO: 720371 - DNA, 33 bp, Homo sapien
atttaaatggtacctacctcaggatcattgtca

SEQ ID NO: 720372 - DNA, 33 bp, Homo sapien
atttaaatggtacctatctcaggatcattgtca

SEQ ID NO: 720373 - DNA, 33 bp, Homo sapien
atctccactttacagaagagaagttgcatactt

SEQ ID NO: 720374 - DNA, 33 bp, Homo sapien
atctccactttacagatgagaagttgcatactt

SEQ ID NO: 720375 - DNA, 33 bp, Homo sapien
cctgcaataacagcacggatagaatttgattgc

SEQ ID NO: 720376 - DNA, 33 bp, Homo sapien
cctgcaataacagcactgatagaatttgattgc

SEQ ID NO: 720377 - DNA, 33 bp, Homo sapien
ggctgctttattgccacagttttattgactctc

SEQ ID NO: 720378 - DNA, 33 bp, Homo sapien
ggctgctttattgccatagttttattgactctc

SEQ ID NO: 720379 - DNA, 33 bp, Homo sapien
gaacttaagaaccagccctttctgtatttcctt

SEQ ID NO: 720380 - DNA, 33 bp, Homo sapien
gaacttaagaaccagctctttctgtatttcctt

SEQ ID NO: 720381 - DNA, 33 bp, Homo sapien
agtttcagctccaacaacaaactgtaacacgat

SEQ ID NO: 720382 - DNA, 33 bp, Homo sapien
agtttcagctccaacagcaaactgtaacacgat

SEQ ID NO: 720383 - DNA, 33 bp, Homo sapien
tatctatgtgtaacaccgtaattgatagaatct

SEQ ID NO: 720384 - DNA, 33 bp, Homo sapien
tatctatgtgtaacactgtaattgatagaatct

SEQ ID NO: 720385 - DNA, 33 bp, Homo sapien
tcacatttagcaagaaaatcaaatctaaacgaa

SEQ ID NO: 720386 - DNA, 33 bp, Homo sapien
tcacatttagcaagaagatcaaatctaaacgaa

SEQ ID NO: 720387 - DNA, 33 bp, Homo sapien
catcatttcctcccctcacatattttcagcatc

SEQ ID NO: 720388 - DNA, 33 bp, Homo sapien
catcatttcctccccttacatattttcagcatc

SEQ ID NO: 720389 - DNA, 33 bp, Homo sapien
aatgggaagtaattctaaaacaggaggcctaaa

SEQ ID NO: 720390 - DNA, 33 bp, Homo sapien
aatgggaagtaattctgaaacaggaggcctaaa

SEQ ID NO: 720391 - DNA, 33 bp, Homo sapien
tttgattacgggtcaaagaaaaccaaatggtaa

SEQ ID NO: 720392 - DNA, 33 bp, Homo sapien
tttgattacgggtcaatgaaaaccaaatggtaa

SEQ ID NO: 720393 - DNA, 33 bp, Homo sapien
gctatattgatagtcaaagcaaagggtaatgag

SEQ ID NO: 720394 - DNA, 33 bp, Homo sapien
gctatattgatagtcacagcaaagggtaatgag

SEQ ID NO: 720395 - DNA, 33 bp, Homo sapien
gaacaaaacagcaagaatacttcgtggatggtt

SEQ ID NO: 720396 - DNA, 33 bp, Homo sapien
gaacaaaacagcaagagtacttcgtggatggtt

SEQ ID NO: 720397 - DNA, 33 bp, Homo sapien
actaatgtcatccagagaagcaaaacagtccct

SEQ ID NO: 720398 - DNA, 33 bp, Homo sapien
actaatgtcatccagataagcaaaacagtccct

SEQ ID NO: 720399 - DNA, 33 bp, Homo sapien
acactaagcctgaaataaagtagtctctagaaa

SEQ ID NO: 720400 - DNA, 33 bp, Homo sapien
acactaagcctgaaatgaagtagtctctagaaa

SEQ ID NO: 720401 - DNA, 33 bp, Homo sapien
aacttgacttaatagaactgcccaagctagggg

SEQ ID NO: 720402 - DNA, 33 bp, Homo sapien
aacttgacttaatagatctgcccaagctagggg

SEQ ID NO: 720403 - DNA, 33 bp, Homo sapien
aaataagtagctcttcaagaaaaataagatgct

SEQ ID NO: 720404 - DNA, 33 bp, Homo sapien
aaataagtagctcttcgagaaaaataagatgct

SEQ ID NO: 720405 - DNA, 33 bp, Homo sapien
aaagagtctcccctaacggaccagcagcattgt

SEQ ID NO: 720406 - DNA, 33 bp, Homo sapien
aaagagtctcccctaatggaccagcagcattgt

SEQ ID NO: 720407 - DNA, 33 bp, Homo sapien
taacttccactattgaatactatctagaacaaa

SEQ ID NO: 720408 - DNA, 33 bp, Homo sapien
taacttccactattgagtactatctagaacaaa

SEQ ID NO: 720409 - DNA, 33 bp, Homo sapien
atcatgtgttgcattcaaacaccgtgtattaac

SEQ ID NO: 720410 - DNA, 33 bp, Homo sapien
atcatgtgttgcattcgaacaccgtgtattaac

SEQ ID NO: 720411 - DNA, 33 bp, Homo sapien
tcctagagaaaagtcacataccagttaaaccct

SEQ ID NO: 720412 - DNA, 33 bp, Homo sapien
tcctagagaaaagtcatataccagttaaaccct

SEQ ID NO: 720413 - DNA, 33 bp, Homo sapien
atagtacagaaggtgagtacaagtttggccttc

SEQ ID NO: 720414 - DNA, 33 bp, Homo sapien
atagtacagaaggtgattacaagtttggccttc

SEQ ID NO: 720415 - DNA, 33 bp, Homo sapien
ctacctaactgtatacaagtgagctatccctgg

SEQ ID NO: 720416 - DNA, 33 bp, Homo sapien
ctacctaactgtataccagtgagctatccctgg

SEQ ID NO: 720417 - DNA, 33 bp, Homo sapien
taccttctcatttacacatttccattaagtgca

SEQ ID NO: 720418 - DNA, 33 bp, Homo sapien
taccttctcatttacatatttccattaagtgca

SEQ ID NO: 720419 - DNA, 33 bp, Homo sapien
cacaggacactattaccaggcaaatatatgaag

SEQ ID NO: 720420 - DNA, 33 bp, Homo sapien
cacaggacactattactaggcaaatatatgaag

SEQ ID NO: 720421 - DNA, 33 bp, Homo sapien
agcctgggagtgtttaagttctggccctgtcaa

SEQ ID NO: 720422 - DNA, 33 bp, Homo sapien
agcctgggagtgtttacgttctggccctgtcaa

SEQ ID NO: 720423 - DNA, 33 bp, Homo sapien
acttttaaaaaccaaaattagcataactgttaa

SEQ ID NO: 720424 - DNA, 33 bp, Homo sapien
acttttaaaaaccaaacttagcataactgttaa

SEQ ID NO: 720425 - DNA, 33 bp, Homo sapien
tatttgccacccctaacaatttctacttctaca

SEQ ID NO: 720426 - DNA, 33 bp, Homo sapien
tatttgccacccctaagaatttctacttctaca

SEQ ID NO: 720427 - DNA, 33 bp, Homo sapien
atgatcctttttattacgtcttcaagtcaatgt

SEQ ID NO: 720428 - DNA, 33 bp, Homo sapien
atgatcctttttattatgtcttcaagtcaatgt

SEQ ID NO: 720429 - DNA, 33 bp, Homo sapien
tattcctgtatttatcagagtccaaagtaaaac

SEQ ID NO: 720430 - DNA, 33 bp, Homo sapien
tattcctgtatttatcggagtccaaagtaaaac

SEQ ID NO: 720431 - DNA, 33 bp, Homo sapien
ttcaattgaaatgcagaaaaacaaccagaggaa

SEQ ID NO: 720432 - DNA, 33 bp, Homo sapien
ttcaattgaaatgcagtaaaacaaccagaggaa

SEQ ID NO: 720433 - DNA, 33 bp, Homo sapien
tttagagaattcttccaaatctgatccaatacc

SEQ ID NO: 720434 - DNA, 33 bp, Homo sapien
tttagagaattcttccgaatctgatccaatacc

SEQ ID NO: 720435 - DNA, 33 bp, Homo sapien
acttgaagtttaaagcacttgcataacttgccc

SEQ ID NO: 720436 - DNA, 33 bp, Homo sapien
acttgaagtttaaagcgcttgcataacttgccc

SEQ ID NO: 720437 - DNA, 33 bp, Homo sapien
tatttatgcaggttaacatatttggcattatgt

SEQ ID NO: 720438 - DNA, 33 bp, Homo sapien
tatttatgcaggttaatatatttggcattatgt

SEQ ID NO: 720439 - DNA, 33 bp, Homo sapien
tatgggaaaaatacaaaacgatgtggtttggct

SEQ ID NO: 720440 - DNA, 33 bp, Homo sapien
tatgggaaaaatacaacacgatgtggtttggct

SEQ ID NO: 720441 - DNA, 33 bp, Homo sapien
gctgcacagtgttccacggtaccacattgtctt

SEQ ID NO: 720442 - DNA, 33 bp, Homo sapien
gctgcacagtgttccatggtaccacattgtctt

SEQ ID NO: 720443 - DNA, 33 bp, Homo sapien
ttacatacctttatgaaatgctttagaccaagt

SEQ ID NO: 720444 - DNA, 33 bp, Homo sapien
ttacatacctttatgagatgctttagaccaagt

SEQ ID NO: 720445 - DNA, 33 bp, Homo sapien
aatcccctaacaagacaataatgtattctttct

SEQ ID NO: 720446 - DNA, 33 bp, Homo sapien
aatcccctaacaagacgataatgtattctttct

SEQ ID NO: 720447 - DNA, 33 bp, Homo sapien
gaataatttgtgcctacatacttttggaatccc

SEQ ID NO: 720448 - DNA, 33 bp, Homo sapien
gaataatttgtgcctatatacttttggaatccc

SEQ ID NO: 720449 - DNA, 33 bp, Homo sapien
aactgagcctaacagaactttgcatggccattg

SEQ ID NO: 720450 - DNA, 33 bp, Homo sapien
aactgagcctaacagagctttgcatggccattg

SEQ ID NO: 720451 - DNA, 33 bp, Homo sapien
ttgggaaccttcctccaaagcctcagtaaattt

SEQ ID NO: 720452 - DNA, 33 bp, Homo sapien
ttgggaaccttcctccgaagcctcagtaaattt

SEQ ID NO: 720453 - DNA, 33 bp, Homo sapien
ggttaggttaaatattaaaggctgagagaacca

SEQ ID NO: 720454 - DNA, 33 bp, Homo sapien
ggttaggttaaatattgaaggctgagagaacca

SEQ ID NO: 720455 - DNA, 33 bp, Homo sapien
acaaaagttgaacaggcagtccttgaagcatga

SEQ ID NO: 720456 - DNA, 33 bp, Homo sapien
acaaaagttgaacaggtagtccttgaagcatga

SEQ ID NO: 720457 - DNA, 33 bp, Homo sapien
attgggttataagaacagcaaactcatacctcc

SEQ ID NO: 720458 - DNA, 33 bp, Homo sapien
attgggttataagaactgcaaactcatacctcc

SEQ ID NO: 720459 - DNA, 33 bp, Homo sapien
agaatataatatgttcaagaaggaatacgaaga

SEQ ID NO: 720460 - DNA, 33 bp, Homo sapien
agaatataatatgttcgagaaggaatacgaaga

SEQ ID NO: 720461 - DNA, 33 bp, Homo sapien
agttagattcctagataaattcactcacagatc

SEQ ID NO: 720462 - DNA, 33 bp, Homo sapien
agttagattcctagatgaattcactcacagatc

SEQ ID NO: 720463 - DNA, 33 bp, Homo sapien
ctagtcacactcaccacgcattgctcccttttc

SEQ ID NO: 720464 - DNA, 33 bp, Homo sapien
ctagtcacactcaccaggcattgctcccttttc

SEQ ID NO: 720465 - DNA, 33 bp, Homo sapien
ctctacccttgcagatgaagtgtttcctcattt

SEQ ID NO: 720466 - DNA, 33 bp, Homo sapien
ctctacccttgcagattaagtgtttcctcattt

SEQ ID NO: 720467 - DNA, 33 bp, Homo sapien
taggtatttgtttttccactttccaattagatg

SEQ ID NO: 720468 - DNA, 33 bp, Homo sapien
taggtatttgtttttctactttccaattagatg

SEQ ID NO: 720469 - DNA, 33 bp, Homo sapien
tggtaagagaggaaaacagatatagaagtgaat

SEQ ID NO: 720470 - DNA, 33 bp, Homo sapien
tggtaagagaggaaaatagatatagaagtgaat

SEQ ID NO: 720471 - DNA, 33 bp, Homo sapien
ccatagcagtttgtggaaaagtgagggagaata

SEQ ID NO: 720472 - DNA, 33 bp, Homo sapien
ccatagcagtttgtgggaaagtgagggagaata

SEQ ID NO: 720473 - DNA, 33 bp, Homo sapien
gactagtgttgctgccagaactttttacaaatt

SEQ ID NO: 720474 - DNA, 33 bp, Homo sapien
gactagtgttgctgcccgaactttttacaaatt

SEQ ID NO: 720475 - DNA, 33 bp, Homo sapien
tttattttgcccttgcaatctctcttgaatcaa

SEQ ID NO: 720476 - DNA, 33 bp, Homo sapien
tttattttgcccttgctatctctcttgaatcaa

SEQ ID NO: 720477 - DNA, 33 bp, Homo sapien
agataccagagtctaggcaccatctcagacaaa

SEQ ID NO: 720478 - DNA, 33 bp, Homo sapien
agataccagagtctagtcaccatctcagacaaa

SEQ ID NO: 720479 - DNA, 33 bp, Homo sapien
attgattaagttggaaaagcagaagaaaacgtt

SEQ ID NO: 720480 - DNA, 33 bp, Homo sapien
attgattaagttggaacagcagaagaaaacgtt

SEQ ID NO: 720481 - DNA, 33 bp, Homo sapien
tcgcgccaggccaagacgtgtcattttcaataa

SEQ ID NO: 720482 - DNA, 33 bp, Homo sapien
tcgcgccaggccaagatgtgtcattttcaataa

SEQ ID NO: 720483 - DNA, 33 bp, Homo sapien
tatgtggccctgaggacagcagaactcatctaa

SEQ ID NO: 720484 - DNA, 33 bp, Homo sapien
tatgtggccctgaggatagcagaactcatctaa

SEQ ID NO: 720485 - DNA, 33 bp, Homo sapien
tgcccactgtgaaaccacaaataaaagtgagag

SEQ ID NO: 720486 - DNA, 33 bp, Homo sapien
tgcccactgtgaaaccccaaataaaagtgagag

SEQ ID NO: 720487 - DNA, 33 bp, Homo sapien
gtataattgaactgcactaccatagctggtgca

SEQ ID NO: 720488 - DNA, 33 bp, Homo sapien
gtataattgaactgcattaccatagctggtgca

SEQ ID NO: 720489 - DNA, 33 bp, Homo sapien
acattcagaagtatgaggattatgctgtactga

SEQ ID NO: 720490 - DNA, 33 bp, Homo sapien
acattcagaagtatgatgattatgctgtactga

SEQ ID NO: 720491 - DNA, 33 bp, Homo sapien
aaattagcctgaaaaaagtaagagaattagtgt

SEQ ID NO: 720492 - DNA, 33 bp, Homo sapien
aaattagcctgaaaaatgtaagagaattagtgt

SEQ ID NO: 720493 - DNA, 33 bp, Homo sapien
ctgctggcactttcaccggcctagagagctcct

SEQ ID NO: 720494 - DNA, 33 bp, Homo sapien
ctgctggcactttcactggcctagagagctcct

SEQ ID NO: 720495 - DNA, 33 bp, Homo sapien
ttcacaggatgatctaaattctaaggaaacgga

SEQ ID NO: 720496 - DNA, 33 bp, Homo sapien
ttcacaggatgatctatattctaaggaaacgga

SEQ ID NO: 720497 - DNA, 33 bp, Homo sapien
aatagtattatgatgagctctcgttacttagta

SEQ ID NO: 720498 - DNA, 33 bp, Homo sapien
aatagtattatgatgatctctcgttacttagta

SEQ ID NO: 720499 - DNA, 33 bp, Homo sapien
aagattacaactcacccaaagctcgaatgattg

SEQ ID NO: 720500 - DNA, 33 bp, Homo sapien
aagattacaactcaccgaaagctcgaatgattg

SEQ ID NO: 720501 - DNA, 33 bp, Homo sapien
gcagatttgccactaacgaaatagtaaagagat

SEQ ID NO: 720502 - DNA, 33 bp, Homo sapien
gcagatttgccactaatgaaatagtaaagagat

SEQ ID NO: 720503 - DNA, 33 bp, Homo sapien
acaaggacagtgcttaaaactcagggaattcag

SEQ ID NO: 720504 - DNA, 33 bp, Homo sapien
acaaggacagtgcttagaactcagggaattcag

SEQ ID NO: 720505 - DNA, 33 bp, Homo sapien
ctcattccttggtttaaaaaaggctttggcaaa

SEQ ID NO: 720506 - DNA, 33 bp, Homo sapien
ctcattccttggtttagaaaaggctttggcaaa

SEQ ID NO: 720507 - DNA, 33 bp, Homo sapien
gtccaaagtgtatttaagacgtgttgctgtgtg

SEQ ID NO: 720508 - DNA, 33 bp, Homo sapien
gtccaaagtgtatttaggacgtgttgctgtgtg

SEQ ID NO: 720509 - DNA, 33 bp, Homo sapien
ggattcctgcacttcaatcctaatgtggtacct

SEQ ID NO: 720510 - DNA, 33 bp, Homo sapien
ggattcctgcacttcagtcctaatgtggtacct

SEQ ID NO: 720511 - DNA, 33 bp, Homo sapien
agatgatcacttctagactaatctaagtgctta

SEQ ID NO: 720512 - DNA, 33 bp, Homo sapien
agatgatcacttctaggctaatctaagtgctta

SEQ ID NO: 720513 - DNA, 33 bp, Homo sapien
tgaatatgtactttaacggtatgatctgatgca

SEQ ID NO: 720514 - DNA, 33 bp, Homo sapien
tgaatatgtactttaatggtatgatctgatgca

SEQ ID NO: 720515 - DNA, 33 bp, Homo sapien
ctatgcagttgtccaaagctaagattacaacta

SEQ ID NO: 720516 - DNA, 33 bp, Homo sapien
ctatgcagttgtccaacgctaagattacaacta

SEQ ID NO: 720517 - DNA, 33 bp, Homo sapien
aagcataattgctagactcaaaaagtagacagc

SEQ ID NO: 720518 - DNA, 33 bp, Homo sapien
aagcataattgctagattcaaaaagtagacagc

SEQ ID NO: 720519 - DNA, 33 bp, Homo sapien
agagccagtatataagcccgagtgaattaagct

SEQ ID NO: 720520 - DNA, 33 bp, Homo sapien
agagccagtatataagtccgagtgaattaagct

SEQ ID NO: 720521 - DNA, 33 bp, Homo sapien
atggagagatcagtaacgcaaatgagtatgcaa

SEQ ID NO: 720522 - DNA, 33 bp, Homo sapien
atggagagatcagtaatgcaaatgagtatgcaa

SEQ ID NO: 720523 - DNA, 33 bp, Homo sapien
gaatgcactttgttgcacctaatagtgagttga

SEQ ID NO: 720524 - DNA, 33 bp, Homo sapien
gaatgcactttgttgcccctaatagtgagttga

SEQ ID NO: 720525 - DNA, 33 bp, Homo sapien
caagaacggcatcttgaattctttttattgtcc

SEQ ID NO: 720526 - DNA, 33 bp, Homo sapien
caagaacggcatcttgtattctttttattgtcc

SEQ ID NO: 720527 - DNA, 33 bp, Homo sapien
cttgggaaacctgggaaactcatttgacctcac

SEQ ID NO: 720528 - DNA, 33 bp, Homo sapien
cttgggaaacctgggacactcatttgacctcac

SEQ ID NO: 720529 - DNA, 33 bp, Homo sapien
tgcctctttctcttgaaatgcacttcttcattc

SEQ ID NO: 720530 - DNA, 33 bp, Homo sapien
tgcctctttctcttgagatgcacttcttcattc

SEQ ID NO: 720531 - DNA, 33 bp, Homo sapien
accaaattgaagctgaaaacgtgagatacctgg

SEQ ID NO: 720532 - DNA, 33 bp, Homo sapien
accaaattgaagctgacaacgtgagatacctgg

SEQ ID NO: 720533 - DNA, 33 bp, Homo sapien
tattcaccactggaaacaatacttcatttagcc

SEQ ID NO: 720534 - DNA, 33 bp, Homo sapien
tattcaccactggaaataatacttcatttagcc

SEQ ID NO: 720535 - DNA, 33 bp, Homo sapien
gggccagactaatatacggtaacagcccacagt

SEQ ID NO: 720536 - DNA, 33 bp, Homo sapien
gggccagactaatatatggtaacagcccacagt

SEQ ID NO: 720537 - DNA, 33 bp, Homo sapien
gttacagaatggaaaaataatgcatgagctggc

SEQ ID NO: 720538 - DNA, 33 bp, Homo sapien
gttacagaatggaaaactaatgcatgagctggc

SEQ ID NO: 720539 - DNA, 33 bp, Homo sapien
tttctttgagcaggagactacatctattctcat

SEQ ID NO: 720540 - DNA, 33 bp, Homo sapien
tttctttgagcaggaggctacatctattctcat

SEQ ID NO: 720541 - DNA, 33 bp, Homo sapien
actgggtgacttagcactccagtaatgatgagg

SEQ ID NO: 720542 - DNA, 33 bp, Homo sapien
actgggtgacttagcagtccagtaatgatgagg

SEQ ID NO: 720543 - DNA, 33 bp, Homo sapien
tccagtttagcctaaaacaagatgaaagattaa

SEQ ID NO: 720544 - DNA, 33 bp, Homo sapien
tccagtttagcctaaagcaagatgaaagattaa

SEQ ID NO: 720545 - DNA, 33 bp, Homo sapien
tccattaatagactgaaatccttgagagtagaa

SEQ ID NO: 720546 - DNA, 33 bp, Homo sapien
tccattaatagactgagatccttgagagtagaa

SEQ ID NO: 720547 - DNA, 33 bp, Homo sapien
ttcatctgtaaaaagagaattgcagcatctgct

SEQ ID NO: 720548 - DNA, 33 bp, Homo sapien
ttcatctgtaaaaagataattgcagcatctgct

SEQ ID NO: 720549 - DNA, 33 bp, Homo sapien
cctttggcctcaacaactcctaaacttgacttg

SEQ ID NO: 720550 - DNA, 33 bp, Homo sapien
cctttggcctcaacaattcctaaacttgacttg

SEQ ID NO: 720551 - DNA, 33 bp, Homo sapien
atcctgctataaagtaagttccttgcaacagac

SEQ ID NO: 720552 - DNA, 33 bp, Homo sapien
atcctgctataaagtatgttccttgcaacagac

SEQ ID NO: 720553 - DNA, 33 bp, Homo sapien
agcgtcctacctatctcaaatcctttgatgaca

SEQ ID NO: 720554 - DNA, 33 bp, Homo sapien
agcgtcctacctatctgaaatcctttgatgaca

SEQ ID NO: 720555 - DNA, 33 bp, Homo sapien
aataagctcagtgttaaaaatgctgagtttgat

SEQ ID NO: 720556 - DNA, 33 bp, Homo sapien
aataagctcagtgttagaaatgctgagtttgat

SEQ ID NO: 720557 - DNA, 33 bp, Homo sapien
caccatgtggtactaccggtgttgtaaatattt

SEQ ID NO: 720558 - DNA, 33 bp, Homo sapien
caccatgtggtactactggtgttgtaaatattt

SEQ ID NO: 720559 - DNA, 33 bp, Homo sapien
agtaattatatagaatcaatacagttggatcct

SEQ ID NO: 720560 - DNA, 33 bp, Homo sapien
agtaattatatagaatgaatacagttggatcct

SEQ ID NO: 720561 - DNA, 33 bp, Homo sapien
ggcctcatcacctttcacctttctgtggtatta

SEQ ID NO: 720562 - DNA, 33 bp, Homo sapien
ggcctcatcacctttcgcctttctgtggtatta

SEQ ID NO: 720563 - DNA, 33 bp, Homo sapien
agtactggaaatcagacctagcgcaatgggtca

SEQ ID NO: 720564 - DNA, 33 bp, Homo sapien
agtactggaaatcagagctagcgcaatgggtca

SEQ ID NO: 720565 - DNA, 33 bp, Homo sapien
ataggctcaattctttaaaaaatccattgatac

SEQ ID NO: 720566 - DNA, 33 bp, Homo sapien
ataggctcaattctttcaaaaatccattgatac

SEQ ID NO: 720567 - DNA, 33 bp, Homo sapien
ggttacttctaactgccagtggtaaacttccag

SEQ ID NO: 720568 - DNA, 33 bp, Homo sapien
ggttacttctaactgcgagtggtaaacttccag

SEQ ID NO: 720569 - DNA, 33 bp, Homo sapien
ggactctgaagattcccgaattgaggccacagg

SEQ ID NO: 720570 - DNA, 33 bp, Homo sapien
ggactctgaagattcctgaattgaggccacagg

SEQ ID NO: 720571 - DNA, 33 bp, Homo sapien
tggcaaaaaggaatcccgaagaatcgaagtgga

SEQ ID NO: 720572 - DNA, 33 bp, Homo sapien
tggcaaaaaggaatcctgaagaatcgaagtgga

SEQ ID NO: 720573 - DNA, 33 bp, Homo sapien
gtgtaccctaaatccaatgatgcctttggaaga

SEQ ID NO: 720574 - DNA, 33 bp, Homo sapien
gtgtaccctaaatccagtgatgcctttggaaga

SEQ ID NO: 720575 - DNA, 33 bp, Homo sapien
gtaggaagtatgacaaaggaagcaagaggctgg

SEQ ID NO: 720576 - DNA, 33 bp, Homo sapien
gtaggaagtatgacaatggaagcaagaggctgg

SEQ ID NO: 720577 - DNA, 33 bp, Homo sapien
cttaacacacccactaaattccaggtattttgt

SEQ ID NO: 720578 - DNA, 33 bp, Homo sapien
cttaacacacccactagattccaggtattttgt

SEQ ID NO: 720579 - DNA, 33 bp, Homo sapien
atgaattgtgtgagaaccaaaacaaaggaatta

SEQ ID NO: 720580 - DNA, 33 bp, Homo sapien
atgaattgtgtgagaatcaaaacaaaggaatta

SEQ ID NO: 720581 - DNA, 33 bp, Homo sapien
agtgattcttgtttacagagccctctttcagtt

SEQ ID NO: 720582 - DNA, 33 bp, Homo sapien
agtgattcttgtttacggagccctctttcagtt

SEQ ID NO: 720583 - DNA, 33 bp, Homo sapien
tttacaaatgaaacaacttagtgggcattagat

SEQ ID NO: 720584 - DNA, 33 bp, Homo sapien
tttacaaatgaaacaatttagtgggcattagat

SEQ ID NO: 720585 - DNA, 33 bp, Homo sapien
tcacttgaccttatcaaggcgaattgccaatat

SEQ ID NO: 720586 - DNA, 33 bp, Homo sapien
tcacttgaccttatcagggcgaattgccaatat

SEQ ID NO: 720587 - DNA, 33 bp, Homo sapien
gataattaagaggataaggcacaacgtggaaaa

SEQ ID NO: 720588 - DNA, 33 bp, Homo sapien
gataattaagaggatacggcacaacgtggaaaa

SEQ ID NO: 720589 - DNA, 33 bp, Homo sapien
ccagggatctttcaccaaacactttaatatatt

SEQ ID NO: 720590 - DNA, 33 bp, Homo sapien
ccagggatctttcaccgaacactttaatatatt

SEQ ID NO: 720591 - DNA, 33 bp, Homo sapien
ggaacttgtacctcaaaaggtgtcattccatca

SEQ ID NO: 720592 - DNA, 33 bp, Homo sapien
ggaacttgtacctcaacaggtgtcattccatca

SEQ ID NO: 720593 - DNA, 33 bp, Homo sapien
catcgtctctgtgtaactcacgagaacttctta

SEQ ID NO: 720594 - DNA, 33 bp, Homo sapien
catcgtctctgtgtaattcacgagaacttctta

SEQ ID NO: 720595 - DNA, 33 bp, Homo sapien
taaatgtgggatggggaatgagaagttctgggt

SEQ ID NO: 720596 - DNA, 33 bp, Homo sapien
taaatgtgggatggggtatgagaagttctgggt

SEQ ID NO: 720597 - DNA, 33 bp, Homo sapien
taggtcaggggcaaaccgggctgtctcaagcaa

SEQ ID NO: 720598 - DNA, 33 bp, Homo sapien
taggtcaggggcaaactgggctgtctcaagcaa

SEQ ID NO: 720599 - DNA, 33 bp, Homo sapien
agaagtaatttcaatccaaaagaattaagcttt

SEQ ID NO: 720600 - DNA, 33 bp, Homo sapien
agaagtaatttcaatcgaaaagaattaagcttt

SEQ ID NO: 720601 - DNA, 33 bp, Homo sapien
actgttgggtacacaaccaaaggaatataaatc

SEQ ID NO: 720602 - DNA, 33 bp, Homo sapien
actgttgggtacacaatcaaaggaatataaatc

SEQ ID NO: 720603 - DNA, 33 bp, Homo sapien
tactttaaaatgaacccggtaagacttcctcat

SEQ ID NO: 720604 - DNA, 33 bp, Homo sapien
tactttaaaatgaacctggtaagacttcctcat

SEQ ID NO: 720605 - DNA, 33 bp, Homo sapien
aagagttttacagtaaccttcagcatttaccat

SEQ ID NO: 720606 - DNA, 33 bp, Homo sapien
aagagttttacagtaatcttcagcatttaccat

SEQ ID NO: 720607 - DNA, 33 bp, Homo sapien
tcttctaaaaataagcaccatggatccagggac

SEQ ID NO: 720608 - DNA, 33 bp, Homo sapien
tcttctaaaaataagcgccatggatccagggac

SEQ ID NO: 720609 - DNA, 33 bp, Homo sapien
gagaagcacagatagcaagaaacagaaagatga

SEQ ID NO: 720610 - DNA, 33 bp, Homo sapien
gagaagcacagatagcgagaaacagaaagatga

SEQ ID NO: 720611 - DNA, 33 bp, Homo sapien
taacatctcaggtaaacgttgcacctatgactc

SEQ ID NO: 720612 - DNA, 33 bp, Homo sapien
taacatctcaggtaaatgttgcacctatgactc

SEQ ID NO: 720613 - DNA, 33 bp, Homo sapien
cacacaaaaggcatcaaagttcagaaatgttcg

SEQ ID NO: 720614 - DNA, 33 bp, Homo sapien
cacacaaaaggcatcagagttcagaaatgttcg

SEQ ID NO: 720615 - DNA, 33 bp, Homo sapien
attgttagagattccaatgaaggattatttcac

SEQ ID NO: 720616 - DNA, 33 bp, Homo sapien
attgttagagattccagtgaaggattatttcac

SEQ ID NO: 720617 - DNA, 33 bp, Homo sapien
taagatcaatctctaaatatatttgtcagtgac

SEQ ID NO: 720618 - DNA, 33 bp, Homo sapien
taagatcaatctctaactatatttgtcagtgac

SEQ ID NO: 720619 - DNA, 33 bp, Homo sapien
tctgaaagtcacctgcaatcatggtaaatggcc

SEQ ID NO: 720620 - DNA, 33 bp, Homo sapien
tctgaaagtcacctgcgatcatggtaaatggcc

SEQ ID NO: 720621 - DNA, 33 bp, Homo sapien
ccgtagttccttaaacactgcacaagaagtcct

SEQ ID NO: 720622 - DNA, 33 bp, Homo sapien
ccgtagttccttaaacgctgcacaagaagtcct

SEQ ID NO: 720623 - DNA, 33 bp, Homo sapien
gaagggacacaaagaaatggcagaaagaagcaa

SEQ ID NO: 720624 - DNA, 33 bp, Homo sapien
gaagggacacaaagaagtggcagaaagaagcaa

SEQ ID NO: 720625 - DNA, 33 bp, Homo sapien
caggagcttcaggacccaaaggaagagaacaag

SEQ ID NO: 720626 - DNA, 33 bp, Homo sapien
caggagcttcaggacctaaaggaagagaacaag

SEQ ID NO: 720627 - DNA, 33 bp, Homo sapien
aaacaatcaggaaaggaccaaaactgtgagcta

SEQ ID NO: 720628 - DNA, 33 bp, Homo sapien
aaacaatcaggaaagggccaaaactgtgagcta

SEQ ID NO: 720629 - DNA, 33 bp, Homo sapien
atcacattcattatcacccagttagtacagaaa

SEQ ID NO: 720630 - DNA, 33 bp, Homo sapien
atcacattcattatcatccagttagtacagaaa

SEQ ID NO: 720631 - DNA, 33 bp, Homo sapien
accaaagttgtgggaaatggactccttgttaag

SEQ ID NO: 720632 - DNA, 33 bp, Homo sapien
accaaagttgtgggaagtggactccttgttaag

SEQ ID NO: 720633 - DNA, 33 bp, Homo sapien
ccttaatgattggagacgatgtatttccttgat

SEQ ID NO: 720634 - DNA, 33 bp, Homo sapien
ccttaatgattggagatgatgtatttccttgat

SEQ ID NO: 720635 - DNA, 33 bp, Homo sapien
aatggttaagagactacgaaacctgagttttaa

SEQ ID NO: 720636 - DNA, 33 bp, Homo sapien
aatggttaagagactatgaaacctgagttttaa

SEQ ID NO: 720637 - DNA, 33 bp, Homo sapien
aaaataatccacggaacgcacagtacctggtgc

SEQ ID NO: 720638 - DNA, 33 bp, Homo sapien
aaaataatccacggaaggcacagtacctggtgc

SEQ ID NO: 720639 - DNA, 33 bp, Homo sapien
tcatgtgaccataagcaaaacccttcacatctt

SEQ ID NO: 720640 - DNA, 33 bp, Homo sapien
tcatgtgaccataagcgaaacccttcacatctt

SEQ ID NO: 720641 - DNA, 33 bp, Homo sapien
caagagtgtcaggagacggcaaggtcaagtagt

SEQ ID NO: 720642 - DNA, 33 bp, Homo sapien
caagagtgtcaggagatggcaaggtcaagtagt

SEQ ID NO: 720643 - DNA, 33 bp, Homo sapien
gacacaatagacttgacgaatacttgctaaatg

SEQ ID NO: 720644 - DNA, 33 bp, Homo sapien
gacacaatagacttgatgaatacttgctaaatg

SEQ ID NO: 720645 - DNA, 33 bp, Homo sapien
catgcatcacagcgaaagtgaacctataaatat

SEQ ID NO: 720646 - DNA, 33 bp, Homo sapien
catgcatcacagcgaaggtgaacctataaatat

SEQ ID NO: 720647 - DNA, 33 bp, Homo sapien
catgaaaattctgaatcatgatgtactcccaaa

SEQ ID NO: 720648 - DNA, 33 bp, Homo sapien
catgaaaattctgaattatgatgtactcccaaa

SEQ ID NO: 720649 - DNA, 33 bp, Homo sapien
tgtaatagcatcactacattttcaaaagggcaa

SEQ ID NO: 720650 - DNA, 33 bp, Homo sapien
tgtaatagcatcactagattttcaaaagggcaa

SEQ ID NO: 720651 - DNA, 33 bp, Homo sapien
ccagcaatgatgagaaactggaaggggcaagga

SEQ ID NO: 720652 - DNA, 33 bp, Homo sapien
ccagcaatgatgagaagctggaaggggcaagga

SEQ ID NO: 720653 - DNA, 33 bp, Homo sapien
gagaaggctgctgagtaactaacaggtggataa

SEQ ID NO: 720654 - DNA, 33 bp, Homo sapien
gagaaggctgctgagtgactaacaggtggataa

SEQ ID NO: 720655 - DNA, 33 bp, Homo sapien
tagtttccaatcagacactttcagaagagttgc

SEQ ID NO: 720656 - DNA, 33 bp, Homo sapien
tagtttccaatcagacgctttcagaagagttgc

SEQ ID NO: 720657 - DNA, 33 bp, Homo sapien
actcccttgcagcattcaacactctgaacattc

SEQ ID NO: 720658 - DNA, 33 bp, Homo sapien
actcccttgcagcatttaacactctgaacattc

SEQ ID NO: 720659 - DNA, 33 bp, Homo sapien
aaaaaagaaggagttaagaatggttcctcagct

SEQ ID NO: 720660 - DNA, 33 bp, Homo sapien
aaaaaagaaggagttaggaatggttcctcagct

SEQ ID NO: 720661 - DNA, 33 bp, Homo sapien
atttctactaactataagccatgactcttataa

SEQ ID NO: 720662 - DNA, 33 bp, Homo sapien
atttctactaactatatgccatgactcttataa

SEQ ID NO: 720663 - DNA, 33 bp, Homo sapien
tcagaaaaacaattcaaagtatcaataagaaat

SEQ ID NO: 720664 - DNA, 33 bp, Homo sapien
tcagaaaaacaattcagagtatcaataagaaat

SEQ ID NO: 720665 - DNA, 33 bp, Homo sapien
agttattcaacaataactagagaaagcagaaga

SEQ ID NO: 720666 - DNA, 33 bp, Homo sapien
agttattcaacaataattagagaaagcagaaga

SEQ ID NO: 720667 - DNA, 33 bp, Homo sapien
gttaagtgaaattagacagagaaagacaaattt

SEQ ID NO: 720668 - DNA, 33 bp, Homo sapien
gttaagtgaaattagatagagaaagacaaattt

SEQ ID NO: 720669 - DNA, 33 bp, Homo sapien
acaggatttttgaaaccgtatccactccctcaa

SEQ ID NO: 720670 - DNA, 33 bp, Homo sapien
acaggatttttgaaactgtatccactccctcaa

SEQ ID NO: 720671 - DNA, 33 bp, Homo sapien
aagtaacagattataactgatggtaattgtata

SEQ ID NO: 720672 - DNA, 33 bp, Homo sapien
aagtaacagattataagtgatggtaattgtata

SEQ ID NO: 720673 - DNA, 33 bp, Homo sapien
ccgaagcataaatataaggcagatagcgtcaac

SEQ ID NO: 720674 - DNA, 33 bp, Homo sapien
ccgaagcataaatatacggcagatagcgtcaac

SEQ ID NO: 720675 - DNA, 33 bp, Homo sapien
agagagtccaagaagtcaactagaggacacatg

SEQ ID NO: 720676 - DNA, 33 bp, Homo sapien
agagagtccaagaagtgaactagaggacacatg

SEQ ID NO: 720677 - DNA, 33 bp, Homo sapien
tctgcttttaaatagcactgtactgcttcatta

SEQ ID NO: 720678 - DNA, 33 bp, Homo sapien
tctgcttttaaatagcgctgtactgcttcatta

SEQ ID NO: 720679 - DNA, 33 bp, Homo sapien
agaagcaggccaaagccgatatgtgatccaggc

SEQ ID NO: 720680 - DNA, 33 bp, Homo sapien
agaagcaggccaaagctgatatgtgatccaggc

SEQ ID NO: 720681 - DNA, 33 bp, Homo sapien
aagataaacagatggccagtaagtaaatgaaaa

SEQ ID NO: 720682 - DNA, 33 bp, Homo sapien
aagataaacagatggctagtaagtaaatgaaaa

SEQ ID NO: 720683 - DNA, 33 bp, Homo sapien
gaccgtaaatgtatgacaatttctggcctctca

SEQ ID NO: 720684 - DNA, 33 bp, Homo sapien
gaccgtaaatgtatgataatttctggcctctca

SEQ ID NO: 720685 - DNA, 33 bp, Homo sapien
tagttcaaattttgccaggagatagtaatgtaa

SEQ ID NO: 720686 - DNA, 33 bp, Homo sapien
tagttcaaattttgccgggagatagtaatgtaa

SEQ ID NO: 720687 - DNA, 33 bp, Homo sapien
ggtcttttgtatatgaatacgttcagcttttct

SEQ ID NO: 720688 - DNA, 33 bp, Homo sapien
ggtcttttgtatatgagtacgttcagcttttct

SEQ ID NO: 720689 - DNA, 33 bp, Homo sapien
gtagtagaaaacattcaattacacattagccat

SEQ ID NO: 720690 - DNA, 33 bp, Homo sapien
gtagtagaaaacattcgattacacattagccat

SEQ ID NO: 720691 - DNA, 33 bp, Homo sapien
aagaaccacagatacaagggagtaaaggtccta

SEQ ID NO: 720692 - DNA, 33 bp, Homo sapien
aagaaccacagatacaggggagtaaaggtccta

SEQ ID NO: 720693 - DNA, 33 bp, Homo sapien
gatgatggtggtaaacactgtagtggaactgag

SEQ ID NO: 720694 - DNA, 33 bp, Homo sapien
gatgatggtggtaaaccctgtagtggaactgag

SEQ ID NO: 720695 - DNA, 33 bp, Homo sapien
ttgagctagggcagtacagaagatggtgtatac

SEQ ID NO: 720696 - DNA, 33 bp, Homo sapien
ttgagctagggcagtatagaagatggtgtatac

SEQ ID NO: 720697 - DNA, 33 bp, Homo sapien
atctggaaaaaacatacgtaattcattggacat

SEQ ID NO: 720698 - DNA, 33 bp, Homo sapien
atctggaaaaaacataggtaattcattggacat

SEQ ID NO: 720699 - DNA, 33 bp, Homo sapien
gtgtactatcagcaataatacagaagcaacgca

SEQ ID NO: 720700 - DNA, 33 bp, Homo sapien
gtgtactatcagcaatcatacagaagcaacgca

SEQ ID NO: 720701 - DNA, 33 bp, Homo sapien
tttcaaaataggagagaaaatttggaatgttct

SEQ ID NO: 720702 - DNA, 33 bp, Homo sapien
tttcaaaataggagaggaaatttggaatgttct

SEQ ID NO: 720703 - DNA, 33 bp, Homo sapien
tacctttgttctttgacattgttgacctacaga

SEQ ID NO: 720704 - DNA, 33 bp, Homo sapien
tacctttgttctttgatattgttgacctacaga

SEQ ID NO: 720705 - DNA, 33 bp, Homo sapien
tacagattttgataccaaggtaatggagtaatg

SEQ ID NO: 720706 - DNA, 33 bp, Homo sapien
tacagattttgataccgaggtaatggagtaatg

SEQ ID NO: 720707 - DNA, 33 bp, Homo sapien
aataagtggattgtacaatgaataaatgaatga

SEQ ID NO: 720708 - DNA, 33 bp, Homo sapien
aataagtggattgtacgatgaataaatgaatga

SEQ ID NO: 720709 - DNA, 33 bp, Homo sapien
cccctgtaatgtcggcagacactcaatgccagc

SEQ ID NO: 720710 - DNA, 33 bp, Homo sapien
cccctgtaatgtcggcggacactcaatgccagc

SEQ ID NO: 720711 - DNA, 33 bp, Homo sapien
accccaaaaccatataataatctcgatacagaa

SEQ ID NO: 720712 - DNA, 33 bp, Homo sapien
accccaaaaccatatagtaatctcgatacagaa

SEQ ID NO: 720713 - DNA, 33 bp, Homo sapien
cttaggtcattttgtacgctgtaacagaatacc

SEQ ID NO: 720714 - DNA, 33 bp, Homo sapien
cttaggtcattttgtatgctgtaacagaatacc

SEQ ID NO: 720715 - DNA, 33 bp, Homo sapien
tcggcttttatgtcaccgcactcttcagatttt

SEQ ID NO: 720716 - DNA, 33 bp, Homo sapien
tcggcttttatgtcactgcactcttcagatttt

SEQ ID NO: 720717 - DNA, 33 bp, Homo sapien
gccaacaaaagagatggaagaatagccaatgaa

SEQ ID NO: 720718 - DNA, 33 bp, Homo sapien
gccaacaaaagagatgtaagaatagccaatgaa

SEQ ID NO: 720719 - DNA, 33 bp, Homo sapien
ctgtaggaaccaaaccaaagtcctgagtttgga

SEQ ID NO: 720720 - DNA, 33 bp, Homo sapien
ctgtaggaaccaaaccgaagtcctgagtttgga

SEQ ID NO: 720721 - DNA, 33 bp, Homo sapien
tctgtgtccataaccaactatggttgcagttct

SEQ ID NO: 720722 - DNA, 33 bp, Homo sapien
tctgtgtccataaccatctatggttgcagttct

SEQ ID NO: 720723 - DNA, 33 bp, Homo sapien
gtctggaggctaggaaatgcaagataaaggtgc

SEQ ID NO: 720724 - DNA, 33 bp, Homo sapien
gtctggaggctaggaagtgcaagataaaggtgc

SEQ ID NO: 720725 - DNA, 33 bp, Homo sapien
ataacaacatttattcacatttcatttaagtca

SEQ ID NO: 720726 - DNA, 33 bp, Homo sapien
ataacaacatttattcgcatttcatttaagtca

SEQ ID NO: 720727 - DNA, 33 bp, Homo sapien
gtcctctccaggtactaaaggaaggataaggta

SEQ ID NO: 720728 - DNA, 33 bp, Homo sapien
gtcctctccaggtactgaaggaaggataaggta

SEQ ID NO: 720729 - DNA, 33 bp, Homo sapien
cagagcagcctttctacgcactctgaaaacctc

SEQ ID NO: 720730 - DNA, 33 bp, Homo sapien
cagagcagcctttctatgcactctgaaaacctc

SEQ ID NO: 720731 - DNA, 33 bp, Homo sapien
tataaaacatacataccacagagtttcaggctc

SEQ ID NO: 720732 - DNA, 33 bp, Homo sapien
tataaaacatacatacgacagagtttcaggctc

SEQ ID NO: 720733 - DNA, 33 bp, Homo sapien
ggcaacaactcctctgaacttcttatgtgagga

SEQ ID NO: 720734 - DNA, 33 bp, Homo sapien
ggcaacaactcctctggacttcttatgtgagga

SEQ ID NO: 720735 - DNA, 33 bp, Homo sapien
tagataacgttggatcgctctctttcataatat

SEQ ID NO: 720736 - DNA, 33 bp, Homo sapien
tagataacgttggatctctctctttcataatat

SEQ ID NO: 720737 - DNA, 33 bp, Homo sapien
tgctttacaaaagacactgtcaggagaatcaag

SEQ ID NO: 720738 - DNA, 33 bp, Homo sapien
tgctttacaaaagacattgtcaggagaatcaag

SEQ ID NO: 720739 - DNA, 33 bp, Homo sapien
ggatttctactatgtgaatcagcatgtatatgt

SEQ ID NO: 720740 - DNA, 33 bp, Homo sapien
ggatttctactatgtggatcagcatgtatatgt

SEQ ID NO: 720741 - DNA, 33 bp, Homo sapien
ataatggactagcctcccttcagacctcaatag

SEQ ID NO: 720742 - DNA, 33 bp, Homo sapien
ataatggactagcctctcttcagacctcaatag

SEQ ID NO: 720743 - DNA, 33 bp, Homo sapien
gatgagatgatacttgcacccagtaaagagtca

SEQ ID NO: 720744 - DNA, 33 bp, Homo sapien
gatgagatgatacttgtacccagtaaagagtca

SEQ ID NO: 720745 - DNA, 33 bp, Homo sapien
attaactcgcctgttacaatcgatatgttgtct

SEQ ID NO: 720746 - DNA, 33 bp, Homo sapien
attaactcgcctgttataatcgatatgttgtct

SEQ ID NO: 720747 - DNA, 33 bp, Homo sapien
cgtaagtatggaaagacatatgcagatggattt

SEQ ID NO: 720748 - DNA, 33 bp, Homo sapien
cgtaagtatggaaagatatatgcagatggattt

SEQ ID NO: 720749 - DNA, 33 bp, Homo sapien
ttaatgaccataccaaactcaaatgaggatgtg

SEQ ID NO: 720750 - DNA, 33 bp, Homo sapien
ttaatgaccataccaagctcaaatgaggatgtg

SEQ ID NO: 720751 - DNA, 33 bp, Homo sapien
ctactgatggatgtcccacatactggaaatgta

SEQ ID NO: 720752 - DNA, 33 bp, Homo sapien
ctactgatggatgtcctacatactggaaatgta

SEQ ID NO: 720753 - DNA, 33 bp, Homo sapien
cgtctatttttgcaaactctagtagcgtataag

SEQ ID NO: 720754 - DNA, 33 bp, Homo sapien
cgtctatttttgcaaattctagtagcgtataag

SEQ ID NO: 720755 - DNA, 33 bp, Homo sapien
actggatttatctttcccaatatccaatgtctc

SEQ ID NO: 720756 - DNA, 33 bp, Homo sapien
actggatttatctttcgcaatatccaatgtctc

SEQ ID NO: 720757 - DNA, 33 bp, Homo sapien; identical to SEQ ID NO: 720755

SEQ ID NO: 720758 - DNA, 33 bp, Homo sapien; identical to SEQ ID NO: 720756

SEQ ID NO: 720759 - DNA, 33 bp, Homo sapien
tctctcaaggacaccaactattatcttttgccc

SEQ ID NO: 720760 - DNA, 33 bp, Homo sapien
tctctcaaggacaccagctattatcttttgccc

SEQ ID NO: 720761 - DNA, 33 bp, Homo sapien
tcacaacgagatgataagaaactgaagtttgta

SEQ ID NO: 720762 - DNA, 33 bp, Homo sapien
tcacaacgagatgataggaaactgaagtttgta

SEQ ID NO: 720763 - DNA, 33 bp, Homo sapien
aatcaagtgaataggacgattgtttttgtggct

SEQ ID NO: 720764 - DNA, 33 bp, Homo sapien
aatcaagtgaataggatgattgtttttgtggct

SEQ ID NO: 720765 - DNA, 33 bp, Homo sapien
ttgctgaatggtgttaggtagattgatagtgag

SEQ ID NO: 720766 - DNA, 33 bp, Homo sapien
ttgctgaatggtgttatgtagattgatagtgag

SEQ ID NO: 720767 - DNA, 33 bp, Homo sapien
caggtagggacctacaatctgataggagtctag

SEQ ID NO: 720768 - DNA, 33 bp, Homo sapien
caggtagggacctacagtctgataggagtctag

SEQ ID NO: 720769 - DNA, 33 bp, Homo sapien
agggctgaatgggagaagtagtagaaagtaaac

SEQ ID NO: 720770 - DNA, 33 bp, Homo sapien
agggctgaatgggagaggtagtagaaagtaaac

SEQ ID NO: 720771 - DNA, 33 bp, Homo sapien
gggtttgagcaggtaaatgacttgttctgacat

SEQ ID NO: 720772 - DNA, 33 bp, Homo sapien
gggtttgagcaggtaagtgacttgttctgacat

SEQ ID NO: 720773 - DNA, 33 bp, Homo sapien
tttactcccaggcaaccattgatctattttctg

SEQ ID NO: 720774 - DNA, 33 bp, Homo sapien
tttactcccaggcaactattgatctattttctg

SEQ ID NO: 720775 - DNA, 33 bp, Homo sapien
tgtatatttaccaaaccgaaaaaagtgaggaga

SEQ ID NO: 720776 - DNA, 33 bp, Homo sapien
tgtatatttaccaaactgaaaaaagtgaggaga

SEQ ID NO: 720777 - DNA, 33 bp, Homo sapien
taattcaaaacttcaaatgtaagattggggctg

SEQ ID NO: 720778 - DNA, 33 bp, Homo sapien
taattcaaaacttcaagtgtaagattggggctg

SEQ ID NO: 720779 - DNA, 33 bp, Homo sapien
gttgtgaagtacctcaactgtgataagaaccac

SEQ ID NO: 720780 - DNA, 33 bp, Homo sapien
gttgtgaagtacctcatctgtgataagaaccac

SEQ ID NO: 720781 - DNA, 33 bp, Homo sapien
actttccaggcccaggaaaaagtgagtgtggct

SEQ ID NO: 720782 - DNA, 33 bp, Homo sapien
actttccaggcccagggaaaagtgagtgtggct

SEQ ID NO: 720783 - DNA, 33 bp, Homo sapien
aaggcaatacaagagcagcctaagacagtgttg

SEQ ID NO: 720784 - DNA, 33 bp, Homo sapien
aaggcaatacaagagcggcctaagacagtgttg

SEQ ID NO: 720785 - DNA, 33 bp, Homo sapien
gataaatacaaaacgaataggaaattgatagac

SEQ ID NO: 720786 - DNA, 33 bp, Homo sapien
gataaatacaaaacgattaggaaattgatagac

SEQ ID NO: 720787 - DNA, 33 bp, Homo sapien
ctttcctagttggggacgcctaaacttcatcga

SEQ ID NO: 720788 - DNA, 33 bp, Homo sapien
ctttcctagttggggatgcctaaacttcatcga

SEQ ID NO: 720789 - DNA, 33 bp, Homo sapien
aatcctcaactggaacccttgcaggtgctacca

SEQ ID NO: 720790 - DNA, 33 bp, Homo sapien
aatcctcaactggaactcttgcaggtgctacca

SEQ ID NO: 720791 - DNA, 33 bp, Homo sapien
acttgagagtaccatgaaggttacaattaacat

SEQ ID NO: 720792 - DNA, 33 bp, Homo sapien
acttgagagtaccatgcaggttacaattaacat

SEQ ID NO: 720793 - DNA, 33 bp, Homo sapien
tggttgtctgaaccaaatggaacccatcagaac

SEQ ID NO: 720794 - DNA, 33 bp, Homo sapien
tggttgtctgaaccaagtggaacccatcagaac

SEQ ID NO: 720795 - DNA, 33 bp, Homo sapien
aaagcatatgtctaaccactatgataatcttta

SEQ ID NO: 720796 - DNA, 33 bp, Homo sapien
aaagcatatgtctaactactatgataatcttta

SEQ ID NO: 720797 - DNA, 33 bp, Homo sapien
gaagaacagagaaaacagaaatgatgatcaaag

SEQ ID NO: 720798 - DNA, 33 bp, Homo sapien
gaagaacagagaaaacggaaatgatgatcaaag

SEQ ID NO: 720799 - DNA, 33 bp, Homo sapien
atatctgaagagttaacggacaaaaggaaccag

SEQ ID NO: 720800 - DNA, 33 bp, Homo sapien
atatctgaagagttaatggacaaaaggaaccag

SEQ ID NO: 720801 - DNA, 33 bp, Homo sapien
tagggtagaaaggtgaaagtaggatttagaact

SEQ ID NO: 720802 - DNA, 33 bp, Homo sapien
tagggtagaaaggtgacagtaggatttagaact

SEQ ID NO: 720803 - DNA, 33 bp, Homo sapien
gcattttaaatgctaaactcatatctggatcaa

SEQ ID NO: 720804 - DNA, 33 bp, Homo sapien
gcattttaaatgctaagctcatatctggatcaa

SEQ ID NO: 720805 - DNA, 33 bp, Homo sapien
ttaatagaatgatgtacatccatttgggtatat

SEQ ID NO: 720806 - DNA, 33 bp, Homo sapien
ttaatagaatgatgtatatccatttgggtatat

SEQ ID NO: 720807 - DNA, 33 bp, Homo sapien
taatgatagtttttaacaactgtagctttgtag

SEQ ID NO: 720808 - DNA, 33 bp, Homo sapien
taatgatagtttttaataactgtagctttgtag

SEQ ID NO: 720809 - DNA, 33 bp, Homo sapien
ctggtggtctttctaacccaacctggatatgat

SEQ ID NO: 720810 - DNA, 33 bp, Homo sapien
ctggtggtctttctaagccaacctggatatgat

SEQ ID NO: 720811 - DNA, 33 bp, Homo sapien
aacaagagtttacacacggtacacttcaactcc

SEQ ID NO: 720812 - DNA, 33 bp, Homo sapien
aacaagagtttacacatggtacacttcaactcc

SEQ ID NO: 720813 - DNA, 33 bp, Homo sapien
agaatccaggtagcaaaaaagattatcaagatt

SEQ ID NO: 720814 - DNA, 33 bp, Homo sapien
agaatccaggtagcaacaaagattatcaagatt

SEQ ID NO: 720815 - DNA, 33 bp, Homo sapien
ataattcctcaaaataacagcatttgtaaactt

SEQ ID NO: 720816 - DNA, 33 bp, Homo sapien
ataattcctcaaaatatcagcatttgtaaactt

SEQ ID NO: 720817 - DNA, 33 bp, Homo sapien
cttgagtctgttgaacagtacacatataaaatg

SEQ ID NO: 720818 - DNA, 33 bp, Homo sapien
cttgagtctgttgaactgtacacatataaaatg

SEQ ID NO: 720819 - DNA, 33 bp, Homo sapien
tcaaatagaaagtgacaggccaaaatccaggta

SEQ ID NO: 720820 - DNA, 33 bp, Homo sapien
tcaaatagaaagtgacgggccaaaatccaggta

SEQ ID NO: 720821 - DNA, 33 bp, Homo sapien
tttctcactgaaatcacattttaaatggagaaa

SEQ ID NO: 720822 - DNA, 33 bp, Homo sapien
tttctcactgaaatcatattttaaatggagaaa

SEQ ID NO: 720823 - DNA, 33 bp, Homo sapien
gcacatattgatgcaaatagtcatctatcacag

SEQ ID NO: 720824 - DNA, 33 bp, Homo sapien
gcacatattgatgcaagtagtcatctatcacag

SEQ ID NO: 720825 - DNA, 33 bp, Homo sapien
atgtgaactctggatccagactgcctatattca

SEQ ID NO: 720826 - DNA, 33 bp, Homo sapien
atgtgaactctggatctagactgcctatattca

SEQ ID NO: 720827 - DNA, 33 bp, Homo sapien
agggtgggagttgtgccgcaaatttaaggagac

SEQ ID NO: 720828 - DNA, 33 bp, Homo sapien
agggtgggagttgtgctgcaaatttaaggagac

SEQ ID NO: 720829 - DNA, 33 bp, Homo sapien
gcctgagatgaaagagaagcaattgggccacac

SEQ ID NO: 720830 - DNA, 33 bp, Homo sapien
gcctgagatgaaagaggagcaattgggccacac

SEQ ID NO: 720831 - DNA, 33 bp, Homo sapien
aacagcatctacttgactactgatactttgatc

SEQ ID NO: 720832 - DNA, 33 bp, Homo sapien
aacagcatctacttgattactgatactttgatc

SEQ ID NO: 720833 - DNA, 33 bp, Homo sapien
tgttcatcaaaagataccactcaaatgtcagaa

SEQ ID NO: 720834 - DNA, 33 bp, Homo sapien
tgttcatcaaaagatatcactcaaatgtcagaa

SEQ ID NO: 720835 - DNA, 33 bp, Homo sapien
gctggtaatatactgcaagttcttcaagctaca

SEQ ID NO: 720836 - DNA, 33 bp, Homo sapien
gctggtaatatactgcgagttcttcaagctaca

SEQ ID NO: 720837 - DNA, 33 bp, Homo sapien; identical to SEQ ID NO: 720835

SEQ ID NO: 720838 - DNA, 33 bp, Homo sapien; identical to SEQ ID NO: 720836

SEQ ID NO: 720839 - DNA, 33 bp, Homo sapien
atttcaagttaccggacctttaagcattccctg

SEQ ID NO: 720840 - DNA, 33 bp, Homo sapien
atttcaagttaccggatctttaagcattccctg

SEQ ID NO: 720841 - DNA, 33 bp, Homo sapien; identical to SEQ ID NO: 720839

SEQ ID NO: 720842 - DNA, 33 bp, Homo sapien; identical to SEQ ID NO: 720840

SEQ ID NO: 720843 - DNA, 33 bp, Homo sapien
agccagccacaaaagacgatatactgtgtaatt

SEQ ID NO: 720844 - DNA, 33 bp, Homo sapien
agccagccacaaaagatgatatactgtgtaatt

SEQ ID NO: 720845 - DNA, 33 bp, Homo sapien
tctgatgataccaataaacaaagagacacacac

SEQ ID NO: 720846 - DNA, 33 bp, Homo sapien
tctgatgataccaatagacaaagagacacacac

SEQ ID NO: 720847 - DNA, 33 bp, Homo sapien
tccaattgttacaaaaagttcggagtctaaaca

SEQ ID NO: 720848 - DNA, 33 bp, Homo sapien
tccaattgttacaaaatgttcggagtctaaaca

SEQ ID NO: 720849 - DNA, 33 bp, Homo sapien
tacagagggcctttagaacttcttgcgaaagat

SEQ ID NO: 720850 - DNA, 33 bp, Homo sapien
tacagagggcctttaggacttcttgcgaaagat

SEQ ID NO: 720851 - DNA, 33 bp, Homo sapien
gtgaatagcgtggtaacgaacatatgagtgcgt

SEQ ID NO: 720852 - DNA, 33 bp, Homo sapien
gtgaatagcgtggtaatgaacatatgagtgcgt

SEQ ID NO: 720853 - DNA, 33 bp, Homo sapien
ctcaaaatgaatcagaaggcaaaatttaaaaga

SEQ ID NO: 720854 - DNA, 33 bp, Homo sapien
ctcaaaatgaatcagagggcaaaatttaaaaga

SEQ ID NO: 720855 - DNA, 33 bp, Homo sapien
tatttacattattcagaatataagccaggtctc

SEQ ID NO: 720856 - DNA, 33 bp, Homo sapien
tatttacattattcaggatataagccaggtctc

SEQ ID NO: 720857 - DNA, 33 bp, Homo sapien
actgatgagtgatagtcaaaggttgatatgcca

SEQ ID NO: 720858 - DNA, 33 bp, Homo sapien
actgatgagtgatagtgaaaggttgatatgcca

SEQ ID NO: 720859 - DNA, 33 bp, Homo sapien
ggattaaaaggcagacaatcaagtatgaaataa

SEQ ID NO: 720860 - DNA, 33 bp, Homo sapien
ggattaaaaggcagacgatcaagtatgaaataa

SEQ ID NO: 720861 - DNA, 33 bp, Homo sapien
atccagaggtgacatacgaccaggctctctctg

SEQ ID NO: 720862 - DNA, 33 bp, Homo sapien
atccagaggtgacatatgaccaggctctctctg

SEQ ID NO: 720863 - DNA, 33 bp, Homo sapien
gcactgaaagctggataaaagcttatgaagaaa

SEQ ID NO: 720864 - DNA, 33 bp, Homo sapien
gcactgaaagctggatgaaagcttatgaagaaa

SEQ ID NO: 720865 - DNA, 33 bp, Homo sapien
tggctacatttacaagccactgttagattttat

SEQ ID NO: 720866 - DNA, 33 bp, Homo sapien
tggctacatttacaaggcactgttagattttat

SEQ ID NO: 720867 - DNA, 33 bp, Homo sapien
tgtagtaacttgtggactaattatggctcagag

SEQ ID NO: 720868 - DNA, 33 bp, Homo sapien
tgtagtaacttgtggattaattatggctcagag

SEQ ID NO: 720869 - DNA, 33 bp, Homo sapien
tgcttcacaaatggtacggacttcacaatttgg

SEQ ID NO: 720870 - DNA, 33 bp, Homo sapien
tgcttcacaaatggtatggacttcacaatttgg

SEQ ID NO: 720871 - DNA, 33 bp, Homo sapien
tatttctttggccaaccaagtgtccctttctac

SEQ ID NO: 720872 - DNA, 33 bp, Homo sapien
tatttctttggccaactaagtgtccctttctac

SEQ ID NO: 720873 - DNA, 33 bp, Homo sapien
ggagttcagagtctaacgcagaagaaatatatt

SEQ ID NO: 720874 - DNA, 33 bp, Homo sapien
ggagttcagagtctaatgcagaagaaatatatt

SEQ ID NO: 720875 - DNA, 33 bp, Homo sapien
ggatgttcatctcctaaagcttcatatcttcat

SEQ ID NO: 720876 - DNA, 33 bp, Homo sapien
ggatgttcatctcctagagcttcatatcttcat

SEQ ID NO: 720877 - DNA, 33 bp, Homo sapien
aaagaaagaaatgataaggagtagatctgaacc

SEQ ID NO: 720878 - DNA, 33 bp, Homo sapien
aaagaaagaaatgatagggagtagatctgaacc

SEQ ID NO: 720879 - DNA, 33 bp, Homo sapien
tgcaaatcacatacctcacaaagtactcatatg

SEQ ID NO: 720880 - DNA, 33 bp, Homo sapien
tgcaaatcacatacctgacaaagtactcatatg

SEQ ID NO: 720881 - DNA, 33 bp, Homo sapien
agaccatggatttaacagtccgatatagtttta

SEQ ID NO: 720882 - DNA, 33 bp, Homo sapien
agaccatggatttaaccgtccgatatagtttta

SEQ ID NO: 720883 - DNA, 33 bp, Homo sapien
tactggctacgttcaacccagggaaatgtagag

SEQ ID NO: 720884 - DNA, 33 bp, Homo sapien
tactggctacgttcaatccagggaaatgtagag

SEQ ID NO: 720885 - DNA, 33 bp, Homo sapien
gttacagggttctggacatatggtgccttagtt

SEQ ID NO: 720886 - DNA, 33 bp, Homo sapien
gttacagggttctggatatatggtgccttagtt

SEQ ID NO: 720887 - DNA, 33 bp, Homo sapien
taacttgattcaattaacatctgaggagctctt

SEQ ID NO: 720888 - DNA, 33 bp, Homo sapien
taacttgattcaattagcatctgaggagctctt

SEQ ID NO: 720889 - DNA, 33 bp, Homo sapien
tgtagcattagctgtgcacaatatgatatcaac

SEQ ID NO: 720890 - DNA, 33 bp, Homo sapien
tgtagcattagctgtgtacaatatgatatcaac

SEQ ID NO: 720891 - DNA, 33 bp, Homo sapien
ctagaatatgccaaaaaacaaatcttacacata

SEQ ID NO: 720892 - DNA, 33 bp, Homo sapien
ctagaatatgccaaaagacaaatcttacacata

SEQ ID NO: 720893 - DNA, 33 bp, Homo sapien
caaaagactccagttcactatggatgtgcctct

SEQ ID NO: 720894 - DNA, 33 bp, Homo sapien
caaaagactccagttccctatggatgtgcctct

SEQ ID NO: 720895 - DNA, 33 bp, Homo sapien
tgcctggcaggtataacaaagtgttttaaatac

SEQ ID NO: 720896 - DNA, 33 bp, Homo sapien
tgcctggcaggtataataaagtgttttaaatac

SEQ ID NO: 720897 - DNA, 33 bp, Homo sapien
ggatattgtccctgggaatggccttatttatct

SEQ ID NO: 720898 - DNA, 33 bp, Homo sapien
ggatattgtccctggggatggccttatttatct

SEQ ID NO: 720899 - DNA, 33 bp, Homo sapien
agtcatcaggcagaggcattcgaaggtctggaa

SEQ ID NO: 720900 - DNA, 33 bp, Homo sapien
agtcatcaggcagaggtattcgaaggtctggaa

SEQ ID NO: 720901 - DNA, 33 bp, Homo sapien
cctattcttctaaatcacaattgtctaaggtaa

SEQ ID NO: 720902 - DNA, 33 bp, Homo sapien
cctattcttctaaatcgcaattgtctaaggtaa

SEQ ID NO: 720903 - DNA, 33 bp, Homo sapien
acttcttaatgtgtgccaaatgcttggttgtga

SEQ ID NO: 720904 - DNA, 33 bp, Homo sapien
acttcttaatgtgtgctaaatgcttggttgtga

SEQ ID NO: 720905 - DNA, 33 bp, Homo sapien
ccatgttactcaggcaactaggaaggttttcta

SEQ ID NO: 720906 - DNA, 33 bp, Homo sapien
ccatgttactcaggcagctaggaaggttttcta

SEQ ID NO: 720907 - DNA, 33 bp, Homo sapien
tatagaccaatattccccattaacacagaggca

SEQ ID NO: 720908 - DNA, 33 bp, Homo sapien
tatagaccaatattcctcattaacacagaggca

SEQ ID NO: 720909 - DNA, 33 bp, Homo sapien
tgtcacaaagagtaccaaaaacttcgaggtaca

SEQ ID NO: 720910 - DNA, 33 bp, Homo sapien
tgtcacaaagagtaccgaaaacttcgaggtaca

SEQ ID NO: 720911 - DNA, 33 bp, Homo sapien
tttctgctgcaaataacctacatctttgagcct

SEQ ID NO: 720912 - DNA, 33 bp, Homo sapien
tttctgctgcaaataagctacatctttgagcct

SEQ ID NO: 720913 - DNA, 33 bp, Homo sapien
cttaaagattaaagtcacatgaactaaaacata

SEQ ID NO: 720914 - DNA, 33 bp, Homo sapien
cttaaagattaaagtcgcatgaactaaaacata

SEQ ID NO: 720915 - DNA, 33 bp, Homo sapien
tggacttagaggactcaccgggaaaggttaaaa

SEQ ID NO: 720916 - DNA, 33 bp, Homo sapien
tggacttagaggactcgccgggaaaggttaaaa

SEQ ID NO: 720917 - DNA, 33 bp, Homo sapien
gatgatctcttcacttaaaggtcatctgaatta

SEQ ID NO: 720918 - DNA, 33 bp, Homo sapien
gatgatctcttcactttaaggtcatctgaatta

SEQ ID NO: 720919 - DNA, 33 bp, Homo sapien
tccacaaagctgattacgttattatccacagaa

SEQ ID NO: 720920 - DNA, 33 bp, Homo sapien
tccacaaagctgattatgttattatccacagaa

SEQ ID NO: 720921 - DNA, 33 bp, Homo sapien
aaaatctttcagaaaacggaagagaagggaata

SEQ ID NO: 720922 - DNA, 33 bp, Homo sapien
aaaatctttcagaaaatggaagagaagggaata

SEQ ID NO: 720923 - DNA, 33 bp, Homo sapien
taagttaaaatgcacactgtaagcactctaaaa

SEQ ID NO: 720924 - DNA, 33 bp, Homo sapien
taagttaaaatgcacagtgtaagcactctaaaa

SEQ ID NO: 720925 - DNA, 33 bp, Homo sapien
ttccattcttgtttaccatttctgttacttttc

SEQ ID NO: 720926 - DNA, 33 bp, Homo sapien
ttccattcttgtttactatttctgttacttttc

SEQ ID NO: 720927 - DNA, 33 bp, Homo sapien
taatacacaagcttaactgagatgtcaaaacag

SEQ ID NO: 720928 - DNA, 33 bp, Homo sapien
taatacacaagcttaattgagatgtcaaaacag

SEQ ID NO: 720929 - DNA, 33 bp, Homo sapien
aaatcaaaatagcaaaaatgccaatttatctac

SEQ ID NO: 720930 - DNA, 33 bp, Homo sapien
aaatcaaaatagcaaatatgccaatttatctac

SEQ ID NO: 720931 - DNA, 33 bp, Homo sapien
tataaattcataaaaccgtatctggtgcttagc

SEQ ID NO: 720932 - DNA, 33 bp, Homo sapien
tataaattcataaaactgtatctggtgcttagc

SEQ ID NO: 720933 - DNA, 33 bp, Homo sapien
tgaagattagtaatagaatgctttgtgaaaatc

SEQ ID NO: 720934 - DNA, 33 bp, Homo sapien
tgaagattagtaataggatgctttgtgaaaatc

SEQ ID NO: 720935 - DNA, 33 bp, Homo sapien
atacagagagactgaacaaattatgaacaaatt

SEQ ID NO: 720936 - DNA, 33 bp, Homo sapien
atacagagagactgaagaaattatgaacaaatt

SEQ ID NO: 720937 - DNA, 33 bp, Homo sapien
aaacaaggagcaaatcacaaatttctttgtttt

SEQ ID NO: 720938 - DNA, 33 bp, Homo sapien
aaacaaggagcaaatctcaaatttctttgtttt

SEQ ID NO: 720939 - DNA, 33 bp, Homo sapien
cctcacagtacatggccccatcttttatcagac

SEQ ID NO: 720940 - DNA, 33 bp, Homo sapien
cctcacagtacatggctccatcttttatcagac

SEQ ID NO: 720941 - DNA, 33 bp, Homo sapien
actttaaataacttgccccaagacaggctctca

SEQ ID NO: 720942 - DNA, 33 bp, Homo sapien
actttaaataacttgctccaagacaggctctca

SEQ ID NO: 720943 - DNA, 33 bp, Homo sapien
aaattatgccagagtacgtattgtcttttatta

SEQ ID NO: 720944 - DNA, 33 bp, Homo sapien
aaattatgccagagtatgtattgtcttttatta

SEQ ID NO: 720945 - DNA, 33 bp, Homo sapien
aaatcaactaattgaaaaactgatccctcatat

SEQ ID NO: 720946 - DNA, 33 bp, Homo sapien
aaatcaactaattgaagaactgatccctcatat

SEQ ID NO: 720947 - DNA, 33 bp, Homo sapien
tcaaatcaggagatcaatcacataaggagttga

SEQ ID NO: 720948 - DNA, 33 bp, Homo sapien
tcaaatcaggagatcagtcacataaggagttga

SEQ ID NO: 720949 - DNA, 33 bp, Homo sapien
tatgtatcacactcctaaaaatcctaccagaaa

SEQ ID NO: 720950 - DNA, 33 bp, Homo sapien
tatgtatcacactcctcaaaatcctaccagaaa

SEQ ID NO: 720951 - DNA, 33 bp, Homo sapien
atatcaattttctccacgttaggttttatgtca

SEQ ID NO: 720952 - DNA, 33 bp, Homo sapien
atatcaattttctccatgttaggttttatgtca

SEQ ID NO: 720953 - DNA, 33 bp, Homo sapien
taaagtcccgtcatcaaattgtgtctggttcaa

SEQ ID NO: 720954 - DNA, 33 bp, Homo sapien
taaagtcccgtcatcacattgtgtctggttcaa

SEQ ID NO: 720955 - DNA, 33 bp, Homo sapien
caataaggagttgcaaaattgaatcaataataa

SEQ ID NO: 720956 - DNA, 33 bp, Homo sapien
caataaggagttgcaacattgaatcaataataa

SEQ ID NO: 720957 - DNA, 33 bp, Homo sapien
gttgtctgacttcctacctcgatcctgaagctt

SEQ ID NO: 720958 - DNA, 33 bp, Homo sapien
gttgtctgacttcctatctcgatcctgaagctt

SEQ ID NO: 720959 - DNA, 33 bp, Homo sapien
cccagttcaattgtaaatactagcactaagctt

SEQ ID NO: 720960 - DNA, 33 bp, Homo sapien
cccagttcaattgtaattactagcactaagctt

SEQ ID NO: 720961 - DNA, 33 bp, Homo sapien
gatctccttcactccaaaatgtctcatggattt

SEQ ID NO: 720962 - DNA, 33 bp, Homo sapien
gatctccttcactccacaatgtctcatggattt

SEQ ID NO: 720963 - DNA, 33 bp, Homo sapien
ttcttcctatccgtgagcatggactgttttcca

SEQ ID NO: 720964 - DNA, 33 bp, Homo sapien
ttcttcctatccgtgatcatggactgttttcca

SEQ ID NO: 720965 - DNA, 33 bp, Homo sapien
ttcgtggcattaattacctacaatctatgataa

SEQ ID NO: 720966 - DNA, 33 bp, Homo sapien
ttcgtggcattaattatctacaatctatgataa

SEQ ID NO: 720967 - DNA, 33 bp, Homo sapien
tttacattttattcaacttactgactcacagag

SEQ ID NO: 720968 - DNA, 33 bp, Homo sapien
tttacattttattcaatttactgactcacagag

SEQ ID NO: 720969 - DNA, 33 bp, Homo sapien
acaatgttctaagcaacggcaaacaatattcag

SEQ ID NO: 720970 - DNA, 33 bp, Homo sapien
acaatgttctaagcaatggcaaacaatattcag

SEQ ID NO: 720971 - DNA, 33 bp, Homo sapien
tggtgcccctcaccaacgatgatgagtaatgca

SEQ ID NO: 720972 - DNA, 33 bp, Homo sapien
tggtgcccctcaccaatgatgatgagtaatgca

SEQ ID NO: 720973 - DNA, 33 bp, Homo sapien
gtcaacctcctaggcaagaaaccatgacctact

SEQ ID NO: 720974 - DNA, 33 bp, Homo sapien
gtcaacctcctaggcaggaaaccatgacctact

SEQ ID NO: 720975 - DNA, 33 bp, Homo sapien
acgcattctgagatgacatggatatgccctgtt

SEQ ID NO: 720976 - DNA, 33 bp, Homo sapien
acgcattctgagatgatatggatatgccctgtt

SEQ ID NO: 720977 - DNA, 33 bp, Homo sapien
tctctggaaaccagtcccaaagaaggaccagca

SEQ ID NO: 720978 - DNA, 33 bp, Homo sapien
tctctggaaaccagtctcaaagaaggaccagca

SEQ ID NO: 720979 - DNA, 33 bp, Homo sapien
gttggtgtttgataaaatggacagaatgttctg

SEQ ID NO: 720980 - DNA, 33 bp, Homo sapien
gttggtgtttgataaagtggacagaatgttctg

SEQ ID NO: 720981 - DNA, 33 bp, Homo sapien
gatctctagaagctaaacttaccaactacttga

SEQ ID NO: 720982 - DNA, 33 bp, Homo sapien
gatctctagaagctaaccttaccaactacttga

SEQ ID NO: 720983 - DNA, 33 bp, Homo sapien
agctcttggtaaatgcaaatcacaaataatttt

SEQ ID NO: 720984 - DNA, 33 bp, Homo sapien
agctcttggtaaatgccaatcacaaataatttt

SEQ ID NO: 720985 - DNA, 33 bp, Homo sapien
gaatctctacttctcactatatgaaaaaaatca

SEQ ID NO: 720986 - DNA, 33 bp, Homo sapien
gaatctctacttctcagtatatgaaaaaaatca

SEQ ID NO: 720987 - DNA, 33 bp, Homo sapien
cataatctaatgggaaattatgctttttaatag

SEQ ID NO: 720988 - DNA, 33 bp, Homo sapien
cataatctaatgggaatttatgctttttaatag

SEQ ID NO: 720989 - DNA, 33 bp, Homo sapien
ggcagaatatgctctacgatattggaataccat

SEQ ID NO: 720990 - DNA, 33 bp, Homo sapien
ggcagaatatgctctatgatattggaataccat

SEQ ID NO: 720991 - DNA, 33 bp, Homo sapien
aaagaaactatgaacaacaataaatgaaaagat

SEQ ID NO: 720992 - DNA, 33 bp, Homo sapien
aaagaaactatgaacagcaataaatgaaaagat

SEQ ID NO: 720993 - DNA, 33 bp, Homo sapien
aaatccttatctaatacggattcagcaacaaag

SEQ ID NO: 720994 - DNA, 33 bp, Homo sapien
aaatccttatctaatatggattcagcaacaaag

SEQ ID NO: 720995 - DNA, 33 bp, Homo sapien
ttggttataggcttgaggtattgtcattacctt

SEQ ID NO: 720996 - DNA, 33 bp, Homo sapien
ttggttataggcttgatgtattgtcattacctt

SEQ ID NO: 720997 - DNA, 33 bp, Homo sapien
attcctactgaaacgaatccacaaaatagagga

SEQ ID NO: 720998 - DNA, 33 bp, Homo sapien
attcctactgaaacgagtccacaaaatagagga

SEQ ID NO: 720999 - DNA, 33 bp, Homo sapien
ttaaccaagatcaaaactgaaatccatgtttac

SEQ ID NO: 721000 - DNA, 33 bp, Homo sapien
ttaaccaagatcaaaattgaaatccatgtttac

SEQ ID NO: 721001 - DNA, 33 bp, Homo sapien
accaaccattactagaatcctagaacaacttcc

SEQ ID NO: 721002 - DNA, 33 bp, Homo sapien
accaaccattactagagtcctagaacaacttcc

SEQ ID NO: 721003 - DNA, 33 bp, Homo sapien
taactgggaagtttacagcactaaatgtctaca

SEQ ID NO: 721004 - DNA, 33 bp, Homo sapien
taactgggaagtttacggcactaaatgtctaca

SEQ ID NO: 721005 - DNA, 33 bp, Homo sapien
atgaaagtattccaagaactaggaaaggattaa

SEQ ID NO: 721006 - DNA, 33 bp, Homo sapien
atgaaagtattccaaggactaggaaaggattaa

SEQ ID NO: 721007 - DNA, 33 bp, Homo sapien
acttctcccccatcaaagagatcctctataaag

SEQ ID NO: 721008 - DNA, 33 bp, Homo sapien
acttctcccccatcaaggagatcctctataaag

SEQ ID NO: 721009 - DNA, 33 bp, Homo sapien
tctctcttaatttttacagctcttcaatattgc

SEQ ID NO: 721010 - DNA, 33 bp, Homo sapien
tctctcttaatttttatagctcttcaatattgc

SEQ ID NO: 721011 - DNA, 33 bp, Homo sapien
aagtgacacctacatagccagctgaaaagtata

SEQ ID NO: 721012 - DNA, 33 bp, Homo sapien
aagtgacacctacatatccagctgaaaagtata

SEQ ID NO: 721013 - DNA, 33 bp, Homo sapien
aagagacaagatagcaacttttgggggatgggc

SEQ ID NO: 721014 - DNA, 33 bp, Homo sapien
aagagacaagatagcagcttttgggggatgggc

SEQ ID NO: 721015 - DNA, 33 bp, Homo sapien
agaagtcattgtaaaaagaagttgttcaatctt

SEQ ID NO: 721016 - DNA, 33 bp, Homo sapien
agaagtcattgtaaaaggaagttgttcaatctt

SEQ ID NO: 721017 - DNA, 33 bp, Homo sapien
aactgccaaactgttaccgaaggcagatgtatc

SEQ ID NO: 721018 - DNA, 33 bp, Homo sapien
aactgccaaactgttatcgaaggcagatgtatc

SEQ ID NO: 721019 - DNA, 33 bp, Homo sapien
ttttctctttcagctacctttagtttatatata

SEQ ID NO: 721020 - DNA, 33 bp, Homo sapien
ttttctctttcagctatctttagtttatatata

SEQ ID NO: 721021 - DNA, 33 bp, Homo sapien
aagaagttgatgagataagataaaaccattgca

SEQ ID NO: 721022 - DNA, 33 bp, Homo sapien
aagaagttgatgagatgagataaaaccattgca

SEQ ID NO: 721023 - DNA, 33 bp, Homo sapien
aagggcaagtttaggaagtaaatttgagaatca

SEQ ID NO: 721024 - DNA, 33 bp, Homo sapien
aagggcaagtttaggaggtaaatttgagaatca

SEQ ID NO: 721025 - DNA, 33 bp, Homo sapien
acaaacgattcagttaggctcttctagttattt

SEQ ID NO: 721026 - DNA, 33 bp, Homo sapien
acaaacgattcagttatgctcttctagttattt

SEQ ID NO: 721027 - DNA, 33 bp, Homo sapien
ggcaaatgttcaaagacgcaaaggcctaagtat

SEQ ID NO: 721028 - DNA, 33 bp, Homo sapien
ggcaaatgttcaaagatgcaaaggcctaagtat

SEQ ID NO: 721029 - DNA, 33 bp, Homo sapien
ctgattactatgaggaagtttggagggtgacat

SEQ ID NO: 721030 - DNA, 33 bp, Homo sapien
ctgattactatgaggatgtttggagggtgacat

SEQ ID NO: 721031 - DNA, 33 bp, Homo sapien
cgtcttttttgccatgaaatattagcctttgtg

SEQ ID NO: 721032 - DNA, 33 bp, Homo sapien
cgtcttttttgccatggaatattagcctttgtg

SEQ ID NO: 721033 - DNA, 33 bp, Homo sapien
atcctctcatttgtgaaaacatggagaatatga

SEQ ID NO: 721034 - DNA, 33 bp, Homo sapien
atcctctcatttgtgacaacatggagaatatga

SEQ ID NO: 721035 - DNA, 33 bp, Homo sapien
atttacagttgttagaacccaggttggaaatca

SEQ ID NO: 721036 - DNA, 33 bp, Homo sapien
atttacagttgttagatcccaggttggaaatca

SEQ ID NO: 721037 - DNA, 33 bp, Homo sapien
tgaataatgttcctgacggcaccacattatatt

SEQ ID NO: 721038 - DNA, 33 bp, Homo sapien
tgaataatgttcctgatggcaccacattatatt

SEQ ID NO: 721039 - DNA, 33 bp, Homo sapien
taaactaaatattgcccggatatacatacatct

SEQ ID NO: 721040 - DNA, 33 bp, Homo sapien
taaactaaatattgcctggatatacatacatct

SEQ ID NO: 721041 - DNA, 33 bp, Homo sapien
tactgacctgtgtaaccgaaaagcccagtaatc

SEQ ID NO: 721042 - DNA, 33 bp, Homo sapien
tactgacctgtgtaactgaaaagcccagtaatc

SEQ ID NO: 721043 - DNA, 33 bp, Homo sapien
ttaaattagaaccaagccattcaaaaacttagt

SEQ ID NO: 721044 - DNA, 33 bp, Homo sapien
ttaaattagaaccaagtcattcaaaaacttagt

SEQ ID NO: 721045 - DNA, 33 bp, Homo sapien
ccattctccactgctgaaacagtaatgccataa

SEQ ID NO: 721046 - DNA, 33 bp, Homo sapien
ccattctccactgctgtaacagtaatgccataa

SEQ ID NO: 721047 - DNA, 33 bp, Homo sapien
gaagctagtaatcactaaaggaactgaggcatc

SEQ ID NO: 721048 - DNA, 33 bp, Homo sapien
gaagctagtaatcactgaaggaactgaggcatc

SEQ ID NO: 721049 - DNA, 33 bp, Homo sapien
tttagtaatcctcttcccagtaccatagtccat

SEQ ID NO: 721050 - DNA, 33 bp, Homo sapien
tttagtaatcctcttctcagtaccatagtccat

SEQ ID NO: 721051 - DNA, 33 bp, Homo sapien
gctgagtaagctagagaagacacaagaaaattt

SEQ ID NO: 721052 - DNA, 33 bp, Homo sapien
gctgagtaagctagaggagacacaagaaaattt

SEQ ID NO: 721053 - DNA, 33 bp, Homo sapien
accagagtttttaatacggctgagtaagctaga

SEQ ID NO: 721054 - DNA, 33 bp, Homo sapien
accagagtttttaatatggctgagtaagctaga

SEQ ID NO: 721055 - DNA, 33 bp, Homo sapien
taaaaggcaccacatacggatttttaaaggtgc

SEQ ID NO: 721056 - DNA, 33 bp, Homo sapien
taaaaggcaccacatatggatttttaaaggtgc

SEQ ID NO: 721057 - DNA, 33 bp, Homo sapien
catatctatgcttccacgctcatggtatataag

SEQ ID NO: 721058 - DNA, 33 bp, Homo sapien
catatctatgcttccatgctcatggtatataag

SEQ ID NO: 721059 - DNA, 33 bp, Homo sapien
ttttccactcaaaatacgcaagagttctgttac

SEQ ID NO: 721060 - DNA, 33 bp, Homo sapien
ttttccactcaaaatatgcaagagttctgttac

SEQ ID NO: 721061 - DNA, 33 bp, Homo sapien
tgtgatttcataaaaacagaactggacttttgg

SEQ ID NO: 721062 - DNA, 33 bp, Homo sapien
tgtgatttcataaaaatagaactggacttttgg

SEQ ID NO: 721063 - DNA, 33 bp, Homo sapien
tgaactggaccttgaaagataatcattttctag

SEQ ID NO: 721064 - DNA, 33 bp, Homo sapien
tgaactggaccttgaaggataatcattttctag

SEQ ID NO: 721065 - DNA, 33 bp, Homo sapien
cattaggagaaatacccactgtagatgaatggt

SEQ ID NO: 721066 - DNA, 33 bp, Homo sapien
cattaggagaaatacctactgtagatgaatggt

SEQ ID NO: 721067 - DNA, 33 bp, Homo sapien
ccaccacgaggggaaccgtctaagaatgaagcc

SEQ ID NO: 721068 - DNA, 33 bp, Homo sapien
ccaccacgaggggaactgtctaagaatgaagcc

SEQ ID NO: 721069 - DNA, 33 bp, Homo sapien
caaagtgtatactcaaggactaattaggatgct

SEQ ID NO: 721070 - DNA, 33 bp, Homo sapien
caaagtgtatactcaatgactaattaggatgct

SEQ ID NO: 721071 - DNA, 33 bp, Homo sapien
atcagaaatgtgcaacacaacagaaaaatcaaa

SEQ ID NO: 721072 - DNA, 33 bp, Homo sapien
atcagaaatgtgcaacgcaacagaaaaatcaaa

SEQ ID NO: 721073 - DNA, 33 bp, Homo sapien
tactacccccagattaacagcctagcaggtact

SEQ ID NO: 721074 - DNA, 33 bp, Homo sapien
tactacccccagattagcagcctagcaggtact

SEQ ID NO: 721075 - DNA, 33 bp, Homo sapien
taattatctagtttgacacaagtacttttagat

SEQ ID NO: 721076 - DNA, 33 bp, Homo sapien
taattatctagtttgatacaagtacttttagat

SEQ ID NO: 721077 - DNA, 33 bp, Homo sapien
tcagtgagatctccttcaaaccagctacgtaaa

SEQ ID NO: 721078 - DNA, 33 bp, Homo sapien
tcagtgagatctcctttaaaccagctacgtaaa

SEQ ID NO: 721079 - DNA, 33 bp, Homo sapien
ctctctttaaatgtgcagcaatagttagcatag

SEQ ID NO: 721080 - DNA, 33 bp, Homo sapien
ctctctttaaatgtgcggcaatagttagcatag

SEQ ID NO: 721081 - DNA, 33 bp, Homo sapien
gtgcacgagaatcacacagaaaactgattggaa

SEQ ID NO: 721082 - DNA, 33 bp, Homo sapien
gtgcacgagaatcacatagaaaactgattggaa

SEQ ID NO: 721083 - DNA, 33 bp, Homo sapien
aaaagttaggtggatccatttcagttgtgcaca

SEQ ID NO: 721084 - DNA, 33 bp, Homo sapien
aaaagttaggtggatctatttcagttgtgcaca

SEQ ID NO: 721085 - DNA, 33 bp, Homo sapien
aagtccccagttggagaaaactatacaccacca

SEQ ID NO: 721086 - DNA, 33 bp, Homo sapien
aagtccccagttggaggaaactatacaccacca

SEQ ID NO: 721087 - DNA, 33 bp, Homo sapien
tcctcattaagacggaagtaatgagagagagga

SEQ ID NO: 721088 - DNA, 33 bp, Homo sapien
tcctcattaagacggacgtaatgagagagagga

SEQ ID NO: 721089 - DNA, 33 bp, Homo sapien
aggaaggtatttgcaaaaggaaggaaagatatg

SEQ ID NO: 721090 - DNA, 33 bp, Homo sapien
aggaaggtatttgcaagaggaaggaaagatatg

SEQ ID NO: 721091 - DNA, 33 bp, Homo sapien
attgaatttcctagacaaaactgtaagatttaa

SEQ ID NO: 721092 - DNA, 33 bp, Homo sapien
attgaatttcctagaccaaactgtaagatttaa

SEQ ID NO: 721093 - DNA, 33 bp, Homo sapien
aagagggtcattttgaaagaacaggcttatgcc

SEQ ID NO: 721094 - DNA, 33 bp, Homo sapien
aagagggtcattttgagagaacaggcttatgcc

SEQ ID NO: 721095 - DNA, 33 bp, Homo sapien
tcttaaacatctaacacctcctaacacccatcc

SEQ ID NO: 721096 - DNA, 33 bp, Homo sapien
tcttaaacatctaacatctcctaacacccatcc

SEQ ID NO: 721097 - DNA, 33 bp, Homo sapien
tgaacttgagagatacaatttaggatatataga

SEQ ID NO: 721098 - DNA, 33 bp, Homo sapien
tgaacttgagagatacgatttaggatatataga

SEQ ID NO: 721099 - DNA, 33 bp, Homo sapien; identical to SEQ ID NO: 721097

SEQ ID NO: 721100 - DNA, 33 bp, Homo sapien; identical to SEQ ID NO: 721098

SEQ ID NO: 721101 - DNA, 33 bp, Homo sapien
cacagggaaaagagcccgagcatggttcatgaa

SEQ ID NO: 721102 - DNA, 33 bp, Homo sapien
cacagggaaaagagcctgagcatggttcatgaa

SEQ ID NO: 721103 - DNA, 33 bp, Homo sapien
ttgctccagtaattcaagaaactctatgcatcc

SEQ ID NO: 721104 - DNA, 33 bp, Homo sapien
ttgctccagtaattcaggaaactctatgcatcc

SEQ ID NO: 721105 - DNA, 33 bp, Homo sapien
ttgaggagagttaaaccaattagagcagaacac

SEQ ID NO: 721106 - DNA, 33 bp, Homo sapien
ttgaggagagttaaactaattagagcagaacac

SEQ ID NO: 721107 - DNA, 33 bp, Homo sapien
aggaaacaagaaatggacacaaattcataatac

SEQ ID NO: 721108 - DNA, 33 bp, Homo sapien
aggaaacaagaaatgggcacaaattcataatac

SEQ ID NO: 721109 - DNA, 33 bp, Homo sapien
gtttcttatatttgccaaagtgccctacatggt

SEQ ID NO: 721110 - DNA, 33 bp, Homo sapien
gtttcttatatttgccgaagtgccctacatggt

SEQ ID NO: 721111 - DNA, 33 bp, Homo sapien
cctggggaaaatcccaatcagaccaactgaccc

SEQ ID NO: 721112 - DNA, 33 bp, Homo sapien
cctggggaaaatcccattcagaccaactgaccc

SEQ ID NO: 721113 - DNA, 33 bp, Homo sapien
ttgcccttgtcctcatgaacttttatgtcaata

SEQ ID NO: 721114 - DNA, 33 bp, Homo sapien
ttgcccttgtcctcattaacttttatgtcaata

SEQ ID NO: 721115 - DNA, 33 bp, Homo sapien
attgcctctgtagatacaaaatggcaaagtttg

SEQ ID NO: 721116 - DNA, 33 bp, Homo sapien
attgcctctgtagatataaaatggcaaagtttg

SEQ ID NO: 721117 - DNA, 33 bp, Homo sapien
atcaaaattcatcttcccagaacttagtagcaa

SEQ ID NO: 721118 - DNA, 33 bp, Homo sapien
atcaaaattcatcttctcagaacttagtagcaa

SEQ ID NO: 721119 - DNA, 33 bp, Homo sapien
ttcagtgactctattgcagctatgaggaattct

SEQ ID NO: 721120 - DNA, 33 bp, Homo sapien
ttcagtgactctattgtagctatgaggaattct

SEQ ID NO: 721121 - DNA, 33 bp, Homo sapien
gagaggtaatttacagcagttcttcaatttaat

SEQ ID NO: 721122 - DNA, 33 bp, Homo sapien
gagaggtaatttacaggagttcttcaatttaat

SEQ ID NO: 721123 - DNA, 33 bp, Homo sapien
actgttcatttatgggccataccacagtttaca

SEQ ID NO: 721124 - DNA, 33 bp, Homo sapien
actgttcatttatgggtcataccacagtttaca

SEQ ID NO: 721125 - DNA, 33 bp, Homo sapien
taaaaaggtatcggaaaatagttggagggaagt

SEQ ID NO: 721126 - DNA, 33 bp, Homo sapien
taaaaaggtatcggaagatagttggagggaagt

SEQ ID NO: 721127 - DNA, 33 bp, Homo sapien
gacaatcttaagagaaggtgctaaattaataat

SEQ ID NO: 721128 - DNA, 33 bp, Homo sapien
gacaatcttaagagaatgtgctaaattaataat

SEQ ID NO: 721129 - DNA, 33 bp, Homo sapien
atagattagatagagcaatattatagagatgat

SEQ ID NO: 721130 - DNA, 33 bp, Homo sapien
atagattagatagagcgatattatagagatgat

SEQ ID NO: 721131 - DNA, 33 bp, Homo sapien
tgtgtaagatattcttaaaaaaaaggtcaataa

SEQ ID NO: 721132 - DNA, 33 bp, Homo sapien
tgtgtaagatattcttgaaaaaaaggtcaataa

SEQ ID NO: 721133 - DNA, 33 bp, Homo sapien
tgcaaatgctaataacagtattgataaaagaaa

SEQ ID NO: 721134 - DNA, 33 bp, Homo sapien
tgcaaatgctaataacggtattgataaaagaaa

SEQ ID NO: 721135 - DNA, 33 bp, Homo sapien
tgatgtttggacagaaaatagaacacatagtac

SEQ ID NO: 721136 - DNA, 33 bp, Homo sapien
tgatgtttggacagaagatagaacacatagtac

SEQ ID NO: 721137 - DNA, 33 bp, Homo sapien
cagtctcctaaatccacgctgcacgttctagca

SEQ ID NO: 721138 - DNA, 33 bp, Homo sapien
cagtctcctaaatccatgctgcacgttctagca

SEQ ID NO: 721139 - DNA, 33 bp, Homo sapien
caggaccatctctaaaacacttaattatgctgg

SEQ ID NO: 721140 - DNA, 33 bp, Homo sapien
caggaccatctctaaaccacttaattatgctgg

SEQ ID NO: 721141 - DNA, 33 bp, Homo sapien
tcatttcatggaagaactgttcagaaaccaggg

SEQ ID NO: 721142 - DNA, 33 bp, Homo sapien
tcatttcatggaagaattgttcagaaaccaggg

SEQ ID NO: 721143 - DNA, 33 bp, Homo sapien
gataggagctgtttcaagagaaaaacaaaggct

SEQ ID NO: 721144 - DNA, 33 bp, Homo sapien
gataggagctgtttcaggagaaaaacaaaggct

SEQ ID NO: 721145 - DNA, 33 bp, Homo sapien
tctcataggttcctcaaggagtcccacattgtg

SEQ ID NO: 721146 - DNA, 33 bp, Homo sapien
tctcataggttcctcagggagtcccacattgtg

SEQ ID NO: 721147 - DNA, 33 bp, Homo sapien
ggagcacgtgtggcagcatccaaaatagagggg

SEQ ID NO: 721148 - DNA, 33 bp, Homo sapien
ggagcacgtgtggcagtatccaaaatagagggg

SEQ ID NO: 721149 - DNA, 33 bp, Homo sapien
gctctggggcttttcaactccacaatgtgaaac

SEQ ID NO: 721150 - DNA, 33 bp, Homo sapien
gctctggggcttttcagctccacaatgtgaaac

SEQ ID NO: 721151 - DNA, 33 bp, Homo sapien
gtgctttcttcctacccgccaaatggcctcttt

SEQ ID NO: 721152 - DNA, 33 bp, Homo sapien
gtgctttcttcctacctgccaaatggcctcttt

SEQ ID NO: 721153 - DNA, 33 bp, Homo sapien
cttcagagaccccataagacaataaaactagaa

SEQ ID NO: 721154 - DNA, 33 bp, Homo sapien
cttcagagaccccatatgacaataaaactagaa

SEQ ID NO: 721155 - DNA, 33 bp, Homo sapien
cagtaaggatctgagacgatgtgaaagaaaaat

SEQ ID NO: 721156 - DNA, 33 bp, Homo sapien
cagtaaggatctgagatgatgtgaaagaaaaat

SEQ ID NO: 721157 - DNA, 33 bp, Homo sapien
atctaactcagttgctaacatttgtgtcaatgc

SEQ ID NO: 721158 - DNA, 33 bp, Homo sapien
atctaactcagttgctgacatttgtgtcaatgc

SEQ ID NO: 721159 - DNA, 33 bp, Homo sapien
actctaaggtgagttaccggatacaataaaaag

SEQ ID NO: 721160 - DNA, 33 bp, Homo sapien
actctaaggtgagttatcggatacaataaaaag

SEQ ID NO: 721161 - DNA, 33 bp, Homo sapien
atttgctgctcatatcaattcagcattggtcat

SEQ ID NO: 721162 - DNA, 33 bp, Homo sapien
atttgctgctcatatccattcagcattggtcat

SEQ ID NO: 721163 - DNA, 33 bp, Homo sapien
ttttgagaccttggcaaatacatttgtgtaacc

SEQ ID NO: 721164 - DNA, 33 bp, Homo sapien
ttttgagaccttggcatatacatttgtgtaacc

SEQ ID NO: 721165 - DNA, 33 bp, Homo sapien
ttagaaatgttttccgccagatactctaaatca

SEQ ID NO: 721166 - DNA, 33 bp, Homo sapien
ttagaaatgttttccgtcagatactctaaatca

SEQ ID NO: 721167 - DNA, 33 bp, Homo sapien
atttactcttcctagactccaaaggtgatattt

SEQ ID NO: 721168 - DNA, 33 bp, Homo sapien
atttactcttcctagattccaaaggtgatattt

SEQ ID NO: 721169 - DNA, 33 bp, Homo sapien
tggtaagttctatggagagagtttaaatcctca

SEQ ID NO: 721170 - DNA, 33 bp, Homo sapien
tggtaagttctatggatagagtttaaatcctca

SEQ ID NO: 721171 - DNA, 33 bp, Homo sapien
tgaagcacttctgtagccactgaaattctgtag

SEQ ID NO: 721172 - DNA, 33 bp, Homo sapien
tgaagcacttctgtagtcactgaaattctgtag

SEQ ID NO: 721173 - DNA, 33 bp, Homo sapien
tagaaggagagtgatactagtacctagcgctta

SEQ ID NO: 721174 - DNA, 33 bp, Homo sapien
tagaaggagagtgatattagtacctagcgctta

SEQ ID NO: 721175 - DNA, 33 bp, Homo sapien
aaaggactgttaaacaatgtaagtttcactata

SEQ ID NO: 721176 - DNA, 33 bp, Homo sapien
aaaggactgttaaacagtgtaagtttcactata

SEQ ID NO: 721177 - DNA, 33 bp, Homo sapien
agtagaactctattaacggtggtcaaagttttg

SEQ ID NO: 721178 - DNA, 33 bp, Homo sapien
agtagaactctattaatggtggtcaaagttttg

SEQ ID NO: 721179 - DNA, 33 bp, Homo sapien
tttgctgcaagtaatgcatttatccaatctcac

SEQ ID NO: 721180 - DNA, 33 bp, Homo sapien
tttgctgcaagtaatgtatttatccaatctcac

SEQ ID NO: 721181 - DNA, 33 bp, Homo sapien
caataaaagcctgaacagtaaatttaacatggc

SEQ ID NO: 721182 - DNA, 33 bp, Homo sapien
caataaaagcctgaaccgtaaatttaacatggc

SEQ ID NO: 721183 - DNA, 33 bp, Homo sapien
cacgttcttaccaagaaaacttcacagttaaca

SEQ ID NO: 721184 - DNA, 33 bp, Homo sapien
cacgttcttaccaagagaacttcacagttaaca

SEQ ID NO: 721185 - DNA, 33 bp, Homo sapien
gcagtaatgacccagaaaactactgagtatgtg

SEQ ID NO: 721186 - DNA, 33 bp, Homo sapien
gcagtaatgacccagacaactactgagtatgtg

SEQ ID NO: 721187 - DNA, 33 bp, Homo sapien
tttctctcttataaaacgaattgacaagatcaa

SEQ ID NO: 721188 - DNA, 33 bp, Homo sapien
tttctctcttataaaatgaattgacaagatcaa

SEQ ID NO: 721189 - DNA, 33 bp, Homo sapien
tattcatgttacaaaacttaactgctggttacc

SEQ ID NO: 721190 - DNA, 33 bp, Homo sapien
tattcatgttacaaaatttaactgctggttacc

SEQ ID NO: 721191 - DNA, 33 bp, Homo sapien
gatataaaattatagccaggtaggataagtagg

SEQ ID NO: 721192 - DNA, 33 bp, Homo sapien
gatataaaattatagctaggtaggataagtagg

SEQ ID NO: 721193 - DNA, 33 bp, Homo sapien
ttatatttctaatttaactggactgaaatgatg

SEQ ID NO: 721194 - DNA, 33 bp, Homo sapien
ttatatttctaatttagctggactgaaatgatg

SEQ ID NO: 721195 - DNA, 33 bp, Homo sapien
aaaatgttaagtttaaataagtggtccataatc

SEQ ID NO: 721196 - DNA, 33 bp, Homo sapien
aaaatgttaagtttaagtaagtggtccataatc

SEQ ID NO: 721197 - DNA, 33 bp, Homo sapien
tatccttatgccatccgaaacctctggaagcca

SEQ ID NO: 721198 - DNA, 33 bp, Homo sapien
tatccttatgccatcctaaacctctggaagcca

SEQ ID NO: 721199 - DNA, 33 bp, Homo sapien
ggttaggtttggagtaataatttaggttctagt

SEQ ID NO: 721200 - DNA, 33 bp, Homo sapien
ggttaggtttggagtagtaatttaggttctagt

SEQ ID NO: 721201 - DNA, 33 bp, Homo sapien
tttcttcattgacccaagttcacttaggagcat

SEQ ID NO: 721202 - DNA, 33 bp, Homo sapien
tttcttcattgacccaggttcacttaggagcat

SEQ ID NO: 721203 - DNA, 33 bp, Homo sapien
tgaacggtactaacatcatgtaaaaacaaacaa

SEQ ID NO: 721204 - DNA, 33 bp, Homo sapien
tgaacggtactaacatgatgtaaaaacaaacaa

SEQ ID NO: 721205 - DNA, 33 bp, Homo sapien
ggcaatcacacctgataacaacacgaacatcat

SEQ ID NO: 721206 - DNA, 33 bp, Homo sapien
ggcaatcacacctgatgacaacacgaacatcat

SEQ ID NO: 721207 - DNA, 33 bp, Homo sapien
ggtttaatcctgtttcaaccacataacaattca

SEQ ID NO: 721208 - DNA, 33 bp, Homo sapien
ggtttaatcctgtttcgaccacataacaattca

SEQ ID NO: 721209 - DNA, 33 bp, Homo sapien
aatgcgggaaacagcacatgatgcaggagttgc

SEQ ID NO: 721210 - DNA, 33 bp, Homo sapien
aatgcgggaaacagcagatgatgcaggagttgc

SEQ ID NO: 721211 - DNA, 33 bp, Homo sapien
gaaactgtgagctctgcaatgtgtgatttaaca

SEQ ID NO: 721212 - DNA, 33 bp, Homo sapien
gaaactgtgagctctgtaatgtgtgatttaaca

SEQ ID NO: 721213 - DNA, 33 bp, Homo sapien
acagcaagttactaaccgctgaacctctgctac

SEQ ID NO: 721214 - DNA, 33 bp, Homo sapien
acagcaagttactaactgctgaacctctgctac

SEQ ID NO: 721215 - DNA, 33 bp, Homo sapien
tttcaaaattcatataaatcagaaaggagcctg

SEQ ID NO: 721216 - DNA, 33 bp, Homo sapien
tttcaaaattcatatatatcagaaaggagcctg

SEQ ID NO: 721217 - DNA, 33 bp, Homo sapien
aaataggcccttctaacgcacaatacgcactaa

SEQ ID NO: 721218 - DNA, 33 bp, Homo sapien
aaataggcccttctaatgcacaatacgcactaa

SEQ ID NO: 721219 - DNA, 33 bp, Homo sapien
tctagttgcacctaagactagaacagcacttac

SEQ ID NO: 721220 - DNA, 33 bp, Homo sapien
tctagttgcacctaaggctagaacagcacttac

SEQ ID NO: 721221 - DNA, 33 bp, Homo sapien
cctctcacagaatttccatatgcaatactggat

SEQ ID NO: 721222 - DNA, 33 bp, Homo sapien
cctctcacagaatttctatatgcaatactggat

SEQ ID NO: 721223 - DNA, 33 bp, Homo sapien
aagaagaatggtgaaacaggagaggatctgcaa

SEQ ID NO: 721224 - DNA, 33 bp, Homo sapien
aagaagaatggtgaaagaggagaggatctgcaa

SEQ ID NO: 721225 - DNA, 33 bp, Homo sapien
ataaaatgaaagagacaatttttagacaaagac

SEQ ID NO: 721226 - DNA, 33 bp, Homo sapien
ataaaatgaaagagacgatttttagacaaagac

SEQ ID NO: 721227 - DNA, 33 bp, Homo sapien
cacaggaaacttcccacgacatattaaaatgga

SEQ ID NO: 721228 - DNA, 33 bp, Homo sapien
cacaggaaacttcccatgacatattaaaatgga

SEQ ID NO: 721229 - DNA, 33 bp, Homo sapien
gcccaatatcaatgaacgcaatacctttctttt

SEQ ID NO: 721230 - DNA, 33 bp, Homo sapien
gcccaatatcaatgaatgcaatacctttctttt

SEQ ID NO: 721231 - DNA, 33 bp, Homo sapien
taccacatctgacacaaacgtgcaattgtgggt

SEQ ID NO: 721232 - DNA, 33 bp, Homo sapien
taccacatctgacacagacgtgcaattgtgggt

SEQ ID NO: 721233 - DNA, 33 bp, Homo sapien
catctataaacaacagcccttcattcattcaag

SEQ ID NO: 721234 - DNA, 33 bp, Homo sapien
catctataaacaacagtccttcattcattcaag

SEQ ID NO: 721235 - DNA, 33 bp, Homo sapien
gaagttcactttcacccatccaacccagatcct

SEQ ID NO: 721236 - DNA, 33 bp, Homo sapien
gaagttcactttcacctatccaacccagatcct

SEQ ID NO: 721237 - DNA, 33 bp, Homo sapien
aatttatggcaagtagaaaatgatacttaaaaa

SEQ ID NO: 721238 - DNA, 33 bp, Homo sapien
aatttatggcaagtaggaaatgatacttaaaaa

SEQ ID NO: 721239 - DNA, 33 bp, Homo sapien
gatgctttattacagcagaatagactgaggagt

SEQ ID NO: 721240 - DNA, 33 bp, Homo sapien
gatgctttattacagcggaatagactgaggagt

SEQ ID NO: 721241 - DNA, 33 bp, Homo sapien
ctcatagctgttacaacggctatatcaaagaga

SEQ ID NO: 721242 - DNA, 33 bp, Homo sapien
ctcatagctgttacaatggctatatcaaagaga

SEQ ID NO: 721243 - DNA, 33 bp, Homo sapien
ccctcctgttatcatcccccaaagtctctaaac

SEQ ID NO: 721244 - DNA, 33 bp, Homo sapien
ccctcctgttatcatctcccaaagtctctaaac

SEQ ID NO: 721245 - DNA, 33 bp, Homo sapien
ttctctgtgttgaagacagtatcaagttcttaa

SEQ ID NO: 721246 - DNA, 33 bp, Homo sapien
ttctctgtgttgaagagagtatcaagttcttaa

SEQ ID NO: 721247 - DNA, 33 bp, Homo sapien
tagcaggtgcgcaggccaatcaagtcaattttc

SEQ ID NO: 721248 - DNA, 33 bp, Homo sapien
tagcaggtgcgcaggctaatcaagtcaattttc

SEQ ID NO: 721249 - DNA, 33 bp, Homo sapien
gtaaaaccaactgcaacccaaacatgattccaa

SEQ ID NO: 721250 - DNA, 33 bp, Homo sapien
gtaaaaccaactgcaagccaaacatgattccaa

SEQ ID NO: 721251 - DNA, 33 bp, Homo sapien
gctaattccgaatgaccgatgcttgattttccc

SEQ ID NO: 721252 - DNA, 33 bp, Homo sapien
gctaattccgaatgacggatgcttgattttccc

SEQ ID NO: 721253 - DNA, 33 bp, Homo sapien
tcactagtgagaaacccatttcaatctgtgaga

SEQ ID NO: 721254 - DNA, 33 bp, Homo sapien
tcactagtgagaaacctatttcaatctgtgaga

SEQ ID NO: 721255 - DNA, 33 bp, Homo sapien
caaggtaggaaacaataacattaaaacagtcta

SEQ ID NO: 721256 - DNA, 33 bp, Homo sapien
caaggtaggaaacaattacattaaaacagtcta

SEQ ID NO: 721257 - DNA, 33 bp, Homo sapien
gaaattgctttgcagcagtcttcataatgccag

SEQ ID NO: 721258 - DNA, 33 bp, Homo sapien
gaaattgctttgcagcggtcttcataatgccag

SEQ ID NO: 721259 - DNA, 33 bp, Homo sapien
ttacataaggttagaaattcaaatacaatcaac

SEQ ID NO: 721260 - DNA, 33 bp, Homo sapien
ttacataaggttagaatttcaaatacaatcaac

SEQ ID NO: 721261 - DNA, 33 bp, Homo sapien
tagtgctgaagacagaagttaagataagggcca

SEQ ID NO: 721262 - DNA, 33 bp, Homo sapien
tagtgctgaagacagaggttaagataagggcca

SEQ ID NO: 721263 - DNA, 33 bp, Homo sapien
taaagaagtattagaacaagtaaaaaacagaat

SEQ ID NO: 721264 - DNA, 33 bp, Homo sapien
taaagaagtattagaagaagtaaaaaacagaat

SEQ ID NO: 721265 - DNA, 33 bp, Homo sapien
caaggcttagagacaaaaagttcattcaatagg

SEQ ID NO: 721266 - DNA, 33 bp, Homo sapien
caaggcttagagacaagaagttcattcaatagg

SEQ ID NO: 721267 - DNA, 33 bp, Homo sapien
gggtactatcatccacacagttacttaagaaga

SEQ ID NO: 721268 - DNA, 33 bp, Homo sapien
gggtactatcatccacgcagttacttaagaaga

SEQ ID NO: 721269 - DNA, 33 bp, Homo sapien
attgatagctcatggacgtgcagttggtttaat

SEQ ID NO: 721270 - DNA, 33 bp, Homo sapien
attgatagctcatggatgtgcagttggtttaat

SEQ ID NO: 721271 - DNA, 33 bp, Homo sapien
taagactagatcaataggaaaacgaatttattc

SEQ ID NO: 721272 - DNA, 33 bp, Homo sapien
taagactagatcaatatgaaaacgaatttattc

SEQ ID NO: 721273 - DNA, 33 bp, Homo sapien
actaaatttccctctggatagtgttctaaaatc

SEQ ID NO: 721274 - DNA, 33 bp, Homo sapien
actaaatttccctctgtatagtgttctaaaatc

SEQ ID NO: 721275 - DNA, 33 bp, Homo sapien
cattcttgagtaatccaaagagtcaaatggtat

SEQ ID NO: 721276 - DNA, 33 bp, Homo sapien
cattcttgagtaatccgaagagtcaaatggtat

SEQ ID NO: 721277 - DNA, 33 bp, Homo sapien
ccttatggtcaaataacgacttggcgtgaaact

SEQ ID NO: 721278 - DNA, 33 bp, Homo sapien
ccttatggtcaaataatgacttggcgtgaaact

SEQ ID NO: 721279 - DNA, 33 bp, Homo sapien
tttgcggccactgataagaaagcccaatctttg

SEQ ID NO: 721280 - DNA, 33 bp, Homo sapien
tttgcggccactgataggaaagcccaatctttg

SEQ ID NO: 721281 - DNA, 33 bp, Homo sapien
atgtgtcagattttgccgatcttccttttttgt

SEQ ID NO: 721282 - DNA, 33 bp, Homo sapien
atgtgtcagattttgctgatcttccttttttgt

SEQ ID NO: 721283 - DNA, 33 bp, Homo sapien
atgtgtttctcatttacgcttctctctctgtaa

SEQ ID NO: 721284 - DNA, 33 bp, Homo sapien
atgtgtttctcatttatgcttctctctctgtaa

SEQ ID NO: 721285 - DNA, 33 bp, Homo sapien
tcttttgcactgtgaaacttttacaataggtta

SEQ ID NO: 721286 - DNA, 33 bp, Homo sapien
tcttttgcactgtgaatcttttacaataggtta

SEQ ID NO: 721287 - DNA, 33 bp, Homo sapien
tccactagtgatatacaacacccattaagcaaa

SEQ ID NO: 721288 - DNA, 33 bp, Homo sapien
tccactagtgatatacgacacccattaagcaaa

SEQ ID NO: 721289 - DNA, 33 bp, Homo sapien
agtgggataaggaggcaatttccctacatgatg

SEQ ID NO: 721290 - DNA, 33 bp, Homo sapien
agtgggataaggaggccatttccctacatgatg

SEQ ID NO: 721291 - DNA, 33 bp, Homo sapien
ggcaataggatattgaactgagagtgaaagcat

SEQ ID NO: 721292 - DNA, 33 bp, Homo sapien
ggcaataggatattgatctgagagtgaaagcat

SEQ ID NO: 721293 - DNA, 33 bp, Homo sapien
gcagatgaaagcataacctttggaaagttgtgt

SEQ ID NO: 721294 - DNA, 33 bp, Homo sapien
gcagatgaaagcataatctttggaaagttgtgt

SEQ ID NO: 721295 - DNA, 33 bp, Homo sapien
ccagtttgtaaattggaaagcgctggaaagctg

SEQ ID NO: 721296 - DNA, 33 bp, Homo sapien
ccagtttgtaaattggcaagcgctggaaagctg

SEQ ID NO: 721297 - DNA, 33 bp, Homo sapien
ttatagcttaaggagaaaaagtcccacatttcc

SEQ ID NO: 721298 - DNA, 33 bp, Homo sapien
ttatagcttaaggagagaaagtcccacatttcc

SEQ ID NO: 721299 - DNA, 33 bp, Homo sapien
tttcacaacactggaacgcttggaagtggtgat

SEQ ID NO: 721300 - DNA, 33 bp, Homo sapien
tttcacaacactggaatgcttggaagtggtgat

SEQ ID NO: 721301 - DNA, 33 bp, Homo sapien
gaataacctgaaaagaatatcctccgtaaaata

SEQ ID NO: 721302 - DNA, 33 bp, Homo sapien
gaataacctgaaaagactatcctccgtaaaata

SEQ ID NO: 721303 - DNA, 33 bp, Homo sapien
catgagagtcgactgacacagaagaaagggact

SEQ ID NO: 721304 - DNA, 33 bp, Homo sapien
catgagagtcgactgatacagaagaaagggact

SEQ ID NO: 721305 - DNA, 33 bp, Homo sapien
attaatactcttgtgtaaatgtctgcaggggaa

SEQ ID NO: 721306 - DNA, 33 bp, Homo sapien
attaatactcttgtgtgaatgtctgcaggggaa

SEQ ID NO: 721307 - DNA, 33 bp, Homo sapien
aggtctcagattctccagagagttaactgctat

SEQ ID NO: 721308 - DNA, 33 bp, Homo sapien
aggtctcagattctccggagagttaactgctat

SEQ ID NO: 721309 - DNA, 33 bp, Homo sapien
tcatttcaatgagtaaaggaagcaaaaactcct

SEQ ID NO: 721310 - DNA, 33 bp, Homo sapien
tcatttcaatgagtaatggaagcaaaaactcct

SEQ ID NO: 721311 - DNA, 33 bp, Homo sapien
ttgacagtgatttggaagcacattaaggtttga

SEQ ID NO: 721312 - DNA, 33 bp, Homo sapien
ttgacagtgatttggaggcacattaaggtttga

SEQ ID NO: 721313 - DNA, 33 bp, Homo sapien
atcttctctccaaatacgtcccaaatatgttac

SEQ ID NO: 721314 - DNA, 33 bp, Homo sapien
atcttctctccaaataggtcccaaatatgttac

SEQ ID NO: 721315 - DNA, 33 bp, Homo sapien
taggaatagtcttaacagtgagatgcatctagt

SEQ ID NO: 721316 - DNA, 33 bp, Homo sapien
taggaatagtcttaactgtgagatgcatctagt

SEQ ID NO: 721317 - DNA, 33 bp, Homo sapien
caatgtgacttcttgccaatccaaggtccctca

SEQ ID NO: 721318 - DNA, 33 bp, Homo sapien
caatgtgacttcttgctaatccaaggtccctca

SEQ ID NO: 721319 - DNA, 33 bp, Homo sapien
ctaatgtcttgaaagtcaaaatcaagcacacac

SEQ ID NO: 721320 - DNA, 33 bp, Homo sapien
ctaatgtcttgaaagttaaaatcaagcacacac

SEQ ID NO: 721321 - DNA, 33 bp, Homo sapien
ttggaataatagcactcaaaatcacaccaaagc

SEQ ID NO: 721322 - DNA, 33 bp, Homo sapien
ttggaataatagcacttaaaatcacaccaaagc

SEQ ID NO: 721323 - DNA, 33 bp, Homo sapien
tgttgctttactgagaaataagatctaccaaat

SEQ ID NO: 721324 - DNA, 33 bp, Homo sapien
tgttgctttactgagagataagatctaccaaat

SEQ ID NO: 721325 - DNA, 33 bp, Homo sapien
tgctccaggtttatccaagactagttttagtgg

SEQ ID NO: 721326 - DNA, 33 bp, Homo sapien
tgctccaggtttatccgagactagttttagtgg

SEQ ID NO: 721327 - DNA, 33 bp, Homo sapien
aaatagaacactctaggcattatgcaaagttgg

SEQ ID NO: 721328 - DNA, 33 bp, Homo sapien
aaatagaacactctagtcattatgcaaagttgg

SEQ ID NO: 721329 - DNA, 33 bp, Homo sapien
attagaagtattggaaagaagaggctggaatag

SEQ ID NO: 721330 - DNA, 33 bp, Homo sapien
attagaagtattggaaggaagaggctggaatag

SEQ ID NO: 721331 - DNA, 33 bp, Homo sapien
aatgtataatgatgcaaaccagatcagagagag

SEQ ID NO: 721332 - DNA, 33 bp, Homo sapien
aatgtataatgatgcagaccagatcagagagag

SEQ ID NO: 721333 - DNA, 33 bp, Homo sapien
tattttatcttttagggatctgctaatcacttt

SEQ ID NO: 721334 - DNA, 33 bp, Homo sapien
tattttatcttttaggtatctgctaatcacttt

SEQ ID NO: 721335 - DNA, 33 bp, Homo sapien
ttacttctcaaactatgactacgacctgccagg

SEQ ID NO: 721336 - DNA, 33 bp, Homo sapien
ttacttctcaaactattactacgacctgccagg

SEQ ID NO: 721337 - DNA, 33 bp, Homo sapien
aagctgttagtgcccactataaacgaaacttaa

SEQ ID NO: 721338 - DNA, 33 bp, Homo sapien
aagctgttagtgcccattataaacgaaacttaa

SEQ ID NO: 721339 - DNA, 33 bp, Homo sapien
accttgttgaccaaaacaagcagatgacattag

SEQ ID NO: 721340 - DNA, 33 bp, Homo sapien
accttgttgaccaaaagaagcagatgacattag

SEQ ID NO: 721341 - DNA, 33 bp, Homo sapien
acaaatctttatcctgaacactgtctttgagga

SEQ ID NO: 721342 - DNA, 33 bp, Homo sapien
acaaatctttatcctggacactgtctttgagga

SEQ ID NO: 721343 - DNA, 33 bp, Homo sapien
ttacatctgtcagttactaaatacttggttaat

SEQ ID NO: 721344 - DNA, 33 bp, Homo sapien
ttacatctgtcagttattaaatacttggttaat

SEQ ID NO: 721345 - DNA, 33 bp, Homo sapien
gtttcctagagaagacaaagtaaaaattaaatc

SEQ ID NO: 721346 - DNA, 33 bp, Homo sapien
gtttcctagagaagacgaagtaaaaattaaatc

SEQ ID NO: 721347 - DNA, 33 bp, Homo sapien
ggaaacaaaatgagtaaaggtctagagattact

SEQ ID NO: 721348 - DNA, 33 bp, Homo sapien
ggaaacaaaatgagtacaggtctagagattact

SEQ ID NO: 721349 - DNA, 33 bp, Homo sapien
cattgcttatgaagaactgtaatggaggagcta

SEQ ID NO: 721350 - DNA, 33 bp, Homo sapien
cattgcttatgaagaagtgtaatggaggagcta

SEQ ID NO: 721351 - DNA, 33 bp, Homo sapien
taagtctgccaagtcacgaatttgtaaagaatg

SEQ ID NO: 721352 - DNA, 33 bp, Homo sapien
taagtctgccaagtcatgaatttgtaaagaatg

SEQ ID NO: 721353 - DNA, 33 bp, Homo sapien
tcctggctcctgtagcccggtggagtgtgcagc

SEQ ID NO: 721354 - DNA, 33 bp, Homo sapien
tcctggctcctgtagctcggtggagtgtgcagc

SEQ ID NO: 721355 - DNA, 33 bp, Homo sapien
atctccattctgagtacgcaacagaaataaaat

SEQ ID NO: 721356 - DNA, 33 bp, Homo sapien
atctccattctgagtatgcaacagaaataaaat

SEQ ID NO: 721357 - DNA, 33 bp, Homo sapien
actggctctcaaacaaaggttactctagacctg

SEQ ID NO: 721358 - DNA, 33 bp, Homo sapien
actggctctcaaacaacggttactctagacctg

SEQ ID NO: 721359 - DNA, 33 bp, Homo sapien
tactgggattcacaacagttaaataatttttgc

SEQ ID NO: 721360 - DNA, 33 bp, Homo sapien
tactgggattcacaacggttaaataatttttgc

SEQ ID NO: 721361 - DNA, 33 bp, Homo sapien
attatatcaaaaatcaccaatttgtgtacactt

SEQ ID NO: 721362 - DNA, 33 bp, Homo sapien
attatatcaaaaatcatcaatttgtgtacactt

SEQ ID NO: 721363 - DNA, 33 bp, Homo sapien
tcacttaatgataacagagtttcaggagagagg

SEQ ID NO: 721364 - DNA, 33 bp, Homo sapien
tcacttaatgataacatagtttcaggagagagg

SEQ ID NO: 721365 - DNA, 33 bp, Homo sapien
agcagctgagctaaacacacagtggcttctgtg

SEQ ID NO: 721366 - DNA, 33 bp, Homo sapien
agcagctgagctaaactcacagtggcttctgtg

SEQ ID NO: 721367 - DNA, 33 bp, Homo sapien
atgactaccatctaaaaaatagttctcggttag

SEQ ID NO: 721368 - DNA, 33 bp, Homo sapien
atgactaccatctaaagaatagttctcggttag

SEQ ID NO: 721369 - DNA, 33 bp, Homo sapien
tgctatgcaagatgaacatcaccaaggcacaca

SEQ ID NO: 721370 - DNA, 33 bp, Homo sapien
tgctatgcaagatgaatatcaccaaggcacaca

SEQ ID NO: 721371 - DNA, 33 bp, Homo sapien
acatcaaggcctcataataagtgactggaaaat

SEQ ID NO: 721372 - DNA, 33 bp, Homo sapien
acatcaaggcctcatagtaagtgactggaaaat

SEQ ID NO: 721373 - DNA, 33 bp, Homo sapien
caaccagcatatgtaacgtttatacaccaaaat

SEQ ID NO: 721374 - DNA, 33 bp, Homo sapien
caaccagcatatgtaatgtttatacaccaaaat

SEQ ID NO: 721375 - DNA, 33 bp, Homo sapien
cagttaaatgagactacgtgtgtaattatcagt

SEQ ID NO: 721376 - DNA, 33 bp, Homo sapien
cagttaaatgagactatgtgtgtaattatcagt

SEQ ID NO: 721377 - DNA, 33 bp, Homo sapien
agtaacaattttaggccaagtatactacactca

SEQ ID NO: 721378 - DNA, 33 bp, Homo sapien
agtaacaattttaggcgaagtatactacactca

SEQ ID NO: 721379 - DNA, 33 bp, Homo sapien
acactgttaggcatagcacagagattcacaata

SEQ ID NO: 721380 - DNA, 33 bp, Homo sapien
acactgttaggcatagtacagagattcacaata

SEQ ID NO: 721381 - DNA, 33 bp, Homo sapien
gttgtgaatagcgctaaaatgaatatacacatg

SEQ ID NO: 721382 - DNA, 33 bp, Homo sapien
gttgtgaatagcgctacaatgaatatacacatg

SEQ ID NO: 721383 - DNA, 33 bp, Homo sapien
ttaggaggcccaattacaggattagcagaggga

SEQ ID NO: 721384 - DNA, 33 bp, Homo sapien
ttaggaggcccaattataggattagcagaggga

SEQ ID NO: 721385 - DNA, 33 bp, Homo sapien
agaaaaagtcaacatgaagaagtatacagcatt

SEQ ID NO: 721386 - DNA, 33 bp, Homo sapien
agaaaaagtcaacatgtagaagtatacagcatt

SEQ ID NO: 721387 - DNA, 33 bp, Homo sapien
gcatagtttcttctcacacttttggcaaatagc

SEQ ID NO: 721388 - DNA, 33 bp, Homo sapien
gcatagtttcttctcagacttttggcaaatagc

SEQ ID NO: 721389 - DNA, 33 bp, Homo sapien
agaaactatgccatcaaggagcattatgctatt

SEQ ID NO: 721390 - DNA, 33 bp, Homo sapien
agaaactatgccatcacggagcattatgctatt

SEQ ID NO: 721391 - DNA, 33 bp, Homo sapien
gatgtctgtgcttccaatgagcttcctggagga

SEQ ID NO: 721392 - DNA, 33 bp, Homo sapien
gatgtctgtgcttccagtgagcttcctggagga

SEQ ID NO: 721393 - DNA, 33 bp, Homo sapien; identical to SEQ ID NO: 721391

SEQ ID NO: 721394 - DNA, 33 bp, Homo sapien; identical to SEQ ID NO: 721392

SEQ ID NO: 721395 - DNA, 33 bp, Homo sapien
ccaaaagaagattggcaaaggagaggagaaaga

SEQ ID NO: 721396 - DNA, 33 bp, Homo sapien
ccaaaagaagattggcgaaggagaggagaaaga

SEQ ID NO: 721397 - DNA, 33 bp, Homo sapien
agggacaagtattctgaaataaaggaatagcaa

SEQ ID NO: 721398 - DNA, 33 bp, Homo sapien
agggacaagtattctggaataaaggaatagcaa

SEQ ID NO: 721399 - DNA, 33 bp, Homo sapien
tttcatatataggacaacctttcagtgttttct

SEQ ID NO: 721400 - DNA, 33 bp, Homo sapien
tttcatatataggacatcctttcagtgttttct

SEQ ID NO: 721401 - DNA, 33 bp, Homo sapien
gaaaacctcaccttgaacactctatctcactca

SEQ ID NO: 721402 - DNA, 33 bp, Homo sapien
gaaaacctcaccttgagcactctatctcactca

SEQ ID NO: 721403 - DNA, 33 bp, Homo sapien
ctgtgaagaatgtacaaagtccacttaaaacag

SEQ ID NO: 721404 - DNA, 33 bp, Homo sapien
ctgtgaagaatgtacagagtccacttaaaacag

SEQ ID NO: 721405 - DNA, 33 bp, Homo sapien
ctgtggcctacctccacgataggtctgaaggtt

SEQ ID NO: 721406 - DNA, 33 bp, Homo sapien
ctgtggcctacctccatgataggtctgaaggtt

SEQ ID NO: 721407 - DNA, 33 bp, Homo sapien
aaataactgtggagaacctgtatccttttccaa

SEQ ID NO: 721408 - DNA, 33 bp, Homo sapien
aaataactgtggagaatctgtatccttttccaa

SEQ ID NO: 721409 - DNA, 33 bp, Homo sapien
taccaagctgtcatgacgaacaggtttctgcac

SEQ ID NO: 721410 - DNA, 33 bp, Homo sapien
taccaagctgtcatgatgaacaggtttctgcac

SEQ ID NO: 721411 - DNA, 33 bp, Homo sapien
ctggcaccttgaggagaagccaatctgacagga

SEQ ID NO: 721412 - DNA, 33 bp, Homo sapien
ctggcaccttgaggaggagccaatctgacagga

SEQ ID NO: 721413 - DNA, 33 bp, Homo sapien
acaccttgtgctaaaagcaggagaggcaagttc

SEQ ID NO: 721414 - DNA, 33 bp, Homo sapien
acaccttgtgctaaaatcaggagaggcaagttc

SEQ ID NO: 721415 - DNA, 33 bp, Homo sapien
ctttctgacctcatcacagtttttaaatccaaa

SEQ ID NO: 721416 - DNA, 33 bp, Homo sapien
ctttctgacctcatcatagtttttaaatccaaa

SEQ ID NO: 721417 - DNA, 33 bp, Homo sapien
ctcatatttgtggaaaaagatttgttaaatata

SEQ ID NO: 721418 - DNA, 33 bp, Homo sapien
ctcatatttgtggaaagagatttgttaaatata

SEQ ID NO: 721419 - DNA, 33 bp, Homo sapien
ctgaggtcttctgcaaagtaaccaacccatgtc

SEQ ID NO: 721420 - DNA, 33 bp, Homo sapien
ctgaggtcttctgcaaggtaaccaacccatgtc

SEQ ID NO: 721421 - DNA, 33 bp, Homo sapien
tagaggataaaggtaaccgacccgtcttggttg

SEQ ID NO: 721422 - DNA, 33 bp, Homo sapien
tagaggataaaggtaatcgacccgtcttggttg

SEQ ID NO: 721423 - DNA, 33 bp, Homo sapien
aaagtttctttccccaaatctctgcaagagcag

SEQ ID NO: 721424 - DNA, 33 bp, Homo sapien
aaagtttctttccccagatctctgcaagagcag

SEQ ID NO: 721425 - DNA, 33 bp, Homo sapien
ggactcccaaaaaagacgaacagagacttcagt

SEQ ID NO: 721426 - DNA, 33 bp, Homo sapien
ggactcccaaaaaagatgaacagagacttcagt

SEQ ID NO: 721427 - DNA, 33 bp, Homo sapien
aagacatactaacaaaagaaaaagcatacacat

SEQ ID NO: 721428 - DNA, 33 bp, Homo sapien
aagacatactaacaaaggaaaaagcatacacat

SEQ ID NO: 721429 - DNA, 33 bp, Homo sapien
cagctcaaaataatcaatatcccaaagtggcat

SEQ ID NO: 721430 - DNA, 33 bp, Homo sapien
cagctcaaaataatcagtatcccaaagtggcat

SEQ ID NO: 721431 - DNA, 33 bp, Homo sapien
tatgtttctgtgaaaactgctttaatgttttga

SEQ ID NO: 721432 - DNA, 33 bp, Homo sapien
tatgtttctgtgaaaagtgctttaatgttttga

SEQ ID NO: 721433 - DNA, 33 bp, Homo sapien
tacatatggtgcctgaaagaaagaagccaggcg

SEQ ID NO: 721434 - DNA, 33 bp, Homo sapien
tacatatggtgcctgatagaaagaagccaggcg

SEQ ID NO: 721435 - DNA, 33 bp, Homo sapien
acattactaccatttcactcttcatcgggccca

SEQ ID NO: 721436 - DNA, 33 bp, Homo sapien
acattactaccatttctctcttcatcgggccca

SEQ ID NO: 721437 - DNA, 33 bp, Homo sapien
gctggatatagaggtacaacctagctttgaggt

SEQ ID NO: 721438 - DNA, 33 bp, Homo sapien
gctggatatagaggtagaacctagctttgaggt

SEQ ID NO: 721439 - DNA, 33 bp, Homo sapien
tataataatcacagccactgaaattttgtcgct

SEQ ID NO: 721440 - DNA, 33 bp, Homo sapien
tataataatcacagccgctgaaattttgtcgct

SEQ ID NO: 721441 - DNA, 33 bp, Homo sapien
ataaatattaaacaagaccagttccatgacatt

SEQ ID NO: 721442 - DNA, 33 bp, Homo sapien
ataaatattaaacaagcccagttccatgacatt

SEQ ID NO: 721443 - DNA, 33 bp, Homo sapien
cagacagactcagtgacgacagtaacaacaatc

SEQ ID NO: 721444 - DNA, 33 bp, Homo sapien
cagacagactcagtgatgacagtaacaacaatc

SEQ ID NO: 721445 - DNA, 33 bp, Homo sapien
ttgccagagattgctaagtaatatagagcaact

SEQ ID NO: 721446 - DNA, 33 bp, Homo sapien
ttgccagagattgctaggtaatatagagcaact

SEQ ID NO: 721447 - DNA, 33 bp, Homo sapien
aataatccctcacttacggcaatcaaaaattat

SEQ ID NO: 721448 - DNA, 33 bp, Homo sapien
aataatccctcacttatggcaatcaaaaattat

SEQ ID NO: 721449 - DNA, 33 bp, Homo sapien
gcctcacagtcttttccaaagctctaaacagct

SEQ ID NO: 721450 - DNA, 33 bp, Homo sapien
gcctcacagtcttttctaaagctctaaacagct

SEQ ID NO: 721451 - DNA, 33 bp, Homo sapien
gggatgagctagtggacattcacaacctggcag

SEQ ID NO: 721452 - DNA, 33 bp, Homo sapien
gggatgagctagtggatattcacaacctggcag

SEQ ID NO: 721453 - DNA, 33 bp, Homo sapien
gatcttaagcagggcacccagctaaaccgtgct

SEQ ID NO: 721454 - DNA, 33 bp, Homo sapien
gatcttaagcagggcatccagctaaaccgtgct

SEQ ID NO: 721455 - DNA, 33 bp, Homo sapien
gcctgaatgcacttcaaaagtctcatatgagta

SEQ ID NO: 721456 - DNA, 33 bp, Homo sapien
gcctgaatgcacttcagaagtctcatatgagta

SEQ ID NO: 721457 - DNA, 33 bp, Homo sapien
agggccagactatgaacgtgggattggtagcaa

SEQ ID NO: 721458 - DNA, 33 bp, Homo sapien
agggccagactatgaatgtgggattggtagcaa

SEQ ID NO: 721459 - DNA, 33 bp, Homo sapien
tgaagggtaagagagaataatgagcatttttca

SEQ ID NO: 721460 - DNA, 33 bp, Homo sapien
tgaagggtaagagagactaatgagcatttttca

SEQ ID NO: 721461 - DNA, 33 bp, Homo sapien
gtgtgaacaagtcatacatttccatctgcaaag

SEQ ID NO: 721462 - DNA, 33 bp, Homo sapien
gtgtgaacaagtcatatatttccatctgcaaag

SEQ ID NO: 721463 - DNA, 33 bp, Homo sapien
acacagctaattcccaacatcacctaagaattc

SEQ ID NO: 721464 - DNA, 33 bp, Homo sapien
acacagctaattcccagcatcacctaagaattc

SEQ ID NO: 721465 - DNA, 33 bp, Homo sapien
accttgatgggcaaaacccaaattatggtttat

SEQ ID NO: 721466 - DNA, 33 bp, Homo sapien
accttgatgggcaaaatccaaattatggtttat

SEQ ID NO: 721467 - DNA, 33 bp, Homo sapien
ttggactgatgtacaactctcatctctataatg

SEQ ID NO: 721468 - DNA, 33 bp, Homo sapien
ttggactgatgtacaattctcatctctataatg

SEQ ID NO: 721469 - DNA, 33 bp, Homo sapien
tgactgctctaatgacagaacttggtaatagaa

SEQ ID NO: 721470 - DNA, 33 bp, Homo sapien
tgactgctctaatgacggaacttggtaatagaa

SEQ ID NO: 721471 - DNA, 33 bp, Homo sapien
tgtagccctgctgttaaagttgcttctttgtca

SEQ ID NO: 721472 - DNA, 33 bp, Homo sapien
tgtagccctgctgttagagttgcttctttgtca

SEQ ID NO: 721473 - DNA, 33 bp, Homo sapien
acagggtatactcacactacattcactgtttct

SEQ ID NO: 721474 - DNA, 33 bp, Homo sapien
acagggtatactcacattacattcactgtttct

SEQ ID NO: 721475 - DNA, 33 bp, Homo sapien
catttggatgtctcaacgactgactctttatgc

SEQ ID NO: 721476 - DNA, 33 bp, Homo sapien
catttggatgtctcaatgactgactctttatgc

SEQ ID NO: 721477 - DNA, 33 bp, Homo sapien
ttgaattgatccttaaaagacaagtataatttc

SEQ ID NO: 721478 - DNA, 33 bp, Homo sapien
ttgaattgatccttaagagacaagtataatttc

SEQ ID NO: 721479 - DNA, 33 bp, Homo sapien
tacacaactttatacacggaatcaagttgcata

SEQ ID NO: 721480 - DNA, 33 bp, Homo sapien
tacacaactttatacatggaatcaagttgcata

SEQ ID NO: 721481 - DNA, 33 bp, Homo sapien
atatttcatccattcaatctgttcagtcagttc

SEQ ID NO: 721482 - DNA, 33 bp, Homo sapien
atatttcatccattcattctgttcagtcagttc

SEQ ID NO: 721483 - DNA, 33 bp, Homo sapien
tcggatctccccattaacaagacatttataaga

SEQ ID NO: 721484 - DNA, 33 bp, Homo sapien
tcggatctccccattagcaagacatttataaga

SEQ ID NO: 721485 - DNA, 33 bp, Homo sapien
cataccaaatcaacccacagtttcacaggaata

SEQ ID NO: 721486 - DNA, 33 bp, Homo sapien
cataccaaatcaaccctcagtttcacaggaata

SEQ ID NO: 721487 - DNA, 33 bp, Homo sapien
ggagagcaaagaaatacgatcaatttggcaaaa

SEQ ID NO: 721488 - DNA, 33 bp, Homo sapien
ggagagcaaagaaatatgatcaatttggcaaaa

SEQ ID NO: 721489 - DNA, 33 bp, Homo sapien
aacatgataggtatgaatattaaatcctggtgt

SEQ ID NO: 721490 - DNA, 33 bp, Homo sapien
aacatgataggtatgactattaaatcctggtgt

SEQ ID NO: 721491 - DNA, 33 bp, Homo sapien
agcaaggaagagtaaacgtattacagataggct

SEQ ID NO: 721492 - DNA, 33 bp, Homo sapien
agcaaggaagagtaaatgtattacagataggct

SEQ ID NO: 721493 - DNA, 33 bp, Homo sapien
agacaggcaactagaaatctattggctttagca

SEQ ID NO: 721494 - DNA, 33 bp, Homo sapien
agacaggcaactagaagtctattggctttagca

SEQ ID NO: 721495 - DNA, 33 bp, Homo sapien
tcattgtttggtttaactagcatcactcaaagg

SEQ ID NO: 721496 - DNA, 33 bp, Homo sapien
tcattgtttggtttaattagcatcactcaaagg

SEQ ID NO: 721497 - DNA, 33 bp, Homo sapien
gctatgataattcaaactgaatgtgagttcact

SEQ ID NO: 721498 - DNA, 33 bp, Homo sapien
gctatgataattcaaagtgaatgtgagttcact

SEQ ID NO: 721499 - DNA, 33 bp, Homo sapien
tgagttgtaaaatttaggagtcactttacattc

SEQ ID NO: 721500 - DNA, 33 bp, Homo sapien
tgagttgtaaaatttatgagtcactttacattc

SEQ ID NO: 721501 - DNA, 33 bp, Homo sapien
gctgaactacttcttccaagcattgctaaataa

SEQ ID NO: 721502 - DNA, 33 bp, Homo sapien
gctgaactacttcttctaagcattgctaaataa

SEQ ID NO: 721503 - DNA, 33 bp, Homo sapien
acgtttaacgagaaaaaagaagacgtaacattt

SEQ ID NO: 721504 - DNA, 33 bp, Homo sapien
acgtttaacgagaaaagagaagacgtaacattt

SEQ ID NO: 721505 - DNA, 33 bp, Homo sapien
aaatgctcaaccaaacagaataaacactcacca

SEQ ID NO: 721506 - DNA, 33 bp, Homo sapien
aaatgctcaaccaaacggaataaacactcacca

SEQ ID NO: 721507 - DNA, 33 bp, Homo sapien
tagcaataaaatgaaacctcttcaattactata

SEQ ID NO: 721508 - DNA, 33 bp, Homo sapien
tagcaataaaatgaaagctcttcaattactata

SEQ ID NO: 721509 - DNA, 33 bp, Homo sapien
acttaataaagcttaaataaagtccaggtaaaa

SEQ ID NO: 721510 - DNA, 33 bp, Homo sapien
acttaataaagcttaagtaaagtccaggtaaaa

SEQ ID NO: 721511 - DNA, 33 bp, Homo sapien
tttgtatttttatctcaattgtagactccttga

SEQ ID NO: 721512 - DNA, 33 bp, Homo sapien
tttgtatttttatctcgattgtagactccttga

SEQ ID NO: 721513 - DNA, 33 bp, Homo sapien
gcataagcataactgaaatttattcatagttac

SEQ ID NO: 721514 - DNA, 33 bp, Homo sapien
gcataagcataactgatatttattcatagttac

SEQ ID NO: 721515 - DNA, 33 bp, Homo sapien
tcatttaactaaatcaccaagttccattatgtt

SEQ ID NO: 721516 - DNA, 33 bp, Homo sapien
tcatttaactaaatcatcaagttccattatgtt

SEQ ID NO: 721517 - DNA, 33 bp, Homo sapien
attcactgtgaaaacagtaaggaaccttagcac

SEQ ID NO: 721518 - DNA, 33 bp, Homo sapien
attcactgtgaaaacattaaggaaccttagcac

SEQ ID NO: 721519 - DNA, 33 bp, Homo sapien
aaaggagctccaaacaatattaattacagctta

SEQ ID NO: 721520 - DNA, 33 bp, Homo sapien
aaaggagctccaaacagtattaattacagctta

SEQ ID NO: 721521 - DNA, 33 bp, Homo sapien
ttttggtctaataagaagtatgtgggaaatgga

SEQ ID NO: 721522 - DNA, 33 bp, Homo sapien
ttttggtctaataagaggtatgtgggaaatgga

SEQ ID NO: 721523 - DNA, 33 bp, Homo sapien
ggaaatccatgaaggaatcaaatgagtagatga

SEQ ID NO: 721524 - DNA, 33 bp, Homo sapien
ggaaatccatgaaggagtcaaatgagtagatga

SEQ ID NO: 721525 - DNA, 33 bp, Homo sapien
atgttaagtgctatacaaatgttacactcctca

SEQ ID NO: 721526 - DNA, 33 bp, Homo sapien
atgttaagtgctatacgaatgttacactcctca

SEQ ID NO: 721527 - DNA, 33 bp, Homo sapien
aagacacagttttgggaaagagtttagacattt

SEQ ID NO: 721528 - DNA, 33 bp, Homo sapien
aagacacagttttggggaagagtttagacattt

SEQ ID NO: 721529 - DNA, 33 bp, Homo sapien
tcttttatagcacaacagccttcctgcagaatg

SEQ ID NO: 721530 - DNA, 33 bp, Homo sapien
tcttttatagcacaacggccttcctgcagaatg

SEQ ID NO: 721531 - DNA, 33 bp, Homo sapien
tatctgatgctgttacaagaagtttggagcctg

SEQ ID NO: 721532 - DNA, 33 bp, Homo sapien
tatctgatgctgttacgagaagtttggagcctg

SEQ ID NO: 721533 - DNA, 33 bp, Homo sapien
gaacattcattctgaacctggacaagcaaatag

SEQ ID NO: 721534 - DNA, 33 bp, Homo sapien
gaacattcattctgaagctggacaagcaaatag

SEQ ID NO: 721535 - DNA, 33 bp, Homo sapien
agcattctgttgtatgaacatagcacaatttat

SEQ ID NO: 721536 - DNA, 33 bp, Homo sapien
agcattctgttgtatggacatagcacaatttat

SEQ ID NO: 721537 - DNA, 33 bp, Homo sapien
aattgcaaaattgaaaatcacagagaacacaat

SEQ ID NO: 721538 - DNA, 33 bp, Homo sapien
aattgcaaaattgaaagtcacagagaacacaat

SEQ ID NO: 721539 - DNA, 33 bp, Homo sapien
gagtaagggaaagcatgagcacaagtaggagag

SEQ ID NO: 721540 - DNA, 33 bp, Homo sapien
gagtaagggaaagcattagcacaagtaggagag

SEQ ID NO: 721541 - DNA, 33 bp, Homo sapien
ccaaactcaccaagtacattcctaactcaggct

SEQ ID NO: 721542 - DNA, 33 bp, Homo sapien
ccaaactcaccaagtatattcctaactcaggct

SEQ ID NO: 721543 - DNA, 33 bp, Homo sapien
agggttatttgccaggcatcctgagagccatca

SEQ ID NO: 721544 - DNA, 33 bp, Homo sapien
agggttatttgccaggtatcctgagagccatca

SEQ ID NO: 721545 - DNA, 33 bp, Homo sapien
cacaaaaagtgctaagaattgcagtaatcatga

SEQ ID NO: 721546 - DNA, 33 bp, Homo sapien
cacaaaaagtgctaaggattgcagtaatcatga

SEQ ID NO: 721547 - DNA, 33 bp, Homo sapien
gagccttgatgataacactttgtcctgtctctg

SEQ ID NO: 721548 - DNA, 33 bp, Homo sapien
gagccttgatgataacgctttgtcctgtctctg

SEQ ID NO: 721549 - DNA, 33 bp, Homo sapien
cagttgtctagtgtaaacagaagctgataaatg

SEQ ID NO: 721550 - DNA, 33 bp, Homo sapien
cagttgtctagtgtaagcagaagctgataaatg

SEQ ID NO: 721551 - DNA, 33 bp, Homo sapien
tgaatagtcatgcttcaagattgccttcacatt

SEQ ID NO: 721552 - DNA, 33 bp, Homo sapien
tgaatagtcatgcttcgagattgccttcacatt

SEQ ID NO: 721553 - DNA, 33 bp, Homo sapien
ggagctcggactataacggagcaatggggaaca

SEQ ID NO: 721554 - DNA, 33 bp, Homo sapien
ggagctcggactataatggagcaatggggaaca

SEQ ID NO: 721555 - DNA, 33 bp, Homo sapien
caatgttactcatgaaaagtagatgatttggaa

SEQ ID NO: 721556 - DNA, 33 bp, Homo sapien
caatgttactcatgaacagtagatgatttggaa

SEQ ID NO: 721557 - DNA, 33 bp, Homo sapien
gtcttgtgagtttaaaattagttaaggataagt

SEQ ID NO: 721558 - DNA, 33 bp, Homo sapien
gtcttgtgagtttaaagttagttaaggataagt

SEQ ID NO: 721559 - DNA, 33 bp, Homo sapien
ttatactatcaagatgacagtcaagaactttat

SEQ ID NO: 721560 - DNA, 33 bp, Homo sapien
ttatactatcaagatgccagtcaagaactttat

SEQ ID NO: 721561 - DNA, 33 bp, Homo sapien
attcttccaaagttaccattcttgccagtttac

SEQ ID NO: 721562 - DNA, 33 bp, Homo sapien
attcttccaaagttactattcttgccagtttac

SEQ ID NO: 721563 - DNA, 33 bp, Homo sapien
tgtgaaaaacacaaacagcagtctcttattttc

SEQ ID NO: 721564 - DNA, 33 bp, Homo sapien
tgtgaaaaacacaaacggcagtctcttattttc

SEQ ID NO: 721565 - DNA, 33 bp, Homo sapien
aaggccaaccccagatcaattaatgaaggacaa

SEQ ID NO: 721566 - DNA, 33 bp, Homo sapien
aaggccaaccccagatgaattaatgaaggacaa

SEQ ID NO: 721567 - DNA, 33 bp, Homo sapien
gatattcagtaaagcaagtgaatgctagtcagg

SEQ ID NO: 721568 - DNA, 33 bp, Homo sapien
gatattcagtaaagcaggtgaatgctagtcagg

SEQ ID NO: 721569 - DNA, 33 bp, Homo sapien
gccttacaaacaacaacttaagaagcaggtagt

SEQ ID NO: 721570 - DNA, 33 bp, Homo sapien
gccttacaaacaacaatttaagaagcaggtagt

SEQ ID NO: 721571 - DNA, 33 bp, Homo sapien
agacatattgggctgaaatattataactctagg

SEQ ID NO: 721572 - DNA, 33 bp, Homo sapien
agacatattgggctgatatattataactctagg

SEQ ID NO: 721573 - DNA, 33 bp, Homo sapien
ccttggttagctgacactatgggtgttttggct

SEQ ID NO: 721574 - DNA, 33 bp, Homo sapien
ccttggttagctgacagtatgggtgttttggct

SEQ ID NO: 721575 - DNA, 33 bp, Homo sapien
taatattatctgaacaataatcattagtaagca

SEQ ID NO: 721576 - DNA, 33 bp, Homo sapien
taatattatctgaacattaatcattagtaagca

SEQ ID NO: 721577 - DNA, 33 bp, Homo sapien
tataacttctgcaatactaatggtattctggta

SEQ ID NO: 721578 - DNA, 33 bp, Homo sapien
tataacttctgcaatattaatggtattctggta

SEQ ID NO: 721579 - DNA, 33 bp, Homo sapien
tataaactcagtataactcagtagcactgactt

SEQ ID NO: 721580 - DNA, 33 bp, Homo sapien
tataaactcagtataattcagtagcactgactt

SEQ ID NO: 721581 - DNA, 33 bp, Homo sapien
ggaaccgtaggcttagcaatcgctctgtcactg

SEQ ID NO: 721582 - DNA, 33 bp, Homo sapien
ggaaccgtaggcttagtaatcgctctgtcactg

SEQ ID NO: 721583 - DNA, 33 bp, Homo sapien
ttctatgataatggaaatactctatatctgcat

SEQ ID NO: 721584 - DNA, 33 bp, Homo sapien
ttctatgataatggaagtactctatatctgcat

SEQ ID NO: 721585 - DNA, 33 bp, Homo sapien
aaatgcctaggaagtacattagagttttaaaat

SEQ ID NO: 721586 - DNA, 33 bp, Homo sapien
aaatgcctaggaagtagattagagttttaaaat

SEQ ID NO: 721587 - DNA, 33 bp, Homo sapien
atgcataaagttgacactcctgtttcctcaaaa

SEQ ID NO: 721588 - DNA, 33 bp, Homo sapien
atgcataaagttgacattcctgtttcctcaaaa

SEQ ID NO: 721589 - DNA, 33 bp, Homo sapien
tttgagaactgattccaaaactattaagtaatt

SEQ ID NO: 721590 - DNA, 33 bp, Homo sapien
tttgagaactgattccgaaactattaagtaatt

SEQ ID NO: 721591 - DNA, 33 bp, Homo sapien
tttttgtactggaaaacgtatttgtgctgaata

SEQ ID NO: 721592 - DNA, 33 bp, Homo sapien
tttttgtactggaaaatgtatttgtgctgaata

SEQ ID NO: 721593 - DNA, 33 bp, Homo sapien
gcctctgataccctgaaaacgctgctaaattct

SEQ ID NO: 721594 - DNA, 33 bp, Homo sapien
gcctctgataccctgataacgctgctaaattct

SEQ ID NO: 721595 - DNA, 33 bp, Homo sapien
atctcaatgctgtacaatctcaatcatgcttga

SEQ ID NO: 721596 - DNA, 33 bp, Homo sapien
atctcaatgctgtacagtctcaatcatgcttga

SEQ ID NO: 721597 - DNA, 33 bp, Homo sapien
gatagcatagagattaagagatgggttctaaag

SEQ ID NO: 721598 - DNA, 33 bp, Homo sapien
gatagcatagagattacgagatgggttctaaag

SEQ ID NO: 721599 - DNA, 33 bp, Homo sapien
cctgactctttccatacgtctcaatatttccct

SEQ ID NO: 721600 - DNA, 33 bp, Homo sapien
cctgactctttccatatgtctcaatatttccct

SEQ ID NO: 721601 - DNA, 33 bp, Homo sapien
ctcttatagttcaccaagaaatgggtgctcatt

SEQ ID NO: 721602 - DNA, 33 bp, Homo sapien
ctcttatagttcaccaggaaatgggtgctcatt

SEQ ID NO: 721603 - DNA, 33 bp, Homo sapien
aataatttttactgacaattcctaggtgaccaa

SEQ ID NO: 721604 - DNA, 33 bp, Homo sapien
aataatttttactgactattcctaggtgaccaa

SEQ ID NO: 721605 - DNA, 33 bp, Homo sapien
ctaagatactgagaaaataagaatcaaataggt

SEQ ID NO: 721606 - DNA, 33 bp, Homo sapien
ctaagatactgagaaagtaagaatcaaataggt

SEQ ID NO: 721607 - DNA, 33 bp, Homo sapien
tctggaaaaaaggatgcaactccagttctgcca

SEQ ID NO: 721608 - DNA, 33 bp, Homo sapien
tctggaaaaaaggatgtaactccagttctgcca

SEQ ID NO: 721609 - DNA, 33 bp, Homo sapien
tcaccctgtgtgttaccgaacattagatcttat

SEQ ID NO: 721610 - DNA, 33 bp, Homo sapien
tcaccctgtgtgttactgaacattagatcttat

SEQ ID NO: 721611 - DNA, 33 bp, Homo sapien
actacactctctcatgaatgcaccatgccttat

SEQ ID NO: 721612 - DNA, 33 bp, Homo sapien
actacactctctcatgtatgcaccatgccttat

SEQ ID NO: 721613 - DNA, 33 bp, Homo sapien
attctgccactgtcaaacttagaaccttgggta

SEQ ID NO: 721614 - DNA, 33 bp, Homo sapien
attctgccactgtcaagcttagaaccttgggta

SEQ ID NO: 721615 - DNA, 33 bp, Homo sapien
aaaaaaattatgggtaagtcttagctcttctat

SEQ ID NO: 721616 - DNA, 33 bp, Homo sapien
aaaaaaattatgggtaggtcttagctcttctat

SEQ ID NO: 721617 - DNA, 33 bp, Homo sapien
attggcggctatgggccaacctgtaaaaggcac

SEQ ID NO: 721618 - DNA, 33 bp, Homo sapien
attggcggctatgggctaacctgtaaaaggcac

SEQ ID NO: 721619 - DNA, 33 bp, Homo sapien
aaactctgattacatacagataatacctaccta

SEQ ID NO: 721620 - DNA, 33 bp, Homo sapien
aaactctgattacatatagataatacctaccta

SEQ ID NO: 721621 - DNA, 33 bp, Homo sapien
gtcaatttgctcattaagtcactattcaattac

SEQ ID NO: 721622 - DNA, 33 bp, Homo sapien
gtcaatttgctcattaggtcactattcaattac

SEQ ID NO: 721623 - DNA, 33 bp, Homo sapien
tgattctggtgtactgcataaaatctagatacc

SEQ ID NO: 721624 - DNA, 33 bp, Homo sapien
tgattctggtgtactgtataaaatctagatacc

SEQ ID NO: 721625 - DNA, 33 bp, Homo sapien
tagtttacaactgtgagaaatgcttggtgaaat

SEQ ID NO: 721626 - DNA, 33 bp, Homo sapien
tagtttacaactgtgataaatgcttggtgaaat

SEQ ID NO: 721627 - DNA, 33 bp, Homo sapien
ggtcaggaaaggatgaaagcaaagcaggtagag

SEQ ID NO: 721628 - DNA, 33 bp, Homo sapien
ggtcaggaaaggatgagagcaaagcaggtagag

SEQ ID NO: 721629 - DNA, 33 bp, Homo sapien
caaatagtaaattcacactcttcaagcacacat

SEQ ID NO: 721630 - DNA, 33 bp, Homo sapien
caaatagtaaattcacgctcttcaagcacacat

SEQ ID NO: 721631 - DNA, 33 bp, Homo sapien
ggtgtgacggaattcaagtaagtgtttctgctc

SEQ ID NO: 721632 - DNA, 33 bp, Homo sapien
ggtgtgacggaattcaggtaagtgtttctgctc

SEQ ID NO: 721633 - DNA, 33 bp, Homo sapien
aaatgattacactgtgaaactagaaatttacct

SEQ ID NO: 721634 - DNA, 33 bp, Homo sapien
aaatgattacactgtggaactagaaatttacct

SEQ ID NO: 721635 - DNA, 33 bp, Homo sapien
tttacaagttcttgtgaaacactaaaagtagcc

SEQ ID NO: 721636 - DNA, 33 bp, Homo sapien
tttacaagttcttgtgcaacactaaaagtagcc

SEQ ID NO: 721637 - DNA, 33 bp, Homo sapien
gtaatacacacatttcgaaacacatggcataat

SEQ ID NO: 721638 - DNA, 33 bp, Homo sapien
gtaatacacacatttctaaacacatggcataat

SEQ ID NO: 721639 - DNA, 33 bp, Homo sapien
cctggcctctgctcataaataaaggcactgctg

SEQ ID NO: 721640 - DNA, 33 bp, Homo sapien
cctggcctctgctcattaataaaggcactgctg

SEQ ID NO: 721641 - DNA, 33 bp, Homo sapien
taataagacaatgaagcctgtaagacagttgta

SEQ ID NO: 721642 - DNA, 33 bp, Homo sapien
taataagacaatgaaggctgtaagacagttgta

SEQ ID NO: 721643 - DNA, 33 bp, Homo sapien
ttagcacaagtctcacacatcttcagttttata

SEQ ID NO: 721644 - DNA, 33 bp, Homo sapien
ttagcacaagtctcacgcatcttcagttttata

SEQ ID NO: 721645 - DNA, 33 bp, Homo sapien
accactgtaatctatcacccagggcctatgttt

SEQ ID NO: 721646 - DNA, 33 bp, Homo sapien
accactgtaatctatcgcccagggcctatgttt

SEQ ID NO: 721647 - DNA, 33 bp, Homo sapien
tgtgtcttttcataaaacaagaacgtcgattaa

SEQ ID NO: 721648 - DNA, 33 bp, Homo sapien
tgtgtcttttcataaagcaagaacgtcgattaa

SEQ ID NO: 721649 - DNA, 33 bp, Homo sapien
agataacttgataataacagtatccgtaaactt

SEQ ID NO: 721650 - DNA, 33 bp, Homo sapien
agataacttgataatagcagtatccgtaaactt

SEQ ID NO: 721651 - DNA, 33 bp, Homo sapien
cctttggtaaaattgacgaacttacgtgggcat

SEQ ID NO: 721652 - DNA, 33 bp, Homo sapien
cctttggtaaaattgatgaacttacgtgggcat

SEQ ID NO: 721653 - DNA, 33 bp, Homo sapien
tcctcttacccttggcaatcactgttcttctta

SEQ ID NO: 721654 - DNA, 33 bp, Homo sapien
tcctcttacccttggcgatcactgttcttctta

SEQ ID NO: 721655 - DNA, 33 bp, Homo sapien
taacctggagcaaaccaaaataatagagacttg

SEQ ID NO: 721656 - DNA, 33 bp, Homo sapien
taacctggagcaaaccgaaataatagagacttg

SEQ ID NO: 721657 - DNA, 33 bp, Homo sapien
tttgctccaggttaggcagaagcccatgcaaga

SEQ ID NO: 721658 - DNA, 33 bp, Homo sapien
tttgctccaggttagggagaagcccatgcaaga

SEQ ID NO: 721659 - DNA, 33 bp, Homo sapien
catgcataatattttacggaagtgtggcaggcc

SEQ ID NO: 721660 - DNA, 33 bp, Homo sapien
catgcataatattttatggaagtgtggcaggcc

SEQ ID NO: 721661 - DNA, 33 bp, Homo sapien
acttcagctggccctacgtatgcttcttaaggg

SEQ ID NO: 721662 - DNA, 33 bp, Homo sapien
acttcagctggccctatgtatgcttcttaaggg

SEQ ID NO: 721663 - DNA, 33 bp, Homo sapien
tgtaactatctgaacactgaagaaagttgctgt

SEQ ID NO: 721664 - DNA, 33 bp, Homo sapien
tgtaactatctgaacattgaagaaagttgctgt

SEQ ID NO: 721665 - DNA, 33 bp, Homo sapien
ctctgtcatcccttcaacaaacatccaggtgat

SEQ ID NO: 721666 - DNA, 33 bp, Homo sapien
ctctgtcatcccttcagcaaacatccaggtgat

SEQ ID NO: 721667 - DNA, 33 bp, Homo sapien
aggtaatgttttattccagtgtttcaggctttc

SEQ ID NO: 721668 - DNA, 33 bp, Homo sapien
aggtaatgttttattcgagtgtttcaggctttc

SEQ ID NO: 721669 - DNA, 33 bp, Homo sapien
atttgtacaatgcccacattcagttggggtgac

SEQ ID NO: 721670 - DNA, 33 bp, Homo sapien
atttgtacaatgcccagattcagttggggtgac

SEQ ID NO: 721671 - DNA, 33 bp, Homo sapien
tgttaattcaattatcaatttccatatcataaa

SEQ ID NO: 721672 - DNA, 33 bp, Homo sapien
tgttaattcaattatcgatttccatatcataaa

SEQ ID NO: 721673 - DNA, 33 bp, Homo sapien
tctcaagcttttatgacggcaataagagaaagc

SEQ ID NO: 721674 - DNA, 33 bp, Homo sapien
tctcaagcttttatgatggcaataagagaaagc

SEQ ID NO: 721675 - DNA, 33 bp, Homo sapien
ttcattgtgaaacaaaattccttcttgacattc

SEQ ID NO: 721676 - DNA, 33 bp, Homo sapien
ttcattgtgaaacaaagttccttcttgacattc

SEQ ID NO: 721677 - DNA, 33 bp, Homo sapien
acagcttaatgataaacgactaatgtatgctgc

SEQ ID NO: 721678 - DNA, 33 bp, Homo sapien
acagcttaatgataaatgactaatgtatgctgc

SEQ ID NO: 721679 - DNA, 33 bp, Homo sapien
tgtataaatgtcaaacactattaacaggaacac

SEQ ID NO: 721680 - DNA, 33 bp, Homo sapien
tgtataaatgtcaaacgctattaacaggaacac

SEQ ID NO: 721681 - DNA, 33 bp, Homo sapien
tgcagttttggcagaaggtctttccaccatggt

SEQ ID NO: 721682 - DNA, 33 bp, Homo sapien
tgcagttttggcagaatgtctttccaccatggt

SEQ ID NO: 721683 - DNA, 33 bp, Homo sapien
cagcaaagacaaggaaacagtgaatatcttaaa

SEQ ID NO: 721684 - DNA, 33 bp, Homo sapien
cagcaaagacaaggaaccagtgaatatcttaaa

SEQ ID NO: 721685 - DNA, 33 bp, Homo sapien
aaatcaagttcttggcaaagttagttctttttt

SEQ ID NO: 721686 - DNA, 33 bp, Homo sapien
aaatcaagttcttggccaagttagttctttttt

SEQ ID NO: 721687 - DNA, 33 bp, Homo sapien
tttcatcagagtaaaccaggacttcacttgaat

SEQ ID NO: 721688 - DNA, 33 bp, Homo sapien
tttcatcagagtaaactaggacttcacttgaat

SEQ ID NO: 721689 - DNA, 33 bp, Homo sapien
gtaagaatgtaaaaaaatagtggactacaaaat

SEQ ID NO: 721690 - DNA, 33 bp, Homo sapien
gtaagaatgtaaaaaattagtggactacaaaat

SEQ ID NO: 721691 - DNA, 33 bp, Homo sapien
tccatagagcaaatgaataaggataaaagcgct

SEQ ID NO: 721692 - DNA, 33 bp, Homo sapien
tccatagagcaaatgagtaaggataaaagcgct

SEQ ID NO: 721693 - DNA, 33 bp, Homo sapien
gcattttggtgactggaaaataaccccaaatca

SEQ ID NO: 721694 - DNA, 33 bp, Homo sapien
gcattttggtgactgggaaataaccccaaatca

SEQ ID NO: 721695 - DNA, 33 bp, Homo sapien
cagagctcagactaaacaccatctctttataaa

SEQ ID NO: 721696 - DNA, 33 bp, Homo sapien
cagagctcagactaaataccatctctttataaa

SEQ ID NO: 721697 - DNA, 33 bp, Homo sapien
ttaagggaaaccagtaagtgttgccttggattt

SEQ ID NO: 721698 - DNA, 33 bp, Homo sapien
ttaagggaaaccagtaggtgttgccttggattt

SEQ ID NO: 721699 - DNA, 33 bp, Homo sapien
aaacattatctggcaacaaaagttagggatgaa

SEQ ID NO: 721700 - DNA, 33 bp, Homo sapien
aaacattatctggcaataaaagttagggatgaa

SEQ ID NO: 721701 - DNA, 33 bp, Homo sapien
tgatccagtgactactaaactataaagacaatt

SEQ ID NO: 721702 - DNA, 33 bp, Homo sapien
tgatccagtgactactgaactataaagacaatt

SEQ ID NO: 721703 - DNA, 33 bp, Homo sapien
ataagaggaaaactacaagagagtgcagccaga

SEQ ID NO: 721704 - DNA, 33 bp, Homo sapien
ataagaggaaaactaccagagagtgcagccaga

SEQ ID NO: 721705 - DNA, 33 bp, Homo sapien
aggtttcctagttacaatacaaaaggcatgatt

SEQ ID NO: 721706 - DNA, 33 bp, Homo sapien
aggtttcctagttacagtacaaaaggcatgatt

SEQ ID NO: 721707 - DNA, 33 bp, Homo sapien
catctaatccaagatcaaaaaagttttctccta

SEQ ID NO: 721708 - DNA, 33 bp, Homo sapien
catctaatccaagatcgaaaaagttttctccta

SEQ ID NO: 721709 - DNA, 33 bp, Homo sapien
ttaatgtcagacctaaactctggattccaaaac

SEQ ID NO: 721710 - DNA, 33 bp, Homo sapien
ttaatgtcagacctaagctctggattccaaaac

SEQ ID NO: 721711 - DNA, 33 bp, Homo sapien
cacttcagacactaacacttctataacaggatt

SEQ ID NO: 721712 - DNA, 33 bp, Homo sapien
cacttcagacactaactcttctataacaggatt

SEQ ID NO: 721713 - DNA, 33 bp, Homo sapien
ttctcttttggaaatgaatgactgggaataaag

SEQ ID NO: 721714 - DNA, 33 bp, Homo sapien
ttctcttttggaaatgcatgactgggaataaag

SEQ ID NO: 721715 - DNA, 33 bp, Homo sapien
tttaaagggtggtctggaaagtccaacttgcaa

SEQ ID NO: 721716 - DNA, 33 bp, Homo sapien
tttaaagggtggtctgtaaagtccaacttgcaa

SEQ ID NO: 721717 - DNA, 33 bp, Homo sapien
tctatcctcaccgttccatacttaccctttata

SEQ ID NO: 721718 - DNA, 33 bp, Homo sapien
tctatcctcaccgttctatacttaccctttata

SEQ ID NO: 721719 - DNA, 33 bp, Homo sapien
tgattaagaaacactgacaattgaaagggaata

SEQ ID NO: 721720 - DNA, 33 bp, Homo sapien
tgattaagaaacactggcaattgaaagggaata

SEQ ID NO: 721721 - DNA, 33 bp, Homo sapien
atctatgtgagtcatgaaaggaaatagaggaga

SEQ ID NO: 721722 - DNA, 33 bp, Homo sapien
atctatgtgagtcatgcaaggaaatagaggaga

SEQ ID NO: 721723 - DNA, 33 bp, Homo sapien
gcactatactggcctacgtaaagtagatgaata

SEQ ID NO: 721724 - DNA, 33 bp, Homo sapien
gcactatactggcctatgtaaagtagatgaata

SEQ ID NO: 721725 - DNA, 33 bp, Homo sapien
gcttccttgagccccacagtgaggttatgcaca

SEQ ID NO: 721726 - DNA, 33 bp, Homo sapien
gcttccttgagccccatagtgaggttatgcaca

SEQ ID NO: 721727 - DNA, 33 bp, Homo sapien
tatataccctaaattgcatctaacgtaaagtag

SEQ ID NO: 721728 - DNA, 33 bp, Homo sapien
tatataccctaaattggatctaacgtaaagtag

SEQ ID NO: 721729 - DNA, 33 bp, Homo sapien
atatttgtttaaatgcagaaccagtggacaaat

SEQ ID NO: 721730 - DNA, 33 bp, Homo sapien
atatttgtttaaatgctgaaccagtggacaaat

SEQ ID NO: 721731 - DNA, 33 bp, Homo sapien
cctgggaaccaaattaaggagcgcctttatata

SEQ ID NO: 721732 - DNA, 33 bp, Homo sapien
cctgggaaccaaattatggagcgcctttatata

SEQ ID NO: 721733 - DNA, 33 bp, Homo sapien
tctatttgcacagtgactaaagagtattttcag

SEQ ID NO: 721734 - DNA, 33 bp, Homo sapien
tctatttgcacagtgattaaagagtattttcag

SEQ ID NO: 721735 - DNA, 33 bp, Homo sapien
ggttagacgctattgacgggtggcaagcacatt

SEQ ID NO: 721736 - DNA, 33 bp, Homo sapien
ggttagacgctattgatgggtggcaagcacatt

SEQ ID NO: 721737 - DNA, 33 bp, Homo sapien
tgtaatcacaaatgaaccctgtacgatttccac

SEQ ID NO: 721738 - DNA, 33 bp, Homo sapien
tgtaatcacaaatgaagcctgtacgatttccac

SEQ ID NO: 721739 - DNA, 33 bp, Homo sapien
tcatggtggtttacaaatgaaattcttgagtgc

SEQ ID NO: 721740 - DNA, 33 bp, Homo sapien
tcatggtggtttacaactgaaattcttgagtgc

SEQ ID NO: 721741 - DNA, 33 bp, Homo sapien
aaccaaagaagcataacagaaagctcagaaata

SEQ ID NO: 721742 - DNA, 33 bp, Homo sapien
aaccaaagaagcataatagaaagctcagaaata

SEQ ID NO: 721743 - DNA, 33 bp, Homo sapien
atatcagctatgtgcaatgagaaataagaacca

SEQ ID NO: 721744 - DNA, 33 bp, Homo sapien
atatcagctatgtgcagtgagaaataagaacca

SEQ ID NO: 721745 - DNA, 33 bp, Homo sapien
acagtctgataacagacaactacggagtgactg

SEQ ID NO: 721746 - DNA, 33 bp, Homo sapien
acagtctgataacagataactacggagtgactg

SEQ ID NO: 721747 - DNA, 33 bp, Homo sapien
atacttattttcttatcagatatgtgaattgca

SEQ ID NO: 721748 - DNA, 33 bp, Homo sapien
atacttattttcttatgagatatgtgaattgca

SEQ ID NO: 721749 - DNA, 33 bp, Homo sapien
acctgaactggacttacgactcttagaaggaag

SEQ ID NO: 721750 - DNA, 33 bp, Homo sapien
acctgaactggacttatgactcttagaaggaag

SEQ ID NO: 721751 - DNA, 33 bp, Homo sapien
gggtgggttcccaatgcattcggcagctccacc

SEQ ID NO: 721752 - DNA, 33 bp, Homo sapien
gggtgggttcccaatgtattcggcagctccacc

SEQ ID NO: 721753 - DNA, 33 bp, Homo sapien
ttggagcctatgaatgcagtatggataaaacta

SEQ ID NO: 721754 - DNA, 33 bp, Homo sapien
ttggagcctatgaatgtagtatggataaaacta

SEQ ID NO: 721755 - DNA, 33 bp, Homo sapien
ggtaggaagttagaaagaatgatttgggctacc

SEQ ID NO: 721756 - DNA, 33 bp, Homo sapien
ggtaggaagttagaaataatgatttgggctacc

SEQ ID NO: 721757 - DNA, 33 bp, Homo sapien
cacaaccagagccttacgtgtgtttccgattct

SEQ ID NO: 721758 - DNA, 33 bp, Homo sapien
cacaaccagagccttatgtgtgtttccgattct

SEQ ID NO: 721759 - DNA, 33 bp, Homo sapien
tcctgaatttcaatcactcttttaccacattgt

SEQ ID NO: 721760 - DNA, 33 bp, Homo sapien
tcctgaatttcaatcattcttttaccacattgt

SEQ ID NO: 721761 - DNA, 33 bp, Homo sapien
ggaaggtggccacagaagattcaatgcttgagt

SEQ ID NO: 721762 - DNA, 33 bp, Homo sapien
ggaaggtggccacagaggattcaatgcttgagt

SEQ ID NO: 721763 - DNA, 33 bp, Homo sapien
cactccctagacttacactatcttaaggcattt

SEQ ID NO: 721764 - DNA, 33 bp, Homo sapien
cactccctagacttacgctatcttaaggcattt

SEQ ID NO: 721765 - DNA, 33 bp, Homo sapien
ttatcagtgagttccacatccagaaccaaatgt

SEQ ID NO: 721766 - DNA, 33 bp, Homo sapien
ttatcagtgagttccatatccagaaccaaatgt

SEQ ID NO: 721767 - DNA, 33 bp, Homo sapien
gtttccactgaacttacgctctgttgtgtctct

SEQ ID NO: 721768 - DNA, 33 bp, Homo sapien
gtttccactgaacttatgctctgttgtgtctct

SEQ ID NO: 721769 - DNA, 33 bp, Homo sapien
taaaataactttcagaggtatcaatagcaattt

SEQ ID NO: 721770 - DNA, 33 bp, Homo sapien
taaaataactttcagatgtatcaatagcaattt

SEQ ID NO: 721771 - DNA, 33 bp, Homo sapien
tacttcctcatctctgcatttgttctacttgta

SEQ ID NO: 721772 - DNA, 33 bp, Homo sapien
tacttcctcatctctgtatttgttctacttgta

SEQ ID NO: 721773 - DNA, 33 bp, Homo sapien
taattctatcaaaatacaggttatggccaatct

SEQ ID NO: 721774 - DNA, 33 bp, Homo sapien
taattctatcaaaatataggttatggccaatct

SEQ ID NO: 721775 - DNA, 33 bp, Homo sapien
cattatattttccaaactatacccataaattgt

SEQ ID NO: 721776 - DNA, 33 bp, Homo sapien
cattatattttccaaagtatacccataaattgt

SEQ ID NO: 721777 - DNA, 33 bp, Homo sapien
ataaggctactgtgcaccccatttttttaatgt

SEQ ID NO: 721778 - DNA, 33 bp, Homo sapien
ataaggctactgtgcatcccatttttttaatgt

SEQ ID NO: 721779 - DNA, 33 bp, Homo sapien
cggaggcttctagaaaaagatgtggccaagtat

SEQ ID NO: 721780 - DNA, 33 bp, Homo sapien
cggaggcttctagaaagagatgtggccaagtat

SEQ ID NO: 721781 - DNA, 33 bp, Homo sapien
catggggtgcagatcacgagttgttctaataaa

SEQ ID NO: 721782 - DNA, 33 bp, Homo sapien
catggggtgcagatcatgagttgttctaataaa

SEQ ID NO: 721783 - DNA, 33 bp, Homo sapien
aatgtggtctatgttcaaagtagagcattccct

SEQ ID NO: 721784 - DNA, 33 bp, Homo sapien
aatgtggtctatgttccaagtagagcattccct

SEQ ID NO: 721785 - DNA, 33 bp, Homo sapien
taaaattaggtcatgacatcaggaaaatttata

SEQ ID NO: 721786 - DNA, 33 bp, Homo sapien
taaaattaggtcatgatatcaggaaaatttata

SEQ ID NO: 721787 - DNA, 33 bp, Homo sapien
gtggactgatggttcaacataaaatacttgcag

SEQ ID NO: 721788 - DNA, 33 bp, Homo sapien
gtggactgatggttcaccataaaatacttgcag

SEQ ID NO: 721789 - DNA, 33 bp, Homo sapien
gccttctcaaaaataaaaatagcctccaaatct

SEQ ID NO: 721790 - DNA, 33 bp, Homo sapien
gccttctcaaaaataagaatagcctccaaatct

SEQ ID NO: 721791 - DNA, 33 bp, Homo sapien
aactggacatcaaaaagtagaagcagctgtgct

SEQ ID NO: 721792 - DNA, 33 bp, Homo sapien
aactggacatcaaaaattagaagcagctgtgct

SEQ ID NO: 721793 - DNA, 33 bp, Homo sapien
gatgtaccactctttcactgaagaataataaat

SEQ ID NO: 721794 - DNA, 33 bp, Homo sapien
gatgtaccactctttctctgaagaataataaat

SEQ ID NO: 721795 - DNA, 33 bp, Homo sapien
tgtgcctgagtgcagcaagtttgagtaagtcgg

SEQ ID NO: 721796 - DNA, 33 bp, Homo sapien
tgtgcctgagtgcagcgagtttgagtaagtcgg

SEQ ID NO: 721797 - DNA, 33 bp, Homo sapien
ggttcaatgtcatggccgagcaaacaaacaaac

SEQ ID NO: 721798 - DNA, 33 bp, Homo sapien
ggttcaatgtcatggctgagcaaacaaacaaac

SEQ ID NO: 721799 - DNA, 33 bp, Homo sapien
gggcaattcataataccggtcactttaaatagt

SEQ ID NO: 721800 - DNA, 33 bp, Homo sapien
gggcaattcataatactggtcactttaaatagt

SEQ ID NO: 721801 - DNA, 33 bp, Homo sapien
taccaacttatattaccgaaaacttctctcaaa

SEQ ID NO: 721802 - DNA, 33 bp, Homo sapien
taccaacttatattactgaaaacttctctcaaa

SEQ ID NO: 721803 - DNA, 33 bp, Homo sapien
aaatactttatcccacaattagccataatcatg

SEQ ID NO: 721804 - DNA, 33 bp, Homo sapien
aaatactttatcccactattagccataatcatg

SEQ ID NO: 721805 - DNA, 33 bp, Homo sapien
tcaatccaaggaattcaaagggggctctctcca

SEQ ID NO: 721806 - DNA, 33 bp, Homo sapien
tcaatccaaggaattcgaagggggctctctcca

SEQ ID NO: 721807 - DNA, 33 bp, Homo sapien
aaaccgtatctcagaaatgtcaccaatttctca

SEQ ID NO: 721808 - DNA, 33 bp, Homo sapien
aaaccgtatctcagaattgtcaccaatttctca

SEQ ID NO: 721809 - DNA, 33 bp, Homo sapien
atgtaatgcaatatgcaaatagattcaactcct

SEQ ID NO: 721810 - DNA, 33 bp, Homo sapien
atgtaatgcaatatgcgaatagattcaactcct

SEQ ID NO: 721811 - DNA, 33 bp, Homo sapien
aagtaaaacgcagaaacaaccaataggtctgct

SEQ ID NO: 721812 - DNA, 33 bp, Homo sapien
aagtaaaacgcagaaagaaccaataggtctgct

SEQ ID NO: 721813 - DNA, 33 bp, Homo sapien
tagatgctatgatcacagtcaacaaacatttag

SEQ ID NO: 721814 - DNA, 33 bp, Homo sapien
tagatgctatgatcacggtcaacaaacatttag

SEQ ID NO: 721815 - DNA, 33 bp, Homo sapien
gaggcgcctgcggaaacttccctctctcaaaaa

SEQ ID NO: 721816 - DNA, 33 bp, Homo sapien
gaggcgcctgcggaaagttccctctctcaaaaa

SEQ ID NO: 721817 - DNA, 33 bp, Homo sapien
tgttggctataggtacaataccatatgacaaat

SEQ ID NO: 721818 - DNA, 33 bp, Homo sapien
tgttggctataggtacgataccatatgacaaat

SEQ ID NO: 721819 - DNA, 33 bp, Homo sapien
agtacttaacgattccaagcttagactttacag

SEQ ID NO: 721820 - DNA, 33 bp, Homo sapien
agtacttaacgattccgagcttagactttacag

SEQ ID NO: 721821 - DNA, 33 bp, Homo sapien
gcccaaagtgaactccacctgtgacttttcatt

SEQ ID NO: 721822 - DNA, 33 bp, Homo sapien
gcccaaagtgaactccccctgtgacttttcatt

SEQ ID NO: 721823 - DNA, 33 bp, Homo sapien
caaagtggctttatggaactgtatgcagccata

SEQ ID NO: 721824 - DNA, 33 bp, Homo sapien
caaagtggctttatgggactgtatgcagccata

SEQ ID NO: 721825 - DNA, 33 bp, Homo sapien
atgaaacttttcaccacgagcttgaagctgcat

SEQ ID NO: 721826 - DNA, 33 bp, Homo sapien
atgaaacttttcaccatgagcttgaagctgcat

SEQ ID NO: 721827 - DNA, 33 bp, Homo sapien
atggctgtcaacgtaactgttcttgattgctgc

SEQ ID NO: 721828 - DNA, 33 bp, Homo sapien
atggctgtcaacgtaagtgttcttgattgctgc

SEQ ID NO: 721829 - DNA, 33 bp, Homo sapien
tttctgttctttgaaaattacctactctacagt

SEQ ID NO: 721830 - DNA, 33 bp, Homo sapien
tttctgttctttgaaagttacctactctacagt

SEQ ID NO: 721831 - DNA, 33 bp, Homo sapien
actcaggattgacaagaaggaacctcaggagtt

SEQ ID NO: 721832 - DNA, 33 bp, Homo sapien
actcaggattgacaagcaggaacctcaggagtt

SEQ ID NO: 721833 - DNA, 33 bp, Homo sapien
gaacaacttcgacttaaaaagaatgaaggatca

SEQ ID NO: 721834 - DNA, 33 bp, Homo sapien
gaacaacttcgacttagaaagaatgaaggatca

SEQ ID NO: 721835 - DNA, 33 bp, Homo sapien
ttctcaatgttgttgacgtttcttcaaaaagaa

SEQ ID NO: 721836 - DNA, 33 bp, Homo sapien
ttctcaatgttgttgatgtttcttcaaaaagaa

SEQ ID NO: 721837 - DNA, 33 bp, Homo sapien
tggtgggggaagagacaactttctcaccaggtc

SEQ ID NO: 721838 - DNA, 33 bp, Homo sapien
tggtgggggaagagacgactttctcaccaggtc

SEQ ID NO: 721839 - DNA, 33 bp, Homo sapien
tggcatttgattgtaccgcagctgatctggcac

SEQ ID NO: 721840 - DNA, 33 bp, Homo sapien
tggcatttgattgtactgcagctgatctggcac

SEQ ID NO: 721841 - DNA, 33 bp, Homo sapien
tttctgtgctaagccacctggatctcggggtga

SEQ ID NO: 721842 - DNA, 33 bp, Homo sapien
tttctgtgctaagccatctggatctcggggtga

SEQ ID NO: 721843 - DNA, 33 bp, Homo sapien
aagtggcaatctactacgttcaatctttaaaca

SEQ ID NO: 721844 - DNA, 33 bp, Homo sapien
aagtggcaatctactatgttcaatctttaaaca

SEQ ID NO: 721845 - DNA, 33 bp, Homo sapien
agtaataaacttctcaccagtaactaggaggat

SEQ ID NO: 721846 - DNA, 33 bp, Homo sapien
agtaataaacttctcatcagtaactaggaggat

SEQ ID NO: 721847 - DNA, 33 bp, Homo sapien
ccttgccagtttggtaaccctccggaacagact

SEQ ID NO: 721848 - DNA, 33 bp, Homo sapien
ccttgccagtttggtacccctccggaacagact

SEQ ID NO: 721849 - DNA, 33 bp, Homo sapien
tatcacttcctccagaacaattcctttcagtgt

SEQ ID NO: 721850 - DNA, 33 bp, Homo sapien
tatcacttcctccagagcaattcctttcagtgt

SEQ ID NO: 721851 - DNA, 33 bp, Homo sapien
cctcaccctcattgcaagtatttttggaatatg

SEQ ID NO: 721852 - DNA, 33 bp, Homo sapien
cctcaccctcattgcatgtatttttggaatatg

SEQ ID NO: 721853 - DNA, 33 bp, Homo sapien
agctgacctgtggcaaattaagatgaccaccag

SEQ ID NO: 721854 - DNA, 33 bp, Homo sapien
agctgacctgtggcaacttaagatgaccaccag

SEQ ID NO: 721855 - DNA, 33 bp, Homo sapien
ttttttattgtggtagaaaacagagtatacatg

SEQ ID NO: 721856 - DNA, 33 bp, Homo sapien
ttttttattgtggtagcaaacagagtatacatg

SEQ ID NO: 721857 - DNA, 33 bp, Homo sapien
gtcctgagagggttaccgactcattcaacattc

SEQ ID NO: 721858 - DNA, 33 bp, Homo sapien
gtcctgagagggttactgactcattcaacattc

SEQ ID NO: 721859 - DNA, 33 bp, Homo sapien
tatggattgtgtattccatgcaggctctattag

SEQ ID NO: 721860 - DNA, 33 bp, Homo sapien
tatggattgtgtattctatgcaggctctattag

SEQ ID NO: 721861 - DNA, 33 bp, Homo sapien
aactttgtgcaggacccctgtatgctataataa

SEQ ID NO: 721862 - DNA, 33 bp, Homo sapien
aactttgtgcaggaccgctgtatgctataataa

SEQ ID NO: 721863 - DNA, 33 bp, Homo sapien
ggcagcatcgaaatcactgaatgggaaaatgaa

SEQ ID NO: 721864 - DNA, 33 bp, Homo sapien
ggcagcatcgaaatcattgaatgggaaaatgaa

SEQ ID NO: 721865 - DNA, 33 bp, Homo sapien
gggaaaaataggaagaagcaaagtgaagaaaaa

SEQ ID NO: 721866 - DNA, 33 bp, Homo sapien
gggaaaaataggaagaggcaaagtgaagaaaaa

SEQ ID NO: 721867 - DNA, 33 bp, Homo sapien
tataaccgtcacaacccggaaacagagtcccat

SEQ ID NO: 721868 - DNA, 33 bp, Homo sapien
tataaccgtcacaacctggaaacagagtcccat

SEQ ID NO: 721869 - DNA, 33 bp, Homo sapien
aatccttcctaacagaacctgtatacgtgttat

SEQ ID NO: 721870 - DNA, 33 bp, Homo sapien
aatccttcctaacagagcctgtatacgtgttat

SEQ ID NO: 721871 - DNA, 33 bp, Homo sapien
aaagggaactagatgacaacagggatccagcca

SEQ ID NO: 721872 - DNA, 33 bp, Homo sapien
aaagggaactagatgataacagggatccagcca

SEQ ID NO: 721873 - DNA, 33 bp, Homo sapien
gtttaagctggggagtaaacagcaagcggccgc

SEQ ID NO: 721874 - DNA, 33 bp, Homo sapien
gtttaagctggggagtgaacagcaagcggccgc

SEQ ID NO: 721875 - DNA, 33 bp, Homo sapien
ctggggtatctctctgcagtaagcgttcactca

SEQ ID NO: 721876 - DNA, 33 bp, Homo sapien
ctggggtatctctctgtagtaagcgttcactca

SEQ ID NO: 721877 - DNA, 33 bp, Homo sapien
gaaggtaggttttgagccagattcgaaaggttc

SEQ ID NO: 721878 - DNA, 33 bp, Homo sapien
gaaggtaggttttgagtcagattcgaaaggttc

SEQ ID NO: 721879 - DNA, 33 bp, Homo sapien
aaataatgtcttttacaccaacttagatggaat

SEQ ID NO: 721880 - DNA, 33 bp, Homo sapien
aaataatgtcttttacgccaacttagatggaat

SEQ ID NO: 721881 - DNA, 33 bp, Homo sapien
acaaaaacagacaaacagagcttaattaaacta

SEQ ID NO: 721882 - DNA, 33 bp, Homo sapien
acaaaaacagacaaacggagcttaattaaacta

SEQ ID NO: 721883 - DNA, 33 bp, Homo sapien
acaccaaagagatgagcaatccacaggggatcc

SEQ ID NO: 721884 - DNA, 33 bp, Homo sapien
acaccaaagagatgagtaatccacaggggatcc

SEQ ID NO: 721885 - DNA, 33 bp, Homo sapien
aatggcacccctccacacattgcctcagtctgc

SEQ ID NO: 721886 - DNA, 33 bp, Homo sapien
aatggcacccctccacgcattgcctcagtctgc

SEQ ID NO: 721887 - DNA, 33 bp, Homo sapien
taacaggattatttaaaacagacatgattttac

SEQ ID NO: 721888 - DNA, 33 bp, Homo sapien
taacaggattatttaacacagacatgattttac

SEQ ID NO: 721889 - DNA, 33 bp, Homo sapien
tcatctgaggccaatgcaattaaaaacagaata

SEQ ID NO: 721890 - DNA, 33 bp, Homo sapien
tcatctgaggccaatggaattaaaaacagaata

SEQ ID NO: 721891 - DNA, 33 bp, Homo sapien
tccagaaacaccattaaccttttgtatatctaa

SEQ ID NO: 721892 - DNA, 33 bp, Homo sapien
tccagaaacaccattagccttttgtatatctaa

SEQ ID NO: 721893 - DNA, 33 bp, Homo sapien
cagtctttccaagttaccttccatgcacctaac

SEQ ID NO: 721894 - DNA, 33 bp, Homo sapien
cagtctttccaagttagcttccatgcacctaac

SEQ ID NO: 721895 - DNA, 33 bp, Homo sapien
aggattttggtaagacagatggagagatgtgaa

SEQ ID NO: 721896 - DNA, 33 bp, Homo sapien
aggattttggtaagaccgatggagagatgtgaa

SEQ ID NO: 721897 - DNA, 33 bp, Homo sapien
ctctgtcatctggagaacttggaccgcagtagc

SEQ ID NO: 721898 - DNA, 33 bp, Homo sapien
ctctgtcatctggagagcttggaccgcagtagc

SEQ ID NO: 721899 - DNA, 33 bp, Homo sapien
aaagaggaattacaaccgtacatgagaatgatg

SEQ ID NO: 721900 - DNA, 33 bp, Homo sapien
aaagaggaattacaactgtacatgagaatgatg

SEQ ID NO: 721901 - DNA, 33 bp, Homo sapien
agaaaagacagtgtgaaacagaaagtgggtcca

SEQ ID NO: 721902 - DNA, 33 bp, Homo sapien
agaaaagacagtgtgagacagaaagtgggtcca

SEQ ID NO: 721903 - DNA, 33 bp, Homo sapien
aaattgagttcaagtacagaggatattcaaaat

SEQ ID NO: 721904 - DNA, 33 bp, Homo sapien
aaattgagttcaagtatagaggatattcaaaat

SEQ ID NO: 721905 - DNA, 33 bp, Homo sapien
agttagttatgcactcaagaagatagatgtgct

SEQ ID NO: 721906 - DNA, 33 bp, Homo sapien
agttagttatgcactcgagaagatagatgtgct

SEQ ID NO: 721907 - DNA, 33 bp, Homo sapien
tgcaacagtgatgttacccccagcagcaatttg

SEQ ID NO: 721908 - DNA, 33 bp, Homo sapien
tgcaacagtgatgttatccccagcagcaatttg

SEQ ID NO: 721909 - DNA, 33 bp, Homo sapien
gcttacaatttaatgaactgcaaaggttaggaa

SEQ ID NO: 721910 - DNA, 33 bp, Homo sapien
gcttacaatttaatgacctgcaaaggttaggaa

SEQ ID NO: 721911 - DNA, 33 bp, Homo sapien
gaaaaagctgaatggcagaagaacaagtttcag

SEQ ID NO: 721912 - DNA, 33 bp, Homo sapien
gaaaaagctgaatggcggaagaacaagtttcag

SEQ ID NO: 721913 - DNA, 33 bp, Homo sapien
ataaagtgtttatgcccattgctaaagttgaat

SEQ ID NO: 721914 - DNA, 33 bp, Homo sapien
ataaagtgtttatgcctattgctaaagttgaat

SEQ ID NO: 721915 - DNA, 33 bp, Homo sapien
ctttaggcagaagaacccctctctcaaacattc

SEQ ID NO: 721916 - DNA, 33 bp, Homo sapien
ctttaggcagaagaactcctctctcaaacattc

SEQ ID NO: 721917 - DNA, 33 bp, Homo sapien
aaatagtagaaacagaactgaaatcattgggac

SEQ ID NO: 721918 - DNA, 33 bp, Homo sapien
aaatagtagaaacagagctgaaatcattgggac

SEQ ID NO: 721919 - DNA, 33 bp, Homo sapien
ttagcaaaattccatactatcatcagtggtttt

SEQ ID NO: 721920 - DNA, 33 bp, Homo sapien
ttagcaaaattccatattatcatcagtggtttt

SEQ ID NO: 721921 - DNA, 33 bp, Homo sapien
aagggtcttatcaataatagagtccaagattta

SEQ ID NO: 721922 - DNA, 33 bp, Homo sapien
aagggtcttatcaatagtagagtccaagattta

SEQ ID NO: 721923 - DNA, 33 bp, Homo sapien
gccgggtcacataatccgaactaatccccgttg

SEQ ID NO: 721924 - DNA, 33 bp, Homo sapien
gccgggtcacataatctgaactaatccccgttg

SEQ ID NO: 721925 - DNA, 33 bp, Homo sapien
ccaactatctattttccaggtcattaatccttt

SEQ ID NO: 721926 - DNA, 33 bp, Homo sapien
ccaactatctattttctaggtcattaatccttt

SEQ ID NO: 721927 - DNA, 33 bp, Homo sapien
cagggtttttttgtatcaacaacagcatacagc

SEQ ID NO: 721928 - DNA, 33 bp, Homo sapien
cagggtttttttgtatgaacaacagcatacagc

SEQ ID NO: 721929 - DNA, 33 bp, Homo sapien
tgaatcttcagggtagaatgactgtagctcagg

SEQ ID NO: 721930 - DNA, 33 bp, Homo sapien
tgaatcttcagggtagcatgactgtagctcagg

SEQ ID NO: 721931 - DNA, 33 bp, Homo sapien
agctttttacaaaaaacgtgcaagatagaattt

SEQ ID NO: 721932 - DNA, 33 bp, Homo sapien
agctttttacaaaaaatgtgcaagatagaattt

SEQ ID NO: 721933 - DNA, 33 bp, Homo sapien
tgtggcacgtgagctcagaaagccacagtacaa

SEQ ID NO: 721934 - DNA, 33 bp, Homo sapien
tgtggcacgtgagctcggaaagccacagtacaa

SEQ ID NO: 721935 - DNA, 33 bp, Homo sapien
ctttaggccaattaaaaacagcactatggttat

SEQ ID NO: 721936 - DNA, 33 bp, Homo sapien
ctttaggccaattaaagacagcactatggttat

SEQ ID NO: 721937 - DNA, 33 bp, Homo sapien
acatatggaaagttacagcacatgtggaaagtt

SEQ ID NO: 721938 - DNA, 33 bp, Homo sapien
acatatggaaagttacggcacatgtggaaagtt

SEQ ID NO: 721939 - DNA, 33 bp, Homo sapien
ccttcatgttgcagaactgactcctttcaaatg

SEQ ID NO: 721940 - DNA, 33 bp, Homo sapien
ccttcatgttgcagaattgactcctttcaaatg

SEQ ID NO: 721941 - DNA, 33 bp, Homo sapien
caaaaaaattagacctcaagtccagaaagattt

SEQ ID NO: 721942 - DNA, 33 bp, Homo sapien
caaaaaaattagacctgaagtccagaaagattt

SEQ ID NO: 721943 - DNA, 33 bp, Homo sapien
aggcggaggaagacaaagagtggtatcatggaa

SEQ ID NO: 721944 - DNA, 33 bp, Homo sapien
aggcggaggaagacaaggagtggtatcatggaa

SEQ ID NO: 721945 - DNA, 33 bp, Homo sapien
aagtaaatgtacaacaatctttgtaatatggaa

SEQ ID NO: 721946 - DNA, 33 bp, Homo sapien
aagtaaatgtacaacagtctttgtaatatggaa

SEQ ID NO: 721947 - DNA, 33 bp, Homo sapien
tctggaaggatgaagacgctatttcaatgaagt

SEQ ID NO: 721948 - DNA, 33 bp, Homo sapien
tctggaaggatgaagatgctatttcaatgaagt

SEQ ID NO: 721949 - DNA, 33 bp, Homo sapien
ccgccacctatttttgaataagccagctgaatc

SEQ ID NO: 721950 - DNA, 33 bp, Homo sapien
ccgccacctatttttgtataagccagctgaatc

SEQ ID NO: 721951 - DNA, 33 bp, Homo sapien
tagattgaaaaagtccaaagcataggtaattgc

SEQ ID NO: 721952 - DNA, 33 bp, Homo sapien
tagattgaaaaagtccgaagcataggtaattgc

SEQ ID NO: 721953 - DNA, 33 bp, Homo sapien
tttatttatacatagcaaagtttagggccacaa

SEQ ID NO: 721954 - DNA, 33 bp, Homo sapien
tttatttatacatagccaagtttagggccacaa

SEQ ID NO: 721955 - DNA, 33 bp, Homo sapien
ttgaatcacggataaaactcccatagtactaga

SEQ ID NO: 721956 - DNA, 33 bp, Homo sapien
ttgaatcacggataaatctcccatagtactaga

SEQ ID NO: 721957 - DNA, 33 bp, Homo sapien
actcaggaatgaatgccactggtttctagtgga

SEQ ID NO: 721958 - DNA, 33 bp, Homo sapien
actcaggaatgaatgctactggtttctagtgga

SEQ ID NO: 721959 - DNA, 33 bp, Homo sapien
tctcagactgtgaaccaatgccaatctgtgacc

SEQ ID NO: 721960 - DNA, 33 bp, Homo sapien
tctcagactgtgaaccgatgccaatctgtgacc

SEQ ID NO: 721961 - DNA, 33 bp, Homo sapien
gaaatgaaaccatgataagatggagattcacag

SEQ ID NO: 721962 - DNA, 33 bp, Homo sapien
gaaatgaaaccatgatgagatggagattcacag

SEQ ID NO: 721963 - DNA, 33 bp, Homo sapien
ctaaacaggtatgcaaatcattttggctaaaga

SEQ ID NO: 721964 - DNA, 33 bp, Homo sapien
ctaaacaggtatgcaagtcattttggctaaaga

SEQ ID NO: 721965 - DNA, 33 bp, Homo sapien
tggtggaagaaagccaatcgtgggaaatagtca

SEQ ID NO: 721966 - DNA, 33 bp, Homo sapien
tggtggaagaaagccagtcgtgggaaatagtca

SEQ ID NO: 721967 - DNA, 33 bp, Homo sapien
tccctatcactttggcactaaatatttcacctg

SEQ ID NO: 721968 - DNA, 33 bp, Homo sapien
tccctatcactttggcgctaaatatttcacctg

SEQ ID NO: 721969 - DNA, 33 bp, Homo sapien
catgaagacgatagaaaatgttagcagccccaa

SEQ ID NO: 721970 - DNA, 33 bp, Homo sapien
catgaagacgatagaagatgttagcagccccaa

SEQ ID NO: 721971 - DNA, 33 bp, Homo sapien
taatagtcaccattgtaaactattcatgcctgg

SEQ ID NO: 721972 - DNA, 33 bp, Homo sapien
taatagtcaccattgtcaactattcatgcctgg

SEQ ID NO: 721973 - DNA, 33 bp, Homo sapien
ggtaccactacagaaaatcaccaaaccacaagg

SEQ ID NO: 721974 - DNA, 33 bp, Homo sapien
ggtaccactacagaaagtcaccaaaccacaagg

SEQ ID NO: 721975 - DNA, 33 bp, Homo sapien
atattactggtaaagacatacaggctaaaagta

SEQ ID NO: 721976 - DNA, 33 bp, Homo sapien
atattactggtaaagatatacaggctaaaagta

SEQ ID NO: 721977 - DNA, 33 bp, Homo sapien
taacaactgttgaacactgaaattatatcaagt

SEQ ID NO: 721978 - DNA, 33 bp, Homo sapien
taacaactgttgaacattgaaattatatcaagt

SEQ ID NO: 721979 - DNA, 33 bp, Homo sapien
tcttaaatgccggttacagtggcaatgtacttg

SEQ ID NO: 721980 - DNA, 33 bp, Homo sapien
tcttaaatgccggttatagtggcaatgtacttg

SEQ ID NO: 721981 - DNA, 33 bp, Homo sapien
ctctgtatcctcacaacgactaggccccagctc

SEQ ID NO: 721982 - DNA, 33 bp, Homo sapien
ctctgtatcctcacaatgactaggccccagctc

SEQ ID NO: 721983 - DNA, 33 bp, Homo sapien
agctcaaccattgctacaatcactcaagaagga

SEQ ID NO: 721984 - DNA, 33 bp, Homo sapien
agctcaaccattgctataatcactcaagaagga

SEQ ID NO: 721985 - DNA, 33 bp, Homo sapien
agcataagttgcttaaaccaatgcacttgcatc

SEQ ID NO: 721986 - DNA, 33 bp, Homo sapien
agcataagttgcttaatccaatgcacttgcatc

SEQ ID NO: 721987 - DNA, 33 bp, Homo sapien
taaaccaggtttttctcactctagagaccatgt

SEQ ID NO: 721988 - DNA, 33 bp, Homo sapien
taaaccaggtttttctgactctagagaccatgt

SEQ ID NO: 721989 - DNA, 33 bp, Homo sapien
tttcttggtctcaagacagaaaattgaaattat

SEQ ID NO: 721990 - DNA, 33 bp, Homo sapien
tttcttggtctcaagagagaaaattgaaattat

SEQ ID NO: 721991 - DNA, 33 bp, Homo sapien
atgctgtgagaaacctcaagctagtcatgtgta

SEQ ID NO: 721992 - DNA, 33 bp, Homo sapien
atgctgtgagaaacctgaagctagtcatgtgta

SEQ ID NO: 721993 - DNA, 33 bp, Homo sapien
aggtgaaaactgctcagctagctaagtacattc

SEQ ID NO: 721994 - DNA, 33 bp, Homo sapien
aggtgaaaactgctcatctagctaagtacattc

SEQ ID NO: 721995 - DNA, 33 bp, Homo sapien
tacacttataacatatcaacttaaggtgaaaac

SEQ ID NO: 721996 - DNA, 33 bp, Homo sapien
tacacttataacatatgaacttaaggtgaaaac

SEQ ID NO: 721997 - DNA, 33 bp, Homo sapien
aatgtagaaggaatagcattttttgacagactc

SEQ ID NO: 721998 - DNA, 33 bp, Homo sapien
aatgtagaaggaatagtattttttgacagactc

SEQ ID NO: 721999 - DNA, 33 bp, Homo sapien
ttcaggagtaaacctccatttgactgatggtag

SEQ ID NO: 722000 - DNA, 33 bp, Homo sapien
ttcaggagtaaacctctatttgactgatggtag

SEQ ID NO: 722001 - DNA, 33 bp, Homo sapien
aactctaaggaggaaaaatggaaccaggaactg

SEQ ID NO: 722002 - DNA, 33 bp, Homo sapien
aactctaaggaggaaagatggaaccaggaactg

SEQ ID NO: 722003 - DNA, 33 bp, Homo sapien
tattggtatgtttacaatcattgggtggtttgt

SEQ ID NO: 722004 - DNA, 33 bp, Homo sapien
tattggtatgtttacagtcattgggtggtttgt

SEQ ID NO: 722005 - DNA, 33 bp, Homo sapien
gctttcataaaatacacctttcagcacaaatta

SEQ ID NO: 722006 - DNA, 33 bp, Homo sapien
gctttcataaaatacatctttcagcacaaatta

SEQ ID NO: 722007 - DNA, 33 bp, Homo sapien
gtattttgtttctggaccatacacattctgtga

SEQ ID NO: 722008 - DNA, 33 bp, Homo sapien
gtattttgtttctggatcatacacattctgtga

SEQ ID NO: 722009 - DNA, 33 bp, Homo sapien
tggaggttttcctgtaggtcaactttgcaggat

SEQ ID NO: 722010 - DNA, 33 bp, Homo sapien
tggaggttttcctgtatgtcaactttgcaggat

SEQ ID NO: 722011 - DNA, 33 bp, Homo sapien
tacagaagatgttcaactatttattattcttgt

SEQ ID NO: 722012 - DNA, 33 bp, Homo sapien
tacagaagatgttcaattatttattattcttgt

SEQ ID NO: 722013 - DNA, 33 bp, Homo sapien
tgtctcacatatagtcaaactctggaatcagcc

SEQ ID NO: 722014 - DNA, 33 bp, Homo sapien
tgtctcacatatagtctaactctggaatcagcc

SEQ ID NO: 722015 - DNA, 33 bp, Homo sapien
ctagaatgcaattaaaccagagctaaaatgtga

SEQ ID NO: 722016 - DNA, 33 bp, Homo sapien
ctagaatgcaattaaatcagagctaaaatgtga

SEQ ID NO: 722017 - DNA, 33 bp, Homo sapien
ctgaagttcctaagagcccatgtaatcttagaa

SEQ ID NO: 722018 - DNA, 33 bp, Homo sapien
ctgaagttcctaagagtccatgtaatcttagaa

SEQ ID NO: 722019 - DNA, 33 bp, Homo sapien
tgggaagttggaaaggccagaattggagctaac

SEQ ID NO: 722020 - DNA, 33 bp, Homo sapien
tgggaagttggaaaggtcagaattggagctaac

SEQ ID NO: 722021 - DNA, 33 bp, Homo sapien
aagcttatttagggagccaataagtggacctcc

SEQ ID NO: 722022 - DNA, 33 bp, Homo sapien
aagcttatttagggaggcaataagtggacctcc

SEQ ID NO: 722023 - DNA, 33 bp, Homo sapien
acaagcatttcttcatcacacggaatgggagtt

SEQ ID NO: 722024 - DNA, 33 bp, Homo sapien
acaagcatttcttcatgacacggaatgggagtt

SEQ ID NO: 722025 - DNA, 33 bp, Homo sapien
cttttgccctggtaaaactaacaaacttgagag

SEQ ID NO: 722026 - DNA, 33 bp, Homo sapien
cttttgccctggtaaacctaacaaacttgagag

SEQ ID NO: 722027 - DNA, 33 bp, Homo sapien
agatcaaggcctagaacgtttgtttcgtttctc

SEQ ID NO: 722028 - DNA, 33 bp, Homo sapien
agatcaaggcctagaatgtttgtttcgtttctc

SEQ ID NO: 722029 - DNA, 33 bp, Homo sapien
aacccagaacccaaaccgtgcctggactcctcg

SEQ ID NO: 722030 - DNA, 33 bp, Homo sapien
aacccagaacccaaactgtgcctggactcctcg

SEQ ID NO: 722031 - DNA, 33 bp, Homo sapien
ctccacactattaccacaagactggtgacagca

SEQ ID NO: 722032 - DNA, 33 bp, Homo sapien
ctccacactattaccataagactggtgacagca

SEQ ID NO: 722033 - DNA, 33 bp, Homo sapien
atcgtaaaggaggtagaccacaagactttgcaa

SEQ ID NO: 722034 - DNA, 33 bp, Homo sapien
atcgtaaaggaggtagtccacaagactttgcaa

SEQ ID NO: 722035 - DNA, 33 bp, Homo sapien
catggagtgaatacacacagacaaaggcagaga

SEQ ID NO: 722036 - DNA, 33 bp, Homo sapien
catggagtgaatacacgcagacaaaggcagaga

SEQ ID NO: 722037 - DNA, 33 bp, Homo sapien
gggtgtgaattttgaaaagggaagagttttatg

SEQ ID NO: 722038 - DNA, 33 bp, Homo sapien
gggtgtgaattttgaagagggaagagttttatg

SEQ ID NO: 722039 - DNA, 33 bp, Homo sapien
ttagtatgctgtacaacgggtaatataggatga

SEQ ID NO: 722040 - DNA, 33 bp, Homo sapien
ttagtatgctgtacaatgggtaatataggatga

SEQ ID NO: 722041 - DNA, 33 bp, Homo sapien
agattccaaaagagagcatcacctaacaagtga

SEQ ID NO: 722042 - DNA, 33 bp, Homo sapien
agattccaaaagagagtatcacctaacaagtga

SEQ ID NO: 722043 - DNA, 33 bp, Homo sapien
atcgatactgctctgacgtttttctttgtattt

SEQ ID NO: 722044 - DNA, 33 bp, Homo sapien
atcgatactgctctgatgtttttctttgtattt

SEQ ID NO: 722045 - DNA, 33 bp, Homo sapien
ttgtttactttctcaactgttgactacattccc

SEQ ID NO: 722046 - DNA, 33 bp, Homo sapien
ttgtttactttctcaattgttgactacattccc

SEQ ID NO: 722047 - DNA, 33 bp, Homo sapien
agcaaagtgaaactggaaagaaaatattactga

SEQ ID NO: 722048 - DNA, 33 bp, Homo sapien
agcaaagtgaaactgggaagaaaatattactga

SEQ ID NO: 722049 - DNA, 33 bp, Homo sapien
acttgagagaaacgctcaagaactgtgtaaggt

SEQ ID NO: 722050 - DNA, 33 bp, Homo sapien
acttgagagaaacgcttaagaactgtgtaaggt

SEQ ID NO: 722051 - DNA, 33 bp, Homo sapien
atatcacaggtgccaaaaactaagcatgtccaa

SEQ ID NO: 722052 - DNA, 33 bp, Homo sapien
atatcacaggtgccaagaactaagcatgtccaa

SEQ ID NO: 722053 - DNA, 33 bp, Homo sapien
ataccaatctctgttacaatctcaaactattaa

SEQ ID NO: 722054 - DNA, 33 bp, Homo sapien
ataccaatctctgttataatctcaaactattaa

SEQ ID NO: 722055 - DNA, 33 bp, Homo sapien
tatagatgaggtcaacaaagattttgctccaca

SEQ ID NO: 722056 - DNA, 33 bp, Homo sapien
tatagatgaggtcaacgaagattttgctccaca

SEQ ID NO: 722057 - DNA, 33 bp, Homo sapien
cgacacctgggtatctaagagtgtgtgctgatc

SEQ ID NO: 722058 - DNA, 33 bp, Homo sapien
cgacacctgggtatctgagagtgtgtgctgatc

SEQ ID NO: 722059 - DNA, 33 bp, Homo sapien
ttttcaacttaataaaactatagtgaatacttg

SEQ ID NO: 722060 - DNA, 33 bp, Homo sapien
ttttcaacttaataaacctatagtgaatacttg

SEQ ID NO: 722061 - DNA, 33 bp, Homo sapien
ccatattctcaataaacgtaagcagaaaggcaa

SEQ ID NO: 722062 - DNA, 33 bp, Homo sapien
ccatattctcaataaatgtaagcagaaaggcaa

SEQ ID NO: 722063 - DNA, 33 bp, Homo sapien
accatgtctgctaataaaattagttaagccttt

SEQ ID NO: 722064 - DNA, 33 bp, Homo sapien
accatgtctgctaatagaattagttaagccttt

SEQ ID NO: 722065 - DNA, 33 bp, Homo sapien
aggcacagaaagggaaataccatatgatctcac

SEQ ID NO: 722066 - DNA, 33 bp, Homo sapien
aggcacagaaagggaagtaccatatgatctcac

SEQ ID NO: 722067 - DNA, 33 bp, Homo sapien
aaatgggagtacatcaaataaaaattgtctcca

SEQ ID NO: 722068 - DNA, 33 bp, Homo sapien
aaatgggagtacatcagataaaaattgtctcca

SEQ ID NO: 722069 - DNA, 33 bp, Homo sapien
cttttaacattcataccggagatataaattatt

SEQ ID NO: 722070 - DNA, 33 bp, Homo sapien
cttttaacattcatactggagatataaattatt

SEQ ID NO: 722071 - DNA, 33 bp, Homo sapien
agggtgggtgataggacggatgaaagatgttga

SEQ ID NO: 722072 - DNA, 33 bp, Homo sapien
agggtgggtgataggatggatgaaagatgttga

SEQ ID NO: 722073 - DNA, 33 bp, Homo sapien
tactcatagcataccaataacaagacaggaaaa

SEQ ID NO: 722074 - DNA, 33 bp, Homo sapien
tactcatagcataccagtaacaagacaggaaaa

SEQ ID NO: 722075 - DNA, 33 bp, Homo sapien
taacctggagcaaaccaaaataatagagacagt

SEQ ID NO: 722076 - DNA, 33 bp, Homo sapien
taacctggagcaaaccgaaataatagagacagt

SEQ ID NO: 722077 - DNA, 33 bp, Homo sapien
gaggcagctgtttgaacagattcattggagagt

SEQ ID NO: 722078 - DNA, 33 bp, Homo sapien
gaggcagctgtttgaatagattcattggagagt

SEQ ID NO: 722079 - DNA, 33 bp, Homo sapien
cttaccacttttaacacgccagtgagcccaagt

SEQ ID NO: 722080 - DNA, 33 bp, Homo sapien
cttaccacttttaacatgccagtgagcccaagt

SEQ ID NO: 722081 - DNA, 33 bp, Homo sapien
acgccagtccataaaaccagctgagggagctgt

SEQ ID NO: 722082 - DNA, 33 bp, Homo sapien
acgccagtccataaaagcagctgagggagctgt

SEQ ID NO: 722083 - DNA, 33 bp, Homo sapien
ttccaaagacaacctactagaagcagtaagttt

SEQ ID NO: 722084 - DNA, 33 bp, Homo sapien
ttccaaagacaacctattagaagcagtaagttt

SEQ ID NO: 722085 - DNA, 33 bp, Homo sapien
agttacatcctctcaaactacttctacttaaat

SEQ ID NO: 722086 - DNA, 33 bp, Homo sapien
agttacatcctctcaagctacttctacttaaat

SEQ ID NO: 722087 - DNA, 33 bp, Homo sapien
ctcctgagctaaaagcaacccacccaccttggc

SEQ ID NO: 722088 - DNA, 33 bp, Homo sapien
ctcctgagctaaaagcgacccacccaccttggc

SEQ ID NO: 722089 - DNA, 33 bp, Homo sapien
atggttgttgaacaaacaggatggctgcggaga

SEQ ID NO: 722090 - DNA, 33 bp, Homo sapien
atggttgttgaacaaataggatggctgcggaga

SEQ ID NO: 722091 - DNA, 33 bp, Homo sapien
aaattctttagttaaaattgtcacaggttggtc

SEQ ID NO: 722092 - DNA, 33 bp, Homo sapien
aaattctttagttaaagttgtcacaggttggtc

SEQ ID NO: 722093 - DNA, 33 bp, Homo sapien
ctccagaagactctccacctatatctgccaggt

SEQ ID NO: 722094 - DNA, 33 bp, Homo sapien
ctccagaagactctccgcctatatctgccaggt

SEQ ID NO: 722095 - DNA, 33 bp, Homo sapien
aatcattaattatccacggcttgaaaccaactc

SEQ ID NO: 722096 - DNA, 33 bp, Homo sapien
aatcattaattatccatggcttgaaaccaactc

SEQ ID NO: 722097 - DNA, 33 bp, Homo sapien
tgccccagtcactctcgacttccttccaataac

SEQ ID NO: 722098 - DNA, 33 bp, Homo sapien
tgccccagtcactctctacttccttccaataac

SEQ ID NO: 722099 - DNA, 33 bp, Homo sapien
tgttactgttgtaagcaagtcaaaagaactttt

SEQ ID NO: 722100 - DNA, 33 bp, Homo sapien
tgttactgttgtaagcgagtcaaaagaactttt

SEQ ID NO: 722101 - DNA, 33 bp, Homo sapien
ttttaatagttcttacaaatatcaggatactga

SEQ ID NO: 722102 - DNA, 33 bp, Homo sapien
ttttaatagttcttacgaatatcaggatactga

SEQ ID NO: 722103 - DNA, 33 bp, Homo sapien
tatgctgtacacagaaaaaacaggtcctttgta

SEQ ID NO: 722104 - DNA, 33 bp, Homo sapien
tatgctgtacacagaataaacaggtcctttgta

SEQ ID NO: 722105 - DNA, 33 bp, Homo sapien
ctggatcagaagtcacaaaacaagaatccaaga

SEQ ID NO: 722106 - DNA, 33 bp, Homo sapien
ctggatcagaagtcacgaaacaagaatccaaga

SEQ ID NO: 722107 - DNA, 33 bp, Homo sapien
taatgaaagattaaaactgctacgaagacaaag

SEQ ID NO: 722108 - DNA, 33 bp, Homo sapien
taatgaaagattaaaagtgctacgaagacaaag

SEQ ID NO: 722109 - DNA, 33 bp, Homo sapien
tgtttggcctaaacaactgctggctgcttttgt

SEQ ID NO: 722110 - DNA, 33 bp, Homo sapien
tgtttggcctaaacaagtgctggctgcttttgt

SEQ ID NO: 722111 - DNA, 33 bp, Homo sapien
ataaacagacatttgcactttcaataacctaaa

SEQ ID NO: 722112 - DNA, 33 bp, Homo sapien
ataaacagacatttgcgctttcaataacctaaa

SEQ ID NO: 722113 - DNA, 33 bp, Homo sapien
ttacgggtgccacatacggattaaatgtgcatt

SEQ ID NO: 722114 - DNA, 33 bp, Homo sapien
ttacgggtgccacatatggattaaatgtgcatt

SEQ ID NO: 722115 - DNA, 33 bp, Homo sapien
agtaaccaacacttcaatcaagatatagaacat

SEQ ID NO: 722116 - DNA, 33 bp, Homo sapien
agtaaccaacacttcagtcaagatatagaacat

SEQ ID NO: 722117 - DNA, 33 bp, Homo sapien
acaacatctgaagacaaagtggctatatgattg

SEQ ID NO: 722118 - DNA, 33 bp, Homo sapien
acaacatctgaagacagagtggctatatgattg

SEQ ID NO: 722119 - DNA, 33 bp, Homo sapien
gaacaaggatagtttgaaatgcacataaaataa

SEQ ID NO: 722120 - DNA, 33 bp, Homo sapien
gaacaaggatagtttggaatgcacataaaataa

SEQ ID NO: 722121 - DNA, 33 bp, Homo sapien
aagtcattcacaagacaactgggcatccactaa

SEQ ID NO: 722122 - DNA, 33 bp, Homo sapien
aagtcattcacaagacgactgggcatccactaa

SEQ ID NO: 722123 - DNA, 33 bp, Homo sapien
tctccattgattatgacgttagctgtgaccttt

SEQ ID NO: 722124 - DNA, 33 bp, Homo sapien
tctccattgattatgatgttagctgtgaccttt

SEQ ID NO: 722125 - DNA, 33 bp, Homo sapien
gactgcttctctcttagcaatacttagtatttt

SEQ ID NO: 722126 - DNA, 33 bp, Homo sapien
gactgcttctctcttatcaatacttagtatttt

SEQ ID NO: 722127 - DNA, 33 bp, Homo sapien
agtctttaccccacgcactcccccgcaccacta

SEQ ID NO: 722128 - DNA, 33 bp, Homo sapien
agtctttaccccacgcgctcccccgcaccacta

SEQ ID NO: 722129 - DNA, 33 bp, Homo sapien
aactcaataagaaataactcaatggtggttcat

SEQ ID NO: 722130 - DNA, 33 bp, Homo sapien
aactcaataagaaatatctcaatggtggttcat

SEQ ID NO: 722131 - DNA, 33 bp, Homo sapien
actccactttttggtacgccagctaactttatg

SEQ ID NO: 722132 - DNA, 33 bp, Homo sapien
actccactttttggtatgccagctaactttatg

SEQ ID NO: 722133 - DNA, 33 bp, Homo sapien
tcagtaacataacctcaatactagtttgtgatt

SEQ ID NO: 722134 - DNA, 33 bp, Homo sapien
tcagtaacataacctcgatactagtttgtgatt

SEQ ID NO: 722135 - DNA, 33 bp, Homo sapien
aaaggattcaatactgcagaaatgcacacagct

SEQ ID NO: 722136 - DNA, 33 bp, Homo sapien
aaaggattcaatactggagaaatgcacacagct

SEQ ID NO: 722137 - DNA, 33 bp, Homo sapien
gtgtgatgcaatcttgaattgtcctgtctggga

SEQ ID NO: 722138 - DNA, 33 bp, Homo sapien
gtgtgatgcaatcttgtattgtcctgtctggga

SEQ ID NO: 722139 - DNA, 33 bp, Homo sapien
ataattatcttgtttcaaaagaacaaactgcat

SEQ ID NO: 722140 - DNA, 33 bp, Homo sapien
ataattatcttgtttcgaaagaacaaactgcat

SEQ ID NO: 722141 - DNA, 33 bp, Homo sapien
caaccggggcaacgtgcaatgaattatcttgat

SEQ ID NO: 722142 - DNA, 33 bp, Homo sapien
caaccggggcaacgtggaatgaattatcttgat

SEQ ID NO: 722143 - DNA, 33 bp, Homo sapien
ttcagcaaggatcatgcaataggtattgtggct

SEQ ID NO: 722144 - DNA, 33 bp, Homo sapien
ttcagcaaggatcatggaataggtattgtggct

SEQ ID NO: 722145 - DNA, 33 bp, Homo sapien
tcccttcctgggagaaagcaataaacaaggagg

SEQ ID NO: 722146 - DNA, 33 bp, Homo sapien
tcccttcctgggagaaggcaataaacaaggagg

SEQ ID NO: 722147 - DNA, 33 bp, Homo sapien
caaactgggagtgggaagatggagaacaacgga

SEQ ID NO: 722148 - DNA, 33 bp, Homo sapien
caaactgggagtgggaggatggagaacaacgga

SEQ ID NO: 722149 - DNA, 33 bp, Homo sapien
ttggttcatttcacaccggcatctagaggctgc

SEQ ID NO: 722150 - DNA, 33 bp, Homo sapien
ttggttcatttcacactggcatctagaggctgc

SEQ ID NO: 722151 - DNA, 33 bp, Homo sapien
cagtggctaaagagagacacttgcataccagct

SEQ ID NO: 722152 - DNA, 33 bp, Homo sapien
cagtggctaaagagagtcacttgcataccagct

SEQ ID NO: 722153 - DNA, 33 bp, Homo sapien
ggcaagctgacctcgacgagataatatgaacac

SEQ ID NO: 722154 - DNA, 33 bp, Homo sapien
ggcaagctgacctcgatgagataatatgaacac

SEQ ID NO: 722155 - DNA, 33 bp, Homo sapien
gcaggtggcaggccccacttgctgtaaatgaaa

SEQ ID NO: 722156 - DNA, 33 bp, Homo sapien
gcaggtggcaggccccgcttgctgtaaatgaaa

SEQ ID NO: 722157 - DNA, 33 bp, Homo sapien
ccttgaaccattctaccgaagttgcttgctgac

SEQ ID NO: 722158 - DNA, 33 bp, Homo sapien
ccttgaaccattctactgaagttgcttgctgac

SEQ ID NO: 722159 - DNA, 33 bp, Homo sapien
attgctctttacagcacgtggacaagcttgcag

SEQ ID NO: 722160 - DNA, 33 bp, Homo sapien
attgctctttacagcatgtggacaagcttgcag

SEQ ID NO: 722161 - DNA, 33 bp, Homo sapien
gggctttacttttgcaagaaatactacagatgg

SEQ ID NO: 722162 - DNA, 33 bp, Homo sapien
gggctttacttttgcaggaaatactacagatgg

SEQ ID NO: 722163 - DNA, 33 bp, Homo sapien
ttctcagtaactaacaataatcatctctctgga

SEQ ID NO: 722164 - DNA, 33 bp, Homo sapien
ttctcagtaactaacattaatcatctctctgga

SEQ ID NO: 722165 - DNA, 33 bp, Homo sapien
aatgcacatttattaaactgtactgtgtgaggg

SEQ ID NO: 722166 - DNA, 33 bp, Homo sapien
aatgcacatttattaatctgtactgtgtgaggg

SEQ ID NO: 722167 - DNA, 33 bp, Homo sapien
attcaggcagcccttacgaaaaccacctggctt

SEQ ID NO: 722168 - DNA, 33 bp, Homo sapien
attcaggcagcccttaggaaaaccacctggctt

SEQ ID NO: 722169 - DNA, 33 bp, Homo sapien
gaagaggaattggaaaagttccagaggatagta

SEQ ID NO: 722170 - DNA, 33 bp, Homo sapien
gaagaggaattggaaaggttccagaggatagta

SEQ ID NO: 722171 - DNA, 33 bp, Homo sapien
aaaattatgaaatacaactcaggacttagaaaa

SEQ ID NO: 722172 - DNA, 33 bp, Homo sapien
aaaattatgaaatacagctcaggacttagaaaa

SEQ ID NO: 722173 - DNA, 33 bp, Homo sapien
aagcacagggaggtgagaacttgtatgggttag

SEQ ID NO: 722174 - DNA, 33 bp, Homo sapien
aagcacagggaggtgataacttgtatgggttag

SEQ ID NO: 722175 - DNA, 33 bp, Homo sapien
tgctagctgagaaaaactaatcccaatacaaaa

SEQ ID NO: 722176 - DNA, 33 bp, Homo sapien
tgctagctgagaaaaagtaatcccaatacaaaa

SEQ ID NO: 722177 - DNA, 33 bp, Homo sapien
acttgtttactcaccacgcaaacatttagtgag

SEQ ID NO: 722178 - DNA, 33 bp, Homo sapien
acttgtttactcaccatgcaaacatttagtgag

SEQ ID NO: 722179 - DNA, 33 bp, Homo sapien
tttatcttttagccaacgggaagtactggctaa

SEQ ID NO: 722180 - DNA, 33 bp, Homo sapien
tttatcttttagccaatgggaagtactggctaa

SEQ ID NO: 722181 - DNA, 33 bp, Homo sapien
gaactgttaccaggagaagaggtacacaccctg

SEQ ID NO: 722182 - DNA, 33 bp, Homo sapien
gaactgttaccaggaggagaggtacacaccctg

SEQ ID NO: 722183 - DNA, 33 bp, Homo sapien
actgtgccataacagagaaatgctttttatata

SEQ ID NO: 722184 - DNA, 33 bp, Homo sapien
actgtgccataacagataaatgctttttatata

SEQ ID NO: 722185 - DNA, 33 bp, Homo sapien
tttacgtaacttacagcagctgagaaaacctgg

SEQ ID NO: 722186 - DNA, 33 bp, Homo sapien
tttacgtaacttacagtagctgagaaaacctgg

SEQ ID NO: 722187 - DNA, 33 bp, Homo sapien
gcaagccatctacttacgaagggctgtcatttt

SEQ ID NO: 722188 - DNA, 33 bp, Homo sapien
gcaagccatctacttatgaagggctgtcatttt

SEQ ID NO: 722189 - DNA, 33 bp, Homo sapien
gcaattttctctaactcacagctctgagaaatc

SEQ ID NO: 722190 - DNA, 33 bp, Homo sapien
gcaattttctctaacttacagctctgagaaatc

SEQ ID NO: 722191 - DNA, 33 bp, Homo sapien
agtgacctatttagaaaactcagatccactttc

SEQ ID NO: 722192 - DNA, 33 bp, Homo sapien
agtgacctatttagaatactcagatccactttc

SEQ ID NO: 722193 - DNA, 33 bp, Homo sapien
tctgcctgatgtgtacaggtacgagttgggagt

SEQ ID NO: 722194 - DNA, 33 bp, Homo sapien
tctgcctgatgtgtacgggtacgagttgggagt

SEQ ID NO: 722195 - DNA, 33 bp, Homo sapien
gttttaatttttcagacctcttgcactatatat

SEQ ID NO: 722196 - DNA, 33 bp, Homo sapien
gttttaatttttcagatctcttgcactatatat

SEQ ID NO: 722197 - DNA, 33 bp, Homo sapien
gtaaaataagattcacgattcttggactttaaa

SEQ ID NO: 722198 - DNA, 33 bp, Homo sapien
gtaaaataagattcactattcttggactttaaa

SEQ ID NO: 722199 - DNA, 33 bp, Homo sapien
ctgatacactgcctcacgtcgaaagctgcatta

SEQ ID NO: 722200 - DNA, 33 bp, Homo sapien
ctgatacactgcctcatgtcgaaagctgcatta

SEQ ID NO: 722201 - DNA, 33 bp, Homo sapien
ctggaggctgtaatcacctagaaaggcctctaa

SEQ ID NO: 722202 - DNA, 33 bp, Homo sapien
ctggaggctgtaatcatctagaaaggcctctaa

SEQ ID NO: 722203 - DNA, 33 bp, Homo sapien
gtagtagaaatagccacatagtgcttcatcctc

SEQ ID NO: 722204 - DNA, 33 bp, Homo sapien
gtagtagaaatagccagatagtgcttcatcctc

SEQ ID NO: 722205 - DNA, 33 bp, Homo sapien
gtctttccaaagggcaaaagaaagtctaaatca

SEQ ID NO: 722206 - DNA, 33 bp, Homo sapien
gtctttccaaagggcagaagaaagtctaaatca

SEQ ID NO: 722207 - DNA, 33 bp, Homo sapien
gcctctaggcaacaacgccctgctttgtctatg

SEQ ID NO: 722208 - DNA, 33 bp, Homo sapien
gcctctaggcaacaactccctgctttgtctatg

SEQ ID NO: 722209 - DNA, 33 bp, Homo sapien
taacaaggatggattaaggataggaaatggtag

SEQ ID NO: 722210 - DNA, 33 bp, Homo sapien
taacaaggatggattacggataggaaatggtag

SEQ ID NO: 722211 - DNA, 33 bp, Homo sapien
gcagaaaaatggcagaaccgcttccacacatct

SEQ ID NO: 722212 - DNA, 33 bp, Homo sapien
gcagaaaaatggcagagccgcttccacacatct

SEQ ID NO: 722213 - DNA, 33 bp, Homo sapien
aatcaaaggaagtccacggtttgtatcacagtt

SEQ ID NO: 722214 - DNA, 33 bp, Homo sapien
aatcaaaggaagtccatggtttgtatcacagtt

SEQ ID NO: 722215 - DNA, 33 bp, Homo sapien
tgtacatggaagctaccctgaggctgcagaagg

SEQ ID NO: 722216 - DNA, 33 bp, Homo sapien
tgtacatggaagctactctgaggctgcagaagg

SEQ ID NO: 722217 - DNA, 33 bp, Homo sapien
tatggataaccccagacactgcaaagtattagg

SEQ ID NO: 722218 - DNA, 33 bp, Homo sapien
tatggataaccccagagactgcaaagtattagg

SEQ ID NO: 722219 - DNA, 33 bp, Homo sapien
catatgtaggacagaaaggctgtatcatgagat

SEQ ID NO: 722220 - DNA, 33 bp, Homo sapien
catatgtaggacagaagggctgtatcatgagat

SEQ ID NO: 722221 - DNA, 33 bp, Homo sapien
aaagagagattttacaaggagagatttggggtg

SEQ ID NO: 722222 - DNA, 33 bp, Homo sapien
aaagagagattttacatggagagatttggggtg

SEQ ID NO: 722223 - DNA, 33 bp, Homo sapien
gtgcacatatgcaaacaactcagcctgtcattg

SEQ ID NO: 722224 - DNA, 33 bp, Homo sapien
gtgcacatatgcaaacgactcagcctgtcattg

SEQ ID NO: 722225 - DNA, 33 bp, Homo sapien
tccctaacaacaggcacctgttactttctttag

SEQ ID NO: 722226 - DNA, 33 bp, Homo sapien
tccctaacaacaggcatctgttactttctttag

SEQ ID NO: 722227 - DNA, 33 bp, Homo sapien
ttttgatcttaactcacatcttaagtttctgct

SEQ ID NO: 722228 - DNA, 33 bp, Homo sapien
ttttgatcttaactcagatcttaagtttctgct

SEQ ID NO: 722229 - DNA, 33 bp, Homo sapien
agttgctttttgtatacagtctaaggaaaaggg

SEQ ID NO: 722230 - DNA, 33 bp, Homo sapien
agttgctttttgtatatagtctaaggaaaaggg

SEQ ID NO: 722231 - DNA, 33 bp, Homo sapien
accgaagctgctgttcccaagtgagttttcttc

SEQ ID NO: 722232 - DNA, 33 bp, Homo sapien
accgaagctgctgttctcaagtgagttttcttc

SEQ ID NO: 722233 - DNA, 33 bp, Homo sapien
agtctactgttgatgtcaaaccagaatttctta

SEQ ID NO: 722234 - DNA, 33 bp, Homo sapien
agtctactgttgatgttaaaccagaatttctta

SEQ ID NO: 722235 - DNA, 33 bp, Homo sapien
ggaggtcacttccttacgcgatatatgtctaga

SEQ ID NO: 722236 - DNA, 33 bp, Homo sapien
ggaggtcacttccttatgcgatatatgtctaga

SEQ ID NO: 722237 - DNA, 33 bp, Homo sapien
tcataagtaatctataagtgatttgaaatatat

SEQ ID NO: 722238 - DNA, 33 bp, Homo sapien
tcataagtaatctataggtgatttgaaatatat

SEQ ID NO: 722239 - DNA, 33 bp, Homo sapien
cagcttgtatggagaacggaaatggagcagatg

SEQ ID NO: 722240 - DNA, 33 bp, Homo sapien
cagcttgtatggagaatggaaatggagcagatg

SEQ ID NO: 722241 - DNA, 33 bp, Homo sapien
tggtgatgctgactgaagttgcagaagtagtca

SEQ ID NO: 722242 - DNA, 33 bp, Homo sapien
tggtgatgctgactgaggttgcagaagtagtca

SEQ ID NO: 722243 - DNA, 33 bp, Homo sapien
gtattttgatcgcttacagaagctaagacggta

SEQ ID NO: 722244 - DNA, 33 bp, Homo sapien
gtattttgatcgcttatagaagctaagacggta

SEQ ID NO: 722245 - DNA, 33 bp, Homo sapien
ctattaaaatggtatccaattcagcaaagaagt

SEQ ID NO: 722246 - DNA, 33 bp, Homo sapien
ctattaaaatggtatctaattcagcaaagaagt

SEQ ID NO: 722247 - DNA, 33 bp, Homo sapien
aggctgggtggagttgaattaaagagaaggaag

SEQ ID NO: 722248 - DNA, 33 bp, Homo sapien
aggctgggtggagttgcattaaagagaaggaag

SEQ ID NO: 722249 - DNA, 33 bp, Homo sapien
caacttagaccaaacacggagtatgaaattggg

SEQ ID NO: 722250 - DNA, 33 bp, Homo sapien
caacttagaccaaacatggagtatgaaattggg

SEQ ID NO: 722251 - DNA, 33 bp, Homo sapien
tttgttcatgtttataccacatatgacaactta

SEQ ID NO: 722252 - DNA, 33 bp, Homo sapien
tttgttcatgtttatatcacatatgacaactta

SEQ ID NO: 722253 - DNA, 33 bp, Homo sapien
ccataaataggtcttacggaaaagctccattaa

SEQ ID NO: 722254 - DNA, 33 bp, Homo sapien
ccataaataggtcttatggaaaagctccattaa

SEQ ID NO: 722255 - DNA, 33 bp, Homo sapien
caatcactgcaggacaagaagtggtattccagc

SEQ ID NO: 722256 - DNA, 33 bp, Homo sapien
caatcactgcaggacaggaagtggtattccagc

SEQ ID NO: 722257 - DNA, 33 bp, Homo sapien
aaaactggtctgagataagactagagattctgc

SEQ ID NO: 722258 - DNA, 33 bp, Homo sapien
aaaactggtctgagatgagactagagattctgc

SEQ ID NO: 722259 - DNA, 33 bp, Homo sapien
agaacacaagagaagacgaagtgggcattatag

SEQ ID NO: 722260 - DNA, 33 bp, Homo sapien
agaacacaagagaagatgaagtgggcattatag

SEQ ID NO: 722261 - DNA, 33 bp, Homo sapien
ttacatggaggtggaaagtaaaggaccatttat

SEQ ID NO: 722262 - DNA, 33 bp, Homo sapien
ttacatggaggtggaaggtaaaggaccatttat

SEQ ID NO: 722263 - DNA, 33 bp, Homo sapien
tgggaaatgcgcccaaagtgaaaaagtttccct

SEQ ID NO: 722264 - DNA, 33 bp, Homo sapien
tgggaaatgcgcccaaggtgaaaaagtttccct

SEQ ID NO: 722265 - DNA, 33 bp, Homo sapien
ttccattcgtctatgtaacagaactagaaaaaa

SEQ ID NO: 722266 - DNA, 33 bp, Homo sapien
ttccattcgtctatgtgacagaactagaaaaaa

SEQ ID NO: 722267 - DNA, 33 bp, Homo sapien
cccaggtcgcagataaagaatctgaggtccagg

SEQ ID NO: 722268 - DNA, 33 bp, Homo sapien
cccaggtcgcagataaggaatctgaggtccagg

SEQ ID NO: 722269 - DNA, 33 bp, Homo sapien
tttttctaaacacaaacggatctctcacatcct

SEQ ID NO: 722270 - DNA, 33 bp, Homo sapien
tttttctaaacacaaatggatctctcacatcct

SEQ ID NO: 722271 - DNA, 33 bp, Homo sapien
gcaaaaggaatgtcctcagcaaaataaacagga

SEQ ID NO: 722272 - DNA, 33 bp, Homo sapien
gcaaaaggaatgtcctgagcaaaataaacagga

SEQ ID NO: 722273 - DNA, 33 bp, Homo sapien
taaattctcagccttccctaaaaattgccctta

SEQ ID NO: 722274 - DNA, 33 bp, Homo sapien
taaattctcagccttctctaaaaattgccctta

SEQ ID NO: 722275 - DNA, 33 bp, Homo sapien
gagcctagcctttataaccctgcatcttgcagc

SEQ ID NO: 722276 - DNA, 33 bp, Homo sapien
gagcctagcctttatatccctgcatcttgcagc

SEQ ID NO: 722277 - DNA, 33 bp, Homo sapien
atataaactgccgaaaatgattggttaaataaa

SEQ ID NO: 722278 - DNA, 33 bp, Homo sapien
atataaactgccgaaagtgattggttaaataaa

SEQ ID NO: 722279 - DNA, 33 bp, Homo sapien
tgatcttcagcaaaggcaatgaaaaacagaatt

SEQ ID NO: 722280 - DNA, 33 bp, Homo sapien
tgatcttcagcaaaggtaatgaaaaacagaatt

SEQ ID NO: 722281 - DNA, 33 bp, Homo sapien
aattcactttgaggagcatttcaaagctgatcc

SEQ ID NO: 722282 - DNA, 33 bp, Homo sapien
aattcactttgaggagtatttcaaagctgatcc

SEQ ID NO: 722283 - DNA, 33 bp, Homo sapien
gcctcctgagctatcacgacaagaggccttggt

SEQ ID NO: 722284 - DNA, 33 bp, Homo sapien
gcctcctgagctatcatgacaagaggccttggt

SEQ ID NO: 722285 - DNA, 33 bp, Homo sapien
atactaagtgcaccaacttctttgaattaagaa

SEQ ID NO: 722286 - DNA, 33 bp, Homo sapien
atactaagtgcaccaagttctttgaattaagaa

SEQ ID NO: 722287 - DNA, 33 bp, Homo sapien
tagagaggttatagaaacttggcgatatgcctg

SEQ ID NO: 722288 - DNA, 33 bp, Homo sapien
tagagaggttatagaagcttggcgatatgcctg

SEQ ID NO: 722289 - DNA, 33 bp, Homo sapien
gtgtgagagatatcaccgctaattaagtcctga

SEQ ID NO: 722290 - DNA, 33 bp, Homo sapien
gtgtgagagatatcactgctaattaagtcctga

SEQ ID NO: 722291 - DNA, 33 bp, Homo sapien
tgagtatcttactggaggtatgtacaaggctaa

SEQ ID NO: 722292 - DNA, 33 bp, Homo sapien
tgagtatcttactggatgtatgtacaaggctaa

SEQ ID NO: 722293 - DNA, 33 bp, Homo sapien
actgtgggggtattgtaaagttaggctaaactg

SEQ ID NO: 722294 - DNA, 33 bp, Homo sapien
actgtgggggtattgttaagttaggctaaactg

SEQ ID NO: 722295 - DNA, 33 bp, Homo sapien
ccagccagaggtaatcgctccttacaactctat

SEQ ID NO: 722296 - DNA, 33 bp, Homo sapien
ccagccagaggtaatctctccttacaactctat

SEQ ID NO: 722297 - DNA, 33 bp, Homo sapien
ttcagggcttgagtccacaaaggagagcaagtc

SEQ ID NO: 722298 - DNA, 33 bp, Homo sapien
ttcagggcttgagtccgcaaaggagagcaagtc

SEQ ID NO: 722299 - DNA, 33 bp, Homo sapien
atgcaccaacagataacgaatccacctacctgc

SEQ ID NO: 722300 - DNA, 33 bp, Homo sapien
atgcaccaacagataatgaatccacctacctgc

SEQ ID NO: 722301 - DNA, 33 bp, Homo sapien
acttttacctcttcagcctattatcaccccggt

SEQ ID NO: 722302 - DNA, 33 bp, Homo sapien
acttttacctcttcagtctattatcaccccggt

SEQ ID NO: 722303 - DNA, 33 bp, Homo sapien
caaaaggagtgtttgagaaattcttggggcctc

SEQ ID NO: 722304 - DNA, 33 bp, Homo sapien
caaaaggagtgtttgataaattcttggggcctc

SEQ ID NO: 722305 - DNA, 33 bp, Homo sapien
tgtccgtcttagacacagggagttgggaggccc

SEQ ID NO: 722306 - DNA, 33 bp, Homo sapien
tgtccgtcttagacacggggagttgggaggccc

SEQ ID NO: 722307 - DNA, 33 bp, Homo sapien
gtgttcagtcgaatccacctgtgtatgccagta

SEQ ID NO: 722308 - DNA, 33 bp, Homo sapien
gtgttcagtcgaatccgcctgtgtatgccagta

SEQ ID NO: 722309 - DNA, 33 bp, Homo sapien
cttccttttcagtccaaaaatgtgggtagttct

SEQ ID NO: 722310 - DNA, 33 bp, Homo sapien
cttccttttcagtccagaaatgtgggtagttct

SEQ ID NO: 722311 - DNA, 33 bp, Homo sapien
tggtgccattcttgggcatgttgcattcattgt

SEQ ID NO: 722312 - DNA, 33 bp, Homo sapien
tggtgccattcttgggtatgttgcattcattgt

SEQ ID NO: 722313 - DNA, 33 bp, Homo sapien
tgtggtatcctgattgaaatcctgagacagaga

SEQ ID NO: 722314 - DNA, 33 bp, Homo sapien
tgtggtatcctgattggaatcctgagacagaga

SEQ ID NO: 722315 - DNA, 33 bp, Homo sapien
acacatggcaatagcaaccacaataatgacaac

SEQ ID NO: 722316 - DNA, 33 bp, Homo sapien
acacatggcaatagcagccacaataatgacaac

SEQ ID NO: 722317 - DNA, 33 bp, Homo sapien
atgacaaccacaacaaatcaattttacctcatg

SEQ ID NO: 722318 - DNA, 33 bp, Homo sapien
atgacaaccacaacaagtcaattttacctcatg

SEQ ID NO: 722319 - DNA, 33 bp, Homo sapien
acaaacctgacaaagacgagcaatggggtaagg

SEQ ID NO: 722320 - DNA, 33 bp, Homo sapien
acaaacctgacaaagatgagcaatggggtaagg

SEQ ID NO: 722321 - DNA, 33 bp, Homo sapien
acaagagtgtctcagaacttcttcagtgtcttg

SEQ ID NO: 722322 - DNA, 33 bp, Homo sapien
acaagagtgtctcagaccttcttcagtgtcttg

SEQ ID NO: 722323 - DNA, 33 bp, Homo sapien
ttagggtcctttccaactctgagactctcatct

SEQ ID NO: 722324 - DNA, 33 bp, Homo sapien
ttagggtcctttccaattctgagactctcatct

SEQ ID NO: 722325 - DNA, 33 bp, Homo sapien
gagggccatctgctaaggcacaggataaaggtg

SEQ ID NO: 722326 - DNA, 33 bp, Homo sapien
gagggccatctgctaatgcacaggataaaggtg

SEQ ID NO: 722327 - DNA, 33 bp, Homo sapien
gctgtgttgccaccagaaaggcatcaaagctgc

SEQ ID NO: 722328 - DNA, 33 bp, Homo sapien
gctgtgttgccaccagcaaggcatcaaagctgc

SEQ ID NO: 722329 - DNA, 33 bp, Homo sapien
aaataaaaacttcacactctcaaccaaacaaga

SEQ ID NO: 722330 - DNA, 33 bp, Homo sapien
aaataaaaacttcacattctcaaccaaacaaga

SEQ ID NO: 722331 - DNA, 33 bp, Homo sapien
cattttatgaagctgcaaagtgggccaatgttt

SEQ ID NO: 722332 - DNA, 33 bp, Homo sapien
cattttatgaagctgcgaagtgggccaatgttt

SEQ ID NO: 722333 - DNA, 33 bp, Homo sapien
tcctgaaaggcagagaaataaaatgtcactcac

SEQ ID NO: 722334 - DNA, 33 bp, Homo sapien
tcctgaaaggcagagagataaaatgtcactcac

SEQ ID NO: 722335 - DNA, 33 bp, Homo sapien
ttgcttaaataattaacgtgtcagaacatagtg

SEQ ID NO: 722336 - DNA, 33 bp, Homo sapien
ttgcttaaataattaatgtgtcagaacatagtg

SEQ ID NO: 722337 - DNA, 33 bp, Homo sapien
gactgtccttccaactcacaccaatctggggga

SEQ ID NO: 722338 - DNA, 33 bp, Homo sapien
gactgtccttccaactgacaccaatctggggga

SEQ ID NO: 722339 - DNA, 33 bp, Homo sapien
tgtgggagctgttgataaaaagatagcataatt

SEQ ID NO: 722340 - DNA, 33 bp, Homo sapien
tgtgggagctgttgatcaaaagatagcataatt

SEQ ID NO: 722341 - DNA, 33 bp, Homo sapien
tatccttcatatgctcacactgaggtagaaaaa

SEQ ID NO: 722342 - DNA, 33 bp, Homo sapien
tatccttcatatgctctcactgaggtagaaaaa

SEQ ID NO: 722343 - DNA, 33 bp, Homo sapien
tgatgtctggattcaactcagcttagaagagaa

SEQ ID NO: 722344 - DNA, 33 bp, Homo sapien
tgatgtctggattcaattcagcttagaagagaa

SEQ ID NO: 722345 - DNA, 33 bp, Homo sapien
ctgtatccacaagcaccaagcacattatctgac

SEQ ID NO: 722346 - DNA, 33 bp, Homo sapien
ctgtatccacaagcactaagcacattatctgac

SEQ ID NO: 722347 - DNA, 33 bp, Homo sapien
ttctttgtgattactacggaaacccgatgtctt

SEQ ID NO: 722348 - DNA, 33 bp, Homo sapien
ttctttgtgattactatggaaacccgatgtctt

SEQ ID NO: 722349 - DNA, 33 bp, Homo sapien
aacagctttacgtgcaccagtcctttaattgtt

SEQ ID NO: 722350 - DNA, 33 bp, Homo sapien
aacagctttacgtgcatcagtcctttaattgtt

SEQ ID NO: 722351 - DNA, 33 bp, Homo sapien
tgcccaacagtttgaacggtcaccctgcttcaa

SEQ ID NO: 722352 - DNA, 33 bp, Homo sapien
tgcccaacagtttgaatggtcaccctgcttcaa

SEQ ID NO: 722353 - DNA, 33 bp, Homo sapien
tcctcacagcagaaacacagggcagagaaattt

SEQ ID NO: 722354 - DNA, 33 bp, Homo sapien
tcctcacagcagaaacgcagggcagagaaattt

SEQ ID NO: 722355 - DNA, 33 bp, Homo sapien
agattaaggcaagcacccctctcttatattctt

SEQ ID NO: 722356 - DNA, 33 bp, Homo sapien
agattaaggcaagcactcctctcttatattctt

SEQ ID NO: 722357 - DNA, 33 bp, Homo sapien
cattccatcgtcaaggaatgaaagctcagtaag

SEQ ID NO: 722358 - DNA, 33 bp, Homo sapien
cattccatcgtcaagggatgaaagctcagtaag

SEQ ID NO: 722359 - DNA, 33 bp, Homo sapien
taaaggagataccataataaggatcaaagggat

SEQ ID NO: 722360 - DNA, 33 bp, Homo sapien
taaaggagataccatagtaaggatcaaagggat

SEQ ID NO: 722361 - DNA, 33 bp, Homo sapien
tcctcttctgcaaaacactaattaaaaattttt

SEQ ID NO: 722362 - DNA, 33 bp, Homo sapien
tcctcttctgcaaaacgctaattaaaaattttt

SEQ ID NO: 722363 - DNA, 33 bp, Homo sapien
cagagaactggtcacaaagagaactggattcaa

SEQ ID NO: 722364 - DNA, 33 bp, Homo sapien
cagagaactggtcacatagagaactggattcaa

SEQ ID NO: 722365 - DNA, 33 bp, Homo sapien
gggtgacaaaaagggaaaatactctggacatag

SEQ ID NO: 722366 - DNA, 33 bp, Homo sapien
gggtgacaaaaagggagaatactctggacatag

SEQ ID NO: 722367 - DNA, 33 bp, Homo sapien
tattgaccgtgggcaaaaagctaccatgaaact

SEQ ID NO: 722368 - DNA, 33 bp, Homo sapien
tattgaccgtgggcaacaagctaccatgaaact

SEQ ID NO: 722369 - DNA, 33 bp, Homo sapien
gacattgaagagtataagcaaagtccaaagtct

SEQ ID NO: 722370 - DNA, 33 bp, Homo sapien
gacattgaagagtataggcaaagtccaaagtct

SEQ ID NO: 722371 - DNA, 33 bp, Homo sapien
cttctttatagttttacgtcctcttcctaggaa

SEQ ID NO: 722372 - DNA, 33 bp, Homo sapien
cttctttatagttttaggtcctcttcctaggaa

SEQ ID NO: 722373 - DNA, 33 bp, Homo sapien
ataggtatatgcaaatgacaagaagttactcct

SEQ ID NO: 722374 - DNA, 33 bp, Homo sapien
ataggtatatgcaaattacaagaagttactcct

SEQ ID NO: 722375 - DNA, 33 bp, Homo sapien
tcataggcacgttcctcaactttacttagataa

SEQ ID NO: 722376 - DNA, 33 bp, Homo sapien
tcataggcacgttccttaactttacttagataa

SEQ ID NO: 722377 - DNA, 33 bp, Homo sapien
cataagcacttaatgaaatatgcaaaggttcat

SEQ ID NO: 722378 - DNA, 33 bp, Homo sapien
cataagcacttaatgacatatgcaaaggttcat

SEQ ID NO: 722379 - DNA, 33 bp, Homo sapien
tgtccaggtttactaaatggaaaagctagtaat

SEQ ID NO: 722380 - DNA, 33 bp, Homo sapien
tgtccaggtttactaagtggaaaagctagtaat

SEQ ID NO: 722381 - DNA, 33 bp, Homo sapien
tgaggtggccttgtgaaaacacacctctaggta

SEQ ID NO: 722382 - DNA, 33 bp, Homo sapien
tgaggtggccttgtgacaacacacctctaggta

SEQ ID NO: 722383 - DNA, 33 bp, Homo sapien
aaactccaaaacttcacgttagctgtctctgtt

SEQ ID NO: 722384 - DNA, 33 bp, Homo sapien
aaactccaaaacttcatgttagctgtctctgtt

SEQ ID NO: 722385 - DNA, 33 bp, Homo sapien
cctggatttttaaaacagtttgcatggcaatga

SEQ ID NO: 722386 - DNA, 33 bp, Homo sapien
cctggatttttaaaactgtttgcatggcaatga

SEQ ID NO: 722387 - DNA, 33 bp, Homo sapien
gctagggaggagcagaccttgtttaaacatttg

SEQ ID NO: 722388 - DNA, 33 bp, Homo sapien
gctagggaggagcagatcttgtttaaacatttg

SEQ ID NO: 722389 - DNA, 33 bp, Homo sapien
gaaataagaacaggaaaccctcttagcagtcaa

SEQ ID NO: 722390 - DNA, 33 bp, Homo sapien
gaaataagaacaggaagccctcttagcagtcaa

SEQ ID NO: 722391 - DNA, 33 bp, Homo sapien
cctggctacatagacccctggcaatcaaattgc

SEQ ID NO: 722392 - DNA, 33 bp, Homo sapien
cctggctacatagacctctggcaatcaaattgc

SEQ ID NO: 722393 - DNA, 33 bp, Homo sapien
ggccttggctttctccacagtgaagagggtcaa

SEQ ID NO: 722394 - DNA, 33 bp, Homo sapien
ggccttggctttctccgcagtgaagagggtcaa

SEQ ID NO: 722395 - DNA, 33 bp, Homo sapien
ttatctgtcttccacaaaagaatataatctcca

SEQ ID NO: 722396 - DNA, 33 bp, Homo sapien
ttatctgtcttccacacaagaatataatctcca

SEQ ID NO: 722397 - DNA, 33 bp, Homo sapien
agagttaggcactaggcatacggtatgatgaaa

SEQ ID NO: 722398 - DNA, 33 bp, Homo sapien
agagttaggcactaggtatacggtatgatgaaa

SEQ ID NO: 722399 - DNA, 33 bp, Homo sapien
ggaaacagtagagtcaagaaaaaaaagtttctc

SEQ ID NO: 722400 - DNA, 33 bp, Homo sapien
ggaaacagtagagtcaggaaaaaaaagtttctc

SEQ ID NO: 722401 - DNA, 33 bp, Homo sapien
ttcgtgagttagggacaaagattggtctcttaa

SEQ ID NO: 722402 - DNA, 33 bp, Homo sapien
ttcgtgagttagggacgaagattggtctcttaa

SEQ ID NO: 722403 - DNA, 33 bp, Homo sapien
gattccatactatccaaaatttcacacatccat

SEQ ID NO: 722404 - DNA, 33 bp, Homo sapien
gattccatactatccacaatttcacacatccat

SEQ ID NO: 722405 - DNA, 33 bp, Homo sapien
gattactgccctcaaacgcttctttggacagcc

SEQ ID NO: 722406 - DNA, 33 bp, Homo sapien
gattactgccctcaaatgcttctttggacagcc

SEQ ID NO: 722407 - DNA, 33 bp, Homo sapien
cttaaccatactcggaagacttccattagcctg

SEQ ID NO: 722408 - DNA, 33 bp, Homo sapien
cttaaccatactcggaggacttccattagcctg

SEQ ID NO: 722409 - DNA, 33 bp, Homo sapien
cctcagcattatccaacggggatccagagtcac

SEQ ID NO: 722410 - DNA, 33 bp, Homo sapien
cctcagcattatccaatggggatccagagtcac

SEQ ID NO: 722411 - DNA, 33 bp, Homo sapien
acctaatggactttgacaccatcttctcttgta

SEQ ID NO: 722412 - DNA, 33 bp, Homo sapien
acctaatggactttgataccatcttctcttgta

SEQ ID NO: 722413 - DNA, 33 bp, Homo sapien
aaagagaagtaggaaacagataatgttgaagag

SEQ ID NO: 722414 - DNA, 33 bp, Homo sapien
aaagagaagtaggaaatagataatgttgaagag

SEQ ID NO: 722415 - DNA, 33 bp, Homo sapien
ataatgagaaggtttcaaatgttcttactacaa

SEQ ID NO: 722416 - DNA, 33 bp, Homo sapien
ataatgagaaggtttcgaatgttcttactacaa

SEQ ID NO: 722417 - DNA, 33 bp, Homo sapien
ataatggttaacataagaaaaacttcagatgta

SEQ ID NO: 722418 - DNA, 33 bp, Homo sapien
ataatggttaacataataaaaacttcagatgta

SEQ ID NO: 722419 - DNA, 33 bp, Homo sapien
tctgacagcagtaggacgccaattataatggtt

SEQ ID NO: 722420 - DNA, 33 bp, Homo sapien
tctgacagcagtaggatgccaattataatggtt

SEQ ID NO: 722421 - DNA, 33 bp, Homo sapien
ctatttgttagagtaaatctgacagcagtagga

SEQ ID NO: 722422 - DNA, 33 bp, Homo sapien
ctatttgttagagtaagtctgacagcagtagga

SEQ ID NO: 722423 - DNA, 33 bp, Homo sapien
ggaacatttgaccaaaacaactcgtttctcact

SEQ ID NO: 722424 - DNA, 33 bp, Homo sapien
ggaacatttgaccaaagcaactcgtttctcact

SEQ ID NO: 722425 - DNA, 33 bp, Homo sapien
ctctagggaagaatcactatccttgccttttac

SEQ ID NO: 722426 - DNA, 33 bp, Homo sapien
ctctagggaagaatcattatccttgccttttac

SEQ ID NO: 722427 - DNA, 33 bp, Homo sapien
gctagaggagtagatacggactgaataaagaag

SEQ ID NO: 722428 - DNA, 33 bp, Homo sapien
gctagaggagtagatatggactgaataaagaag

SEQ ID NO: 722429 - DNA, 33 bp, Homo sapien
tcctgttctccatggactaattcaaacctctct

SEQ ID NO: 722430 - DNA, 33 bp, Homo sapien
tcctgttctccatggagtaattcaaacctctct

SEQ ID NO: 722431 - DNA, 33 bp, Homo sapien
catagctttgagtccacatttggtcaccatttc

SEQ ID NO: 722432 - DNA, 33 bp, Homo sapien
catagctttgagtccatatttggtcaccatttc

SEQ ID NO: 722433 - DNA, 33 bp, Homo sapien
ttggttaacacttgacaacagaagctgaattcc

SEQ ID NO: 722434 - DNA, 33 bp, Homo sapien
ttggttaacacttgacgacagaagctgaattcc

SEQ ID NO: 722435 - DNA, 33 bp, Homo sapien
atttgatgcaaagacactgctagaccataactt

SEQ ID NO: 722436 - DNA, 33 bp, Homo sapien
atttgatgcaaagacagtgctagaccataactt

SEQ ID NO: 722437 - DNA, 33 bp, Homo sapien
caagcgaagggttaaccgtgtcagtgactggtc

SEQ ID NO: 722438 - DNA, 33 bp, Homo sapien
caagcgaagggttaactgtgtcagtgactggtc

SEQ ID NO: 722439 - DNA, 33 bp, Homo sapien
ctagatttgtcttgcacgaaacattaattttta

SEQ ID NO: 722440 - DNA, 33 bp, Homo sapien
ctagatttgtcttgcatgaaacattaattttta

SEQ ID NO: 722441 - DNA, 33 bp, Homo sapien
ttaaagagttcaaaccccaaactttgtcagaaa

SEQ ID NO: 722442 - DNA, 33 bp, Homo sapien
ttaaagagttcaaacctcaaactttgtcagaaa

SEQ ID NO: 722443 - DNA, 33 bp, Homo sapien
gccctgcacagtgatacacaaagtatatcagag

SEQ ID NO: 722444 - DNA, 33 bp, Homo sapien
gccctgcacagtgatagacaaagtatatcagag

SEQ ID NO: 722445 - DNA, 33 bp, Homo sapien
gaataggtaagtaacaggtcagtgtgtgaggag

SEQ ID NO: 722446 - DNA, 33 bp, Homo sapien
gaataggtaagtaacatgtcagtgtgtgaggag

SEQ ID NO: 722447 - DNA, 33 bp, Homo sapien
catgagaacaaaataacaacactgtgaagaggt

SEQ ID NO: 722448 - DNA, 33 bp, Homo sapien
catgagaacaaaataagaacactgtgaagaggt

SEQ ID NO: 722449 - DNA, 33 bp, Homo sapien
cacctgattgaaaaaaataatgcagtaaagtca

SEQ ID NO: 722450 - DNA, 33 bp, Homo sapien
cacctgattgaaaaaagtaatgcagtaaagtca

SEQ ID NO: 722451 - DNA, 33 bp, Homo sapien
ctctcaggaaatgagcaaagtgcctaaatacag

SEQ ID NO: 722452 - DNA, 33 bp, Homo sapien
ctctcaggaaatgagccaagtgcctaaatacag

SEQ ID NO: 722453 - DNA, 33 bp, Homo sapien
tggaacgtagttaggcacattagtcatgagata

SEQ ID NO: 722454 - DNA, 33 bp, Homo sapien
tggaacgtagttaggcgcattagtcatgagata

SEQ ID NO: 722455 - DNA, 33 bp, Homo sapien
ctctgtctcatgaatacgctagaaggaaaaaga

SEQ ID NO: 722456 - DNA, 33 bp, Homo sapien
ctctgtctcatgaatatgctagaaggaaaaaga

SEQ ID NO: 722457 - DNA, 33 bp, Homo sapien
gactgatttctcttgccaatcattaatatccaa

SEQ ID NO: 722458 - DNA, 33 bp, Homo sapien
gactgatttctcttgctaatcattaatatccaa

SEQ ID NO: 722459 - DNA, 33 bp, Homo sapien
tgtggatatatgaagtgaatgtagtgacttatt

SEQ ID NO: 722460 - DNA, 33 bp, Homo sapien
tgtggatatatgaagttaatgtagtgacttatt

SEQ ID NO: 722461 - DNA, 33 bp, Homo sapien
tgaacacaaaggccataagaagagtgtttccaa

SEQ ID NO: 722462 - DNA, 33 bp, Homo sapien
tgaacacaaaggccatgagaagagtgtttccaa

SEQ ID NO: 722463 - DNA, 33 bp, Homo sapien
cgcctaggacagacctgaaatttatagacctgt

SEQ ID NO: 722464 - DNA, 33 bp, Homo sapien
cgcctaggacagaccttaaatttatagacctgt

SEQ ID NO: 722465 - DNA, 33 bp, Homo sapien
ctcattttccaggtataacgtataggtccattc

SEQ ID NO: 722466 - DNA, 33 bp, Homo sapien
ctcattttccaggtatgacgtataggtccattc

SEQ ID NO: 722467 - DNA, 33 bp, Homo sapien
gcagttaaaatgcaccagagaactctgccaagc

SEQ ID NO: 722468 - DNA, 33 bp, Homo sapien
gcagttaaaatgcaccggagaactctgccaagc

SEQ ID NO: 722469 - DNA, 33 bp, Homo sapien
cagaaaagaaacacaaagttgtatcttaggcgg

SEQ ID NO: 722470 - DNA, 33 bp, Homo sapien
cagaaaagaaacacaaggttgtatcttaggcgg

SEQ ID NO: 722471 - DNA, 33 bp, Homo sapien
aagtttgtggggagatcacgaaagatagctaaa

SEQ ID NO: 722472 - DNA, 33 bp, Homo sapien
aagtttgtggggagattacgaaagatagctaaa

SEQ ID NO: 722473 - DNA, 33 bp, Homo sapien
catttttatacacaagcctactctactcttaaa

SEQ ID NO: 722474 - DNA, 33 bp, Homo sapien
catttttatacacaaggctactctactcttaaa

SEQ ID NO: 722475 - DNA, 33 bp, Homo sapien
tagaggaaaatggtcacgtactcttggaattct

SEQ ID NO: 722476 - DNA, 33 bp, Homo sapien
tagaggaaaatggtcatgtactcttggaattct

SEQ ID NO: 722477 - DNA, 33 bp, Homo sapien
tatcattcactgcataaacttgactcaatggct

SEQ ID NO: 722478 - DNA, 33 bp, Homo sapien
tatcattcactgcatagacttgactcaatggct

SEQ ID NO: 722479 - DNA, 33 bp, Homo sapien
gtgaagaactgtgttacccatgtataagagata

SEQ ID NO: 722480 - DNA, 33 bp, Homo sapien
gtgaagaactgtgttatccatgtataagagata

SEQ ID NO: 722481 - DNA, 33 bp, Homo sapien
tgatattagtgtgtcaactatgaatccatcaca

SEQ ID NO: 722482 - DNA, 33 bp, Homo sapien
tgatattagtgtgtcacctatgaatccatcaca

SEQ ID NO: 722483 - DNA, 33 bp, Homo sapien
tctgttaatcaatgaaatggtccttccttattt

SEQ ID NO: 722484 - DNA, 33 bp, Homo sapien
tctgttaatcaatgaagtggtccttccttattt

SEQ ID NO: 722485 - DNA, 33 bp, Homo sapien
gaagagcaaatgcaaacaccaagagttgggcac

SEQ ID NO: 722486 - DNA, 33 bp, Homo sapien
gaagagcaaatgcaaagaccaagagttgggcac

SEQ ID NO: 722487 - DNA, 33 bp, Homo sapien
cttcagaaaacaattacgcaaacagtagataga

SEQ ID NO: 722488 - DNA, 33 bp, Homo sapien
cttcagaaaacaattatgcaaacagtagataga

SEQ ID NO: 722489 - DNA, 33 bp, Homo sapien
atcactggcttttacactgaaaacattgcagtg

SEQ ID NO: 722490 - DNA, 33 bp, Homo sapien
atcactggcttttacattgaaaacattgcagtg

SEQ ID NO: 722491 - DNA, 33 bp, Homo sapien
taagaacttcacatgaagactgatcggagaagg

SEQ ID NO: 722492 - DNA, 33 bp, Homo sapien
taagaacttcacatgaggactgatcggagaagg

SEQ ID NO: 722493 - DNA, 33 bp, Homo sapien
tctactgttccaagcaatccattacctttttgt

SEQ ID NO: 722494 - DNA, 33 bp, Homo sapien
tctactgttccaagcactccattacctttttgt

SEQ ID NO: 722495 - DNA, 33 bp, Homo sapien
tgtgtaattgaacaaaacctgagaaaactacaa

SEQ ID NO: 722496 - DNA, 33 bp, Homo sapien
tgtgtaattgaacaaaccctgagaaaactacaa

SEQ ID NO: 722497 - DNA, 33 bp, Homo sapien
ttaagcaaaagaggccagactctatgattttat

SEQ ID NO: 722498 - DNA, 33 bp, Homo sapien
ttaagcaaaagaggccggactctatgattttat

SEQ ID NO: 722499 - DNA, 33 bp, Homo sapien
gcctccactagcacaaccttaattcaaagcttt

SEQ ID NO: 722500 - DNA, 33 bp, Homo sapien
gcctccactagcacaatcttaattcaaagcttt

SEQ ID NO: 722501 - DNA, 33 bp, Homo sapien
gtctcctgaatctagaactctccctgtgcctcc

SEQ ID NO: 722502 - DNA, 33 bp, Homo sapien
gtctcctgaatctagacctctccctgtgcctcc

SEQ ID NO: 722503 - DNA, 33 bp, Homo sapien
cttgctcttttaatgccctagtagccctgtgat

SEQ ID NO: 722504 - DNA, 33 bp, Homo sapien
cttgctcttttaatgctctagtagccctgtgat

SEQ ID NO: 722505 - DNA, 33 bp, Homo sapien
tagtaatgtttccttcacaaatgaaaaattcta

SEQ ID NO: 722506 - DNA, 33 bp, Homo sapien
tagtaatgtttccttcgcaaatgaaaaattcta

SEQ ID NO: 722507 - DNA, 33 bp, Homo sapien
atagcttaggttgccacgtaagaagtttcaagg

SEQ ID NO: 722508 - DNA, 33 bp, Homo sapien
atagcttaggttgccaggtaagaagtttcaagg

SEQ ID NO: 722509 - DNA, 33 bp, Homo sapien
gggatgtcaattagtacaaccatcatggagaat

SEQ ID NO: 722510 - DNA, 33 bp, Homo sapien
gggatgtcaattagtataaccatcatggagaat

SEQ ID NO: 722511 - DNA, 33 bp, Homo sapien
tgggtggtgaaaaatacgttaatttgattgtta

SEQ ID NO: 722512 - DNA, 33 bp, Homo sapien
tgggtggtgaaaaatatgttaatttgattgtta

SEQ ID NO: 722513 - DNA, 33 bp, Homo sapien
acaacaacaactcttcactccttttttgtgctg

SEQ ID NO: 722514 - DNA, 33 bp, Homo sapien
acaacaacaactcttcgctccttttttgtgctg

SEQ ID NO: 722515 - DNA, 33 bp, Homo sapien
gcaacaaaaccaaaaaatggatgcctcaattag

SEQ ID NO: 722516 - DNA, 33 bp, Homo sapien
gcaacaaaaccaaaaattggatgcctcaattag

SEQ ID NO: 722517 - DNA, 33 bp, Homo sapien
tctaaaatcaggaagaacttcttcaaatgaaaa

SEQ ID NO: 722518 - DNA, 33 bp, Homo sapien
tctaaaatcaggaagagcttcttcaaatgaaaa

SEQ ID NO: 722519 - DNA, 33 bp, Homo sapien
caacaaatggcaagaccgaaagagctgtaacac

SEQ ID NO: 722520 - DNA, 33 bp, Homo sapien
caacaaatggcaagactgaaagagctgtaacac

SEQ ID NO: 722521 - DNA, 33 bp, Homo sapien
taagagggctaagaatcactgctactttctttc

SEQ ID NO: 722522 - DNA, 33 bp, Homo sapien
taagagggctaagaatgactgctactttctttc

SEQ ID NO: 722523 - DNA, 33 bp, Homo sapien
tgtgaagacaaaagagaattatatctgtgaaag

SEQ ID NO: 722524 - DNA, 33 bp, Homo sapien
tgtgaagacaaaagaggattatatctgtgaaag

SEQ ID NO: 722525 - DNA, 33 bp, Homo sapien
tcagcatcgctaattgcataatgttatctgtta

SEQ ID NO: 722526 - DNA, 33 bp, Homo sapien
tcagcatcgctaattgtataatgttatctgtta

SEQ ID NO: 722527 - DNA, 33 bp, Homo sapien
aagtaagtcatcaaaagcccgttcacataggtc

SEQ ID NO: 722528 - DNA, 33 bp, Homo sapien
aagtaagtcatcaaaatcccgttcacataggtc

SEQ ID NO: 722529 - DNA, 33 bp, Homo sapien
aatgccacctaaatccaccccagtctctacatc

SEQ ID NO: 722530 - DNA, 33 bp, Homo sapien
aatgccacctaaatccgccccagtctctacatc

SEQ ID NO: 722531 - DNA, 33 bp, Homo sapien
tcatttatacagatcacctcagtttcaaaagaa

SEQ ID NO: 722532 - DNA, 33 bp, Homo sapien
tcatttatacagatcatctcagtttcaaaagaa

SEQ ID NO: 722533 - DNA, 33 bp, Homo sapien
ttcaattctcagtatgacaagcagattttccac

SEQ ID NO: 722534 - DNA, 33 bp, Homo sapien
ttcaattctcagtatggcaagcagattttccac

SEQ ID NO: 722535 - DNA, 33 bp, Homo sapien
gaaactggttcaagaaaatgaatgggaagagaa

SEQ ID NO: 722536 - DNA, 33 bp, Homo sapien
gaaactggttcaagaacatgaatgggaagagaa

SEQ ID NO: 722537 - DNA, 33 bp, Homo sapien
tcagaactgtggtaaacctaattctcaacatta

SEQ ID NO: 722538 - DNA, 33 bp, Homo sapien
tcagaactgtggtaaatctaattctcaacatta

SEQ ID NO: 722539 - DNA, 33 bp, Homo sapien
aaagaaatggatttccaaactgagtgcaacgtt

SEQ ID NO: 722540 - DNA, 33 bp, Homo sapien
aaagaaatggatttccgaactgagtgcaacgtt

SEQ ID NO: 722541 - DNA, 33 bp, Homo sapien
gagatcacacaactaggaaaaataagtgagacc

SEQ ID NO: 722542 - DNA, 33 bp, Homo sapien
gagatcacacaactagtaaaaataagtgagacc

SEQ ID NO: 722543 - DNA, 33 bp, Homo sapien
ccatggaagaattgtaagaagagacaggtcgct

SEQ ID NO: 722544 - DNA, 33 bp, Homo sapien
ccatggaagaattgtaggaagagacaggtcgct

SEQ ID NO: 722545 - DNA, 33 bp, Homo sapien
tcctagacaaatgagaaacattcagagatgtga

SEQ ID NO: 722546 - DNA, 33 bp, Homo sapien
tcctagacaaatgagagacattcagagatgtga

SEQ ID NO: 722547 - DNA, 33 bp, Homo sapien
gagatatgttttgtgacgagatctttatagtcg

SEQ ID NO: 722548 - DNA, 33 bp, Homo sapien
gagatatgttttgtgatgagatctttatagtcg

SEQ ID NO: 722549 - DNA, 33 bp, Homo sapien
gcaatcagtgttatgccctgttttatgcttgac

SEQ ID NO: 722550 - DNA, 33 bp, Homo sapien
gcaatcagtgttatgctctgttttatgcttgac

SEQ ID NO: 722551 - DNA, 33 bp, Homo sapien
gcattatcaaaataccgcaaataagttcattga

SEQ ID NO: 722552 - DNA, 33 bp, Homo sapien
gcattatcaaaatacctcaaataagttcattga

SEQ ID NO: 722553 - DNA, 33 bp, Homo sapien
aatgttgcttctctccgatcttcttggaacatt

SEQ ID NO: 722554 - DNA, 33 bp, Homo sapien
aatgttgcttctctcctatcttcttggaacatt

SEQ ID NO: 722555 - DNA, 33 bp, Homo sapien
catcacttacatgtccgattatccagggccttc

SEQ ID NO: 722556 - DNA, 33 bp, Homo sapien
catcacttacatgtcctattatccagggccttc

SEQ ID NO: 722557 - DNA, 33 bp, Homo sapien
acactctttaaaaccacgaaaatggcatatttc

SEQ ID NO: 722558 - DNA, 33 bp, Homo sapien
acactctttaaaaccaggaaaatggcatatttc

SEQ ID NO: 722559 - DNA, 33 bp, Homo sapien
caatagcctactgtagaaaattgtgggatagga

SEQ ID NO: 722560 - DNA, 33 bp, Homo sapien
caatagcctactgtaggaaattgtgggatagga

SEQ ID NO: 722561 - DNA, 33 bp, Homo sapien
accataactcttgacacagccaggtgtgatggt

SEQ ID NO: 722562 - DNA, 33 bp, Homo sapien
accataactcttgacatagccaggtgtgatggt

SEQ ID NO: 722563 - DNA, 33 bp, Homo sapien
gcagctgttacctaaaacaactaatgaaatgtg

SEQ ID NO: 722564 - DNA, 33 bp, Homo sapien
gcagctgttacctaaagcaactaatgaaatgtg

SEQ ID NO: 722565 - DNA, 33 bp, Homo sapien
gacaaccatgaaccgtaaaagggagccactgaa

SEQ ID NO: 722566 - DNA, 33 bp, Homo sapien
gacaaccatgaaccgtgaaagggagccactgaa

SEQ ID NO: 722567 - DNA, 33 bp, Homo sapien
aggacaggggtttacacaactgtatacttgcaa

SEQ ID NO: 722568 - DNA, 33 bp, Homo sapien
aggacaggggtttacataactgtatacttgcaa

SEQ ID NO: 722569 - DNA, 33 bp, Homo sapien
tttaaggacaaaagaaaccagattataacagat

SEQ ID NO: 722570 - DNA, 33 bp, Homo sapien
tttaaggacaaaagaagccagattataacagat

SEQ ID NO: 722571 - DNA, 33 bp, Homo sapien
aaaagctttgagataccacctctcgagaaactt

SEQ ID NO: 722572 - DNA, 33 bp, Homo sapien
aaaagctttgagatactacctctcgagaaactt

SEQ ID NO: 722573 - DNA, 33 bp, Homo sapien
tgtcccattgcttggaacatttcaggaactgaa

SEQ ID NO: 722574 - DNA, 33 bp, Homo sapien
tgtcccattgcttggagcatttcaggaactgaa

SEQ ID NO: 722575 - DNA, 33 bp, Homo sapien
tccaggaacacactgacgcaacattcttaagcc

SEQ ID NO: 722576 - DNA, 33 bp, Homo sapien
tccaggaacacactgatgcaacattcttaagcc

SEQ ID NO: 722577 - DNA, 33 bp, Homo sapien
tcaagtgtatgtattacggaaaaaacaatctca

SEQ ID NO: 722578 - DNA, 33 bp, Homo sapien
tcaagtgtatgtattatggaaaaaacaatctca

SEQ ID NO: 722579 - DNA, 33 bp, Homo sapien
gcagtctaatgcagaacagcgaaaagaagtggt

SEQ ID NO: 722580 - DNA, 33 bp, Homo sapien
gcagtctaatgcagaagagcgaaaagaagtggt

SEQ ID NO: 722581 - DNA, 33 bp, Homo sapien
gtagatcaattgtctcaatctcctttcttccat

SEQ ID NO: 722582 - DNA, 33 bp, Homo sapien
gtagatcaattgtctccatctcctttcttccat

SEQ ID NO: 722583 - DNA, 33 bp, Homo sapien
gggacacatcaagagtaaagccaagttctttct

SEQ ID NO: 722584 - DNA, 33 bp, Homo sapien
gggacacatcaagagtgaagccaagttctttct

SEQ ID NO: 722585 - DNA, 33 bp, Homo sapien
actatgcagaaaattcccattaaaaatctgata

SEQ ID NO: 722586 - DNA, 33 bp, Homo sapien
actatgcagaaaattctcattaaaaatctgata

SEQ ID NO: 722587 - DNA, 33 bp, Homo sapien
acattgatgtatactaaaagcagagtgttaaca

SEQ ID NO: 722588 - DNA, 33 bp, Homo sapien
acattgatgtatactagaagcagagtgttaaca

SEQ ID NO: 722589 - DNA, 33 bp, Homo sapien
gccatgaaaatggtacagagttggtggcaatat

SEQ ID NO: 722590 - DNA, 33 bp, Homo sapien
gccatgaaaatggtacggagttggtggcaatat

SEQ ID NO: 722591 - DNA, 33 bp, Homo sapien
ctctactaaaacaggaactttgtaatagtttga

SEQ ID NO: 722592 - DNA, 33 bp, Homo sapien
ctctactaaaacaggagctttgtaatagtttga

SEQ ID NO: 722593 - DNA, 33 bp, Homo sapien
gagactgagctagaaggaaacaactggacaaca

SEQ ID NO: 722594 - DNA, 33 bp, Homo sapien
gagactgagctagaagtaaacaactggacaaca

SEQ ID NO: 722595 - DNA, 33 bp, Homo sapien
aaagaatctccagcaacggaatgtctctaaaat

SEQ ID NO: 722596 - DNA, 33 bp, Homo sapien
aaagaatctccagcaatggaatgtctctaaaat

SEQ ID NO: 722597 - DNA, 33 bp, Homo sapien
tatttcacaatgcctcaacctgaagaatgctat

SEQ ID NO: 722598 - DNA, 33 bp, Homo sapien
tatttcacaatgcctcgacctgaagaatgctat

SEQ ID NO: 722599 - DNA, 33 bp, Homo sapien
gtgagtgttcattttcaccattactggcaactg

SEQ ID NO: 722600 - DNA, 33 bp, Homo sapien
gtgagtgttcattttcgccattactggcaactg

SEQ ID NO: 722601 - DNA, 33 bp, Homo sapien
ctgccatggagagtaaatgtagttcaaaagcaa

SEQ ID NO: 722602 - DNA, 33 bp, Homo sapien
ctgccatggagagtaagtgtagttcaaaagcaa

SEQ ID NO: 722603 - DNA, 33 bp, Homo sapien
tagagcacaaatacaaaaagtcacttaatagtt

SEQ ID NO: 722604 - DNA, 33 bp, Homo sapien
tagagcacaaatacaagaagtcacttaatagtt

SEQ ID NO: 722605 - DNA, 33 bp, Homo sapien
tttgtatttgcaattcacctacttgcaaaaatt

SEQ ID NO: 722606 - DNA, 33 bp, Homo sapien
tttgtatttgcaattcgcctacttgcaaaaatt

SEQ ID NO: 722607 - DNA, 33 bp, Homo sapien
aaacttcctttctgcaccttcataccagttaat

SEQ ID NO: 722608 - DNA, 33 bp, Homo sapien
aaacttcctttctgcagcttcataccagttaat

SEQ ID NO: 722609 - DNA, 33 bp, Homo sapien
tcatataatggttataagtgattggatgattag

SEQ ID NO: 722610 - DNA, 33 bp, Homo sapien
tcatataatggttataggtgattggatgattag

SEQ ID NO: 722611 - DNA, 33 bp, Homo sapien
aataaagatgtaggaaaggaaaatgccattagt

SEQ ID NO: 722612 - DNA, 33 bp, Homo sapien
aataaagatgtaggaagggaaaatgccattagt

SEQ ID NO: 722613 - DNA, 33 bp, Homo sapien
aaggacagttttttcacctgttctactttatac

SEQ ID NO: 722614 - DNA, 33 bp, Homo sapien
aaggacagttttttcatctgttctactttatac

SEQ ID NO: 722615 - DNA, 33 bp, Homo sapien
atttcttccactgctcaaaggaaacaaatcgag

SEQ ID NO: 722616 - DNA, 33 bp, Homo sapien
atttcttccactgctcgaaggaaacaaatcgag

SEQ ID NO: 722617 - DNA, 33 bp, Homo sapien
cactatttgtggcatcggacctcttttcatccc

SEQ ID NO: 722618 - DNA, 33 bp, Homo sapien
cactatttgtggcatctgacctcttttcatccc

SEQ ID NO: 722619 - DNA, 33 bp, Homo sapien
tctgtgggttgatagacgttttccactggggat

SEQ ID NO: 722620 - DNA, 33 bp, Homo sapien
tctgtgggttgatagatgttttccactggggat

SEQ ID NO: 722621 - DNA, 33 bp, Homo sapien
cctttcacctttgccaaagtcgactggcattag

SEQ ID NO: 722622 - DNA, 33 bp, Homo sapien
cctttcacctttgccagagtcgactggcattag

SEQ ID NO: 722623 - DNA, 33 bp, Homo sapien
atagacatactgacaacttcccaggattttaag

SEQ ID NO: 722624 - DNA, 33 bp, Homo sapien
atagacatactgacaatttcccaggattttaag

SEQ ID NO: 722625 - DNA, 33 bp, Homo sapien
gcgctaatggctggtaaatttctgaggtattgt

SEQ ID NO: 722626 - DNA, 33 bp, Homo sapien
gcgctaatggctggtacatttctgaggtattgt

SEQ ID NO: 722627 - DNA, 33 bp, Homo sapien
gactcatctgagacaaatccctttcacctatga

SEQ ID NO: 722628 - DNA, 33 bp, Homo sapien
gactcatctgagacaagtccctttcacctatga

SEQ ID NO: 722629 - DNA, 33 bp, Homo sapien
aaggtcagcctagcaggagtacaataagcaagg

SEQ ID NO: 722630 - DNA, 33 bp, Homo sapien
aaggtcagcctagcagtagtacaataagcaagg

SEQ ID NO: 722631 - DNA, 33 bp, Homo sapien
tttccacttccagtaacagtcaactataattca

SEQ ID NO: 722632 - DNA, 33 bp, Homo sapien
tttccacttccagtaatagtcaactataattca

SEQ ID NO: 722633 - DNA, 33 bp, Homo sapien
tgtttgcctcatttaccgggaaaaatcagatag

SEQ ID NO: 722634 - DNA, 33 bp, Homo sapien
tgtttgcctcatttactgggaaaaatcagatag

SEQ ID NO: 722635 - DNA, 33 bp, Homo sapien
acctcctttggcacacagtggtgactgggcaga

SEQ ID NO: 722636 - DNA, 33 bp, Homo sapien
acctcctttggcacaccgtggtgactgggcaga

SEQ ID NO: 722637 - DNA, 33 bp, Homo sapien
actgagagatagtataacaggtgaaaagtggga

SEQ ID NO: 722638 - DNA, 33 bp, Homo sapien
actgagagatagtatagcaggtgaaaagtggga

SEQ ID NO: 722639 - DNA, 33 bp, Homo sapien
tgcaaacacgaggaggaacaaagagaacggatt

SEQ ID NO: 722640 - DNA, 33 bp, Homo sapien
tgcaaacacgaggaggcacaaagagaacggatt

SEQ ID NO: 722641 - DNA, 33 bp, Homo sapien
aaaacagtacactgtaacctgaattacacaaaa

SEQ ID NO: 722642 - DNA, 33 bp, Homo sapien
aaaacagtacactgtaccctgaattacacaaaa

SEQ ID NO: 722643 - DNA, 33 bp, Homo sapien
cttaatctgtgggatccgagtctaacttcaggt

SEQ ID NO: 722644 - DNA, 33 bp, Homo sapien
cttaatctgtgggatctgagtctaacttcaggt

SEQ ID NO: 722645 - DNA, 33 bp, Homo sapien
caaagccaggcttatacctcatttcacaatatc

SEQ ID NO: 722646 - DNA, 33 bp, Homo sapien
caaagccaggcttatagctcatttcacaatatc

SEQ ID NO: 722647 - DNA, 33 bp, Homo sapien
tgcccagagttttgaacaggaaacaattctttt

SEQ ID NO: 722648 - DNA, 33 bp, Homo sapien
tgcccagagttttgaagaggaaacaattctttt

SEQ ID NO: 722649 - DNA, 33 bp, Homo sapien
tggggctgctaatggaagttcctagaaattgtc

SEQ ID NO: 722650 - DNA, 33 bp, Homo sapien
tggggctgctaatggaggttcctagaaattgtc

SEQ ID NO: 722651 - DNA, 33 bp, Homo sapien
actaacaccaccagagaactttttaacattcct

SEQ ID NO: 722652 - DNA, 33 bp, Homo sapien
actaacaccaccagagtactttttaacattcct

SEQ ID NO: 722653 - DNA, 33 bp, Homo sapien
cttgaatttaacagaaactgcttttgaaccgaa

SEQ ID NO: 722654 - DNA, 33 bp, Homo sapien
cttgaatttaacagaatctgcttttgaaccgaa

SEQ ID NO: 722655 - DNA, 33 bp, Homo sapien
gtagttgaatatcacaatctgtgccagtgattc

SEQ ID NO: 722656 - DNA, 33 bp, Homo sapien
gtagttgaatatcacattctgtgccagtgattc

SEQ ID NO: 722657 - DNA, 33 bp, Homo sapien
tcaaagtgaaggtccaatagaagttttgtttat

SEQ ID NO: 722658 - DNA, 33 bp, Homo sapien
tcaaagtgaaggtccagtagaagttttgtttat

SEQ ID NO: 722659 - DNA, 33 bp, Homo sapien
agctcatgggatactacatggttgttcatcttt

SEQ ID NO: 722660 - DNA, 33 bp, Homo sapien
agctcatgggatactatatggttgttcatcttt

SEQ ID NO: 722661 - DNA, 33 bp, Homo sapien
tgaaacattcctgtcaactattgactttgtagc

SEQ ID NO: 722662 - DNA, 33 bp, Homo sapien
tgaaacattcctgtcacctattgactttgtagc

SEQ ID NO: 722663 - DNA, 33 bp, Homo sapien
aggttttctcatgactcagatttcttcataatg

SEQ ID NO: 722664 - DNA, 33 bp, Homo sapien
aggttttctcatgacttagatttcttcataatg

SEQ ID NO: 722665 - DNA, 33 bp, Homo sapien
gagaactgtgaagggcacaatgaagcccactgt

SEQ ID NO: 722666 - DNA, 33 bp, Homo sapien
gagaactgtgaagggcgcaatgaagcccactgt

SEQ ID NO: 722667 - DNA, 33 bp, Homo sapien
gatctcttgaatcacaataaagtgccattgcca

SEQ ID NO: 722668 - DNA, 33 bp, Homo sapien
gatctcttgaatcacattaaagtgccattgcca

SEQ ID NO: 722669 - DNA, 33 bp, Homo sapien
tttcagatgagggctaaatggcccaaaaagaaa

SEQ ID NO: 722670 - DNA, 33 bp, Homo sapien
tttcagatgagggctacatggcccaaaaagaaa

SEQ ID NO: 722671 - DNA, 33 bp, Homo sapien
gtctggagaaagcaacagaagataacacagagt

SEQ ID NO: 722672 - DNA, 33 bp, Homo sapien
gtctggagaaagcaacggaagataacacagagt

SEQ ID NO: 722673 - DNA, 33 bp, Homo sapien
tatccctgccgttaaaagacgcgtgactgttat

SEQ ID NO: 722674 - DNA, 33 bp, Homo sapien
tatccctgccgttaaatgacgcgtgactgttat

SEQ ID NO: 722675 - DNA, 33 bp, Homo sapien
tggattagtgtctttacaagaagaaacagggca

SEQ ID NO: 722676 - DNA, 33 bp, Homo sapien
tggattagtgtctttataagaagaaacagggca

SEQ ID NO: 722677 - DNA, 33 bp, Homo sapien
ccctacctctagtggaatatgcacaatagggct

SEQ ID NO: 722678 - DNA, 33 bp, Homo sapien
ccctacctctagtggagtatgcacaatagggct

SEQ ID NO: 722679 - DNA, 33 bp, Homo sapien
gtgatatatgccacaacatcactttactataac

SEQ ID NO: 722680 - DNA, 33 bp, Homo sapien
gtgatatatgccacaatatcactttactataac

SEQ ID NO: 722681 - DNA, 33 bp, Homo sapien
taatcaactgccagtcgctttacatcaataaca

SEQ ID NO: 722682 - DNA, 33 bp, Homo sapien
taatcaactgccagtctctttacatcaataaca

SEQ ID NO: 722683 - DNA, 33 bp, Homo sapien
agatatttgttcaacactaaggggtaaatagaa

SEQ ID NO: 722684 - DNA, 33 bp, Homo sapien
agatatttgttcaacattaaggggtaaatagaa

SEQ ID NO: 722685 - DNA, 33 bp, Homo sapien
ctgaattttagacttaccatttattgttgcata

SEQ ID NO: 722686 - DNA, 33 bp, Homo sapien
ctgaattttagacttatcatttattgttgcata

SEQ ID NO: 722687 - DNA, 33 bp, Homo sapien
gcaactaattctcatacattgctggcaagaatg

SEQ ID NO: 722688 - DNA, 33 bp, Homo sapien
gcaactaattctcatatattgctggcaagaatg

SEQ ID NO: 722689 - DNA, 33 bp, Homo sapien
atgaaagtccctaaacaatgaggttcagcgaat

SEQ ID NO: 722690 - DNA, 33 bp, Homo sapien
atgaaagtccctaaacgatgaggttcagcgaat

SEQ ID NO: 722691 - DNA, 33 bp, Homo sapien
atttaaaggcagtaacacttgaccaggcactaa

SEQ ID NO: 722692 - DNA, 33 bp, Homo sapien
atttaaaggcagtaacgcttgaccaggcactaa

SEQ ID NO: 722693 - DNA, 33 bp, Homo sapien
catatgtctttagcatcatacggactctagcat

SEQ ID NO: 722694 - DNA, 33 bp, Homo sapien
catatgtctttagcattatacggactctagcat

SEQ ID NO: 722695 - DNA, 33 bp, Homo sapien
gaggtgaggacaataacgaacgtgatgcctaag

SEQ ID NO: 722696 - DNA, 33 bp, Homo sapien
gaggtgaggacaataatgaacgtgatgcctaag

SEQ ID NO: 722697 - DNA, 33 bp, Homo sapien
agaactttaggacagccacaaaatgaataacat

SEQ ID NO: 722698 - DNA, 33 bp, Homo sapien
agaactttaggacagctacaaaatgaataacat

SEQ ID NO: 722699 - DNA, 33 bp, Homo sapien
aagtcaaaggaaaagggccttgagtctctgggg

SEQ ID NO: 722700 - DNA, 33 bp, Homo sapien
aagtcaaaggaaaaggtccttgagtctctgggg

SEQ ID NO: 722701 - DNA, 33 bp, Homo sapien
tgtagtagataatcagacagagaagttggacac

SEQ ID NO: 722702 - DNA, 33 bp, Homo sapien
tgtagtagataatcagtcagagaagttggacac

SEQ ID NO: 722703 - DNA, 33 bp, Homo sapien
acactgcctgcctaaacagaaacacttaggtca

SEQ ID NO: 722704 - DNA, 33 bp, Homo sapien
acactgcctgcctaaatagaaacacttaggtca

SEQ ID NO: 722705 - DNA, 33 bp, Homo sapien
taggtcaacatgtagacagagatctgagcttcc

SEQ ID NO: 722706 - DNA, 33 bp, Homo sapien
taggtcaacatgtagatagagatctgagcttcc

SEQ ID NO: 722707 - DNA, 33 bp, Homo sapien
gcatcctctgtctgtacgccctaagtcagtttt

SEQ ID NO: 722708 - DNA, 33 bp, Homo sapien
gcatcctctgtctgtatgccctaagtcagtttt

SEQ ID NO: 722709 - DNA, 33 bp, Homo sapien
taattcagggacagaaccatgcagaaattcaca

SEQ ID NO: 722710 - DNA, 33 bp, Homo sapien
taattcagggacagaatcatgcagaaattcaca

SEQ ID NO: 722711 - DNA, 33 bp, Homo sapien
ttaattaattcagtgacgtatgttttctaggat

SEQ ID NO: 722712 - DNA, 33 bp, Homo sapien
ttaattaattcagtgatgtatgttttctaggat

SEQ ID NO: 722713 - DNA, 33 bp, Homo sapien
ggtatttttagttgcaagaaagagatcaagaga

SEQ ID NO: 722714 - DNA, 33 bp, Homo sapien
ggtatttttagttgcacgaaagagatcaagaga

SEQ ID NO: 722715 - DNA, 33 bp, Homo sapien
gtcactgatatctaagaaaagaagagttatcgg

SEQ ID NO: 722716 - DNA, 33 bp, Homo sapien
gtcactgatatctaaggaaagaagagttatcgg

SEQ ID NO: 722717 - DNA, 33 bp, Homo sapien
gtttcaagcaaatcagacatctaccatcatctt

SEQ ID NO: 722718 - DNA, 33 bp, Homo sapien
gtttcaagcaaatcaggcatctaccatcatctt

SEQ ID NO: 722719 - DNA, 33 bp, Homo sapien
gtgatctgaagtgaaaccgtttcatccggaaat

SEQ ID NO: 722720 - DNA, 33 bp, Homo sapien
gtgatctgaagtgaaagcgtttcatccggaaat

SEQ ID NO: 722721 - DNA, 33 bp, Homo sapien
acctgaatcacccttaagtaaagataaattctg

SEQ ID NO: 722722 - DNA, 33 bp, Homo sapien
acctgaatcacccttatgtaaagataaattctg

SEQ ID NO: 722723 - DNA, 33 bp, Homo sapien
accattttgccattcaaacattgcctctctaca

SEQ ID NO: 722724 - DNA, 33 bp, Homo sapien
accattttgccattcagacattgcctctctaca

SEQ ID NO: 722725 - DNA, 33 bp, Homo sapien
aagacaaaatataaacaatgtgagtatgcctca

SEQ ID NO: 722726 - DNA, 33 bp, Homo sapien
aagacaaaatataaacgatgtgagtatgcctca

SEQ ID NO: 722727 - DNA, 33 bp, Homo sapien
acatatattcaaaacacaggtgtacatagacat

SEQ ID NO: 722728 - DNA, 33 bp, Homo sapien
acatatattcaaaacataggtgtacatagacat

SEQ ID NO: 722729 - DNA, 33 bp, Homo sapien
cataaacgtattcaccacttctaaaagtttcct

SEQ ID NO: 722730 - DNA, 33 bp, Homo sapien
cataaacgtattcaccgcttctaaaagtttcct

SEQ ID NO: 722731 - DNA, 33 bp, Homo sapien
tttcaactcttgtttacgtttgaaattttcata

SEQ ID NO: 722732 - DNA, 33 bp, Homo sapien
tttcaactcttgtttatgtttgaaattttcata

SEQ ID NO: 722733 - DNA, 33 bp, Homo sapien
tacatcaaaattatccaagtgcttttccttttt

SEQ ID NO: 722734 - DNA, 33 bp, Homo sapien
tacatcaaaattatcctagtgcttttccttttt

SEQ ID NO: 722735 - DNA, 33 bp, Homo sapien
atacataggccattaacatatatgatgagcaaa

SEQ ID NO: 722736 - DNA, 33 bp, Homo sapien
atacataggccattaatatatatgatgagcaaa

SEQ ID NO: 722737 - DNA, 33 bp, Homo sapien
ctcaatgacaatataccctgctctgtcttctta

SEQ ID NO: 722738 - DNA, 33 bp, Homo sapien
ctcaatgacaatatactctgctctgtcttctta

SEQ ID NO: 722739 - DNA, 33 bp, Homo sapien
atttaacatatctaaaaggcctcatgcacaata

SEQ ID NO: 722740 - DNA, 33 bp, Homo sapien
atttaacatatctaaacggcctcatgcacaata

SEQ ID NO: 722741 - DNA, 33 bp, Homo sapien
gctgagagacagaatcaaccaactgcatagact

SEQ ID NO: 722742 - DNA, 33 bp, Homo sapien
gctgagagacagaatccaccaactgcatagact

SEQ ID NO: 722743 - DNA, 33 bp, Homo sapien
catccattagtgggtcccaggcacaaaggtgga

SEQ ID NO: 722744 - DNA, 33 bp, Homo sapien
catccattagtgggtctcaggcacaaaggtgga

SEQ ID NO: 722745 - DNA, 33 bp, Homo sapien
acattgctccttctaccctctgtcactctatag

SEQ ID NO: 722746 - DNA, 33 bp, Homo sapien
acattgctccttctactctctgtcactctatag

SEQ ID NO: 722747 - DNA, 33 bp, Homo sapien; identical to SEQ ID NO: 722745

SEQ ID NO: 722748 - DNA, 33 bp, Homo sapien; identical to SEQ ID NO: 722746

SEQ ID NO: 722749 - DNA, 33 bp, Homo sapien
aaatgaccatgctaacccctttacaacagacaa

SEQ ID NO: 722750 - DNA, 33 bp, Homo sapien
aaatgaccatgctaactcctttacaacagacaa

SEQ ID NO: 722751 - DNA, 33 bp, Homo sapien
caggcatattctgtaagtcctgacactgtttgt

SEQ ID NO: 722752 - DNA, 33 bp, Homo sapien
caggcatattctgtaattcctgacactgtttgt

SEQ ID NO: 722753 - DNA, 33 bp, Homo sapien
ctttctcaagaggcagaatgtaaactgaagtca

SEQ ID NO: 722754 - DNA, 33 bp, Homo sapien
ctttctcaagaggcaggatgtaaactgaagtca

SEQ ID NO: 722755 - DNA, 33 bp, Homo sapien
tacggagacaaatgccacaatagaaaacctcag

SEQ ID NO: 722756 - DNA, 33 bp, Homo sapien
tacggagacaaatgccgcaatagaaaacctcag

SEQ ID NO: 722757 - DNA, 33 bp, Homo sapien
gagagtgtgacattgacgtggaatatgatcaac

SEQ ID NO: 722758 - DNA, 33 bp, Homo sapien
gagagtgtgacattgatgtggaatatgatcaac

SEQ ID NO: 722759 - DNA, 33 bp, Homo sapien
acttggaatacaacacagtcactgcagagttat

SEQ ID NO: 722760 - DNA, 33 bp, Homo sapien
acttggaatacaacacggtcactgcagagttat

SEQ ID NO: 722761 - DNA, 33 bp, Homo sapien
aactttgagcaatacaataaacataggcaaaag

SEQ ID NO: 722762 - DNA, 33 bp, Homo sapien
aactttgagcaatacagtaaacataggcaaaag

SEQ ID NO: 722763 - DNA, 33 bp, Homo sapien
aacttttccgatgaaacttcctcattgaaacac

SEQ ID NO: 722764 - DNA, 33 bp, Homo sapien
aacttttccgatgaaatttcctcattgaaacac

SEQ ID NO: 722765 - DNA, 33 bp, Homo sapien
gctggtaggtcagtaaaaaagttagacattaat

SEQ ID NO: 722766 - DNA, 33 bp, Homo sapien
gctggtaggtcagtaagaaagttagacattaat

SEQ ID NO: 722767 - DNA, 33 bp, Homo sapien
gtctttatttcaaataccctagagttctgctca

SEQ ID NO: 722768 - DNA, 33 bp, Homo sapien
gtctttatttcaaatagcctagagttctgctca

SEQ ID NO: 722769 - DNA, 33 bp, Homo sapien
aaatgacagtgcccaactctagatatttgccaa

SEQ ID NO: 722770 - DNA, 33 bp, Homo sapien
aaatgacagtgcccaattctagatatttgccaa

SEQ ID NO: 722771 - DNA, 33 bp, Homo sapien
agagatttagccaagacgtggagcccaggagga

SEQ ID NO: 722772 - DNA, 33 bp, Homo sapien
agagatttagccaagatgtggagcccaggagga

SEQ ID NO: 722773 - DNA, 33 bp, Homo sapien
ggggctgcttacatcccagcgcttccaacaaca

SEQ ID NO: 722774 - DNA, 33 bp, Homo sapien
ggggctgcttacatcctagcgcttccaacaaca

SEQ ID NO: 722775 - DNA, 33 bp, Homo sapien
ttgccatgattcattacagtaaccaggagagat

SEQ ID NO: 722776 - DNA, 33 bp, Homo sapien
ttgccatgattcattagagtaaccaggagagat

SEQ ID NO: 722777 - DNA, 33 bp, Homo sapien
gaaaatctttgaaaaactttctgtgacctggaa

SEQ ID NO: 722778 - DNA, 33 bp, Homo sapien
gaaaatctttgaaaaagtttctgtgacctggaa

SEQ ID NO: 722779 - DNA, 33 bp, Homo sapien
aactctcataatcttacagttctcccagcctct

SEQ ID NO: 722780 - DNA, 33 bp, Homo sapien
aactctcataatcttatagttctcccagcctct

SEQ ID NO: 722781 - DNA, 33 bp, Homo sapien
agtaggccaaacaaaaagtacctgtctgcttag

SEQ ID NO: 722782 - DNA, 33 bp, Homo sapien
agtaggccaaacaaaacgtacctgtctgcttag

SEQ ID NO: 722783 - DNA, 33 bp, Homo sapien
attgtagattttcttccgaaattcatgctttca

SEQ ID NO: 722784 - DNA, 33 bp, Homo sapien
attgtagattttcttctgaaattcatgctttca

SEQ ID NO: 722785 - DNA, 33 bp, Homo sapien
cctcactctcatcccacgaaatcagtctctgca

SEQ ID NO: 722786 - DNA, 33 bp, Homo sapien
cctcactctcatcccatgaaatcagtctctgca

SEQ ID NO: 722787 - DNA, 33 bp, Homo sapien
tttaggagatagagtgccaaagaattttttttc

SEQ ID NO: 722788 - DNA, 33 bp, Homo sapien
tttaggagatagagtgtcaaagaattttttttc

SEQ ID NO: 722789 - DNA, 33 bp, Homo sapien
cagatggatatgataccaagtggctaaattctg

SEQ ID NO: 722790 - DNA, 33 bp, Homo sapien
cagatggatatgatacgaagtggctaaattctg

SEQ ID NO: 722791 - DNA, 33 bp, Homo sapien
tgctgtaagaggaagaaccaagacaaaattcag

SEQ ID NO: 722792 - DNA, 33 bp, Homo sapien
tgctgtaagaggaagatccaagacaaaattcag

SEQ ID NO: 722793 - DNA, 33 bp, Homo sapien
ttcctcccctcaagcaacgactcttccattacc

SEQ ID NO: 722794 - DNA, 33 bp, Homo sapien
ttcctcccctcaagcagcgactcttccattacc

SEQ ID NO: 722795 - DNA, 33 bp, Homo sapien
tctcaggttgggaaacaaatcatctataatcta

SEQ ID NO: 722796 - DNA, 33 bp, Homo sapien
tctcaggttgggaaacgaatcatctataatcta

SEQ ID NO: 722797 - DNA, 33 bp, Homo sapien
gaacatctggtaccaaagcaaccaagtaaaagt

SEQ ID NO: 722798 - DNA, 33 bp, Homo sapien
gaacatctggtaccaacgcaaccaagtaaaagt

SEQ ID NO: 722799 - DNA, 33 bp, Homo sapien
taggcattttgtgtcccagaaatatctcttttt

SEQ ID NO: 722800 - DNA, 33 bp, Homo sapien
taggcattttgtgtcctagaaatatctcttttt

SEQ ID NO: 722801 - DNA, 33 bp, Homo sapien
ccactaaggatgccaaatcttctcatatttccc

SEQ ID NO: 722802 - DNA, 33 bp, Homo sapien
ccactaaggatgccaagtcttctcatatttccc

SEQ ID NO: 722803 - DNA, 33 bp, Homo sapien
ggagcaaacaagggacaatcagcagcttcttgc

SEQ ID NO: 722804 - DNA, 33 bp, Homo sapien
ggagcaaacaagggacgatcagcagcttcttgc

SEQ ID NO: 722805 - DNA, 33 bp, Homo sapien
aggagatgacggtgagcagataaaacagtagca

SEQ ID NO: 722806 - DNA, 33 bp, Homo sapien
aggagatgacggtgaggagataaaacagtagca

SEQ ID NO: 722807 - DNA, 33 bp, Homo sapien
cgagtttagtctataaatagcgacagatgtact

SEQ ID NO: 722808 - DNA, 33 bp, Homo sapien
cgagtttagtctataagtagcgacagatgtact

SEQ ID NO: 722809 - DNA, 33 bp, Homo sapien
agtaagaggattcagaaaaactgtcagggtctt

SEQ ID NO: 722810 - DNA, 33 bp, Homo sapien
agtaagaggattcagagaaactgtcagggtctt

SEQ ID NO: 722811 - DNA, 33 bp, Homo sapien
ttttttttttgccacagacatcttgttaaagtg

SEQ ID NO: 722812 - DNA, 33 bp, Homo sapien
ttttttttttgccacatacatcttgttaaagtg

SEQ ID NO: 722813 - DNA, 33 bp, Homo sapien
aaattcacatatttggacaatactgaaccagaa

SEQ ID NO: 722814 - DNA, 33 bp, Homo sapien
aaattcacatatttggtcaatactgaaccagaa

SEQ ID NO: 722815 - DNA, 33 bp, Homo sapien
tattactcacaatccaataaagatgggaacatg

SEQ ID NO: 722816 - DNA, 33 bp, Homo sapien
tattactcacaatccagtaaagatgggaacatg

SEQ ID NO: 722817 - DNA, 33 bp, Homo sapien
gatgttactgctgttacgggaagaagattcagg

SEQ ID NO: 722818 - DNA, 33 bp, Homo sapien
gatgttactgctgttatgggaagaagattcagg

SEQ ID NO: 722819 - DNA, 33 bp, Homo sapien
agacacagaagacaaacggtatcaaacaagcta

SEQ ID NO: 722820 - DNA, 33 bp, Homo sapien
agacacagaagacaaatggtatcaaacaagcta

SEQ ID NO: 722821 - DNA, 33 bp, Homo sapien
aatctggcatcacagacagtaccaagagatggt

SEQ ID NO: 722822 - DNA, 33 bp, Homo sapien
aatctggcatcacagagagtaccaagagatggt

SEQ ID NO: 722823 - DNA, 33 bp, Homo sapien
aaccctctgtcaaaagccctacctggacgttcc

SEQ ID NO: 722824 - DNA, 33 bp, Homo sapien
aaccctctgtcaaaaggcctacctggacgttcc

SEQ ID NO: 722825 - DNA, 33 bp, Homo sapien
aaggctattccccccaacatacatgggcataca

SEQ ID NO: 722826 - DNA, 33 bp, Homo sapien
aaggctattccccccagcatacatgggcataca

SEQ ID NO: 722827 - DNA, 33 bp, Homo sapien
ttagatgtttaaggcagtcttttctgcagaact

SEQ ID NO: 722828 - DNA, 33 bp, Homo sapien
ttagatgtttaaggcattcttttctgcagaact

SEQ ID NO: 722829 - DNA, 33 bp, Homo sapien
tcaaccagcttgcaaaattgtcattgcactggt

SEQ ID NO: 722830 - DNA, 33 bp, Homo sapien
tcaaccagcttgcaaatttgtcattgcactggt

SEQ ID NO: 722831 - DNA, 33 bp, Homo sapien
caagaacacaatggataactccttgatttgaat

SEQ ID NO: 722832 - DNA, 33 bp, Homo sapien
caagaacacaatggatgactccttgatttgaat

SEQ ID NO: 722833 - DNA, 33 bp, Homo sapien
caaagcaccagaattcaaatgctccttctcatc

SEQ ID NO: 722834 - DNA, 33 bp, Homo sapien
caaagcaccagaattcgaatgctccttctcatc

SEQ ID NO: 722835 - DNA, 33 bp, Homo sapien
agatcacaaatggtagcaagcagaagctttcac

SEQ ID NO: 722836 - DNA, 33 bp, Homo sapien
agatcacaaatggtaggaagcagaagctttcac

SEQ ID NO: 722837 - DNA, 33 bp, Homo sapien
ccctgcacaattgttaccatcttcttattttaa

SEQ ID NO: 722838 - DNA, 33 bp, Homo sapien
ccctgcacaattgttagcatcttcttattttaa

SEQ ID NO: 722839 - DNA, 33 bp, Homo sapien
gggtatttctctgctacgttttatttgtgaaaa

SEQ ID NO: 722840 - DNA, 33 bp, Homo sapien
gggtatttctctgctatgttttatttgtgaaaa

SEQ ID NO: 722841 - DNA, 33 bp, Homo sapien
tgaaaacagatgtaaacaactatatttcaacta

SEQ ID NO: 722842 - DNA, 33 bp, Homo sapien
tgaaaacagatgtaaagaactatatttcaacta

SEQ ID NO: 722843 - DNA, 33 bp, Homo sapien
gttcttcaatgccccgaaatgtgtttaatctcc

SEQ ID NO: 722844 - DNA, 33 bp, Homo sapien
gttcttcaatgccccgcaatgtgtttaatctcc

SEQ ID NO: 722845 - DNA, 33 bp, Homo sapien
ccttcaagcccttctaaggaaagtgctcatttc

SEQ ID NO: 722846 - DNA, 33 bp, Homo sapien
ccttcaagcccttctatggaaagtgctcatttc

SEQ ID NO: 722847 - DNA, 33 bp, Homo sapien
gacgtctgaccatttacctacttggaaaaagac

SEQ ID NO: 722848 - DNA, 33 bp, Homo sapien
gacgtctgaccatttatctacttggaaaaagac

SEQ ID NO: 722849 - DNA, 33 bp, Homo sapien
taatgaaattctaacacggtaataatcacatag

SEQ ID NO: 722850 - DNA, 33 bp, Homo sapien
taatgaaattctaacatggtaataatcacatag

SEQ ID NO: 722851 - DNA, 33 bp, Homo sapien
ataagcgggtacttctaaaagtgaatcgaagcc

SEQ ID NO: 722852 - DNA, 33 bp, Homo sapien
ataagcgggtacttctgaaagtgaatcgaagcc

SEQ ID NO: 722853 - DNA, 33 bp, Homo sapien
aataaggcaacaagaaatcctggccccaattta

SEQ ID NO: 722854 - DNA, 33 bp, Homo sapien
aataaggcaacaagaagtcctggccccaattta

SEQ ID NO: 722855 - DNA, 33 bp, Homo sapien
tccatcctctctgctgaactggctgtgaggtca

SEQ ID NO: 722856 - DNA, 33 bp, Homo sapien
tccatcctctctgctggactggctgtgaggtca

SEQ ID NO: 722857 - DNA, 33 bp, Homo sapien
cttaaaatttcaggtccctccttccttacctga

SEQ ID NO: 722858 - DNA, 33 bp, Homo sapien
cttaaaatttcaggtctctccttccttacctga

SEQ ID NO: 722859 - DNA, 33 bp, Homo sapien
aatatatattatagtacgccagatggtgataag

SEQ ID NO: 722860 - DNA, 33 bp, Homo sapien
aatatatattatagtatgccagatggtgataag

SEQ ID NO: 722861 - DNA, 33 bp, Homo sapien
ctttcatgtcagaagacgaccttcttgccctca

SEQ ID NO: 722862 - DNA, 33 bp, Homo sapien
ctttcatgtcagaagatgaccttcttgccctca

SEQ ID NO: 722863 - DNA, 33 bp, Homo sapien
aatgcatgagtaaagaataagtgtgccatagtt

SEQ ID NO: 722864 - DNA, 33 bp, Homo sapien
aatgcatgagtaaagagtaagtgtgccatagtt

SEQ ID NO: 722865 - DNA, 33 bp, Homo sapien
acatgctgtgtttctccagacaggtatcacact

SEQ ID NO: 722866 - DNA, 33 bp, Homo sapien
acatgctgtgtttctctagacaggtatcacact

SEQ ID NO: 722867 - DNA, 33 bp, Homo sapien
ttgggtggtatctaaaagggcatataagcctcc

SEQ ID NO: 722868 - DNA, 33 bp, Homo sapien
ttgggtggtatctaaaggggcatataagcctcc

SEQ ID NO: 722869 - DNA, 33 bp, Homo sapien
gcttacataactgagacaggtcaaaaagttaaa

SEQ ID NO: 722870 - DNA, 33 bp, Homo sapien
gcttacataactgagataggtcaaaaagttaaa

SEQ ID NO: 722871 - DNA, 33 bp, Homo sapien
gtgaagtgactggaaacgataatcacatatgac

SEQ ID NO: 722872 - DNA, 33 bp, Homo sapien
gtgaagtgactggaaatgataatcacatatgac

SEQ ID NO: 722873 - DNA, 33 bp, Homo sapien
gccatggtacagtatacagtctaaaaagggaag

SEQ ID NO: 722874 - DNA, 33 bp, Homo sapien
gccatggtacagtatagagtctaaaaagggaag

SEQ ID NO: 722875 - DNA, 33 bp, Homo sapien
cacttcccagcaagggacattcacttttccaca

SEQ ID NO: 722876 - DNA, 33 bp, Homo sapien
cacttcccagcaagggccattcacttttccaca

SEQ ID NO: 722877 - DNA, 33 bp, Homo sapien
caaggataccaactaaagtgtgatttccaagct

SEQ ID NO: 722878 - DNA, 33 bp, Homo sapien
caaggataccaactaaggtgtgatttccaagct

SEQ ID NO: 722879 - DNA, 33 bp, Homo sapien
aaatcggcaggttatcaattccctttgtttcct

SEQ ID NO: 722880 - DNA, 33 bp, Homo sapien
aaatcggcaggttatcgattccctttgtttcct

SEQ ID NO: 722881 - DNA, 33 bp, Homo sapien
gctgcagttttcagaacgtcacacaacccaact

SEQ ID NO: 722882 - DNA, 33 bp, Homo sapien
gctgcagttttcagaatgtcacacaacccaact

SEQ ID NO: 722883 - DNA, 33 bp, Homo sapien
ctgagctgcaaacatcaactctactgaaataat

SEQ ID NO: 722884 - DNA, 33 bp, Homo sapien
ctgagctgcaaacatcgactctactgaaataat

SEQ ID NO: 722885 - DNA, 33 bp, Homo sapien
cagtatgaaagccccaatcaaaatgttgccata

SEQ ID NO: 722886 - DNA, 33 bp, Homo sapien
cagtatgaaagccccagtcaaaatgttgccata

SEQ ID NO: 722887 - DNA, 33 bp, Homo sapien
acaaagacaaaacaacggtgtagtatgcctaag

SEQ ID NO: 722888 - DNA, 33 bp, Homo sapien
acaaagacaaaacaactgtgtagtatgcctaag

SEQ ID NO: 722889 - DNA, 33 bp, Homo sapien
tatgcccaggactttacgtctttcctcaacata

SEQ ID NO: 722890 - DNA, 33 bp, Homo sapien
tatgcccaggactttatgtctttcctcaacata

SEQ ID NO: 722891 - DNA, 33 bp, Homo sapien
taagcctgtccttttgaaaagtttgcctttgag

SEQ ID NO: 722892 - DNA, 33 bp, Homo sapien
taagcctgtccttttggaaagtttgcctttgag

SEQ ID NO: 722893 - DNA, 33 bp, Homo sapien
gaaggtcaatacagaacctaatgggaagggcgg

SEQ ID NO: 722894 - DNA, 33 bp, Homo sapien
gaaggtcaatacagaatctaatgggaagggcgg

SEQ ID NO: 722895 - DNA, 33 bp, Homo sapien
gttcaacaaatacttacaaggcttaccggcatt

SEQ ID NO: 722896 - DNA, 33 bp, Homo sapien
gttcaacaaatacttataaggcttaccggcatt

SEQ ID NO: 722897 - DNA, 33 bp, Homo sapien
tcatagtgactcctgaaggtaagaagtgtttta

SEQ ID NO: 722898 - DNA, 33 bp, Homo sapien
tcatagtgactcctgagggtaagaagtgtttta

SEQ ID NO: 722899 - DNA, 33 bp, Homo sapien
atgttcacttgactgacagatacaatcacctat

SEQ ID NO: 722900 - DNA, 33 bp, Homo sapien
atgttcacttgactgagagatacaatcacctat

SEQ ID NO: 722901 - DNA, 33 bp, Homo sapien
gaagtcttctgacacacccaagcatctatccca

SEQ ID NO: 722902 - DNA, 33 bp, Homo sapien
gaagtcttctgacacatccaagcatctatccca

SEQ ID NO: 722903 - DNA, 33 bp, Homo sapien
ccaaacatactatacaaccctattctgctttat

SEQ ID NO: 722904 - DNA, 33 bp, Homo sapien
ccaaacatactatacagccctattctgctttat

SEQ ID NO: 722905 - DNA, 33 bp, Homo sapien
aaaaaacacaaacgcccatgtaatggattatat

SEQ ID NO: 722906 - DNA, 33 bp, Homo sapien
aaaaaacacaaacgcctatgtaatggattatat

SEQ ID NO: 722907 - DNA, 33 bp, Homo sapien
gaaaatttaaccccaactctatactgatggcac

SEQ ID NO: 722908 - DNA, 33 bp, Homo sapien
gaaaatttaaccccaagtctatactgatggcac

SEQ ID NO: 722909 - DNA, 33 bp, Homo sapien
actgcagtccaggggcaaaatgaatgtgccttg

SEQ ID NO: 722910 - DNA, 33 bp, Homo sapien
actgcagtccaggggcgaaatgaatgtgccttg

SEQ ID NO: 722911 - DNA, 33 bp, Homo sapien
acagggtttcagtatcgctccactggcaaaaat

SEQ ID NO: 722912 - DNA, 33 bp, Homo sapien
acagggtttcagtatctctccactggcaaaaat

SEQ ID NO: 722913 - DNA, 33 bp, Homo sapien
attcttttccagaggccgccactgttattttgc

SEQ ID NO: 722914 - DNA, 33 bp, Homo sapien
attcttttccagaggctgccactgttattttgc

SEQ ID NO: 722915 - DNA, 33 bp, Homo sapien
ttcagatcacttaagcaaagataaattcctgaa

SEQ ID NO: 722916 - DNA, 33 bp, Homo sapien
ttcagatcacttaagccaagataaattcctgaa

SEQ ID NO: 722917 - DNA, 33 bp, Homo sapien
taatttggaataatgacagaaaacatacaagct

SEQ ID NO: 722918 - DNA, 33 bp, Homo sapien
taatttggaataatgatagaaaacatacaagct

SEQ ID NO: 722919 - DNA, 33 bp, Homo sapien
ttactctttcagcctacggcaagctaaggacct

SEQ ID NO: 722920 - DNA, 33 bp, Homo sapien
ttactctttcagcctatggcaagctaaggacct

SEQ ID NO: 722921 - DNA, 33 bp, Homo sapien
agaaaaaaaaatgggactactggagataaaata

SEQ ID NO: 722922 - DNA, 33 bp, Homo sapien
agaaaaaaaaatgggattactggagataaaata

SEQ ID NO: 722923 - DNA, 33 bp, Homo sapien
agttaccagaagaggaaaggcaaaaacaacaaa

SEQ ID NO: 722924 - DNA, 33 bp, Homo sapien
agttaccagaagaggagaggcaaaaacaacaaa

SEQ ID NO: 722925 - DNA, 33 bp, Homo sapien
caggaggagaggtctacaaaatctcatgtgaag

SEQ ID NO: 722926 - DNA, 33 bp, Homo sapien
caggaggagaggtctagaaaatctcatgtgaag

SEQ ID NO: 722927 - DNA, 33 bp, Homo sapien
caggcacctgccaccacattggactaattttta

SEQ ID NO: 722928 - DNA, 33 bp, Homo sapien
caggcacctgccaccatattggactaattttta

SEQ ID NO: 722929 - DNA, 33 bp, Homo sapien
gctgctcatctgggaagtctttttaattgtggt

SEQ ID NO: 722930 - DNA, 33 bp, Homo sapien
gctgctcatctgggaattctttttaattgtggt

SEQ ID NO: 722931 - DNA, 33 bp, Homo sapien
tgttatatttccttaactgtagttttgtttttt

SEQ ID NO: 722932 - DNA, 33 bp, Homo sapien
tgttatatttccttaattgtagttttgtttttt

SEQ ID NO: 722933 - DNA, 33 bp, Homo sapien
acacagagtctattgggaaacaacctagagaaa

SEQ ID NO: 722934 - DNA, 33 bp, Homo sapien
acacagagtctattggtaaacaacctagagaaa

SEQ ID NO: 722935 - DNA, 33 bp, Homo sapien
ctgaaagacaggacgaaaggatgagtggcctat

SEQ ID NO: 722936 - DNA, 33 bp, Homo sapien
ctgaaagacaggacgagaggatgagtggcctat

SEQ ID NO: 722937 - DNA, 33 bp, Homo sapien
ctgaaacacagtagtcactatgatcagaggagt

SEQ ID NO: 722938 - DNA, 33 bp, Homo sapien
ctgaaacacagtagtccctatgatcagaggagt

SEQ ID NO: 722939 - DNA, 33 bp, Homo sapien
tttttctttccttagaggctctcagtcagtgtt

SEQ ID NO: 722940 - DNA, 33 bp, Homo sapien
tttttctttccttagatgctctcagtcagtgtt

SEQ ID NO: 722941 - DNA, 33 bp, Homo sapien
atagaacatgagaacacgaaacctgacagcaga

SEQ ID NO: 722942 - DNA, 33 bp, Homo sapien
atagaacatgagaacatgaaacctgacagcaga

SEQ ID NO: 722943 - DNA, 33 bp, Homo sapien
tgctcttatagctgccaccttccatgctgaaga

SEQ ID NO: 722944 - DNA, 33 bp, Homo sapien
tgctcttatagctgccgccttccatgctgaaga

SEQ ID NO: 722945 - DNA, 33 bp, Homo sapien
tacttctcaacaatacactctgcagtcccttct

SEQ ID NO: 722946 - DNA, 33 bp, Homo sapien
tacttctcaacaatacgctctgcagtcccttct

SEQ ID NO: 722947 - DNA, 33 bp, Homo sapien
aaaaaaatacaaagagccatttgaaaaattagt

SEQ ID NO: 722948 - DNA, 33 bp, Homo sapien
aaaaaaatacaaagagtcatttgaaaaattagt

SEQ ID NO: 722949 - DNA, 33 bp, Homo sapien
catttcaatctatgaacattgtatgtctctcca

SEQ ID NO: 722950 - DNA, 33 bp, Homo sapien
catttcaatctatgaatattgtatgtctctcca

SEQ ID NO: 722951 - DNA, 33 bp, Homo sapien
agtaaggcatttgaacagcaatgttgagcaagg

SEQ ID NO: 722952 - DNA, 33 bp, Homo sapien
agtaaggcatttgaacggcaatgttgagcaagg

SEQ ID NO: 722953 - DNA, 33 bp, Homo sapien
aaaagataaccaataaagagggcaacaatgact

SEQ ID NO: 722954 - DNA, 33 bp, Homo sapien
aaaagataaccaataaggagggcaacaatgact

SEQ ID NO: 722955 - DNA, 33 bp, Homo sapien
gagaagtctattttaaatcataccataaactta

SEQ ID NO: 722956 - DNA, 33 bp, Homo sapien
gagaagtctattttaagtcataccataaactta

SEQ ID NO: 722957 - DNA, 33 bp, Homo sapien
atggccttgtagatgagcctgaggccaggcagg

SEQ ID NO: 722958 - DNA, 33 bp, Homo sapien
atggccttgtagatgatcctgaggccaggcagg

SEQ ID NO: 722959 - DNA, 33 bp, Homo sapien
ctatatatttccagtcaaattgctggcagtcga

SEQ ID NO: 722960 - DNA, 33 bp, Homo sapien
ctatatatttccagtccaattgctggcagtcga

SEQ ID NO: 722961 - DNA, 33 bp, Homo sapien
gagcatgataaattagaccgtgatctttattca

SEQ ID NO: 722962 - DNA, 33 bp, Homo sapien
gagcatgataaattagcccgtgatctttattca

SEQ ID NO: 722963 - DNA, 33 bp, Homo sapien
aaagtcctctagctgacaaaagtatttttagtc

SEQ ID NO: 722964 - DNA, 33 bp, Homo sapien
aaagtcctctagctgataaaagtatttttagtc

SEQ ID NO: 722965 - DNA, 33 bp, Homo sapien
gtttagttttacaaaaatgccagatgttgtatg

SEQ ID NO: 722966 - DNA, 33 bp, Homo sapien
gtttagttttacaaaagtgccagatgttgtatg

SEQ ID NO: 722967 - DNA, 33 bp, Homo sapien
ttcaaaatatgtagtcaaaatgtcaagactagt

SEQ ID NO: 722968 - DNA, 33 bp, Homo sapien
ttcaaaatatgtagtcgaaatgtcaagactagt

SEQ ID NO: 722969 - DNA, 33 bp, Homo sapien
atgacatttctatgcactagacagaattactca

SEQ ID NO: 722970 - DNA, 33 bp, Homo sapien
atgacatttctatgcattagacagaattactca

SEQ ID NO: 722971 - DNA, 33 bp, Homo sapien
ataaggaactacttgaagccaggcgcagtggct

SEQ ID NO: 722972 - DNA, 33 bp, Homo sapien
ataaggaactacttgaggccaggcgcagtggct

SEQ ID NO: 722973 - DNA, 33 bp, Homo sapien
atgacatttaggaaaacaatgttgccagagcat

SEQ ID NO: 722974 - DNA, 33 bp, Homo sapien
atgacatttaggaaaataatgttgccagagcat

SEQ ID NO: 722975 - DNA, 33 bp, Homo sapien
atttgatttctcctcaaaagtaagccaggaaat

SEQ ID NO: 722976 - DNA, 33 bp, Homo sapien
atttgatttctcctcagaagtaagccaggaaat

SEQ ID NO: 722977 - DNA, 33 bp, Homo sapien
agagactgctaacacaaccattactgaatattc

SEQ ID NO: 722978 - DNA, 33 bp, Homo sapien
agagactgctaacacagccattactgaatattc

SEQ ID NO: 722979 - DNA, 33 bp, Homo sapien
ttggtggatggaattacggcaagtcaagagaac

SEQ ID NO: 722980 - DNA, 33 bp, Homo sapien
ttggtggatggaattagggcaagtcaagagaac

SEQ ID NO: 722981 - DNA, 33 bp, Homo sapien
agagaacatgctgttaagtctactcagtaaaca

SEQ ID NO: 722982 - DNA, 33 bp, Homo sapien
agagaacatgctgttaggtctactcagtaaaca

SEQ ID NO: 722983 - DNA, 33 bp, Homo sapien
tcttactggcattagaagatattttgtaatgag

SEQ ID NO: 722984 - DNA, 33 bp, Homo sapien
tcttactggcattagaggatattttgtaatgag

SEQ ID NO: 722985 - DNA, 33 bp, Homo sapien
tgagattattgagtcacgaactacttttcttga

SEQ ID NO: 722986 - DNA, 33 bp, Homo sapien
tgagattattgagtcatgaactacttttcttga

SEQ ID NO: 722987 - DNA, 33 bp, Homo sapien
tccttcacaaatcctacaatgcaggtattatca

SEQ ID NO: 722988 - DNA, 33 bp, Homo sapien
tccttcacaaatcctataatgcaggtattatca

SEQ ID NO: 722989 - DNA, 33 bp, Homo sapien
tttctgacaaatgacccgccaataatgtttggg

SEQ ID NO: 722990 - DNA, 33 bp, Homo sapien
tttctgacaaatgacctgccaataatgtttggg

SEQ ID NO: 722991 - DNA, 33 bp, Homo sapien
ctgaaacaaaacaaggaacctcattcattccag

SEQ ID NO: 722992 - DNA, 33 bp, Homo sapien
ctgaaacaaaacaaggtacctcattcattccag

SEQ ID NO: 722993 - DNA, 33 bp, Homo sapien
atagcacagataacaacacaagcttacaacttt

SEQ ID NO: 722994 - DNA, 33 bp, Homo sapien
atagcacagataacaatacaagcttacaacttt

SEQ ID NO: 722995 - DNA, 33 bp, Homo sapien
ttagctgcccataaaaatgctgataatgaaact

SEQ ID NO: 722996 - DNA, 33 bp, Homo sapien
ttagctgcccataaaattgctgataatgaaact

SEQ ID NO: 722997 - DNA, 33 bp, Homo sapien
acattttacttgattacggtgtgaagattttct

SEQ ID NO: 722998 - DNA, 33 bp, Homo sapien
acattttacttgattatggtgtgaagattttct

SEQ ID NO: 722999 - DNA, 33 bp, Homo sapien
cctcactctccttgatgatacttctacacaatg

SEQ ID NO: 723000 - DNA, 33 bp, Homo sapien
cctcactctccttgattatacttctacacaatg

SEQ ID NO: 723001 - DNA, 33 bp, Homo sapien
atgtgtgacatagaaacacaaaactattggagg

SEQ ID NO: 723002 - DNA, 33 bp, Homo sapien
atgtgtgacatagaaatacaaaactattggagg

SEQ ID NO: 723003 - DNA, 33 bp, Homo sapien
agatggagaacccagaaggaagtgtttgattga

SEQ ID NO: 723004 - DNA, 33 bp, Homo sapien
agatggagaacccagagggaagtgtttgattga

SEQ ID NO: 723005 - DNA, 33 bp, Homo sapien
ttccatttccccagataacaggttacagaaggt

SEQ ID NO: 723006 - DNA, 33 bp, Homo sapien
ttccatttccccagatgacaggttacagaaggt

SEQ ID NO: 723007 - DNA, 33 bp, Homo sapien
acaccagaagagaaataaactctaacaggccaa

SEQ ID NO: 723008 - DNA, 33 bp, Homo sapien
acaccagaagagaaattaactctaacaggccaa

SEQ ID NO: 723009 - DNA, 33 bp, Homo sapien
ctgtgaacatagaaaggagtagtataatgtcat

SEQ ID NO: 723010 - DNA, 33 bp, Homo sapien
ctgtgaacatagaaagtagtagtataatgtcat

SEQ ID NO: 723011 - DNA, 33 bp, Homo sapien
acaaaaagaatctcaactgatatgccctctgca

SEQ ID NO: 723012 - DNA, 33 bp, Homo sapien
acaaaaagaatctcaattgatatgccctctgca

SEQ ID NO: 723013 - DNA, 33 bp, Homo sapien
ccaccaagactgcttacccctgggagaaataat

SEQ ID NO: 723014 - DNA, 33 bp, Homo sapien
ccaccaagactgcttatccctgggagaaataat

SEQ ID NO: 723015 - DNA, 33 bp, Homo sapien
atatttcagactgaacagaaaattggtaatcaa

SEQ ID NO: 723016 - DNA, 33 bp, Homo sapien
atatttcagactgaacggaaaattggtaatcaa

SEQ ID NO: 723017 - DNA, 33 bp, Homo sapien; identical to SEQ ID NO: 723015

SEQ ID NO: 723018 - DNA, 33 bp, Homo sapien; identical to SEQ ID NO: 723016

SEQ ID NO: 723019 - DNA, 33 bp, Homo sapien
agcatcattgatagaccggtccacttgattacc

SEQ ID NO: 723020 - DNA, 33 bp, Homo sapien
agcatcattgatagactggtccacttgattacc

SEQ ID NO: 723021 - DNA, 33 bp, Homo sapien
ggagaatttccataccccatccagagtctcaca

SEQ ID NO: 723022 - DNA, 33 bp, Homo sapien
ggagaatttccatacctcatccagagtctcaca

SEQ ID NO: 723023 - DNA, 33 bp, Homo sapien
ccttagtacgtaatgaaattctgatctccagct

SEQ ID NO: 723024 - DNA, 33 bp, Homo sapien
ccttagtacgtaatgatattctgatctccagct

SEQ ID NO: 723025 - DNA, 33 bp, Homo sapien; identical to SEQ ID NO: 723023

SEQ ID NO: 723026 - DNA, 33 bp, Homo sapien; identical to SEQ ID NO: 723024

SEQ ID NO: 723027 - DNA, 33 bp, Homo sapien
cgactaaattgcatagactatcattttattgtg

SEQ ID NO: 723028 - DNA, 33 bp, Homo sapien
cgactaaattgcataggctatcattttattgtg

SEQ ID NO: 723029 - DNA, 33 bp, Homo sapien
ccattcatccaagaaacattaattgagtccctt

SEQ ID NO: 723030 - DNA, 33 bp, Homo sapien
ccattcatccaagaaatattaattgagtccctt

SEQ ID NO: 723031 - DNA, 33 bp, Homo sapien
tagttttagaattcaacgggttctctttcacag

SEQ ID NO: 723032 - DNA, 33 bp, Homo sapien
tagttttagaattcaatgggttctctttcacag

SEQ ID NO: 723033 - DNA, 33 bp, Homo sapien; identical to SEQ ID NO: 723031

SEQ ID NO: 723034 - DNA, 33 bp, Homo sapien; identical to SEQ ID NO: 723032

SEQ ID NO: 723035 - DNA, 33 bp, Homo sapien
ttatagggatgagacaaaataacagagagaagt

SEQ ID NO: 723036 - DNA, 33 bp, Homo sapien
ttatagggatgagacacaataacagagagaagt

SEQ ID NO: 723037 - DNA, 33 bp, Homo sapien; identical to SEQ ID NO: 723035

SEQ ID NO: 723038 - DNA, 33 bp, Homo sapien; identical to SEQ ID NO: 723036

SEQ ID NO: 723039 - DNA, 33 bp, Homo sapien
ttcttaggccatcaaaactaacactactaggtt

SEQ ID NO: 723040 - DNA, 33 bp, Homo sapien
ttcttaggccatcaaagctaacactactaggtt

SEQ ID NO: 723041 - DNA, 33 bp, Homo sapien
aatacataaatcaaagactatggcacaaaacct

SEQ ID NO: 723042 - DNA, 33 bp, Homo sapien
aatacataaatcaaagtctatggcacaaaacct

SEQ ID NO: 723043 - DNA, 33 bp, Homo sapien
ctaactttccacctaccactggaagaatattta

SEQ ID NO: 723044 - DNA, 33 bp, Homo sapien
ctaactttccacctactactggaagaatattta

SEQ ID NO: 723045 - DNA, 33 bp, Homo sapien
atcaatactgaggtagccaggatgagaaagaga

SEQ ID NO: 723046 - DNA, 33 bp, Homo sapien
atcaatactgaggtagtcaggatgagaaagaga

SEQ ID NO: 723047 - DNA, 33 bp, Homo sapien
ttacactatggtgtccacattgccagtaagaac

SEQ ID NO: 723048 - DNA, 33 bp, Homo sapien
ttacactatggtgtcctcattgccagtaagaac

SEQ ID NO: 723049 - DNA, 33 bp, Homo sapien
attttcctggccttccaatttttcaccagtgaa

SEQ ID NO: 723050 - DNA, 33 bp, Homo sapien
attttcctggccttccgatttttcaccagtgaa

SEQ ID NO: 723051 - DNA, 33 bp, Homo sapien
cgatatggaccacatccaataaaccctcagacc

SEQ ID NO: 723052 - DNA, 33 bp, Homo sapien
cgatatggaccacatcgaataaaccctcagacc

SEQ ID NO: 723053 - DNA, 33 bp, Homo sapien
ggggtctgcttctaggaacaccaaactaagagc

SEQ ID NO: 723054 - DNA, 33 bp, Homo sapien
ggggtctgcttctagggacaccaaactaagagc

SEQ ID NO: 723055 - DNA, 33 bp, Homo sapien
ctataatgagtgagctaaaaaagaaataagtaa

SEQ ID NO: 723056 - DNA, 33 bp, Homo sapien
ctataatgagtgagcttaaaaagaaataagtaa

SEQ ID NO: 723057 - DNA, 33 bp, Homo sapien
gcaataagaggcagggacactggaagacctgat

SEQ ID NO: 723058 - DNA, 33 bp, Homo sapien
gcaataagaggcaggggcactggaagacctgat

SEQ ID NO: 723059 - DNA, 33 bp, Homo sapien
tggcatgggagagtgacagtacatcgtaggcaa

SEQ ID NO: 723060 - DNA, 33 bp, Homo sapien
tggcatgggagagtgatagtacatcgtaggcaa

SEQ ID NO: 723061 - DNA, 33 bp, Homo sapien
cttagccacaaagtcccaaagatacttcagaaa

SEQ ID NO: 723062 - DNA, 33 bp, Homo sapien
cttagccacaaagtcctaaagatacttcagaaa

SEQ ID NO: 723063 - DNA, 33 bp, Homo sapien
ccagtacttgagggacaaatattaccatcttaa

SEQ ID NO: 723064 - DNA, 33 bp, Homo sapien
ccagtacttgagggaccaatattaccatcttaa

SEQ ID NO: 723065 - DNA, 33 bp, Homo sapien
gggaaagggaaaatgaaagacccacagcactac

SEQ ID NO: 723066 - DNA, 33 bp, Homo sapien
gggaaagggaaaatgagagacccacagcactac

SEQ ID NO: 723067 - DNA, 33 bp, Homo sapien
tgtaacacttatcatacgtcattaccactatcc

SEQ ID NO: 723068 - DNA, 33 bp, Homo sapien
tgtaacacttatcatatgtcattaccactatcc

SEQ ID NO: 723069 - DNA, 33 bp, Homo sapien
tcaaatgggaaagcagcctcatggccattttgt

SEQ ID NO: 723070 - DNA, 33 bp, Homo sapien
tcaaatgggaaagcagtctcatggccattttgt

SEQ ID NO: 723071 - DNA, 33 bp, Homo sapien
tcccttgctcgcaagcaaaaaatcctaatcgct

SEQ ID NO: 723072 - DNA, 33 bp, Homo sapien
tcccttgctcgcaagcgaaaaatcctaatcgct

SEQ ID NO: 723073 - DNA, 33 bp, Homo sapien
tttcacgttttcaaccacaacgcagcgagccaa

SEQ ID NO: 723074 - DNA, 33 bp, Homo sapien
tttcacgttttcaaccgcaacgcagcgagccaa

SEQ ID NO: 723075 - DNA, 33 bp, Homo sapien
agctgtcgatgagctaagttgcagatttgtaag

SEQ ID NO: 723076 - DNA, 33 bp, Homo sapien
agctgtcgatgagctacgttgcagatttgtaag

SEQ ID NO: 723077 - DNA, 33 bp, Homo sapien
aaagttttattccagcaattatgaatccttcat

SEQ ID NO: 723078 - DNA, 33 bp, Homo sapien
aaagttttattccagcgattatgaatccttcat

SEQ ID NO: 723079 - DNA, 33 bp, Homo sapien
ttaaaacagaggggataagtagatttacaagat

SEQ ID NO: 723080 - DNA, 33 bp, Homo sapien
ttaaaacagaggggatgagtagatttacaagat

SEQ ID NO: 723081 - DNA, 33 bp, Homo sapien
ttttttattgcactgcagactcagatataagca

SEQ ID NO: 723082 - DNA, 33 bp, Homo sapien
ttttttattgcactgcggactcagatataagca

SEQ ID NO: 723083 - DNA, 33 bp, Homo sapien
ctttccgtatcactaacagaataaattcctaat

SEQ ID NO: 723084 - DNA, 33 bp, Homo sapien
ctttccgtatcactaagagaataaattcctaat

SEQ ID NO: 723085 - DNA, 33 bp, Homo sapien
atcagagctaaaatcacagagttacaaaataaa

SEQ ID NO: 723086 - DNA, 33 bp, Homo sapien
atcagagctaaaatcatagagttacaaaataaa

SEQ ID NO: 723087 - DNA, 33 bp, Homo sapien
ttttataagctcatcaaggttaggtagcatgtt

SEQ ID NO: 723088 - DNA, 33 bp, Homo sapien
ttttataagctcatcagggttaggtagcatgtt

SEQ ID NO: 723089 - DNA, 33 bp, Homo sapien
acatttttgactaataccgatcttttcaccaac

SEQ ID NO: 723090 - DNA, 33 bp, Homo sapien
acatttttgactaatatcgatcttttcaccaac

SEQ ID NO: 723091 - DNA, 33 bp, Homo sapien
acatggcttgatgtaacagtatagaatctagac

SEQ ID NO: 723092 - DNA, 33 bp, Homo sapien
acatggcttgatgtaatagtatagaatctagac

SEQ ID NO: 723093 - DNA, 33 bp, Homo sapien
gtcatttcagtaaaataagtgaccgtgtcatgt

SEQ ID NO: 723094 - DNA, 33 bp, Homo sapien
gtcatttcagtaaaatgagtgaccgtgtcatgt

SEQ ID NO: 723095 - DNA, 33 bp, Homo sapien
tgaatttgcatttttaagtgaagtttgatggga

SEQ ID NO: 723096 - DNA, 33 bp, Homo sapien
tgaatttgcatttttaggtgaagtttgatggga

SEQ ID NO: 723097 - DNA, 33 bp, Homo sapien
tgactgcattgattacactcccatgaagccagc

SEQ ID NO: 723098 - DNA, 33 bp, Homo sapien
tgactgcattgattacgctcccatgaagccagc

SEQ ID NO: 723099 - DNA, 33 bp, Homo sapien
tgcttagcaccatgaccgtcactttgtataatc

SEQ ID NO: 723100 - DNA, 33 bp, Homo sapien
tgcttagcaccatgactgtcactttgtataatc

SEQ ID NO: 723101 - DNA, 33 bp, Homo sapien
agctaagaagtaccacaaacactccaagtagct

SEQ ID NO: 723102 - DNA, 33 bp, Homo sapien
agctaagaagtaccaccaacactccaagtagct

SEQ ID NO: 723103 - DNA, 33 bp, Homo sapien
ttatttctgattccgaaatctaagccatacact

SEQ ID NO: 723104 - DNA, 33 bp, Homo sapien
ttatttctgattccgagatctaagccatacact

SEQ ID NO: 723105 - DNA, 33 bp, Homo sapien
attacctcactggaaagttgctatgccactgtc

SEQ ID NO: 723106 - DNA, 33 bp, Homo sapien
attacctcactggaaatttgctatgccactgtc

SEQ ID NO: 723107 - DNA, 33 bp, Homo sapien
gggttttgattttgatcagagaaaattagaaca

SEQ ID NO: 723108 - DNA, 33 bp, Homo sapien
gggttttgattttgattagagaaaattagaaca

SEQ ID NO: 723109 - DNA, 33 bp, Homo sapien
agcctcagagctgaaacggctgttatgcaccac

SEQ ID NO: 723110 - DNA, 33 bp, Homo sapien
agcctcagagctgaaatggctgttatgcaccac

SEQ ID NO: 723111 - DNA, 33 bp, Homo sapien
taaaactttatggctaatcatttgtctccagct

SEQ ID NO: 723112 - DNA, 33 bp, Homo sapien
taaaactttatggctagtcatttgtctccagct

SEQ ID NO: 723113 - DNA, 33 bp, Homo sapien
ttccaaaagaacactaccttccatgccacagta

SEQ ID NO: 723114 - DNA, 33 bp, Homo sapien
ttccaaaagaacactagcttccatgccacagta

SEQ ID NO: 723115 - DNA, 33 bp, Homo sapien
tattctgaggatgataaaatggcctaaattaat

SEQ ID NO: 723116 - DNA, 33 bp, Homo sapien
tattctgaggatgatacaatggcctaaattaat

SEQ ID NO: 723117 - DNA, 33 bp, Homo sapien
ttatttctttttcacactagagttccaacatga

SEQ ID NO: 723118 - DNA, 33 bp, Homo sapien
ttatttctttttcacattagagttccaacatga

SEQ ID NO: 723119 - DNA, 33 bp, Homo sapien
aaatgtacataaagaaaatggtttccctgtcat

SEQ ID NO: 723120 - DNA, 33 bp, Homo sapien
aaatgtacataaagaacatggtttccctgtcat

SEQ ID NO: 723121 - DNA, 33 bp, Homo sapien
cagttagagtacctacaattctcagcctctctc

SEQ ID NO: 723122 - DNA, 33 bp, Homo sapien
cagttagagtacctaccattctcagcctctctc

SEQ ID NO: 723123 - DNA, 33 bp, Homo sapien
gatattgcaagacatacactgtaaatgtgggac

SEQ ID NO: 723124 - DNA, 33 bp, Homo sapien
gatattgcaagacatatactgtaaatgtgggac

SEQ ID NO: 723125 - DNA, 33 bp, Homo sapien
aatagacccttctatcacattacttggaactaa

SEQ ID NO: 723126 - DNA, 33 bp, Homo sapien
aatagacccttctatcgcattacttggaactaa

SEQ ID NO: 723127 - DNA, 33 bp, Homo sapien
agctgaaactacaaacactactgtcaatcaaac

SEQ ID NO: 723128 - DNA, 33 bp, Homo sapien
agctgaaactacaaacgctactgtcaatcaaac

SEQ ID NO: 723129 - DNA, 33 bp, Homo sapien
aaatatttcttctagacggttaggttcaaagtt

SEQ ID NO: 723130 - DNA, 33 bp, Homo sapien
aaatatttcttctagatggttaggttcaaagtt

SEQ ID NO: 723131 - DNA, 33 bp, Homo sapien
aaccaccagaatgaataaagtcaatcaggaaaa

SEQ ID NO: 723132 - DNA, 33 bp, Homo sapien
aaccaccagaatgaatgaagtcaatcaggaaaa

SEQ ID NO: 723133 - DNA, 33 bp, Homo sapien
ttggcaaggtttatgaagtatcttggctaagaa

SEQ ID NO: 723134 - DNA, 33 bp, Homo sapien
ttggcaaggtttatgaggtatcttggctaagaa

SEQ ID NO: 723135 - DNA, 33 bp, Homo sapien
ctagtctcagggaataccgtctcttccaaattt

SEQ ID NO: 723136 - DNA, 33 bp, Homo sapien
ctagtctcagggaatatcgtctcttccaaattt

SEQ ID NO: 723137 - DNA, 33 bp, Homo sapien
tctgacatggctggaacatagattgcgtgagag

SEQ ID NO: 723138 - DNA, 33 bp, Homo sapien
tctgacatggctggaatatagattgcgtgagag

SEQ ID NO: 723139 - DNA, 33 bp, Homo sapien
cctaccaccatctccaagtgaataatcccaggc

SEQ ID NO: 723140 - DNA, 33 bp, Homo sapien
cctaccaccatctccacgtgaataatcccaggc

SEQ ID NO: 723141 - DNA, 33 bp, Homo sapien
ctttttatgaattagacgtgtccatttagaaag

SEQ ID NO: 723142 - DNA, 33 bp, Homo sapien
ctttttatgaattagatgtgtccatttagaaag

SEQ ID NO: 723143 - DNA, 33 bp, Homo sapien
agttttccatgtgtaccatgacttttcccaata

SEQ ID NO: 723144 - DNA, 33 bp, Homo sapien
agttttccatgtgtactatgacttttcccaata

SEQ ID NO: 723145 - DNA, 33 bp, Homo sapien
gtcacaagatgtatgaagtttaaagaagtctaa

SEQ ID NO: 723146 - DNA, 33 bp, Homo sapien
gtcacaagatgtatgaggtttaaagaagtctaa

SEQ ID NO: 723147 - DNA, 33 bp, Homo sapien
aaactctgtaacaaagactcacattcttcatct

SEQ ID NO: 723148 - DNA, 33 bp, Homo sapien
aaactctgtaacaaaggctcacattcttcatct

SEQ ID NO: 723149 - DNA, 33 bp, Homo sapien
taacgtcttttgtattcaaagatcacactggag

SEQ ID NO: 723150 - DNA, 33 bp, Homo sapien
taacgtcttttgtattgaaagatcacactggag

SEQ ID NO: 723151 - DNA, 33 bp, Homo sapien
ttgtcattactttccaatccatgtttactctgc

SEQ ID NO: 723152 - DNA, 33 bp, Homo sapien
ttgtcattactttccagtccatgtttactctgc

SEQ ID NO: 723153 - DNA, 33 bp, Homo sapien
aacctctcataaaccacattgttagttcagatg

SEQ ID NO: 723154 - DNA, 33 bp, Homo sapien
aacctctcataaaccatattgttagttcagatg

SEQ ID NO: 723155 - DNA, 33 bp, Homo sapien
tctgctagacttgtgaggcctaatatctaaatg

SEQ ID NO: 723156 - DNA, 33 bp, Homo sapien
tctgctagacttgtgatgcctaatatctaaatg

SEQ ID NO: 723157 - DNA, 33 bp, Homo sapien
aatttttacctttgaacgattgcctgtttaaag

SEQ ID NO: 723158 - DNA, 33 bp, Homo sapien
aatttttacctttgaatgattgcctgtttaaag

SEQ ID NO: 723159 - DNA, 33 bp, Homo sapien
acaaactttgctttcaaacttaacacactttgg

SEQ ID NO: 723160 - DNA, 33 bp, Homo sapien
acaaactttgctttcacacttaacacactttgg

SEQ ID NO: 723161 - DNA, 33 bp, Homo sapien
ccacttctccttttaacgtgccacagatgcatg

SEQ ID NO: 723162 - DNA, 33 bp, Homo sapien
ccacttctccttttaatgtgccacagatgcatg

SEQ ID NO: 723163 - DNA, 33 bp, Homo sapien
ttctattggatagcacagatctagagattcttc

SEQ ID NO: 723164 - DNA, 33 bp, Homo sapien
ttctattggatagcacggatctagagattcttc

SEQ ID NO: 723165 - DNA, 33 bp, Homo sapien
tcacaaatcagtatgaagaaattaactattgcc

SEQ ID NO: 723166 - DNA, 33 bp, Homo sapien
tcacaaatcagtatgaggaaattaactattgcc

SEQ ID NO: 723167 - DNA, 33 bp, Homo sapien
agcttctgtagaggacaatgtttgcaataattt

SEQ ID NO: 723168 - DNA, 33 bp, Homo sapien
agcttctgtagaggacgatgtttgcaataattt

SEQ ID NO: 723169 - DNA, 33 bp, Homo sapien
ttttttcccaaagccaatatggggtagacccag

SEQ ID NO: 723170 - DNA, 33 bp, Homo sapien
ttttttcccaaagccagtatggggtagacccag

SEQ ID NO: 723171 - DNA, 33 bp, Homo sapien
cacaatattttgtaaacctctctttccaattag

SEQ ID NO: 723172 - DNA, 33 bp, Homo sapien
cacaatattttgtaaatctctctttccaattag

SEQ ID NO: 723173 - DNA, 33 bp, Homo sapien
cccaggctttatacctgaattccctcaaatctg

SEQ ID NO: 723174 - DNA, 33 bp, Homo sapien
cccaggctttataccttaattccctcaaatctg

SEQ ID NO: 723175 - DNA, 33 bp, Homo sapien
aatgtagatgcataaaaagcaatacttattata

SEQ ID NO: 723176 - DNA, 33 bp, Homo sapien
aatgtagatgcataaagagcaatacttattata

SEQ ID NO: 723177 - DNA, 33 bp, Homo sapien
aaaactatagctaggaagggcccatgtatcctc

SEQ ID NO: 723178 - DNA, 33 bp, Homo sapien
aaaactatagctaggacgggcccatgtatcctc

SEQ ID NO: 723179 - DNA, 33 bp, Homo sapien
ttagagcatcagtgacagtagttccattgagct

SEQ ID NO: 723180 - DNA, 33 bp, Homo sapien
ttagagcatcagtgacggtagttccattgagct

SEQ ID NO: 723181 - DNA, 33 bp, Homo sapien
ttaaccagtgaacgaacaacttaacatatactc

SEQ ID NO: 723182 - DNA, 33 bp, Homo sapien
ttaaccagtgaacgaataacttaacatatactc

SEQ ID NO: 723183 - DNA, 33 bp, Homo sapien
aaagtcatttggcctcaatatacatccagatac

SEQ ID NO: 723184 - DNA, 33 bp, Homo sapien
aaagtcatttggcctcgatatacatccagatac

SEQ ID NO: 723185 - DNA, 33 bp, Homo sapien
gcatttattgttgaaaatattgatgagttactt

SEQ ID NO: 723186 - DNA, 33 bp, Homo sapien
gcatttattgttgaaagtattgatgagttactt

SEQ ID NO: 723187 - DNA, 33 bp, Homo sapien
gaaaaggataggaagacagcataggaaagacca

SEQ ID NO: 723188 - DNA, 33 bp, Homo sapien
gaaaaggataggaagagagcataggaaagacca

SEQ ID NO: 723189 - DNA, 33 bp, Homo sapien
cagacaagaataagaccgccttttttctataga

SEQ ID NO: 723190 - DNA, 33 bp, Homo sapien
cagacaagaataagactgccttttttctataga

SEQ ID NO: 723191 - DNA, 33 bp, Homo sapien
tttttgaatctagcaaataattgtctcagaaat

SEQ ID NO: 723192 - DNA, 33 bp, Homo sapien
tttttgaatctagcaagtaattgtctcagaaat

SEQ ID NO: 723193 - DNA, 33 bp, Homo sapien
gaaatgcctcaggtaacgataaaaactagggtg

SEQ ID NO: 723194 - DNA, 33 bp, Homo sapien
gaaatgcctcaggtaaggataaaaactagggtg

SEQ ID NO: 723195 - DNA, 33 bp, Homo sapien
aaactagggtgctaccaggaaaacatcatctta

SEQ ID NO: 723196 - DNA, 33 bp, Homo sapien
aaactagggtgctaccgggaaaacatcatctta

SEQ ID NO: 723197 - DNA, 33 bp, Homo sapien
ggctgcttaaccaatacattaggtggtagtgga

SEQ ID NO: 723198 - DNA, 33 bp, Homo sapien
ggctgcttaaccaatatattaggtggtagtgga

SEQ ID NO: 723199 - DNA, 33 bp, Homo sapien
tttttccaatccattaaaaatcattctgtatta

SEQ ID NO: 723200 - DNA, 33 bp, Homo sapien
tttttccaatccattagaaatcattctgtatta

SEQ ID NO: 723201 - DNA, 33 bp, Homo sapien
attggaaacacaatccaaaagataaccaaaaaa

SEQ ID NO: 723202 - DNA, 33 bp, Homo sapien
attggaaacacaatccgaaagataaccaaaaaa

SEQ ID NO: 723203 - DNA, 33 bp, Homo sapien
caatgtcctagaaagacaaaacgtccaaactcc

SEQ ID NO: 723204 - DNA, 33 bp, Homo sapien
caatgtcctagaaagataaaacgtccaaactcc

SEQ ID NO: 723205 - DNA, 33 bp, Homo sapien
gccaaagcaggagaacaaattatgtaggacgac

SEQ ID NO: 723206 - DNA, 33 bp, Homo sapien
gccaaagcaggagaacgaattatgtaggacgac

SEQ ID NO: 723207 - DNA, 33 bp, Homo sapien
ctggctgcatttgccacctgttgattgtaaagg

SEQ ID NO: 723208 - DNA, 33 bp, Homo sapien
ctggctgcatttgccatctgttgattgtaaagg

SEQ ID NO: 723209 - DNA, 33 bp, Homo sapien
gcctcttccttcatcacatttctccttgtcgtc

SEQ ID NO: 723210 - DNA, 33 bp, Homo sapien
gcctcttccttcatcatatttctccttgtcgtc

SEQ ID NO: 723211 - DNA, 33 bp, Homo sapien
tgtggaatattgcatcaccaaaaatgttttcta

SEQ ID NO: 723212 - DNA, 33 bp, Homo sapien
tgtggaatattgcatcgccaaaaatgttttcta

SEQ ID NO: 723213 - DNA, 33 bp, Homo sapien
tgcagctctttggtggcaaatatcctctggtat

SEQ ID NO: 723214 - DNA, 33 bp, Homo sapien
tgcagctctttggtggtaaatatcctctggtat

SEQ ID NO: 723215 - DNA, 33 bp, Homo sapien
atggaaatcacattcacagaagtctgggaaagc

SEQ ID NO: 723216 - DNA, 33 bp, Homo sapien
atggaaatcacattcatagaagtctgggaaagc

SEQ ID NO: 723217 - DNA, 33 bp, Homo sapien
cacagcaaagagactaccaacagggtaaataga

SEQ ID NO: 723218 - DNA, 33 bp, Homo sapien
cacagcaaagagactatcaacagggtaaataga

SEQ ID NO: 723219 - DNA, 33 bp, Homo sapien
aaggaatagacatttcaataatcaaaagctcca

SEQ ID NO: 723220 - DNA, 33 bp, Homo sapien
aaggaatagacatttcgataatcaaaagctcca

SEQ ID NO: 723221 - DNA, 33 bp, Homo sapien
cacagagaatttttaggacagtgaaattattct

SEQ ID NO: 723222 - DNA, 33 bp, Homo sapien
cacagagaatttttagtacagtgaaattattct

SEQ ID NO: 723223 - DNA, 33 bp, Homo sapien
cattcattgcgctctaaagtgtctatctctgac

SEQ ID NO: 723224 - DNA, 33 bp, Homo sapien
cattcattgcgctctacagtgtctatctctgac

SEQ ID NO: 723225 - DNA, 33 bp, Homo sapien
acaaagagcccatagaactccatttgcactctt

SEQ ID NO: 723226 - DNA, 33 bp, Homo sapien
acaaagagcccatagacctccatttgcactctt

SEQ ID NO: 723227 - DNA, 33 bp, Homo sapien
aagagaaggtacatttgaaatctttctcatgca

SEQ ID NO: 723228 - DNA, 33 bp, Homo sapien
aagagaaggtacattttaaatctttctcatgca

SEQ ID NO: 723229 - DNA, 33 bp, Homo sapien
tctaatggagaccttgcatgattatgtaagtta

SEQ ID NO: 723230 - DNA, 33 bp, Homo sapien
tctaatggagaccttgtatgattatgtaagtta

SEQ ID NO: 723231 - DNA, 33 bp, Homo sapien
tctttctaatacctgacgctcaataaggtctta

SEQ ID NO: 723232 - DNA, 33 bp, Homo sapien
tctttctaatacctgaggctcaataaggtctta

SEQ ID NO: 723233 - DNA, 33 bp, Homo sapien
tcagggactagagtgaaaaaccttagaaatctg

SEQ ID NO: 723234 - DNA, 33 bp, Homo sapien
tcagggactagagtgagaaaccttagaaatctg

SEQ ID NO: 723235 - DNA, 33 bp, Homo sapien
aaattatacatagtggaaaagtttctagtgtca

SEQ ID NO: 723236 - DNA, 33 bp, Homo sapien
aaattatacatagtgggaaagtttctagtgtca

SEQ ID NO: 723237 - DNA, 33 bp, Homo sapien
gaatgataatccactgaatgcatataacacaat

SEQ ID NO: 723238 - DNA, 33 bp, Homo sapien
gaatgataatccactgtatgcatataacacaat

SEQ ID NO: 723239 - DNA, 33 bp, Homo sapien
ttcaacaaaaagctacaacttataccaaaaagt

SEQ ID NO: 723240 - DNA, 33 bp, Homo sapien
ttcaacaaaaagctaccacttataccaaaaagt

SEQ ID NO: 723241 - DNA, 33 bp, Homo sapien
ctctgcacctggctcaaccttggcgggcatgag

SEQ ID NO: 723242 - DNA, 33 bp, Homo sapien
ctctgcacctggctcacccttggcgggcatgag

SEQ ID NO: 723243 - DNA, 33 bp, Homo sapien
agagctgaacactcacggggatgccctgcctat

SEQ ID NO: 723244 - DNA, 33 bp, Homo sapien
agagctgaacactcactgggatgccctgcctat

SEQ ID NO: 723245 - DNA, 33 bp, Homo sapien
tattacttataggcagaaaggaatgaaagaagc

SEQ ID NO: 723246 - DNA, 33 bp, Homo sapien
tattacttataggcagcaaggaatgaaagaagc

SEQ ID NO: 723247 - DNA, 33 bp, Homo sapien
ttcttggtcccattagacagatgacatcatagg

SEQ ID NO: 723248 - DNA, 33 bp, Homo sapien
ttcttggtcccattaggcagatgacatcatagg

SEQ ID NO: 723249 - DNA, 33 bp, Homo sapien
aatatcaagatttttacatgtggagctgaaata

SEQ ID NO: 723250 - DNA, 33 bp, Homo sapien
aatatcaagatttttatatgtggagctgaaata

SEQ ID NO: 723251 - DNA, 33 bp, Homo sapien
atgtagtttcagtctcaatcccaaaagactgag

SEQ ID NO: 723252 - DNA, 33 bp, Homo sapien
atgtagtttcagtctcgatcccaaaagactgag

SEQ ID NO: 723253 - DNA, 33 bp, Homo sapien
cttcaaaagccattccaccattctatcaagcca

SEQ ID NO: 723254 - DNA, 33 bp, Homo sapien
cttcaaaagccattccgccattctatcaagcca

SEQ ID NO: 723255 - DNA, 33 bp, Homo sapien
agagatgttagttgagcagggcactttctaaaa

SEQ ID NO: 723256 - DNA, 33 bp, Homo sapien
agagatgttagttgagtagggcactttctaaaa

SEQ ID NO: 723257 - DNA, 33 bp, Homo sapien
tccactttctccataactcatagcttcagtttc

SEQ ID NO: 723258 - DNA, 33 bp, Homo sapien
tccactttctccataagtcatagcttcagtttc

SEQ ID NO: 723259 - DNA, 33 bp, Homo sapien
tgtcatcagactttcaaaagagcaaattcatta

SEQ ID NO: 723260 - DNA, 33 bp, Homo sapien
tgtcatcagactttcagaagagcaaattcatta

SEQ ID NO: 723261 - DNA, 33 bp, Homo sapien
acatcttctgaggctaaataatctattaaaaag

SEQ ID NO: 723262 - DNA, 33 bp, Homo sapien
acatcttctgaggctagataatctattaaaaag

SEQ ID NO: 723263 - DNA, 33 bp, Homo sapien
actagtttctgaactgaaaaacaggaatacggt

SEQ ID NO: 723264 - DNA, 33 bp, Homo sapien
actagtttctgaactggaaaacaggaatacggt

SEQ ID NO: 723265 - DNA, 33 bp, Homo sapien
gcccgtggctagcataacacaatcaaagtttct

SEQ ID NO: 723266 - DNA, 33 bp, Homo sapien
gcccgtggctagcatagcacaatcaaagtttct

SEQ ID NO: 723267 - DNA, 33 bp, Homo sapien
acaccagccttgaaaagaaagaggagcaaatta

SEQ ID NO: 723268 - DNA, 33 bp, Homo sapien
acaccagccttgaaaataaagaggagcaaatta

SEQ ID NO: 723269 - DNA, 33 bp, Homo sapien
aggtcatttttgaaccacttgggacaaagagcc

SEQ ID NO: 723270 - DNA, 33 bp, Homo sapien
aggtcatttttgaaccgcttgggacaaagagcc

SEQ ID NO: 723271 - DNA, 33 bp, Homo sapien
gccaaagggactgatacactttccgttcaaaat

SEQ ID NO: 723272 - DNA, 33 bp, Homo sapien
gccaaagggactgatatactttccgttcaaaat

SEQ ID NO: 723273 - DNA, 33 bp, Homo sapien
ttagggcatttatacaacacaagtgaatacaaa

SEQ ID NO: 723274 - DNA, 33 bp, Homo sapien
ttagggcatttatacagcacaagtgaatacaaa

SEQ ID NO: 723275 - DNA, 33 bp, Homo sapien
attggagattttgtcaaggacgtgatacatcta

SEQ ID NO: 723276 - DNA, 33 bp, Homo sapien
attggagattttgtcagggacgtgatacatcta

SEQ ID NO: 723277 - DNA, 33 bp, Homo sapien
ctaagcatggcacatacaaccttagtcataaag

SEQ ID NO: 723278 - DNA, 33 bp, Homo sapien
ctaagcatggcacatataaccttagtcataaag

SEQ ID NO: 723279 - DNA, 33 bp, Homo sapien
gaaaaagaaagccatacgcacatcatgacatga

SEQ ID NO: 723280 - DNA, 33 bp, Homo sapien
gaaaaagaaagccatatgcacatcatgacatga

SEQ ID NO: 723281 - DNA, 33 bp, Homo sapien
aagactgctcattcacaatttctacaaggagag

SEQ ID NO: 723282 - DNA, 33 bp, Homo sapien
aagactgctcattcactatttctacaaggagag

SEQ ID NO: 723283 - DNA, 33 bp, Homo sapien
tacagtttatgtgaaaaagttaacttcttacct

SEQ ID NO: 723284 - DNA, 33 bp, Homo sapien
tacagtttatgtgaaatagttaacttcttacct

SEQ ID NO: 723285 - DNA, 33 bp, Homo sapien
aatgtgatctctttgaaaaacaccatataagtt

SEQ ID NO: 723286 - DNA, 33 bp, Homo sapien
aatgtgatctctttgataaacaccatataagtt

SEQ ID NO: 723287 - DNA, 33 bp, Homo sapien
agagtgaatacagatcaatggtatctctaagta

SEQ ID NO: 723288 - DNA, 33 bp, Homo sapien
agagtgaatacagatcgatggtatctctaagta

SEQ ID NO: 723289 - DNA, 33 bp, Homo sapien
cactaagtcatctacaataactcaaatggaaat

SEQ ID NO: 723290 - DNA, 33 bp, Homo sapien
cactaagtcatctacagtaactcaaatggaaat

SEQ ID NO: 723291 - DNA, 33 bp, Homo sapien
caattaatagttaacaaggtacgcttataaaac

SEQ ID NO: 723292 - DNA, 33 bp, Homo sapien
caattaatagttaacagggtacgcttataaaac

SEQ ID NO: 723293 - DNA, 33 bp, Homo sapien
agaaagcaaaaagagaactccaatgaaaatgat

SEQ ID NO: 723294 - DNA, 33 bp, Homo sapien
agaaagcaaaaagagagctccaatgaaaatgat

SEQ ID NO: 723295 - DNA, 33 bp, Homo sapien
gaacttatgtccaaaagtgaattgttagcaata

SEQ ID NO: 723296 - DNA, 33 bp, Homo sapien
gaacttatgtccaaaattgaattgttagcaata

SEQ ID NO: 723297 - DNA, 33 bp, Homo sapien
atactgacactggaagaatatctatggcaataa

SEQ ID NO: 723298 - DNA, 33 bp, Homo sapien
atactgacactggaagcatatctatggcaataa

SEQ ID NO: 723299 - DNA, 33 bp, Homo sapien
ttaaatttccagtttgcagtaatttcaggtgtt

SEQ ID NO: 723300 - DNA, 33 bp, Homo sapien
ttaaatttccagtttgtagtaatttcaggtgtt

SEQ ID NO: 723301 - DNA, 33 bp, Homo sapien
acagctaagggtgctcacatggttcaaaccccc

SEQ ID NO: 723302 - DNA, 33 bp, Homo sapien
acagctaagggtgctcgcatggttcaaaccccc

SEQ ID NO: 723303 - DNA, 33 bp, Homo sapien
tggactggtgcggggacgtgacatactgagaca

SEQ ID NO: 723304 - DNA, 33 bp, Homo sapien
tggactggtgcggggatgtgacatactgagaca

SEQ ID NO: 723305 - DNA, 33 bp, Homo sapien
ggacgaggataaggatcacttctgaatcagata

SEQ ID NO: 723306 - DNA, 33 bp, Homo sapien
ggacgaggataaggatgacttctgaatcagata

SEQ ID NO: 723307 - DNA, 33 bp, Homo sapien
gttcctaaaagtacaaatgcataattctccacc

SEQ ID NO: 723308 - DNA, 33 bp, Homo sapien
gttcctaaaagtacaagtgcataattctccacc

SEQ ID NO: 723309 - DNA, 33 bp, Homo sapien
aactgaacaactgccaacacaagcagaaaagca

SEQ ID NO: 723310 - DNA, 33 bp, Homo sapien
aactgaacaactgccagcacaagcagaaaagca

SEQ ID NO: 723311 - DNA, 33 bp, Homo sapien
atacagcagtataaacaaccatatctgcacaac

SEQ ID NO: 723312 - DNA, 33 bp, Homo sapien
atacagcagtataaaccaccatatctgcacaac

SEQ ID NO: 723313 - DNA, 33 bp, Homo sapien
ccgccatggtataagacattctctcacaataat

SEQ ID NO: 723314 - DNA, 33 bp, Homo sapien
ccgccatggtataagatattctctcacaataat

SEQ ID NO: 723315 - DNA, 33 bp, Homo sapien
ctatcaacagagtaaaaagcaaccatttgacaa

SEQ ID NO: 723316 - DNA, 33 bp, Homo sapien
ctatcaacagagtaaacagcaaccatttgacaa

SEQ ID NO: 723317 - DNA, 33 bp, Homo sapien
taggtactatgcccacgacctggcaaatggaat

SEQ ID NO: 723318 - DNA, 33 bp, Homo sapien
taggtactatgcccactacctggcaaatggaat

SEQ ID NO: 723319 - DNA, 33 bp, Homo sapien
atcattgagtcatcctcaaacaaccctggacct

SEQ ID NO: 723320 - DNA, 33 bp, Homo sapien
atcattgagtcatcctgaaacaaccctggacct

SEQ ID NO: 723321 - DNA, 33 bp, Homo sapien
aacattggttccaatacggttttgcctctttaa

SEQ ID NO: 723322 - DNA, 33 bp, Homo sapien
aacattggttccaatatggttttgcctctttaa

SEQ ID NO: 723323 - DNA, 33 bp, Homo sapien
ttggaagacaaggaaaagatagcaaatgtctgt

SEQ ID NO: 723324 - DNA, 33 bp, Homo sapien
ttggaagacaaggaaacgatagcaaatgtctgt

SEQ ID NO: 723325 - DNA, 33 bp, Homo sapien
gaataaaggagctataagcatttctattatgat

SEQ ID NO: 723326 - DNA, 33 bp, Homo sapien
gaataaaggagctataggcatttctattatgat

SEQ ID NO: 723327 - DNA, 33 bp, Homo sapien
aggacacatcaaagaaagcaaaactcaggccaa

SEQ ID NO: 723328 - DNA, 33 bp, Homo sapien
aggacacatcaaagaacgcaaaactcaggccaa

SEQ ID NO: 723329 - DNA, 33 bp, Homo sapien
tgtcagagaaaaatccaacttggtcaagatgaa

SEQ ID NO: 723330 - DNA, 33 bp, Homo sapien
tgtcagagaaaaatccgacttggtcaagatgaa

SEQ ID NO: 723331 - DNA, 33 bp, Homo sapien
gggatatgctggtgagaaaaacacagaaacctc

SEQ ID NO: 723332 - DNA, 33 bp, Homo sapien
gggatatgctggtgaggaaaacacagaaacctc

SEQ ID NO: 723333 - DNA, 33 bp, Homo sapien
gtctcctcaactgtaccataaactccaggagag

SEQ ID NO: 723334 - DNA, 33 bp, Homo sapien
gtctcctcaactgtactataaactccaggagag

SEQ ID NO: 723335 - DNA, 33 bp, Homo sapien
gttgtagaaaaagggacaactttccagggattg

SEQ ID NO: 723336 - DNA, 33 bp, Homo sapien
gttgtagaaaaagggagaactttccagggattg

SEQ ID NO: 723337 - DNA, 33 bp, Homo sapien
aatagaccaatgggacagaataaagagcccaga

SEQ ID NO: 723338 - DNA, 33 bp, Homo sapien
aatagaccaatgggacggaataaagagcccaga

SEQ ID NO: 723339 - DNA, 33 bp, Homo sapien
cccaatatgttgaactaaaaattacattctctt

SEQ ID NO: 723340 - DNA, 33 bp, Homo sapien
cccaatatgttgaactgaaaattacattctctt

SEQ ID NO: 723341 - DNA, 33 bp, Homo sapien
attcacatgaataaaccaaaaatatcccttatt

SEQ ID NO: 723342 - DNA, 33 bp, Homo sapien
attcacatgaataaacgaaaaatatcccttatt

SEQ ID NO: 723343 - DNA, 33 bp, Homo sapien
attgccagtaagataggcctacatcagtacagt

SEQ ID NO: 723344 - DNA, 33 bp, Homo sapien
attgccagtaagatagtcctacatcagtacagt

SEQ ID NO: 723345 - DNA, 33 bp, Homo sapien
aaatagaaacaagccactgcagactttccatga

SEQ ID NO: 723346 - DNA, 33 bp, Homo sapien
aaatagaaacaagccattgcagactttccatga

SEQ ID NO: 723347 - DNA, 33 bp, Homo sapien
ctttgcttacgagtaaatgtataaagagtttga

SEQ ID NO: 723348 - DNA, 33 bp, Homo sapien
ctttgcttacgagtaagtgtataaagagtttga

SEQ ID NO: 723349 - DNA, 33 bp, Homo sapien
gtttgaagctcagagactaaatttgcagatatc

SEQ ID NO: 723350 - DNA, 33 bp, Homo sapien
gtttgaagctcagagagtaaatttgcagatatc

SEQ ID NO: 723351 - DNA, 33 bp, Homo sapien
tttatcctatagtttaacatagaaatctagaat

SEQ ID NO: 723352 - DNA, 33 bp, Homo sapien
tttatcctatagtttagcatagaaatctagaat

SEQ ID NO: 723353 - DNA, 33 bp, Homo sapien
acctttacctcctgcaatgactcttcagagccc

SEQ ID NO: 723354 - DNA, 33 bp, Homo sapien
acctttacctcctgcagtgactcttcagagccc

SEQ ID NO: 723355 - DNA, 33 bp, Homo sapien
cattaatcctaaatcaacctagctccagatact

SEQ ID NO: 723356 - DNA, 33 bp, Homo sapien
cattaatcctaaatcagcctagctccagatact

SEQ ID NO: 723357 - DNA, 33 bp, Homo sapien
atacttcatttcagaaccactagtctatgttaa

SEQ ID NO: 723358 - DNA, 33 bp, Homo sapien
atacttcatttcagaatcactagtctatgttaa

SEQ ID NO: 723359 - DNA, 33 bp, Homo sapien
tccaaatgacttctaaccttctaaataaactct

SEQ ID NO: 723360 - DNA, 33 bp, Homo sapien
tccaaatgacttctaagcttctaaataaactct

SEQ ID NO: 723361 - DNA, 33 bp, Homo sapien
aaatggtttgtgggacaggcccaagactccgtt

SEQ ID NO: 723362 - DNA, 33 bp, Homo sapien
aaatggtttgtgggacgggcccaagactccgtt

SEQ ID NO: 723363 - DNA, 33 bp, Homo sapien
agaaaattggtaccaagggtgaagcactggtat

SEQ ID NO: 723364 - DNA, 33 bp, Homo sapien
agaaaattggtaccaatggtgaagcactggtat

SEQ ID NO: 723365 - DNA, 33 bp, Homo sapien
ccacaatccattttaaggatcataagacttatt

SEQ ID NO: 723366 - DNA, 33 bp, Homo sapien
ccacaatccattttaatgatcataagacttatt

SEQ ID NO: 723367 - DNA, 33 bp, Homo sapien
actgattgaaatgtaagagacaccaattaacta

SEQ ID NO: 723368 - DNA, 33 bp, Homo sapien
actgattgaaatgtaatagacaccaattaacta

SEQ ID NO: 723369 - DNA, 33 bp, Homo sapien
agatcttgaagagcagaaattatgggttgaacc

SEQ ID NO: 723370 - DNA, 33 bp, Homo sapien
agatcttgaagagcagtaattatgggttgaacc

SEQ ID NO: 723371 - DNA, 33 bp, Homo sapien
tgggttcaaggagtgacgaaaataaaacctgtg

SEQ ID NO: 723372 - DNA, 33 bp, Homo sapien
tgggttcaaggagtgatgaaaataaaacctgtg

SEQ ID NO: 723373 - DNA, 33 bp, Homo sapien
gtcttattgctcaaaaccttcaagacttagatg

SEQ ID NO: 723374 - DNA, 33 bp, Homo sapien
gtcttattgctcaaaagcttcaagacttagatg

SEQ ID NO: 723375 - DNA, 33 bp, Homo sapien
gaattcagaagaggtaacttaaactgacagttc

SEQ ID NO: 723376 - DNA, 33 bp, Homo sapien
gaattcagaagaggtagcttaaactgacagttc

SEQ ID NO: 723377 - DNA, 33 bp, Homo sapien
atgtggttcaacctcaactttgttaactgcatc

SEQ ID NO: 723378 - DNA, 33 bp, Homo sapien
atgtggttcaacctcagctttgttaactgcatc

SEQ ID NO: 723379 - DNA, 33 bp, Homo sapien
gaaccaactactcaataagatacacagtcagtc

SEQ ID NO: 723380 - DNA, 33 bp, Homo sapien
gaaccaactactcaatgagatacacagtcagtc

SEQ ID NO: 723381 - DNA, 33 bp, Homo sapien
attatgggtgagccaacaaagggaaacatcaga

SEQ ID NO: 723382 - DNA, 33 bp, Homo sapien
attatgggtgagccaagaaagggaaacatcaga

SEQ ID NO: 723383 - DNA, 33 bp, Homo sapien
gaacttccgggcaaatgatcaaacttcagcaag

SEQ ID NO: 723384 - DNA, 33 bp, Homo sapien
gaacttccgggcaaattatcaaacttcagcaag

SEQ ID NO: 723385 - DNA, 33 bp, Homo sapien
tctctctttttgagccacgaacaagtcagaaaa

SEQ ID NO: 723386 - DNA, 33 bp, Homo sapien
tctctctttttgagccgcgaacaagtcagaaaa

SEQ ID NO: 723387 - DNA, 33 bp, Homo sapien
ttaggagatttcaacaaacattaagaggttccc

SEQ ID NO: 723388 - DNA, 33 bp, Homo sapien
ttaggagatttcaacagacattaagaggttccc

SEQ ID NO: 723389 - DNA, 33 bp, Homo sapien
agtggacagagattgaataaggagagttattac

SEQ ID NO: 723390 - DNA, 33 bp, Homo sapien
agtggacagagattgagtaaggagagttattac

SEQ ID NO: 723391 - DNA, 33 bp, Homo sapien
tgcagctcctttggcaatagtcccactcctgcc

SEQ ID NO: 723392 - DNA, 33 bp, Homo sapien
tgcagctcctttggcactagtcccactcctgcc

SEQ ID NO: 723393 - DNA, 33 bp, Homo sapien
tgagggcagacagaaggaagagtcaggctcagg

SEQ ID NO: 723394 - DNA, 33 bp, Homo sapien
tgagggcagacagaagtaagagtcaggctcagg

SEQ ID NO: 723395 - DNA, 33 bp, Homo sapien
tttaggacttgcacaacggaagctgacacttct

SEQ ID NO: 723396 - DNA, 33 bp, Homo sapien
tttaggacttgcacaatggaagctgacacttct

SEQ ID NO: 723397 - DNA, 33 bp, Homo sapien
catgtatgtgcatgaactcacaggtgtatacta

SEQ ID NO: 723398 - DNA, 33 bp, Homo sapien
catgtatgtgcatgaagtcacaggtgtatacta

SEQ ID NO: 723399 - DNA, 33 bp, Homo sapien
tcaaagtaattggcagaacatactactttgggc

SEQ ID NO: 723400 - DNA, 33 bp, Homo sapien
tcaaagtaattggcaggacatactactttgggc

SEQ ID NO: 723401 - DNA, 33 bp, Homo sapien
ctatgcgattacattccctcccatactcaaatt

SEQ ID NO: 723402 - DNA, 33 bp, Homo sapien
ctatgcgattacattctctcccatactcaaatt

SEQ ID NO: 723403 - DNA, 33 bp, Homo sapien
cagcatggctagatccacacttgggggtcgtct

SEQ ID NO: 723404 - DNA, 33 bp, Homo sapien
cagcatggctagatccgcacttgggggtcgtct

SEQ ID NO: 723405 - DNA, 33 bp, Homo sapien
accatcattccatcaaggtaccaaacactgggt

SEQ ID NO: 723406 - DNA, 33 bp, Homo sapien
accatcattccatcaatgtaccaaacactgggt

SEQ ID NO: 723407 - DNA, 33 bp, Homo sapien
ccaagagtcgaaaaccaaagaagctggagcccg

SEQ ID NO: 723408 - DNA, 33 bp, Homo sapien
ccaagagtcgaaaaccgaagaagctggagcccg

SEQ ID NO: 723409 - DNA, 33 bp, Homo sapien
aagagagccctagataagcagagggaaatgtgt

SEQ ID NO: 723410 - DNA, 33 bp, Homo sapien
aagagagccctagataggcagagggaaatgtgt

SEQ ID NO: 723411 - DNA, 33 bp, Homo sapien
tctgttatccattgcaatctgtacactctcata

SEQ ID NO: 723412 - DNA, 33 bp, Homo sapien
tctgttatccattgcagtctgtacactctcata

SEQ ID NO: 723413 - DNA, 33 bp, Homo sapien
ttcactcagagactgaaagagaaagaacctagg

SEQ ID NO: 723414 - DNA, 33 bp, Homo sapien
ttcactcagagactgagagagaaagaacctagg

SEQ ID NO: 723415 - DNA, 33 bp, Homo sapien
ctgttaaatttttagaagtatcgaaagccagtt

SEQ ID NO: 723416 - DNA, 33 bp, Homo sapien
ctgttaaatttttagaggtatcgaaagccagtt

SEQ ID NO: 723417 - DNA, 33 bp, Homo sapien
ggctccatgctaaaaacagtaggaattgtttca

SEQ ID NO: 723418 - DNA, 33 bp, Homo sapien
ggctccatgctaaaaatagtaggaattgtttca

SEQ ID NO: 723419 - DNA, 33 bp, Homo sapien
gttttttctctgagtaaggagggacaccattgg

SEQ ID NO: 723420 - DNA, 33 bp, Homo sapien
gttttttctctgagtagggagggacaccattgg

SEQ ID NO: 723421 - DNA, 33 bp, Homo sapien
gattccaaacagaaaacgcaattcacctagaag

SEQ ID NO: 723422 - DNA, 33 bp, Homo sapien
gattccaaacagaaaatgcaattcacctagaag

SEQ ID NO: 723423 - DNA, 33 bp, Homo sapien
atattttcttgattaaactttttatctcaatat

SEQ ID NO: 723424 - DNA, 33 bp, Homo sapien
atattttcttgattaagctttttatctcaatat

SEQ ID NO: 723425 - DNA, 33 bp, Homo sapien
attgtgtactgtgttcactatttgggtgacagg

SEQ ID NO: 723426 - DNA, 33 bp, Homo sapien
attgtgtactgtgttcgctatttgggtgacagg

SEQ ID NO: 723427 - DNA, 33 bp, Homo sapien
tgagatacgtaaaaaactgaactctactgtcca

SEQ ID NO: 723428 - DNA, 33 bp, Homo sapien
tgagatacgtaaaaaattgaactctactgtcca

SEQ ID NO: 723429 - DNA, 33 bp, Homo sapien
gttatgaacagaacttcaaactgccagcagaag

SEQ ID NO: 723430 - DNA, 33 bp, Homo sapien
gttatgaacagaactttaaactgccagcagaag

SEQ ID NO: 723431 - DNA, 33 bp, Homo sapien
tcctaacattaaaagacctgagtgaattttcat

SEQ ID NO: 723432 - DNA, 33 bp, Homo sapien
tcctaacattaaaagagctgagtgaattttcat

SEQ ID NO: 723433 - DNA, 33 bp, Homo sapien
tcagagtgaaggctgacggacaaactgcagagg

SEQ ID NO: 723434 - DNA, 33 bp, Homo sapien
tcagagtgaaggctgatggacaaactgcagagg

SEQ ID NO: 723435 - DNA, 33 bp, Homo sapien
tggcaaactcatgttgaaaagactgtcttggga

SEQ ID NO: 723436 - DNA, 33 bp, Homo sapien
tggcaaactcatgttgtaaagactgtcttggga

SEQ ID NO: 723437 - DNA, 33 bp, Homo sapien
aggcagaataagatgactcaaaactccagagag

SEQ ID NO: 723438 - DNA, 33 bp, Homo sapien
aggcagaataagatgattcaaaactccagagag

SEQ ID NO: 723439 - DNA, 33 bp, Homo sapien
agtactacatagtgaacggacaaatgaaacttg

SEQ ID NO: 723440 - DNA, 33 bp, Homo sapien
agtactacatagtgaatggacaaatgaaacttg

SEQ ID NO: 723441 - DNA, 33 bp, Homo sapien
aaccattgcaattcaacacttctaatccattag

SEQ ID NO: 723442 - DNA, 33 bp, Homo sapien
aaccattgcaattcaatacttctaatccattag

SEQ ID NO: 723443 - DNA, 33 bp, Homo sapien
cttatcggtaaaataaacataatggtagctata

SEQ ID NO: 723444 - DNA, 33 bp, Homo sapien
cttatcggtaaaataagcataatggtagctata

SEQ ID NO: 723445 - DNA, 33 bp, Homo sapien
acaaagcgatattagaaagtctccaagtaaaga

SEQ ID NO: 723446 - DNA, 33 bp, Homo sapien
acaaagcgatattagagagtctccaagtaaaga

SEQ ID NO: 723447 - DNA, 33 bp, Homo sapien
aactcatagacacagaaagtaggataaaggtta

SEQ ID NO: 723448 - DNA, 33 bp, Homo sapien
aactcatagacacagagagtaggataaaggtta

SEQ ID NO: 723449 - DNA, 33 bp, Homo sapien
caattatgactatggaaaattagctgattagca

SEQ ID NO: 723450 - DNA, 33 bp, Homo sapien
caattatgactatggagaattagctgattagca

SEQ ID NO: 723451 - DNA, 33 bp, Homo sapien
ataaaactgtgtgcaacgccatctcaaaggttc

SEQ ID NO: 723452 - DNA, 33 bp, Homo sapien
ataaaactgtgtgcaatgccatctcaaaggttc

SEQ ID NO: 723453 - DNA, 33 bp, Homo sapien
tagataaagcgttttcaaagcattgtgtgcaat

SEQ ID NO: 723454 - DNA, 33 bp, Homo sapien
tagataaagcgttttcgaagcattgtgtgcaat

SEQ ID NO: 723455 - DNA, 33 bp, Homo sapien
tttgctttccatacatcacactggctttgccct

SEQ ID NO: 723456 - DNA, 33 bp, Homo sapien
tttgctttccatacattacactggctttgccct

SEQ ID NO: 723457 - DNA, 33 bp, Homo sapien
tacaagtgtacaggtacgtaagattcttagatg

SEQ ID NO: 723458 - DNA, 33 bp, Homo sapien
tacaagtgtacaggtatgtaagattcttagatg

SEQ ID NO: 723459 - DNA, 33 bp, Homo sapien
aaactagtggtaccagaaggaaatctaagccta

SEQ ID NO: 723460 - DNA, 33 bp, Homo sapien
aaactagtggtaccaggaggaaatctaagccta

SEQ ID NO: 723461 - DNA, 33 bp, Homo sapien
aactccattagatcgtgaatttgaggtaggatg

SEQ ID NO: 723462 - DNA, 33 bp, Homo sapien
aactccattagatcgttaatttgaggtaggatg

SEQ ID NO: 723463 - DNA, 33 bp, Homo sapien
gtctttctccaaatgcaaggcagtcgctcatct

SEQ ID NO: 723464 - DNA, 33 bp, Homo sapien
gtctttctccaaatgcgaggcagtcgctcatct

SEQ ID NO: 723465 - DNA, 33 bp, Homo sapien
aaatagaaaaatgcaaatatagctatcaaaaaa

SEQ ID NO: 723466 - DNA, 33 bp, Homo sapien
aaatagaaaaatgcaattatagctatcaaaaaa

SEQ ID NO: 723467 - DNA, 33 bp, Homo sapien
catataatcctgcaacaactctgatagggagac

SEQ ID NO: 723468 - DNA, 33 bp, Homo sapien
catataatcctgcaacgactctgatagggagac

SEQ ID NO: 723469 - DNA, 33 bp, Homo sapien
cctatgtcccctgatagatgctcccctcaagat

SEQ ID NO: 723470 - DNA, 33 bp, Homo sapien
cctatgtcccctgatatatgctcccctcaagat

SEQ ID NO: 723471 - DNA, 33 bp, Homo sapien
caatcaatcggattaactgaaagtctcttctgt

SEQ ID NO: 723472 - DNA, 33 bp, Homo sapien
caatcaatcggattaattgaaagtctcttctgt

SEQ ID NO: 723473 - DNA, 33 bp, Homo sapien
aaaattacctccacgaagcaagctgtgacaaca

SEQ ID NO: 723474 - DNA, 33 bp, Homo sapien
aaaattacctccacgatgcaagctgtgacaaca

SEQ ID NO: 723475 - DNA, 33 bp, Homo sapien
atttaggtaccgtatgaatctctgaattaaaat

SEQ ID NO: 723476 - DNA, 33 bp, Homo sapien
atttaggtaccgtatgtatctctgaattaaaat

SEQ ID NO: 723477 - DNA, 33 bp, Homo sapien
ctttgaattttactaacagccagaagtatttac

SEQ ID NO: 723478 - DNA, 33 bp, Homo sapien
ctttgaattttactaatagccagaagtatttac

SEQ ID NO: 723479 - DNA, 33 bp, Homo sapien
gacttactataacatacctacagtagtccagac

SEQ ID NO: 723480 - DNA, 33 bp, Homo sapien
gacttactataacatagctacagtagtccagac

SEQ ID NO: 723481 - DNA, 33 bp, Homo sapien
gtcaacattactttaaacatggatttttaaata

SEQ ID NO: 723482 - DNA, 33 bp, Homo sapien
gtcaacattactttaagcatggatttttaaata

SEQ ID NO: 723483 - DNA, 33 bp, Homo sapien
attagaaaagtaaacacgatgaaacacaaagta

SEQ ID NO: 723484 - DNA, 33 bp, Homo sapien
attagaaaagtaaacatgatgaaacacaaagta

SEQ ID NO: 723485 - DNA, 33 bp, Homo sapien
tgacattttcaaaaacaataaaagcataacctt

SEQ ID NO: 723486 - DNA, 33 bp, Homo sapien
tgacattttcaaaaactataaaagcataacctt

SEQ ID NO: 723487 - DNA, 33 bp, Homo sapien
gaagaaagccttgttcactgaaagggagtatta

SEQ ID NO: 723488 - DNA, 33 bp, Homo sapien
gaagaaagccttgttcgctgaaagggagtatta

SEQ ID NO: 723489 - DNA, 33 bp, Homo sapien
tggtgatggcttgacgaattttttttttgtttt

SEQ ID NO: 723490 - DNA, 33 bp, Homo sapien
tggtgatggcttgacgtattttttttttgtttt

SEQ ID NO: 723491 - DNA, 33 bp, Homo sapien
gactggaagttcaacaaggtttcctggaaaggc

SEQ ID NO: 723492 - DNA, 33 bp, Homo sapien
gactggaagttcaacacggtttcctggaaaggc

SEQ ID NO: 723493 - DNA, 33 bp, Homo sapien
gcagctaacaaacgtacgaaaaaaagctcatca

SEQ ID NO: 723494 - DNA, 33 bp, Homo sapien
gcagctaacaaacgtatgaaaaaaagctcatca

SEQ ID NO: 723495 - DNA, 33 bp, Homo sapien
ttttacttaaggcatcaaattcagatagtcaca

SEQ ID NO: 723496 - DNA, 33 bp, Homo sapien
ttttacttaaggcatcgaattcagatagtcaca

SEQ ID NO: 723497 - DNA, 33 bp, Homo sapien
ctctctcgcatatagcagacaaggattctccac

SEQ ID NO: 723498 - DNA, 33 bp, Homo sapien
ctctctcgcatatagcggacaaggattctccac

SEQ ID NO: 723499 - DNA, 33 bp, Homo sapien
ttttgcaggagaaaaacccacagaaaagcatca

SEQ ID NO: 723500 - DNA, 33 bp, Homo sapien
ttttgcaggagaaaaatccacagaaaagcatca

SEQ ID NO: 723501 - DNA, 33 bp, Homo sapien
attacttgtttccaaagacattgatgaaatata

SEQ ID NO: 723502 - DNA, 33 bp, Homo sapien
attacttgtttccaaatacattgatgaaatata

SEQ ID NO: 723503 - DNA, 33 bp, Homo sapien
atatcccctgttaaaaaagcgagaatatcaaag

SEQ ID NO: 723504 - DNA, 33 bp, Homo sapien
atatcccctgttaaaatagcgagaatatcaaag

SEQ ID NO: 723505 - DNA, 33 bp, Homo sapien
ttcaaatggatttgtgaaaaaaaacatggaata

SEQ ID NO: 723506 - DNA, 33 bp, Homo sapien
ttcaaatggatttgtggaaaaaaacatggaata

SEQ ID NO: 723507 - DNA, 33 bp, Homo sapien
gttttgcctgttttcaaacctctgtgaatgcca

SEQ ID NO: 723508 - DNA, 33 bp, Homo sapien
gttttgcctgttttcatacctctgtgaatgcca

SEQ ID NO: 723509 - DNA, 33 bp, Homo sapien
cagccttaaactacataagaactacatagaact

SEQ ID NO: 723510 - DNA, 33 bp, Homo sapien
cagccttaaactacattagaactacatagaact

SEQ ID NO: 723511 - DNA, 33 bp, Homo sapien
tcttttgaatagagacaaaggcagattagccct

SEQ ID NO: 723512 - DNA, 33 bp, Homo sapien
tcttttgaatagagacgaaggcagattagccct

SEQ ID NO: 723513 - DNA, 33 bp, Homo sapien
ttccctccttccttaaaaatagaattgtagcta

SEQ ID NO: 723514 - DNA, 33 bp, Homo sapien
ttccctccttccttaataatagaattgtagcta

SEQ ID NO: 723515 - DNA, 33 bp, Homo sapien
tagagattttcgctgcaaacacatatatagcga

SEQ ID NO: 723516 - DNA, 33 bp, Homo sapien
tagagattttcgctgcgaacacatatatagcga

SEQ ID NO: 723517 - DNA, 33 bp, Homo sapien
aaaaatacaagaagaacacaaattggcaaaaat

SEQ ID NO: 723518 - DNA, 33 bp, Homo sapien
aaaaatacaagaagaatacaaattggcaaaaat

SEQ ID NO: 723519 - DNA, 33 bp, Homo sapien
atatattttgagttcacattcatcaattcagca

SEQ ID NO: 723520 - DNA, 33 bp, Homo sapien
atatattttgagttcagattcatcaattcagca

SEQ ID NO: 723521 - DNA, 33 bp, Homo sapien
agggatccctgtgataaaaataatctgtatatt

SEQ ID NO: 723522 - DNA, 33 bp, Homo sapien
agggatccctgtgatagaaataatctgtatatt

SEQ ID NO: 723523 - DNA, 33 bp, Homo sapien
ttaggagtcaatccaaaggttaacccaataaat

SEQ ID NO: 723524 - DNA, 33 bp, Homo sapien
ttaggagtcaatccaacggttaacccaataaat

SEQ ID NO: 723525 - DNA, 33 bp, Homo sapien
gatcaaacctattagacgcgataaacaatataa

SEQ ID NO: 723526 - DNA, 33 bp, Homo sapien
gatcaaacctattagatgcgataaacaatataa

SEQ ID NO: 723527 - DNA, 33 bp, Homo sapien
ttaagctgtgtatttacgctttaagtgcaattc

SEQ ID NO: 723528 - DNA, 33 bp, Homo sapien
ttaagctgtgtatttatgctttaagtgcaattc

SEQ ID NO: 723529 - DNA, 33 bp, Homo sapien
agttatctaagttatacacgttttgcatcacca

SEQ ID NO: 723530 - DNA, 33 bp, Homo sapien
agttatctaagttatatacgttttgcatcacca

SEQ ID NO: 723531 - DNA, 33 bp, Homo sapien
agggaagtttttgccaactgctactttgaagaa

SEQ ID NO: 723532 - DNA, 33 bp, Homo sapien
agggaagtttttgccatctgctactttgaagaa

SEQ ID NO: 723533 - DNA, 33 bp, Homo sapien
gtacttgtctggctcaataaggcagagatataa

SEQ ID NO: 723534 - DNA, 33 bp, Homo sapien
gtacttgtctggctcagtaaggcagagatataa

SEQ ID NO: 723535 - DNA, 33 bp, Homo sapien
aaatcaaaaccataacaagatataccatctcac

SEQ ID NO: 723536 - DNA, 33 bp, Homo sapien
aaatcaaaaccataacgagatataccatctcac

SEQ ID NO: 723537 - DNA, 33 bp, Homo sapien
cgctaacttcaacaccaataactgaagccaacc

SEQ ID NO: 723538 - DNA, 33 bp, Homo sapien
cgctaacttcaacaccgataactgaagccaacc

SEQ ID NO: 723539 - DNA, 33 bp, Homo sapien
tggtatcttactgccacgaagagtttgttctgt

SEQ ID NO: 723540 - DNA, 33 bp, Homo sapien
tggtatcttactgccatgaagagtttgttctgt

SEQ ID NO: 723541 - DNA, 33 bp, Homo sapien
ccacataagcagtcatcaaattgtaacataact

SEQ ID NO: 723542 - DNA, 33 bp, Homo sapien
ccacataagcagtcattaaattgtaacataact

SEQ ID NO: 723543 - DNA, 33 bp, Homo sapien
gtctgaaattcctttaggccagagtaatagaat

SEQ ID NO: 723544 - DNA, 33 bp, Homo sapien
gtctgaaattcctttatgccagagtaatagaat

SEQ ID NO: 723545 - DNA, 33 bp, Homo sapien
tgcatatgattccagcagattagtagatccttt

SEQ ID NO: 723546 - DNA, 33 bp, Homo sapien
tgcatatgattccagcggattagtagatccttt

SEQ ID NO: 723547 - DNA, 33 bp, Homo sapien
acctttttacctagcaaatttctgataaaaaat

SEQ ID NO: 723548 - DNA, 33 bp, Homo sapien
acctttttacctagcagatttctgataaaaaat

SEQ ID NO: 723549 - DNA, 33 bp, Homo sapien
tttatctatctagaacacagttaagaacaagaa

SEQ ID NO: 723550 - DNA, 33 bp, Homo sapien
tttatctatctagaacgcagttaagaacaagaa

SEQ ID NO: 723551 - DNA, 33 bp, Homo sapien
ttggtctcaaatcatacgtagtggttttttttt

SEQ ID NO: 723552 - DNA, 33 bp, Homo sapien
ttggtctcaaatcatatgtagtggttttttttt

SEQ ID NO: 723553 - DNA, 33 bp, Homo sapien
ggtccatgccttttgaactatcagtagaaatat

SEQ ID NO: 723554 - DNA, 33 bp, Homo sapien
ggtccatgccttttgatctatcagtagaaatat

SEQ ID NO: 723555 - DNA, 33 bp, Homo sapien
aatatagagcgcccaaagactttgatttccaaa

SEQ ID NO: 723556 - DNA, 33 bp, Homo sapien
aatatagagcgcccaaggactttgatttccaaa

SEQ ID NO: 723557 - DNA, 33 bp, Homo sapien
tcttcagatctctagactagaatgctcaactac

SEQ ID NO: 723558 - DNA, 33 bp, Homo sapien
tcttcagatctctagagtagaatgctcaactac

SEQ ID NO: 723559 - DNA, 33 bp, Homo sapien
ttaggaatgaagaggtaaagtcccatagcccat

SEQ ID NO: 723560 - DNA, 33 bp, Homo sapien
ttaggaatgaagaggttaagtcccatagcccat

SEQ ID NO: 723561 - DNA, 33 bp, Homo sapien
attaggtactccgagcaagtttaagggaaccat

SEQ ID NO: 723562 - DNA, 33 bp, Homo sapien
attaggtactccgagcgagtttaagggaaccat

SEQ ID NO: 723563 - DNA, 33 bp, Homo sapien
aggggtaaggaagtgaccataatgaatgaaggg

SEQ ID NO: 723564 - DNA, 33 bp, Homo sapien
aggggtaaggaagtgatcataatgaatgaaggg

SEQ ID NO: 723565 - DNA, 33 bp, Homo sapien
gaatcccaagccaccacataggaactgaagagg

SEQ ID NO: 723566 - DNA, 33 bp, Homo sapien
gaatcccaagccaccagataggaactgaagagg

SEQ ID NO: 723567 - DNA, 33 bp, Homo sapien
ataaccagttcaattaaagtttgatcacaaatg

SEQ ID NO: 723568 - DNA, 33 bp, Homo sapien
ataaccagttcaattagagtttgatcacaaatg

SEQ ID NO: 723569 - DNA, 33 bp, Homo sapien
ggtagaactacaaatacagaggacagaagggtc

SEQ ID NO: 723570 - DNA, 33 bp, Homo sapien
ggtagaactacaaatatagaggacagaagggtc

SEQ ID NO: 723571 - DNA, 33 bp, Homo sapien
tcttaaatcatcaggactcatggacagaaagca

SEQ ID NO: 723572 - DNA, 33 bp, Homo sapien
tcttaaatcatcaggattcatggacagaaagca

SEQ ID NO: 723573 - DNA, 33 bp, Homo sapien
ctcctttactgtcagacaattaaccagaaatac

SEQ ID NO: 723574 - DNA, 33 bp, Homo sapien
ctcctttactgtcagataattaaccagaaatac

SEQ ID NO: 723575 - DNA, 33 bp, Homo sapien
ctgacctaatttctaccggaaagaattgtacag

SEQ ID NO: 723576 - DNA, 33 bp, Homo sapien
ctgacctaatttctactggaaagaattgtacag

SEQ ID NO: 723577 - DNA, 33 bp, Homo sapien
aagctaccatatttcacagaaccgaggaaggaa

SEQ ID NO: 723578 - DNA, 33 bp, Homo sapien
aagctaccatatttcatagaaccgaggaaggaa

SEQ ID NO: 723579 - DNA, 33 bp, Homo sapien
gactcttctttaaaaggctgtatgtgtttgtaa

SEQ ID NO: 723580 - DNA, 33 bp, Homo sapien
gactcttctttaaaagtctgtatgtgtttgtaa

SEQ ID NO: 723581 - DNA, 33 bp, Homo sapien
ttgtccaaactgtaagaaagataatatctccta

SEQ ID NO: 723582 - DNA, 33 bp, Homo sapien
ttgtccaaactgtaaggaagataatatctccta

SEQ ID NO: 723583 - DNA, 33 bp, Homo sapien
agttcagggcaaatgccagattgcagggaggta

SEQ ID NO: 723584 - DNA, 33 bp, Homo sapien
agttcagggcaaatgctagattgcagggaggta

SEQ ID NO: 723585 - DNA, 33 bp, Homo sapien
tgtcattttgaatagacagtaaagtcttgtttt

SEQ ID NO: 723586 - DNA, 33 bp, Homo sapien
tgtcattttgaatagatagtaaagtcttgtttt

SEQ ID NO: 723587 - DNA, 33 bp, Homo sapien
ataagagtgatttggacagaccaagtgatccag

SEQ ID NO: 723588 - DNA, 33 bp, Homo sapien
ataagagtgatttggagagaccaagtgatccag

SEQ ID NO: 723589 - DNA, 33 bp, Homo sapien
agaaatactgttaatgcaaaagagccttatcta

SEQ ID NO: 723590 - DNA, 33 bp, Homo sapien
agaaatactgttaatgtaaaagagccttatcta

SEQ ID NO: 723591 - DNA, 33 bp, Homo sapien
actaacaatcctaacaatacccaccatttactg

SEQ ID NO: 723592 - DNA, 33 bp, Homo sapien
actaacaatcctaacagtacccaccatttactg

SEQ ID NO: 723593 - DNA, 33 bp, Homo sapien
acaagaaggcaggaagaaggaaaaatcagttta

SEQ ID NO: 723594 - DNA, 33 bp, Homo sapien
acaagaaggcaggaaggaggaaaaatcagttta

SEQ ID NO: 723595 - DNA, 33 bp, Homo sapien
cactactaaaatgtacaaaaatccaatgtaagc

SEQ ID NO: 723596 - DNA, 33 bp, Homo sapien
cactactaaaatgtaccaaaatccaatgtaagc

SEQ ID NO: 723597 - DNA, 33 bp, Homo sapien
agaataaatgaagagaacagcttgggtcctgga

SEQ ID NO: 723598 - DNA, 33 bp, Homo sapien
agaataaatgaagagagcagcttgggtcctgga

SEQ ID NO: 723599 - DNA, 33 bp, Homo sapien
catagatctagtaagagatttttgagtgactga

SEQ ID NO: 723600 - DNA, 33 bp, Homo sapien
catagatctagtaagatatttttgagtgactga

SEQ ID NO: 723601 - DNA, 33 bp, Homo sapien
ccctagacttccactcacagcagttcaggctgg

SEQ ID NO: 723602 - DNA, 33 bp, Homo sapien
ccctagacttccactcgcagcagttcaggctgg

SEQ ID NO: 723603 - DNA, 33 bp, Homo sapien
accccatatgtccccaaatccagaactatcatg

SEQ ID NO: 723604 - DNA, 33 bp, Homo sapien
accccatatgtccccagatccagaactatcatg

SEQ ID NO: 723605 - DNA, 33 bp, Homo sapien
tctcgatagttgttccacatttgatgaaaatat

SEQ ID NO: 723606 - DNA, 33 bp, Homo sapien
tctcgatagttgttccgcatttgatgaaaatat

SEQ ID NO: 723607 - DNA, 33 bp, Homo sapien
gcttcttgcaccatgaacggtctggttgggaag

SEQ ID NO: 723608 - DNA, 33 bp, Homo sapien
gcttcttgcaccatgagcggtctggttgggaag

SEQ ID NO: 723609 - DNA, 33 bp, Homo sapien
ctcaatactaatgttgaatgtaaacggcctaaa

SEQ ID NO: 723610 - DNA, 33 bp, Homo sapien
ctcaatactaatgttggatgtaaacggcctaaa

SEQ ID NO: 723611 - DNA, 33 bp, Homo sapien
aaaccaaaggccttaactgaggtaggaatttaa

SEQ ID NO: 723612 - DNA, 33 bp, Homo sapien
aaaccaaaggccttaattgaggtaggaatttaa

SEQ ID NO: 723613 - DNA, 33 bp, Homo sapien
ttaaaatgctgacaaaagcctgttacccaataa

SEQ ID NO: 723614 - DNA, 33 bp, Homo sapien
ttaaaatgctgacaaatgcctgttacccaataa

SEQ ID NO: 723615 - DNA, 33 bp, Homo sapien
tgcccagctaatctaaaacgtctttttaatcta

SEQ ID NO: 723616 - DNA, 33 bp, Homo sapien
tgcccagctaatctaatacgtctttttaatcta

SEQ ID NO: 723617 - DNA, 33 bp, Homo sapien
tgtgataaaattctatcaacccagaaatcacat

SEQ ID NO: 723618 - DNA, 33 bp, Homo sapien
tgtgataaaattctatgaacccagaaatcacat

SEQ ID NO: 723619 - DNA, 33 bp, Homo sapien
taaaacatttattccaagtgccggtttttatat

SEQ ID NO: 723620 - DNA, 33 bp, Homo sapien
taaaacatttattccaggtgccggtttttatat

SEQ ID NO: 723621 - DNA, 33 bp, Homo sapien
catgacaagatccagaggttcctgaattagtca

SEQ ID NO: 723622 - DNA, 33 bp, Homo sapien
catgacaagatccagatgttcctgaattagtca

SEQ ID NO: 723623 - DNA, 33 bp, Homo sapien
tttcagggtccagtagaataagctgggaacttc

SEQ ID NO: 723624 - DNA, 33 bp, Homo sapien
tttcagggtccagtagcataagctgggaacttc

SEQ ID NO: 723625 - DNA, 33 bp, Homo sapien
tgaggtcctgcataaacgttaggcttgagagaa

SEQ ID NO: 723626 - DNA, 33 bp, Homo sapien
tgaggtcctgcataaatgttaggcttgagagaa

SEQ ID NO: 723627 - DNA, 33 bp, Homo sapien
tgtccttaaatctagaaaaggtcaaatgttcaa

SEQ ID NO: 723628 - DNA, 33 bp, Homo sapien
tgtccttaaatctagacaaggtcaaatgttcaa

SEQ ID NO: 723629 - DNA, 33 bp, Homo sapien
cgcaatacagctcgtacagcaaaaacagtccaa

SEQ ID NO: 723630 - DNA, 33 bp, Homo sapien
cgcaatacagctcgtatagcaaaaacagtccaa

SEQ ID NO: 723631 - DNA, 33 bp, Homo sapien
cacaatgagatttcgacacacagatgattgaaa

SEQ ID NO: 723632 - DNA, 33 bp, Homo sapien
cacaatgagatttcgatacacagatgattgaaa

SEQ ID NO: 723633 - DNA, 33 bp, Homo sapien
aaaagagggcattcacaggctatctgagtaccc

SEQ ID NO: 723634 - DNA, 33 bp, Homo sapien
aaaagagggcattcacgggctatctgagtaccc

SEQ ID NO: 723635 - DNA, 33 bp, Homo sapien
tagacaagacttatgacatagagaagtaacgac

SEQ ID NO: 723636 - DNA, 33 bp, Homo sapien
tagacaagacttatgatatagagaagtaacgac

SEQ ID NO: 723637 - DNA, 33 bp, Homo sapien
gtgatagaaagaggccaaggacgctacggtcat

SEQ ID NO: 723638 - DNA, 33 bp, Homo sapien
gtgatagaaagaggccgaggacgctacggtcat

SEQ ID NO: 723639 - DNA, 33 bp, Homo sapien
gatttatatgcactaactcaataagttctccta

SEQ ID NO: 723640 - DNA, 33 bp, Homo sapien
gatttatatgcactaattcaataagttctccta

SEQ ID NO: 723641 - DNA, 33 bp, Homo sapien
tggaaactgtatttaaaaaaaatgttgaaaatg

SEQ ID NO: 723642 - DNA, 33 bp, Homo sapien
tggaaactgtatttaagaaaaatgttgaaaatg

SEQ ID NO: 723643 - DNA, 33 bp, Homo sapien
gtgcaaaatacactcactcctccctcagagcct

SEQ ID NO: 723644 - DNA, 33 bp, Homo sapien
gtgcaaaatacactcattcctccctcagagcct

SEQ ID NO: 723645 - DNA, 33 bp, Homo sapien
agctttgaacctgaacccttaatggtacgaggc

SEQ ID NO: 723646 - DNA, 33 bp, Homo sapien
agctttgaacctgaactcttaatggtacgaggc

SEQ ID NO: 723647 - DNA, 33 bp, Homo sapien
cagtctaataagcaacaatggagcaacgggtga

SEQ ID NO: 723648 - DNA, 33 bp, Homo sapien
cagtctaataagcaacgatggagcaacgggtga

SEQ ID NO: 723649 - DNA, 33 bp, Homo sapien
ggcagccaatttaaaaatatctccaagtcaggg

SEQ ID NO: 723650 - DNA, 33 bp, Homo sapien
ggcagccaatttaaaagtatctccaagtcaggg

SEQ ID NO: 723651 - DNA, 33 bp, Homo sapien
attggctggcaagaaaccgcttaggtagacagg

SEQ ID NO: 723652 - DNA, 33 bp, Homo sapien
attggctggcaagaaagcgcttaggtagacagg

SEQ ID NO: 723653 - DNA, 33 bp, Homo sapien
gttgtaatagggatgccataccagtgctttagg

SEQ ID NO: 723654 - DNA, 33 bp, Homo sapien
gttgtaatagggatgctataccagtgctttagg

SEQ ID NO: 723655 - DNA, 33 bp, Homo sapien
ctaactataaaccacaagatggccaagtttttg

SEQ ID NO: 723656 - DNA, 33 bp, Homo sapien
ctaactataaaccacaggatggccaagtttttg

SEQ ID NO: 723657 - DNA, 33 bp, Homo sapien
tcagtatcactttaagccctgcatttaattggc

SEQ ID NO: 723658 - DNA, 33 bp, Homo sapien
tcagtatcactttaagtcctgcatttaattggc

SEQ ID NO: 723659 - DNA, 33 bp, Homo sapien
ttcatgtatcaagtccaaacatttgatagttta

SEQ ID NO: 723660 - DNA, 33 bp, Homo sapien
ttcatgtatcaagtccgaacatttgatagttta

SEQ ID NO: 723661 - DNA, 33 bp, Homo sapien
tttataaattgtaacaatcattccagttatcaa

SEQ ID NO: 723662 - DNA, 33 bp, Homo sapien
tttataaattgtaacagtcattccagttatcaa

SEQ ID NO: 723663 - DNA, 33 bp, Homo sapien
gcttcactcactttcaggtctttccttttcagg

SEQ ID NO: 723664 - DNA, 33 bp, Homo sapien
gcttcactcactttcatgtctttccttttcagg

SEQ ID NO: 723665 - DNA, 33 bp, Homo sapien
gttgtttggagagatacggaatgagagaattat

SEQ ID NO: 723666 - DNA, 33 bp, Homo sapien
gttgtttggagagatatggaatgagagaattat

SEQ ID NO: 723667 - DNA, 33 bp, Homo sapien
tgtaaccttgctaggacggtgcctggcaaagag

SEQ ID NO: 723668 - DNA, 33 bp, Homo sapien
tgtaaccttgctaggatggtgcctggcaaagag

SEQ ID NO: 723669 - DNA, 33 bp, Homo sapien
catagtgttgcctccacgctttctgtgatcggt

SEQ ID NO: 723670 - DNA, 33 bp, Homo sapien
catagtgttgcctccatgctttctgtgatcggt

SEQ ID NO: 723671 - DNA, 33 bp, Homo sapien
taaagatgccctcccccaagattcttatctgtt

SEQ ID NO: 723672 - DNA, 33 bp, Homo sapien
taaagatgccctccccgaagattcttatctgtt

SEQ ID NO: 723673 - DNA, 33 bp, Homo sapien
attctaaatgaaagcaaaactctagaaatttaa

SEQ ID NO: 723674 - DNA, 33 bp, Homo sapien
attctaaatgaaagcagaactctagaaatttaa

SEQ ID NO: 723675 - DNA, 33 bp, Homo sapien
tttcagttgagaaatgaaaagcaatacaacaaa

SEQ ID NO: 723676 - DNA, 33 bp, Homo sapien
tttcagttgagaaatggaaagcaatacaacaaa

SEQ ID NO: 723677 - DNA, 33 bp, Homo sapien
ggatagctgtgaccatcatgccatctgcctagc

SEQ ID NO: 723678 - DNA, 33 bp, Homo sapien
ggatagctgtgaccattatgccatctgcctagc

SEQ ID NO: 723679 - DNA, 33 bp, Homo sapien
ggatcttaccaatttacatcgctaattagtagg

SEQ ID NO: 723680 - DNA, 33 bp, Homo sapien
ggatcttaccaatttatatcgctaattagtagg

SEQ ID NO: 723681 - DNA, 33 bp, Homo sapien
gatcctgttgtacccaagcttaaaaggacaatg

SEQ ID NO: 723682 - DNA, 33 bp, Homo sapien
gatcctgttgtacccaggcttaaaaggacaatg

SEQ ID NO: 723683 - DNA, 33 bp, Homo sapien
tacatttatttccagaagagaattaagttttgt

SEQ ID NO: 723684 - DNA, 33 bp, Homo sapien
tacatttatttccagaggagaattaagttttgt

SEQ ID NO: 723685 - DNA, 33 bp, Homo sapien
cagagccacgttcagaatcattctccagactgc

SEQ ID NO: 723686 - DNA, 33 bp, Homo sapien
cagagccacgttcagattcattctccagactgc

SEQ ID NO: 723687 - DNA, 33 bp, Homo sapien
atgtacacttaaattacgcatattttatgtact

SEQ ID NO: 723688 - DNA, 33 bp, Homo sapien
atgtacacttaaattaggcatattttatgtact

SEQ ID NO: 723689 - DNA, 33 bp, Homo sapien
actaactatagttggcaaagacctaataaaaat

SEQ ID NO: 723690 - DNA, 33 bp, Homo sapien
actaactatagttggcgaagacctaataaaaat

SEQ ID NO: 723691 - DNA, 33 bp, Homo sapien
ggatgggaagtaagaacagaaccccaagagcct

SEQ ID NO: 723692 - DNA, 33 bp, Homo sapien
ggatgggaagtaagaatagaaccccaagagcct

SEQ ID NO: 723693 - DNA, 33 bp, Homo sapien
cactttatggcacagaacttgcattgctaccct

SEQ ID NO: 723694 - DNA, 33 bp, Homo sapien
cactttatggcacagagcttgcattgctaccct

SEQ ID NO: 723695 - DNA, 33 bp, Homo sapien
aatagatgaattttcaaatccaagttcaacaaa

SEQ ID NO: 723696 - DNA, 33 bp, Homo sapien
aatagatgaattttcacatccaagttcaacaaa

SEQ ID NO: 723697 - DNA, 33 bp, Homo sapien
ggggacagaaaacaaaatgagggaaggttgatg

SEQ ID NO: 723698 - DNA, 33 bp, Homo sapien
ggggacagaaaacaaagtgagggaaggttgatg

SEQ ID NO: 723699 - DNA, 33 bp, Homo sapien
acctggagaaaaatgccgagaggtctcagtgtt

SEQ ID NO: 723700 - DNA, 33 bp, Homo sapien
acctggagaaaaatgctgagaggtctcagtgtt

SEQ ID NO: 723701 - DNA, 33 bp, Homo sapien
atagcttcttctacagactgaccattttaatgg

SEQ ID NO: 723702 - DNA, 33 bp, Homo sapien
atagcttcttctacaggctgaccattttaatgg

SEQ ID NO: 723703 - DNA, 33 bp, Homo sapien
accactgcttgaggacactgaatttgatttttc

SEQ ID NO: 723704 - DNA, 33 bp, Homo sapien
accactgcttgaggaccctgaatttgatttttc

SEQ ID NO: 723705 - DNA, 33 bp, Homo sapien
ctctccaggaattaagaacaccaggtcactcac

SEQ ID NO: 723706 - DNA, 33 bp, Homo sapien
ctctccaggaattaaggacaccaggtcactcac

SEQ ID NO: 723707 - DNA, 33 bp, Homo sapien
tgtgttaggaggctcactctgtgtttcttgtcc

SEQ ID NO: 723708 - DNA, 33 bp, Homo sapien
tgtgttaggaggctcattctgtgtttcttgtcc

SEQ ID NO: 723709 - DNA, 33 bp, Homo sapien
tatgtatccagctatccagtccgctcaactgta

SEQ ID NO: 723710 - DNA, 33 bp, Homo sapien
tatgtatccagctatctagtccgctcaactgta

SEQ ID NO: 723711 - DNA, 33 bp, Homo sapien
tatttggtctttctaggaatccctctcactctg

SEQ ID NO: 723712 - DNA, 33 bp, Homo sapien
tatttggtctttctagtaatccctctcactctg

SEQ ID NO: 723713 - DNA, 33 bp, Homo sapien
aaaatgatttaacaaacggcatcacaagatcta

SEQ ID NO: 723714 - DNA, 33 bp, Homo sapien
aaaatgatttaacaaatggcatcacaagatcta

SEQ ID NO: 723715 - DNA, 33 bp, Homo sapien
ttgatcatgttgctcacagaaaatccataactg

SEQ ID NO: 723716 - DNA, 33 bp, Homo sapien
ttgatcatgttgctcatagaaaatccataactg

SEQ ID NO: 723717 - DNA, 33 bp, Homo sapien
aagcagatgagccacaactaatacaggtacaat

SEQ ID NO: 723718 - DNA, 33 bp, Homo sapien
aagcagatgagccacagctaatacaggtacaat

SEQ ID NO: 723719 - DNA, 33 bp, Homo sapien
agaggccagaatatgaactcttggagagaagga

SEQ ID NO: 723720 - DNA, 33 bp, Homo sapien
agaggccagaatatgagctcttggagagaagga

SEQ ID NO: 723721 - DNA, 33 bp, Homo sapien
gtattctagttttgccgatatgcattttctttt

SEQ ID NO: 723722 - DNA, 33 bp, Homo sapien
gtattctagttttgcctatatgcattttctttt

SEQ ID NO: 723723 - DNA, 33 bp, Homo sapien
gtgtgatattttccaggatctggtgacttttgt

SEQ ID NO: 723724 - DNA, 33 bp, Homo sapien
gtgtgatattttccagtatctggtgacttttgt

SEQ ID NO: 723725 - DNA, 33 bp, Homo sapien
cctcctcagttgttgcacaaatacctcaaatct

SEQ ID NO: 723726 - DNA, 33 bp, Homo sapien
cctcctcagttgttgcgcaaatacctcaaatct

SEQ ID NO: 723727 - DNA, 33 bp, Homo sapien
ataacaactgccgcaaatacttctggtttcctc

SEQ ID NO: 723728 - DNA, 33 bp, Homo sapien
ataacaactgccgcaagtacttctggtttcctc

SEQ ID NO: 723729 - DNA, 33 bp, Homo sapien
atgtttctaacacaaacaaatgatgaatgcttg

SEQ ID NO: 723730 - DNA, 33 bp, Homo sapien
atgtttctaacacaaagaaatgatgaatgcttg

SEQ ID NO: 723731 - DNA, 33 bp, Homo sapien
aagagtgtgctgggaaaacaaaatgagtcttca

SEQ ID NO: 723732 - DNA, 33 bp, Homo sapien
aagagtgtgctgggaacacaaaatgagtcttca

SEQ ID NO: 723733 - DNA, 33 bp, Homo sapien
tctttgtcagactgtgaatgagaccaaaaaaag

SEQ ID NO: 723734 - DNA, 33 bp, Homo sapien
tctttgtcagactgtggatgagaccaaaaaaag

SEQ ID NO: 723735 - DNA, 33 bp, Homo sapien
gctcgtctacaagaaacggctaacaaaattaca

SEQ ID NO: 723736 - DNA, 33 bp, Homo sapien
gctcgtctacaagaaatggctaacaaaattaca

SEQ ID NO: 723737 - DNA, 33 bp, Homo sapien
agaactggtttttttaccaaatcatcttaaaat

SEQ ID NO: 723738 - DNA, 33 bp, Homo sapien
agaactggtttttttatcaaatcatcttaaaat

SEQ ID NO: 723739 - DNA, 33 bp, Homo sapien
acagcatgaaagaggaaccgaggagtgctggct

SEQ ID NO: 723740 - DNA, 33 bp, Homo sapien
acagcatgaaagaggacccgaggagtgctggct

SEQ ID NO: 723741 - DNA, 33 bp, Homo sapien
tctgtgcttactaaaactttgttgatatggata

SEQ ID NO: 723742 - DNA, 33 bp, Homo sapien
tctgtgcttactaaaattttgttgatatggata

SEQ ID NO: 723743 - DNA, 33 bp, Homo sapien
ctgtctgttcaatccaatattctagcggtctag

SEQ ID NO: 723744 - DNA, 33 bp, Homo sapien
ctgtctgttcaatccagtattctagcggtctag

SEQ ID NO: 723745 - DNA, 33 bp, Homo sapien
ccacacctggaggaaacgaccagtcaaatccag

SEQ ID NO: 723746 - DNA, 33 bp, Homo sapien
ccacacctggaggaaatgaccagtcaaatccag

SEQ ID NO: 723747 - DNA, 33 bp, Homo sapien
aacaaacatagacctacaagtgccagccatgtg

SEQ ID NO: 723748 - DNA, 33 bp, Homo sapien
aacaaacatagacctataagtgccagccatgtg

SEQ ID NO: 723749 - DNA, 33 bp, Homo sapien
tcattcattgagcacacaatgactcacctgaaa

SEQ ID NO: 723750 - DNA, 33 bp, Homo sapien
tcattcattgagcacagaatgactcacctgaaa

SEQ ID NO: 723751 - DNA, 33 bp, Homo sapien
gaatgaatgacacttacgtatgtttaatgcatt

SEQ ID NO: 723752 - DNA, 33 bp, Homo sapien
gaatgaatgacacttatgtatgtttaatgcatt

SEQ ID NO: 723753 - DNA, 33 bp, Homo sapien
taccatgcaccttaatcaaattaaaccacttaa

SEQ ID NO: 723754 - DNA, 33 bp, Homo sapien
taccatgcaccttaatgaaattaaaccacttaa

SEQ ID NO: 723755 - DNA, 33 bp, Homo sapien
gtcaatcatctatcacactcccttaagctagaa

SEQ ID NO: 723756 - DNA, 33 bp, Homo sapien
gtcaatcatctatcacgctcccttaagctagaa

SEQ ID NO: 723757 - DNA, 33 bp, Homo sapien
cttaactcaataggaaatagaactaagtgctct

SEQ ID NO: 723758 - DNA, 33 bp, Homo sapien
cttaactcaataggaagtagaactaagtgctct

SEQ ID NO: 723759 - DNA, 33 bp, Homo sapien
aaaaacatttatctcacgccttaaaaatgtttt

SEQ ID NO: 723760 - DNA, 33 bp, Homo sapien
aaaaacatttatctcatgccttaaaaatgtttt

SEQ ID NO: 723761 - DNA, 33 bp, Homo sapien
aactggtattcaaaacaacctcatgaaaaccct

SEQ ID NO: 723762 - DNA, 33 bp, Homo sapien
aactggtattcaaaaccacctcatgaaaaccct

SEQ ID NO: 723763 - DNA, 33 bp, Homo sapien
tgctttctagaccaataaactttctcatactga

SEQ ID NO: 723764 - DNA, 33 bp, Homo sapien
tgctttctagaccaattaactttctcatactga

SEQ ID NO: 723765 - DNA, 33 bp, Homo sapien
taggtgatatatccaaagctacagagtgtgcat

SEQ ID NO: 723766 - DNA, 33 bp, Homo sapien
taggtgatatatccaacgctacagagtgtgcat

SEQ ID NO: 723767 - DNA, 33 bp, Homo sapien
attccaatgtcatttacagagatatttccccaa

SEQ ID NO: 723768 - DNA, 33 bp, Homo sapien
attccaatgtcatttagagagatatttccccaa

SEQ ID NO: 723769 - DNA, 33 bp, Homo sapien
gggaaaagcttgaaatcacttagaaggctgaac

SEQ ID NO: 723770 - DNA, 33 bp, Homo sapien
gggaaaagcttgaaatgacttagaaggctgaac

SEQ ID NO: 723771 - DNA, 33 bp, Homo sapien
aagtgacactgataaacgaatactttctgagaa

SEQ ID NO: 723772 - DNA, 33 bp, Homo sapien
aagtgacactgataaaggaatactttctgagaa

SEQ ID NO: 723773 - DNA, 33 bp, Homo sapien
agtaagcaactcattcaagatacttcagccatc

SEQ ID NO: 723774 - DNA, 33 bp, Homo sapien
agtaagcaactcattcgagatacttcagccatc

SEQ ID NO: 723775 - DNA, 33 bp, Homo sapien
aatgcttctaaaccaacaaattacagaaaacat

SEQ ID NO: 723776 - DNA, 33 bp, Homo sapien
aatgcttctaaaccaagaaattacagaaaacat

SEQ ID NO: 723777 - DNA, 33 bp, Homo sapien
aacagagtaaaggacacgaatacacttctcaaa

SEQ ID NO: 723778 - DNA, 33 bp, Homo sapien
aacagagtaaaggacatgaatacacttctcaaa

SEQ ID NO: 723779 - DNA, 33 bp, Homo sapien
tgctcctcctctatcccccaaaaactactgata

SEQ ID NO: 723780 - DNA, 33 bp, Homo sapien
tgctcctcctctatcctccaaaaactactgata

SEQ ID NO: 723781 - DNA, 33 bp, Homo sapien
actagaaatgagctacaaggagtaaaatacaca

SEQ ID NO: 723782 - DNA, 33 bp, Homo sapien
actagaaatgagctacgaggagtaaaatacaca

SEQ ID NO: 723783 - DNA, 33 bp, Homo sapien
tttctgcaagatgcaactggatatttttaaatt

SEQ ID NO: 723784 - DNA, 33 bp, Homo sapien
tttctgcaagatgcaattggatatttttaaatt

SEQ ID NO: 723785 - DNA, 33 bp, Homo sapien
aattttagttatagcaatctctctcactttgtt

SEQ ID NO: 723786 - DNA, 33 bp, Homo sapien
aattttagttatagcattctctctcactttgtt

SEQ ID NO: 723787 - DNA, 33 bp, Homo sapien
agtattcagttcactaccatttactgtggtgta

SEQ ID NO: 723788 - DNA, 33 bp, Homo sapien
agtattcagttcactatcatttactgtggtgta

SEQ ID NO: 723789 - DNA, 33 bp, Homo sapien
taaacagttgagaagacggatagcccaaacaac

SEQ ID NO: 723790 - DNA, 33 bp, Homo sapien
taaacagttgagaagatggatagcccaaacaac

SEQ ID NO: 723791 - DNA, 33 bp, Homo sapien
gtagatgtgtttgtaacatatgttgaatgtgta

SEQ ID NO: 723792 - DNA, 33 bp, Homo sapien
gtagatgtgtttgtaatatatgttgaatgtgta

SEQ ID NO: 723793 - DNA, 33 bp, Homo sapien
tttttcataaatgtaactaacctgccttttaaa

SEQ ID NO: 723794 - DNA, 33 bp, Homo sapien
tttttcataaatgtaagtaacctgccttttaaa

SEQ ID NO: 723795 - DNA, 33 bp, Homo sapien
tctctgaaaggaaagacctatcgcattctcaac

SEQ ID NO: 723796 - DNA, 33 bp, Homo sapien
tctctgaaaggaaagatctatcgcattctcaac

SEQ ID NO: 723797 - DNA, 33 bp, Homo sapien
tagtgataaaattatacgtttgccacaaacagc

SEQ ID NO: 723798 - DNA, 33 bp, Homo sapien
tagtgataaaattatatgtttgccacaaacagc

SEQ ID NO: 723799 - DNA, 33 bp, Homo sapien
ggtgaaggtgaattaccgctatcatctactatc

SEQ ID NO: 723800 - DNA, 33 bp, Homo sapien
ggtgaaggtgaattactgctatcatctactatc

SEQ ID NO: 723801 - DNA, 33 bp, Homo sapien
tcaaaatgattgttaacctgtgttcataaatca

SEQ ID NO: 723802 - DNA, 33 bp, Homo sapien
tcaaaatgattgttaatctgtgttcataaatca

SEQ ID NO: 723803 - DNA, 33 bp, Homo sapien
tgaatgagagggaaaacagaagtgagccagttc

SEQ ID NO: 723804 - DNA, 33 bp, Homo sapien
tgaatgagagggaaaagagaagtgagccagttc

SEQ ID NO: 723805 - DNA, 33 bp, Homo sapien
ttagatcattggtgggaagtttgtgaaacgaaa

SEQ ID NO: 723806 - DNA, 33 bp, Homo sapien
ttagatcattggtggggagtttgtgaaacgaaa

SEQ ID NO: 723807 - DNA, 33 bp, Homo sapien
tagggataaaaggaaacggctgtaagacacctg

SEQ ID NO: 723808 - DNA, 33 bp, Homo sapien
tagggataaaaggaaatggctgtaagacacctg

SEQ ID NO: 723809 - DNA, 33 bp, Homo sapien
ggaatgaagaacacccagcactggaaaaggact

SEQ ID NO: 723810 - DNA, 33 bp, Homo sapien
ggaatgaagaacacccggcactggaaaaggact

SEQ ID NO: 723811 - DNA, 33 bp, Homo sapien
agctcactccaaaatcagatttctctagaaaaa

SEQ ID NO: 723812 - DNA, 33 bp, Homo sapien
agctcactccaaaatcggatttctctagaaaaa

SEQ ID NO: 723813 - DNA, 33 bp, Homo sapien
gaacttgataaatagggaccaaggaataccatg

SEQ ID NO: 723814 - DNA, 33 bp, Homo sapien
gaacttgataaataggtaccaaggaataccatg

SEQ ID NO: 723815 - DNA, 33 bp, Homo sapien
cccccttagtatagtacgcaaagtcagcctgtc

SEQ ID NO: 723816 - DNA, 33 bp, Homo sapien
cccccttagtatagtatgcaaagtcagcctgtc

SEQ ID NO: 723817 - DNA, 33 bp, Homo sapien
tctctctggtcttttacaccttaagcaagaatt

SEQ ID NO: 723818 - DNA, 33 bp, Homo sapien
tctctctggtcttttataccttaagcaagaatt

SEQ ID NO: 723819 - DNA, 33 bp, Homo sapien
ctcaaggtaccacaatcagttagcatagggaag

SEQ ID NO: 723820 - DNA, 33 bp, Homo sapien
ctcaaggtaccacaattagttagcatagggaag

SEQ ID NO: 723821 - DNA, 33 bp, Homo sapien
gtgtacgccacgttgaagcctagttaataaacc

SEQ ID NO: 723822 - DNA, 33 bp, Homo sapien
gtgtacgccacgttgaggcctagttaataaacc

SEQ ID NO: 723823 - DNA, 33 bp, Homo sapien
gtgctaatctagccaccaatatcccataagagc

SEQ ID NO: 723824 - DNA, 33 bp, Homo sapien
gtgctaatctagccacgaatatcccataagagc

SEQ ID NO: 723825 - DNA, 33 bp, Homo sapien
caaactagcaacaaaaaactcacataatgctta

SEQ ID NO: 723826 - DNA, 33 bp, Homo sapien
caaactagcaacaaaacactcacataatgctta

SEQ ID NO: 723827 - DNA, 33 bp, Homo sapien
gatacagtcatcttacacctgccaatgcctcca

SEQ ID NO: 723828 - DNA, 33 bp, Homo sapien
gatacagtcatcttactcctgccaatgcctcca

SEQ ID NO: 723829 - DNA, 33 bp, Homo sapien
ttaaaaaagtgggaaaacatggcgagatgtttt

SEQ ID NO: 723830 - DNA, 33 bp, Homo sapien
ttaaaaaagtgggaaatcatggcgagatgtttt

SEQ ID NO: 723831 - DNA, 33 bp, Homo sapien
tgtgctcatcaaggcaatagtgattgttgcaaa

SEQ ID NO: 723832 - DNA, 33 bp, Homo sapien
tgtgctcatcaaggcagtagtgattgttgcaaa

SEQ ID NO: 723833 - DNA, 33 bp, Homo sapien
ttagagtcaagcatgaagaataggtaacttcgg

SEQ ID NO: 723834 - DNA, 33 bp, Homo sapien
ttagagtcaagcatgaggaataggtaacttcgg

SEQ ID NO: 723835 - DNA, 33 bp, Homo sapien
catgtaatttgccttacccgggctgttgcctac

SEQ ID NO: 723836 - DNA, 33 bp, Homo sapien
catgtaatttgccttatccgggctgttgcctac

SEQ ID NO: 723837 - DNA, 33 bp, Homo sapien
gccacaattacccaaactcaataaagcaaaaat

SEQ ID NO: 723838 - DNA, 33 bp, Homo sapien
gccacaattacccaaattcaataaagcaaaaat

SEQ ID NO: 723839 - DNA, 33 bp, Homo sapien
taaagatgtgtttacacggtcatcttgatagag

SEQ ID NO: 723840 - DNA, 33 bp, Homo sapien
taaagatgtgtttacagggtcatcttgatagag

SEQ ID NO: 723841 - DNA, 33 bp, Homo sapien
caggccaggcctgaaaatggcgtgcatctcttt

SEQ ID NO: 723842 - DNA, 33 bp, Homo sapien
caggccaggcctgaaagtggcgtgcatctcttt

SEQ ID NO: 723843 - DNA, 33 bp, Homo sapien
cctctagttctaaagcaaagtcctaaatgtatt

SEQ ID NO: 723844 - DNA, 33 bp, Homo sapien
cctctagttctaaagcgaagtcctaaatgtatt

SEQ ID NO: 723845 - DNA, 33 bp, Homo sapien
atcatctaaatgggaccctacttgatgctataa

SEQ ID NO: 723846 - DNA, 33 bp, Homo sapien
atcatctaaatgggactctacttgatgctataa

SEQ ID NO: 723847 - DNA, 33 bp, Homo sapien
agatgatgatgccgaaatgggatttgaaggatg

SEQ ID NO: 723848 - DNA, 33 bp, Homo sapien
agatgatgatgccgaagtgggatttgaaggatg

SEQ ID NO: 723849 - DNA, 33 bp, Homo sapien
aggaaagagtatttcaaacagagagagcagcac

SEQ ID NO: 723850 - DNA, 33 bp, Homo sapien
aggaaagagtatttcagacagagagagcagcac

SEQ ID NO: 723851 - DNA, 33 bp, Homo sapien
ttgtgacagttcggtgaattcatatataaaggc

SEQ ID NO: 723852 - DNA, 33 bp, Homo sapien
ttgtgacagttcggtggattcatatataaaggc

SEQ ID NO: 723853 - DNA, 33 bp, Homo sapien
ttcagtgctttggtaacaatacaacataacaca

SEQ ID NO: 723854 - DNA, 33 bp, Homo sapien
ttcagtgctttggtaataatacaacataacaca

SEQ ID NO: 723855 - DNA, 33 bp, Homo sapien
ataatctgttgatgtaaatataaattccgcttc

SEQ ID NO: 723856 - DNA, 33 bp, Homo sapien
ataatctgttgatgtacatataaattccgcttc

SEQ ID NO: 723857 - DNA, 33 bp, Homo sapien
gactggcagaatccaacctatctaacccaatgc

SEQ ID NO: 723858 - DNA, 33 bp, Homo sapien
gactggcagaatccaatctatctaacccaatgc

SEQ ID NO: 723859 - DNA, 33 bp, Homo sapien
tctaaatcaacatgtaataagtagcaagaaatg

SEQ ID NO: 723860 - DNA, 33 bp, Homo sapien
tctaaatcaacatgtagtaagtagcaagaaatg

SEQ ID NO: 723861 - DNA, 33 bp, Homo sapien
agtacccaatataatgccacagaacagcagtca

SEQ ID NO: 723862 - DNA, 33 bp, Homo sapien
agtacccaatataatgtcacagaacagcagtca

SEQ ID NO: 723863 - DNA, 33 bp, Homo sapien
taaataatggatttggaattagatataggaaat

SEQ ID NO: 723864 - DNA, 33 bp, Homo sapien
taaataatggatttgggattagatataggaaat

SEQ ID NO: 723865 - DNA, 33 bp, Homo sapien
atggttcctttgagaacgtcttttttctaacgg

SEQ ID NO: 723866 - DNA, 33 bp, Homo sapien
atggttcctttgagaaggtcttttttctaacgg

SEQ ID NO: 723867 - DNA, 33 bp, Homo sapien
tggcaggggctggtgaaatagaacattagatct

SEQ ID NO: 723868 - DNA, 33 bp, Homo sapien
tggcaggggctggtgagatagaacattagatct

SEQ ID NO: 723869 - DNA, 33 bp, Homo sapien
agtgcctgtgacagcaaccagcctttcctattt

SEQ ID NO: 723870 - DNA, 33 bp, Homo sapien
agtgcctgtgacagcagccagcctttcctattt

SEQ ID NO: 723871 - DNA, 33 bp, Homo sapien
gcatgggtctccttataaattgctccatcttcc

SEQ ID NO: 723872 - DNA, 33 bp, Homo sapien
gcatgggtctccttatgaattgctccatcttcc

SEQ ID NO: 723873 - DNA, 33 bp, Homo sapien
tttacaatgaagcaaaatataatggagtaggtc

SEQ ID NO: 723874 - DNA, 33 bp, Homo sapien
tttacaatgaagcaaagtataatggagtaggtc

SEQ ID NO: 723875 - DNA, 33 bp, Homo sapien
ataatatctgccactagattcactttttgtcgc

SEQ ID NO: 723876 - DNA, 33 bp, Homo sapien
ataatatctgccactatattcactttttgtcgc

SEQ ID NO: 723877 - DNA, 33 bp, Homo sapien
taaaatgtaaaacgataaaacttctagaagata

SEQ ID NO: 723878 - DNA, 33 bp, Homo sapien
taaaatgtaaaacgatgaaacttctagaagata

SEQ ID NO: 723879 - DNA, 33 bp, Homo sapien
ttttgttttcctgaatcatccttttggtactgt

SEQ ID NO: 723880 - DNA, 33 bp, Homo sapien
ttttgttttcctgaattatccttttggtactgt

SEQ ID NO: 723881 - DNA, 33 bp, Homo sapien
aaagctgctgtaaacactcaagcgcagatttct

SEQ ID NO: 723882 - DNA, 33 bp, Homo sapien
aaagctgctgtaaacattcaagcgcagatttct

SEQ ID NO: 723883 - DNA, 33 bp, Homo sapien
tcataattgtgaaaaaccagaggcaaccaagat

SEQ ID NO: 723884 - DNA, 33 bp, Homo sapien
tcataattgtgaaaaatcagaggcaaccaagat

SEQ ID NO: 723885 - DNA, 33 bp, Homo sapien
tgtttcttcacttagcaatatgcccttacagct

SEQ ID NO: 723886 - DNA, 33 bp, Homo sapien
tgtttcttcacttagccatatgcccttacagct

SEQ ID NO: 723887 - DNA, 33 bp, Homo sapien
tatgaaagaatgaaaaatttgttgttgcctaag

SEQ ID NO: 723888 - DNA, 33 bp, Homo sapien
tatgaaagaatgaaaagtttgttgttgcctaag

SEQ ID NO: 723889 - DNA, 33 bp, Homo sapien
ttttttctctccatagaaatacagactccacta

SEQ ID NO: 723890 - DNA, 33 bp, Homo sapien
ttttttctctccataggaatacagactccacta

SEQ ID NO: 723891 - DNA, 33 bp, Homo sapien
catccttcaaatctcaacttcagtataacttgg

SEQ ID NO: 723892 - DNA, 33 bp, Homo sapien
catccttcaaatctcagcttcagtataacttgg

SEQ ID NO: 723893 - DNA, 33 bp, Homo sapien
gaagtgctgttaaaaaatcagataatctgagga

SEQ ID NO: 723894 - DNA, 33 bp, Homo sapien
gaagtgctgttaaaaagtcagataatctgagga

SEQ ID NO: 723895 - DNA, 33 bp, Homo sapien
cctcctccctgtgttacacttttctattggccc

SEQ ID NO: 723896 - DNA, 33 bp, Homo sapien
cctcctccctgtgttatacttttctattggccc

SEQ ID NO: 723897 - DNA, 33 bp, Homo sapien
aggtcttgcctggtccacagtctcttcaacttt

SEQ ID NO: 723898 - DNA, 33 bp, Homo sapien
aggtcttgcctggtccgcagtctcttcaacttt

SEQ ID NO: 723899 - DNA, 33 bp, Homo sapien
tggaataaaattaaccaaaaattgatccaagat

SEQ ID NO: 723900 - DNA, 33 bp, Homo sapien
tggaataaaattaacccaaaattgatccaagat

SEQ ID NO: 723901 - DNA, 33 bp, Homo sapien
agcccataaaggtgaaataatgcacccaacata

SEQ ID NO: 723902 - DNA, 33 bp, Homo sapien
agcccataaaggtgaagtaatgcacccaacata

SEQ ID NO: 723903 - DNA, 33 bp, Homo sapien
gtctgttggtaaagaaatgaaaatggatcacag

SEQ ID NO: 723904 - DNA, 33 bp, Homo sapien
gtctgttggtaaagaagtgaaaatggatcacag

SEQ ID NO: 723905 - DNA, 33 bp, Homo sapien
aaaaattgccaagtacgcatggatacaatagtc

SEQ ID NO: 723906 - DNA, 33 bp, Homo sapien
aaaaattgccaagtactcatggatacaatagtc

SEQ ID NO: 723907 - DNA, 33 bp, Homo sapien
agattgaccgacatacacattgcacaaagcact

SEQ ID NO: 723908 - DNA, 33 bp, Homo sapien
agattgaccgacatacgcattgcacaaagcact

SEQ ID NO: 723909 - DNA, 33 bp, Homo sapien
atctaacaaactatcaactggttcattaccttt

SEQ ID NO: 723910 - DNA, 33 bp, Homo sapien
atctaacaaactatcacctggttcattaccttt

SEQ ID NO: 723911 - DNA, 33 bp, Homo sapien
tatagtattccaattaactatactgccatagtt

SEQ ID NO: 723912 - DNA, 33 bp, Homo sapien
tatagtattccaattacctatactgccatagtt

SEQ ID NO: 723913 - DNA, 33 bp, Homo sapien
ctcgctgagcccagatcatattgtttgttcact

SEQ ID NO: 723914 - DNA, 33 bp, Homo sapien
ctcgctgagcccagattatattgtttgttcact

SEQ ID NO: 723915 - DNA, 33 bp, Homo sapien
gtaatttagaagtgaacaaattgaagcattggt

SEQ ID NO: 723916 - DNA, 33 bp, Homo sapien
gtaatttagaagtgaagaaattgaagcattggt

SEQ ID NO: 723917 - DNA, 33 bp, Homo sapien
tctcatcaagttgtaacgggacatggagcaatg

SEQ ID NO: 723918 - DNA, 33 bp, Homo sapien
tctcatcaagttgtaatgggacatggagcaatg

SEQ ID NO: 723919 - DNA, 33 bp, Homo sapien
tttgctggctattgaactcccagatgtatttag

SEQ ID NO: 723920 - DNA, 33 bp, Homo sapien
tttgctggctattgaattcccagatgtatttag

SEQ ID NO: 723921 - DNA, 33 bp, Homo sapien
ataaagttataatttcacaaaacagaagggaga

SEQ ID NO: 723922 - DNA, 33 bp, Homo sapien
ataaagttataatttcgcaaaacagaagggaga

SEQ ID NO: 723923 - DNA, 33 bp, Homo sapien
tagaatcagtagagtagctattatgtcttaggc

SEQ ID NO: 723924 - DNA, 33 bp, Homo sapien
tagaatcagtagagtatctattatgtcttaggc

SEQ ID NO: 723925 - DNA, 33 bp, Homo sapien
attaaaggtaattaaactaaagtgatggccaca

SEQ ID NO: 723926 - DNA, 33 bp, Homo sapien
attaaaggtaattaaagtaaagtgatggccaca

SEQ ID NO: 723927 - DNA, 33 bp, Homo sapien
ttcaatccatttgtcacgcgccttagccaagga

SEQ ID NO: 723928 - DNA, 33 bp, Homo sapien
ttcaatccatttgtcatgcgccttagccaagga

SEQ ID NO: 723929 - DNA, 33 bp, Homo sapien
tacagtaattcagtcaagaaataaatcactgac

SEQ ID NO: 723930 - DNA, 33 bp, Homo sapien
tacagtaattcagtcaggaaataaatcactgac

SEQ ID NO: 723931 - DNA, 33 bp, Homo sapien
agggcagacagtaatcaaagcagatttctaaat

SEQ ID NO: 723932 - DNA, 33 bp, Homo sapien
agggcagacagtaatcgaagcagatttctaaat

SEQ ID NO: 723933 - DNA, 33 bp, Homo sapien
gtagagtttctcttaaactaaactatcatgtgc

SEQ ID NO: 723934 - DNA, 33 bp, Homo sapien
gtagagtttctcttaatctaaactatcatgtgc

SEQ ID NO: 723935 - DNA, 33 bp, Homo sapien
tcttccagtggttaaccaagggtggctgccaga

SEQ ID NO: 723936 - DNA, 33 bp, Homo sapien
tcttccagtggttaactaagggtggctgccaga

SEQ ID NO: 723937 - DNA, 33 bp, Homo sapien
tcccaaatatgccatgaagtgatccctgaaccc

SEQ ID NO: 723938 - DNA, 33 bp, Homo sapien
tcccaaatatgccatgtagtgatccctgaaccc

SEQ ID NO: 723939 - DNA, 33 bp, Homo sapien
agtgctttgttaagaacgaaaaaaccactgaga

SEQ ID NO: 723940 - DNA, 33 bp, Homo sapien
agtgctttgttaagaaggaaaaaaccactgaga

SEQ ID NO: 723941 - DNA, 33 bp, Homo sapien
tcacctgacactggtacagaagttttggttttt

SEQ ID NO: 723942 - DNA, 33 bp, Homo sapien
tcacctgacactggtatagaagttttggttttt

SEQ ID NO: 723943 - DNA, 33 bp, Homo sapien
actccaggttctttgacgtcctcactgttacag

SEQ ID NO: 723944 - DNA, 33 bp, Homo sapien
actccaggttctttgatgtcctcactgttacag

SEQ ID NO: 723945 - DNA, 33 bp, Homo sapien
tgacttaagcaaaatacgtggttctaggtagtt

SEQ ID NO: 723946 - DNA, 33 bp, Homo sapien
tgacttaagcaaaatatgtggttctaggtagtt

SEQ ID NO: 723947 - DNA, 33 bp, Homo sapien
aggatttacgtaaaagccaagctcatttcagag

SEQ ID NO: 723948 - DNA, 33 bp, Homo sapien
aggatttacgtaaaaggcaagctcatttcagag

SEQ ID NO: 723949 - DNA, 33 bp, Homo sapien
agaggacggatggcaacgaggtatgagaagcaa

SEQ ID NO: 723950 - DNA, 33 bp, Homo sapien
agaggacggatggcaatgaggtatgagaagcaa

SEQ ID NO: 723951 - DNA, 33 bp, Homo sapien
agaagaattttgttaaacatctctcatgtgcta

SEQ ID NO: 723952 - DNA, 33 bp, Homo sapien
agaagaattttgttaatcatctctcatgtgcta

SEQ ID NO: 723953 - DNA, 33 bp, Homo sapien
taagaagtggcagacccgaaattgataactggt

SEQ ID NO: 723954 - DNA, 33 bp, Homo sapien
taagaagtggcagacctgaaattgataactggt

SEQ ID NO: 723955 - DNA, 33 bp, Homo sapien
taatattgtggtaaaaagtgtgagaacaaaata

SEQ ID NO: 723956 - DNA, 33 bp, Homo sapien
taatattgtggtaaaaggtgtgagaacaaaata

SEQ ID NO: 723957 - DNA, 33 bp, Homo sapien
atgcacgtggaaacacaggtttttcatttgtaa

SEQ ID NO: 723958 - DNA, 33 bp, Homo sapien
atgcacgtggaaacactggtttttcatttgtaa

SEQ ID NO: 723959 - DNA, 33 bp, Homo sapien
aaattgtgacttgtccaatcttgggtcattgta

SEQ ID NO: 723960 - DNA, 33 bp, Homo sapien
aaattgtgacttgtccgatcttgggtcattgta

SEQ ID NO: 723961 - DNA, 33 bp, Homo sapien
agcctggttatcttcaatcaacacagagatgaa

SEQ ID NO: 723962 - DNA, 33 bp, Homo sapien
agcctggttatcttcagtcaacacagagatgaa

SEQ ID NO: 723963 - DNA, 33 bp, Homo sapien
ttcagaacactgggagcattgtttgctaaaatt

SEQ ID NO: 723964 - DNA, 33 bp, Homo sapien
ttcagaacactgggaggattgtttgctaaaatt

SEQ ID NO: 723965 - DNA, 33 bp, Homo sapien
gggaattgaagagaatcaacctcatattttgag

SEQ ID NO: 723966 - DNA, 33 bp, Homo sapien
gggaattgaagagaatgaacctcatattttgag

SEQ ID NO: 723967 - DNA, 33 bp, Homo sapien
cttttaaagtagagaactatgttgtgaagatta

SEQ ID NO: 723968 - DNA, 33 bp, Homo sapien
cttttaaagtagagaagtatgttgtgaagatta

SEQ ID NO: 723969 - DNA, 33 bp, Homo sapien
ggtataaatatatccaactttggaaacaaaatc

SEQ ID NO: 723970 - DNA, 33 bp, Homo sapien
ggtataaatatatccatctttggaaacaaaatc

SEQ ID NO: 723971 - DNA, 33 bp, Homo sapien
aaattctatgtcagtaagagaaagttcaggttt

SEQ ID NO: 723972 - DNA, 33 bp, Homo sapien
aaattctatgtcagtaggagaaagttcaggttt

SEQ ID NO: 723973 - DNA, 33 bp, Homo sapien
taaccattgccttttgcattttctaggtccaga

SEQ ID NO: 723974 - DNA, 33 bp, Homo sapien
taaccattgccttttgtattttctaggtccaga

SEQ ID NO: 723975 - DNA, 33 bp, Homo sapien
gtagcttctgcagggaactttctctccaagcct

SEQ ID NO: 723976 - DNA, 33 bp, Homo sapien
gtagcttctgcagggacctttctctccaagcct

SEQ ID NO: 723977 - DNA, 33 bp, Homo sapien
tgtcccatacagcttaaatggaaatcatcccaa

SEQ ID NO: 723978 - DNA, 33 bp, Homo sapien
tgtcccatacagcttatatggaaatcatcccaa

SEQ ID NO: 723979 - DNA, 33 bp, Homo sapien
ataatcttacaactggaattaatagtcgtggtc

SEQ ID NO: 723980 - DNA, 33 bp, Homo sapien
ataatcttacaactggcattaatagtcgtggtc

SEQ ID NO: 723981 - DNA, 33 bp, Homo sapien
aatgcagtgtatgaaaagaagcctgaggaagaa

SEQ ID NO: 723982 - DNA, 33 bp, Homo sapien
aatgcagtgtatgaaatgaagcctgaggaagaa

SEQ ID NO: 723983 - DNA, 33 bp, Homo sapien
tgactggagttgagaaaaatattgcccaaaatg

SEQ ID NO: 723984 - DNA, 33 bp, Homo sapien
tgactggagttgagaacaatattgcccaaaatg

SEQ ID NO: 723985 - DNA, 33 bp, Homo sapien
aggttttatctttggcaagttgtgaattagaat

SEQ ID NO: 723986 - DNA, 33 bp, Homo sapien
aggttttatctttggctagttgtgaattagaat

SEQ ID NO: 723987 - DNA, 33 bp, Homo sapien
ccagtaaaggttagagcattagaacaaggggtt

SEQ ID NO: 723988 - DNA, 33 bp, Homo sapien
ccagtaaaggttagagtattagaacaaggggtt

SEQ ID NO: 723989 - DNA, 33 bp, Homo sapien
gctgtgttttctcaacagtcgtcagaattataa

SEQ ID NO: 723990 - DNA, 33 bp, Homo sapien
gctgtgttttctcaacggtcgtcagaattataa

SEQ ID NO: 723991 - DNA, 33 bp, Homo sapien
tataccaactaggataacttcaatcacaaataa

SEQ ID NO: 723992 - DNA, 33 bp, Homo sapien
tataccaactaggataccttcaatcacaaataa

SEQ ID NO: 723993 - DNA, 33 bp, Homo sapien
tctattttcaacaaaccacttatctacattgtc

SEQ ID NO: 723994 - DNA, 33 bp, Homo sapien
tctattttcaacaaactacttatctacattgtc

SEQ ID NO: 723995 - DNA, 33 bp, Homo sapien
aatacccttaattccacgtgctatttccagttt

SEQ ID NO: 723996 - DNA, 33 bp, Homo sapien
aatacccttaattccatgtgctatttccagttt

SEQ ID NO: 723997 - DNA, 33 bp, Homo sapien
ataagttaatagtaaagctcactcattaaaata

SEQ ID NO: 723998 - DNA, 33 bp, Homo sapien
ataagttaatagtaaatctcactcattaaaata

SEQ ID NO: 723999 - DNA, 33 bp, Homo sapien
tggtccctcaatgagacagtttttcaagttttg

SEQ ID NO: 724000 - DNA, 33 bp, Homo sapien
tggtccctcaatgagatagtttttcaagttttg

SEQ ID NO: 724001 - DNA, 33 bp, Homo sapien
ttttgtctagggagtcaaaaacattaattttta

SEQ ID NO: 724002 - DNA, 33 bp, Homo sapien
ttttgtctagggagtcgaaaacattaattttta

SEQ ID NO: 724003 - DNA, 33 bp, Homo sapien
aaggaagagtttgacacgaagtaaaagtctctg

SEQ ID NO: 724004 - DNA, 33 bp, Homo sapien
aaggaagagtttgacatgaagtaaaagtctctg

SEQ ID NO: 724005 - DNA, 33 bp, Homo sapien
atagttggagcaatgacgactctttaatccata

SEQ ID NO: 724006 - DNA, 33 bp, Homo sapien
atagttggagcaatgatgactctttaatccata

SEQ ID NO: 724007 - DNA, 33 bp, Homo sapien
aaatacagaggaaaaaaatagaggaattgggag

SEQ ID NO: 724008 - DNA, 33 bp, Homo sapien
aaatacagaggaaaaatatagaggaattgggag

SEQ ID NO: 724009 - DNA, 33 bp, Homo sapien
catttgcaattgaaaacctttcttcatgtacaa

SEQ ID NO: 724010 - DNA, 33 bp, Homo sapien
catttgcaattgaaaatctttcttcatgtacaa

SEQ ID NO: 724011 - DNA, 33 bp, Homo sapien
ccaaacagaagcatatgagttggagtattatag

SEQ ID NO: 724012 - DNA, 33 bp, Homo sapien
ccaaacagaagcatattagttggagtattatag

SEQ ID NO: 724013 - DNA, 33 bp, Homo sapien
atccatctggatgtcccgctgtatcaacttatt

SEQ ID NO: 724014 - DNA, 33 bp, Homo sapien
atccatctggatgtcctgctgtatcaacttatt

SEQ ID NO: 724015 - DNA, 33 bp, Homo sapien
aagcaaaaaggttcagccatctggatgcttcac

SEQ ID NO: 724016 - DNA, 33 bp, Homo sapien
aagcaaaaaggttcagtcatctggatgcttcac

SEQ ID NO: 724017 - DNA, 33 bp, Homo sapien
tacatcacctcgtcaaaatcactttagaactaa

SEQ ID NO: 724018 - DNA, 33 bp, Homo sapien
tacatcacctcgtcaagatcactttagaactaa

SEQ ID NO: 724019 - DNA, 33 bp, Homo sapien
tggttgatcaattagcagaaggatgagtcatat

SEQ ID NO: 724020 - DNA, 33 bp, Homo sapien
tggttgatcaattagcggaaggatgagtcatat

SEQ ID NO: 724021 - DNA, 33 bp, Homo sapien
ttagaccacttgaaatgaatgcagtttatatca

SEQ ID NO: 724022 - DNA, 33 bp, Homo sapien
ttagaccacttgaaattaatgcagtttatatca

SEQ ID NO: 724023 - DNA, 33 bp, Homo sapien
agtaatagtgtattgacacccaaaaagagtatt

SEQ ID NO: 724024 - DNA, 33 bp, Homo sapien
agtaatagtgtattgatacccaaaaagagtatt

SEQ ID NO: 724025 - DNA, 33 bp, Homo sapien
gatgatttcctcaaagacaattgatgcgggcta

SEQ ID NO: 724026 - DNA, 33 bp, Homo sapien
gatgatttcctcaaaggcaattgatgcgggcta

SEQ ID NO: 724027 - DNA, 33 bp, Homo sapien
acatgcttaatggaccagaaatccaaccttact

SEQ ID NO: 724028 - DNA, 33 bp, Homo sapien
acatgcttaatggaccggaaatccaaccttact

SEQ ID NO: 724029 - DNA, 33 bp, Homo sapien
aatgtaacaggagtaaaattaagcaaaagtatt

SEQ ID NO: 724030 - DNA, 33 bp, Homo sapien
aatgtaacaggagtaagattaagcaaaagtatt

SEQ ID NO: 724031 - DNA, 33 bp, Homo sapien
caggtatcgttatatagcacagaaaagcccact

SEQ ID NO: 724032 - DNA, 33 bp, Homo sapien
caggtatcgttatatatcacagaaaagcccact

SEQ ID NO: 724033 - DNA, 33 bp, Homo sapien
ctagatctgtcagcaaatggaatagtgataata

SEQ ID NO: 724034 - DNA, 33 bp, Homo sapien
ctagatctgtcagcaagtggaatagtgataata

SEQ ID NO: 724035 - DNA, 33 bp, Homo sapien
ctgctttttccacttccaaagtccttaggaatg

SEQ ID NO: 724036 - DNA, 33 bp, Homo sapien
ctgctttttccacttcgaaagtccttaggaatg

SEQ ID NO: 724037 - DNA, 33 bp, Homo sapien
tgagggcaatgtgatacgtcatataaacaaaag

SEQ ID NO: 724038 - DNA, 33 bp, Homo sapien
tgagggcaatgtgatatgtcatataaacaaaag

SEQ ID NO: 724039 - DNA, 33 bp, Homo sapien
gggcaatctgcttgtgaagattctgctctagaa

SEQ ID NO: 724040 - DNA, 33 bp, Homo sapien
gggcaatctgcttgtggagattctgctctagaa

SEQ ID NO: 724041 - DNA, 33 bp, Homo sapien
tgcatttgtgtaattaccatggactctatacat

SEQ ID NO: 724042 - DNA, 33 bp, Homo sapien
tgcatttgtgtaattatcatggactctatacat

SEQ ID NO: 724043 - DNA, 33 bp, Homo sapien
ctatgaccgccatcacgcattggttcctcaaaa

SEQ ID NO: 724044 - DNA, 33 bp, Homo sapien
ctatgaccgccatcactcattggttcctcaaaa

SEQ ID NO: 724045 - DNA, 33 bp, Homo sapien
atatggattgactttcaatttcctccttgcttc

SEQ ID NO: 724046 - DNA, 33 bp, Homo sapien
atatggattgactttcgatttcctccttgcttc

SEQ ID NO: 724047 - DNA, 33 bp, Homo sapien
gaagcagttgtctctcaatggcttttctctttt

SEQ ID NO: 724048 - DNA, 33 bp, Homo sapien
gaagcagttgtctctcgatggcttttctctttt

SEQ ID NO: 724049 - DNA, 33 bp, Homo sapien
atgtatttgattttgccgatgaaagttgtttgc

SEQ ID NO: 724050 - DNA, 33 bp, Homo sapien
atgtatttgattttgctgatgaaagttgtttgc

SEQ ID NO: 724051 - DNA, 33 bp, Homo sapien
atgaaagaagagcattaaatagtaactggcaat

SEQ ID NO: 724052 - DNA, 33 bp, Homo sapien
atgaaagaagagcattgaatagtaactggcaat

SEQ ID NO: 724053 - DNA, 33 bp, Homo sapien
tcaaactggtttcacaaactcttagcctgtcct

SEQ ID NO: 724054 - DNA, 33 bp, Homo sapien
tcaaactggtttcacagactcttagcctgtcct

SEQ ID NO: 724055 - DNA, 33 bp, Homo sapien
ctcaattcacttatccaggaaaatgattaaaat

SEQ ID NO: 724056 - DNA, 33 bp, Homo sapien
ctcaattcacttatcctggaaaatgattaaaat

SEQ ID NO: 724057 - DNA, 33 bp, Homo sapien
gaaagttggaagaggcaatctgatgatttggca

SEQ ID NO: 724058 - DNA, 33 bp, Homo sapien
gaaagttggaagaggctatctgatgatttggca

SEQ ID NO: 724059 - DNA, 33 bp, Homo sapien
agattcagaatcttgacggatgtgagaatgttt

SEQ ID NO: 724060 - DNA, 33 bp, Homo sapien
agattcagaatcttgatggatgtgagaatgttt

SEQ ID NO: 724061 - DNA, 33 bp, Homo sapien
tctaattgtgttttaacggtttctgggactgca

SEQ ID NO: 724062 - DNA, 33 bp, Homo sapien
tctaattgtgttttaatggtttctgggactgca

SEQ ID NO: 724063 - DNA, 33 bp, Homo sapien
aagatttgcctaagaaatagactgtgccaaaga

SEQ ID NO: 724064 - DNA, 33 bp, Homo sapien
aagatttgcctaagaactagactgtgccaaaga

SEQ ID NO: 724065 - DNA, 33 bp, Homo sapien
gttcagtaccagcatccaagcagcctatcatgg

SEQ ID NO: 724066 - DNA, 33 bp, Homo sapien
gttcagtaccagcatctaagcagcctatcatgg

SEQ ID NO: 724067 - DNA, 33 bp, Homo sapien
tattagagatgtgaccagagaaaattagtgttc

SEQ ID NO: 724068 - DNA, 33 bp, Homo sapien
tattagagatgtgaccggagaaaattagtgttc

SEQ ID NO: 724069 - DNA, 33 bp, Homo sapien
tgattctcagcgataactcttttcaatggaagg

SEQ ID NO: 724070 - DNA, 33 bp, Homo sapien
tgattctcagcgataattcttttcaatggaagg

SEQ ID NO: 724071 - DNA, 33 bp, Homo sapien
tgtggatcctaatgaacattttgtgcccctaat

SEQ ID NO: 724072 - DNA, 33 bp, Homo sapien
tgtggatcctaatgaagattttgtgcccctaat

SEQ ID NO: 724073 - DNA, 33 bp, Homo sapien
tgccctttctagggcaacccgcatagcatgacg

SEQ ID NO: 724074 - DNA, 33 bp, Homo sapien
tgccctttctagggcagcccgcatagcatgacg

SEQ ID NO: 724075 - DNA, 33 bp, Homo sapien
ctttctggatattatacgtaatgctgctttaaa

SEQ ID NO: 724076 - DNA, 33 bp, Homo sapien
ctttctggatattatatgtaatgctgctttaaa

SEQ ID NO: 724077 - DNA, 33 bp, Homo sapien
agcacattgcctacctcactttaatggtgactt

SEQ ID NO: 724078 - DNA, 33 bp, Homo sapien
agcacattgcctaccttactttaatggtgactt

SEQ ID NO: 724079 - DNA, 33 bp, Homo sapien
cggaacatgttcagagaaaagcaggaagcacat

SEQ ID NO: 724080 - DNA, 33 bp, Homo sapien
cggaacatgttcagaggaaagcaggaagcacat

SEQ ID NO: 724081 - DNA, 33 bp, Homo sapien
gaaattcccagttcctcagacactagtttgctc

SEQ ID NO: 724082 - DNA, 33 bp, Homo sapien
gaaattcccagttccttagacactagtttgctc

SEQ ID NO: 724083 - DNA, 33 bp, Homo sapien
tcaatgtgatccgttcactgatgctataatgcc

SEQ ID NO: 724084 - DNA, 33 bp, Homo sapien
tcaatgtgatccgttcgctgatgctataatgcc

SEQ ID NO: 724085 - DNA, 33 bp, Homo sapien
taacactttgatgttaccatttctgggatacag

SEQ ID NO: 724086 - DNA, 33 bp, Homo sapien
taacactttgatgttatcatttctgggatacag

SEQ ID NO: 724087 - DNA, 33 bp, Homo sapien
gacgagattagctaaaggtaagacaaactatat

SEQ ID NO: 724088 - DNA, 33 bp, Homo sapien
gacgagattagctaaatgtaagacaaactatat

SEQ ID NO: 724089 - DNA, 33 bp, Homo sapien
cagggtgcccaaaatgaacctcagtatttttct

SEQ ID NO: 724090 - DNA, 33 bp, Homo sapien
cagggtgcccaaaatggacctcagtatttttct

SEQ ID NO: 724091 - DNA, 33 bp, Homo sapien
acatcccagtgaagacacatttgcaggtataaa

SEQ ID NO: 724092 - DNA, 33 bp, Homo sapien
acatcccagtgaagacgcatttgcaggtataaa

SEQ ID NO: 724093 - DNA, 33 bp, Homo sapien
tttggcctccatagtaccatataataggcactt

SEQ ID NO: 724094 - DNA, 33 bp, Homo sapien
tttggcctccatagtatcatataataggcactt

SEQ ID NO: 724095 - DNA, 33 bp, Homo sapien
ggactgttttaaatcacgggccaggaattatac

SEQ ID NO: 724096 - DNA, 33 bp, Homo sapien
ggactgttttaaatcatgggccaggaattatac

SEQ ID NO: 724097 - DNA, 33 bp, Homo sapien
agcaggtagtatatgcagacagtaatttttctt

SEQ ID NO: 724098 - DNA, 33 bp, Homo sapien
agcaggtagtatatgcggacagtaatttttctt

SEQ ID NO: 724099 - DNA, 33 bp, Homo sapien
aagttctgtttgatcaatgaaaaccttcttttc

SEQ ID NO: 724100 - DNA, 33 bp, Homo sapien
aagttctgtttgatcactgaaaaccttcttttc

SEQ ID NO: 724101 - DNA, 33 bp, Homo sapien
gtaaattttggtttcaacagagctggacaataa

SEQ ID NO: 724102 - DNA, 33 bp, Homo sapien
gtaaattttggtttcagcagagctggacaataa

SEQ ID NO: 724103 - DNA, 33 bp, Homo sapien
ttaaggaggaaatcaaactattcattgcgtgca

SEQ ID NO: 724104 - DNA, 33 bp, Homo sapien
ttaaggaggaaatcaagctattcattgcgtgca

SEQ ID NO: 724105 - DNA, 33 bp, Homo sapien
tgcctctttatctcagaaagtgaagtcttacaa

SEQ ID NO: 724106 - DNA, 33 bp, Homo sapien
tgcctctttatctcaggaagtgaagtcttacaa

SEQ ID NO: 724107 - DNA, 33 bp, Homo sapien
acacactgcttgacaaataacttaaccaaaaaa

SEQ ID NO: 724108 - DNA, 33 bp, Homo sapien
acacactgcttgacaactaacttaaccaaaaaa

SEQ ID NO: 724109 - DNA, 33 bp, Homo sapien
aaaggaagtccagttcaagtgttcagatgatgg

SEQ ID NO: 724110 - DNA, 33 bp, Homo sapien
aaaggaagtccagttcgagtgttcagatgatgg

SEQ ID NO: 724111 - DNA, 33 bp, Homo sapien
agaaaatgtttggaaaatgtaagataccacatt

SEQ ID NO: 724112 - DNA, 33 bp, Homo sapien
agaaaatgtttggaaagtgtaagataccacatt

SEQ ID NO: 724113 - DNA, 33 bp, Homo sapien
aaacttcttgagtatacgaaaaggtgaagtcac

SEQ ID NO: 724114 - DNA, 33 bp, Homo sapien
aaacttcttgagtatatgaaaaggtgaagtcac

SEQ ID NO: 724115 - DNA, 33 bp, Homo sapien
aaatagttgccttagccattatattgtttgcct

SEQ ID NO: 724116 - DNA, 33 bp, Homo sapien
aaatagttgccttagctattatattgtttgcct

SEQ ID NO: 724117 - DNA, 33 bp, Homo sapien
agcaaactcagaataactgaaattgcaatagca

SEQ ID NO: 724118 - DNA, 33 bp, Homo sapien
agcaaactcagaataattgaaattgcaatagca

SEQ ID NO: 724119 - DNA, 33 bp, Homo sapien
ttttggttactattcaccttacctcacaagaaa

SEQ ID NO: 724120 - DNA, 33 bp, Homo sapien
ttttggttactattcatcttacctcacaagaaa

SEQ ID NO: 724121 - DNA, 33 bp, Homo sapien
taaagttgcctaatgacaaataattgaactttg

SEQ ID NO: 724122 - DNA, 33 bp, Homo sapien
taaagttgcctaatgataaataattgaactttg

SEQ ID NO: 724123 - DNA, 33 bp, Homo sapien
tttgcaaaacttaataaaagcaaacaggttgct

SEQ ID NO: 724124 - DNA, 33 bp, Homo sapien
tttgcaaaacttaatagaagcaaacaggttgct

SEQ ID NO: 724125 - DNA, 33 bp, Homo sapien
agcactttctctacttcaaatgtatgatgattt

SEQ ID NO: 724126 - DNA, 33 bp, Homo sapien
agcactttctctacttgaaatgtatgatgattt

SEQ ID NO: 724127 - DNA, 33 bp, Homo sapien
gcaaagtcactgtgtacacttaaggccactttt

SEQ ID NO: 724128 - DNA, 33 bp, Homo sapien
gcaaagtcactgtgtatacttaaggccactttt

SEQ ID NO: 724129 - DNA, 33 bp, Homo sapien
aaaattccattaaaaaattagagcgtagtcatg

SEQ ID NO: 724130 - DNA, 33 bp, Homo sapien
aaaattccattaaaaagttagagcgtagtcatg

SEQ ID NO: 724131 - DNA, 33 bp, Homo sapien
aaaagtattatttgaacgttgagtcttgtatct

SEQ ID NO: 724132 - DNA, 33 bp, Homo sapien
aaaagtattatttgaatgttgagtcttgtatct

SEQ ID NO: 724133 - DNA, 33 bp, Homo sapien
gtcacaattttctgtaggccataaatatagtag

SEQ ID NO: 724134 - DNA, 33 bp, Homo sapien
gtcacaattttctgtatgccataaatatagtag

SEQ ID NO: 724135 - DNA, 33 bp, Homo sapien
gaattactgatacacagaaacgatttcatccca

SEQ ID NO: 724136 - DNA, 33 bp, Homo sapien
gaattactgatacacataaacgatttcatccca

SEQ ID NO: 724137 - DNA, 33 bp, Homo sapien
tgttacatatgtgttcaaaatggctagagaaca

SEQ ID NO: 724138 - DNA, 33 bp, Homo sapien
tgttacatatgtgttccaaatggctagagaaca

SEQ ID NO: 724139 - DNA, 33 bp, Homo sapien
cagcatatggtgaaatcagttgaagaaaaaaaa

SEQ ID NO: 724140 - DNA, 33 bp, Homo sapien
cagcatatggtgaaatgagttgaagaaaaaaaa

SEQ ID NO: 724141 - DNA, 33 bp, Homo sapien
aggtgcactctttcataacaaatacagagtctt

SEQ ID NO: 724142 - DNA, 33 bp, Homo sapien
aggtgcactctttcatgacaaatacagagtctt

SEQ ID NO: 724143 - DNA, 33 bp, Homo sapien
cagaatacttgagctccactctaaaagtcgttt

SEQ ID NO: 724144 - DNA, 33 bp, Homo sapien
cagaatacttgagctctactctaaaagtcgttt

SEQ ID NO: 724145 - DNA, 33 bp, Homo sapien
ctataaagttaagagacagtctttggtttttga

SEQ ID NO: 724146 - DNA, 33 bp, Homo sapien
ctataaagttaagagatagtctttggtttttga

SEQ ID NO: 724147 - DNA, 33 bp, Homo sapien
cccaaatcacaggcaaatatcaatgttttgcta

SEQ ID NO: 724148 - DNA, 33 bp, Homo sapien
cccaaatcacaggcaagtatcaatgttttgcta

SEQ ID NO: 724149 - DNA, 33 bp, Homo sapien
tatagttctgagtttcaacaaacacatatcgtc

SEQ ID NO: 724150 - DNA, 33 bp, Homo sapien
tatagttctgagtttcgacaaacacatatcgtc

SEQ ID NO: 724151 - DNA, 33 bp, Homo sapien
ttgactccactgaagaactgagcagtcacggga

SEQ ID NO: 724152 - DNA, 33 bp, Homo sapien
ttgactccactgaagagctgagcagtcacggga

SEQ ID NO: 724153 - DNA, 33 bp, Homo sapien
tttaaaaccagtggtacatctcagcaaactggg

SEQ ID NO: 724154 - DNA, 33 bp, Homo sapien
tttaaaaccagtggtagatctcagcaaactggg

SEQ ID NO: 724155 - DNA, 33 bp, Homo sapien
caatctctactgataccgctctctgcaataaca

SEQ ID NO: 724156 - DNA, 33 bp, Homo sapien
caatctctactgatactgctctctgcaataaca

SEQ ID NO: 724157 - DNA, 33 bp, Homo sapien
atatagaactttgtgccaaaaaataaaagcact

SEQ ID NO: 724158 - DNA, 33 bp, Homo sapien
atatagaactttgtgctaaaaaataaaagcact

SEQ ID NO: 724159 - DNA, 33 bp, Homo sapien
ccagtttaatactggacgcaatacttaagttat

SEQ ID NO: 724160 - DNA, 33 bp, Homo sapien
ccagtttaatactggatgcaatacttaagttat

SEQ ID NO: 724161 - DNA, 33 bp, Homo sapien
tagttcatccttgaaccaattactctcaccaag

SEQ ID NO: 724162 - DNA, 33 bp, Homo sapien
tagttcatccttgaacgaattactctcaccaag

SEQ ID NO: 724163 - DNA, 33 bp, Homo sapien
ttgccaggcacatttacccaatatggtgacctc

SEQ ID NO: 724164 - DNA, 33 bp, Homo sapien
ttgccaggcacatttatccaatatggtgacctc

SEQ ID NO: 724165 - DNA, 33 bp, Homo sapien
aacatccagaagcttacagaaaagcctctatct

SEQ ID NO: 724166 - DNA, 33 bp, Homo sapien
aacatccagaagcttagagaaaagcctctatct

SEQ ID NO: 724167 - DNA, 33 bp, Homo sapien
ttggaatttgataggaactctctggctactgtg

SEQ ID NO: 724168 - DNA, 33 bp, Homo sapien
ttggaatttgataggatctctctggctactgtg

SEQ ID NO: 724169 - DNA, 33 bp, Homo sapien
gtggagattcaagatacattcaagttctgacag

SEQ ID NO: 724170 - DNA, 33 bp, Homo sapien
gtggagattcaagatatattcaagttctgacag

SEQ ID NO: 724171 - DNA, 33 bp, Homo sapien
atatatcagacacagaagaaaaaagtatgttat

SEQ ID NO: 724172 - DNA, 33 bp, Homo sapien
atatatcagacacagatgaaaaaagtatgttat

SEQ ID NO: 724173 - DNA, 33 bp, Homo sapien
aatataagaaattacactgaaagtcaatggata

SEQ ID NO: 724174 - DNA, 33 bp, Homo sapien
aatataagaaattacagtgaaagtcaatggata

SEQ ID NO: 724175 - DNA, 33 bp, Homo sapien
agtcaacattaaacaactaataagtcaacaatt

SEQ ID NO: 724176 - DNA, 33 bp, Homo sapien
agtcaacattaaacaattaataagtcaacaatt

SEQ ID NO: 724177 - DNA, 33 bp, Homo sapien
gcaacttccagttttaccatccttgcattaaaa

SEQ ID NO: 724178 - DNA, 33 bp, Homo sapien
gcaacttccagttttatcatccttgcattaaaa

SEQ ID NO: 724179 - DNA, 33 bp, Homo sapien
ctggaagttgctttggaaattgctcccagctgg

SEQ ID NO: 724180 - DNA, 33 bp, Homo sapien
ctggaagttgctttggtaattgctcccagctgg

SEQ ID NO: 724181 - DNA, 33 bp, Homo sapien
catgataaatgggtcacgttaagaagtttgctc

SEQ ID NO: 724182 - DNA, 33 bp, Homo sapien
catgataaatgggtcatgttaagaagtttgctc

SEQ ID NO: 724183 - DNA, 33 bp, Homo sapien
ggttattgctttacaggcaacaagggtataacc

SEQ ID NO: 724184 - DNA, 33 bp, Homo sapien
ggttattgctttacagtcaacaagggtataacc

SEQ ID NO: 724185 - DNA, 33 bp, Homo sapien
atcagtcttctgtgtaaggacatttgaattgtc

SEQ ID NO: 724186 - DNA, 33 bp, Homo sapien
atcagtcttctgtgtatggacatttgaattgtc

SEQ ID NO: 724187 - DNA, 33 bp, Homo sapien
ctgtgtttactgctcacgtgttgtctcacttgt

SEQ ID NO: 724188 - DNA, 33 bp, Homo sapien
ctgtgtttactgctcatgtgttgtctcacttgt

SEQ ID NO: 724189 - DNA, 33 bp, Homo sapien
ttaggattgttgactgaaaacacttgggtatac

SEQ ID NO: 724190 - DNA, 33 bp, Homo sapien
ttaggattgttgactgcaaacacttgggtatac

SEQ ID NO: 724191 - DNA, 33 bp, Homo sapien
ataattttaaacatcacccagacaggctgcagt

SEQ ID NO: 724192 - DNA, 33 bp, Homo sapien
ataattttaaacatcatccagacaggctgcagt

SEQ ID NO: 724193 - DNA, 33 bp, Homo sapien
tcttaactatctgcttcaaatgaaggaatagtt

SEQ ID NO: 724194 - DNA, 33 bp, Homo sapien
tcttaactatctgctttaaatgaaggaatagtt

SEQ ID NO: 724195 - DNA, 33 bp, Homo sapien
agagataggctgcctgcacataccagagttgaa

SEQ ID NO: 724196 - DNA, 33 bp, Homo sapien
agagataggctgcctggacataccagagttgaa

SEQ ID NO: 724197 - DNA, 33 bp, Homo sapien
cttagggacctcattcactttttatcttcaggg

SEQ ID NO: 724198 - DNA, 33 bp, Homo sapien
cttagggacctcattcgctttttatcttcaggg

SEQ ID NO: 724199 - DNA, 33 bp, Homo sapien
tgtaatggggaaggtacggagcattcaactata

SEQ ID NO: 724200 - DNA, 33 bp, Homo sapien
tgtaatggggaaggtatggagcattcaactata

SEQ ID NO: 724201 - DNA, 33 bp, Homo sapien
gaagccatcatgaaaaagagaaaagagtttcag

SEQ ID NO: 724202 - DNA, 33 bp, Homo sapien
gaagccatcatgaaaaggagaaaagagtttcag

SEQ ID NO: 724203 - DNA, 33 bp, Homo sapien
gaatttgccagtgttacaatttttgagattatg

SEQ ID NO: 724204 - DNA, 33 bp, Homo sapien
gaatttgccagtgttataatttttgagattatg

SEQ ID NO: 724205 - DNA, 33 bp, Homo sapien
gcaaaagggcaggtcactatcttatttagccta

SEQ ID NO: 724206 - DNA, 33 bp, Homo sapien
gcaaaagggcaggtcattatcttatttagccta

SEQ ID NO: 724207 - DNA, 33 bp, Homo sapien
gtgatcttctatgaataataggcattctgcact

SEQ ID NO: 724208 - DNA, 33 bp, Homo sapien
gtgatcttctatgaatcataggcattctgcact

SEQ ID NO: 724209 - DNA, 33 bp, Homo sapien
ctttaagtgaatagaaactcatttatactgcta

SEQ ID NO: 724210 - DNA, 33 bp, Homo sapien
ctttaagtgaatagaatctcatttatactgcta

SEQ ID NO: 724211 - DNA, 33 bp, Homo sapien
tctaatttggaaatacgcagcatacaacttact

SEQ ID NO: 724212 - DNA, 33 bp, Homo sapien
tctaatttggaaatactcagcatacaacttact

SEQ ID NO: 724213 - DNA, 33 bp, Homo sapien
aatatacacagaagccacacagtaataatggct

SEQ ID NO: 724214 - DNA, 33 bp, Homo sapien
aatatacacagaagccgcacagtaataatggct

SEQ ID NO: 724215 - DNA, 33 bp, Homo sapien
gaaagaagctaattgcagaacagtttacagagt

SEQ ID NO: 724216 - DNA, 33 bp, Homo sapien
gaaagaagctaattgccgaacagtttacagagt

SEQ ID NO: 724217 - DNA, 33 bp, Homo sapien
ttcttaccactgttaccgccttgagaactgaac

SEQ ID NO: 724218 - DNA, 33 bp, Homo sapien
ttcttaccactgttactgccttgagaactgaac

SEQ ID NO: 724219 - DNA, 33 bp, Homo sapien
caggagggaaagtgaactgtgtggtcaccctag

SEQ ID NO: 724220 - DNA, 33 bp, Homo sapien
caggagggaaagtgaattgtgtggtcaccctag

SEQ ID NO: 724221 - DNA, 33 bp, Homo sapien
aagcttttggagcagggatgtgacatgaagaaa

SEQ ID NO: 724222 - DNA, 33 bp, Homo sapien
aagcttttggagcaggtatgtgacatgaagaaa

SEQ ID NO: 724223 - DNA, 33 bp, Homo sapien
acatatatgtagatgacagcaggttaagttata

SEQ ID NO: 724224 - DNA, 33 bp, Homo sapien
acatatatgtagatgatagcaggttaagttata

SEQ ID NO: 724225 - DNA, 33 bp, Homo sapien
aatacctgacatacgtaaaagagcctttaggtt

SEQ ID NO: 724226 - DNA, 33 bp, Homo sapien
aatacctgacatacgttaaagagcctttaggtt

SEQ ID NO: 724227 - DNA, 33 bp, Homo sapien
tgtacaggcctacttacacacaattgtgagagt

SEQ ID NO: 724228 - DNA, 33 bp, Homo sapien
tgtacaggcctacttatacacaattgtgagagt

SEQ ID NO: 724229 - DNA, 33 bp, Homo sapien
tttttcacacttcaaaatatctaaactattcca

SEQ ID NO: 724230 - DNA, 33 bp, Homo sapien
tttttcacacttcaaactatctaaactattcca

SEQ ID NO: 724231 - DNA, 33 bp, Homo sapien
tatggcagaatttcaacagtgtttaggacaagg

SEQ ID NO: 724232 - DNA, 33 bp, Homo sapien
tatggcagaatttcaatagtgtttaggacaagg

SEQ ID NO: 724233 - DNA, 33 bp, Homo sapien
ttctgctttattggaaagagttttgtataattc

SEQ ID NO: 724234 - DNA, 33 bp, Homo sapien
ttctgctttattggaaggagttttgtataattc

SEQ ID NO: 724235 - DNA, 33 bp, Homo sapien
aatgaatgtttaatatcaagacctatagaagaa

SEQ ID NO: 724236 - DNA, 33 bp, Homo sapien
aatgaatgtttaatatgaagacctatagaagaa

SEQ ID NO: 724237 - DNA, 33 bp, Homo sapien
tggtataaaaatgaaacgaaaatgaacaaaata

SEQ ID NO: 724238 - DNA, 33 bp, Homo sapien
tggtataaaaatgaaatgaaaatgaacaaaata

SEQ ID NO: 724239 - DNA, 33 bp, Homo sapien
aatggttataattgtgcagtacaataaaggaaa

SEQ ID NO: 724240 - DNA, 33 bp, Homo sapien
aatggttataattgtggagtacaataaaggaaa

SEQ ID NO: 724241 - DNA, 33 bp, Homo sapien
ggtgaagccaggagaaaggcattaagaaaatga

SEQ ID NO: 724242 - DNA, 33 bp, Homo sapien
ggtgaagccaggagaatggcattaagaaaatga

SEQ ID NO: 724243 - DNA, 33 bp, Homo sapien
tcaagaaaagatggtggaatacgtatgtatttg

SEQ ID NO: 724244 - DNA, 33 bp, Homo sapien
tcaagaaaagatggtgtaatacgtatgtatttg

SEQ ID NO: 724245 - DNA, 33 bp, Homo sapien
tagtacttcaccctaactatattgtcttccact

SEQ ID NO: 724246 - DNA, 33 bp, Homo sapien
tagtacttcaccctaattatattgtcttccact

SEQ ID NO: 724247 - DNA, 33 bp, Homo sapien
acaaagagatcacaaaaggtcttgacaagagta

SEQ ID NO: 724248 - DNA, 33 bp, Homo sapien
acaaagagatcacaaacggtcttgacaagagta

SEQ ID NO: 724249 - DNA, 33 bp, Homo sapien
agttaattagtctctcacttttgaactactttt

SEQ ID NO: 724250 - DNA, 33 bp, Homo sapien
agttaattagtctctcgcttttgaactactttt

SEQ ID NO: 724251 - DNA, 33 bp, Homo sapien
ggatatgttctgagaaccatgtccttaggtaat

SEQ ID NO: 724252 - DNA, 33 bp, Homo sapien
ggatatgttctgagaatcatgtccttaggtaat

SEQ ID NO: 724253 - DNA, 33 bp, Homo sapien
tcttcagttaagagaaacacagtggcccaatga

SEQ ID NO: 724254 - DNA, 33 bp, Homo sapien
tcttcagttaagagaaccacagtggcccaatga

SEQ ID NO: 724255 - DNA, 33 bp, Homo sapien
ttaccagttctatcaacgagccctttagctgaa

SEQ ID NO: 724256 - DNA, 33 bp, Homo sapien
ttaccagttctatcaatgagccctttagctgaa

SEQ ID NO: 724257 - DNA, 33 bp, Homo sapien
accacctaaagagctacgtttgagatgttccct

SEQ ID NO: 724258 - DNA, 33 bp, Homo sapien
accacctaaagagctatgtttgagatgttccct

SEQ ID NO: 724259 - DNA, 33 bp, Homo sapien
ttagtacctgaatatacgtttgtgtgtcaagta

SEQ ID NO: 724260 - DNA, 33 bp, Homo sapien
ttagtacctgaatataggtttgtgtgtcaagta

SEQ ID NO: 724261 - DNA, 33 bp, Homo sapien
tcagcagaactagctaactgatattaagccaca

SEQ ID NO: 724262 - DNA, 33 bp, Homo sapien
tcagcagaactagctacctgatattaagccaca

SEQ ID NO: 724263 - DNA, 33 bp, Homo sapien
tgacaaacataattgacaccatgaaatgtgata

SEQ ID NO: 724264 - DNA, 33 bp, Homo sapien
tgacaaacataattgataccatgaaatgtgata

SEQ ID NO: 724265 - DNA, 33 bp, Homo sapien
tattagctatattactcaaaacaggctgggcaa

SEQ ID NO: 724266 - DNA, 33 bp, Homo sapien
tattagctatattacttaaaacaggctgggcaa

SEQ ID NO: 724267 - DNA, 33 bp, Homo sapien
agaaagtggtatttaaacagagtcttgaagaat

SEQ ID NO: 724268 - DNA, 33 bp, Homo sapien
agaaagtggtatttaagcagagtcttgaagaat

SEQ ID NO: 724269 - DNA, 33 bp, Homo sapien
tgttatgtctttctcaaagttattataacatcc

SEQ ID NO: 724270 - DNA, 33 bp, Homo sapien
tgttatgtctttctcagagttattataacatcc

SEQ ID NO: 724271 - DNA, 33 bp, Homo sapien
gtagaactgcctataaagggaattgcttcaaaa

SEQ ID NO: 724272 - DNA, 33 bp, Homo sapien
gtagaactgcctataaggggaattgcttcaaaa

SEQ ID NO: 724273 - DNA, 33 bp, Homo sapien
catttagaatttgcctaaagatcaaaatgtcat

SEQ ID NO: 724274 - DNA, 33 bp, Homo sapien
catttagaatttgcctgaagatcaaaatgtcat

SEQ ID NO: 724275 - DNA, 33 bp, Homo sapien
atgaaattacaagggacagtgaagaatgtgtga

SEQ ID NO: 724276 - DNA, 33 bp, Homo sapien
atgaaattacaagggagagtgaagaatgtgtga

SEQ ID NO: 724277 - DNA, 33 bp, Homo sapien
ccatccctgtgcaaataagagtagtatagacaa

SEQ ID NO: 724278 - DNA, 33 bp, Homo sapien
ccatccctgtgcaaatgagagtagtatagacaa

SEQ ID NO: 724279 - DNA, 33 bp, Homo sapien
ggcaagtaacttaaacgctcttagtctctttgt

SEQ ID NO: 724280 - DNA, 33 bp, Homo sapien
ggcaagtaacttaaactctcttagtctctttgt

SEQ ID NO: 724281 - DNA, 33 bp, Homo sapien
tgttcatacttaccaaagatacaagaacaagta

SEQ ID NO: 724282 - DNA, 33 bp, Homo sapien
tgttcatacttaccaaggatacaagaacaagta

SEQ ID NO: 724283 - DNA, 33 bp, Homo sapien
agccagaatctggaaccgggatggcagccaatc

SEQ ID NO: 724284 - DNA, 33 bp, Homo sapien
agccagaatctggaactgggatggcagccaatc

SEQ ID NO: 724285 - DNA, 33 bp, Homo sapien
cccaataggcaatttcgcaaccttccctcttcc

SEQ ID NO: 724286 - DNA, 33 bp, Homo sapien
cccaataggcaatttctcaaccttccctcttcc

SEQ ID NO: 724287 - DNA, 33 bp, Homo sapien
tacctaaggttgaccaagaaactaaatagtttg

SEQ ID NO: 724288 - DNA, 33 bp, Homo sapien
tacctaaggttgaccaggaaactaaatagtttg

SEQ ID NO: 724289 - DNA, 33 bp, Homo sapien
cattgatgatgaaataaaacgaaattctgccaa

SEQ ID NO: 724290 - DNA, 33 bp, Homo sapien
cattgatgatgaaatacaacgaaattctgccaa

SEQ ID NO: 724291 - DNA, 33 bp, Homo sapien
aaaggacaagcttggacgttaaagggtgttaga

SEQ ID NO: 724292 - DNA, 33 bp, Homo sapien
aaaggacaagcttggatgttaaagggtgttaga

SEQ ID NO: 724293 - DNA, 33 bp, Homo sapien
tgtatagttatagcaacagggtgttacagcaaa

SEQ ID NO: 724294 - DNA, 33 bp, Homo sapien
tgtatagttatagcaatagggtgttacagcaaa

SEQ ID NO: 724295 - DNA, 33 bp, Homo sapien
agaggctgatttcaacccattgtggaaaataac

SEQ ID NO: 724296 - DNA, 33 bp, Homo sapien
agaggctgatttcaactcattgtggaaaataac

SEQ ID NO: 724297 - DNA, 33 bp, Homo sapien
actgacacattgagcaatagtctttgactcatg

SEQ ID NO: 724298 - DNA, 33 bp, Homo sapien
actgacacattgagcagtagtctttgactcatg

SEQ ID NO: 724299 - DNA, 33 bp, Homo sapien
aattagatcaccataaggtttttcacctgcatt

SEQ ID NO: 724300 - DNA, 33 bp, Homo sapien
aattagatcaccataatgtttttcacctgcatt

SEQ ID NO: 724301 - DNA, 33 bp, Homo sapien
cttttaggcagtaggcaaattcatgggaactca

SEQ ID NO: 724302 - DNA, 33 bp, Homo sapien
cttttaggcagtaggcgaattcatgggaactca

SEQ ID NO: 724303 - DNA, 33 bp, Homo sapien
atgcttaccatctatacgttttcactttccatt

SEQ ID NO: 724304 - DNA, 33 bp, Homo sapien
atgcttaccatctatatgttttcactttccatt

SEQ ID NO: 724305 - DNA, 33 bp, Homo sapien
gcaagtggtgaaatcaaaacgaaaccaaagcaa

SEQ ID NO: 724306 - DNA, 33 bp, Homo sapien
gcaagtggtgaaatcagaacgaaaccaaagcaa

SEQ ID NO: 724307 - DNA, 33 bp, Homo sapien
gcatacccatttttgaccacaggtttctcagct

SEQ ID NO: 724308 - DNA, 33 bp, Homo sapien
gcatacccatttttgatcacaggtttctcagct

SEQ ID NO: 724309 - DNA, 33 bp, Homo sapien
aacaggcactaagagaagcaacactgtaagaaa

SEQ ID NO: 724310 - DNA, 33 bp, Homo sapien
aacaggcactaagagaggcaacactgtaagaaa

SEQ ID NO: 724311 - DNA, 33 bp, Homo sapien
tcattggtacaggaaacggggcaacaggcacta

SEQ ID NO: 724312 - DNA, 33 bp, Homo sapien
tcattggtacaggaaagggggcaacaggcacta

SEQ ID NO: 724313 - DNA, 33 bp, Homo sapien
ctctagaagttgaagaaagcagtatggaaaaat

SEQ ID NO: 724314 - DNA, 33 bp, Homo sapien
ctctagaagttgaagagagcagtatggaaaaat

SEQ ID NO: 724315 - DNA, 33 bp, Homo sapien
atataagactggtttcaatttctaggagtccag

SEQ ID NO: 724316 - DNA, 33 bp, Homo sapien
atataagactggtttcgatttctaggagtccag

SEQ ID NO: 724317 - DNA, 33 bp, Homo sapien
tctcaaagaaaaggccaaaccaaggtgacagca

SEQ ID NO: 724318 - DNA, 33 bp, Homo sapien
tctcaaagaaaaggccgaaccaaggtgacagca

SEQ ID NO: 724319 - DNA, 33 bp, Homo sapien
attcagtggcttgttacggtgaaatttgttcac

SEQ ID NO: 724320 - DNA, 33 bp, Homo sapien
attcagtggcttgttatggtgaaatttgttcac

SEQ ID NO: 724321 - DNA, 33 bp, Homo sapien
tgaagtaattaactaaagatagctagtcaggaa

SEQ ID NO: 724322 - DNA, 33 bp, Homo sapien
tgaagtaattaactaaggatagctagtcaggaa

SEQ ID NO: 724323 - DNA, 33 bp, Homo sapien
gacatgggaaatgagaagtaggagtggaaacat

SEQ ID NO: 724324 - DNA, 33 bp, Homo sapien
gacatgggaaatgagacgtaggagtggaaacat

SEQ ID NO: 724325 - DNA, 33 bp, Homo sapien
caacctttcacaaactcaagtcacaaatgccta

SEQ ID NO: 724326 - DNA, 33 bp, Homo sapien
caacctttcacaaactgaagtcacaaatgccta

SEQ ID NO: 724327 - DNA, 33 bp, Homo sapien
ttccatatttaaaggccacttcgaatgccatct

SEQ ID NO: 724328 - DNA, 33 bp, Homo sapien
ttccatatttaaaggctacttcgaatgccatct

SEQ ID NO: 724329 - DNA, 33 bp, Homo sapien
tttaagcacaaggtagaatacaatcaacaagaa

SEQ ID NO: 724330 - DNA, 33 bp, Homo sapien
tttaagcacaaggtagtatacaatcaacaagaa

SEQ ID NO: 724331 - DNA, 33 bp, Homo sapien
tcccaagagaaaaacaagagcaaagagggttga

SEQ ID NO: 724332 - DNA, 33 bp, Homo sapien
tcccaagagaaaaacaggagcaaagagggttga

SEQ ID NO: 724333 - DNA, 33 bp, Homo sapien
actaatataattgttacgttttccaatatgtgc

SEQ ID NO: 724334 - DNA, 33 bp, Homo sapien
actaatataattgttaggttttccaatatgtgc

SEQ ID NO: 724335 - DNA, 33 bp, Homo sapien
gtctttgatgacacgacgagatgtagtgacttt

SEQ ID NO: 724336 - DNA, 33 bp, Homo sapien
gtctttgatgacacgatgagatgtagtgacttt

SEQ ID NO: 724337 - DNA, 33 bp, Homo sapien
atgttttgactttagccgatacatatatacaaa

SEQ ID NO: 724338 - DNA, 33 bp, Homo sapien
atgttttgactttagcggatacatatatacaaa

SEQ ID NO: 724339 - DNA, 33 bp, Homo sapien
gagtttctgagaactgaatcatgaaattaaagg

SEQ ID NO: 724340 - DNA, 33 bp, Homo sapien
gagtttctgagaactgtatcatgaaattaaagg

SEQ ID NO: 724341 - DNA, 33 bp, Homo sapien
aactgtctggatgtcactgaaatgagaacacca

SEQ ID NO: 724342 - DNA, 33 bp, Homo sapien
aactgtctggatgtcattgaaatgagaacacca

SEQ ID NO: 724343 - DNA, 33 bp, Homo sapien
attaccccagaacacaatgactgctcagcagac

SEQ ID NO: 724344 - DNA, 33 bp, Homo sapien
attaccccagaacacagtgactgctcagcagac

SEQ ID NO: 724345 - DNA, 33 bp, Homo sapien
ctgtttagaggctcgacctttcctttttctttt

SEQ ID NO: 724346 - DNA, 33 bp, Homo sapien
ctgtttagaggctcgatctttcctttttctttt

SEQ ID NO: 724347 - DNA, 33 bp, Homo sapien
agatgtgactcaaagaagaaaatcaaagtcagc

SEQ ID NO: 724348 - DNA, 33 bp, Homo sapien
agatgtgactcaaagaggaaaatcaaagtcagc

SEQ ID NO: 724349 - DNA, 33 bp, Homo sapien
gaaacaatgttaggaaattcaggtgacaccaga

SEQ ID NO: 724350 - DNA, 33 bp, Homo sapien
gaaacaatgttaggaagttcaggtgacaccaga

SEQ ID NO: 724351 - DNA, 33 bp, Homo sapien
gtcattttaacggtgaaatttaacatcgatgtt

SEQ ID NO: 724352 - DNA, 33 bp, Homo sapien
gtcattttaacggtgagatttaacatcgatgtt

SEQ ID NO: 724353 - DNA, 33 bp, Homo sapien
agttgagtttgcttccaatatggtttggctgtg

SEQ ID NO: 724354 - DNA, 33 bp, Homo sapien
agttgagtttgcttccgatatggtttggctgtg

SEQ ID NO: 724355 - DNA, 33 bp, Homo sapien
cttccatcttggactacgtaggcaggtgtaggt

SEQ ID NO: 724356 - DNA, 33 bp, Homo sapien
cttccatcttggactatgtaggcaggtgtaggt

SEQ ID NO: 724357 - DNA, 33 bp, Homo sapien
ttttcttatttattgcagcaagaaagcacaaga

SEQ ID NO: 724358 - DNA, 33 bp, Homo sapien
ttttcttatttattgcggcaagaaagcacaaga

SEQ ID NO: 724359 - DNA, 33 bp, Homo sapien
gctacctacatgggaacgctgaaagtaggaatt

SEQ ID NO: 724360 - DNA, 33 bp, Homo sapien
gctacctacatgggaatgctgaaagtaggaatt

SEQ ID NO: 724361 - DNA, 33 bp, Homo sapien
aacagaagccacaatgaatagatgggatctaat

SEQ ID NO: 724362 - DNA, 33 bp, Homo sapien
aacagaagccacaatggatagatgggatctaat

SEQ ID NO: 724363 - DNA, 33 bp, Homo sapien
attcttctttctctaactgtcttcacactttat

SEQ ID NO: 724364 - DNA, 33 bp, Homo sapien
attcttctttctctaattgtcttcacactttat

SEQ ID NO: 724365 - DNA, 33 bp, Homo sapien
gtgaatgaataaaccaccagctcatctggctgg

SEQ ID NO: 724366 - DNA, 33 bp, Homo sapien
gtgaatgaataaaccatcagctcatctggctgg

SEQ ID NO: 724367 - DNA, 33 bp, Homo sapien
ccaaatattaaagctgaaactctgaagcaagaa

SEQ ID NO: 724368 - DNA, 33 bp, Homo sapien
ccaaatattaaagctgcaactctgaagcaagaa

SEQ ID NO: 724369 - DNA, 33 bp, Homo sapien
agacactgaggacataaaacggtcccaaaatac

SEQ ID NO: 724370 - DNA, 33 bp, Homo sapien
agacactgaggacatacaacggtcccaaaatac

SEQ ID NO: 724371 - DNA, 33 bp, Homo sapien
gaataatccacttccccaagattttggcaaagt

SEQ ID NO: 724372 - DNA, 33 bp, Homo sapien
gaataatccacttcccgaagattttggcaaagt

SEQ ID NO: 724373 - DNA, 33 bp, Homo sapien
gtgcttccgtcaccaaccacactcttttctgat

SEQ ID NO: 724374 - DNA, 33 bp, Homo sapien
gtgcttccgtcaccaagcacactcttttctgat

SEQ ID NO: 724375 - DNA, 33 bp, Homo sapien
ctgtgattgtgctaccactaaatatccacaggc

SEQ ID NO: 724376 - DNA, 33 bp, Homo sapien
ctgtgattgtgctaccgctaaatatccacaggc

SEQ ID NO: 724377 - DNA, 33 bp, Homo sapien
tataacaatcgaagtacctaaagtaagacttga

SEQ ID NO: 724378 - DNA, 33 bp, Homo sapien
tataacaatcgaagtatctaaagtaagacttga

SEQ ID NO: 724379 - DNA, 33 bp, Homo sapien
atatgagcttttactgaactaggactgatgagt

SEQ ID NO: 724380 - DNA, 33 bp, Homo sapien
atatgagcttttactggactaggactgatgagt

SEQ ID NO: 724381 - DNA, 33 bp, Homo sapien
tttgaacagagacccaagggaggtgaaagagtg

SEQ ID NO: 724382 - DNA, 33 bp, Homo sapien
tttgaacagagacccaggggaggtgaaagagtg

SEQ ID NO: 724383 - DNA, 33 bp, Homo sapien
aagaccaggagagtgaactatctcagaagacag

SEQ ID NO: 724384 - DNA, 33 bp, Homo sapien
aagaccaggagagtgagctatctcagaagacag

SEQ ID NO: 724385 - DNA, 33 bp, Homo sapien
aaaaactatttagagacgagaagatattggtgc

SEQ ID NO: 724386 - DNA, 33 bp, Homo sapien
aaaaactatttagagatgagaagatattggtgc

SEQ ID NO: 724387 - DNA, 33 bp, Homo sapien
gctaaaaatggtacaccaataaagttctactga

SEQ ID NO: 724388 - DNA, 33 bp, Homo sapien
gctaaaaatggtacactaataaagttctactga

SEQ ID NO: 724389 - DNA, 33 bp, Homo sapien
taacagaggatggcccaagctcctgcatcttcc

SEQ ID NO: 724390 - DNA, 33 bp, Homo sapien
taacagaggatggcccgagctcctgcatcttcc

SEQ ID NO: 724391 - DNA, 33 bp, Homo sapien
gctataggagaaaggacgaacaagaaatacatt

SEQ ID NO: 724392 - DNA, 33 bp, Homo sapien
gctataggagaaaggaggaacaagaaatacatt

SEQ ID NO: 724393 - DNA, 33 bp, Homo sapien
ggggaaagtgtggaaaagggtgtttctactgct

SEQ ID NO: 724394 - DNA, 33 bp, Homo sapien
ggggaaagtgtggaaatgggtgtttctactgct

SEQ ID NO: 724395 - DNA, 33 bp, Homo sapien
ttttataaagtgcagacgaaactgggttttgat

SEQ ID NO: 724396 - DNA, 33 bp, Homo sapien
ttttataaagtgcagatgaaactgggttttgat

SEQ ID NO: 724397 - DNA, 33 bp, Homo sapien
aacacacagagttacagggagtcttaggagagc

SEQ ID NO: 724398 - DNA, 33 bp, Homo sapien
aacacacagagttacatggagtcttaggagagc

SEQ ID NO: 724399 - DNA, 33 bp, Homo sapien
ctcataatgttctaaaattggcctttaaaagct

SEQ ID NO: 724400 - DNA, 33 bp, Homo sapien
ctcataatgttctaaatttggcctttaaaagct

SEQ ID NO: 724401 - DNA, 33 bp, Homo sapien
aagaagaactattttaactggaagataaggttt

SEQ ID NO: 724402 - DNA, 33 bp, Homo sapien
aagaagaactattttagctggaagataaggttt

SEQ ID NO: 724403 - DNA, 33 bp, Homo sapien
ttcttcttgcttgatgaaattgatgtttgtctt

SEQ ID NO: 724404 - DNA, 33 bp, Homo sapien
ttcttcttgcttgatggaattgatgtttgtctt

SEQ ID NO: 724405 - DNA, 33 bp, Homo sapien
gggccatgacacaataataagatgcgtaaacat

SEQ ID NO: 724406 - DNA, 33 bp, Homo sapien
gggccatgacacaatagtaagatgcgtaaacat

SEQ ID NO: 724407 - DNA, 33 bp, Homo sapien
gacaggaaaataaagtcaactattttgtgctat

SEQ ID NO: 724408 - DNA, 33 bp, Homo sapien
gacaggaaaataaagtgaactattttgtgctat

SEQ ID NO: 724409 - DNA, 33 bp, Homo sapien
acaggattttcaagaaaaactgtgccactgctg

SEQ ID NO: 724410 - DNA, 33 bp, Homo sapien
acaggattttcaagaataactgtgccactgctg

SEQ ID NO: 724411 - DNA, 33 bp, Homo sapien
gtaagcccgtcctactaagaacataaaggaaat

SEQ ID NO: 724412 - DNA, 33 bp, Homo sapien
gtaagcccgtcctactgagaacataaaggaaat

SEQ ID NO: 724413 - DNA, 33 bp, Homo sapien
gccacaccaccaggccaggaatttccattatgc

SEQ ID NO: 724414 - DNA, 33 bp, Homo sapien
gccacaccaccaggccgggaatttccattatgc

SEQ ID NO: 724415 - DNA, 33 bp, Homo sapien
tgtacctatcccaaacccttgtgtgtactctaa

SEQ ID NO: 724416 - DNA, 33 bp, Homo sapien
tgtacctatcccaaactcttgtgtgtactctaa

SEQ ID NO: 724417 - DNA, 33 bp, Homo sapien
ttattgagctgtctcaactgtggctatgtttgc

SEQ ID NO: 724418 - DNA, 33 bp, Homo sapien
ttattgagctgtctcacctgtggctatgtttgc

SEQ ID NO: 724419 - DNA, 33 bp, Homo sapien
gcagcaggcctgactacgtgtaaacttgctgag

SEQ ID NO: 724420 - DNA, 33 bp, Homo sapien
gcagcaggcctgactatgtgtaaacttgctgag

SEQ ID NO: 724421 - DNA, 33 bp, Homo sapien
gaagccatgatataacagagaggtgaaaagagg

SEQ ID NO: 724422 - DNA, 33 bp, Homo sapien
gaagccatgatataacggagaggtgaaaagagg

SEQ ID NO: 724423 - DNA, 33 bp, Homo sapien
aatattcaaaatgagaaaccataacatactgga

SEQ ID NO: 724424 - DNA, 33 bp, Homo sapien
aatattcaaaatgagagaccataacatactgga

SEQ ID NO: 724425 - DNA, 33 bp, Homo sapien
aacaaagataaacagacggagcttaattaaact

SEQ ID NO: 724426 - DNA, 33 bp, Homo sapien
aacaaagataaacagatggagcttaattaaact

SEQ ID NO: 724427 - DNA, 33 bp, Homo sapien
atgttatcttacatggaaagatggaattttgca

SEQ ID NO: 724428 - DNA, 33 bp, Homo sapien
atgttatcttacatggcaagatggaattttgca

SEQ ID NO: 724429 - DNA, 33 bp, Homo sapien
ccatttctttgctcaaacagattgttggcaaga

SEQ ID NO: 724430 - DNA, 33 bp, Homo sapien
ccatttctttgctcaatcagattgttggcaaga

SEQ ID NO: 724431 - DNA, 33 bp, Homo sapien
gctgaaggatctattacgtgtggatcagttagt

SEQ ID NO: 724432 - DNA, 33 bp, Homo sapien
gctgaaggatctattatgtgtggatcagttagt

SEQ ID NO: 724433 - DNA, 33 bp, Homo sapien
gctctaagcctggctacgtgcaagttgaggttc

SEQ ID NO: 724434 - DNA, 33 bp, Homo sapien
gctctaagcctggctatgtgcaagttgaggttc

SEQ ID NO: 724435 - DNA, 33 bp, Homo sapien
ggcatttaacaggacactgaagcaaaaataacg

SEQ ID NO: 724436 - DNA, 33 bp, Homo sapien
ggcatttaacaggacattgaagcaaaaataacg

SEQ ID NO: 724437 - DNA, 33 bp, Homo sapien
tcacctcagtcacctcaaaatttaattatatca

SEQ ID NO: 724438 - DNA, 33 bp, Homo sapien
tcacctcagtcacctcgaaatttaattatatca

SEQ ID NO: 724439 - DNA, 33 bp, Homo sapien
tttttgggcaataacacgaaaacggtgatgttt

SEQ ID NO: 724440 - DNA, 33 bp, Homo sapien
tttttgggcaataacatgaaaacggtgatgttt

SEQ ID NO: 724441 - DNA, 33 bp, Homo sapien
atcaggaatccttacaaacctgcgaatactggc

SEQ ID NO: 724442 - DNA, 33 bp, Homo sapien
atcaggaatccttacagacctgcgaatactggc

SEQ ID NO: 724443 - DNA, 33 bp, Homo sapien
agccttctacacttaaccagtcgatctttgtgt

SEQ ID NO: 724444 - DNA, 33 bp, Homo sapien
agccttctacacttaagcagtcgatctttgtgt

SEQ ID NO: 724445 - DNA, 33 bp, Homo sapien
aatttggctttcaaagaatgtagattcacaagt

SEQ ID NO: 724446 - DNA, 33 bp, Homo sapien
aatttggctttcaaaggatgtagattcacaagt

SEQ ID NO: 724447 - DNA, 33 bp, Homo sapien
ccactctggagaattaggtaaacttcaagttgt

SEQ ID NO: 724448 - DNA, 33 bp, Homo sapien
ccactctggagaattatgtaaacttcaagttgt

SEQ ID NO: 724449 - DNA, 33 bp, Homo sapien
cctgtgtagcaaagcaacttataatgcttgtgg

SEQ ID NO: 724450 - DNA, 33 bp, Homo sapien
cctgtgtagcaaagcagcttataatgcttgtgg

SEQ ID NO: 724451 - DNA, 33 bp, Homo sapien
gtacagctataacccaactgtctggtgattttg

SEQ ID NO: 724452 - DNA, 33 bp, Homo sapien
gtacagctataacccacctgtctggtgattttg

SEQ ID NO: 724453 - DNA, 33 bp, Homo sapien
catcattcaggaacgcagactcttcccaacatg

SEQ ID NO: 724454 - DNA, 33 bp, Homo sapien
catcattcaggaacgcggactcttcccaacatg

SEQ ID NO: 724455 - DNA, 33 bp, Homo sapien
gggaagtcaaccataacagagaatgctaaacac

SEQ ID NO: 724456 - DNA, 33 bp, Homo sapien
gggaagtcaaccataatagagaatgctaaacac

SEQ ID NO: 724457 - DNA, 33 bp, Homo sapien
ctagtggtccttcaaccatttacaaaggcagag

SEQ ID NO: 724458 - DNA, 33 bp, Homo sapien
ctagtggtccttcaactatttacaaaggcagag

SEQ ID NO: 724459 - DNA, 33 bp, Homo sapien
tgggcacagcgctaaccgcagaaactagtttgc

SEQ ID NO: 724460 - DNA, 33 bp, Homo sapien
tgggcacagcgctaactgcagaaactagtttgc

SEQ ID NO: 724461 - DNA, 33 bp, Homo sapien
gtcctagctcatagtcacctcacaattaatctt

SEQ ID NO: 724462 - DNA, 33 bp, Homo sapien
gtcctagctcatagtcgcctcacaattaatctt

SEQ ID NO: 724463 - DNA, 33 bp, Homo sapien
acactcataaagttgacctataatcgaatattc

SEQ ID NO: 724464 - DNA, 33 bp, Homo sapien
acactcataaagttgatctataatcgaatattc

SEQ ID NO: 724465 - DNA, 33 bp, Homo sapien
atttcttactaatttccagatggtaggatagca

SEQ ID NO: 724466 - DNA, 33 bp, Homo sapien
atttcttactaatttctagatggtaggatagca

SEQ ID NO: 724467 - DNA, 33 bp, Homo sapien
aataagaaccatttgaccatgatgattccacat

SEQ ID NO: 724468 - DNA, 33 bp, Homo sapien
aataagaaccatttgatcatgatgattccacat

SEQ ID NO: 724469 - DNA, 33 bp, Homo sapien
tcctctctgtccatcacgctgtaacccaaatat

SEQ ID NO: 724470 - DNA, 33 bp, Homo sapien
tcctctctgtccatcatgctgtaacccaaatat

SEQ ID NO: 724471 - DNA, 33 bp, Homo sapien
aaaagtaaaagcacaggaaggaattcagaaaca

SEQ ID NO: 724472 - DNA, 33 bp, Homo sapien
aaaagtaaaagcacagtaaggaattcagaaaca

SEQ ID NO: 724473 - DNA, 33 bp, Homo sapien
cattgtcatgaagtgacgtgaactcgttaaaca

SEQ ID NO: 724474 - DNA, 33 bp, Homo sapien
cattgtcatgaagtgatgtgaactcgttaaaca

SEQ ID NO: 724475 - DNA, 33 bp, Homo sapien
actgtgtaccttagcaatagaggaaaaagaaga

SEQ ID NO: 724476 - DNA, 33 bp, Homo sapien
actgtgtaccttagcagtagaggaaaaagaaga

SEQ ID NO: 724477 - DNA, 33 bp, Homo sapien
caaaatcatagggacacaaacgcaaaaatagac

SEQ ID NO: 724478 - DNA, 33 bp, Homo sapien
caaaatcatagggacagaaacgcaaaaatagac

SEQ ID NO: 724479 - DNA, 33 bp, Homo sapien
taagagtgaagcacaagttctccaaatggatta

SEQ ID NO: 724480 - DNA, 33 bp, Homo sapien
taagagtgaagcacaatttctccaaatggatta

SEQ ID NO: 724481 - DNA, 33 bp, Homo sapien
tcctggcattaaatggcataaataaaaggaaat

SEQ ID NO: 724482 - DNA, 33 bp, Homo sapien
tcctggcattaaatgggataaataaaaggaaat

SEQ ID NO: 724483 - DNA, 33 bp, Homo sapien
atgaatttgtgttacaatcccatcctctgaaac

SEQ ID NO: 724484 - DNA, 33 bp, Homo sapien
atgaatttgtgttacagtcccatcctctgaaac

SEQ ID NO: 724485 - DNA, 33 bp, Homo sapien
tatagtaagaggagccaataattgagatctgag

SEQ ID NO: 724486 - DNA, 33 bp, Homo sapien
tatagtaagaggagccgataattgagatctgag

SEQ ID NO: 724487 - DNA, 33 bp, Homo sapien
tcatgatacaatcttacggccacatagttattt

SEQ ID NO: 724488 - DNA, 33 bp, Homo sapien
tcatgatacaatcttatggccacatagttattt

SEQ ID NO: 724489 - DNA, 33 bp, Homo sapien
gctgggtttcggagataagtcaaggtttgcaaa

SEQ ID NO: 724490 - DNA, 33 bp, Homo sapien
gctgggtttcggagatgagtcaaggtttgcaaa

SEQ ID NO: 724491 - DNA, 33 bp, Homo sapien
ttactttgaacctatgaatgtcattgcatgtga

SEQ ID NO: 724492 - DNA, 33 bp, Homo sapien
ttactttgaacctatggatgtcattgcatgtga

SEQ ID NO: 724493 - DNA, 33 bp, Homo sapien
tgaatcacaaggaagacgctttagaatattaga

SEQ ID NO: 724494 - DNA, 33 bp, Homo sapien
tgaatcacaaggaagatgctttagaatattaga

SEQ ID NO: 724495 - DNA, 33 bp, Homo sapien
tcggtatcagtgaaagccctaatacggtctata

SEQ ID NO: 724496 - DNA, 33 bp, Homo sapien
tcggtatcagtgaaagtcctaatacggtctata

SEQ ID NO: 724497 - DNA, 33 bp, Homo sapien
ctttcactgataccgacatttacttttaggatt

SEQ ID NO: 724498 - DNA, 33 bp, Homo sapien
ctttcactgataccgatatttacttttaggatt

SEQ ID NO: 724499 - DNA, 33 bp, Homo sapien
ccttgctgaactgagacctttagtcgccctgtc

SEQ ID NO: 724500 - DNA, 33 bp, Homo sapien
ccttgctgaactgagatctttagtcgccctgtc

SEQ ID NO: 724501 - DNA, 33 bp, Homo sapien
ttggatacgaatagggccaagttatagaaatat

SEQ ID NO: 724502 - DNA, 33 bp, Homo sapien
ttggatacgaataggggcaagttatagaaatat

SEQ ID NO: 724503 - DNA, 33 bp, Homo sapien
ttgtgattacagacaaactttaaaaattgtatt

SEQ ID NO: 724504 - DNA, 33 bp, Homo sapien
ttgtgattacagacaacctttaaaaattgtatt

SEQ ID NO: 724505 - DNA, 33 bp, Homo sapien
tctagatgcttcctaacgataaaattccctttg

SEQ ID NO: 724506 - DNA, 33 bp, Homo sapien
tctagatgcttcctaatgataaaattccctttg

SEQ ID NO: 724507 - DNA, 33 bp, Homo sapien
aagaaattgagagagaagagttggctgaagaat

SEQ ID NO: 724508 - DNA, 33 bp, Homo sapien
aagaaattgagagagaggagttggctgaagaat

SEQ ID NO: 724509 - DNA, 33 bp, Homo sapien
tgaaaaaccattacaacgtagaactcagtactc

SEQ ID NO: 724510 - DNA, 33 bp, Homo sapien
tgaaaaaccattacaatgtagaactcagtactc

SEQ ID NO: 724511 - DNA, 33 bp, Homo sapien
ttagtaattggaaagacagaatagcacatcgta

SEQ ID NO: 724512 - DNA, 33 bp, Homo sapien
ttagtaattggaaagagagaatagcacatcgta

SEQ ID NO: 724513 - DNA, 33 bp, Homo sapien
atttcagaaatatgtaaagactagacctgcttg

SEQ ID NO: 724514 - DNA, 33 bp, Homo sapien
atttcagaaatatgtagagactagacctgcttg

SEQ ID NO: 724515 - DNA, 33 bp, Homo sapien
aatgttttgcatgggacattttagcttttctaa

SEQ ID NO: 724516 - DNA, 33 bp, Homo sapien
aatgttttgcatgggatattttagcttttctaa

SEQ ID NO: 724517 - DNA, 33 bp, Homo sapien
attatagctggtttaaatagtaagaaaatgtat

SEQ ID NO: 724518 - DNA, 33 bp, Homo sapien
attatagctggtttaactagtaagaaaatgtat

SEQ ID NO: 724519 - DNA, 33 bp, Homo sapien
aattgcataatacatcacatttacttgataagc

SEQ ID NO: 724520 - DNA, 33 bp, Homo sapien
aattgcataatacatctcatttacttgataagc

SEQ ID NO: 724521 - DNA, 33 bp, Homo sapien
tcacttcaggtaataacgtgatggatggcaggt

SEQ ID NO: 724522 - DNA, 33 bp, Homo sapien
tcacttcaggtaataatgtgatggatggcaggt

SEQ ID NO: 724523 - DNA, 33 bp, Homo sapien
ataagtgtacctaaggcattataggcgttcaaa

SEQ ID NO: 724524 - DNA, 33 bp, Homo sapien
ataagtgtacctaaggtattataggcgttcaaa

SEQ ID NO: 724525 - DNA, 33 bp, Homo sapien
gaggcgtttagtgcaaagagtctcagtaaagca

SEQ ID NO: 724526 - DNA, 33 bp, Homo sapien
gaggcgtttagtgcaaggagtctcagtaaagca

SEQ ID NO: 724527 - DNA, 33 bp, Homo sapien
agaagatattggcctacagaaagtggtaaaatg

SEQ ID NO: 724528 - DNA, 33 bp, Homo sapien
agaagatattggcctatagaaagtggtaaaatg

SEQ ID NO: 724529 - DNA, 33 bp, Homo sapien
actttcagatcataggaagataagagacaacca

SEQ ID NO: 724530 - DNA, 33 bp, Homo sapien
actttcagatcataggtagataagagacaacca

SEQ ID NO: 724531 - DNA, 33 bp, Homo sapien
agcagcataagggccacactaggagaagtataa

SEQ ID NO: 724532 - DNA, 33 bp, Homo sapien
agcagcataagggccagactaggagaagtataa

SEQ ID NO: 724533 - DNA, 33 bp, Homo sapien
tgcaaactttgcctgactcactttagttctctt

SEQ ID NO: 724534 - DNA, 33 bp, Homo sapien
tgcaaactttgcctgattcactttagttctctt

SEQ ID NO: 724535 - DNA, 33 bp, Homo sapien
tttgtaatctctgttccaatatgtcaaggtgtt

SEQ ID NO: 724536 - DNA, 33 bp, Homo sapien
tttgtaatctctgttcgaatatgtcaaggtgtt

SEQ ID NO: 724537 - DNA, 33 bp, Homo sapien
gctattttgagccaagcccggagaattggatag

SEQ ID NO: 724538 - DNA, 33 bp, Homo sapien
gctattttgagccaagtccggagaattggatag

SEQ ID NO: 724539 - DNA, 33 bp, Homo sapien
ccatctgtgttttgttaaaattttcacttgatc

SEQ ID NO: 724540 - DNA, 33 bp, Homo sapien
ccatctgtgttttgttcaaattttcacttgatc

SEQ ID NO: 724541 - DNA, 33 bp, Homo sapien
ccatccctgtttgtaaatgacacaattctatat

SEQ ID NO: 724542 - DNA, 33 bp, Homo sapien
ccatccctgtttgtaagtgacacaattctatat

SEQ ID NO: 724543 - DNA, 33 bp, Homo sapien
tgcaacctaaacttaacggtcttgtgaccctgc

SEQ ID NO: 724544 - DNA, 33 bp, Homo sapien
tgcaacctaaacttaatggtcttgtgaccctgc

SEQ ID NO: 724545 - DNA, 33 bp, Homo sapien
cggtggtgaatgaaagcaggctgtttgtgcgtt

SEQ ID NO: 724546 - DNA, 33 bp, Homo sapien
cggtggtgaatgaaagtaggctgtttgtgcgtt

SEQ ID NO: 724547 - DNA, 33 bp, Homo sapien
gcaggtggggctcgcaagtcagtcagaaaggaa

SEQ ID NO: 724548 - DNA, 33 bp, Homo sapien
gcaggtggggctcgcacgtcagtcagaaaggaa

SEQ ID NO: 724549 - DNA, 33 bp, Homo sapien
taccaagtatggaaagccactattttgtttctt

SEQ ID NO: 724550 - DNA, 33 bp, Homo sapien
taccaagtatggaaagtcactattttgtttctt

SEQ ID NO: 724551 - DNA, 33 bp, Homo sapien
atgtacagccatgtcaataataggtaagggcct

SEQ ID NO: 724552 - DNA, 33 bp, Homo sapien
atgtacagccatgtcagtaataggtaagggcct

SEQ ID NO: 724553 - DNA, 33 bp, Homo sapien
tgaattaacgtaatccaaagttgcaaaagtcaa

SEQ ID NO: 724554 - DNA, 33 bp, Homo sapien
tgaattaacgtaatccgaagttgcaaaagtcaa

SEQ ID NO: 724555 - DNA, 33 bp, Homo sapien
agtagtgtctcttaccaattttcctgtgaagtt

SEQ ID NO: 724556 - DNA, 33 bp, Homo sapien
agtagtgtctcttaccgattttcctgtgaagtt

SEQ ID NO: 724557 - DNA, 33 bp, Homo sapien
tccttctagctactgaataagtaaaataggcta

SEQ ID NO: 724558 - DNA, 33 bp, Homo sapien
tccttctagctactgagtaagtaaaataggcta

SEQ ID NO: 724559 - DNA, 33 bp, Homo sapien
ataattattggccattaaaatatgtgttgttag

SEQ ID NO: 724560 - DNA, 33 bp, Homo sapien
ataattattggccatttaaatatgtgttgttag

SEQ ID NO: 724561 - DNA, 33 bp, Homo sapien
aattcattaaaaatcgacactacagtaaacatg

SEQ ID NO: 724562 - DNA, 33 bp, Homo sapien
aattcattaaaaatcggcactacagtaaacatg

SEQ ID NO: 724563 - DNA, 33 bp, Homo sapien
attgaggtctttttaacggactttccatcacga

SEQ ID NO: 724564 - DNA, 33 bp, Homo sapien
attgaggtctttttaatggactttccatcacga

SEQ ID NO: 724565 - DNA, 33 bp, Homo sapien
acagaacttcattctaccactttttaagcaata

SEQ ID NO: 724566 - DNA, 33 bp, Homo sapien
acagaacttcattctatcactttttaagcaata

SEQ ID NO: 724567 - DNA, 33 bp, Homo sapien
acttactcagtcccaaatgctactaaaactgaa

SEQ ID NO: 724568 - DNA, 33 bp, Homo sapien
acttactcagtcccaagtgctactaaaactgaa

SEQ ID NO: 724569 - DNA, 33 bp, Homo sapien
tttttaattgtgtttacgacaaaaagagcatgg

SEQ ID NO: 724570 - DNA, 33 bp, Homo sapien
tttttaattgtgtttatgacaaaaagagcatgg

SEQ ID NO: 724571 - DNA, 33 bp, Homo sapien
agactggggtttaatccaatatattcattctga

SEQ ID NO: 724572 - DNA, 33 bp, Homo sapien
agactggggtttaatctaatatattcattctga

SEQ ID NO: 724573 - DNA, 33 bp, Homo sapien
ttctaaagctgcaaacagacgtatatagcatat

SEQ ID NO: 724574 - DNA, 33 bp, Homo sapien
ttctaaagctgcaaactgacgtatatagcatat

SEQ ID NO: 724575 - DNA, 33 bp, Homo sapien
tatgctgtttctaagacatctttcacattgaag

SEQ ID NO: 724576 - DNA, 33 bp, Homo sapien
tatgctgtttctaagagatctttcacattgaag

SEQ ID NO: 724577 - DNA, 33 bp, Homo sapien
tactgttttgaagggacgatacagagatacaaa

SEQ ID NO: 724578 - DNA, 33 bp, Homo sapien
tactgttttgaagggatgatacagagatacaaa

SEQ ID NO: 724579 - DNA, 33 bp, Homo sapien
tcagcacacctcctcaatcttttgacaatgaag

SEQ ID NO: 724580 - DNA, 33 bp, Homo sapien
tcagcacacctcctcattcttttgacaatgaag

SEQ ID NO: 724581 - DNA, 33 bp, Homo sapien
ctattttcagcacataagaagtatcctgtcttt

SEQ ID NO: 724582 - DNA, 33 bp, Homo sapien
ctattttcagcacataggaagtatcctgtcttt

SEQ ID NO: 724583 - DNA, 33 bp, Homo sapien
ctttcagaaagaaactcaactttatcatcacct

SEQ ID NO: 724584 - DNA, 33 bp, Homo sapien
ctttcagaaagaaacttaactttatcatcacct

SEQ ID NO: 724585 - DNA, 33 bp, Homo sapien
gctgagaaccgaacaccgggtgaatgacctgcc

SEQ ID NO: 724586 - DNA, 33 bp, Homo sapien
gctgagaaccgaacactgggtgaatgacctgcc

SEQ ID NO: 724587 - DNA, 33 bp, Homo sapien
gctcactggtcatcccaatcgatgtctgcagct

SEQ ID NO: 724588 - DNA, 33 bp, Homo sapien
gctcactggtcatcccgatcgatgtctgcagct

SEQ ID NO: 724589 - DNA, 33 bp, Homo sapien
aatttatcagtaaattaaaatatgcccatatcc

SEQ ID NO: 724590 - DNA, 33 bp, Homo sapien
aatttatcagtaaattgaaatatgcccatatcc

SEQ ID NO: 724591 - DNA, 33 bp, Homo sapien
gattcgaaaaaggctcaagtctgggagtttaag

SEQ ID NO: 724592 - DNA, 33 bp, Homo sapien
gattcgaaaaaggctcgagtctgggagtttaag

SEQ ID NO: 724593 - DNA, 33 bp, Homo sapien
tccttttaaagtcccaagacagaagattccata

SEQ ID NO: 724594 - DNA, 33 bp, Homo sapien
tccttttaaagtcccaggacagaagattccata

SEQ ID NO: 724595 - DNA, 33 bp, Homo sapien
caggggaaaacagaagaccttcactcatgtggg

SEQ ID NO: 724596 - DNA, 33 bp, Homo sapien
caggggaaaacagaagtccttcactcatgtggg

SEQ ID NO: 724597 - DNA, 33 bp, Homo sapien
gactttcttctcagggaccaacttgaatttctg

SEQ ID NO: 724598 - DNA, 33 bp, Homo sapien
gactttcttctcaggggccaacttgaatttctg

SEQ ID NO: 724599 - DNA, 33 bp, Homo sapien
catgtaaatttgcaacaaacattactaaatttt

SEQ ID NO: 724600 - DNA, 33 bp, Homo sapien
catgtaaatttgcaaccaacattactaaatttt

SEQ ID NO: 724601 - DNA, 33 bp, Homo sapien
ctcagttattacaaacacttaaatcacatggtt

SEQ ID NO: 724602 - DNA, 33 bp, Homo sapien
ctcagttattacaaactcttaaatcacatggtt

SEQ ID NO: 724603 - DNA, 33 bp, Homo sapien
tatatttacatgtcaacattcataggcccaaaa

SEQ ID NO: 724604 - DNA, 33 bp, Homo sapien
tatatttacatgtcaatattcataggcccaaaa

SEQ ID NO: 724605 - DNA, 33 bp, Homo sapien
tcactccagcatcaccacaaacacctgaatgaa

SEQ ID NO: 724606 - DNA, 33 bp, Homo sapien
tcactccagcatcaccgcaaacacctgaatgaa

SEQ ID NO: 724607 - DNA, 33 bp, Homo sapien
caaagcaggtagcataacgaaagacctgaggat

SEQ ID NO: 724608 - DNA, 33 bp, Homo sapien
caaagcaggtagcatagcgaaagacctgaggat

SEQ ID NO: 724609 - DNA, 33 bp, Homo sapien
cattttaaacatatcagtaaacaattagcatta

SEQ ID NO: 724610 - DNA, 33 bp, Homo sapien
cattttaaacatatcattaaacaattagcatta

SEQ ID NO: 724611 - DNA, 33 bp, Homo sapien
ggaattaacattgccacagacagtgatttataa

SEQ ID NO: 724612 - DNA, 33 bp, Homo sapien
ggaattaacattgccagagacagtgatttataa

SEQ ID NO: 724613 - DNA, 33 bp, Homo sapien
gctggacatacctgaacttatgatttgatgggt

SEQ ID NO: 724614 - DNA, 33 bp, Homo sapien
gctggacatacctgaatttatgatttgatgggt

SEQ ID NO: 724615 - DNA, 33 bp, Homo sapien
ttagaagccagtaaacaacattccttatttaat

SEQ ID NO: 724616 - DNA, 33 bp, Homo sapien
ttagaagccagtaaacgacattccttatttaat

SEQ ID NO: 724617 - DNA, 33 bp, Homo sapien
caaattagtctatgccaattgctaaatgtttac

SEQ ID NO: 724618 - DNA, 33 bp, Homo sapien
caaattagtctatgccgattgctaaatgtttac

SEQ ID NO: 724619 - DNA, 33 bp, Homo sapien
taaaaattgcaaattcacaatcaagctaaaaag

SEQ ID NO: 724620 - DNA, 33 bp, Homo sapien
taaaaattgcaaattcgcaatcaagctaaaaag

SEQ ID NO: 724621 - DNA, 33 bp, Homo sapien
aataaagagaaacaaacagtcttgaccagaggg

SEQ ID NO: 724622 - DNA, 33 bp, Homo sapien
aataaagagaaacaaatagtcttgaccagaggg

SEQ ID NO: 724623 - DNA, 33 bp, Homo sapien
tgttttcactgccaagaccagaatagtttcctt

SEQ ID NO: 724624 - DNA, 33 bp, Homo sapien
tgttttcactgccaagtccagaatagtttcctt

SEQ ID NO: 724625 - DNA, 33 bp, Homo sapien
catgctcacaaccgtacagttgttgcatatatt

SEQ ID NO: 724626 - DNA, 33 bp, Homo sapien
catgctcacaaccgtatagttgttgcatatatt

SEQ ID NO: 724627 - DNA, 33 bp, Homo sapien
gatctttgttgaaaatcagggtattctaaaatg

SEQ ID NO: 724628 - DNA, 33 bp, Homo sapien
gatctttgttgaaaattagggtattctaaaatg

SEQ ID NO: 724629 - DNA, 33 bp, Homo sapien
aaccagagctgctttcaatctgagttatttacc

SEQ ID NO: 724630 - DNA, 33 bp, Homo sapien
aaccagagctgctttccatctgagttatttacc

SEQ ID NO: 724631 - DNA, 33 bp, Homo sapien
attattatgataatgaatacatatgctgcccag

SEQ ID NO: 724632 - DNA, 33 bp, Homo sapien
attattatgataatgagtacatatgctgcccag

SEQ ID NO: 724633 - DNA, 33 bp, Homo sapien
cagactgccttcccaaaatacgtgtgaattgtt

SEQ ID NO: 724634 - DNA, 33 bp, Homo sapien
cagactgccttcccaagatacgtgtgaattgtt

SEQ ID NO: 724635 - DNA, 33 bp, Homo sapien
ggcttcttatttttaaacctccaatatctggta

SEQ ID NO: 724636 - DNA, 33 bp, Homo sapien
ggcttcttatttttaaccctccaatatctggta

SEQ ID NO: 724637 - DNA, 33 bp, Homo sapien
attacttagctgtctgccaaacattacctcatc

SEQ ID NO: 724638 - DNA, 33 bp, Homo sapien
attacttagctgtctgtcaaacattacctcatc

SEQ ID NO: 724639 - DNA, 33 bp, Homo sapien
tcagaagcacaaggaaattagatgacttattct

SEQ ID NO: 724640 - DNA, 33 bp, Homo sapien
tcagaagcacaaggaacttagatgacttattct

SEQ ID NO: 724641 - DNA, 33 bp, Homo sapien
tgggttaatgcataacaagtcaccattgagata

SEQ ID NO: 724642 - DNA, 33 bp, Homo sapien
tgggttaatgcataaccagtcaccattgagata

SEQ ID NO: 724643 - DNA, 33 bp, Homo sapien
cttcaattccttcatacgacctgactcttcctc

SEQ ID NO: 724644 - DNA, 33 bp, Homo sapien
cttcaattccttcataggacctgactcttcctc

SEQ ID NO: 724645 - DNA, 33 bp, Homo sapien
attgcacagcctctggaaaagcatggtaaatgt

SEQ ID NO: 724646 - DNA, 33 bp, Homo sapien
attgcacagcctctgggaaagcatggtaaatgt

SEQ ID NO: 724647 - DNA, 33 bp, Homo sapien
agtccttgatcttaaccactttttatgttttct

SEQ ID NO: 724648 - DNA, 33 bp, Homo sapien
agtccttgatcttaactactttttatgttttct

SEQ ID NO: 724649 - DNA, 33 bp, Homo sapien
agtttagaatgaaataccttagtctggaaatat

SEQ ID NO: 724650 - DNA, 33 bp, Homo sapien
agtttagaatgaaatatcttagtctggaaatat

SEQ ID NO: 724651 - DNA, 33 bp, Homo sapien
agtggtgtatcctctacaacattaactttgcaa

SEQ ID NO: 724652 - DNA, 33 bp, Homo sapien
agtggtgtatcctctataacattaactttgcaa

SEQ ID NO: 724653 - DNA, 33 bp, Homo sapien
agcttgcaattttgaaaatagacatggttttgt

SEQ ID NO: 724654 - DNA, 33 bp, Homo sapien
agcttgcaattttgaacatagacatggttttgt

SEQ ID NO: 724655 - DNA, 33 bp, Homo sapien
tagtctggattaatgaaggagtaaaaatgacaa

SEQ ID NO: 724656 - DNA, 33 bp, Homo sapien
tagtctggattaatgagggagtaaaaatgacaa

SEQ ID NO: 724657 - DNA, 33 bp, Homo sapien
gagacatttaagcaacaaaatacaacattgcta

SEQ ID NO: 724658 - DNA, 33 bp, Homo sapien
gagacatttaagcaacgaaatacaacattgcta

SEQ ID NO: 724659 - DNA, 33 bp, Homo sapien
cctgtgtatcatagaccacatataattttcaac

SEQ ID NO: 724660 - DNA, 33 bp, Homo sapien
cctgtgtatcatagactacatataattttcaac

SEQ ID NO: 724661 - DNA, 33 bp, Homo sapien
ctttacattggttaaaacattcagcctcagggc

SEQ ID NO: 724662 - DNA, 33 bp, Homo sapien
ctttacattggttaaagcattcagcctcagggc

SEQ ID NO: 724663 - DNA, 33 bp, Homo sapien
gatcatagatattttccaatgaggccataggtg

SEQ ID NO: 724664 - DNA, 33 bp, Homo sapien
gatcatagatattttctaatgaggccataggtg

SEQ ID NO: 724665 - DNA, 33 bp, Homo sapien
aagtgtccttaaaccaaattacaaactagtcat

SEQ ID NO: 724666 - DNA, 33 bp, Homo sapien
aagtgtccttaaaccacattacaaactagtcat

SEQ ID NO: 724667 - DNA, 33 bp, Homo sapien
tatgagtgtataaaaaagatcaagagaccagtt

SEQ ID NO: 724668 - DNA, 33 bp, Homo sapien
tatgagtgtataaaaatgatcaagagaccagtt

SEQ ID NO: 724669 - DNA, 33 bp, Homo sapien
ttgttttaataggtaacgtagtaacacaaaaat

SEQ ID NO: 724670 - DNA, 33 bp, Homo sapien
ttgttttaataggtaatgtagtaacacaaaaat

SEQ ID NO: 724671 - DNA, 33 bp, Homo sapien
acttggacttccaacaaaaacaggaagacacag

SEQ ID NO: 724672 - DNA, 33 bp, Homo sapien
acttggacttccaacacaaacaggaagacacag

SEQ ID NO: 724673 - DNA, 33 bp, Homo sapien
aaaatattggttgtcaatcatggtctttactga

SEQ ID NO: 724674 - DNA, 33 bp, Homo sapien
aaaatattggttgtcagtcatggtctttactga

SEQ ID NO: 724675 - DNA, 33 bp, Homo sapien
acacaggcttaacagaaataactcttaaattat

SEQ ID NO: 724676 - DNA, 33 bp, Homo sapien
acacaggcttaacagacataactcttaaattat

SEQ ID NO: 724677 - DNA, 33 bp, Homo sapien
aattctttacgacctcacaaactgtgcctgttt

SEQ ID NO: 724678 - DNA, 33 bp, Homo sapien
aattctttacgacctcgcaaactgtgcctgttt

SEQ ID NO: 724679 - DNA, 33 bp, Homo sapien
gtacacaagcatatagcaaaatgtccccagagt

SEQ ID NO: 724680 - DNA, 33 bp, Homo sapien
gtacacaagcatatagtaaaatgtccccagagt

SEQ ID NO: 724681 - DNA, 33 bp, Homo sapien
gccaatttctgtcaaacagaacaatcaggagag

SEQ ID NO: 724682 - DNA, 33 bp, Homo sapien
gccaatttctgtcaaatagaacaatcaggagag

SEQ ID NO: 724683 - DNA, 33 bp, Homo sapien
ttcttttctgttcataacaacctgtctcctgtt

SEQ ID NO: 724684 - DNA, 33 bp, Homo sapien
ttcttttctgttcatagcaacctgtctcctgtt

SEQ ID NO: 724685 - DNA, 33 bp, Homo sapien
ttcattagcgagatctcagaatgcctgttcctg

SEQ ID NO: 724686 - DNA, 33 bp, Homo sapien
ttcattagcgagatctgagaatgcctgttcctg

SEQ ID NO: 724687 - DNA, 33 bp, Homo sapien
ataatctccttcgacaagttccaaatatctttc

SEQ ID NO: 724688 - DNA, 33 bp, Homo sapien
ataatctccttcgacaggttccaaatatctttc

SEQ ID NO: 724689 - DNA, 33 bp, Homo sapien
ttttgctagggaaggagaactgggagaattgaa

SEQ ID NO: 724690 - DNA, 33 bp, Homo sapien
ttttgctagggaaggataactgggagaattgaa

SEQ ID NO: 724691 - DNA, 33 bp, Homo sapien
caacataagaatcttaagtcgttaccataagtc

SEQ ID NO: 724692 - DNA, 33 bp, Homo sapien
caacataagaatcttacgtcgttaccataagtc

SEQ ID NO: 724693 - DNA, 33 bp, Homo sapien
aaagcaactttggaaaagatttcaaaacatgaa

SEQ ID NO: 724694 - DNA, 33 bp, Homo sapien
aaagcaactttggaaaggatttcaaaacatgaa

SEQ ID NO: 724695 - DNA, 33 bp, Homo sapien
aattcagtgatagttaccaaaggtttgttagta

SEQ ID NO: 724696 - DNA, 33 bp, Homo sapien
aattcagtgatagttatcaaaggtttgttagta

SEQ ID NO: 724697 - DNA, 33 bp, Homo sapien
atggctacttttcaaaatggacttttctgatat

SEQ ID NO: 724698 - DNA, 33 bp, Homo sapien
atggctacttttcaaactggacttttctgatat

SEQ ID NO: 724699 - DNA, 33 bp, Homo sapien
aaagatgagcagaacacattcagatattcagat

SEQ ID NO: 724700 - DNA, 33 bp, Homo sapien
aaagatgagcagaacagattcagatattcagat

SEQ ID NO: 724701 - DNA, 33 bp, Homo sapien
cttatcatttctctgaaaacagattgtgttagg

SEQ ID NO: 724702 - DNA, 33 bp, Homo sapien
cttatcatttctctgacaacagattgtgttagg

SEQ ID NO: 724703 - DNA, 33 bp, Homo sapien
gtagtaatttcttccaaaaaagcagtttggtaa

SEQ ID NO: 724704 - DNA, 33 bp, Homo sapien
gtagtaatttcttccacaaaagcagtttggtaa

SEQ ID NO: 724705 - DNA, 33 bp, Homo sapien
taatgtcagacttgtactaaataggatcacaga

SEQ ID NO: 724706 - DNA, 33 bp, Homo sapien
taatgtcagacttgtattaaataggatcacaga

SEQ ID NO: 724707 - DNA, 33 bp, Homo sapien
gatatatgctacaacagtatttagtgtgtgtat

SEQ ID NO: 724708 - DNA, 33 bp, Homo sapien
gatatatgctacaacattatttagtgtgtgtat

SEQ ID NO: 724709 - DNA, 33 bp, Homo sapien
ggagttatgcagttgcaagccaaagatcagcag

SEQ ID NO: 724710 - DNA, 33 bp, Homo sapien
ggagttatgcagttgcgagccaaagatcagcag

SEQ ID NO: 724711 - DNA, 33 bp, Homo sapien
aattagtaagcatagaagatgagagtgtggtgg

SEQ ID NO: 724712 - DNA, 33 bp, Homo sapien
aattagtaagcatagaggatgagagtgtggtgg

SEQ ID NO: 724713 - DNA, 33 bp, Homo sapien
aaagaggccagcacaaattatattgggatatta

SEQ ID NO: 724714 - DNA, 33 bp, Homo sapien
aaagaggccagcacaagttatattgggatatta

SEQ ID NO: 724715 - DNA, 33 bp, Homo sapien
atgcattcattcaatcgctcttcaaaacaaacg

SEQ ID NO: 724716 - DNA, 33 bp, Homo sapien
atgcattcattcaatctctcttcaaaacaaacg

SEQ ID NO: 724717 - DNA, 33 bp, Homo sapien
ttattgtattagcaccgaagatgaacaggaaga

SEQ ID NO: 724718 - DNA, 33 bp, Homo sapien
ttattgtattagcacctaagatgaacaggaaga

SEQ ID NO: 724719 - DNA, 33 bp, Homo sapien
ccactttctattacctcagcagctattactctg

SEQ ID NO: 724720 - DNA, 33 bp, Homo sapien
ccactttctattaccttagcagctattactctg

SEQ ID NO: 724721 - DNA, 33 bp, Homo sapien
acatagcagccagagtaacattgtcaacatgta

SEQ ID NO: 724722 - DNA, 33 bp, Homo sapien
acatagcagccagagtgacattgtcaacatgta

SEQ ID NO: 724723 - DNA, 33 bp, Homo sapien
atgtgagatcatgttacaaaatctcccaatggt

SEQ ID NO: 724724 - DNA, 33 bp, Homo sapien
atgtgagatcatgttataaaatctcccaatggt

SEQ ID NO: 724725 - DNA, 33 bp, Homo sapien
aacacaatacgacttacccactttcttcagctt

SEQ ID NO: 724726 - DNA, 33 bp, Homo sapien
aacacaatacgacttatccactttcttcagctt

SEQ ID NO: 724727 - DNA, 33 bp, Homo sapien
agaggaagccaccagagatcaacgaaacaaaca

SEQ ID NO: 724728 - DNA, 33 bp, Homo sapien
agaggaagccaccagatatcaacgaaacaaaca

SEQ ID NO: 724729 - DNA, 33 bp, Homo sapien
aatctgaagttaaggcaaccagctcttatgtct

SEQ ID NO: 724730 - DNA, 33 bp, Homo sapien
aatctgaagttaaggcgaccagctcttatgtct

SEQ ID NO: 724731 - DNA, 33 bp, Homo sapien
gacaaaaataatcacccgatagttcattctgta

SEQ ID NO: 724732 - DNA, 33 bp, Homo sapien
gacaaaaataatcacctgatagttcattctgta

SEQ ID NO: 724733 - DNA, 33 bp, Homo sapien
tatgtagagttcaaaaataggtagaattaatat

SEQ ID NO: 724734 - DNA, 33 bp, Homo sapien
tatgtagagttcaaaagtaggtagaattaatat

SEQ ID NO: 724735 - DNA, 33 bp, Homo sapien
gctcaacagatttaaaagccataattactattt

SEQ ID NO: 724736 - DNA, 33 bp, Homo sapien
gctcaacagatttaaacgccataattactattt

SEQ ID NO: 724737 - DNA, 33 bp, Homo sapien
catttttctgtaccataagatgaactcctaaaa

SEQ ID NO: 724738 - DNA, 33 bp, Homo sapien
catttttctgtaccatgagatgaactcctaaaa

SEQ ID NO: 724739 - DNA, 33 bp, Homo sapien
tcaaaagctattgaagacaatactatgaccatc

SEQ ID NO: 724740 - DNA, 33 bp, Homo sapien
tcaaaagctattgaaggcaatactatgaccatc

SEQ ID NO: 724741 - DNA, 33 bp, Homo sapien
tatgaccatctggtgactagaatctctttaccc

SEQ ID NO: 724742 - DNA, 33 bp, Homo sapien
tatgaccatctggtgagtagaatctctttaccc

SEQ ID NO: 724743 - DNA, 33 bp, Homo sapien
caccaacatctaagggaacattattatttggca

SEQ ID NO: 724744 - DNA, 33 bp, Homo sapien
caccaacatctaagggtacattattatttggca

SEQ ID NO: 724745 - DNA, 33 bp, Homo sapien
atagcaacataatttaccaactcaacattgact

SEQ ID NO: 724746 - DNA, 33 bp, Homo sapien
atagcaacataatttatcaactcaacattgact

SEQ ID NO: 724747 - DNA, 33 bp, Homo sapien
tagtgttttccttccagattcaagagatggttg

SEQ ID NO: 724748 - DNA, 33 bp, Homo sapien
tagtgttttccttccatattcaagagatggttg

SEQ ID NO: 724749 - DNA, 33 bp, Homo sapien
gagaggtcagaccaaggctctccagttcttaaa

SEQ ID NO: 724750 - DNA, 33 bp, Homo sapien
gagaggtcagaccaagtctctccagttcttaaa

SEQ ID NO: 724751 - DNA, 33 bp, Homo sapien
aataaaagtgtctttaagcaatgaagaagagat

SEQ ID NO: 724752 - DNA, 33 bp, Homo sapien
aataaaagtgtctttaggcaatgaagaagagat

SEQ ID NO: 724753 - DNA, 33 bp, Homo sapien
tacagacaactaacaaccaatatatatccatgt

SEQ ID NO: 724754 - DNA, 33 bp, Homo sapien
tacagacaactaacaagcaatatatatccatgt

SEQ ID NO: 724755 - DNA, 33 bp, Homo sapien
tgagagatggccacagaaaagagtcaattaatc

SEQ ID NO: 724756 - DNA, 33 bp, Homo sapien
tgagagatggccacaggaaagagtcaattaatc

SEQ ID NO: 724757 - DNA, 33 bp, Homo sapien
tcagctttgttatcagcccagtgcttataaata

SEQ ID NO: 724758 - DNA, 33 bp, Homo sapien
tcagctttgttatcaggccagtgcttataaata

SEQ ID NO: 724759 - DNA, 33 bp, Homo sapien
gctcagtagataccgacaccaatttattttagc

SEQ ID NO: 724760 - DNA, 33 bp, Homo sapien
gctcagtagataccgataccaatttattttagc

SEQ ID NO: 724761 - DNA, 33 bp, Homo sapien
tattttaaaataagtaaatttgaatgcataatc

SEQ ID NO: 724762 - DNA, 33 bp, Homo sapien
tattttaaaataagtacatttgaatgcataatc

SEQ ID NO: 724763 - DNA, 33 bp, Homo sapien
ttttcaccagactttacggaagcagaattctgg

SEQ ID NO: 724764 - DNA, 33 bp, Homo sapien
ttttcaccagactttatggaagcagaattctgg

SEQ ID NO: 724765 - DNA, 33 bp, Homo sapien
atatagaaagaactcaacccaatagcaagaata

SEQ ID NO: 724766 - DNA, 33 bp, Homo sapien
atatagaaagaactcatcccaatagcaagaata

SEQ ID NO: 724767 - DNA, 33 bp, Homo sapien
aagaagtgtgtcagaaaatattaatggttttga

SEQ ID NO: 724768 - DNA, 33 bp, Homo sapien
aagaagtgtgtcagaagatattaatggttttga

SEQ ID NO: 724769 - DNA, 33 bp, Homo sapien
tgctcaaaaagtattacgttgtgttggctgtgc

SEQ ID NO: 724770 - DNA, 33 bp, Homo sapien
tgctcaaaaagtattatgttgtgttggctgtgc

SEQ ID NO: 724771 - DNA, 33 bp, Homo sapien
tcaagtagaaaaactcaagttgcaatgaatttc

SEQ ID NO: 724772 - DNA, 33 bp, Homo sapien
tcaagtagaaaaactccagttgcaatgaatttc

SEQ ID NO: 724773 - DNA, 33 bp, Homo sapien
attttagatattgtaaacattttggtgtaatat

SEQ ID NO: 724774 - DNA, 33 bp, Homo sapien
attttagatattgtaagcattttggtgtaatat

SEQ ID NO: 724775 - DNA, 33 bp, Homo sapien
aataggagttgactaaagattcaaactatgctc

SEQ ID NO: 724776 - DNA, 33 bp, Homo sapien
aataggagttgactaaggattcaaactatgctc

SEQ ID NO: 724777 - DNA, 33 bp, Homo sapien
tctctgtatagtttaacgccacaggcatacctc

SEQ ID NO: 724778 - DNA, 33 bp, Homo sapien
tctctgtatagtttaaggccacaggcatacctc

SEQ ID NO: 724779 - DNA, 33 bp, Homo sapien
aaacttgtttctttgcaagttagttacatttta

SEQ ID NO: 724780 - DNA, 33 bp, Homo sapien
aaacttgtttctttgcgagttagttacatttta

SEQ ID NO: 724781 - DNA, 33 bp, Homo sapien
agaaatcagcgtaaaacaggctgaaatcaaatc

SEQ ID NO: 724782 - DNA, 33 bp, Homo sapien
agaaatcagcgtaaaataggctgaaatcaaatc

SEQ ID NO: 724783 - DNA, 33 bp, Homo sapien
tctttgggtaagtaaacagtatcaccactaggc

SEQ ID NO: 724784 - DNA, 33 bp, Homo sapien
tctttgggtaagtaaagagtatcaccactaggc

SEQ ID NO: 724785 - DNA, 33 bp, Homo sapien
ggctctgtgtcactccaaggtaggctattgtcc

SEQ ID NO: 724786 - DNA, 33 bp, Homo sapien
ggctctgtgtcactccgaggtaggctattgtcc

SEQ ID NO: 724787 - DNA, 33 bp, Homo sapien
atgtctacaaattcaacgcaaacatctcattta

SEQ ID NO: 724788 - DNA, 33 bp, Homo sapien
atgtctacaaattcaatgcaaacatctcattta

SEQ ID NO: 724789 - DNA, 33 bp, Homo sapien
tcttatgacattgcaaatattctcactttggaa

SEQ ID NO: 724790 - DNA, 33 bp, Homo sapien
tcttatgacattgcaagtattctcactttggaa

SEQ ID NO: 724791 - DNA, 33 bp, Homo sapien
tcattcagaatctaaacgccagaaaagtagtaa

SEQ ID NO: 724792 - DNA, 33 bp, Homo sapien
tcattcagaatctaaatgccagaaaagtagtaa

SEQ ID NO: 724793 - DNA, 33 bp, Homo sapien
catttgccaccagcaactgagtcatgatctaat

SEQ ID NO: 724794 - DNA, 33 bp, Homo sapien
catttgccaccagcaagtgagtcatgatctaat

SEQ ID NO: 724795 - DNA, 33 bp, Homo sapien
cagcctcaaccatagaagatggccacgcccagg

SEQ ID NO: 724796 - DNA, 33 bp, Homo sapien
cagcctcaaccatagacgatggccacgcccagg

SEQ ID NO: 724797 - DNA, 33 bp, Homo sapien; identical to SEQ ID NO: 724795

SEQ ID NO: 724798 - DNA, 33 bp, Homo sapien; identical to SEQ ID NO: 724796

SEQ ID NO: 724799 - DNA, 33 bp, Homo sapien
cctggacaaaggaaccaacaagttttaagctgg

SEQ ID NO: 724800 - DNA, 33 bp, Homo sapien
cctggacaaaggaaccgacaagttttaagctgg

SEQ ID NO: 724801 - DNA, 33 bp, Homo sapien
ggtgtctttataaaaccaggaaattggacatag

SEQ ID NO: 724802 - DNA, 33 bp, Homo sapien
ggtgtctttataaaacgaggaaattggacatag

SEQ ID NO: 724803 - DNA, 33 bp, Homo sapien
gtcataaggcctaccacagagagcactcactca

SEQ ID NO: 724804 - DNA, 33 bp, Homo sapien
gtcataaggcctaccatagagagcactcactca

SEQ ID NO: 724805 - DNA, 33 bp, Homo sapien
aatatattgggtggtaagcaagtggatatgacc

SEQ ID NO: 724806 - DNA, 33 bp, Homo sapien
aatatattgggtggtaggcaagtggatatgacc

SEQ ID NO: 724807 - DNA, 33 bp, Homo sapien
aagagcagaatttatacggtaaaactgagatgc

SEQ ID NO: 724808 - DNA, 33 bp, Homo sapien
aagagcagaatttatatggtaaaactgagatgc

SEQ ID NO: 724809 - DNA, 33 bp, Homo sapien
ggaatatttcttttccacaaccataataaatta

SEQ ID NO: 724810 - DNA, 33 bp, Homo sapien
ggaatatttcttttccgcaaccataataaatta

SEQ ID NO: 724811 - DNA, 33 bp, Homo sapien
cagatgtgctgttaaccggtcttgttgtattta

SEQ ID NO: 724812 - DNA, 33 bp, Homo sapien
cagatgtgctgttaactggtcttgttgtattta

SEQ ID NO: 724813 - DNA, 33 bp, Homo sapien
aataccagattctctaagcttcgaactgtggga

SEQ ID NO: 724814 - DNA, 33 bp, Homo sapien
aataccagattctctaggcttcgaactgtggga

SEQ ID NO: 724815 - DNA, 33 bp, Homo sapien
cggtctccccagatacaatctctaagcttgtgc

SEQ ID NO: 724816 - DNA, 33 bp, Homo sapien
cggtctccccagatactatctctaagcttgtgc

SEQ ID NO: 724817 - DNA, 33 bp, Homo sapien
gcagcactctccttcaagacctagtatatccct

SEQ ID NO: 724818 - DNA, 33 bp, Homo sapien
gcagcactctccttcatgacctagtatatccct

SEQ ID NO: 724819 - DNA, 33 bp, Homo sapien
gagttgattcggagaaaataatcacaggagctt

SEQ ID NO: 724820 - DNA, 33 bp, Homo sapien
gagttgattcggagaacataatcacaggagctt

SEQ ID NO: 724821 - DNA, 33 bp, Homo sapien
gttttggttctatcacacatattaaccattcac

SEQ ID NO: 724822 - DNA, 33 bp, Homo sapien
gttttggttctatcacgcatattaaccattcac

SEQ ID NO: 724823 - DNA, 33 bp, Homo sapien
tttgtactaatgaccacgtgctatggagtcaca

SEQ ID NO: 724824 - DNA, 33 bp, Homo sapien
tttgtactaatgaccatgtgctatggagtcaca

SEQ ID NO: 724825 - DNA, 33 bp, Homo sapien
gaaataattcctgaaaaagtgtgcaaatttatt

SEQ ID NO: 724826 - DNA, 33 bp, Homo sapien
gaaataattcctgaaagagtgtgcaaatttatt

SEQ ID NO: 724827 - DNA, 33 bp, Homo sapien
cccagaattagtaaagacatgaaggattcagta

SEQ ID NO: 724828 - DNA, 33 bp, Homo sapien
cccagaattagtaaaggcatgaaggattcagta

SEQ ID NO: 724829 - DNA, 33 bp, Homo sapien
ccagcaataatgctagccaatttacacaaccaa

SEQ ID NO: 724830 - DNA, 33 bp, Homo sapien
ccagcaataatgctagtcaatttacacaaccaa

SEQ ID NO: 724831 - DNA, 33 bp, Homo sapien
ggcagaggcctctgtaacaatcaccgtcatgaa

SEQ ID NO: 724832 - DNA, 33 bp, Homo sapien
ggcagaggcctctgtatcaatcaccgtcatgaa

SEQ ID NO: 724833 - DNA, 33 bp, Homo sapien
gttaccttcacattgccagagaatactgttccc

SEQ ID NO: 724834 - DNA, 33 bp, Homo sapien
gttaccttcacattgctagagaatactgttccc

SEQ ID NO: 724835 - DNA, 33 bp, Homo sapien
atgcaggactacttgaaaccaataatttattat

SEQ ID NO: 724836 - DNA, 33 bp, Homo sapien
atgcaggactacttgataccaataatttattat

SEQ ID NO: 724837 - DNA, 33 bp, Homo sapien
ttctagtctttagaggaagtcttcgtacttgac

SEQ ID NO: 724838 - DNA, 33 bp, Homo sapien
ttctagtctttagaggcagtcttcgtacttgac

SEQ ID NO: 724839 - DNA, 33 bp, Homo sapien
aagatttagcatacaaattggagaaagtcttag

SEQ ID NO: 724840 - DNA, 33 bp, Homo sapien
aagatttagcatacaagttggagaaagtcttag

SEQ ID NO: 724841 - DNA, 33 bp, Homo sapien
ctattctacatgaaaaagtgataataaccacat

SEQ ID NO: 724842 - DNA, 33 bp, Homo sapien
ctattctacatgaaaaggtgataataaccacat

SEQ ID NO: 724843 - DNA, 33 bp, Homo sapien
tttgttacattagataccacttatcaatcccag

SEQ ID NO: 724844 - DNA, 33 bp, Homo sapien
tttgttacattagatatcacttatcaatcccag

SEQ ID NO: 724845 - DNA, 33 bp, Homo sapien
gagacaaatttctcaaagcctaattctatcata

SEQ ID NO: 724846 - DNA, 33 bp, Homo sapien
gagacaaatttctcaatgcctaattctatcata

SEQ ID NO: 724847 - DNA, 33 bp, Homo sapien
tgggtagttgtcaaatcaataaaacttgttgtt

SEQ ID NO: 724848 - DNA, 33 bp, Homo sapien
tgggtagttgtcaaatgaataaaacttgttgtt

SEQ ID NO: 724849 - DNA, 33 bp, Homo sapien
aattttctgtcttttcgcagtagatagaggata

SEQ ID NO: 724850 - DNA, 33 bp, Homo sapien
aattttctgtcttttctcagtagatagaggata

SEQ ID NO: 724851 - DNA, 33 bp, Homo sapien
cctcaagcagaaggaaactctttatgctggcct

SEQ ID NO: 724852 - DNA, 33 bp, Homo sapien
cctcaagcagaaggaatctctttatgctggcct

SEQ ID NO: 724853 - DNA, 33 bp, Homo sapien
tagaggacagagtacaactacctttaaacttag

SEQ ID NO: 724854 - DNA, 33 bp, Homo sapien
tagaggacagagtacatctacctttaaacttag

SEQ ID NO: 724855 - DNA, 33 bp, Homo sapien
gatgaggaatactttaacatagtgcaagaaggc

SEQ ID NO: 724856 - DNA, 33 bp, Homo sapien
gatgaggaatactttaccatagtgcaagaaggc

SEQ ID NO: 724857 - DNA, 33 bp, Homo sapien
aagctgcctttattagaaattctgttcgactta

SEQ ID NO: 724858 - DNA, 33 bp, Homo sapien
aagctgcctttattagtaattctgttcgactta

SEQ ID NO: 724859 - DNA, 33 bp, Homo sapien
caaggggaattaggaacgacacagcggaacatc

SEQ ID NO: 724860 - DNA, 33 bp, Homo sapien
caaggggaattaggaatgacacagcggaacatc

SEQ ID NO: 724861 - DNA, 33 bp, Homo sapien
attgtaatatttttaacggcttcttactgatag

SEQ ID NO: 724862 - DNA, 33 bp, Homo sapien
attgtaatatttttaatggcttcttactgatag

SEQ ID NO: 724863 - DNA, 33 bp, Homo sapien
gactccaggacatacaactattggtttcttcta

SEQ ID NO: 724864 - DNA, 33 bp, Homo sapien
gactccaggacatacatctattggtttcttcta

SEQ ID NO: 724865 - DNA, 33 bp, Homo sapien
aacaagtggtatgaagacggaatattcattatt

SEQ ID NO: 724866 - DNA, 33 bp, Homo sapien
aacaagtggtatgaaggcggaatattcattatt

SEQ ID NO: 724867 - DNA, 33 bp, Homo sapien
tcttattaacacttcaatctgctattgcttatt

SEQ ID NO: 724868 - DNA, 33 bp, Homo sapien
tcttattaacacttcagtctgctattgcttatt

SEQ ID NO: 724869 - DNA, 33 bp, Homo sapien
aaatgaattaaagcaaaggtatgtattatgaga

SEQ ID NO: 724870 - DNA, 33 bp, Homo sapien
aaatgaattaaagcaatggtatgtattatgaga

SEQ ID NO: 724871 - DNA, 33 bp, Homo sapien
gcttctcaagagaaaactgtagtgataccaatt

SEQ ID NO: 724872 - DNA, 33 bp, Homo sapien
gcttctcaagagaaaattgtagtgataccaatt

SEQ ID NO: 724873 - DNA, 33 bp, Homo sapien
gttcttagtctacagacgataaaaactcattaa

SEQ ID NO: 724874 - DNA, 33 bp, Homo sapien
gttcttagtctacagatgataaaaactcattaa

SEQ ID NO: 724875 - DNA, 33 bp, Homo sapien
agttcatgtttctacactggttagcaagcaaaa

SEQ ID NO: 724876 - DNA, 33 bp, Homo sapien
agttcatgtttctacattggttagcaagcaaaa

SEQ ID NO: 724877 - DNA, 33 bp, Homo sapien
atgaactcctgcctctcagaaatcaaggagttt

SEQ ID NO: 724878 - DNA, 33 bp, Homo sapien
atgaactcctgcctcttagaaatcaaggagttt

SEQ ID NO: 724879 - DNA, 33 bp, Homo sapien
acattactgtttgtcaaggaaatgaatatcaaa

SEQ ID NO: 724880 - DNA, 33 bp, Homo sapien
acattactgtttgtcagggaaatgaatatcaaa

SEQ ID NO: 724881 - DNA, 33 bp, Homo sapien
ggagccagacaataaacatgagaacattcaaaa

SEQ ID NO: 724882 - DNA, 33 bp, Homo sapien
ggagccagacaataaatatgagaacattcaaaa

SEQ ID NO: 724883 - DNA, 33 bp, Homo sapien
ctgaaatacagcttcaaattgacttggttccat

SEQ ID NO: 724884 - DNA, 33 bp, Homo sapien
ctgaaatacagcttcagattgacttggttccat

SEQ ID NO: 724885 - DNA, 33 bp, Homo sapien
tctactatttggtgaaacttgaattccagtttt

SEQ ID NO: 724886 - DNA, 33 bp, Homo sapien
tctactatttggtgaaccttgaattccagtttt

SEQ ID NO: 724887 - DNA, 33 bp, Homo sapien
cttccttttttttgcaaagtcactgacgtttta

SEQ ID NO: 724888 - DNA, 33 bp, Homo sapien
cttccttttttttgcagagtcactgacgtttta

SEQ ID NO: 724889 - DNA, 33 bp, Homo sapien
gtaaaaagcatctcaccgaggtaaaaaacgttt

SEQ ID NO: 724890 - DNA, 33 bp, Homo sapien
gtaaaaagcatctcactgaggtaaaaaacgttt

SEQ ID NO: 724891 - DNA, 33 bp, Homo sapien
gagttaaagcatcacaactaagcagactatgag

SEQ ID NO: 724892 - DNA, 33 bp, Homo sapien
gagttaaagcatcacatctaagcagactatgag

SEQ ID NO: 724893 - DNA, 33 bp, Homo sapien
agtatttgacagaataacagggtcactacagta

SEQ ID NO: 724894 - DNA, 33 bp, Homo sapien
agtatttgacagaatatcagggtcactacagta

SEQ ID NO: 724895 - DNA, 33 bp, Homo sapien
gcccaaaaatttcacaatctgataaacaacttc

SEQ ID NO: 724896 - DNA, 33 bp, Homo sapien
gcccaaaaatttcacattctgataaacaacttc

SEQ ID NO: 724897 - DNA, 33 bp, Homo sapien; identical to SEQ ID NO: 724895

SEQ ID NO: 724898 - DNA, 33 bp, Homo sapien; identical to SEQ ID NO: 724896

SEQ ID NO: 724899 - DNA, 33 bp, Homo sapien
ttcttttgcctagtaaaccttatcccataccat

SEQ ID NO: 724900 - DNA, 33 bp, Homo sapien
ttcttttgcctagtaacccttatcccataccat

SEQ ID NO: 724901 - DNA, 33 bp, Homo sapien
atctgaagtgattagggactggagcaggccccc

SEQ ID NO: 724902 - DNA, 33 bp, Homo sapien
atctgaagtgattaggtactggagcaggccccc

SEQ ID NO: 724903 - DNA, 33 bp, Homo sapien
tgcttctcagccacaactattctgagtctcagg

SEQ ID NO: 724904 - DNA, 33 bp, Homo sapien
tgcttctcagccacaagtattctgagtctcagg

SEQ ID NO: 724905 - DNA, 33 bp, Homo sapien
ttagaaataacctttgaagagcaacttaaacta

SEQ ID NO: 724906 - DNA, 33 bp, Homo sapien
ttagaaataacctttgtagagcaacttaaacta

SEQ ID NO: 724907 - DNA, 33 bp, Homo sapien
aatataattgtgaaaacgtctttgataataact

SEQ ID NO: 724908 - DNA, 33 bp, Homo sapien
aatataattgtgaaaatgtctttgataataact

SEQ ID NO: 724909 - DNA, 33 bp, Homo sapien
atatcactgagatctaagccatcaatgtctact

SEQ ID NO: 724910 - DNA, 33 bp, Homo sapien
atatcactgagatctaggccatcaatgtctact

SEQ ID NO: 724911 - DNA, 33 bp, Homo sapien
atggaaaaccaccaagacagaacactgttagac

SEQ ID NO: 724912 - DNA, 33 bp, Homo sapien
atggaaaaccaccaaggcagaacactgttagac

SEQ ID NO: 724913 - DNA, 33 bp, Homo sapien
ggggaaaaggaaataaccagatcttccaggaac

SEQ ID NO: 724914 - DNA, 33 bp, Homo sapien
ggggaaaaggaaataatcagatcttccaggaac

SEQ ID NO: 724915 - DNA, 33 bp, Homo sapien
cttagtatatctattgcaattatgcaggcaccg

SEQ ID NO: 724916 - DNA, 33 bp, Homo sapien
cttagtatatctattgtaattatgcaggcaccg

SEQ ID NO: 724917 - DNA, 33 bp, Homo sapien
tccataatgaaagagacccaatgtaaccaatta

SEQ ID NO: 724918 - DNA, 33 bp, Homo sapien
tccataatgaaagagatccaatgtaaccaatta

SEQ ID NO: 724919 - DNA, 33 bp, Homo sapien
catcaggaggcacaacaattctattcaactaga

SEQ ID NO: 724920 - DNA, 33 bp, Homo sapien
catcaggaggcacaacgattctattcaactaga

SEQ ID NO: 724921 - DNA, 33 bp, Homo sapien
agagaataggaataggcactttgtccatcatat

SEQ ID NO: 724922 - DNA, 33 bp, Homo sapien
agagaataggaataggtactttgtccatcatat

SEQ ID NO: 724923 - DNA, 33 bp, Homo sapien
ttctgatcccatgatacacaaaaacgtcccacc

SEQ ID NO: 724924 - DNA, 33 bp, Homo sapien
ttctgatcccatgatatacaaaaacgtcccacc

SEQ ID NO: 724925 - DNA, 33 bp, Homo sapien
ttccgagccagctcatcatattggtcccggatg

SEQ ID NO: 724926 - DNA, 33 bp, Homo sapien
ttccgagccagctcatgatattggtcccggatg

SEQ ID NO: 724927 - DNA, 33 bp, Homo sapien; identical to SEQ ID NO: 724925

SEQ ID NO: 724928 - DNA, 33 bp, Homo sapien; identical to SEQ ID NO: 724926

SEQ ID NO: 724929 - DNA, 33 bp, Homo sapien
ctaatgtaaatgttctaaacacattaatggtag

SEQ ID NO: 724930 - DNA, 33 bp, Homo sapien
ctaatgtaaatgttctgaacacattaatggtag

SEQ ID NO: 724931 - DNA, 33 bp, Homo sapien
ccaataggaattttggaaagttaccaatgtcta

SEQ ID NO: 724932 - DNA, 33 bp, Homo sapien
ccaataggaattttgggaagttaccaatgtcta

SEQ ID NO: 724933 - DNA, 33 bp, Homo sapien
tgaatatcctgagcaaattagaaagaaaatcaa

SEQ ID NO: 724934 - DNA, 33 bp, Homo sapien
tgaatatcctgagcaagttagaaagaaaatcaa

SEQ ID NO: 724935 - DNA, 33 bp, Homo sapien
tgggcaatgatatcagaatgaaacttttccacc

SEQ ID NO: 724936 - DNA, 33 bp, Homo sapien
tgggcaatgatatcaggatgaaacttttccacc

SEQ ID NO: 724937 - DNA, 33 bp, Homo sapien
tatgaattttaagcgacgtcttttatgataata

SEQ ID NO: 724938 - DNA, 33 bp, Homo sapien
tatgaattttaagcgaggtcttttatgataata

SEQ ID NO: 724939 - DNA, 33 bp, Homo sapien
ggcattgaattgagataaaagtattcaggaagg

SEQ ID NO: 724940 - DNA, 33 bp, Homo sapien
ggcattgaattgagatgaaagtattcaggaagg

SEQ ID NO: 724941 - DNA, 33 bp, Homo sapien
gttggacttattcaaaaattcctgattgagttg

SEQ ID NO: 724942 - DNA, 33 bp, Homo sapien
gttggacttattcaaacattcctgattgagttg

SEQ ID NO: 724943 - DNA, 33 bp, Homo sapien
gataacgtaataagaaactctggtcaaagtatc

SEQ ID NO: 724944 - DNA, 33 bp, Homo sapien
gataacgtaataagaacctctggtcaaagtatc

SEQ ID NO: 724945 - DNA, 33 bp, Homo sapien
tttgaggattttagcacgtttaacaggatccat

SEQ ID NO: 724946 - DNA, 33 bp, Homo sapien
tttgaggattttagcatgtttaacaggatccat

SEQ ID NO: 724947 - DNA, 33 bp, Homo sapien
caagatcttagaaaaaatatgtatgagaacata

SEQ ID NO: 724948 - DNA, 33 bp, Homo sapien
caagatcttagaaaaactatgtatgagaacata

SEQ ID NO: 724949 - DNA, 33 bp, Homo sapien
ctatacacttcacaaacctgaaaagtggataaa

SEQ ID NO: 724950 - DNA, 33 bp, Homo sapien
ctatacacttcacaaatctgaaaagtggataaa

SEQ ID NO: 724951 - DNA, 33 bp, Homo sapien
agggaactataagaacaaaaacagtattaaaag

SEQ ID NO: 724952 - DNA, 33 bp, Homo sapien
agggaactataagaacgaaaacagtattaaaag

SEQ ID NO: 724953 - DNA, 33 bp, Homo sapien
cagcagtacaacaaagaagtgggaggtaaggat

SEQ ID NO: 724954 - DNA, 33 bp, Homo sapien
cagcagtacaacaaagtagtgggaggtaaggat

SEQ ID NO: 724955 - DNA, 33 bp, Homo sapien
atgtctacacctcataccatctttatctgcctt

SEQ ID NO: 724956 - DNA, 33 bp, Homo sapien
atgtctacacctcatatcatctttatctgcctt

SEQ ID NO: 724957 - DNA, 33 bp, Homo sapien
tttttatctcttcaccactaaataggaaacagc

SEQ ID NO: 724958 - DNA, 33 bp, Homo sapien
tttttatctcttcaccgctaaataggaaacagc

SEQ ID NO: 724959 - DNA, 33 bp, Homo sapien
ataaaatggctacttcaaccaatttttatcatg

SEQ ID NO: 724960 - DNA, 33 bp, Homo sapien
ataaaatggctacttcgaccaatttttatcatg

SEQ ID NO: 724961 - DNA, 33 bp, Homo sapien
ctttttggtgtaatgacctattttccttatacc

SEQ ID NO: 724962 - DNA, 33 bp, Homo sapien
ctttttggtgtaatgatctattttccttatacc

SEQ ID NO: 724963 - DNA, 33 bp, Homo sapien
ctcttatcatttgtgacgctagaaaaagccttg

SEQ ID NO: 724964 - DNA, 33 bp, Homo sapien
ctcttatcatttgtgatgctagaaaaagccttg

SEQ ID NO: 724965 - DNA, 33 bp, Homo sapien
aaaagagataagtaacagaaatagtgataaagt

SEQ ID NO: 724966 - DNA, 33 bp, Homo sapien
aaaagagataagtaacggaaatagtgataaagt

SEQ ID NO: 724967 - DNA, 33 bp, Homo sapien
ggatgcagaaaaaccaataattaaaggcaaatg

SEQ ID NO: 724968 - DNA, 33 bp, Homo sapien
ggatgcagaaaaaccagtaattaaaggcaaatg

SEQ ID NO: 724969 - DNA, 33 bp, Homo sapien
atatgatgatattatacggaagactcaaaaaag

SEQ ID NO: 724970 - DNA, 33 bp, Homo sapien
atatgatgatattatatggaagactcaaaaaag

SEQ ID NO: 724971 - DNA, 33 bp, Homo sapien
tctaccctcaagacccccacctgtgttaaattc

SEQ ID NO: 724972 - DNA, 33 bp, Homo sapien
tctaccctcaagaccctcacctgtgttaaattc

SEQ ID NO: 724973 - DNA, 33 bp, Homo sapien
tctaatgtgattttaaaaattggttgaatagag

SEQ ID NO: 724974 - DNA, 33 bp, Homo sapien
tctaatgtgattttaataattggttgaatagag

SEQ ID NO: 724975 - DNA, 33 bp, Homo sapien
ttaaaattagagatgaaagaatttcccagcaag

SEQ ID NO: 724976 - DNA, 33 bp, Homo sapien
ttaaaattagagatgagagaatttcccagcaag

SEQ ID NO: 724977 - DNA, 33 bp, Homo sapien
gacagggcagggaagaacgctaagacaggttgc

SEQ ID NO: 724978 - DNA, 33 bp, Homo sapien
gacagggcagggaagagcgctaagacaggttgc

SEQ ID NO: 724979 - DNA, 33 bp, Homo sapien
tactgttgtcagatcacctatgtgagattggga

SEQ ID NO: 724980 - DNA, 33 bp, Homo sapien
tactgttgtcagatcagctatgtgagattggga

SEQ ID NO: 724981 - DNA, 33 bp, Homo sapien
gctcagccgcaatacaatagaccaccagataga

SEQ ID NO: 724982 - DNA, 33 bp, Homo sapien
gctcagccgcaatacagtagaccaccagataga

SEQ ID NO: 724983 - DNA, 33 bp, Homo sapien
atgtagtaggctttcccgctatttcacttctag

SEQ ID NO: 724984 - DNA, 33 bp, Homo sapien
atgtagtaggctttcctgctatttcacttctag

SEQ ID NO: 724985 - DNA, 33 bp, Homo sapien
acatttatcagttcccaaacaataattttatgt

SEQ ID NO: 724986 - DNA, 33 bp, Homo sapien
acatttatcagttcccgaacaataattttatgt

SEQ ID NO: 724987 - DNA, 33 bp, Homo sapien
gtgataattgtgttaactgtagaaattgattgt

SEQ ID NO: 724988 - DNA, 33 bp, Homo sapien
gtgataattgtgttaattgtagaaattgattgt

SEQ ID NO: 724989 - DNA, 33 bp, Homo sapien
cagggattctaactctcggcttcactagcagac

SEQ ID NO: 724990 - DNA, 33 bp, Homo sapien
cagggattctaactcttggcttcactagcagac

SEQ ID NO: 724991 - DNA, 33 bp, Homo sapien
actggcattcaaatcaatatgggaaaggtagaa

SEQ ID NO: 724992 - DNA, 33 bp, Homo sapien
actggcattcaaatcagtatgggaaaggtagaa

SEQ ID NO: 724993 - DNA, 33 bp, Homo sapien
aggccaatattcccaacgaacatagatgcaatg

SEQ ID NO: 724994 - DNA, 33 bp, Homo sapien
aggccaatattcccaatgaacatagatgcaatg

SEQ ID NO: 724995 - DNA, 33 bp, Homo sapien
ccccagcgtaaaaaggaacactaaaaggagcta

SEQ ID NO: 724996 - DNA, 33 bp, Homo sapien
ccccagcgtaaaaagggacactaaaaggagcta

SEQ ID NO: 724997 - DNA, 33 bp, Homo sapien
gaaaataatcaatacaatgatatacacggaaac

SEQ ID NO: 724998 - DNA, 33 bp, Homo sapien
gaaaataatcaatacagtgatatacacggaaac

SEQ ID NO: 724999 - DNA, 33 bp, Homo sapien
ttgctggccatttatactagcctgtgacttgtc

SEQ ID NO: 725000 - DNA, 33 bp, Homo sapien
ttgctggccatttatattagcctgtgacttgtc

SEQ ID NO: 725001 - DNA, 33 bp, Homo sapien
atctgtgtaataaaatcatagcgcaggaaattg

SEQ ID NO: 725002 - DNA, 33 bp, Homo sapien
atctgtgtaataaaatgatagcgcaggaaattg

SEQ ID NO: 725003 - DNA, 33 bp, Homo sapien
tgtgaggtatgctctacaaacttaactcaggga

SEQ ID NO: 725004 - DNA, 33 bp, Homo sapien
tgtgaggtatgctctagaaacttaactcaggga

SEQ ID NO: 725005 - DNA, 33 bp, Homo sapien
tatgggtcaatatccacgtgggttagattttat

SEQ ID NO: 725006 - DNA, 33 bp, Homo sapien
tatgggtcaatatccatgtgggttagattttat

SEQ ID NO: 725007 - DNA, 33 bp, Homo sapien; identical to SEQ ID NO: 725005

SEQ ID NO: 725008 - DNA, 33 bp, Homo sapien; identical to SEQ ID NO: 725006

SEQ ID NO: 725009 - DNA, 33 bp, Homo sapien
tttagctaggttgatagtaaagtcagagatgcg

SEQ ID NO: 725010 - DNA, 33 bp, Homo sapien
tttagctaggttgatattaaagtcagagatgcg

SEQ ID NO: 725011 - DNA, 33 bp, Homo sapien
aaaccccgatacaaccaccttgccacctcttgc

SEQ ID NO: 725012 - DNA, 33 bp, Homo sapien
aaaccccgatacaaccgccttgccacctcttgc

SEQ ID NO: 725013 - DNA, 33 bp, Homo sapien
cttaacaaacaataccaattataaatcagcatt

SEQ ID NO: 725014 - DNA, 33 bp, Homo sapien
cttaacaaacaataccgattataaatcagcatt

SEQ ID NO: 725015 - DNA, 33 bp, Homo sapien
tagagtttcatttttccaggatggagatctcca

SEQ ID NO: 725016 - DNA, 33 bp, Homo sapien
tagagtttcatttttctaggatggagatctcca

SEQ ID NO: 725017 - DNA, 33 bp, Homo sapien
agagctgctaagggccaacccagatattgaggc

SEQ ID NO: 725018 - DNA, 33 bp, Homo sapien
agagctgctaagggccgacccagatattgaggc

SEQ ID NO: 725019 - DNA, 33 bp, Homo sapien
gaggggtcatcactgaagcaagaataccactga

SEQ ID NO: 725020 - DNA, 33 bp, Homo sapien
gaggggtcatcactgaggcaagaataccactga

SEQ ID NO: 725021 - DNA, 33 bp, Homo sapien
attatttcattgaataacccatctaccctctac

SEQ ID NO: 725022 - DNA, 33 bp, Homo sapien
attatttcattgaatagcccatctaccctctac

SEQ ID NO: 725023 - DNA, 33 bp, Homo sapien
taaaaaaatgagctgaccaaagcatttggtatt

SEQ ID NO: 725024 - DNA, 33 bp, Homo sapien
taaaaaaatgagctgagcaaagcatttggtatt

SEQ ID NO: 725025 - DNA, 33 bp, Homo sapien
cttagatagtccctgtaaagtaattttgttttt

SEQ ID NO: 725026 - DNA, 33 bp, Homo sapien
cttagatagtccctgtgaagtaattttgttttt

SEQ ID NO: 725027 - DNA, 33 bp, Homo sapien
ttcaaaatgcagatgaaagaagtaaatgataca

SEQ ID NO: 725028 - DNA, 33 bp, Homo sapien
ttcaaaatgcagatgatagaagtaaatgataca

SEQ ID NO: 725029 - DNA, 33 bp, Homo sapien
acatgagctttcaaccggatagcagcagaaata

SEQ ID NO: 725030 - DNA, 33 bp, Homo sapien
acatgagctttcaacctgatagcagcagaaata

SEQ ID NO: 725031 - DNA, 33 bp, Homo sapien
cttgtgtccaaacaagcctgtttacaaaagtga

SEQ ID NO: 725032 - DNA, 33 bp, Homo sapien
cttgtgtccaaacaaggctgtttacaaaagtga

SEQ ID NO: 725033 - DNA, 33 bp, Homo sapien
ggtttacacaactacaatagaacccagtgaaaa

SEQ ID NO: 725034 - DNA, 33 bp, Homo sapien
ggtttacacaactacagtagaacccagtgaaaa

SEQ ID NO: 725035 - DNA, 33 bp, Homo sapien
atagggaggacttggtgaagagaaaaggaagaa

SEQ ID NO: 725036 - DNA, 33 bp, Homo sapien
atagggaggacttggttaagagaaaaggaagaa

SEQ ID NO: 725037 - DNA, 33 bp, Homo sapien
ctttatggaacatcctcacttccacacctcctt

SEQ ID NO: 725038 - DNA, 33 bp, Homo sapien
ctttatggaacatcctgacttccacacctcctt

SEQ ID NO: 725039 - DNA, 33 bp, Homo sapien
ctgatctacctgtatccattttacagcttacac

SEQ ID NO: 725040 - DNA, 33 bp, Homo sapien
ctgatctacctgtatctattttacagcttacac

SEQ ID NO: 725041 - DNA, 33 bp, Homo sapien
cagggtggtcttaccaatgaactggactggctg

SEQ ID NO: 725042 - DNA, 33 bp, Homo sapien
cagggtggtcttaccagtgaactggactggctg

SEQ ID NO: 725043 - DNA, 33 bp, Homo sapien
tgataaggctcaaataacttagattttatattt

SEQ ID NO: 725044 - DNA, 33 bp, Homo sapien
tgataaggctcaaatatcttagattttatattt

SEQ ID NO: 725045 - DNA, 33 bp, Homo sapien
ttaatattagggccaacgttcagtaatatatag

SEQ ID NO: 725046 - DNA, 33 bp, Homo sapien
ttaatattagggccaatgttcagtaatatatag

SEQ ID NO: 725047 - DNA, 33 bp, Homo sapien
attttaagctttgttaagaaatgcctagaatac

SEQ ID NO: 725048 - DNA, 33 bp, Homo sapien
attttaagctttgttaggaaatgcctagaatac

SEQ ID NO: 725049 - DNA, 33 bp, Homo sapien
gtgcatcaaatgaccacgttaataaccattacc

SEQ ID NO: 725050 - DNA, 33 bp, Homo sapien
gtgcatcaaatgaccatgttaataaccattacc

SEQ ID NO: 725051 - DNA, 33 bp, Homo sapien
ggaaatagtatattagacggagtagttttgcct

SEQ ID NO: 725052 - DNA, 33 bp, Homo sapien
ggaaatagtatattaggcggagtagttttgcct

SEQ ID NO: 725053 - DNA, 33 bp, Homo sapien
ctaacctcatggaaacaatttctccttcagaac

SEQ ID NO: 725054 - DNA, 33 bp, Homo sapien
ctaacctcatggaaaccatttctccttcagaac

SEQ ID NO: 725055 - DNA, 33 bp, Homo sapien
cttcatcacaaaacaaagttcccaagacagaag

SEQ ID NO: 725056 - DNA, 33 bp, Homo sapien
cttcatcacaaaacaaggttcccaagacagaag

SEQ ID NO: 725057 - DNA, 33 bp, Homo sapien
gtctgatctcgctatcacaatttctgccaccag

SEQ ID NO: 725058 - DNA, 33 bp, Homo sapien
gtctgatctcgctatcgcaatttctgccaccag

SEQ ID NO: 725059 - DNA, 33 bp, Homo sapien
gtggtttggcatgagacattttccagccgctgt

SEQ ID NO: 725060 - DNA, 33 bp, Homo sapien
gtggtttggcatgagatattttccagccgctgt

SEQ ID NO: 725061 - DNA, 33 bp, Homo sapien
acatttgtcctgatgacaggcaattacaaagac

SEQ ID NO: 725062 - DNA, 33 bp, Homo sapien
acatttgtcctgatgataggcaattacaaagac

SEQ ID NO: 725063 - DNA, 33 bp, Homo sapien
ttatcctcttgctgtaagtgattaacggcttga

SEQ ID NO: 725064 - DNA, 33 bp, Homo sapien
ttatcctcttgctgtaggtgattaacggcttga

SEQ ID NO: 725065 - DNA, 33 bp, Homo sapien
cactgctgacaattacaggaatggatagtgaca

SEQ ID NO: 725066 - DNA, 33 bp, Homo sapien
cactgctgacaattacgggaatggatagtgaca

SEQ ID NO: 725067 - DNA, 33 bp, Homo sapien
aataatagtcaacataccttttgtctacactat

SEQ ID NO: 725068 - DNA, 33 bp, Homo sapien
aataatagtcaacatatcttttgtctacactat

SEQ ID NO: 725069 - DNA, 33 bp, Homo sapien
attaaggattatctcaagtctagcacagataat

SEQ ID NO: 725070 - DNA, 33 bp, Homo sapien
attaaggattatctcaggtctagcacagataat

SEQ ID NO: 725071 - DNA, 33 bp, Homo sapien
ctatcctaaaattttgaaattatctgtgctaga

SEQ ID NO: 725072 - DNA, 33 bp, Homo sapien
ctatcctaaaattttgtaattatctgtgctaga

SEQ ID NO: 725073 - DNA, 33 bp, Homo sapien
aatgtgtgtggtttgacctctgacgtggggttt

SEQ ID NO: 725074 - DNA, 33 bp, Homo sapien
aatgtgtgtggtttgatctctgacgtggggttt

SEQ ID NO: 725075 - DNA, 33 bp, Homo sapien
gttttacaaacacagacaatgtatatgttgtat

SEQ ID NO: 725076 - DNA, 33 bp, Homo sapien
gttttacaaacacagagaatgtatatgttgtat

SEQ ID NO: 725077 - DNA, 33 bp, Homo sapien
tacttctctaatcttaacacctgcaaaaatggt

SEQ ID NO: 725078 - DNA, 33 bp, Homo sapien
tacttctctaatcttagcacctgcaaaaatggt

SEQ ID NO: 725079 - DNA, 33 bp, Homo sapien
aatctcttgtcacccacgctgaattgcagtgtc

SEQ ID NO: 725080 - DNA, 33 bp, Homo sapien
aatctcttgtcacccatgctgaattgcagtgtc

SEQ ID NO: 725081 - DNA, 33 bp, Homo sapien
aatagtgtgaggtagcaaaccatataaagatct

SEQ ID NO: 725082 - DNA, 33 bp, Homo sapien
aatagtgtgaggtagcgaaccatataaagatct

SEQ ID NO: 725083 - DNA, 33 bp, Homo sapien
ctgccttcttagagacggaaaggtgttaccact

SEQ ID NO: 725084 - DNA, 33 bp, Homo sapien
ctgccttcttagagactgaaaggtgttaccact

SEQ ID NO: 725085 - DNA, 33 bp, Homo sapien
atagattcttgcataactaggtattgattccca

SEQ ID NO: 725086 - DNA, 33 bp, Homo sapien
atagattcttgcataattaggtattgattccca

SEQ ID NO: 725087 - DNA, 33 bp, Homo sapien
agtaaaagctcttttaagcaaacacaatttatt

SEQ ID NO: 725088 - DNA, 33 bp, Homo sapien
agtaaaagctcttttaggcaaacacaatttatt

SEQ ID NO: 725089 - DNA, 33 bp, Homo sapien
tccagtctctaaaaaaaataactgcactattga

SEQ ID NO: 725090 - DNA, 33 bp, Homo sapien
tccagtctctaaaaaagataactgcactattga

SEQ ID NO: 725091 - DNA, 33 bp, Homo sapien
ctaaaacataatggagacatggtgtattcagca

SEQ ID NO: 725092 - DNA, 33 bp, Homo sapien
ctaaaacataatggagccatggtgtattcagca

SEQ ID NO: 725093 - DNA, 33 bp, Homo sapien
tactcattgcatttcacggaaaacattacaact

SEQ ID NO: 725094 - DNA, 33 bp, Homo sapien
tactcattgcatttcatggaaaacattacaact

SEQ ID NO: 725095 - DNA, 33 bp, Homo sapien
cactgctacatcctcacagttaaggaaaatatt

SEQ ID NO: 725096 - DNA, 33 bp, Homo sapien
cactgctacatcctcagagttaaggaaaatatt

SEQ ID NO: 725097 - DNA, 33 bp, Homo sapien
taccttaacagactaacgacaagtttgaaaatt

SEQ ID NO: 725098 - DNA, 33 bp, Homo sapien
taccttaacagactaatgacaagtttgaaaatt

SEQ ID NO: 725099 - DNA, 33 bp, Homo sapien
acagccccaagaggaaaagtggatctgtgtcat

SEQ ID NO: 725100 - DNA, 33 bp, Homo sapien
acagccccaagaggaagagtggatctgtgtcat

SEQ ID NO: 725101 - DNA, 33 bp, Homo sapien
agcccaaatcaactgaaggctaaagggatcccc

SEQ ID NO: 725102 - DNA, 33 bp, Homo sapien
agcccaaatcaactgagggctaaagggatcccc

SEQ ID NO: 725103 - DNA, 33 bp, Homo sapien
taaaagccattctttacctattccatccaagtc

SEQ ID NO: 725104 - DNA, 33 bp, Homo sapien
taaaagccattctttatctattccatccaagtc

SEQ ID NO: 725105 - DNA, 33 bp, Homo sapien
tcttacgtccgggtcacgctaatgcaagaagtg

SEQ ID NO: 725106 - DNA, 33 bp, Homo sapien
tcttacgtccgggtcatgctaatgcaagaagtg

SEQ ID NO: 725107 - DNA, 33 bp, Homo sapien
ttctttaaaaaacttggaagtcaatattcctgc

SEQ ID NO: 725108 - DNA, 33 bp, Homo sapien
ttctttaaaaaacttgtaagtcaatattcctgc

SEQ ID NO: 725109 - DNA, 33 bp, Homo sapien
tatgtgtacaaggatacgttgtttgttgccatg

SEQ ID NO: 725110 - DNA, 33 bp, Homo sapien
tatgtgtacaaggataggttgtttgttgccatg

SEQ ID NO: 725111 - DNA, 33 bp, Homo sapien
accaggactacaagaccgccatgctgtcggaca

SEQ ID NO: 725112 - DNA, 33 bp, Homo sapien
accaggactacaagactgccatgctgtcggaca

SEQ ID NO: 725113 - DNA, 33 bp, Homo sapien
tgaagcagtgtgaaaacagcatcgtggactaca

SEQ ID NO: 725114 - DNA, 33 bp, Homo sapien
tgaagcagtgtgaaaagagcatcgtggactaca

SEQ ID NO: 725115 - DNA, 33 bp, Homo sapien
atgcaggagttgaaaaatgtggatgatggagga

SEQ ID NO: 725116 - DNA, 33 bp, Homo sapien
atgcaggagttgaaaagtgtggatgatggagga

SEQ ID NO: 725117 - DNA, 33 bp, Homo sapien
gatgctaacgctttcaagagaactctgtgccca

SEQ ID NO: 725118 - DNA, 33 bp, Homo sapien
gatgctaacgctttcatgagaactctgtgccca

SEQ ID NO: 725119 - DNA, 33 bp, Homo sapien
catcatgaatatttggcacagattaatctggca

SEQ ID NO: 725120 - DNA, 33 bp, Homo sapien
catcatgaatatttgggacagattaatctggca

SEQ ID NO: 725121 - DNA, 33 bp, Homo sapien
gcagcttgtgctgctacaataagttgaaatgac

SEQ ID NO: 725122 - DNA, 33 bp, Homo sapien
gcagcttgtgctgctataataagttgaaatgac

SEQ ID NO: 725123 - DNA, 33 bp, Homo sapien
cagcagccaaactatgaagcttgtatatgaaat

SEQ ID NO: 725124 - DNA, 33 bp, Homo sapien
cagcagccaaactatggagcttgtatatgaaat

SEQ ID NO: 725125 - DNA, 33 bp, Homo sapien
agaggtccttgctagaccaggaaatctaagact

SEQ ID NO: 725126 - DNA, 33 bp, Homo sapien
agaggtccttgctagagcaggaaatctaagact

SEQ ID NO: 725127 - DNA, 33 bp, Homo sapien
atgatgacctaatgtacaactggcaggaaggat

SEQ ID NO: 725128 - DNA, 33 bp, Homo sapien
atgatgacctaatgtataactggcaggaaggat

SEQ ID NO: 725129 - DNA, 33 bp, Homo sapien
ttaaatataaagtaagaagttgagtaattcata

SEQ ID NO: 725130 - DNA, 33 bp, Homo sapien
ttaaatataaagtaaggagttgagtaattcata

SEQ ID NO: 725131 - DNA, 33 bp, Homo sapien
ggaaagtgaatatttcccagacacattgaaaga

SEQ ID NO: 725132 - DNA, 33 bp, Homo sapien
ggaaagtgaatatttctcagacacattgaaaga

SEQ ID NO: 725133 - DNA, 33 bp, Homo sapien
tgtttaagtcctaataacagaacctgtgacaat

SEQ ID NO: 725134 - DNA, 33 bp, Homo sapien
tgtttaagtcctaatatcagaacctgtgacaat

SEQ ID NO: 725135 - DNA, 33 bp, Homo sapien
caagtgatcccttaaacattataccctgcatag

SEQ ID NO: 725136 - DNA, 33 bp, Homo sapien
caagtgatcccttaaatattataccctgcatag

SEQ ID NO: 725137 - DNA, 33 bp, Homo sapien
cagcctcttttacgtaagaatcacaatattgca

SEQ ID NO: 725138 - DNA, 33 bp, Homo sapien
cagcctcttttacgtacgaatcacaatattgca

SEQ ID NO: 725139 - DNA, 33 bp, Homo sapien
ggtctgactccttccaacattggtaagggtgtg

SEQ ID NO: 725140 - DNA, 33 bp, Homo sapien
ggtctgactccttccagcattggtaagggtgtg

SEQ ID NO: 725141 - DNA, 33 bp, Homo sapien
cacagactgctttcccaactatgcctgctccac

SEQ ID NO: 725142 - DNA, 33 bp, Homo sapien
cacagactgctttcccgactatgcctgctccac

SEQ ID NO: 725143 - DNA, 33 bp, Homo sapien
cagacaagaagatagacatagctttgtttaaca

SEQ ID NO: 725144 - DNA, 33 bp, Homo sapien
cagacaagaagatagatatagctttgtttaaca

SEQ ID NO: 725145 - DNA, 33 bp, Homo sapien
gtcactttgccatagacgaagaatacatagtta

SEQ ID NO: 725146 - DNA, 33 bp, Homo sapien
gtcactttgccatagaggaagaatacatagtta

SEQ ID NO: 725147 - DNA, 33 bp, Homo sapien
aatactgtatccttcaaaaatttttcctctgtt

SEQ ID NO: 725148 - DNA, 33 bp, Homo sapien
aatactgtatccttcacaaatttttcctctgtt

SEQ ID NO: 725149 - DNA, 33 bp, Homo sapien
ggaagtacaggtatggaaaccactaatatatta

SEQ ID NO: 725150 - DNA, 33 bp, Homo sapien
ggaagtacaggtatgggaaccactaatatatta

SEQ ID NO: 725151 - DNA, 33 bp, Homo sapien
gtaataatgccggataactattgtattttatat

SEQ ID NO: 725152 - DNA, 33 bp, Homo sapien
gtaataatgccggatagctattgtattttatat

SEQ ID NO: 725153 - DNA, 33 bp, Homo sapien
cttttctagaatgccacgtgaaagaaaccacac

SEQ ID NO: 725154 - DNA, 33 bp, Homo sapien
cttttctagaatgccatgtgaaagaaaccacac

SEQ ID NO: 725155 - DNA, 33 bp, Homo sapien
ctgcttttcctgattgcagatgttacatagcac

SEQ ID NO: 725156 - DNA, 33 bp, Homo sapien
ctgcttttcctgattgtagatgttacatagcac

SEQ ID NO: 725157 - DNA, 33 bp, Homo sapien
aggaagctgcaattaccgtaaaaacccataaga

SEQ ID NO: 725158 - DNA, 33 bp, Homo sapien
aggaagctgcaattactgtaaaaacccataaga

SEQ ID NO: 725159 - DNA, 33 bp, Homo sapien
cagataaatttcaggaaaacctgactaggagaa

SEQ ID NO: 725160 - DNA, 33 bp, Homo sapien
cagataaatttcaggataacctgactaggagaa

SEQ ID NO: 725161 - DNA, 33 bp, Homo sapien
gtgcttcttgggaacccgagtcttaattgttga

SEQ ID NO: 725162 - DNA, 33 bp, Homo sapien
gtgcttcttgggaacctgagtcttaattgttga

SEQ ID NO: 725163 - DNA, 33 bp, Homo sapien
ccacctccaataggccaagcatcacagggctgg

SEQ ID NO: 725164 - DNA, 33 bp, Homo sapien
ccacctccaataggccgagcatcacagggctgg

SEQ ID NO: 725165 - DNA, 33 bp, Homo sapien
gttttctcagttgaaacgagtctcctaaaggaa

SEQ ID NO: 725166 - DNA, 33 bp, Homo sapien
gttttctcagttgaaatgagtctcctaaaggaa

SEQ ID NO: 725167 - DNA, 33 bp, Homo sapien
agctctagattacaaactttccccctttaacat

SEQ ID NO: 725168 - DNA, 33 bp, Homo sapien
agctctagattacaaattttccccctttaacat

SEQ ID NO: 725169 - DNA, 33 bp, Homo sapien
tcagggtataggtatcgcacatctttgttcaac

SEQ ID NO: 725170 - DNA, 33 bp, Homo sapien
tcagggtataggtatctcacatctttgttcaac

SEQ ID NO: 725171 - DNA, 33 bp, Homo sapien
agcttatcaattattactaaaaagcgtgctaaa

SEQ ID NO: 725172 - DNA, 33 bp, Homo sapien
agcttatcaattattattaaaaagcgtgctaaa

SEQ ID NO: 725173 - DNA, 33 bp, Homo sapien
atcatgtgcagacagaaaaactattgtactgtg

SEQ ID NO: 725174 - DNA, 33 bp, Homo sapien
atcatgtgcagacagagaaactattgtactgtg

SEQ ID NO: 725175 - DNA, 33 bp, Homo sapien
gaaagtgaagatatgcacaaactactttaccat

SEQ ID NO: 725176 - DNA, 33 bp, Homo sapien
gaaagtgaagatatgcccaaactactttaccat

SEQ ID NO: 725177 - DNA, 33 bp, Homo sapien
aaacaaattagctttaagggccacaataatgaa

SEQ ID NO: 725178 - DNA, 33 bp, Homo sapien
aaacaaattagctttacgggccacaataatgaa

SEQ ID NO: 725179 - DNA, 33 bp, Homo sapien
tcaacattagagagaccgtatggcatgggcatg

SEQ ID NO: 725180 - DNA, 33 bp, Homo sapien
tcaacattagagagactgtatggcatgggcatg

SEQ ID NO: 725181 - DNA, 33 bp, Homo sapien
cacctcaaaatggggacatcatgtgggagaatc

SEQ ID NO: 725182 - DNA, 33 bp, Homo sapien
cacctcaaaatggggatatcatgtgggagaatc

SEQ ID NO: 725183 - DNA, 33 bp, Homo sapien
atgccaatcacctgagaagtgcactgcttttgt

SEQ ID NO: 725184 - DNA, 33 bp, Homo sapien
atgccaatcacctgaggagtgcactgcttttgt

SEQ ID NO: 725185 - DNA, 33 bp, Homo sapien
tgactttaagattatccatgtgatttgctttgc

SEQ ID NO: 725186 - DNA, 33 bp, Homo sapien
tgactttaagattatcgatgtgatttgctttgc

SEQ ID NO: 725187 - DNA, 33 bp, Homo sapien
atgatggataggcagacggagtttgattacatg

SEQ ID NO: 725188 - DNA, 33 bp, Homo sapien
atgatggataggcagatggagtttgattacatg

SEQ ID NO: 725189 - DNA, 33 bp, Homo sapien
tcccagacgtcttccaagatgctgtttctccta

SEQ ID NO: 725190 - DNA, 33 bp, Homo sapien
tcccagacgtcttccacgatgctgtttctccta

SEQ ID NO: 725191 - DNA, 33 bp, Homo sapien
gaagaacacttttttacggccacaatcgtttaa

SEQ ID NO: 725192 - DNA, 33 bp, Homo sapien
gaagaacacttttttatggccacaatcgtttaa

SEQ ID NO: 725193 - DNA, 33 bp, Homo sapien
aaatgatggggtgatagggtagagagtgaaaat

SEQ ID NO: 725194 - DNA, 33 bp, Homo sapien
aaatgatggggtgatatggtagagagtgaaaat

SEQ ID NO: 725195 - DNA, 33 bp, Homo sapien
acatggaaatgccttaccatattagcagattag

SEQ ID NO: 725196 - DNA, 33 bp, Homo sapien
acatggaaatgccttatcatattagcagattag

SEQ ID NO: 725197 - DNA, 33 bp, Homo sapien
gaaatggattctcccccagaaagaaatacaggc

SEQ ID NO: 725198 - DNA, 33 bp, Homo sapien
gaaatggattctcccctagaaagaaatacaggc

SEQ ID NO: 725199 - DNA, 33 bp, Homo sapien
tcagaaaactgagagaaacaatgaaatggattc

SEQ ID NO: 725200 - DNA, 33 bp, Homo sapien
tcagaaaactgagagagacaatgaaatggattc

SEQ ID NO: 725201 - DNA, 33 bp, Homo sapien
gttttggctcttccacactaagtcccagaccag

SEQ ID NO: 725202 - DNA, 33 bp, Homo sapien
gttttggctcttccacgctaagtcccagaccag

SEQ ID NO: 725203 - DNA, 33 bp, Homo sapien
gacttttgggttctacaattctgttttcaagta

SEQ ID NO: 725204 - DNA, 33 bp, Homo sapien
gacttttgggttctaccattctgttttcaagta

SEQ ID NO: 725205 - DNA, 33 bp, Homo sapien
gtagctcaagcaaagacataggtcaacaaatta

SEQ ID NO: 725206 - DNA, 33 bp, Homo sapien
gtagctcaagcaaagatataggtcaacaaatta

SEQ ID NO: 725207 - DNA, 33 bp, Homo sapien
acctgatggtaaagcactcaattcaacaagaag

SEQ ID NO: 725208 - DNA, 33 bp, Homo sapien
acctgatggtaaagcattcaattcaacaagaag

SEQ ID NO: 725209 - DNA, 33 bp, Homo sapien
tctaagtctaatttcacccctaagtgcaccaga

SEQ ID NO: 725210 - DNA, 33 bp, Homo sapien
tctaagtctaatttcatccctaagtgcaccaga

SEQ ID NO: 725211 - DNA, 33 bp, Homo sapien
tacctaaatgtgctgtcaaataatattgttatc

SEQ ID NO: 725212 - DNA, 33 bp, Homo sapien
tacctaaatgtgctgtgaaataatattgttatc

SEQ ID NO: 725213 - DNA, 33 bp, Homo sapien
ttgacagttacatgagcctatcattttaattgt

SEQ ID NO: 725214 - DNA, 33 bp, Homo sapien
ttgacagttacatgaggctatcattttaattgt

SEQ ID NO: 725215 - DNA, 33 bp, Homo sapien
atacaattaaatcttgaaactgaaatacaaaac

SEQ ID NO: 725216 - DNA, 33 bp, Homo sapien
atacaattaaatcttggaactgaaatacaaaac

SEQ ID NO: 725217 - DNA, 33 bp, Homo sapien
cgctgtgaaagagagacgaatagctcgtaaaat

SEQ ID NO: 725218 - DNA, 33 bp, Homo sapien
cgctgtgaaagagagatgaatagctcgtaaaat

SEQ ID NO: 725219 - DNA, 33 bp, Homo sapien
tttactgaattaccaacgctagatatgttgcta

SEQ ID NO: 725220 - DNA, 33 bp, Homo sapien
tttactgaattaccaatgctagatatgttgcta

SEQ ID NO: 725221 - DNA, 33 bp, Homo sapien
aaatcattaagccaaaagcaacactagcctttc

SEQ ID NO: 725222 - DNA, 33 bp, Homo sapien
aaatcattaagccaaacgcaacactagcctttc

SEQ ID NO: 725223 - DNA, 33 bp, Homo sapien
atgttgctcagtttacaaaagtccagtctcatc

SEQ ID NO: 725224 - DNA, 33 bp, Homo sapien
atgttgctcagtttacgaaagtccagtctcatc

SEQ ID NO: 725225 - DNA, 33 bp, Homo sapien
ggatcagtcaggacaacttacatttctgctctg

SEQ ID NO: 725226 - DNA, 33 bp, Homo sapien
ggatcagtcaggacaagttacatttctgctctg

SEQ ID NO: 725227 - DNA, 33 bp, Homo sapien
atacaagctattcaacaaacagatctctacctt

SEQ ID NO: 725228 - DNA, 33 bp, Homo sapien
atacaagctattcaacgaacagatctctacctt

SEQ ID NO: 725229 - DNA, 33 bp, Homo sapien
atgtttttgtatcaataaaagcctaacagatca

SEQ ID NO: 725230 - DNA, 33 bp, Homo sapien
atgtttttgtatcaattaaagcctaacagatca

SEQ ID NO: 725231 - DNA, 33 bp, Homo sapien
gtcttctctgaacatgaactatctgtcatggcc

SEQ ID NO: 725232 - DNA, 33 bp, Homo sapien
gtcttctctgaacatggactatctgtcatggcc

SEQ ID NO: 725233 - DNA, 33 bp, Homo sapien
tttacagaggagttaacggaagcatatagagat

SEQ ID NO: 725234 - DNA, 33 bp, Homo sapien
tttacagaggagttaatggaagcatatagagat

SEQ ID NO: 725235 - DNA, 33 bp, Homo sapien
ttcccccaggttcttaacctcacatctttccta

SEQ ID NO: 725236 - DNA, 33 bp, Homo sapien
ttcccccaggttcttaccctcacatctttccta

SEQ ID NO: 725237 - DNA, 33 bp, Homo sapien
ataatgaggtttgtctcacctcctctcctgtca

SEQ ID NO: 725238 - DNA, 33 bp, Homo sapien
ataatgaggtttgtctgacctcctctcctgtca

SEQ ID NO: 725239 - DNA, 33 bp, Homo sapien
gttcaagaccagcatgaataatatatcaaaacc

SEQ ID NO: 725240 - DNA, 33 bp, Homo sapien
gttcaagaccagcatggataatatatcaaaacc

SEQ ID NO: 725241 - DNA, 33 bp, Homo sapien
agtttccagaacagaacgagaactccacacagc

SEQ ID NO: 725242 - DNA, 33 bp, Homo sapien
agtttccagaacagaatgagaactccacacagc

SEQ ID NO: 725243 - DNA, 33 bp, Homo sapien
aaggtgatccacagtaacagaaggcacaaaaac

SEQ ID NO: 725244 - DNA, 33 bp, Homo sapien
aaggtgatccacagtagcagaaggcacaaaaac

SEQ ID NO: 725245 - DNA, 33 bp, Homo sapien
tggtgatagggacaggcaacccataagacaggt

SEQ ID NO: 725246 - DNA, 33 bp, Homo sapien
tggtgatagggacaggtaacccataagacaggt

SEQ ID NO: 725247 - DNA, 33 bp, Homo sapien
tatatatgttatggtaactgtaatcagaaaatt

SEQ ID NO: 725248 - DNA, 33 bp, Homo sapien
tatatatgttatggtatctgtaatcagaaaatt

SEQ ID NO: 725249 - DNA, 33 bp, Homo sapien
agccagggcagtaaaacggatagatacatctct

SEQ ID NO: 725250 - DNA, 33 bp, Homo sapien
agccagggcagtaaaatggatagatacatctct

SEQ ID NO: 725251 - DNA, 33 bp, Homo sapien
caaaaggcaagatatcaaccctgttatgtgaag

SEQ ID NO: 725252 - DNA, 33 bp, Homo sapien
caaaaggcaagatatcgaccctgttatgtgaag

SEQ ID NO: 725253 - DNA, 33 bp, Homo sapien
ccagttccatgacttaccacctgcagtctaaga

SEQ ID NO: 725254 - DNA, 33 bp, Homo sapien
ccagttccatgacttatcacctgcagtctaaga

SEQ ID NO: 725255 - DNA, 33 bp, Homo sapien
atgtcattggtcataaactccaacttaactcta

SEQ ID NO: 725256 - DNA, 33 bp, Homo sapien
atgtcattggtcataacctccaacttaactcta

SEQ ID NO: 725257 - DNA, 33 bp, Homo sapien
aagagaactcagattaaggtgttcattttactg

SEQ ID NO: 725258 - DNA, 33 bp, Homo sapien
aagagaactcagattagggtgttcattttactg

SEQ ID NO: 725259 - DNA, 33 bp, Homo sapien
ctaactggatgtgaagaaaatgtaaaaattgtt

SEQ ID NO: 725260 - DNA, 33 bp, Homo sapien
ctaactggatgtgaaggaaatgtaaaaattgtt

SEQ ID NO: 725261 - DNA, 33 bp, Homo sapien
tgtgtaatacagttcacattgattcagagcttg

SEQ ID NO: 725262 - DNA, 33 bp, Homo sapien
tgtgtaatacagttcatattgattcagagcttg

SEQ ID NO: 725263 - DNA, 33 bp, Homo sapien
acgaggcagaaacaccagaatcctcaagggcat

SEQ ID NO: 725264 - DNA, 33 bp, Homo sapien
acgaggcagaaacaccggaatcctcaagggcat

SEQ ID NO: 725265 - DNA, 33 bp, Homo sapien
caggcatactttcaaactttcttgacatttaca

SEQ ID NO: 725266 - DNA, 33 bp, Homo sapien
caggcatactttcaaattttcttgacatttaca

SEQ ID NO: 725267 - DNA, 33 bp, Homo sapien
gttactacagtctgcaacagcgtgtttcttaaa

SEQ ID NO: 725268 - DNA, 33 bp, Homo sapien
gttactacagtctgcagcagcgtgtttcttaaa

SEQ ID NO: 725269 - DNA, 33 bp, Homo sapien
tttcttcagtggctgaccatgtgggagggagcc

SEQ ID NO: 725270 - DNA, 33 bp, Homo sapien
tttcttcagtggctgatcatgtgggagggagcc

SEQ ID NO: 725271 - DNA, 33 bp, Homo sapien
tgtcaagtgtactacaatgcaatttctttattt

SEQ ID NO: 725272 - DNA, 33 bp, Homo sapien
tgtcaagtgtactacagtgcaatttctttattt

SEQ ID NO: 725273 - DNA, 33 bp, Homo sapien
cctgtaccatattagaagataaaaccatgagaa

SEQ ID NO: 725274 - DNA, 33 bp, Homo sapien
cctgtaccatattagaggataaaaccatgagaa

SEQ ID NO: 725275 - DNA, 33 bp, Homo sapien
tcttagaaaaatactcaaactaagtcactaagc

SEQ ID NO: 725276 - DNA, 33 bp, Homo sapien
tcttagaaaaatactcgaactaagtcactaagc

SEQ ID NO: 725277 - DNA, 33 bp, Homo sapien
ttggagactcatgttacacgcagatttccagtt

SEQ ID NO: 725278 - DNA, 33 bp, Homo sapien
ttggagactcatgttatacgcagatttccagtt

SEQ ID NO: 725279 - DNA, 33 bp, Homo sapien
aagctttcagtaactaaagttatatgccatgtg

SEQ ID NO: 725280 - DNA, 33 bp, Homo sapien
aagctttcagtaactacagttatatgccatgtg

SEQ ID NO: 725281 - DNA, 33 bp, Homo sapien
aaattctttctctagaccataaagttgtgcaat

SEQ ID NO: 725282 - DNA, 33 bp, Homo sapien
aaattctttctctagatcataaagttgtgcaat

SEQ ID NO: 725283 - DNA, 33 bp, Homo sapien
tgacctacagtataagcaatcccataagatcag

SEQ ID NO: 725284 - DNA, 33 bp, Homo sapien
tgacctacagtataagtaatcccataagatcag

SEQ ID NO: 725285 - DNA, 33 bp, Homo sapien
ttcacctctatctgtacgacctcagtctggact

SEQ ID NO: 725286 - DNA, 33 bp, Homo sapien
ttcacctctatctgtatgacctcagtctggact

SEQ ID NO: 725287 - DNA, 33 bp, Homo sapien
caatgggataactgccaaacaatcacttgacat

SEQ ID NO: 725288 - DNA, 33 bp, Homo sapien
caatgggataactgccgaacaatcacttgacat

SEQ ID NO: 725289 - DNA, 33 bp, Homo sapien
taatagagttgcacctcaacaactggacggtta

SEQ ID NO: 725290 - DNA, 33 bp, Homo sapien
taatagagttgcacctgaacaactggacggtta

SEQ ID NO: 725291 - DNA, 33 bp, Homo sapien
tttcacaaaatgtaacagccaatagcttactgt

SEQ ID NO: 725292 - DNA, 33 bp, Homo sapien
tttcacaaaatgtaactgccaatagcttactgt

SEQ ID NO: 725293 - DNA, 33 bp, Homo sapien
aatttagatcacaaaaatggaaaatgtactttt

SEQ ID NO: 725294 - DNA, 33 bp, Homo sapien
aatttagatcacaaaagtggaaaatgtactttt

SEQ ID NO: 725295 - DNA, 33 bp, Homo sapien
cattacttttgaaccaatgatagaagataatgt

SEQ ID NO: 725296 - DNA, 33 bp, Homo sapien
cattacttttgaaccagtgatagaagataatgt

SEQ ID NO: 725297 - DNA, 33 bp, Homo sapien
tctataaattgataaacgtagaggaacaatgtt

SEQ ID NO: 725298 - DNA, 33 bp, Homo sapien
tctataaattgataaatgtagaggaacaatgtt

SEQ ID NO: 725299 - DNA, 33 bp, Homo sapien
tataaatatttgtgtacaattggcacagagctt

SEQ ID NO: 725300 - DNA, 33 bp, Homo sapien
tataaatatttgtgtataattggcacagagctt

SEQ ID NO: 725301 - DNA, 33 bp, Homo sapien
cctataataacgaggaacctctgataatatctc

SEQ ID NO: 725302 - DNA, 33 bp, Homo sapien
cctataataacgaggagcctctgataatatctc

SEQ ID NO: 725303 - DNA, 33 bp, Homo sapien
actgctgtagccaaaactggaacattagaatac

SEQ ID NO: 725304 - DNA, 33 bp, Homo sapien
actgctgtagccaaaattggaacattagaatac

SEQ ID NO: 725305 - DNA, 33 bp, Homo sapien
atcaaggatagaatgaaaatgtctgataggtgt

SEQ ID NO: 725306 - DNA, 33 bp, Homo sapien
atcaaggatagaatgagaatgtctgataggtgt

SEQ ID NO: 725307 - DNA, 33 bp, Homo sapien
tgttttacataaaagagcaacctcaatattgac

SEQ ID NO: 725308 - DNA, 33 bp, Homo sapien
tgttttacataaaagatcaacctcaatattgac

SEQ ID NO: 725309 - DNA, 33 bp, Homo sapien
gtgtcaaagatttggccacggttttcttctaca

SEQ ID NO: 725310 - DNA, 33 bp, Homo sapien
gtgtcaaagatttggctacggttttcttctaca

SEQ ID NO: 725311 - DNA, 33 bp, Homo sapien
tccactgtaaaggcacagatacacaaatgtcct

SEQ ID NO: 725312 - DNA, 33 bp, Homo sapien
tccactgtaaaggcacggatacacaaatgtcct

SEQ ID NO: 725313 - DNA, 33 bp, Homo sapien
tatcaagatgccactacagtcaacttcttggtg

SEQ ID NO: 725314 - DNA, 33 bp, Homo sapien
tatcaagatgccactatagtcaacttcttggtg

SEQ ID NO: 725315 - DNA, 33 bp, Homo sapien
agtgcaaagatctcacaaggtgtcaggagagat

SEQ ID NO: 725316 - DNA, 33 bp, Homo sapien
agtgcaaagatctcaccaggtgtcaggagagat

SEQ ID NO: 725317 - DNA, 33 bp, Homo sapien
tacaatctgggccccccacttctctcagcatga

SEQ ID NO: 725318 - DNA, 33 bp, Homo sapien
tacaatctgggcccccgacttctctcagcatga

SEQ ID NO: 725319 - DNA, 33 bp, Homo sapien
tattatgcttgtgaaaattatgtttggtagtgt

SEQ ID NO: 725320 - DNA, 33 bp, Homo sapien
tattatgcttgtgaaagttatgtttggtagtgt

SEQ ID NO: 725321 - DNA, 33 bp, Homo sapien
ggaatttaagtctaagcaagctagcaatattat

SEQ ID NO: 725322 - DNA, 33 bp, Homo sapien
ggaatttaagtctaaggaagctagcaatattat

SEQ ID NO: 725323 - DNA, 33 bp, Homo sapien
agaatttggagcaaagaaagtttcccagctcca

SEQ ID NO: 725324 - DNA, 33 bp, Homo sapien
agaatttggagcaaaggaagtttcccagctcca

SEQ ID NO: 725325 - DNA, 33 bp, Homo sapien
tacatagagaaaaaaaggtagcctatatgtctg

SEQ ID NO: 725326 - DNA, 33 bp, Homo sapien
tacatagagaaaaaaatgtagcctatatgtctg

SEQ ID NO: 725327 - DNA, 33 bp, Homo sapien
atttatttagagcctcaacaatgttaaggtggc

SEQ ID NO: 725328 - DNA, 33 bp, Homo sapien
atttatttagagcctcgacaatgttaaggtggc

SEQ ID NO: 725329 - DNA, 33 bp, Homo sapien
tttaggtattagatccaacagtagcatctctca

SEQ ID NO: 725330 - DNA, 33 bp, Homo sapien
tttaggtattagatccgacagtagcatctctca

SEQ ID NO: 725331 - DNA, 33 bp, Homo sapien
ttgagtcatttatttacgcttcccagtcaacat

SEQ ID NO: 725332 - DNA, 33 bp, Homo sapien
ttgagtcatttatttatgcttcccagtcaacat

SEQ ID NO: 725333 - DNA, 33 bp, Homo sapien
ataaattttttcctacagagatttttgagctcc

SEQ ID NO: 725334 - DNA, 33 bp, Homo sapien
ataaattttttcctacggagatttttgagctcc

SEQ ID NO: 725335 - DNA, 33 bp, Homo sapien
gttcaagtgctttaacaaagttcccagacttgt

SEQ ID NO: 725336 - DNA, 33 bp, Homo sapien
gttcaagtgctttaacgaagttcccagacttgt

SEQ ID NO: 725337 - DNA, 33 bp, Homo sapien
accagactgtaactaacgtcacaagaccaaata

SEQ ID NO: 725338 - DNA, 33 bp, Homo sapien
accagactgtaactaatgtcacaagaccaaata

SEQ ID NO: 725339 - DNA, 33 bp, Homo sapien
gatcttcatccttgccggcttgggggtgtctgc

SEQ ID NO: 725340 - DNA, 33 bp, Homo sapien
gatcttcatccttgcctgcttgggggtgtctgc

SEQ ID NO: 725341 - DNA, 33 bp, Homo sapien
tacacctaaattttccgctaatgcaagtcttac

SEQ ID NO: 725342 - DNA, 33 bp, Homo sapien
tacacctaaattttcctctaatgcaagtcttac

SEQ ID NO: 725343 - DNA, 33 bp, Homo sapien
tttgttcttcgatataggcaaggttataatgtc

SEQ ID NO: 725344 - DNA, 33 bp, Homo sapien
tttgttcttcgatatatgcaaggttataatgtc

SEQ ID NO: 725345 - DNA, 33 bp, Homo sapien
tattttagcaaaaatccgagtcaaaataacaca

SEQ ID NO: 725346 - DNA, 33 bp, Homo sapien
tattttagcaaaaatctgagtcaaaataacaca

SEQ ID NO: 725347 - DNA, 33 bp, Homo sapien
ttctggatcttacagaacacttgacttaattcc

SEQ ID NO: 725348 - DNA, 33 bp, Homo sapien
ttctggatcttacagagcacttgacttaattcc

SEQ ID NO: 725349 - DNA, 33 bp, Homo sapien
aaggagtcaacagaaagagcaactttaggacat

SEQ ID NO: 725350 - DNA, 33 bp, Homo sapien
aaggagtcaacagaaatagcaactttaggacat

SEQ ID NO: 725351 - DNA, 33 bp, Homo sapien
tgggaggatagcctgagccagggaaatccaggt

SEQ ID NO: 725352 - DNA, 33 bp, Homo sapien
tgggaggatagcctgatccagggaaatccaggt

SEQ ID NO: 725353 - DNA, 33 bp, Homo sapien; identical to SEQ ID NO: 725351

SEQ ID NO: 725354 - DNA, 33 bp, Homo sapien; identical to SEQ ID NO: 725352

SEQ ID NO: 725355 - DNA, 33 bp, Homo sapien
cctcacaattatgtatcaggaacactggcaaga

SEQ ID NO: 725356 - DNA, 33 bp, Homo sapien
cctcacaattatgtatgaggaacactggcaaga

SEQ ID NO: 725357 - DNA, 33 bp, Homo sapien; identical to SEQ ID NO: 725355

SEQ ID NO: 725358 - DNA, 33 bp, Homo sapien; identical to SEQ ID NO: 725356

SEQ ID NO: 725359 - DNA, 33 bp, Homo sapien
tgacatttcagtagaactgggagaggtaatttt

SEQ ID NO: 725360 - DNA, 33 bp, Homo sapien
tgacatttcagtagaattgggagaggtaatttt

SEQ ID NO: 725361 - DNA, 33 bp, Homo sapien; identical to SEQ ID NO: 725359

SEQ ID NO: 725362 - DNA, 33 bp, Homo sapien; identical to SEQ ID NO: 725360

SEQ ID NO: 725363 - DNA, 33 bp, Homo sapien
tcctttagaaagaaggaaatcctgtcatacatg

SEQ ID NO: 725364 - DNA, 33 bp, Homo sapien
tcctttagaaagaagggaatcctgtcatacatg

SEQ ID NO: 725365 - DNA, 33 bp, Homo sapien
gccaaaggtgagttcactaccctgaagggagag

SEQ ID NO: 725366 - DNA, 33 bp, Homo sapien
gccaaaggtgagttcattaccctgaagggagag

SEQ ID NO: 725367 - DNA, 33 bp, Homo sapien
agggcctagcctccaaaaccttatggatctacc

SEQ ID NO: 725368 - DNA, 33 bp, Homo sapien
agggcctagcctccaagaccttatggatctacc

SEQ ID NO: 725369 - DNA, 33 bp, Homo sapien
gacacttgatttggcaaagaacgttgcttagag

SEQ ID NO: 725370 - DNA, 33 bp, Homo sapien
gacacttgatttggcagagaacgttgcttagag

SEQ ID NO: 725371 - DNA, 33 bp, Homo sapien
tgagatctagtcattcacaacaacatagatgga

SEQ ID NO: 725372 - DNA, 33 bp, Homo sapien
tgagatctagtcattcgcaacaacatagatgga

SEQ ID NO: 725373 - DNA, 33 bp, Homo sapien; identical to SEQ ID NO: 725371

SEQ ID NO: 725374 - DNA, 33 bp, Homo sapien; identical to SEQ ID NO: 725372

SEQ ID NO: 725375 - DNA, 33 bp, Homo sapien
aaagcagactaagacaacttcataatggactca

SEQ ID NO: 725376 - DNA, 33 bp, Homo sapien
aaagcagactaagacagcttcataatggactca

SEQ ID NO: 725377 - DNA, 33 bp, Homo sapien
ttattgaaaaaaagtacgaccaaggagatatgt

SEQ ID NO: 725378 - DNA, 33 bp, Homo sapien
ttattgaaaaaaagtatgaccaaggagatatgt

SEQ ID NO: 725379 - DNA, 33 bp, Homo sapien
gagtgaacagagggaggacatggaagctgggca

SEQ ID NO: 725380 - DNA, 33 bp, Homo sapien
gagtgaacagagggagtacatggaagctgggca

SEQ ID NO: 725381 - DNA, 33 bp, Homo sapien
tagaattgtcaattcacgtcattagcccaattt

SEQ ID NO: 725382 - DNA, 33 bp, Homo sapien
tagaattgtcaattcatgtcattagcccaattt

SEQ ID NO: 725383 - DNA, 33 bp, Homo sapien
ttaatactgaatcaaactaatgcagaccgagtc

SEQ ID NO: 725384 - DNA, 33 bp, Homo sapien
ttaatactgaatcaaattaatgcagaccgagtc

SEQ ID NO: 725385 - DNA, 33 bp, Homo sapien
tggtaagggcctactccgaacctcgatgtatcc

SEQ ID NO: 725386 - DNA, 33 bp, Homo sapien
tggtaagggcctactctgaacctcgatgtatcc

SEQ ID NO: 725387 - DNA, 33 bp, Homo sapien
ttgttaaatgtaatcaaaatgtctgctattgaa

SEQ ID NO: 725388 - DNA, 33 bp, Homo sapien
ttgttaaatgtaatcataatgtctgctattgaa

SEQ ID NO: 725389 - DNA, 33 bp, Homo sapien; identical to SEQ ID NO: 725387

SEQ ID NO: 725390 - DNA, 33 bp, Homo sapien; identical to SEQ ID NO: 725388

SEQ ID NO: 725391 - DNA, 33 bp, Homo sapien
attatcatggaaggaaatatgatataaccaatt

SEQ ID NO: 725392 - DNA, 33 bp, Homo sapien
attatcatggaaggaactatgatataaccaatt

SEQ ID NO: 725393 - DNA, 33 bp, Homo sapien
gctagacaatttatgcgcaagcttccattattt

SEQ ID NO: 725394 - DNA, 33 bp, Homo sapien
gctagacaatttatgctcaagcttccattattt

SEQ ID NO: 725395 - DNA, 33 bp, Homo sapien
tataggtgtacgaatacatctggctatgcatta

SEQ ID NO: 725396 - DNA, 33 bp, Homo sapien
tataggtgtacgaatatatctggctatgcatta

SEQ ID NO: 725397 - DNA, 33 bp, Homo sapien
aaactctaaaaactaaacacattatcgccttca

SEQ ID NO: 725398 - DNA, 33 bp, Homo sapien
aaactctaaaaactaagcacattatcgccttca

SEQ ID NO: 725399 - DNA, 33 bp, Homo sapien
cataccgaaaaataatcaaattctcttgaaaaa

SEQ ID NO: 725400 - DNA, 33 bp, Homo sapien
cataccgaaaaataatgaaattctcttgaaaaa

SEQ ID NO: 725401 - DNA, 33 bp, Homo sapien
tgataagtgtcataaaaagaaatgagatttgaa

SEQ ID NO: 725402 - DNA, 33 bp, Homo sapien
tgataagtgtcataaagagaaatgagatttgaa

SEQ ID NO: 725403 - DNA, 33 bp, Homo sapien; identical to SEQ ID NO: 725401

SEQ ID NO: 725404 - DNA, 33 bp, Homo sapien; identical to SEQ ID NO: 725402

SEQ ID NO: 725405 - DNA, 33 bp, Homo sapien
agatttattttattggaaagatactatgaggtg

SEQ ID NO: 725406 - DNA, 33 bp, Homo sapien
agatttattttattgggaagatactatgaggtg

SEQ ID NO: 725407 - DNA, 33 bp, Homo sapien
agaggtttaattgctcaagatctcatatactac

SEQ ID NO: 725408 - DNA, 33 bp, Homo sapien
agaggtttaattgctccagatctcatatactac

SEQ ID NO: 725409 - DNA, 33 bp, Homo sapien
cctcattttaaattataacacttgcaattaatc

SEQ ID NO: 725410 - DNA, 33 bp, Homo sapien
cctcattttaaattattacacttgcaattaatc

SEQ ID NO: 725411 - DNA, 33 bp, Homo sapien
ctcattaagactcctcactcgttagtattaaca

SEQ ID NO: 725412 - DNA, 33 bp, Homo sapien
ctcattaagactcctcgctcgttagtattaaca

SEQ ID NO: 725413 - DNA, 33 bp, Homo sapien
cgcacatgaattctgacgttctggccatgcatt

SEQ ID NO: 725414 - DNA, 33 bp, Homo sapien
cgcacatgaattctgatgttctggccatgcatt

SEQ ID NO: 725415 - DNA, 33 bp, Homo sapien
ttatttattacaagtcaacagaaccatttggct

SEQ ID NO: 725416 - DNA, 33 bp, Homo sapien
ttatttattacaagtcgacagaaccatttggct

SEQ ID NO: 725417 - DNA, 33 bp, Homo sapien
ttatcttaatttcaggccagaatatttaagggc

SEQ ID NO: 725418 - DNA, 33 bp, Homo sapien
ttatcttaatttcaggtcagaatatttaagggc

SEQ ID NO: 725419 - DNA, 33 bp, Homo sapien
cctcacataacacacaatccaactgacagatcc

SEQ ID NO: 725420 - DNA, 33 bp, Homo sapien
cctcacataacacacagtccaactgacagatcc

SEQ ID NO: 725421 - DNA, 33 bp, Homo sapien
atcaggaaggaatttacggtgttgtatcagaga

SEQ ID NO: 725422 - DNA, 33 bp, Homo sapien
atcaggaaggaatttatggtgttgtatcagaga

SEQ ID NO: 725423 - DNA, 33 bp, Homo sapien
gtcgtctccccattcacagtgctctgttttcca

SEQ ID NO: 725424 - DNA, 33 bp, Homo sapien
gtcgtctccccattcatagtgctctgttttcca

SEQ ID NO: 725425 - DNA, 33 bp, Homo sapien
ttcttcgttgattgaacagaattatcttttaca

SEQ ID NO: 725426 - DNA, 33 bp, Homo sapien
ttcttcgttgattgaatagaattatcttttaca

SEQ ID NO: 725427 - DNA, 33 bp, Homo sapien; identical to SEQ ID NO: 725425

SEQ ID NO: 725428 - DNA, 33 bp, Homo sapien; identical to SEQ ID NO: 725426

SEQ ID NO: 725429 - DNA, 33 bp, Homo sapien
ctacttctccacacaccattcttcctagccttg

SEQ ID NO: 725430 - DNA, 33 bp, Homo sapien
ctacttctccacacactattcttcctagccttg

SEQ ID NO: 725431 - DNA, 33 bp, Homo sapien
tttattttggatagccagcaaaccaataacatg

SEQ ID NO: 725432 - DNA, 33 bp, Homo sapien
tttattttggatagccggcaaaccaataacatg

SEQ ID NO: 725433 - DNA, 33 bp, Homo sapien
tcctgaagactgaggagaacttgtgaacctaga

SEQ ID NO: 725434 - DNA, 33 bp, Homo sapien
tcctgaagactgaggataacttgtgaacctaga

SEQ ID NO: 725435 - DNA, 33 bp, Homo sapien
ttttgtgatatctcttgaaaaatgtgtttacag

SEQ ID NO: 725436 - DNA, 33 bp, Homo sapien
ttttgtgatatctctttaaaaatgtgtttacag

SEQ ID NO: 725437 - DNA, 33 bp, Homo sapien
gtgaggcacccatacagtattcagaaagcaaac

SEQ ID NO: 725438 - DNA, 33 bp, Homo sapien
gtgaggcacccatacattattcagaaagcaaac

SEQ ID NO: 725439 - DNA, 33 bp, Homo sapien
taataaaattaattgcaagaactcaaatgactg

SEQ ID NO: 725440 - DNA, 33 bp, Homo sapien
taataaaattaattgcgagaactcaaatgactg

SEQ ID NO: 725441 - DNA, 33 bp, Homo sapien; identical to SEQ ID NO: 725439

SEQ ID NO: 725442 - DNA, 33 bp, Homo sapien; identical to SEQ ID NO: 725440

SEQ ID NO: 725443 - DNA, 33 bp, Homo sapien
tttgttgattcctaaaacaattcatagaaatgt

SEQ ID NO: 725444 - DNA, 33 bp, Homo sapien
tttgttgattcctaaagcaattcatagaaatgt

SEQ ID NO: 725445 - DNA, 33 bp, Homo sapien; identical to SEQ ID NO: 725443

SEQ ID NO: 725446 - DNA, 33 bp, Homo sapien; identical to SEQ ID NO: 725444

SEQ ID NO: 725447 - DNA, 33 bp, Homo sapien
ccaacaacatagtatcccggtgttcatattttc

SEQ ID NO: 725448 - DNA, 33 bp, Homo sapien
ccaacaacatagtatctcggtgttcatattttc

SEQ ID NO: 725449 - DNA, 33 bp, Homo sapien
tggtacagtaaacaaaactatcctctaatctct

SEQ ID NO: 725450 - DNA, 33 bp, Homo sapien
tggtacagtaaacaaagctatcctctaatctct

SEQ ID NO: 725451 - DNA, 33 bp, Homo sapien
ttctctcagatacacaaggttataacttccgta

SEQ ID NO: 725452 - DNA, 33 bp, Homo sapien
ttctctcagatacacatggttataacttccgta

SEQ ID NO: 725453 - DNA, 33 bp, Homo sapien
gatttcttatgggggaaggcagaacatagcaaa

SEQ ID NO: 725454 - DNA, 33 bp, Homo sapien
gatttcttatgggggagggcagaacatagcaaa

SEQ ID NO: 725455 - DNA, 33 bp, Homo sapien; identical to SEQ ID NO: 725453

SEQ ID NO: 725456 - DNA, 33 bp, Homo sapien; identical to SEQ ID NO: 725454

SEQ ID NO: 725457 - DNA, 33 bp, Homo sapien
atagttagtaatagtgaactgtataatccaaaa

SEQ ID NO: 725458 - DNA, 33 bp, Homo sapien
atagttagtaatagtgcactgtataatccaaaa

SEQ ID NO: 725459 - DNA, 33 bp, Homo sapien
ttgacaaggtaagaatcaaggctgaatggagca

SEQ ID NO: 725460 - DNA, 33 bp, Homo sapien
ttgacaaggtaagaattaaggctgaatggagca

SEQ ID NO: 725461 - DNA, 33 bp, Homo sapien
gtcacatgtctacaataatcttatcttcaacag

SEQ ID NO: 725462 - DNA, 33 bp, Homo sapien
gtcacatgtctacaatcatcttatcttcaacag

SEQ ID NO: 725463 - DNA, 33 bp, Homo sapien; identical to SEQ ID NO: 725461

SEQ ID NO: 725464 - DNA, 33 bp, Homo sapien; identical to SEQ ID NO: 725462

SEQ ID NO: 725465 - DNA, 33 bp, Homo sapien
agaattatattgtcaaagtatagagagagatat

SEQ ID NO: 725466 - DNA, 33 bp, Homo sapien
agaattatattgtcaatgtatagagagagatat

SEQ ID NO: 725467 - DNA, 33 bp, Homo sapien
aatacataagcatgagaaagtggtaaatgagat

SEQ ID NO: 725468 - DNA, 33 bp, Homo sapien
aatacataagcatgaggaagtggtaaatgagat

SEQ ID NO: 725469 - DNA, 33 bp, Homo sapien
atgctaagcaacagaaattagtagatttacttt

SEQ ID NO: 725470 - DNA, 33 bp, Homo sapien
atgctaagcaacagaagttagtagatttacttt

SEQ ID NO: 725471 - DNA, 33 bp, Homo sapien; identical to SEQ ID NO: 725469

SEQ ID NO: 725472 - DNA, 33 bp, Homo sapien; identical to SEQ ID NO: 725470

SEQ ID NO: 725473 - DNA, 33 bp, Homo sapien
tgctttctctaacaaggcacttatgctccttgt

SEQ ID NO: 725474 - DNA, 33 bp, Homo sapien
tgctttctctaacaagtcacttatgctccttgt

SEQ ID NO: 725475 - DNA, 33 bp, Homo sapien
accactgagaacttgacgattacaactgccaat

SEQ ID NO: 725476 - DNA, 33 bp, Homo sapien
accactgagaacttgatgattacaactgccaat

SEQ ID NO: 725477 - DNA, 33 bp, Homo sapien
aaggctagatgaaataagcttaaaatgcagcca

SEQ ID NO: 725478 - DNA, 33 bp, Homo sapien
aaggctagatgaaataggcttaaaatgcagcca

SEQ ID NO: 725479 - DNA, 33 bp, Homo sapien; identical to SEQ ID NO: 725477

SEQ ID NO: 725480 - DNA, 33 bp, Homo sapien; identical to SEQ ID NO: 725478

SEQ ID NO: 725481 - DNA, 33 bp, Homo sapien
ggtagtattagtcatgcagctgtcaaatagttg

SEQ ID NO: 725482 - DNA, 33 bp, Homo sapien
ggtagtattagtcatgtagctgtcaaatagttg

SEQ ID NO: 725483 - DNA, 33 bp, Homo sapien; identical to SEQ ID NO: 725481

SEQ ID NO: 725484 - DNA, 33 bp, Homo sapien; identical to SEQ ID NO: 725482

SEQ ID NO: 725485 - DNA, 33 bp, Homo sapien
acaaaacaaggaaagaccagggaatgaatataa

SEQ ID NO: 725486 - DNA, 33 bp, Homo sapien
acaaaacaaggaaagagcagggaatgaatataa

SEQ ID NO: 725487 - DNA, 33 bp, Homo sapien; identical to SEQ ID NO: 725485

SEQ ID NO: 725488 - DNA, 33 bp, Homo sapien; identical to SEQ ID NO: 725486

SEQ ID NO: 725489 - DNA, 33 bp, Homo sapien
catattgtatgtgaaacttttgaaacagtaggt

SEQ ID NO: 725490 - DNA, 33 bp, Homo sapien
catattgtatgtgaaatttttgaaacagtaggt

SEQ ID NO: 725491 - DNA, 33 bp, Homo sapien
ccatcctatcttactacactggaaagcacttaa

SEQ ID NO: 725492 - DNA, 33 bp, Homo sapien
ccatcctatcttactatactggaaagcacttaa

SEQ ID NO: 725493 - DNA, 33 bp, Homo sapien
taagtgctctacccataactttgtggaaaatca

SEQ ID NO: 725494 - DNA, 33 bp, Homo sapien
taagtgctctacccattactttgtggaaaatca

SEQ ID NO: 725495 - DNA, 33 bp, Homo sapien; identical to SEQ ID NO: 725493

SEQ ID NO: 725496 - DNA, 33 bp, Homo sapien; identical to SEQ ID NO: 725494

SEQ ID NO: 725497 - DNA, 33 bp, Homo sapien
gaaggagctgaccgaaggacatggttttgggat

SEQ ID NO: 725498 - DNA, 33 bp, Homo sapien
gaaggagctgaccgaatgacatggttttgggat

SEQ ID NO: 725499 - DNA, 33 bp, Homo sapien; identical to SEQ ID NO: 725497

SEQ ID NO: 725500 - DNA, 33 bp, Homo sapien; identical to SEQ ID NO: 725498

SEQ ID NO: 725501 - DNA, 33 bp, Homo sapien
gggtctaaggcctacaacttcctctactctcac

SEQ ID NO: 725502 - DNA, 33 bp, Homo sapien
gggtctaaggcctacagcttcctctactctcac

SEQ ID NO: 725503 - DNA, 33 bp, Homo sapien; identical to SEQ ID NO: 725501

SEQ ID NO: 725504 - DNA, 33 bp, Homo sapien; identical to SEQ ID NO: 725502

SEQ ID NO: 725505 - DNA, 33 bp, Homo sapien
aatgggaatgctcatacgcagttggtgggaatg

SEQ ID NO: 725506 - DNA, 33 bp, Homo sapien
aatgggaatgctcatatgcagttggtgggaatg

SEQ ID NO: 725507 - DNA, 33 bp, Homo sapien; identical to SEQ ID NO: 725505

SEQ ID NO: 725508 - DNA, 33 bp, Homo sapien; identical to SEQ ID NO: 725506

SEQ ID NO: 725509 - DNA, 33 bp, Homo sapien
gttatattcaaagagaaatttttggtcatcctc

SEQ ID NO: 725510 - DNA, 33 bp, Homo sapien
gttatattcaaagagagatttttggtcatcctc

SEQ ID NO: 725511 - DNA, 33 bp, Homo sapien; identical to SEQ ID NO: 725509

SEQ ID NO: 725512 - DNA, 33 bp, Homo sapien; identical to SEQ ID NO: 725510

SEQ ID NO: 725513 - DNA, 33 bp, Homo sapien
acttttaacatggtaactgaggaaaaaatgagt

SEQ ID NO: 725514 - DNA, 33 bp, Homo sapien
acttttaacatggtaattgaggaaaaaatgagt

SEQ ID NO: 725515 - DNA, 33 bp, Homo sapien
ggcttgcttacaataaaggcagatatctcagag

SEQ ID NO: 725516 - DNA, 33 bp, Homo sapien
ggcttgcttacaataagggcagatatctcagag

SEQ ID NO: 725517 - DNA, 33 bp, Homo sapien; identical to SEQ ID NO: 725515

SEQ ID NO: 725518 - DNA, 33 bp, Homo sapien; identical to SEQ ID NO: 725516

SEQ ID NO: 725519 - DNA, 33 bp, Homo sapien
atgtgcaaatgaaaaaacaatgtccattatttc

SEQ ID NO: 725520 - DNA, 33 bp, Homo sapien
atgtgcaaatgaaaaagcaatgtccattatttc

SEQ ID NO: 725521 - DNA, 33 bp, Homo sapien; identical to SEQ ID NO: 725519

SEQ ID NO: 725522 - DNA, 33 bp, Homo sapien; identical to SEQ ID NO: 725520

SEQ ID NO: 725523 - DNA, 33 bp, Homo sapien
ccactacagaatcataggttttagggtgtattt

SEQ ID NO: 725524 - DNA, 33 bp, Homo sapien
ccactacagaatcatatgttttagggtgtattt

SEQ ID NO: 725525 - DNA, 33 bp, Homo sapien
gaaaatgtcctcaaagaaatactagcaaactaa

SEQ ID NO: 725526 - DNA, 33 bp, Homo sapien
gaaaatgtcctcaaaggaatactagcaaactaa

SEQ ID NO: 725527 - DNA, 33 bp, Homo sapien; identical to SEQ ID NO: 725525

SEQ ID NO: 725528 - DNA, 33 bp, Homo sapien; identical to SEQ ID NO: 725526

SEQ ID NO: 725529 - DNA, 33 bp, Homo sapien
tataatataaacagcaaaaggatcacatacatg

SEQ ID NO: 725530 - DNA, 33 bp, Homo sapien
tataatataaacagcagaaggatcacatacatg

SEQ ID NO: 725531 - DNA, 33 bp, Homo sapien; identical to SEQ ID NO: 725529

SEQ ID NO: 725532 - DNA, 33 bp, Homo sapien; identical to SEQ ID NO: 725530

SEQ ID NO: 725533 - DNA, 33 bp, Homo sapien
ctggcataaccttgacacaaaaatctgataagg

SEQ ID NO: 725534 - DNA, 33 bp, Homo sapien
ctggcataaccttgacccaaaaatctgataagg

SEQ ID NO: 725535 - DNA, 33 bp, Homo sapien
acctaacaaagaaatacgatttgatttaatatt

SEQ ID NO: 725536 - DNA, 33 bp, Homo sapien
acctaacaaagaaatatgatttgatttaatatt

SEQ ID NO: 725537 - DNA, 33 bp, Homo sapien
atccaagacaacagcaggagccttaggtgactg

SEQ ID NO: 725538 - DNA, 33 bp, Homo sapien
atccaagacaacagcatgagccttaggtgactg

SEQ ID NO: 725539 - DNA, 33 bp, Homo sapien
gtgactgagagtgtgacgaaggcaagccttgaa

SEQ ID NO: 725540 - DNA, 33 bp, Homo sapien
gtgactgagagtgtgatgaaggcaagccttgaa

SEQ ID NO: 725541 - DNA, 33 bp, Homo sapien
caaatagcaatttggcagaaggtgacataaata

SEQ ID NO: 725542 - DNA, 33 bp, Homo sapien
caaatagcaatttggccgaaggtgacataaata

SEQ ID NO: 725543 - DNA, 33 bp, Homo sapien
ttgaaactgaagagacacattccacagaactgt

SEQ ID NO: 725544 - DNA, 33 bp, Homo sapien
ttgaaactgaagagacgcattccacagaactgt

SEQ ID NO: 725545 - DNA, 33 bp, Homo sapien; identical to SEQ ID NO: 725543

SEQ ID NO: 725546 - DNA, 33 bp, Homo sapien; identical to SEQ ID NO: 725544

SEQ ID NO: 725547 - DNA, 33 bp, Homo sapien
attctcatggaattctcaaagagcaagcacaat

SEQ ID NO: 725548 - DNA, 33 bp, Homo sapien
attctcatggaattcttaaagagcaagcacaat

SEQ ID NO: 725549 - DNA, 33 bp, Homo sapien
taatcttggaaaattccacttctaaattcttaa

SEQ ID NO: 725550 - DNA, 33 bp, Homo sapien
taatcttggaaaattctacttctaaattcttaa

SEQ ID NO: 725551 - DNA, 33 bp, Homo sapien
tgactggcttattttacatggacttggccaaag

SEQ ID NO: 725552 - DNA, 33 bp, Homo sapien
tgactggcttattttatatggacttggccaaag

SEQ ID NO: 725553 - DNA, 33 bp, Homo sapien; identical to SEQ ID NO: 725551

SEQ ID NO: 725554 - DNA, 33 bp, Homo sapien; identical to SEQ ID NO: 725552

SEQ ID NO: 725555 - DNA, 33 bp, Homo sapien
gactcacaggaatcaaaccttctatttctcctg

SEQ ID NO: 725556 - DNA, 33 bp, Homo sapien
gactcacaggaatcaacccttctatttctcctg

SEQ ID NO: 725557 - DNA, 33 bp, Homo sapien
ttagcagactggacacaccgaggaaagaatctc

SEQ ID NO: 725558 - DNA, 33 bp, Homo sapien
ttagcagactggacacgccgaggaaagaatctc

SEQ ID NO: 725559 - DNA, 33 bp, Homo sapien
caagatacttgtttaagaaagaaacgacacttc

SEQ ID NO: 725560 - DNA, 33 bp, Homo sapien
caagatacttgtttaataaagaaacgacacttc

SEQ ID NO: 725561 - DNA, 33 bp, Homo sapien
ctccaggtttccctcaacataaaacagtcaaat

SEQ ID NO: 725562 - DNA, 33 bp, Homo sapien
ctccaggtttccctcagcataaaacagtcaaat

SEQ ID NO: 725563 - DNA, 33 bp, Homo sapien
ggctttctaattcacaatcactgaagcatctcc

SEQ ID NO: 725564 - DNA, 33 bp, Homo sapien
ggctttctaattcacagtcactgaagcatctcc

SEQ ID NO: 725565 - DNA, 33 bp, Homo sapien
ggtcagcagaagacaaattagaggctgatgact

SEQ ID NO: 725566 - DNA, 33 bp, Homo sapien
ggtcagcagaagacaagttagaggctgatgact

SEQ ID NO: 725567 - DNA, 33 bp, Homo sapien
cggagcatgcaaacagccagctcatagggagcg

SEQ ID NO: 725568 - DNA, 33 bp, Homo sapien
cggagcatgcaaacaggcagctcatagggagcg

SEQ ID NO: 725569 - DNA, 33 bp, Homo sapien
ggctataattattacacgatctgaaatgactat

SEQ ID NO: 725570 - DNA, 33 bp, Homo sapien
ggctataattattacatgatctgaaatgactat

SEQ ID NO: 725571 - DNA, 33 bp, Homo sapien
ttgtagattcttaaaactgtgatggaactttta

SEQ ID NO: 725572 - DNA, 33 bp, Homo sapien
ttgtagattcttaaaattgtgatggaactttta

SEQ ID NO: 725573 - DNA, 33 bp, Homo sapien
taggtaagcagaaaagaaatggtgtaaagaaac

SEQ ID NO: 725574 - DNA, 33 bp, Homo sapien
taggtaagcagaaaaggaatggtgtaaagaaac

SEQ ID NO: 725575 - DNA, 33 bp, Homo sapien
tctcttagaggatgacagtcagaaacggaggaa

SEQ ID NO: 725576 - DNA, 33 bp, Homo sapien
tctcttagaggatgacggtcagaaacggaggaa

SEQ ID NO: 725577 - DNA, 33 bp, Homo sapien
gtaactataatgaaagcctatgtgtcataaatg

SEQ ID NO: 725578 - DNA, 33 bp, Homo sapien
gtaactataatgaaaggctatgtgtcataaatg

SEQ ID NO: 725579 - DNA, 33 bp, Homo sapien
tgaaagtgatttatagcatttaggaggcagagt

SEQ ID NO: 725580 - DNA, 33 bp, Homo sapien
tgaaagtgatttatagtatttaggaggcagagt

SEQ ID NO: 725581 - DNA, 33 bp, Homo sapien
gtcattatatctacaacagctgggaattagttg

SEQ ID NO: 725582 - DNA, 33 bp, Homo sapien
gtcattatatctacaatagctgggaattagttg

SEQ ID NO: 725583 - DNA, 33 bp, Homo sapien
aacactttacatagcccgccaaataggatcctg

SEQ ID NO: 725584 - DNA, 33 bp, Homo sapien
aacactttacatagcctgccaaataggatcctg

SEQ ID NO: 725585 - DNA, 33 bp, Homo sapien
ttcacatccccaaacaataactgtgtataagcg

SEQ ID NO: 725586 - DNA, 33 bp, Homo sapien
ttcacatccccaaacagtaactgtgtataagcg

SEQ ID NO: 725587 - DNA, 33 bp, Homo sapien
tttctttagtttctcaatcttggctataatcaa

SEQ ID NO: 725588 - DNA, 33 bp, Homo sapien
tttctttagtttctcagtcttggctataatcaa

SEQ ID NO: 725589 - DNA, 33 bp, Homo sapien
tctcaccaaaactgaccagaacgctggcgtgac

SEQ ID NO: 725590 - DNA, 33 bp, Homo sapien
tctcaccaaaactgactagaacgctggcgtgac

SEQ ID NO: 725591 - DNA, 33 bp, Homo sapien
tgcttttcaacggcccccttttcaacagcacgt

SEQ ID NO: 725592 - DNA, 33 bp, Homo sapien
tgcttttcaacggcccgcttttcaacagcacgt

SEQ ID NO: 725593 - DNA, 33 bp, Homo sapien
ctataatgagaggttaagtctaaagatgtgact

SEQ ID NO: 725594 - DNA, 33 bp, Homo sapien
ctataatgagaggttacgtctaaagatgtgact

SEQ ID NO: 725595 - DNA, 33 bp, Homo sapien
tgagcctttcagaggccattctaaggttgtagg

SEQ ID NO: 725596 - DNA, 33 bp, Homo sapien
tgagcctttcagaggctattctaaggttgtagg

SEQ ID NO: 725597 - DNA, 33 bp, Homo sapien
ctttaagttagggctaagctactgtctggtgct

SEQ ID NO: 725598 - DNA, 33 bp, Homo sapien
ctttaagttagggctaggctactgtctggtgct

SEQ ID NO: 725599 - DNA, 33 bp, Homo sapien
agcgtttagaagcaccaagaaaaccagtcaacc

SEQ ID NO: 725600 - DNA, 33 bp, Homo sapien
agcgtttagaagcaccgagaaaaccagtcaacc

SEQ ID NO: 725601 - DNA, 33 bp, Homo sapien
aagaatccttgtggtaagatctgtttctggagc

SEQ ID NO: 725602 - DNA, 33 bp, Homo sapien
aagaatccttgtggtaggatctgtttctggagc

SEQ ID NO: 725603 - DNA, 33 bp, Homo sapien
acaaaagaaaaaatgaagcataatagctccacc

SEQ ID NO: 725604 - DNA, 33 bp, Homo sapien
acaaaagaaaaaatgaggcataatagctccacc

SEQ ID NO: 725605 - DNA, 33 bp, Homo sapien
gctgtatggaatggaaaaaagttaatctgttag

SEQ ID NO: 725606 - DNA, 33 bp, Homo sapien
gctgtatggaatggaagaaagttaatctgttag

SEQ ID NO: 725607 - DNA, 33 bp, Homo sapien
ctgtttgtacaaaatccaagtatcggagctttg

SEQ ID NO: 725608 - DNA, 33 bp, Homo sapien
ctgtttgtacaaaatctaagtatcggagctttg

SEQ ID NO: 725609 - DNA, 33 bp, Homo sapien
cttctattgatggcgaaatgaattgacataagg

SEQ ID NO: 725610 - DNA, 33 bp, Homo sapien
cttctattgatggcgatatgaattgacataagg

SEQ ID NO: 725611 - DNA, 33 bp, Homo sapien
tctcagagataacataaacaatcagtagattat

SEQ ID NO: 725612 - DNA, 33 bp, Homo sapien
tctcagagataacatacacaatcagtagattat

SEQ ID NO: 725613 - DNA, 33 bp, Homo sapien
ataagatggaacaaaacgacaataatttcaata

SEQ ID NO: 725614 - DNA, 33 bp, Homo sapien
ataagatggaacaaaatgacaataatttcaata

SEQ ID NO: 725615 - DNA, 33 bp, Homo sapien
tattcttgaggaaaacacattcagaatttaaac

SEQ ID NO: 725616 - DNA, 33 bp, Homo sapien
tattcttgaggaaaacgcattcagaatttaaac

SEQ ID NO: 725617 - DNA, 33 bp, Homo sapien
actgccttgcacatcaatgatcatttaaaacac

SEQ ID NO: 725618 - DNA, 33 bp, Homo sapien
actgccttgcacatcagtgatcatttaaaacac

SEQ ID NO: 725619 - DNA, 33 bp, Homo sapien
gtgctgcctctgttaccgattcattttgtgttt

SEQ ID NO: 725620 - DNA, 33 bp, Homo sapien
gtgctgcctctgttactgattcattttgtgttt

SEQ ID NO: 725621 - DNA, 33 bp, Homo sapien
agcattactgagaacccggtgtctttatgtgtg

SEQ ID NO: 725622 - DNA, 33 bp, Homo sapien
agcattactgagaacctggtgtctttatgtgtg

SEQ ID NO: 725623 - DNA, 33 bp, Homo sapien
gacctgggttatggacacctattaccatgttct

SEQ ID NO: 725624 - DNA, 33 bp, Homo sapien
gacctgggttatggacgcctattaccatgttct

SEQ ID NO: 725625 - DNA, 33 bp, Homo sapien
tagattcatgaaacaaattcttcttcacccaca

SEQ ID NO: 725626 - DNA, 33 bp, Homo sapien
tagattcatgaaacaagttcttcttcacccaca

SEQ ID NO: 725627 - DNA, 33 bp, Homo sapien
ctatatcccattccagacatagaggcaggcttt

SEQ ID NO: 725628 - DNA, 33 bp, Homo sapien
ctatatcccattccaggcatagaggcaggcttt

SEQ ID NO: 725629 - DNA, 33 bp, Homo sapien
gttttaggttcatcaacaataaaagtacaggta

SEQ ID NO: 725630 - DNA, 33 bp, Homo sapien
gttttaggttcatcaataataaaagtacaggta

SEQ ID NO: 725631 - DNA, 33 bp, Homo sapien
ggagatcaatatagtgcattttacatgaaggga

SEQ ID NO: 725632 - DNA, 33 bp, Homo sapien
ggagatcaatatagtggattttacatgaaggga

SEQ ID NO: 725633 - DNA, 33 bp, Homo sapien
gagagtacacatttcaataagttgctcactgca

SEQ ID NO: 725634 - DNA, 33 bp, Homo sapien
gagagtacacatttcagtaagttgctcactgca

SEQ ID NO: 725635 - DNA, 33 bp, Homo sapien
acctcaaccattcttaccttgactttcatattt

SEQ ID NO: 725636 - DNA, 33 bp, Homo sapien
acctcaaccattcttatcttgactttcatattt

SEQ ID NO: 725637 - DNA, 33 bp, Homo sapien
accatatcaagtaccacgaattattttaaaaca

SEQ ID NO: 725638 - DNA, 33 bp, Homo sapien
accatatcaagtaccatgaattattttaaaaca

SEQ ID NO: 725639 - DNA, 33 bp, Homo sapien
atgatacaacgttataactctcctctaacatcc

SEQ ID NO: 725640 - DNA, 33 bp, Homo sapien
atgatacaacgttatatctctcctctaacatcc

SEQ ID NO: 725641 - DNA, 33 bp, Homo sapien
taaggttttattgccaactgttccacttatttt

SEQ ID NO: 725642 - DNA, 33 bp, Homo sapien
taaggttttattgccagctgttccacttatttt

SEQ ID NO: 725643 - DNA, 33 bp, Homo sapien
atggatgaaaatacgcacactggcttagaaagt

SEQ ID NO: 725644 - DNA, 33 bp, Homo sapien
atggatgaaaatacgcgcactggcttagaaagt

SEQ ID NO: 725645 - DNA, 33 bp, Homo sapien
agttaaggcataaaaccaaaaaagcaaaacaag

SEQ ID NO: 725646 - DNA, 33 bp, Homo sapien
agttaaggcataaaacgaaaaaagcaaaacaag

SEQ ID NO: 725647 - DNA, 33 bp, Homo sapien
actacataatatttaacgcctcatagctggaaa

SEQ ID NO: 725648 - DNA, 33 bp, Homo sapien
actacataatatttaatgcctcatagctggaaa

SEQ ID NO: 725649 - DNA, 33 bp, Homo sapien
aaacggcctgctatctcacaaagatttcatgcc

SEQ ID NO: 725650 - DNA, 33 bp, Homo sapien
aaacggcctgctatctgacaaagatttcatgcc

SEQ ID NO: 725651 - DNA, 33 bp, Homo sapien
tcacccagctctgttaaggtataattgacaaat

SEQ ID NO: 725652 - DNA, 33 bp, Homo sapien
tcacccagctctgttacggtataattgacaaat

SEQ ID NO: 725653 - DNA, 33 bp, Homo sapien
ccacacgtgtcatcaacactaacataaatcttc

SEQ ID NO: 725654 - DNA, 33 bp, Homo sapien
ccacacgtgtcatcaatactaacataaatcttc

SEQ ID NO: 725655 - DNA, 33 bp, Homo sapien
ataattaagttgcacactatgttcccttctaac

SEQ ID NO: 725656 - DNA, 33 bp, Homo sapien
ataattaagttgcacattatgttcccttctaac

SEQ ID NO: 725657 - DNA, 33 bp, Homo sapien
ccaaccatctacagctgaatggaatagacaagt

SEQ ID NO: 725658 - DNA, 33 bp, Homo sapien
ccaaccatctacagcttaatggaatagacaagt

SEQ ID NO: 725659 - DNA, 33 bp, Homo sapien
aggttgttttgagaataaagtgaaatgatgttt

SEQ ID NO: 725660 - DNA, 33 bp, Homo sapien
aggttgttttgagaattaagtgaaatgatgttt

SEQ ID NO: 725661 - DNA, 33 bp, Homo sapien
tctaaattcgaggtgaaaaataaggtgaccttt

SEQ ID NO: 725662 - DNA, 33 bp, Homo sapien
tctaaattcgaggtgataaataaggtgaccttt

SEQ ID NO: 725663 - DNA, 33 bp, Homo sapien
tgaggctgagggaaaagagcaggtaggagacca

SEQ ID NO: 725664 - DNA, 33 bp, Homo sapien
tgaggctgagggaaaatagcaggtaggagacca

SEQ ID NO: 725665 - DNA, 33 bp, Homo sapien
ctagaaattacttgaacgaatcaatgaatgcca

SEQ ID NO: 725666 - DNA, 33 bp, Homo sapien
ctagaaattacttgaatgaatcaatgaatgcca

SEQ ID NO: 725667 - DNA, 33 bp, Homo sapien
acaaattctgagacaaagattaaatgtatcatt

SEQ ID NO: 725668 - DNA, 33 bp, Homo sapien
acaaattctgagacaaggattaaatgtatcatt

SEQ ID NO: 725669 - DNA, 33 bp, Homo sapien
tagacagacctgggataaaaccctttctccagc

SEQ ID NO: 725670 - DNA, 33 bp, Homo sapien
tagacagacctgggatgaaaccctttctccagc

SEQ ID NO: 725671 - DNA, 33 bp, Homo sapien
ttcaagcttctaatgacgatttgttttcctaag

SEQ ID NO: 725672 - DNA, 33 bp, Homo sapien
ttcaagcttctaatgatgatttgttttcctaag

SEQ ID NO: 725673 - DNA, 33 bp, Homo sapien
gggtacaaatggtatacggttctattctgccat

SEQ ID NO: 725674 - DNA, 33 bp, Homo sapien
gggtacaaatggtatagggttctattctgccat

SEQ ID NO: 725675 - DNA, 33 bp, Homo sapien
ttactgtttttaatggaaatgcccattggtaga

SEQ ID NO: 725676 - DNA, 33 bp, Homo sapien
ttactgtttttaatgggaatgcccattggtaga

SEQ ID NO: 725677 - DNA, 33 bp, Homo sapien
tattgcagatttggagccattttccattctgaa

SEQ ID NO: 725678 - DNA, 33 bp, Homo sapien
tattgcagatttggagtcattttccattctgaa

SEQ ID NO: 725679 - DNA, 33 bp, Homo sapien
tcataaaaggaaatccaagtcctcgtaagaaaa

SEQ ID NO: 725680 - DNA, 33 bp, Homo sapien
tcataaaaggaaatccgagtcctcgtaagaaaa

SEQ ID NO: 725681 - DNA, 33 bp, Homo sapien
gtaccttataatgccagaactcttcctagtgtt

SEQ ID NO: 725682 - DNA, 33 bp, Homo sapien
gtaccttataatgccataactcttcctagtgtt

SEQ ID NO: 725683 - DNA, 33 bp, Homo sapien
caccctgcttctgctcacacacggtgcactgca

SEQ ID NO: 725684 - DNA, 33 bp, Homo sapien
caccctgcttctgctcgcacacggtgcactgca

SEQ ID NO: 725685 - DNA, 33 bp, Homo sapien
agaacctactgagttaggataggaaatgcctca

SEQ ID NO: 725686 - DNA, 33 bp, Homo sapien
agaacctactgagttatgataggaaatgcctca

SEQ ID NO: 725687 - DNA, 33 bp, Homo sapien
caattccgctgacatccaagaccaaaacatcag

SEQ ID NO: 725688 - DNA, 33 bp, Homo sapien
caattccgctgacatctaagaccaaaacatcag

SEQ ID NO: 725689 - DNA, 33 bp, Homo sapien
acaattccacactgagaacacacatttacataa

SEQ ID NO: 725690 - DNA, 33 bp, Homo sapien
acaattccacactgagtacacacatttacataa

SEQ ID NO: 725691 - DNA, 33 bp, Homo sapien
tggtctgtgctatcctcactccactttagccaa

SEQ ID NO: 725692 - DNA, 33 bp, Homo sapien
tggtctgtgctatccttactccactttagccaa

SEQ ID NO: 725693 - DNA, 33 bp, Homo sapien
ccaaatttgtctccaaactgttacttcctggca

SEQ ID NO: 725694 - DNA, 33 bp, Homo sapien
ccaaatttgtctccaagctgttacttcctggca

SEQ ID NO: 725695 - DNA, 33 bp, Homo sapien
gcttttgatgaggaaactaataaagacataaaa

SEQ ID NO: 725696 - DNA, 33 bp, Homo sapien
gcttttgatgaggaaagtaataaagacataaaa

SEQ ID NO: 725697 - DNA, 33 bp, Homo sapien
tttggtgggatttggaacttttccttcctaaca

SEQ ID NO: 725698 - DNA, 33 bp, Homo sapien
tttggtgggatttggagcttttccttcctaaca

SEQ ID NO: 725699 - DNA, 33 bp, Homo sapien
aggagatgaaggagaccgagaatgggacacagt

SEQ ID NO: 725700 - DNA, 33 bp, Homo sapien
aggagatgaaggagactgagaatgggacacagt

SEQ ID NO: 725701 - DNA, 33 bp, Homo sapien
gttctctttttagcaaccttctgaacatcacca

SEQ ID NO: 725702 - DNA, 33 bp, Homo sapien
gttctctttttagcaatcttctgaacatcacca

SEQ ID NO: 725703 - DNA, 33 bp, Homo sapien
ccttgcttaattgactcagcctttctgtgcttc

SEQ ID NO: 725704 - DNA, 33 bp, Homo sapien
ccttgcttaattgacttagcctttctgtgcttc

SEQ ID NO: 725705 - DNA, 33 bp, Homo sapien
taaaaccgaagatttacagatggttatttaaat

SEQ ID NO: 725706 - DNA, 33 bp, Homo sapien
taaaaccgaagatttatagatggttatttaaat

SEQ ID NO: 725707 - DNA, 33 bp, Homo sapien
cttctattaaactgccaattatctattcaattt

SEQ ID NO: 725708 - DNA, 33 bp, Homo sapien
cttctattaaactgccgattatctattcaattt

SEQ ID NO: 725709 - DNA, 33 bp, Homo sapien
accacacaattaatcaatatcaaaccctgaact

SEQ ID NO: 725710 - DNA, 33 bp, Homo sapien
accacacaattaatcagtatcaaaccctgaact

SEQ ID NO: 725711 - DNA, 33 bp, Homo sapien
tatactaatcattcacaccaaacctgaagccat

SEQ ID NO: 725712 - DNA, 33 bp, Homo sapien
tatactaatcattcacgccaaacctgaagccat

SEQ ID NO: 725713 - DNA, 33 bp, Homo sapien
cttggtggaaaaggtaaaagttgcaaaatcaaa

SEQ ID NO: 725714 - DNA, 33 bp, Homo sapien
cttggtggaaaaggtagaagttgcaaaatcaaa

SEQ ID NO: 725715 - DNA, 33 bp, Homo sapien
gtactattatcgctcccaaacaaacgtcctttt

SEQ ID NO: 725716 - DNA, 33 bp, Homo sapien
gtactattatcgctcctaaacaaacgtcctttt

SEQ ID NO: 725717 - DNA, 33 bp, Homo sapien
tggagtactctttcacaccaagattgcatagca

SEQ ID NO: 725718 - DNA, 33 bp, Homo sapien
tggagtactctttcacgccaagattgcatagca

SEQ ID NO: 725719 - DNA, 33 bp, Homo sapien
acacattagatcacacaatcattttaagtgctt

SEQ ID NO: 725720 - DNA, 33 bp, Homo sapien
acacattagatcacactatcattttaagtgctt

SEQ ID NO: 725721 - DNA, 33 bp, Homo sapien
agaaatatcaaaaaagaaatgtaccttatgttt

SEQ ID NO: 725722 - DNA, 33 bp, Homo sapien
agaaatatcaaaaaaggaatgtaccttatgttt

SEQ ID NO: 725723 - DNA, 33 bp, Homo sapien
ttcagaggagaggtcacgcagagtcaccagagt

SEQ ID NO: 725724 - DNA, 33 bp, Homo sapien
ttcagaggagaggtcatgcagagtcaccagagt

SEQ ID NO: 725725 - DNA, 33 bp, Homo sapien
agagtttgttttaacaccagggtagcaagtggc

SEQ ID NO: 725726 - DNA, 33 bp, Homo sapien
agagtttgttttaacagcagggtagcaagtggc

SEQ ID NO: 725727 - DNA, 33 bp, Homo sapien
tggaagaactgatgaacagaagctacactaggt

SEQ ID NO: 725728 - DNA, 33 bp, Homo sapien
tggaagaactgatgaatagaagctacactaggt

SEQ ID NO: 725729 - DNA, 33 bp, Homo sapien
actttctagtagagaagaatggcatacaataga

SEQ ID NO: 725730 - DNA, 33 bp, Homo sapien
actttctagtagagaataatggcatacaataga

SEQ ID NO: 725731 - DNA, 33 bp, Homo sapien
agtcatgattcaaaagcattagaacagcccaaa

SEQ ID NO: 725732 - DNA, 33 bp, Homo sapien
agtcatgattcaaaagtattagaacagcccaaa

SEQ ID NO: 725733 - DNA, 33 bp, Homo sapien
ttctggtcacaatttcaatggtcaggaatttga

SEQ ID NO: 725734 - DNA, 33 bp, Homo sapien
ttctggtcacaatttctatggtcaggaatttga

SEQ ID NO: 725735 - DNA, 33 bp, Homo sapien
aacacatataatattgaagtcctaacacaaagg

SEQ ID NO: 725736 - DNA, 33 bp, Homo sapien
aacacatataatattggagtcctaacacaaagg

SEQ ID NO: 725737 - DNA, 33 bp, Homo sapien
taatttatggcctataagagactgaacaaatgc

SEQ ID NO: 725738 - DNA, 33 bp, Homo sapien
taatttatggcctataggagactgaacaaatgc

SEQ ID NO: 725739 - DNA, 33 bp, Homo sapien
ctcacttttcacaaaacagctataaagaaaggg

SEQ ID NO: 725740 - DNA, 33 bp, Homo sapien
ctcacttttcacaaaagagctataaagaaaggg

SEQ ID NO: 725741 - DNA, 33 bp, Homo sapien
aaaaatgggcagtatcccctatagctttgggtc

SEQ ID NO: 725742 - DNA, 33 bp, Homo sapien
aaaaatgggcagtatctcctatagctttgggtc

SEQ ID NO: 725743 - DNA, 33 bp, Homo sapien
agaaccaagatgtagcacttaaaagtggcgggg

SEQ ID NO: 725744 - DNA, 33 bp, Homo sapien
agaaccaagatgtagcccttaaaagtggcgggg

SEQ ID NO: 725745 - DNA, 33 bp, Homo sapien
tcttacactggtcaaagaaaaaaccagaagtgt

SEQ ID NO: 725746 - DNA, 33 bp, Homo sapien
tcttacactggtcaaataaaaaaccagaagtgt

SEQ ID NO: 725747 - DNA, 33 bp, Homo sapien
aagccactgcacatgacgaagattcttacagtt

SEQ ID NO: 725748 - DNA, 33 bp, Homo sapien
aagccactgcacatgaggaagattcttacagtt

SEQ ID NO: 725749 - DNA, 33 bp, Homo sapien
agaactttctgacaaacggacttctatctattt

SEQ ID NO: 725750 - DNA, 33 bp, Homo sapien
agaactttctgacaaatggacttctatctattt

SEQ ID NO: 725751 - DNA, 33 bp, Homo sapien
caaaaggacacagaaaccagttggaaggggctt

SEQ ID NO: 725752 - DNA, 33 bp, Homo sapien
caaaaggacacagaaatcagttggaaggggctt

SEQ ID NO: 725753 - DNA, 33 bp, Homo sapien
atttgaaaggggcctacggattagatggtaatt

SEQ ID NO: 725754 - DNA, 33 bp, Homo sapien
atttgaaaggggcctatggattagatggtaatt

SEQ ID NO: 725755 - DNA, 33 bp, Homo sapien
ctcacctcttactacaccgaaagagatcagagc

SEQ ID NO: 725756 - DNA, 33 bp, Homo sapien
ctcacctcttactacatcgaaagagatcagagc

SEQ ID NO: 725757 - DNA, 33 bp, Homo sapien
caagactaaaactgaacacatcctgcagactgc

SEQ ID NO: 725758 - DNA, 33 bp, Homo sapien
caagactaaaactgaagacatcctgcagactgc

SEQ ID NO: 725759 - DNA, 33 bp, Homo sapien
gtacacagagacaaaaacactgggaagcacagt

SEQ ID NO: 725760 - DNA, 33 bp, Homo sapien
gtacacagagacaaaagcactgggaagcacagt

SEQ ID NO: 725761 - DNA, 33 bp, Homo sapien
tctctgttctccactgcaaaggttgtttacaga

SEQ ID NO: 725762 - DNA, 33 bp, Homo sapien
tctctgttctccactggaaaggttgtttacaga

SEQ ID NO: 725763 - DNA, 33 bp, Homo sapien
ccagcaatcagtctagcagaggagtagaaattt

SEQ ID NO: 725764 - DNA, 33 bp, Homo sapien
ccagcaatcagtctaggagaggagtagaaattt

SEQ ID NO: 725765 - DNA, 33 bp, Homo sapien
agaagacagatggatacgtgattaatacaaatt

SEQ ID NO: 725766 - DNA, 33 bp, Homo sapien
agaagacagatggatatgtgattaatacaaatt

SEQ ID NO: 725767 - DNA, 33 bp, Homo sapien
cattattgtgtagtcacaaactccaaaaactat

SEQ ID NO: 725768 - DNA, 33 bp, Homo sapien
cattattgtgtagtcataaactccaaaaactat

SEQ ID NO: 725769 - DNA, 33 bp, Homo sapien
aaaatgacaactaaaacgttttcggtatgcaaa

SEQ ID NO: 725770 - DNA, 33 bp, Homo sapien
aaaatgacaactaaaatgttttcggtatgcaaa

SEQ ID NO: 725771 - DNA, 33 bp, Homo sapien
tgtccatgttcttaaactgcactctctctctct

SEQ ID NO: 725772 - DNA, 33 bp, Homo sapien
tgtccatgttcttaaattgcactctctctctct

SEQ ID NO: 725773 - DNA, 33 bp, Homo sapien
aacggtggtgggctatcaatgaagtatactagc

SEQ ID NO: 725774 - DNA, 33 bp, Homo sapien
aacggtggtgggctattaatgaagtatactagc

SEQ ID NO: 725775 - DNA, 33 bp, Homo sapien
ccaagtgtcagaaccactgactcaatttcaaca

SEQ ID NO: 725776 - DNA, 33 bp, Homo sapien
ccaagtgtcagaaccattgactcaatttcaaca

SEQ ID NO: 725777 - DNA, 33 bp, Homo sapien
tacagaaggatgaaaaactcatggtggtcaaga

SEQ ID NO: 725778 - DNA, 33 bp, Homo sapien
tacagaaggatgaaaagctcatggtggtcaaga

SEQ ID NO: 725779 - DNA, 33 bp, Homo sapien; identical to SEQ ID NO: 725777

SEQ ID NO: 725780 - DNA, 33 bp, Homo sapien; identical to SEQ ID NO: 725778

SEQ ID NO: 725781 - DNA, 33 bp, Homo sapien
ttcaggtatacagttcaatgccctaaaataatt

SEQ ID NO: 725782 - DNA, 33 bp, Homo sapien
ttcaggtatacagttcgatgccctaaaataatt

SEQ ID NO: 725783 - DNA, 33 bp, Homo sapien; identical to SEQ ID NO: 725781

SEQ ID NO: 725784 - DNA, 33 bp, Homo sapien; identical to SEQ ID NO: 725782

SEQ ID NO: 725785 - DNA, 33 bp, Homo sapien
agagccaaatgatctcaacaacctgaaataact

SEQ ID NO: 725786 - DNA, 33 bp, Homo sapien
agagccaaatgatctcgacaacctgaaataact

SEQ ID NO: 725787 - DNA, 33 bp, Homo sapien
atctaaaatttacactcaggctacttccagtgt

SEQ ID NO: 725788 - DNA, 33 bp, Homo sapien
atctaaaatttacacttaggctacttccagtgt

SEQ ID NO: 725789 - DNA, 33 bp, Homo sapien
acttatcaagtaatgaaaaaggctccatacgtt

SEQ ID NO: 725790 - DNA, 33 bp, Homo sapien
acttatcaagtaatgagaaaggctccatacgtt

SEQ ID NO: 725791 - DNA, 33 bp, Homo sapien
agaagtgagcgaccagaagtaaaattccttaac

SEQ ID NO: 725792 - DNA, 33 bp, Homo sapien
agaagtgagcgaccaggagtaaaattccttaac

SEQ ID NO: 725793 - DNA, 33 bp, Homo sapien
attttcacaatctatactagaacatttgcatct

SEQ ID NO: 725794 - DNA, 33 bp, Homo sapien
attttcacaatctatagtagaacatttgcatct

SEQ ID NO: 725795 - DNA, 33 bp, Homo sapien
taaatcatttttcgccaaactctcaccagtatg

SEQ ID NO: 725796 - DNA, 33 bp, Homo sapien
taaatcatttttcgccgaactctcaccagtatg

SEQ ID NO: 725797 - DNA, 33 bp, Homo sapien
cttctatactaaccccaatttttgtgcccatat

SEQ ID NO: 725798 - DNA, 33 bp, Homo sapien
cttctatactaaccccgatttttgtgcccatat

SEQ ID NO: 725799 - DNA, 33 bp, Homo sapien
gttttcagatagttcaaagacatatccctatca

SEQ ID NO: 725800 - DNA, 33 bp, Homo sapien
gttttcagatagttcagagacatatccctatca

SEQ ID NO: 725801 - DNA, 33 bp, Homo sapien
atcgtgaactcaaatgaactattctgatagcct

SEQ ID NO: 725802 - DNA, 33 bp, Homo sapien
atcgtgaactcaaatgtactattctgatagcct

SEQ ID NO: 725803 - DNA, 33 bp, Homo sapien
cttaggtaaattgaacgaatgacatctggatga

SEQ ID NO: 725804 - DNA, 33 bp, Homo sapien
cttaggtaaattgaactaatgacatctggatga

SEQ ID NO: 725805 - DNA, 33 bp, Homo sapien
caaggctatgttgcgacagaaaagaatgtactt

SEQ ID NO: 725806 - DNA, 33 bp, Homo sapien
caaggctatgttgcgagagaaaagaatgtactt

SEQ ID NO: 725807 - DNA, 33 bp, Homo sapien
ttcagatataacataccggaaagcacaaaatat

SEQ ID NO: 725808 - DNA, 33 bp, Homo sapien
ttcagatataacatacgggaaagcacaaaatat

SEQ ID NO: 725809 - DNA, 33 bp, Homo sapien
gagattagaagttgacaggggaaacaaactgca

SEQ ID NO: 725810 - DNA, 33 bp, Homo sapien
gagattagaagttgacgggggaaacaaactgca

SEQ ID NO: 725811 - DNA, 33 bp, Homo sapien
ttttgtttatacataccgtagtgactgtcaact

SEQ ID NO: 725812 - DNA, 33 bp, Homo sapien
ttttgtttatacatactgtagtgactgtcaact

SEQ ID NO: 725813 - DNA, 33 bp, Homo sapien
cacaggcatcagcaaactgacttccaacggtat

SEQ ID NO: 725814 - DNA, 33 bp, Homo sapien
cacaggcatcagcaaagtgacttccaacggtat

SEQ ID NO: 725815 - DNA, 33 bp, Homo sapien
ttttaccttgacatttaaaaatgagaagaaact

SEQ ID NO: 725816 - DNA, 33 bp, Homo sapien
ttttaccttgacatttgaaaatgagaagaaact

SEQ ID NO: 725817 - DNA, 33 bp, Homo sapien
gtgagtgtctgttgtacgtgtagttagaaagaa

SEQ ID NO: 725818 - DNA, 33 bp, Homo sapien
gtgagtgtctgttgtatgtgtagttagaaagaa

SEQ ID NO: 725819 - DNA, 33 bp, Homo sapien
agcctggctagaagcactgacaccatggattga

SEQ ID NO: 725820 - DNA, 33 bp, Homo sapien
agcctggctagaagcattgacaccatggattga

SEQ ID NO: 725821 - DNA, 33 bp, Homo sapien
tgaaaatgtccaaatccaatgggaaatagtaat

SEQ ID NO: 725822 - DNA, 33 bp, Homo sapien
tgaaaatgtccaaatctaatgggaaatagtaat

SEQ ID NO: 725823 - DNA, 33 bp, Homo sapien
acatttgagctgattaaattatgagcctggaca

SEQ ID NO: 725824 - DNA, 33 bp, Homo sapien
acatttgagctgattagattatgagcctggaca

SEQ ID NO: 725825 - DNA, 33 bp, Homo sapien
gtaagtaccttgagagcaggtttattatcttgc

SEQ ID NO: 725826 - DNA, 33 bp, Homo sapien
gtaagtaccttgagagtaggtttattatcttgc

SEQ ID NO: 725827 - DNA, 33 bp, Homo sapien
acatccagaaagtaacagagccagactgaaaac

SEQ ID NO: 725828 - DNA, 33 bp, Homo sapien
acatccagaaagtaacggagccagactgaaaac

SEQ ID NO: 725829 - DNA, 33 bp, Homo sapien
gcctaaggtcacaatacaaggcacagtggagac

SEQ ID NO: 725830 - DNA, 33 bp, Homo sapien
gcctaaggtcacaatataaggcacagtggagac

SEQ ID NO: 725831 - DNA, 33 bp, Homo sapien
gtgctgactttgtatgcaggtatctataacaat

SEQ ID NO: 725832 - DNA, 33 bp, Homo sapien
gtgctgactttgtatgtaggtatctataacaat

SEQ ID NO: 725833 - DNA, 33 bp, Homo sapien
cattacattacattcacaaggacagtgagtgaa

SEQ ID NO: 725834 - DNA, 33 bp, Homo sapien
cattacattacattcataaggacagtgagtgaa

SEQ ID NO: 725835 - DNA, 33 bp, Homo sapien
ttcctcttgctgcactaaaggccagagccccag

SEQ ID NO: 725836 - DNA, 33 bp, Homo sapien
ttcctcttgctgcactgaaggccagagccccag

SEQ ID NO: 725837 - DNA, 33 bp, Homo sapien
ggagctgtgaccataaaccattgtagtatccag

SEQ ID NO: 725838 - DNA, 33 bp, Homo sapien
ggagctgtgaccataacccattgtagtatccag

SEQ ID NO: 725839 - DNA, 33 bp, Homo sapien
tgccttcatataccaaactcatcgtctttctcc

SEQ ID NO: 725840 - DNA, 33 bp, Homo sapien
tgccttcatataccaatctcatcgtctttctcc

SEQ ID NO: 725841 - DNA, 33 bp, Homo sapien
caggctgcaaaatggaaggctgtggaggtcgtg

SEQ ID NO: 725842 - DNA, 33 bp, Homo sapien
caggctgcaaaatggacggctgtggaggtcgtg

SEQ ID NO: 725843 - DNA, 33 bp, Homo sapien
ttttaaaaagaaagaaatgcaaagattgaacag

SEQ ID NO: 725844 - DNA, 33 bp, Homo sapien
ttttaaaaagaaagaagtgcaaagattgaacag

SEQ ID NO: 725845 - DNA, 33 bp, Homo sapien
gtactattggttttggcagcaatgtagaggatg

SEQ ID NO: 725846 - DNA, 33 bp, Homo sapien
gtactattggttttggtagcaatgtagaggatg

SEQ ID NO: 725847 - DNA, 33 bp, Homo sapien
gacaatgtgaggaagaaagatcgtgataacagt

SEQ ID NO: 725848 - DNA, 33 bp, Homo sapien
gacaatgtgaggaagagagatcgtgataacagt

SEQ ID NO: 725849 - DNA, 33 bp, Homo sapien
atggaaaaaaaatccactctcatacagggatgt

SEQ ID NO: 725850 - DNA, 33 bp, Homo sapien
atggaaaaaaaatccagtctcatacagggatgt

SEQ ID NO: 725851 - DNA, 33 bp, Homo sapien
atacatcctttgtgtcaactagaggaaaagtaa

SEQ ID NO: 725852 - DNA, 33 bp, Homo sapien
atacatcctttgtgtcgactagaggaaaagtaa

SEQ ID NO: 725853 - DNA, 33 bp, Homo sapien
attaaacaccttttcacgccatttgtatgtctt

SEQ ID NO: 725854 - DNA, 33 bp, Homo sapien
attaaacaccttttcatgccatttgtatgtctt

SEQ ID NO: 725855 - DNA, 33 bp, Homo sapien
gcactgcgcatagccaaatccataggtcttaat

SEQ ID NO: 725856 - DNA, 33 bp, Homo sapien
gcactgcgcatagccagatccataggtcttaat

SEQ ID NO: 725857 - DNA, 33 bp, Homo sapien
caagttcctgcacagaataaatctttgataaga

SEQ ID NO: 725858 - DNA, 33 bp, Homo sapien
caagttcctgcacagagtaaatctttgataaga

SEQ ID NO: 725859 - DNA, 33 bp, Homo sapien
ggagggagagcattacaacacataacgcatgcg

SEQ ID NO: 725860 - DNA, 33 bp, Homo sapien
ggagggagagcattacgacacataacgcatgcg

SEQ ID NO: 725861 - DNA, 33 bp, Homo sapien
tgaagcagatttgtcccgagtctagaatagcag

SEQ ID NO: 725862 - DNA, 33 bp, Homo sapien
tgaagcagatttgtcctgagtctagaatagcag

SEQ ID NO: 725863 - DNA, 33 bp, Homo sapien
ctttgcggcgattcaccgaagagctgaagcaga

SEQ ID NO: 725864 - DNA, 33 bp, Homo sapien
ctttgcggcgattcactgaagagctgaagcaga

SEQ ID NO: 725865 - DNA, 33 bp, Homo sapien
atgggcctaaggaaaaggattacaggaacacat

SEQ ID NO: 725866 - DNA, 33 bp, Homo sapien
atgggcctaaggaaaatgattacaggaacacat

SEQ ID NO: 725867 - DNA, 33 bp, Homo sapien
agaattctttaatgaacctgtttcagaaattct

SEQ ID NO: 725868 - DNA, 33 bp, Homo sapien
agaattctttaatgaatctgtttcagaaattct

SEQ ID NO: 725869 - DNA, 33 bp, Homo sapien
ataaatgaacagcaaaatgtggtggaattacca

SEQ ID NO: 725870 - DNA, 33 bp, Homo sapien
ataaatgaacagcaaattgtggtggaattacca

SEQ ID NO: 725871 - DNA, 33 bp, Homo sapien
tcactggtctaatggaagaaacagacttgtgaa

SEQ ID NO: 725872 - DNA, 33 bp, Homo sapien
tcactggtctaatggaggaaacagacttgtgaa

SEQ ID NO: 725873 - DNA, 33 bp, Homo sapien
tttgaaagtaggaaccacatcttttcatagttc

SEQ ID NO: 725874 - DNA, 33 bp, Homo sapien
tttgaaagtaggaaccccatcttttcatagttc

SEQ ID NO: 725875 - DNA, 33 bp, Homo sapien
gttaatgtcacaaggacgttcgagggtacatat

SEQ ID NO: 725876 - DNA, 33 bp, Homo sapien
gttaatgtcacaaggatgttcgagggtacatat

SEQ ID NO: 725877 - DNA, 33 bp, Homo sapien
ggaggtcatagtaaaacagacgttggaaatgga

SEQ ID NO: 725878 - DNA, 33 bp, Homo sapien
ggaggtcatagtaaaatagacgttggaaatgga

SEQ ID NO: 725879 - DNA, 33 bp, Homo sapien
tttctgctaattgataagatagacagggaaaat

SEQ ID NO: 725880 - DNA, 33 bp, Homo sapien
tttctgctaattgataggatagacagggaaaat

SEQ ID NO: 725881 - DNA, 33 bp, Homo sapien
ttctgatcacgagatgcaatgaaatctaaagaa

SEQ ID NO: 725882 - DNA, 33 bp, Homo sapien
ttctgatcacgagatgtaatgaaatctaaagaa

SEQ ID NO: 725883 - DNA, 33 bp, Homo sapien
gatgtctgaattggaccgagaacttccagacct

SEQ ID NO: 725884 - DNA, 33 bp, Homo sapien
gatgtctgaattggactgagaacttccagacct

SEQ ID NO: 725885 - DNA, 33 bp, Homo sapien
aactccatctcgaacaaaaaacaaaccaaccaa

SEQ ID NO: 725886 - DNA, 33 bp, Homo sapien
aactccatctcgaacagaaaacaaaccaaccaa

SEQ ID NO: 725887 - DNA, 33 bp, Homo sapien
gactctgccaggaaacaccaattttctgaagct

SEQ ID NO: 725888 - DNA, 33 bp, Homo sapien
gactctgccaggaaacgccaattttctgaagct

SEQ ID NO: 725889 - DNA, 33 bp, Homo sapien
caacagccaggatctacattctagaagagatgc

SEQ ID NO: 725890 - DNA, 33 bp, Homo sapien
caacagccaggatctatattctagaagagatgc

SEQ ID NO: 725891 - DNA, 33 bp, Homo sapien
tggaaaaattcttgcacgaggaaaggacagaca

SEQ ID NO: 725892 - DNA, 33 bp, Homo sapien
tggaaaaattcttgcatgaggaaaggacagaca

SEQ ID NO: 725893 - DNA, 33 bp, Homo sapien
taaaatctaatcctaacagggttcctgaagtag

SEQ ID NO: 725894 - DNA, 33 bp, Homo sapien
taaaatctaatcctaatagggttcctgaagtag

SEQ ID NO: 725895 - DNA, 33 bp, Homo sapien
ggagaacgcaactggggattataggaggtgtgc

SEQ ID NO: 725896 - DNA, 33 bp, Homo sapien
ggagaacgcaactgggtattataggaggtgtgc

SEQ ID NO: 725897 - DNA, 33 bp, Homo sapien
taaataaattagaaacaaaatgtatgcatccac

SEQ ID NO: 725898 - DNA, 33 bp, Homo sapien
taaataaattagaaaccaaatgtatgcatccac

SEQ ID NO: 725899 - DNA, 33 bp, Homo sapien
tctagcagaattcagcaaatgtttgtggaataa

SEQ ID NO: 725900 - DNA, 33 bp, Homo sapien
tctagcagaattcagcgaatgtttgtggaataa

SEQ ID NO: 725901 - DNA, 33 bp, Homo sapien
cttctctgtagctgtacgaatcttgcccatgaa

SEQ ID NO: 725902 - DNA, 33 bp, Homo sapien
cttctctgtagctgtatgaatcttgcccatgaa

SEQ ID NO: 725903 - DNA, 33 bp, Homo sapien
atgtttcctcgcagcactgctattcatgggcaa

SEQ ID NO: 725904 - DNA, 33 bp, Homo sapien
atgtttcctcgcagcattgctattcatgggcaa

SEQ ID NO: 725905 - DNA, 33 bp, Homo sapien
aaaaagcagctatgaccaatctagaaatcctac

SEQ ID NO: 725906 - DNA, 33 bp, Homo sapien
aaaaagcagctatgactaatctagaaatcctac

SEQ ID NO: 725907 - DNA, 33 bp, Homo sapien
acatgtgtactgcttacgtgtctaaagtctgcc

SEQ ID NO: 725908 - DNA, 33 bp, Homo sapien
acatgtgtactgcttatgtgtctaaagtctgcc

SEQ ID NO: 725909 - DNA, 33 bp, Homo sapien
gatagaaagctgtccactcattctttcattcag

SEQ ID NO: 725910 - DNA, 33 bp, Homo sapien
gatagaaagctgtccattcattctttcattcag

SEQ ID NO: 725911 - DNA, 33 bp, Homo sapien
gtgtgtgttagcaaaacgttacttgacagttat

SEQ ID NO: 725912 - DNA, 33 bp, Homo sapien
gtgtgtgttagcaaaatgttacttgacagttat

SEQ ID NO: 725913 - DNA, 33 bp, Homo sapien
aagcctattcagctacaccccttgcttggcgca

SEQ ID NO: 725914 - DNA, 33 bp, Homo sapien
aagcctattcagctactccccttgcttggcgca

SEQ ID NO: 725915 - DNA, 33 bp, Homo sapien
gattgttgagactaacagaagggactgagaaag

SEQ ID NO: 725916 - DNA, 33 bp, Homo sapien
gattgttgagactaacggaagggactgagaaag

SEQ ID NO: 725917 - DNA, 33 bp, Homo sapien
catgcacttctctcataacccttcactcactct

SEQ ID NO: 725918 - DNA, 33 bp, Homo sapien
catgcacttctctcatcacccttcactcactct

SEQ ID NO: 725919 - DNA, 33 bp, Homo sapien
attgtgatgaatcctacgaagggagacgttcag

SEQ ID NO: 725920 - DNA, 33 bp, Homo sapien
attgtgatgaatcctatgaagggagacgttcag

SEQ ID NO: 725921 - DNA, 33 bp, Homo sapien
ctgtaatgatctaataagatagacacttgccta

SEQ ID NO: 725922 - DNA, 33 bp, Homo sapien
ctgtaatgatctaataggatagacacttgccta

SEQ ID NO: 725923 - DNA, 33 bp, Homo sapien
ttggaaaatcccaacaatgaggtagccaatggc

SEQ ID NO: 725924 - DNA, 33 bp, Homo sapien
ttggaaaatcccaacagtgaggtagccaatggc

SEQ ID NO: 725925 - DNA, 33 bp, Homo sapien
gaccttatagaaagaacgcccagaacttaataa

SEQ ID NO: 725926 - DNA, 33 bp, Homo sapien
gaccttatagaaagaatgcccagaacttaataa

SEQ ID NO: 725927 - DNA, 33 bp, Homo sapien
attctattacacttcaatctactttttaaagag

SEQ ID NO: 725928 - DNA, 33 bp, Homo sapien
attctattacacttcagtctactttttaaagag

SEQ ID NO: 725929 - DNA, 33 bp, Homo sapien
ctgaggctagaatggcacttccatatcttttag

SEQ ID NO: 725930 - DNA, 33 bp, Homo sapien
ctgaggctagaatggcgcttccatatcttttag

SEQ ID NO: 725931 - DNA, 33 bp, Homo sapien
ggcagtaagagaaagacctggccagcttttcct

SEQ ID NO: 725932 - DNA, 33 bp, Homo sapien
ggcagtaagagaaagatctggccagcttttcct

SEQ ID NO: 725933 - DNA, 33 bp, Homo sapien
gccttttttgttcctacactgcactggacatta

SEQ ID NO: 725934 - DNA, 33 bp, Homo sapien
gccttttttgttcctatactgcactggacatta

SEQ ID NO: 725935 - DNA, 33 bp, Homo sapien
aatgtaagtatagaaaatgtagccttttgcaag

SEQ ID NO: 725936 - DNA, 33 bp, Homo sapien
aatgtaagtatagaaagtgtagccttttgcaag

SEQ ID NO: 725937 - DNA, 33 bp, Homo sapien
ataaattaatgttagaagtactggcaaataata

SEQ ID NO: 725938 - DNA, 33 bp, Homo sapien
ataaattaatgttagacgtactggcaaataata

SEQ ID NO: 725939 - DNA, 33 bp, Homo sapien
ggtacttgctttcaaccacaagacaggacattt

SEQ ID NO: 725940 - DNA, 33 bp, Homo sapien
ggtacttgctttcaactacaagacaggacattt

SEQ ID NO: 725941 - DNA, 33 bp, Homo sapien
gagtagtttcataagcacccaccaattttggga

SEQ ID NO: 725942 - DNA, 33 bp, Homo sapien
gagtagtttcataagcgcccaccaattttggga

SEQ ID NO: 725943 - DNA, 33 bp, Homo sapien
taaatttactctgtcactaggattgcattttac

SEQ ID NO: 725944 - DNA, 33 bp, Homo sapien
taaatttactctgtcattaggattgcattttac

SEQ ID NO: 725945 - DNA, 33 bp, Homo sapien
gtccttctgtcttcaaatatgatttatcctgca

SEQ ID NO: 725946 - DNA, 33 bp, Homo sapien
gtccttctgtcttcaagtatgatttatcctgca

SEQ ID NO: 725947 - DNA, 33 bp, Homo sapien
tcatggaagccttgggaattactaagagaaatt

SEQ ID NO: 725948 - DNA, 33 bp, Homo sapien
tcatggaagccttggggattactaagagaaatt

SEQ ID NO: 725949 - DNA, 33 bp, Homo sapien
tgctctcaacagctaaattagagcagctacttc

SEQ ID NO: 725950 - DNA, 33 bp, Homo sapien
tgctctcaacagctaagttagagcagctacttc

SEQ ID NO: 725951 - DNA, 33 bp, Homo sapien
aaccactgatattggcaaaccgacaaaacattt

SEQ ID NO: 725952 - DNA, 33 bp, Homo sapien
aaccactgatattggcgaaccgacaaaacattt

SEQ ID NO: 725953 - DNA, 33 bp, Homo sapien
cttgccaataattagcgcttcaaaaatattttg

SEQ ID NO: 725954 - DNA, 33 bp, Homo sapien
cttgccaataattagctcttcaaaaatattttg

SEQ ID NO: 725955 - DNA, 33 bp, Homo sapien
cttctttgatatcacaatgaactcaacaagcag

SEQ ID NO: 725956 - DNA, 33 bp, Homo sapien
cttctttgatatcacattgaactcaacaagcag

SEQ ID NO: 725957 - DNA, 33 bp, Homo sapien
atttacacctgtcaccagatttgaatacacagt

SEQ ID NO: 725958 - DNA, 33 bp, Homo sapien
atttacacctgtcacctgatttgaatacacagt

SEQ ID NO: 725959 - DNA, 33 bp, Homo sapien
ataagccagtgcatcacggtaagagtcattagc

SEQ ID NO: 725960 - DNA, 33 bp, Homo sapien
ataagccagtgcatcatggtaagagtcattagc

SEQ ID NO: 725961 - DNA, 33 bp, Homo sapien
gacagctccaagaaaaatcatctactctatgca

SEQ ID NO: 725962 - DNA, 33 bp, Homo sapien
gacagctccaagaaaagtcatctactctatgca

SEQ ID NO: 725963 - DNA, 33 bp, Homo sapien
tttggagaacttccaccctcttctataaagtgg

SEQ ID NO: 725964 - DNA, 33 bp, Homo sapien
tttggagaacttccactctcttctataaagtgg

SEQ ID NO: 725965 - DNA, 33 bp, Homo sapien
atgcagattcattataacacaacattcccgtca

SEQ ID NO: 725966 - DNA, 33 bp, Homo sapien
atgcagattcattatagcacaacattcccgtca

SEQ ID NO: 725967 - DNA, 33 bp, Homo sapien
cacatttgggttgtcactctagagcatgtcaaa

SEQ ID NO: 725968 - DNA, 33 bp, Homo sapien
cacatttgggttgtcattctagagcatgtcaaa

SEQ ID NO: 725969 - DNA, 33 bp, Homo sapien
ctaataactagcttaaatctatctggcagtaat

SEQ ID NO: 725970 - DNA, 33 bp, Homo sapien
ctaataactagcttaactctatctggcagtaat

SEQ ID NO: 725971 - DNA, 33 bp, Homo sapien
tgcactgtattccctacggcccggtcacctgcc

SEQ ID NO: 725972 - DNA, 33 bp, Homo sapien
tgcactgtattccctatggcccggtcacctgcc

SEQ ID NO: 725973 - DNA, 33 bp, Homo sapien
acagttcgtgggtatgacaataaggagcaggtg

SEQ ID NO: 725974 - DNA, 33 bp, Homo sapien
acagttcgtgggtatggcaataaggagcaggtg

SEQ ID NO: 725975 - DNA, 33 bp, Homo sapien
tcttgggatcattacaccttacaccttgataat

SEQ ID NO: 725976 - DNA, 33 bp, Homo sapien
tcttgggatcattacatcttacaccttgataat

SEQ ID NO: 725977 - DNA, 33 bp, Homo sapien
tagtgaataatatctacgtcaactgatggaaat

SEQ ID NO: 725978 - DNA, 33 bp, Homo sapien
tagtgaataatatctatgtcaactgatggaaat

SEQ ID NO: 725979 - DNA, 33 bp, Homo sapien
ttaaaaatcatcatgacctttacctggtgaact

SEQ ID NO: 725980 - DNA, 33 bp, Homo sapien
ttaaaaatcatcatgagctttacctggtgaact

SEQ ID NO: 725981 - DNA, 33 bp, Homo sapien
gggtattttagatttgcaatgccattgaatgta

SEQ ID NO: 725982 - DNA, 33 bp, Homo sapien
gggtattttagatttgtaatgccattgaatgta

SEQ ID NO: 725983 - DNA, 33 bp, Homo sapien
tttttcttttgctataaatgtatctgtctagtt

SEQ ID NO: 725984 - DNA, 33 bp, Homo sapien
tttttcttttgctatagatgtatctgtctagtt

SEQ ID NO: 725985 - DNA, 33 bp, Homo sapien
gtatgtcaggctctggcccaatagctctatgtg

SEQ ID NO: 725986 - DNA, 33 bp, Homo sapien
gtatgtcaggctctggtccaatagctctatgtg

SEQ ID NO: 725987 - DNA, 33 bp, Homo sapien
acaaatgttcactgaacacctaccaggtaacag

SEQ ID NO: 725988 - DNA, 33 bp, Homo sapien
acaaatgttcactgaatacctaccaggtaacag

SEQ ID NO: 725989 - DNA, 33 bp, Homo sapien
aagagttgtgcctctaacctgagtatgtcagga

SEQ ID NO: 725990 - DNA, 33 bp, Homo sapien
aagagttgtgcctctagcctgagtatgtcagga

SEQ ID NO: 725991 - DNA, 33 bp, Homo sapien
tggagactaattacacaaaatgccaagagtgtc

SEQ ID NO: 725992 - DNA, 33 bp, Homo sapien
tggagactaattacacgaaatgccaagagtgtc

SEQ ID NO: 725993 - DNA, 33 bp, Homo sapien
tctcttttcccttccaacattaattgtctcaga

SEQ ID NO: 725994 - DNA, 33 bp, Homo sapien
tctcttttcccttccagcattaattgtctcaga

SEQ ID NO: 725995 - DNA, 33 bp, Homo sapien
gttttctaattaccgagctggcaaagacaacta

SEQ ID NO: 725996 - DNA, 33 bp, Homo sapien
gttttctaattaccgatctggcaaagacaacta

SEQ ID NO: 725997 - DNA, 33 bp, Homo sapien
gacatttagaaataaacatcctcatcaggaatg

SEQ ID NO: 725998 - DNA, 33 bp, Homo sapien
gacatttagaaataaatatcctcatcaggaatg

SEQ ID NO: 725999 - DNA, 33 bp, Homo sapien
ggtattaaaaccactcacaaaaatgaccttatc

SEQ ID NO: 726000 - DNA, 33 bp, Homo sapien
ggtattaaaaccactcgcaaaaatgaccttatc

SEQ ID NO: 726001 - DNA, 33 bp, Homo sapien
gttattcctgtgctataagtggatgcatcaaca

SEQ ID NO: 726002 - DNA, 33 bp, Homo sapien
gttattcctgtgctattagtggatgcatcaaca

SEQ ID NO: 726003 - DNA, 33 bp, Homo sapien
gtactgggatagctaactcaagagctagggttc

SEQ ID NO: 726004 - DNA, 33 bp, Homo sapien
gtactgggatagctaattcaagagctagggttc

SEQ ID NO: 726005 - DNA, 33 bp, Homo sapien
attttttcttgcttaaagttcacagcaatatgc

SEQ ID NO: 726006 - DNA, 33 bp, Homo sapien
attttttcttgcttaatgttcacagcaatatgc

SEQ ID NO: 726007 - DNA, 33 bp, Homo sapien
tgattaataaatagtacgcacattgttaggcac

SEQ ID NO: 726008 - DNA, 33 bp, Homo sapien
tgattaataaatagtatgcacattgttaggcac

SEQ ID NO: 726009 - DNA, 33 bp, Homo sapien
attgttaaatgtgatacagcatattcatagaat

SEQ ID NO: 726010 - DNA, 33 bp, Homo sapien
attgttaaatgtgatagagcatattcatagaat

SEQ ID NO: 726011 - DNA, 33 bp, Homo sapien
gatgcagcctgaaccacctaatcttcaggattt

SEQ ID NO: 726012 - DNA, 33 bp, Homo sapien
gatgcagcctgaaccatctaatcttcaggattt

SEQ ID NO: 726013 - DNA, 33 bp, Homo sapien
gctatggtaaagtaagcacagataccatcaacc

SEQ ID NO: 726014 - DNA, 33 bp, Homo sapien
gctatggtaaagtaagtacagataccatcaacc

SEQ ID NO: 726015 - DNA, 33 bp, Homo sapien
tttgttttcacagcaaatacaaacttcgcaccc

SEQ ID NO: 726016 - DNA, 33 bp, Homo sapien
tttgttttcacagcaagtacaaacttcgcaccc

SEQ ID NO: 726017 - DNA, 33 bp, Homo sapien
ccattctccacaaagcaaacacagtggtcctgt

SEQ ID NO: 726018 - DNA, 33 bp, Homo sapien
ccattctccacaaagcgaacacagtggtcctgt

SEQ ID NO: 726019 - DNA, 33 bp, Homo sapien
gcattgtttggggagaaattgtgatttagatag

SEQ ID NO: 726020 - DNA, 33 bp, Homo sapien
gcattgtttggggagagattgtgatttagatag

SEQ ID NO: 726021 - DNA, 33 bp, Homo sapien
tttattccttgagtccaaaagaatatatactcc

SEQ ID NO: 726022 - DNA, 33 bp, Homo sapien
tttattccttgagtccgaaagaatatatactcc

SEQ ID NO: 726023 - DNA, 33 bp, Homo sapien
gacactggaacagaaacggaagagcaaagttca

SEQ ID NO: 726024 - DNA, 33 bp, Homo sapien
gacactggaacagaaatggaagagcaaagttca

SEQ ID NO: 726025 - DNA, 33 bp, Homo sapien
atccacctgctttttcccattaaagtatgctgc

SEQ ID NO: 726026 - DNA, 33 bp, Homo sapien
atccacctgctttttctcattaaagtatgctgc

SEQ ID NO: 726027 - DNA, 33 bp, Homo sapien
atccattggttttccaggtagtttgctagaatc

SEQ ID NO: 726028 - DNA, 33 bp, Homo sapien
atccattggttttccatgtagtttgctagaatc

SEQ ID NO: 726029 - DNA, 33 bp, Homo sapien
tgactagtttctgaagcaagtattctatatatt

SEQ ID NO: 726030 - DNA, 33 bp, Homo sapien
tgactagtttctgaaggaagtattctatatatt

SEQ ID NO: 726031 - DNA, 33 bp, Homo sapien
actttagtcttcatgcgcctgttatcctcattg

SEQ ID NO: 726032 - DNA, 33 bp, Homo sapien
actttagtcttcatgctcctgttatcctcattg

SEQ ID NO: 726033 - DNA, 33 bp, Homo sapien
gcttgtgctatataagacaccatcttaggcttt

SEQ ID NO: 726034 - DNA, 33 bp, Homo sapien
gcttgtgctatataaggcaccatcttaggcttt

SEQ ID NO: 726035 - DNA, 33 bp, Homo sapien
aacaagctagtaaatgaaacaggacacaaaata

SEQ ID NO: 726036 - DNA, 33 bp, Homo sapien
aacaagctagtaaatggaacaggacacaaaata

SEQ ID NO: 726037 - DNA, 33 bp, Homo sapien
taattttctcatttaacggaacctcaaagatgt

SEQ ID NO: 726038 - DNA, 33 bp, Homo sapien
taattttctcatttaatggaacctcaaagatgt

SEQ ID NO: 726039 - DNA, 33 bp, Homo sapien
gtacataataatacccaaactccccattttctt

SEQ ID NO: 726040 - DNA, 33 bp, Homo sapien
gtacataataataccccaactccccattttctt

SEQ ID NO: 726041 - DNA, 33 bp, Homo sapien
ggtaggggaaatcgcaatgcagacaaaatctcc

SEQ ID NO: 726042 - DNA, 33 bp, Homo sapien
ggtaggggaaatcgcagtgcagacaaaatctcc

SEQ ID NO: 726043 - DNA, 33 bp, Homo sapien
tattaaataacattaacggatgaaacaaaacat

SEQ ID NO: 726044 - DNA, 33 bp, Homo sapien
tattaaataacattaatggatgaaacaaaacat

SEQ ID NO: 726045 - DNA, 33 bp, Homo sapien
tatgcacagggatacacaaagtttaagacattg

SEQ ID NO: 726046 - DNA, 33 bp, Homo sapien
tatgcacagggatacataaagtttaagacattg

SEQ ID NO: 726047 - DNA, 33 bp, Homo sapien
aaatgcagtatctgccaagaagagtaaagtgaa

SEQ ID NO: 726048 - DNA, 33 bp, Homo sapien
aaatgcagtatctgccgagaagagtaaagtgaa

SEQ ID NO: 726049 - DNA, 33 bp, Homo sapien
tttattttgttagtgacgcagcttctttaatga

SEQ ID NO: 726050 - DNA, 33 bp, Homo sapien
tttattttgttagtgatgcagcttctttaatga

SEQ ID NO: 726051 - DNA, 33 bp, Homo sapien
taccaaagtgagatcacattaaattcctgtatt

SEQ ID NO: 726052 - DNA, 33 bp, Homo sapien
taccaaagtgagatcatattaaattcctgtatt

SEQ ID NO: 726053 - DNA, 33 bp, Homo sapien
gacaggcagaaaggtaagcttcctacatcaagc

SEQ ID NO: 726054 - DNA, 33 bp, Homo sapien
gacaggcagaaaggtaggcttcctacatcaagc

SEQ ID NO: 726055 - DNA, 33 bp, Homo sapien
aaactgatatttgaaacgacaccttgaagagcc

SEQ ID NO: 726056 - DNA, 33 bp, Homo sapien
aaactgatatttgaaatgacaccttgaagagcc

SEQ ID NO: 726057 - DNA, 33 bp, Homo sapien
ttctgccactatagggaccacatatgcagcaca

SEQ ID NO: 726058 - DNA, 33 bp, Homo sapien
ttctgccactatagggtccacatatgcagcaca

SEQ ID NO: 726059 - DNA, 33 bp, Homo sapien
gttatttgatgttcacactagtggcctagtttc

SEQ ID NO: 726060 - DNA, 33 bp, Homo sapien
gttatttgatgttcacgctagtggcctagtttc

SEQ ID NO: 726061 - DNA, 33 bp, Homo sapien
cacacctggctgtataatagtttaaaataatgt

SEQ ID NO: 726062 - DNA, 33 bp, Homo sapien
cacacctggctgtatactagtttaaaataatgt

SEQ ID NO: 726063 - DNA, 33 bp, Homo sapien
tgaattgtagtgaaggaaattttatgaagttgg

SEQ ID NO: 726064 - DNA, 33 bp, Homo sapien
tgaattgtagtgaagggaattttatgaagttgg

SEQ ID NO: 726065 - DNA, 33 bp, Homo sapien
tttagtaggcacaaatcacaaagatgttgaaac

SEQ ID NO: 726066 - DNA, 33 bp, Homo sapien
tttagtaggcacaaatgacaaagatgttgaaac

SEQ ID NO: 726067 - DNA, 33 bp, Homo sapien
tatatattttgatggacgatatttcgaatgaaa

SEQ ID NO: 726068 - DNA, 33 bp, Homo sapien
tatatattttgatggatgatatttcgaatgaaa

SEQ ID NO: 726069 - DNA, 33 bp, Homo sapien
aaatttacctacataaccacatcaagtaaaatt

SEQ ID NO: 726070 - DNA, 33 bp, Homo sapien
aaatttacctacataagcacatcaagtaaaatt

SEQ ID NO: 726071 - DNA, 33 bp, Homo sapien
caaatcctggttcagcaacttatggctgttgac

SEQ ID NO: 726072 - DNA, 33 bp, Homo sapien
caaatcctggttcagcgacttatggctgttgac

SEQ ID NO: 726073 - DNA, 33 bp, Homo sapien
ttattagtattggagaacagcctattatttgtt

SEQ ID NO: 726074 - DNA, 33 bp, Homo sapien
ttattagtattggagagcagcctattatttgtt

SEQ ID NO: 726075 - DNA, 33 bp, Homo sapien
ctgcaaagtagagataatagtatcagtttcata

SEQ ID NO: 726076 - DNA, 33 bp, Homo sapien
ctgcaaagtagagatagtagtatcagtttcata

SEQ ID NO: 726077 - DNA, 33 bp, Homo sapien
tgagtaagtaatgtgacgaagattctgcagagt

SEQ ID NO: 726078 - DNA, 33 bp, Homo sapien
tgagtaagtaatgtgatgaagattctgcagagt

SEQ ID NO: 726079 - DNA, 33 bp, Homo sapien
attacataaagcacccacctgaaacaacttata

SEQ ID NO: 726080 - DNA, 33 bp, Homo sapien
attacataaagcacccgcctgaaacaacttata

SEQ ID NO: 726081 - DNA, 33 bp, Homo sapien
catgagacacgggttaagtcatggtgaaaatgg

SEQ ID NO: 726082 - DNA, 33 bp, Homo sapien
catgagacacgggttaggtcatggtgaaaatgg

SEQ ID NO: 726083 - DNA, 33 bp, Homo sapien
ctgttaagtagcatcactagtttttttttttat

SEQ ID NO: 726084 - DNA, 33 bp, Homo sapien
ctgttaagtagcatcattagtttttttttttat

SEQ ID NO: 726085 - DNA, 33 bp, Homo sapien
aggcacagccattgtcacaaatgtggaggaagc

SEQ ID NO: 726086 - DNA, 33 bp, Homo sapien
aggcacagccattgtcgcaaatgtggaggaagc

SEQ ID NO: 726087 - DNA, 33 bp, Homo sapien
ctcagcagacaacctgaacattacttcacagag

SEQ ID NO: 726088 - DNA, 33 bp, Homo sapien
ctcagcagacaacctgcacattacttcacagag

SEQ ID NO: 726089 - DNA, 33 bp, Homo sapien
caattccaacatttaaagtatctgtcagttaag

SEQ ID NO: 726090 - DNA, 33 bp, Homo sapien
caattccaacatttaaggtatctgtcagttaag

SEQ ID NO: 726091 - DNA, 33 bp, Homo sapien
ctttggaaaacataagccggattgtgtcactct

SEQ ID NO: 726092 - DNA, 33 bp, Homo sapien
ctttggaaaacataagtcggattgtgtcactct

SEQ ID NO: 726093 - DNA, 33 bp, Homo sapien
ttggctgccaggtctacaacctggattgtttta

SEQ ID NO: 726094 - DNA, 33 bp, Homo sapien
ttggctgccaggtctataacctggattgtttta

SEQ ID NO: 726095 - DNA, 33 bp, Homo sapien
atgaaagcgccaacaacaacagtatttttaaaa

SEQ ID NO: 726096 - DNA, 33 bp, Homo sapien
atgaaagcgccaacaagaacagtatttttaaaa

SEQ ID NO: 726097 - DNA, 33 bp, Homo sapien
tgaagcttttccataaagttgagcctagcttct

SEQ ID NO: 726098 - DNA, 33 bp, Homo sapien
tgaagcttttccataaggttgagcctagcttct

SEQ ID NO: 726099 - DNA, 33 bp, Homo sapien
gagacctaacccaggacgtggctgcataatatt

SEQ ID NO: 726100 - DNA, 33 bp, Homo sapien
gagacctaacccaggatgtggctgcataatatt

SEQ ID NO: 726101 - DNA, 33 bp, Homo sapien
aaatcacataactaatcacatttggcttcaatt

SEQ ID NO: 726102 - DNA, 33 bp, Homo sapien
aaatcacataactaattacatttggcttcaatt

SEQ ID NO: 726103 - DNA, 33 bp, Homo sapien
caacaatgaatgtattcaacatcctatgcaaaa

SEQ ID NO: 726104 - DNA, 33 bp, Homo sapien
caacaatgaatgtattgaacatcctatgcaaaa

SEQ ID NO: 726105 - DNA, 33 bp, Homo sapien
ttcacagttgccaaagcaaaatgtaagcttgta

SEQ ID NO: 726106 - DNA, 33 bp, Homo sapien
ttcacagttgccaaagtaaaatgtaagcttgta

SEQ ID NO: 726107 - DNA, 33 bp, Homo sapien
tgttcttaggttacaaagcagttactgacacac

SEQ ID NO: 726108 - DNA, 33 bp, Homo sapien
tgttcttaggttacaatgcagttactgacacac

SEQ ID NO: 726109 - DNA, 33 bp, Homo sapien
atccctcttcagaaaacggaccttctcttcgat

SEQ ID NO: 726110 - DNA, 33 bp, Homo sapien
atccctcttcagaaaatggaccttctcttcgat

SEQ ID NO: 726111 - DNA, 33 bp, Homo sapien
ataaatgcatggaaaacggtctgaagggattca

SEQ ID NO: 726112 - DNA, 33 bp, Homo sapien
ataaatgcatggaaaatggtctgaagggattca

SEQ ID NO: 726113 - DNA, 33 bp, Homo sapien
tgagattaagacattaaggtccaagaggtaata

SEQ ID NO: 726114 - DNA, 33 bp, Homo sapien
tgagattaagacattacggtccaagaggtaata

SEQ ID NO: 726115 - DNA, 33 bp, Homo sapien
aattgagaagaacttaaatgtccaataacaaga

SEQ ID NO: 726116 - DNA, 33 bp, Homo sapien
aattgagaagaacttagatgtccaataacaaga

SEQ ID NO: 726117 - DNA, 33 bp, Homo sapien
gagattttggatgccacgaattgagactgtgga

SEQ ID NO: 726118 - DNA, 33 bp, Homo sapien
gagattttggatgccatgaattgagactgtgga

SEQ ID NO: 726119 - DNA, 33 bp, Homo sapien
tgcttttgctgcattaaaagctgtttgtttcca

SEQ ID NO: 726120 - DNA, 33 bp, Homo sapien
tgcttttgctgcattagaagctgtttgtttcca

SEQ ID NO: 726121 - DNA, 33 bp, Homo sapien
gttgaaagtcaaagaaccacagagtattaatgt

SEQ ID NO: 726122 - DNA, 33 bp, Homo sapien
gttgaaagtcaaagaatcacagagtattaatgt

SEQ ID NO: 726123 - DNA, 33 bp, Homo sapien
gtaattcatcaggcaacaacatttaatctaccg

SEQ ID NO: 726124 - DNA, 33 bp, Homo sapien
gtaattcatcaggcaagaacatttaatctaccg

SEQ ID NO: 726125 - DNA, 33 bp, Homo sapien; identical to SEQ ID NO: 726123

SEQ ID NO: 726126 - DNA, 33 bp, Homo sapien; identical to SEQ ID NO: 726124

SEQ ID NO: 726127 - DNA, 33 bp, Homo sapien
ggaatttgcctcttaaatcatctcacatttgtt

SEQ ID NO: 726128 - DNA, 33 bp, Homo sapien
ggaatttgcctcttaagtcatctcacatttgtt

SEQ ID NO: 726129 - DNA, 33 bp, Homo sapien
accacccaggctctcaatctaactctccaagtg

SEQ ID NO: 726130 - DNA, 33 bp, Homo sapien
accacccaggctctcagtctaactctccaagtg

SEQ ID NO: 726131 - DNA, 33 bp, Homo sapien
aaaaaaaccagacacacaaatcgagtttaattt

SEQ ID NO: 726132 - DNA, 33 bp, Homo sapien
aaaaaaaccagacacataaatcgagtttaattt

SEQ ID NO: 726133 - DNA, 33 bp, Homo sapien
ggtattttaccaagcagcaggaactaatttgca

SEQ ID NO: 726134 - DNA, 33 bp, Homo sapien
ggtattttaccaagcatcaggaactaatttgca

SEQ ID NO: 726135 - DNA, 33 bp, Homo sapien
aaatactgtcatctcaatagagcttatttttac

SEQ ID NO: 726136 - DNA, 33 bp, Homo sapien
aaatactgtcatctcagtagagcttatttttac

SEQ ID NO: 726137 - DNA, 33 bp, Homo sapien
ggaactaatctttcaaagttctgcttaagcaat

SEQ ID NO: 726138 - DNA, 33 bp, Homo sapien
ggaactaatctttcaaggttctgcttaagcaat

SEQ ID NO: 726139 - DNA, 33 bp, Homo sapien
aacttgcctattgaaaacacatctagaataagt

SEQ ID NO: 726140 - DNA, 33 bp, Homo sapien
aacttgcctattgaaagcacatctagaataagt

SEQ ID NO: 726141 - DNA, 33 bp, Homo sapien
tgaaacagcatcacgaataatacaaacaacatc

SEQ ID NO: 726142 - DNA, 33 bp, Homo sapien
tgaaacagcatcacgagtaatacaaacaacatc

SEQ ID NO: 726143 - DNA, 33 bp, Homo sapien
gtgtgctttgtggagacagtcaggtaagtaagg

SEQ ID NO: 726144 - DNA, 33 bp, Homo sapien
gtgtgctttgtggagagagtcaggtaagtaagg

SEQ ID NO: 726145 - DNA, 33 bp, Homo sapien
actgacggctatcacactacaaacagactgggt

SEQ ID NO: 726146 - DNA, 33 bp, Homo sapien
actgacggctatcacattacaaacagactgggt

SEQ ID NO: 726147 - DNA, 33 bp, Homo sapien
tgaaagttgtctatacaaaaatggagtcacttc

SEQ ID NO: 726148 - DNA, 33 bp, Homo sapien
tgaaagttgtctataccaaaatggagtcacttc

SEQ ID NO: 726149 - DNA, 33 bp, Homo sapien
attaaaccctttatgacagaggtctgcaaattg

SEQ ID NO: 726150 - DNA, 33 bp, Homo sapien
attaaaccctttatgatagaggtctgcaaattg

SEQ ID NO: 726151 - DNA, 33 bp, Homo sapien
cagttatctaacggcaatcccaattttaggatt

SEQ ID NO: 726152 - DNA, 33 bp, Homo sapien
cagttatctaacggcattcccaattttaggatt

SEQ ID NO: 726153 - DNA, 33 bp, Homo sapien
tctagagagaaggtgaactattcccacatgtca

SEQ ID NO: 726154 - DNA, 33 bp, Homo sapien
tctagagagaaggtgatctattcccacatgtca

SEQ ID NO: 726155 - DNA, 33 bp, Homo sapien
tgagaaattgtggtccgaaggaaagatcccata

SEQ ID NO: 726156 - DNA, 33 bp, Homo sapien
tgagaaattgtggtcctaaggaaagatcccata

SEQ ID NO: 726157 - DNA, 33 bp, Homo sapien
acttgtcttcgggtatcaagctgctgcttattt

SEQ ID NO: 726158 - DNA, 33 bp, Homo sapien
acttgtcttcgggtatgaagctgctgcttattt

SEQ ID NO: 726159 - DNA, 33 bp, Homo sapien
tataagatgtcgagaaagttctgaatggagcct

SEQ ID NO: 726160 - DNA, 33 bp, Homo sapien
tataagatgtcgagaacgttctgaatggagcct

SEQ ID NO: 726161 - DNA, 33 bp, Homo sapien
tttacttctcctaagaataactacaaccatgaa

SEQ ID NO: 726162 - DNA, 33 bp, Homo sapien
tttacttctcctaagagtaactacaaccatgaa

SEQ ID NO: 726163 - DNA, 33 bp, Homo sapien
tatttgattttggcagaagaagaatatttatgt

SEQ ID NO: 726164 - DNA, 33 bp, Homo sapien
tatttgattttggcaggagaagaatatttatgt

SEQ ID NO: 726165 - DNA, 33 bp, Homo sapien
cactcatacttgttcaacctgaaagtgtcaaag

SEQ ID NO: 726166 - DNA, 33 bp, Homo sapien
cactcatacttgttcatcctgaaagtgtcaaag

SEQ ID NO: 726167 - DNA, 33 bp, Homo sapien
attcaactctggacataaaaagtcactaagagt

SEQ ID NO: 726168 - DNA, 33 bp, Homo sapien
attcaactctggacatgaaaagtcactaagagt

SEQ ID NO: 726169 - DNA, 33 bp, Homo sapien
tgagtttgaaggcagaagggatccgtttccatt

SEQ ID NO: 726170 - DNA, 33 bp, Homo sapien
tgagtttgaaggcagaggggatccgtttccatt

SEQ ID NO: 726171 - DNA, 33 bp, Homo sapien
agaaaaggcaggactcaagcgatgaggtggtgg

SEQ ID NO: 726172 - DNA, 33 bp, Homo sapien
agaaaaggcaggactcgagcgatgaggtggtgg

SEQ ID NO: 726173 - DNA, 33 bp, Homo sapien
actctttgtgcccttacgtacatcttctcatgt

SEQ ID NO: 726174 - DNA, 33 bp, Homo sapien
actctttgtgcccttatgtacatcttctcatgt

SEQ ID NO: 726175 - DNA, 33 bp, Homo sapien
tgttgaagaaaacagcaaacaagatttggcatt

SEQ ID NO: 726176 - DNA, 33 bp, Homo sapien
tgttgaagaaaacagcgaacaagatttggcatt

SEQ ID NO: 726177 - DNA, 33 bp, Homo sapien
ttgtggtttggttatacgacatttgacaagttt

SEQ ID NO: 726178 - DNA, 33 bp, Homo sapien
ttgtggtttggttatatgacatttgacaagttt

SEQ ID NO: 726179 - DNA, 33 bp, Homo sapien
attctttagttgaggacaataaggatctcatca

SEQ ID NO: 726180 - DNA, 33 bp, Homo sapien
attctttagttgaggataataaggatctcatca

SEQ ID NO: 726181 - DNA, 33 bp, Homo sapien
tacttttcttgctatacgtgtagtaattcttgt

SEQ ID NO: 726182 - DNA, 33 bp, Homo sapien
tacttttcttgctatatgtgtagtaattcttgt

SEQ ID NO: 726183 - DNA, 33 bp, Homo sapien
tataatattccaaaacagctaaatgctctttta

SEQ ID NO: 726184 - DNA, 33 bp, Homo sapien
tataatattccaaaacggctaaatgctctttta

SEQ ID NO: 726185 - DNA, 33 bp, Homo sapien
agttacgaatgttcacgggaactataataagag

SEQ ID NO: 726186 - DNA, 33 bp, Homo sapien
agttacgaatgttcactggaactataataagag

SEQ ID NO: 726187 - DNA, 33 bp, Homo sapien
aggaggagatcaactacgaaggggtacagggga

SEQ ID NO: 726188 - DNA, 33 bp, Homo sapien
aggaggagatcaactatgaaggggtacagggga

SEQ ID NO: 726189 - DNA, 33 bp, Homo sapien
tttagatagctgtactaaaattcaggaaaaagt

SEQ ID NO: 726190 - DNA, 33 bp, Homo sapien
tttagatagctgtacttaaattcaggaaaaagt

SEQ ID NO: 726191 - DNA, 33 bp, Homo sapien
actgtttataccaaacaaaagtccaggataaac

SEQ ID NO: 726192 - DNA, 33 bp, Homo sapien
actgtttataccaaacgaaagtccaggataaac

SEQ ID NO: 726193 - DNA, 33 bp, Homo sapien
gcttgtgatttgtacaatacacttacctaccac

SEQ ID NO: 726194 - DNA, 33 bp, Homo sapien
gcttgtgatttgtacagtacacttacctaccac

SEQ ID NO: 726195 - DNA, 33 bp, Homo sapien
tttttcttgtttatcaatctgttgttatatcat

SEQ ID NO: 726196 - DNA, 33 bp, Homo sapien
tttttcttgtttatcagtctgttgttatatcat

SEQ ID NO: 726197 - DNA, 33 bp, Homo sapien
aatcgctaaaacacaacgttgattttctgtaat

SEQ ID NO: 726198 - DNA, 33 bp, Homo sapien
aatcgctaaaacacaatgttgattttctgtaat

SEQ ID NO: 726199 - DNA, 33 bp, Homo sapien
agtatgtaattacagggactcagataatcaata

SEQ ID NO: 726200 - DNA, 33 bp, Homo sapien
agtatgtaattacaggtactcagataatcaata

SEQ ID NO: 726201 - DNA, 33 bp, Homo sapien
acagaaacaaattccactgaagcatctgtagct

SEQ ID NO: 726202 - DNA, 33 bp, Homo sapien
acagaaacaaattccattgaagcatctgtagct

SEQ ID NO: 726203 - DNA, 33 bp, Homo sapien
cttatacatgaaagtgaagagtccagattatta

SEQ ID NO: 726204 - DNA, 33 bp, Homo sapien
cttatacatgaaagtggagagtccagattatta

SEQ ID NO: 726205 - DNA, 33 bp, Homo sapien
tgagaacctggtataaaagatatttccaagcca

SEQ ID NO: 726206 - DNA, 33 bp, Homo sapien
tgagaacctggtataacagatatttccaagcca

SEQ ID NO: 726207 - DNA, 33 bp, Homo sapien
cttgatttgcttccaaaaaatagaatatggcaa

SEQ ID NO: 726208 - DNA, 33 bp, Homo sapien
cttgatttgcttccaagaaatagaatatggcaa

SEQ ID NO: 726209 - DNA, 33 bp, Homo sapien
cactgattaagatttcaagagagaaaggcatta

SEQ ID NO: 726210 - DNA, 33 bp, Homo sapien
cactgattaagatttccagagagaaaggcatta

SEQ ID NO: 726211 - DNA, 33 bp, Homo sapien
tccagcagggtagcgaaacttcttatgtaacag

SEQ ID NO: 726212 - DNA, 33 bp, Homo sapien
tccagcagggtagcgagacttcttatgtaacag

SEQ ID NO: 726213 - DNA, 33 bp, Homo sapien
ctaccacgagttgtaccgagcaacatgcctatc

SEQ ID NO: 726214 - DNA, 33 bp, Homo sapien
ctaccacgagttgtactgagcaacatgcctatc

SEQ ID NO: 726215 - DNA, 33 bp, Homo sapien
tcaggatgctggttaacgtgaaatttaaaggaa

SEQ ID NO: 726216 - DNA, 33 bp, Homo sapien
tcaggatgctggttaatgtgaaatttaaaggaa

SEQ ID NO: 726217 - DNA, 33 bp, Homo sapien
taccagaactctgctgaaacataaaaggcaaat

SEQ ID NO: 726218 - DNA, 33 bp, Homo sapien
taccagaactctgctgcaacataaaaggcaaat

SEQ ID NO: 726219 - DNA, 33 bp, Homo sapien
ataaatgtctctaacacaatacttagcacatct

SEQ ID NO: 726220 - DNA, 33 bp, Homo sapien
ataaatgtctctaacataatacttagcacatct

SEQ ID NO: 726221 - DNA, 33 bp, Homo sapien
actaaaatgattcaagacctcctaaaacactct

SEQ ID NO: 726222 - DNA, 33 bp, Homo sapien
actaaaatgattcaaggcctcctaaaacactct

SEQ ID NO: 726223 - DNA, 33 bp, Homo sapien
tgaggaaagagcagaaagaagataaatgaagga

SEQ ID NO: 726224 - DNA, 33 bp, Homo sapien
tgaggaaagagcagaaggaagataaatgaagga

SEQ ID NO: 726225 - DNA, 33 bp, Homo sapien
tctctaccttgggtgaagtttcaggcagtctga

SEQ ID NO: 726226 - DNA, 33 bp, Homo sapien
tctctaccttgggtgaggtttcaggcagtctga

SEQ ID NO: 726227 - DNA, 33 bp, Homo sapien
gtaaatggctctgctgaaattatatcaacacat

SEQ ID NO: 726228 - DNA, 33 bp, Homo sapien
gtaaatggctctgctggaattatatcaacacat

SEQ ID NO: 726229 - DNA, 33 bp, Homo sapien
gcttacatttggcataatatattacataagact

SEQ ID NO: 726230 - DNA, 33 bp, Homo sapien
gcttacatttggcatagtatattacataagact

SEQ ID NO: 726231 - DNA, 33 bp, Homo sapien
agcatgagacggtgaaacttgaggaaagagaaa

SEQ ID NO: 726232 - DNA, 33 bp, Homo sapien
agcatgagacggtgaaccttgaggaaagagaaa

SEQ ID NO: 726233 - DNA, 33 bp, Homo sapien
tgattcatgccttatcaacacattaatttacac

SEQ ID NO: 726234 - DNA, 33 bp, Homo sapien
tgattcatgccttatcgacacattaatttacac

SEQ ID NO: 726235 - DNA, 33 bp, Homo sapien
atttagcaatttcatgcaacgcttctatgtttc

SEQ ID NO: 726236 - DNA, 33 bp, Homo sapien
atttagcaatttcatgtaacgcttctatgtttc

SEQ ID NO: 726237 - DNA, 33 bp, Homo sapien
gacacatactaatactcaataggttgctagtgt

SEQ ID NO: 726238 - DNA, 33 bp, Homo sapien
gacacatactaatacttaataggttgctagtgt

SEQ ID NO: 726239 - DNA, 33 bp, Homo sapien
catttggaagtatatacgggatggctacagata

SEQ ID NO: 726240 - DNA, 33 bp, Homo sapien
catttggaagtatatatgggatggctacagata

SEQ ID NO: 726241 - DNA, 33 bp, Homo sapien
ggctcaaccctgcgtactaaaaggcaaaatggt

SEQ ID NO: 726242 - DNA, 33 bp, Homo sapien
ggctcaaccctgcgtattaaaaggcaaaatggt

SEQ ID NO: 726243 - DNA, 33 bp, Homo sapien
catgtgtaatcactaaagaatgtattaagacag

SEQ ID NO: 726244 - DNA, 33 bp, Homo sapien
catgtgtaatcactaaggaatgtattaagacag

SEQ ID NO: 726245 - DNA, 33 bp, Homo sapien
cataatctggcttcaaatgaacactgccacaaa

SEQ ID NO: 726246 - DNA, 33 bp, Homo sapien
cataatctggcttcaactgaacactgccacaaa

SEQ ID NO: 726247 - DNA, 33 bp, Homo sapien
ccaaaatgagtgaaaagactttgttttacctat

SEQ ID NO: 726248 - DNA, 33 bp, Homo sapien
ccaaaatgagtgaaaatactttgttttacctat

SEQ ID NO: 726249 - DNA, 33 bp, Homo sapien
attaaaatctaatttgaatgtgtaaaaataatt

SEQ ID NO: 726250 - DNA, 33 bp, Homo sapien
attaaaatctaatttgcatgtgtaaaaataatt

SEQ ID NO: 726251 - DNA, 33 bp, Homo sapien
gtggagtacatgggcactaggcacagacggcag

SEQ ID NO: 726252 - DNA, 33 bp, Homo sapien
gtggagtacatgggcagtaggcacagacggcag

SEQ ID NO: 726253 - DNA, 33 bp, Homo sapien
acattttgagaatgacggatatagaggtaagtg

SEQ ID NO: 726254 - DNA, 33 bp, Homo sapien
acattttgagaatgactgatatagaggtaagtg

SEQ ID NO: 726255 - DNA, 33 bp, Homo sapien
gaactaactgcaactccgactattagaggagga

SEQ ID NO: 726256 - DNA, 33 bp, Homo sapien
gaactaactgcaactctgactattagaggagga

SEQ ID NO: 726257 - DNA, 33 bp, Homo sapien
ataaaggcttaaataccccaacctagcaatgcc

SEQ ID NO: 726258 - DNA, 33 bp, Homo sapien
ataaaggcttaaatactccaacctagcaatgcc

SEQ ID NO: 726259 - DNA, 33 bp, Homo sapien
ttgtttggcttacccaatagattcctttaagca

SEQ ID NO: 726260 - DNA, 33 bp, Homo sapien
ttgtttggcttacccagtagattcctttaagca

SEQ ID NO: 726261 - DNA, 33 bp, Homo sapien
ggagaaactaatggcaaataagggccaatttta

SEQ ID NO: 726262 - DNA, 33 bp, Homo sapien
ggagaaactaatggcagataagggccaatttta

SEQ ID NO: 726263 - DNA, 33 bp, Homo sapien
aggacagaagttactcactagagataatctaca

SEQ ID NO: 726264 - DNA, 33 bp, Homo sapien
aggacagaagttactcgctagagataatctaca

SEQ ID NO: 726265 - DNA, 33 bp, Homo sapien
atttatgtcgcacttacaggcaaacaggtggag

SEQ ID NO: 726266 - DNA, 33 bp, Homo sapien
atttatgtcgcacttataggcaaacaggtggag

SEQ ID NO: 726267 - DNA, 33 bp, Homo sapien
attcaggcttaactcaaagtaactttcaagtcc

SEQ ID NO: 726268 - DNA, 33 bp, Homo sapien
attcaggcttaactcacagtaactttcaagtcc

SEQ ID NO: 726269 - DNA, 33 bp, Homo sapien
tgatatgctaaacaaaatgttgattattcatgc

SEQ ID NO: 726270 - DNA, 33 bp, Homo sapien
tgatatgctaaacaaagtgttgattattcatgc

SEQ ID NO: 726271 - DNA, 33 bp, Homo sapien
ttttatgatcaagtaaaaggagaattcatggta

SEQ ID NO: 726272 - DNA, 33 bp, Homo sapien
ttttatgatcaagtaagaggagaattcatggta

SEQ ID NO: 726273 - DNA, 33 bp, Homo sapien
gtaatttctgccaccacactgaccgatctccta

SEQ ID NO: 726274 - DNA, 33 bp, Homo sapien
gtaatttctgccaccatactgaccgatctccta

SEQ ID NO: 726275 - DNA, 33 bp, Homo sapien
atgaagttcatggccaatgcaaaaggtttgttt

SEQ ID NO: 726276 - DNA, 33 bp, Homo sapien
atgaagttcatggccagtgcaaaaggtttgttt

SEQ ID NO: 726277 - DNA, 33 bp, Homo sapien
atgaactggattgaagacaagacacagaaacat

SEQ ID NO: 726278 - DNA, 33 bp, Homo sapien
atgaactggattgaagtcaagacacagaaacat

SEQ ID NO: 726279 - DNA, 33 bp, Homo sapien
atagtatttccctgtacgtatgcttaagtgtag

SEQ ID NO: 726280 - DNA, 33 bp, Homo sapien
atagtatttccctgtatgtatgcttaagtgtag

SEQ ID NO: 726281 - DNA, 33 bp, Homo sapien
tcctgatggtgatacaacagcattgcgaagtct

SEQ ID NO: 726282 - DNA, 33 bp, Homo sapien
tcctgatggtgatacagcagcattgcgaagtct

SEQ ID NO: 726283 - DNA, 33 bp, Homo sapien
gatgctagcaaggttacagagaaaaaggaatgc

SEQ ID NO: 726284 - DNA, 33 bp, Homo sapien
gatgctagcaaggttagagagaaaaaggaatgc

SEQ ID NO: 726285 - DNA, 33 bp, Homo sapien
ttgcccattttctcacaggcttgttttttgctt

SEQ ID NO: 726286 - DNA, 33 bp, Homo sapien
ttgcccattttctcacgggcttgttttttgctt

SEQ ID NO: 726287 - DNA, 33 bp, Homo sapien
atatttcattttgtggacatatttaatttttgg

SEQ ID NO: 726288 - DNA, 33 bp, Homo sapien
atatttcattttgtggccatatttaatttttgg

SEQ ID NO: 726289 - DNA, 33 bp, Homo sapien
aattaatagtaggcagactcttgtgctatgtga

SEQ ID NO: 726290 - DNA, 33 bp, Homo sapien
aattaatagtaggcagcctcttgtgctatgtga

SEQ ID NO: 726291 - DNA, 33 bp, Homo sapien
ggaaaataactgtaaaaaccagacatactgcaa

SEQ ID NO: 726292 - DNA, 33 bp, Homo sapien
ggaaaataactgtaaagaccagacatactgcaa

SEQ ID NO: 726293 - DNA, 33 bp, Homo sapien
agacaacatttgaagaagtggttgaaaaagtag

SEQ ID NO: 726294 - DNA, 33 bp, Homo sapien
agacaacatttgaagacgtggttgaaaaagtag

SEQ ID NO: 726295 - DNA, 33 bp, Homo sapien
actcaaaatcatcataacctttggcactgagac

SEQ ID NO: 726296 - DNA, 33 bp, Homo sapien
actcaaaatcatcataccctttggcactgagac

SEQ ID NO: 726297 - DNA, 33 bp, Homo sapien
aataactgtatcaaaaggtagtcaaaactaaaa

SEQ ID NO: 726298 - DNA, 33 bp, Homo sapien
aataactgtatcaaaatgtagtcaaaactaaaa

SEQ ID NO: 726299 - DNA, 33 bp, Homo sapien
tctgaatgagttctgtaaaacagtttccaaaat

SEQ ID NO: 726300 - DNA, 33 bp, Homo sapien
tctgaatgagttctgtgaaacagtttccaaaat

SEQ ID NO: 726301 - DNA, 33 bp, Homo sapien
tttggattttgagtacgaactacctgtgaggtc

SEQ ID NO: 726302 - DNA, 33 bp, Homo sapien
tttggattttgagtactaactacctgtgaggtc

SEQ ID NO: 726303 - DNA, 33 bp, Homo sapien
ttgtttgcaaaaagtaacaaaaggctcctaatg

SEQ ID NO: 726304 - DNA, 33 bp, Homo sapien
ttgtttgcaaaaagtagcaaaaggctcctaatg

SEQ ID NO: 726305 - DNA, 33 bp, Homo sapien
tagaccaggataatttcaaagcaagttagattg

SEQ ID NO: 726306 - DNA, 33 bp, Homo sapien
tagaccaggataatttgaaagcaagttagattg

SEQ ID NO: 726307 - DNA, 33 bp, Homo sapien
ccaagtccattaactaagaaaggaaaagctaaa

SEQ ID NO: 726308 - DNA, 33 bp, Homo sapien
ccaagtccattaactaggaaaggaaaagctaaa

SEQ ID NO: 726309 - DNA, 33 bp, Homo sapien
tgccaacaccatagaaagtacttacacaaacct

SEQ ID NO: 726310 - DNA, 33 bp, Homo sapien
tgccaacaccatagaaggtacttacacaaacct

SEQ ID NO: 726311 - DNA, 33 bp, Homo sapien
catcttatttagcaagaactcaagacaccaaca

SEQ ID NO: 726312 - DNA, 33 bp, Homo sapien
catcttatttagcaaggactcaagacaccaaca

SEQ ID NO: 726313 - DNA, 33 bp, Homo sapien
gtgctttgagatacacagatcaaattttaaatg

SEQ ID NO: 726314 - DNA, 33 bp, Homo sapien
gtgctttgagatacaccgatcaaattttaaatg

SEQ ID NO: 726315 - DNA, 33 bp, Homo sapien
tgtaactgtttttgagaccaaatattaaattcc

SEQ ID NO: 726316 - DNA, 33 bp, Homo sapien
tgtaactgtttttgaggccaaatattaaattcc

SEQ ID NO: 726317 - DNA, 33 bp, Homo sapien
atgtttgctcattttcaatttaaaggcttttaa

SEQ ID NO: 726318 - DNA, 33 bp, Homo sapien
atgtttgctcattttctatttaaaggcttttaa

SEQ ID NO: 726319 - DNA, 33 bp, Homo sapien
gttaaaatacttataagcagtgggctaaagtta

SEQ ID NO: 726320 - DNA, 33 bp, Homo sapien
gttaaaatacttataatcagtgggctaaagtta

SEQ ID NO: 726321 - DNA, 33 bp, Homo sapien
tttttaaacaaacataaatggaaagtaggacat

SEQ ID NO: 726322 - DNA, 33 bp, Homo sapien
tttttaaacaaacatacatggaaagtaggacat

SEQ ID NO: 726323 - DNA, 33 bp, Homo sapien
gattggacaccacttgcataaactttatttgcc

SEQ ID NO: 726324 - DNA, 33 bp, Homo sapien
gattggacaccacttgtataaactttatttgcc

SEQ ID NO: 726325 - DNA, 33 bp, Homo sapien
gcattatcccatgacccccaaacagaacacaca

SEQ ID NO: 726326 - DNA, 33 bp, Homo sapien
gcattatcccatgacctccaaacagaacacaca

SEQ ID NO: 726327 - DNA, 33 bp, Homo sapien
tttgtcattaaattgaagttattgtcgatggag

SEQ ID NO: 726328 - DNA, 33 bp, Homo sapien
tttgtcattaaattgatgttattgtcgatggag

SEQ ID NO: 726329 - DNA, 33 bp, Homo sapien
aactgtccttgatacactgggcgtttacaatta

SEQ ID NO: 726330 - DNA, 33 bp, Homo sapien
aactgtccttgatacattgggcgtttacaatta

SEQ ID NO: 726331 - DNA, 33 bp, Homo sapien
taacctccttataccacgtactgaaaaagtcaa

SEQ ID NO: 726332 - DNA, 33 bp, Homo sapien
taacctccttataccatgtactgaaaaagtcaa

SEQ ID NO: 726333 - DNA, 33 bp, Homo sapien
gttcaaccttaagaccaagcaacgaacaatcaa

SEQ ID NO: 726334 - DNA, 33 bp, Homo sapien
gttcaaccttaagaccgagcaacgaacaatcaa

SEQ ID NO: 726335 - DNA, 33 bp, Homo sapien
gttattcttgataagcactatgattgcccttca

SEQ ID NO: 726336 - DNA, 33 bp, Homo sapien
gttattcttgataagcgctatgattgcccttca

SEQ ID NO: 726337 - DNA, 33 bp, Homo sapien
tatttcctggccaataacaaaagccatgcgaat

SEQ ID NO: 726338 - DNA, 33 bp, Homo sapien
tatttcctggccaatagcaaaagccatgcgaat

SEQ ID NO: 726339 - DNA, 33 bp, Homo sapien
gattcttaaatacttacgcatttcctaagaata

SEQ ID NO: 726340 - DNA, 33 bp, Homo sapien
gattcttaaatacttatgcatttcctaagaata

SEQ ID NO: 726341 - DNA, 33 bp, Homo sapien
tattttttaaaatgtacgactagactaagcaag

SEQ ID NO: 726342 - DNA, 33 bp, Homo sapien
tattttttaaaatgtatgactagactaagcaag

SEQ ID NO: 726343 - DNA, 33 bp, Homo sapien
gacctgcccaggtaggaatgaaaagcatatgga

SEQ ID NO: 726344 - DNA, 33 bp, Homo sapien
gacctgcccaggtaggtatgaaaagcatatgga

SEQ ID NO: 726345 - DNA, 33 bp, Homo sapien
attacagtgtgtgttccactggcattatgtaag

SEQ ID NO: 726346 - DNA, 33 bp, Homo sapien
attacagtgtgtgttctactggcattatgtaag

SEQ ID NO: 726347 - DNA, 33 bp, Homo sapien
atagaaagcatgtaccagatgagggtattaatg

SEQ ID NO: 726348 - DNA, 33 bp, Homo sapien
atagaaagcatgtaccggatgagggtattaatg

SEQ ID NO: 726349 - DNA, 33 bp, Homo sapien
tctaacttccgtgcaacttagtgattgtgttca

SEQ ID NO: 726350 - DNA, 33 bp, Homo sapien
tctaacttccgtgcaatttagtgattgtgttca

SEQ ID NO: 726351 - DNA, 33 bp, Homo sapien
taaccaatctgcaacacataaaaaggaaggcat

SEQ ID NO: 726352 - DNA, 33 bp, Homo sapien
taaccaatctgcaacatataaaaaggaaggcat

SEQ ID NO: 726353 - DNA, 33 bp, Homo sapien
aattaaaaggctggcacaattacgatttttcta

SEQ ID NO: 726354 - DNA, 33 bp, Homo sapien
aattaaaaggctggcataattacgatttttcta

SEQ ID NO: 726355 - DNA, 33 bp, Homo sapien
ctgaaagaagcagacaaatgaggaaagtaatct

SEQ ID NO: 726356 - DNA, 33 bp, Homo sapien
ctgaaagaagcagacagatgaggaaagtaatct

SEQ ID NO: 726357 - DNA, 33 bp, Homo sapien
aactggatcacagaaaagataagtagcttacat

SEQ ID NO: 726358 - DNA, 33 bp, Homo sapien
aactggatcacagaaaggataagtagcttacat

SEQ ID NO: 726359 - DNA, 33 bp, Homo sapien
aatatatatttagcaagttctaggcctgatcat

SEQ ID NO: 726360 - DNA, 33 bp, Homo sapien
aatatatatttagcaatttctaggcctgatcat

SEQ ID NO: 726361 - DNA, 33 bp, Homo sapien
gactgtgaacctactcactacttgaaacaatgg

SEQ ID NO: 726362 - DNA, 33 bp, Homo sapien
gactgtgaacctactcgctacttgaaacaatgg

SEQ ID NO: 726363 - DNA, 33 bp, Homo sapien
taggttcagaaccagaaatatttaaccagggtg

SEQ ID NO: 726364 - DNA, 33 bp, Homo sapien
taggttcagaaccagagatatttaaccagggtg

SEQ ID NO: 726365 - DNA, 33 bp, Homo sapien
tgtaactaagcagatacgatataaaagaatcct

SEQ ID NO: 726366 - DNA, 33 bp, Homo sapien
tgtaactaagcagatatgatataaaagaatcct

SEQ ID NO: 726367 - DNA, 33 bp, Homo sapien
ttggcattttatggtagggaaagtgccaagttt

SEQ ID NO: 726368 - DNA, 33 bp, Homo sapien
ttggcattttatggtatggaaagtgccaagttt

SEQ ID NO: 726369 - DNA, 33 bp, Homo sapien
tagaggtgtgatcaaacggttgacctttctagt

SEQ ID NO: 726370 - DNA, 33 bp, Homo sapien
tagaggtgtgatcaaatggttgacctttctagt

SEQ ID NO: 726371 - DNA, 33 bp, Homo sapien
agactctagtttttgcccaattgtttgcacatt

SEQ ID NO: 726372 - DNA, 33 bp, Homo sapien
agactctagtttttgctcaattgtttgcacatt

SEQ ID NO: 726373 - DNA, 33 bp, Homo sapien
tttcctgggatgaccaacggaaacaagtctgaa

SEQ ID NO: 726374 - DNA, 33 bp, Homo sapien
tttcctgggatgaccagcggaaacaagtctgaa

SEQ ID NO: 726375 - DNA, 33 bp, Homo sapien
tcactctggtagaaacaagccaccatatcatga

SEQ ID NO: 726376 - DNA, 33 bp, Homo sapien
tcactctggtagaaacgagccaccatatcatga

SEQ ID NO: 726377 - DNA, 33 bp, Homo sapien
ttttgaccagtctccccgattcttttcttttag

SEQ ID NO: 726378 - DNA, 33 bp, Homo sapien
ttttgaccagtctccctgattcttttcttttag

SEQ ID NO: 726379 - DNA, 33 bp, Homo sapien
agaaagtaccacttgacgtgcactctataccat

SEQ ID NO: 726380 - DNA, 33 bp, Homo sapien
agaaagtaccacttgatgtgcactctataccat

SEQ ID NO: 726381 - DNA, 33 bp, Homo sapien
aatgaagtgtgaatgacaatagcacagagatgt

SEQ ID NO: 726382 - DNA, 33 bp, Homo sapien
aatgaagtgtgaatgagaatagcacagagatgt

SEQ ID NO: 726383 - DNA, 33 bp, Homo sapien
cctctgtccaattaacaagactttggccaccca

SEQ ID NO: 726384 - DNA, 33 bp, Homo sapien
cctctgtccaattaacgagactttggccaccca

SEQ ID NO: 726385 - DNA, 33 bp, Homo sapien
ggaatttgtgataagccctggtttcttcaagta

SEQ ID NO: 726386 - DNA, 33 bp, Homo sapien
ggaatttgtgataagctctggtttcttcaagta

SEQ ID NO: 726387 - DNA, 33 bp, Homo sapien
aggcgattaagtcaaaatgaagcctttagagta

SEQ ID NO: 726388 - DNA, 33 bp, Homo sapien
aggcgattaagtcaaagtgaagcctttagagta

SEQ ID NO: 726389 - DNA, 33 bp, Homo sapien
aaatgaaatattgtgaataaaatgctgagcaag

SEQ ID NO: 726390 - DNA, 33 bp, Homo sapien
aaatgaaatattgtgagtaaaatgctgagcaag

SEQ ID NO: 726391 - DNA, 33 bp, Homo sapien
aaagactgctgcagagaaacaccggcaagattt

SEQ ID NO: 726392 - DNA, 33 bp, Homo sapien
aaagactgctgcagaggaacaccggcaagattt

SEQ ID NO: 726393 - DNA, 33 bp, Homo sapien
gtcaatgtaactgctgaagatcctaacacagga

SEQ ID NO: 726394 - DNA, 33 bp, Homo sapien
gtcaatgtaactgctggagatcctaacacagga

SEQ ID NO: 726395 - DNA, 33 bp, Homo sapien
aggtacagtatacatacagaaaagtgcatagat

SEQ ID NO: 726396 - DNA, 33 bp, Homo sapien
aggtacagtatacatatagaaaagtgcatagat

SEQ ID NO: 726397 - DNA, 33 bp, Homo sapien
cactggagcatcctacacttgatagtttagcag

SEQ ID NO: 726398 - DNA, 33 bp, Homo sapien
cactggagcatcctacgcttgatagtttagcag

SEQ ID NO: 726399 - DNA, 33 bp, Homo sapien
agtactgtcatccttcactttgtattctctaac

SEQ ID NO: 726400 - DNA, 33 bp, Homo sapien
agtactgtcatccttcgctttgtattctctaac

SEQ ID NO: 726401 - DNA, 33 bp, Homo sapien
aacaaacttgatccaagtgtaagatttgtacag

SEQ ID NO: 726402 - DNA, 33 bp, Homo sapien
aacaaacttgatccaattgtaagatttgtacag

SEQ ID NO: 726403 - DNA, 33 bp, Homo sapien
tccctggtggcaaaacaattggggaccactgac

SEQ ID NO: 726404 - DNA, 33 bp, Homo sapien
tccctggtggcaaaacgattggggaccactgac

SEQ ID NO: 726405 - DNA, 33 bp, Homo sapien
agctctcctcttgagcacctgttttcttgtaga

SEQ ID NO: 726406 - DNA, 33 bp, Homo sapien
agctctcctcttgagcccctgttttcttgtaga

SEQ ID NO: 726407 - DNA, 33 bp, Homo sapien
attaaaaaatgtcaacaatgttttcaagggaaa

SEQ ID NO: 726408 - DNA, 33 bp, Homo sapien
attaaaaaatgtcaacgatgttttcaagggaaa

SEQ ID NO: 726409 - DNA, 33 bp, Homo sapien
agaagaagacgatgaaccagctgtttccataat

SEQ ID NO: 726410 - DNA, 33 bp, Homo sapien
agaagaagacgatgaagcagctgtttccataat

SEQ ID NO: 726411 - DNA, 33 bp, Homo sapien
catagataataagtgacgaggtagaggtgactc

SEQ ID NO: 726412 - DNA, 33 bp, Homo sapien
catagataataagtgatgaggtagaggtgactc

SEQ ID NO: 726413 - DNA, 33 bp, Homo sapien
agccttttttataaaacgagcatcccaaggtca

SEQ ID NO: 726414 - DNA, 33 bp, Homo sapien
agccttttttataaaatgagcatcccaaggtca

SEQ ID NO: 726415 - DNA, 33 bp, Homo sapien
ttctttgtagagctcaagtcaaatgctacttct

SEQ ID NO: 726416 - DNA, 33 bp, Homo sapien
ttctttgtagagctcaggtcaaatgctacttct

SEQ ID NO: 726417 - DNA, 33 bp, Homo sapien
gtctttggcattggaacgtttccagacattaaa

SEQ ID NO: 726418 - DNA, 33 bp, Homo sapien
gtctttggcattggaatgtttccagacattaaa

SEQ ID NO: 726419 - DNA, 33 bp, Homo sapien
ctagccaaacaatcacaaactgctaacttcatt

SEQ ID NO: 726420 - DNA, 33 bp, Homo sapien
ctagccaaacaatcactaactgctaacttcatt

SEQ ID NO: 726421 - DNA, 33 bp, Homo sapien
tctataatattcaatgccacttacaatggaggt

SEQ ID NO: 726422 - DNA, 33 bp, Homo sapien
tctataatattcaatgtcacttacaatggaggt

SEQ ID NO: 726423 - DNA, 33 bp, Homo sapien
aggttattgcagtctcccgtacagaggatcagg

SEQ ID NO: 726424 - DNA, 33 bp, Homo sapien
aggttattgcagtctcgcgtacagaggatcagg

SEQ ID NO: 726425 - DNA, 33 bp, Homo sapien
ttccactgggtgaaataatctacttctatgttt

SEQ ID NO: 726426 - DNA, 33 bp, Homo sapien
ttccactgggtgaaatgatctacttctatgttt

SEQ ID NO: 726427 - DNA, 33 bp, Homo sapien
gtaacaattcccatgcaccttcctgtatacctt

SEQ ID NO: 726428 - DNA, 33 bp, Homo sapien
gtaacaattcccatgctccttcctgtatacctt

SEQ ID NO: 726429 - DNA, 33 bp, Homo sapien
aaggactaaggctttaacaaattgaagcagaga

SEQ ID NO: 726430 - DNA, 33 bp, Homo sapien
aaggactaaggctttagcaaattgaagcagaga

SEQ ID NO: 726431 - DNA, 33 bp, Homo sapien
tctctacagttataaagccattcaaggcagaat

SEQ ID NO: 726432 - DNA, 33 bp, Homo sapien
tctctacagttataaatccattcaaggcagaat

SEQ ID NO: 726433 - DNA, 33 bp, Homo sapien
tagacaaatatttctacaattcaaacgggtttt

SEQ ID NO: 726434 - DNA, 33 bp, Homo sapien
tagacaaatatttctataattcaaacgggtttt

SEQ ID NO: 726435 - DNA, 33 bp, Homo sapien
cgacataaggaaacatcagctgagcttcaactt

SEQ ID NO: 726436 - DNA, 33 bp, Homo sapien
cgacataaggaaacattagctgagcttcaactt

SEQ ID NO: 726437 - DNA, 33 bp, Homo sapien
tacagaacatataaaagtgcctgataaatggct

SEQ ID NO: 726438 - DNA, 33 bp, Homo sapien
tacagaacatataaaattgcctgataaatggct

SEQ ID NO: 726439 - DNA, 33 bp, Homo sapien
ccagtagtccacaaataagttggagtagcaaat

SEQ ID NO: 726440 - DNA, 33 bp, Homo sapien
ccagtagtccacaaatgagttggagtagcaaat

SEQ ID NO: 726441 - DNA, 33 bp, Homo sapien
agttttggccacaggaataggagaacgtagtga

SEQ ID NO: 726442 - DNA, 33 bp, Homo sapien
agttttggccacaggagtaggagaacgtagtga

SEQ ID NO: 726443 - DNA, 33 bp, Homo sapien
caatattatgtcactgccaaatataaacactgc

SEQ ID NO: 726444 - DNA, 33 bp, Homo sapien
caatattatgtcactgtcaaatataaacactgc

SEQ ID NO: 726445 - DNA, 33 bp, Homo sapien
tcaaagagagattttgaataggttttgagtagt

SEQ ID NO: 726446 - DNA, 33 bp, Homo sapien
tcaaagagagattttggataggttttgagtagt

SEQ ID NO: 726447 - DNA, 33 bp, Homo sapien
aaagagatcagtaaagcagaaaagagttcagga

SEQ ID NO: 726448 - DNA, 33 bp, Homo sapien
aaagagatcagtaaagtagaaaagagttcagga

SEQ ID NO: 726449 - DNA, 33 bp, Homo sapien
tcagtaaaatttgaggcaaataggaaaccacta

SEQ ID NO: 726450 - DNA, 33 bp, Homo sapien
tcagtaaaatttgaggtaaataggaaaccacta

SEQ ID NO: 726451 - DNA, 33 bp, Homo sapien
ctcccttttgattaacacaaagtcaacacatta

SEQ ID NO: 726452 - DNA, 33 bp, Homo sapien
ctcccttttgattaacgcaaagtcaacacatta

SEQ ID NO: 726453 - DNA, 33 bp, Homo sapien
ctttttcctgacttaagagtctctcctttgtgt

SEQ ID NO: 726454 - DNA, 33 bp, Homo sapien
ctttttcctgacttaatagtctctcctttgtgt

SEQ ID NO: 726455 - DNA, 33 bp, Homo sapien
cggcaggagtccacaaagtgctgtgaggactga

SEQ ID NO: 726456 - DNA, 33 bp, Homo sapien
cggcaggagtccacaacgtgctgtgaggactga

SEQ ID NO: 726457 - DNA, 33 bp, Homo sapien
gaaaggatcgagaccacgggaacaaaatgcagt

SEQ ID NO: 726458 - DNA, 33 bp, Homo sapien
gaaaggatcgagaccatgggaacaaaatgcagt

SEQ ID NO: 726459 - DNA, 33 bp, Homo sapien
gaaccatataatcttaaaagtgcattgccagaa

SEQ ID NO: 726460 - DNA, 33 bp, Homo sapien
gaaccatataatcttagaagtgcattgccagaa

SEQ ID NO: 726461 - DNA, 33 bp, Homo sapien
aattattcattgtttacctgaaattcataacgg

SEQ ID NO: 726462 - DNA, 33 bp, Homo sapien
aattattcattgtttagctgaaattcataacgg

SEQ ID NO: 726463 - DNA, 33 bp, Homo sapien
acaatcatccacaataacaataaaaagataacg

SEQ ID NO: 726464 - DNA, 33 bp, Homo sapien
acaatcatccacaatagcaataaaaagataacg

SEQ ID NO: 726465 - DNA, 33 bp, Homo sapien
ctaaaaagctaagcacaaacggttcagagtctt

SEQ ID NO: 726466 - DNA, 33 bp, Homo sapien
ctaaaaagctaagcacgaacggttcagagtctt

SEQ ID NO: 726467 - DNA, 33 bp, Homo sapien
aaaaattcacctcactaaaagtactggggaata

SEQ ID NO: 726468 - DNA, 33 bp, Homo sapien
aaaaattcacctcactgaaagtactggggaata

SEQ ID NO: 726469 - DNA, 33 bp, Homo sapien
ggaggctgcacaggtaccaaaagccagatcatc

SEQ ID NO: 726470 - DNA, 33 bp, Homo sapien
ggaggctgcacaggtagcaaaagccagatcatc

SEQ ID NO: 726471 - DNA, 33 bp, Homo sapien
tattcagggaacagtaccaataacatccgggcc

SEQ ID NO: 726472 - DNA, 33 bp, Homo sapien
tattcagggaacagtatcaataacatccgggcc

SEQ ID NO: 726473 - DNA, 33 bp, Homo sapien
tcactgtcacttcaaagaaatatgattttactg

SEQ ID NO: 726474 - DNA, 33 bp, Homo sapien
tcactgtcacttcaaataaatatgattttactg

SEQ ID NO: 726475 - DNA, 33 bp, Homo sapien
ttacattttcattttcaatcatccctggctaaa

SEQ ID NO: 726476 - DNA, 33 bp, Homo sapien
ttacattttcattttcgatcatccctggctaaa

SEQ ID NO: 726477 - DNA, 33 bp, Homo sapien
ttaacctgtaggtccaacttaattgataaaaag

SEQ ID NO: 726478 - DNA, 33 bp, Homo sapien
ttaacctgtaggtccaccttaattgataaaaag

SEQ ID NO: 726479 - DNA, 33 bp, Homo sapien
ctccaaacttgctggacatatatgatacaagcc

SEQ ID NO: 726480 - DNA, 33 bp, Homo sapien
ctccaaacttgctggatatatatgatacaagcc

SEQ ID NO: 726481 - DNA, 33 bp, Homo sapien
gagagaggaccttccaaccatgctacagacttt

SEQ ID NO: 726482 - DNA, 33 bp, Homo sapien
gagagaggaccttccatccatgctacagacttt

SEQ ID NO: 726483 - DNA, 33 bp, Homo sapien
cctttgttgcatccccaattttcaaaattatgc

SEQ ID NO: 726484 - DNA, 33 bp, Homo sapien
cctttgttgcatcccccattttcaaaattatgc

SEQ ID NO: 726485 - DNA, 33 bp, Homo sapien
ttcttctggcttagtaccttatcaaatagacat

SEQ ID NO: 726486 - DNA, 33 bp, Homo sapien
ttcttctggcttagtatcttatcaaatagacat

SEQ ID NO: 726487 - DNA, 33 bp, Homo sapien
gtcaatcacatttggaccatcacaggaactgcc

SEQ ID NO: 726488 - DNA, 33 bp, Homo sapien
gtcaatcacatttggatcatcacaggaactgcc

SEQ ID NO: 726489 - DNA, 33 bp, Homo sapien
gagcaatggaggtgtccagtgtctactgaaaaa

SEQ ID NO: 726490 - DNA, 33 bp, Homo sapien
gagcaatggaggtgtcgagtgtctactgaaaaa

SEQ ID NO: 726491 - DNA, 33 bp, Homo sapien
atccttcctcttttaacgtccatctgctgaata

SEQ ID NO: 726492 - DNA, 33 bp, Homo sapien
atccttcctcttttaatgtccatctgctgaata

SEQ ID NO: 726493 - DNA, 33 bp, Homo sapien
ggcttgaggaactcacacaagaagtaatgagga

SEQ ID NO: 726494 - DNA, 33 bp, Homo sapien
ggcttgaggaactcacgcaagaagtaatgagga

SEQ ID NO: 726495 - DNA, 33 bp, Homo sapien
tctgaaaatataaacaatagccaaaataatttt

SEQ ID NO: 726496 - DNA, 33 bp, Homo sapien
tctgaaaatataaacagtagccaaaataatttt

SEQ ID NO: 726497 - DNA, 33 bp, Homo sapien
atattttcagatatatcagggcagcttgcttgt

SEQ ID NO: 726498 - DNA, 33 bp, Homo sapien
atattttcagatatattagggcagcttgcttgt

SEQ ID NO: 726499 - DNA, 33 bp, Homo sapien
ctaaaatccactatcacagaaaggcaaaaaaaa

SEQ ID NO: 726500 - DNA, 33 bp, Homo sapien
ctaaaatccactatcagagaaaggcaaaaaaaa

SEQ ID NO: 726501 - DNA, 33 bp, Homo sapien
gtgctacacgctattacgtggctatagtaggaa

SEQ ID NO: 726502 - DNA, 33 bp, Homo sapien
gtgctacacgctattatgtggctatagtaggaa

SEQ ID NO: 726503 - DNA, 33 bp, Homo sapien
ccacttcactatacaaacttttgtcctgaatat

SEQ ID NO: 726504 - DNA, 33 bp, Homo sapien
ccacttcactatacaatcttttgtcctgaatat

SEQ ID NO: 726505 - DNA, 33 bp, Homo sapien
atctgtctccaggagaaaagaatgcattactcc

SEQ ID NO: 726506 - DNA, 33 bp, Homo sapien
atctgtctccaggagagaagaatgcattactcc

SEQ ID NO: 726507 - DNA, 33 bp, Homo sapien
tttctgccatgcaccacaacaaatacacacaca

SEQ ID NO: 726508 - DNA, 33 bp, Homo sapien
tttctgccatgcaccataacaaatacacacaca

SEQ ID NO: 726509 - DNA, 33 bp, Homo sapien
ccaggcctcatctatcgcatttcctatatacca

SEQ ID NO: 726510 - DNA, 33 bp, Homo sapien
ccaggcctcatctatctcatttcctatatacca

SEQ ID NO: 726511 - DNA, 33 bp, Homo sapien
tttttcattctcaataactgcagtagactttta

SEQ ID NO: 726512 - DNA, 33 bp, Homo sapien
tttttcattctcaatagctgcagtagactttta

SEQ ID NO: 726513 - DNA, 33 bp, Homo sapien
tgatgtgtcctttctgcagttgcaggcccccgg

SEQ ID NO: 726514 - DNA, 33 bp, Homo sapien
tgatgtgtcctttctgtagttgcaggcccccgg

SEQ ID NO: 726515 - DNA, 33 bp, Homo sapien
agacaaatgagctccaatcaagtttaaaagctt

SEQ ID NO: 726516 - DNA, 33 bp, Homo sapien
agacaaatgagctccactcaagtttaaaagctt

SEQ ID NO: 726517 - DNA, 33 bp, Homo sapien
tgtaaattagggcaaccactatggaaaatagtt

SEQ ID NO: 726518 - DNA, 33 bp, Homo sapien
tgtaaattagggcaactactatggaaaatagtt

SEQ ID NO: 726519 - DNA, 33 bp, Homo sapien
accttcctctaacacaaggagattacaattcag

SEQ ID NO: 726520 - DNA, 33 bp, Homo sapien
accttcctctaacacatggagattacaattcag

SEQ ID NO: 726521 - DNA, 33 bp, Homo sapien
tctactctgaatgaggacaaacctaggacaaaa

SEQ ID NO: 726522 - DNA, 33 bp, Homo sapien
tctactctgaatgagggcaaacctaggacaaaa

SEQ ID NO: 726523 - DNA, 33 bp, Homo sapien
tccttactctagcttgcacctcagtgtccctta

SEQ ID NO: 726524 - DNA, 33 bp, Homo sapien
tccttactctagcttgtacctcagtgtccctta

SEQ ID NO: 726525 - DNA, 33 bp, Homo sapien
aatccctgtgtcaggccctacttcaaagacgcc

SEQ ID NO: 726526 - DNA, 33 bp, Homo sapien
aatccctgtgtcaggctctacttcaaagacgcc

SEQ ID NO: 726527 - DNA, 33 bp, Homo sapien
caattgtccattgaagaatgatgaaaaacatag

SEQ ID NO: 726528 - DNA, 33 bp, Homo sapien
caattgtccattgaaggatgatgaaaaacatag

SEQ ID NO: 726529 - DNA, 33 bp, Homo sapien
taggcatagaacagatcaatcttagcaataaaa

SEQ ID NO: 726530 - DNA, 33 bp, Homo sapien
taggcatagaacagatgaatcttagcaataaaa

SEQ ID NO: 726531 - DNA, 33 bp, Homo sapien
ttttgatagtggttaacgcaaattttcctagat

SEQ ID NO: 726532 - DNA, 33 bp, Homo sapien
ttttgatagtggttaatgcaaattttcctagat

SEQ ID NO: 726533 - DNA, 33 bp, Homo sapien
ttttgcactctgacaactaagtaattcccaaaa

SEQ ID NO: 726534 - DNA, 33 bp, Homo sapien
ttttgcactctgacaattaagtaattcccaaaa

SEQ ID NO: 726535 - DNA, 33 bp, Homo sapien
ctgtgttatgattgccacaccaaaaatctggtg

SEQ ID NO: 726536 - DNA, 33 bp, Homo sapien
ctgtgttatgattgccgcaccaaaaatctggtg

SEQ ID NO: 726537 - DNA, 33 bp, Homo sapien
attagttcaatccctaaggaaaacagtaaagag

SEQ ID NO: 726538 - DNA, 33 bp, Homo sapien
attagttcaatccctatggaaaacagtaaagag

SEQ ID NO: 726539 - DNA, 33 bp, Homo sapien
atactattccattactcacaatggcaaagtcat

SEQ ID NO: 726540 - DNA, 33 bp, Homo sapien
atactattccattacttacaatggcaaagtcat

SEQ ID NO: 726541 - DNA, 33 bp, Homo sapien
attgaaaagcatagacaaaaatttatgaagtaa

SEQ ID NO: 726542 - DNA, 33 bp, Homo sapien
attgaaaagcatagaccaaaatttatgaagtaa

SEQ ID NO: 726543 - DNA, 33 bp, Homo sapien
gctagcaataagaaaacggtcacgttccaggct

SEQ ID NO: 726544 - DNA, 33 bp, Homo sapien
gctagcaataagaaaagggtcacgttccaggct

SEQ ID NO: 726545 - DNA, 33 bp, Homo sapien
ttgtattcaatgtcagaagcctggaacgtgacc

SEQ ID NO: 726546 - DNA, 33 bp, Homo sapien
ttgtattcaatgtcaggagcctggaacgtgacc

SEQ ID NO: 726547 - DNA, 33 bp, Homo sapien
attccacataggtatccacaggaagaagctaat

SEQ ID NO: 726548 - DNA, 33 bp, Homo sapien
attccacataggtatctacaggaagaagctaat

SEQ ID NO: 726549 - DNA, 33 bp, Homo sapien
ctttttcagttatagacacatatttcccacggg

SEQ ID NO: 726550 - DNA, 33 bp, Homo sapien
ctttttcagttatagagacatatttcccacggg

SEQ ID NO: 726551 - DNA, 33 bp, Homo sapien
gtttaactgcagttgaacatcgtaataattgta

SEQ ID NO: 726552 - DNA, 33 bp, Homo sapien
gtttaactgcagttgagcatcgtaataattgta

SEQ ID NO: 726553 - DNA, 33 bp, Homo sapien
ttgattgggaaaaataacatgaacctatctgag

SEQ ID NO: 726554 - DNA, 33 bp, Homo sapien
ttgattgggaaaaatagcatgaacctatctgag

SEQ ID NO: 726555 - DNA, 33 bp, Homo sapien
ctctcaactgctagtgaaaacactcaatcatca

SEQ ID NO: 726556 - DNA, 33 bp, Homo sapien
ctctcaactgctagtggaaacactcaatcatca

SEQ ID NO: 726557 - DNA, 33 bp, Homo sapien
ctgtgaaggtagtatacgaatatggtggtactt

SEQ ID NO: 726558 - DNA, 33 bp, Homo sapien
ctgtgaaggtagtatatgaatatggtggtactt

SEQ ID NO: 726559 - DNA, 33 bp, Homo sapien
taatggagatccctgaagatatgctgggaaatg

SEQ ID NO: 726560 - DNA, 33 bp, Homo sapien
taatggagatccctgaggatatgctgggaaatg

SEQ ID NO: 726561 - DNA, 33 bp, Homo sapien
ccttcccagctgtaccagatattctgtttattc

SEQ ID NO: 726562 - DNA, 33 bp, Homo sapien
ccttcccagctgtaccggatattctgtttattc

SEQ ID NO: 726563 - DNA, 33 bp, Homo sapien
cttgatttctagaataaactgcccatactcctt

SEQ ID NO: 726564 - DNA, 33 bp, Homo sapien
cttgatttctagaatagactgcccatactcctt

SEQ ID NO: 726565 - DNA, 33 bp, Homo sapien
aggagcaaggaaccaacggtgctagtgtttctc

SEQ ID NO: 726566 - DNA, 33 bp, Homo sapien
aggagcaaggaaccaatggtgctagtgtttctc

SEQ ID NO: 726567 - DNA, 33 bp, Homo sapien
cctagaccataacttcacactgcttcatttaaa

SEQ ID NO: 726568 - DNA, 33 bp, Homo sapien
cctagaccataacttctcactgcttcatttaaa

SEQ ID NO: 726569 - DNA, 33 bp, Homo sapien
aactcatacacagttccaaagtggtttagctgg

SEQ ID NO: 726570 - DNA, 33 bp, Homo sapien
aactcatacacagttctaaagtggtttagctgg

SEQ ID NO: 726571 - DNA, 33 bp, Homo sapien
catttcctggaaagcacgtgtttcctatttagg

SEQ ID NO: 726572 - DNA, 33 bp, Homo sapien
catttcctggaaagcatgtgtttcctatttagg

SEQ ID NO: 726573 - DNA, 33 bp, Homo sapien
gtgacacaacactgcacggtgagaaaccagaaa

SEQ ID NO: 726574 - DNA, 33 bp, Homo sapien
gtgacacaacactgcatggtgagaaaccagaaa

SEQ ID NO: 726575 - DNA, 33 bp, Homo sapien
atgatacataaatgaacggcaaaaacaatgatt

SEQ ID NO: 726576 - DNA, 33 bp, Homo sapien
atgatacataaatgaatggcaaaaacaatgatt

SEQ ID NO: 726577 - DNA, 33 bp, Homo sapien
gttttatctccaatcaatctttgccaccttagc

SEQ ID NO: 726578 - DNA, 33 bp, Homo sapien
gttttatctccaatcagtctttgccaccttagc

SEQ ID NO: 726579 - DNA, 33 bp, Homo sapien
acctctctagttagcaggaaatgtcgggaacaa

SEQ ID NO: 726580 - DNA, 33 bp, Homo sapien
acctctctagttagcatgaaatgtcgggaacaa

SEQ ID NO: 726581 - DNA, 33 bp, Homo sapien
agcttgtattggaggcccttctcaaagagaaat

SEQ ID NO: 726582 - DNA, 33 bp, Homo sapien
agcttgtattggaggctcttctcaaagagaaat

SEQ ID NO: 726583 - DNA, 33 bp, Homo sapien
cagcaataagaaactcagaaaggctcagggccc

SEQ ID NO: 726584 - DNA, 33 bp, Homo sapien
cagcaataagaaactccgaaaggctcagggccc

SEQ ID NO: 726585 - DNA, 33 bp, Homo sapien
tttgtgttttcaaaaaatcatttcaactgttat

SEQ ID NO: 726586 - DNA, 33 bp, Homo sapien
tttgtgttttcaaaaagtcatttcaactgttat

SEQ ID NO: 726587 - DNA, 33 bp, Homo sapien
ctgggtaaagagaagcaagaaagttctgaggca

SEQ ID NO: 726588 - DNA, 33 bp, Homo sapien
ctgggtaaagagaagcgagaaagttctgaggca

SEQ ID NO: 726589 - DNA, 33 bp, Homo sapien
gcatttctttcacttgaaaatactctccattga

SEQ ID NO: 726590 - DNA, 33 bp, Homo sapien
gcatttctttcacttggaaatactctccattga

SEQ ID NO: 726591 - DNA, 33 bp, Homo sapien
acatttgtaaagtcacaagcatagtacaaagag

SEQ ID NO: 726592 - DNA, 33 bp, Homo sapien
acatttgtaaagtcacgagcatagtacaaagag

SEQ ID NO: 726593 - DNA, 33 bp, Homo sapien
aacagtatgtaaataaacagagagacatacatc

SEQ ID NO: 726594 - DNA, 33 bp, Homo sapien
aacagtatgtaaataaccagagagacatacatc

SEQ ID NO: 726595 - DNA, 33 bp, Homo sapien
tgttactacctatgtacgaatggaaccttaaga

SEQ ID NO: 726596 - DNA, 33 bp, Homo sapien
tgttactacctatgtatgaatggaaccttaaga

SEQ ID NO: 726597 - DNA, 33 bp, Homo sapien
gtttattcagactagaagggaaagcacattata

SEQ ID NO: 726598 - DNA, 33 bp, Homo sapien
gtttattcagactagaggggaaagcacattata

SEQ ID NO: 726599 - DNA, 33 bp, Homo sapien
catgtgaaaaatatcaatatgtgagtggataat

SEQ ID NO: 726600 - DNA, 33 bp, Homo sapien
catgtgaaaaatatcagtatgtgagtggataat

SEQ ID NO: 726601 - DNA, 33 bp, Homo sapien
taactaagtatatcaaaaggcagctgtgtttgt

SEQ ID NO: 726602 - DNA, 33 bp, Homo sapien
taactaagtatatcaacaggcagctgtgtttgt

SEQ ID NO: 726603 - DNA, 33 bp, Homo sapien
tcccttttaattaatccactctgaggcccacag

SEQ ID NO: 726604 - DNA, 33 bp, Homo sapien
tcccttttaattaatctactctgaggcccacag

SEQ ID NO: 726605 - DNA, 33 bp, Homo sapien
ttttaagataaaacaacgaggatgatacatgac

SEQ ID NO: 726606 - DNA, 33 bp, Homo sapien
ttttaagataaaacaatgaggatgatacatgac

SEQ ID NO: 726607 - DNA, 33 bp, Homo sapien
acttcaaattgtgtagcaacaaaagctgaaggt

SEQ ID NO: 726608 - DNA, 33 bp, Homo sapien
acttcaaattgtgtagtaacaaaagctgaaggt

SEQ ID NO: 726609 - DNA, 33 bp, Homo sapien
agtctgggggagaagaaaacgagataaagcatg

SEQ ID NO: 726610 - DNA, 33 bp, Homo sapien
agtctgggggagaagacaacgagataaagcatg

SEQ ID NO: 726611 - DNA, 33 bp, Homo sapien
ttggtcaaagaaagtcactttaatcaggagttc

SEQ ID NO: 726612 - DNA, 33 bp, Homo sapien
ttggtcaaagaaagtccctttaatcaggagttc

SEQ ID NO: 726613 - DNA, 33 bp, Homo sapien
tgagtaaaactggtaactgctagtgacttcaat

SEQ ID NO: 726614 - DNA, 33 bp, Homo sapien
tgagtaaaactggtaagtgctagtgacttcaat

SEQ ID NO: 726615 - DNA, 33 bp, Homo sapien
gatctttaggaagtaacctgtggcataacagat

SEQ ID NO: 726616 - DNA, 33 bp, Homo sapien
gatctttaggaagtaatctgtggcataacagat

SEQ ID NO: 726617 - DNA, 33 bp, Homo sapien
cccactctggtatccaataaaatcctacagcat

SEQ ID NO: 726618 - DNA, 33 bp, Homo sapien
cccactctggtatccagtaaaatcctacagcat

SEQ ID NO: 726619 - DNA, 33 bp, Homo sapien
cactaatgcatgattccaaggcacatttttttg

SEQ ID NO: 726620 - DNA, 33 bp, Homo sapien
cactaatgcatgattctaaggcacatttttttg

SEQ ID NO: 726621 - DNA, 33 bp, Homo sapien
gtgggccacacaataaagctaaagctacataaa

SEQ ID NO: 726622 - DNA, 33 bp, Homo sapien
gtgggccacacaataaggctaaagctacataaa

SEQ ID NO: 726623 - DNA, 33 bp, Homo sapien
taaagccagttcctgaatagcaaatagttttct

SEQ ID NO: 726624 - DNA, 33 bp, Homo sapien
taaagccagttcctgagtagcaaatagttttct

SEQ ID NO: 726625 - DNA, 33 bp, Homo sapien
aggagtaagtgacaaactacatggtgattctga

SEQ ID NO: 726626 - DNA, 33 bp, Homo sapien
aggagtaagtgacaaattacatggtgattctga

SEQ ID NO: 726627 - DNA, 33 bp, Homo sapien
aaatcaactgtcaaagcctagtaaattacacag

SEQ ID NO: 726628 - DNA, 33 bp, Homo sapien
aaatcaactgtcaaaggctagtaaattacacag

SEQ ID NO: 726629 - DNA, 33 bp, Homo sapien
ttacacttttgcttgacagctgtgtaatttact

SEQ ID NO: 726630 - DNA, 33 bp, Homo sapien
ttacacttttgcttgagagctgtgtaatttact

SEQ ID NO: 726631 - DNA, 33 bp, Homo sapien
tgtaggtatgtcttcaccatttcttcctgttcc

SEQ ID NO: 726632 - DNA, 33 bp, Homo sapien
tgtaggtatgtcttcatcatttcttcctgttcc

SEQ ID NO: 726633 - DNA, 33 bp, Homo sapien
tatttttttgtggccaaatactattaatattta

SEQ ID NO: 726634 - DNA, 33 bp, Homo sapien
tatttttttgtggccacatactattaatattta

SEQ ID NO: 726635 - DNA, 33 bp, Homo sapien
cagacctgcaccagtccatatgggaccgtgtag

SEQ ID NO: 726636 - DNA, 33 bp, Homo sapien
cagacctgcaccagtctatatgggaccgtgtag

SEQ ID NO: 726637 - DNA, 33 bp, Homo sapien
agccttccttccataggattggatgcatatgat

SEQ ID NO: 726638 - DNA, 33 bp, Homo sapien
agccttccttccatagtattggatgcatatgat

SEQ ID NO: 726639 - DNA, 33 bp, Homo sapien
acttatattgttgggccagtaggctatggtgac

SEQ ID NO: 726640 - DNA, 33 bp, Homo sapien
acttatattgttgggcgagtaggctatggtgac

SEQ ID NO: 726641 - DNA, 33 bp, Homo sapien
ctatacaaagtactcacgatttcctccattaga

SEQ ID NO: 726642 - DNA, 33 bp, Homo sapien
ctatacaaagtactcatgatttcctccattaga

SEQ ID NO: 726643 - DNA, 33 bp, Homo sapien
gaaccctgagcatcccaaagtcctgctctcttt

SEQ ID NO: 726644 - DNA, 33 bp, Homo sapien
gaaccctgagcatcccgaagtcctgctctcttt

SEQ ID NO: 726645 - DNA, 33 bp, Homo sapien
cttaacttcaattgggaacatcatttacttctg

SEQ ID NO: 726646 - DNA, 33 bp, Homo sapien
cttaacttcaattgggcacatcatttacttctg

SEQ ID NO: 726647 - DNA, 33 bp, Homo sapien
tcacactccatatacaatctgtcaggaaatggc

SEQ ID NO: 726648 - DNA, 33 bp, Homo sapien
tcacactccatatacagtctgtcaggaaatggc

SEQ ID NO: 726649 - DNA, 33 bp, Homo sapien
gtatctgtatgtcgctgaactcagtttttgttt

SEQ ID NO: 726650 - DNA, 33 bp, Homo sapien
gtatctgtatgtcgcttaactcagtttttgttt

SEQ ID NO: 726651 - DNA, 33 bp, Homo sapien
accaccataaagtgtacacagccatatctcaaa

SEQ ID NO: 726652 - DNA, 33 bp, Homo sapien
accaccataaagtgtatacagccatatctcaaa

SEQ ID NO: 726653 - DNA, 33 bp, Homo sapien
aagaggggttgtaaaactggagtatgggctttc

SEQ ID NO: 726654 - DNA, 33 bp, Homo sapien
aagaggggttgtaaaattggagtatgggctttc

SEQ ID NO: 726655 - DNA, 33 bp, Homo sapien
gtactttactgcatgaagaaggtacagaggctg

SEQ ID NO: 726656 - DNA, 33 bp, Homo sapien
gtactttactgcatgaggaaggtacagaggctg

SEQ ID NO: 726657 - DNA, 33 bp, Homo sapien
ttggtgcccaagtctgcagcgggggagctgagg

SEQ ID NO: 726658 - DNA, 33 bp, Homo sapien
ttggtgcccaagtctggagcgggggagctgagg

SEQ ID NO: 726659 - DNA, 33 bp, Homo sapien
acaaattgaaggactacggcaactctacatcga

SEQ ID NO: 726660 - DNA, 33 bp, Homo sapien
acaaattgaaggactatggcaactctacatcga

SEQ ID NO: 726661 - DNA, 33 bp, Homo sapien
aaatctactctgcctacgttttatcgatggaat

SEQ ID NO: 726662 - DNA, 33 bp, Homo sapien
aaatctactctgcctatgttttatcgatggaat

SEQ ID NO: 726663 - DNA, 33 bp, Homo sapien
actgtcatctgtttaccgcatagtctactgaat

SEQ ID NO: 726664 - DNA, 33 bp, Homo sapien
actgtcatctgtttactgcatagtctactgaat

SEQ ID NO: 726665 - DNA, 33 bp, Homo sapien
gcttagtgacaatggaaaatgtcttatctgtgc

SEQ ID NO: 726666 - DNA, 33 bp, Homo sapien
gcttagtgacaatggagaatgtcttatctgtgc

SEQ ID NO: 726667 - DNA, 33 bp, Homo sapien
ctccctgtggattacacgatgttcttttgttat

SEQ ID NO: 726668 - DNA, 33 bp, Homo sapien
ctccctgtggattacatgatgttcttttgttat

SEQ ID NO: 726669 - DNA, 33 bp, Homo sapien
ttatgaaaagcttccaatagagaggtacgtctc

SEQ ID NO: 726670 - DNA, 33 bp, Homo sapien
ttatgaaaagcttccagtagagaggtacgtctc

SEQ ID NO: 726671 - DNA, 33 bp, Homo sapien
ctggctggtaagtatacaagttaaagatattaa

SEQ ID NO: 726672 - DNA, 33 bp, Homo sapien
ctggctggtaagtatagaagttaaagatattaa

SEQ ID NO: 726673 - DNA, 33 bp, Homo sapien
gtgagtgtgaattaaacgtgaagctgtaaagag

SEQ ID NO: 726674 - DNA, 33 bp, Homo sapien
gtgagtgtgaattaaatgtgaagctgtaaagag

SEQ ID NO: 726675 - DNA, 33 bp, Homo sapien
tttttaaggctgaataataatccctcgtgtgta

SEQ ID NO: 726676 - DNA, 33 bp, Homo sapien
tttttaaggctgaatagtaatccctcgtgtgta

SEQ ID NO: 726677 - DNA, 33 bp, Homo sapien
tagacaaaatctgcaacctgggaccagtttcct

SEQ ID NO: 726678 - DNA, 33 bp, Homo sapien
tagacaaaatctgcaatctgggaccagtttcct

SEQ ID NO: 726679 - DNA, 33 bp, Homo sapien
cacacaaatacagattaaaacaaagacaggaaa

SEQ ID NO: 726680 - DNA, 33 bp, Homo sapien
cacacaaatacagatttaaacaaagacaggaaa

SEQ ID NO: 726681 - DNA, 33 bp, Homo sapien
aaaatactgtttagaaacaacgtggcttgaatt

SEQ ID NO: 726682 - DNA, 33 bp, Homo sapien
aaaatactgtttagaagcaacgtggcttgaatt

SEQ ID NO: 726683 - DNA, 33 bp, Homo sapien
aatctgagcacaataaaatttctgattttgatc

SEQ ID NO: 726684 - DNA, 33 bp, Homo sapien
aatctgagcacaataagatttctgattttgatc

SEQ ID NO: 726685 - DNA, 33 bp, Homo sapien
tgtaccacatcacttaagttgaaattttaactg

SEQ ID NO: 726686 - DNA, 33 bp, Homo sapien
tgtaccacatcacttaggttgaaattttaactg

SEQ ID NO: 726687 - DNA, 33 bp, Homo sapien
gctgtgcttttctgcaatgcaactttattagca

SEQ ID NO: 726688 - DNA, 33 bp, Homo sapien
gctgtgcttttctgcagtgcaactttattagca

SEQ ID NO: 726689 - DNA, 33 bp, Homo sapien
ttatattagaaagctacgcaatacagtaattga

SEQ ID NO: 726690 - DNA, 33 bp, Homo sapien
ttatattagaaagctatgcaatacagtaattga

SEQ ID NO: 726691 - DNA, 33 bp, Homo sapien
ttctttgcagttattaagtgattacagctgtcc

SEQ ID NO: 726692 - DNA, 33 bp, Homo sapien
ttctttgcagttattatgtgattacagctgtcc

SEQ ID NO: 726693 - DNA, 33 bp, Homo sapien
agccttgcctactttacagagatttttcttttc

SEQ ID NO: 726694 - DNA, 33 bp, Homo sapien
agccttgcctactttatagagatttttcttttc

SEQ ID NO: 726695 - DNA, 33 bp, Homo sapien
taaaagtgtgtaacaactccccctactctctct

SEQ ID NO: 726696 - DNA, 33 bp, Homo sapien
taaaagtgtgtaacaattccccctactctctct

SEQ ID NO: 726697 - DNA, 33 bp, Homo sapien
cacaaagtaagtgaagaaccagatcagggagag

SEQ ID NO: 726698 - DNA, 33 bp, Homo sapien
cacaaagtaagtgaaggaccagatcagggagag

SEQ ID NO: 726699 - DNA, 33 bp, Homo sapien
tgccctctcatttcacgcaaagtaaaagtcaaa

SEQ ID NO: 726700 - DNA, 33 bp, Homo sapien
tgccctctcatttcactcaaagtaaaagtcaaa

SEQ ID NO: 726701 - DNA, 33 bp, Homo sapien
gtggctggaatgcaataagcaagcagttgagga

SEQ ID NO: 726702 - DNA, 33 bp, Homo sapien
gtggctggaatgcaatgagcaagcagttgagga

SEQ ID NO: 726703 - DNA, 33 bp, Homo sapien
tgttttatagatgagacaggtgatgttgaggaa

SEQ ID NO: 726704 - DNA, 33 bp, Homo sapien
tgttttatagatgagagaggtgatgttgaggaa

SEQ ID NO: 726705 - DNA, 33 bp, Homo sapien
tgcaataaacctgcaaaggggctgttagtatcc

SEQ ID NO: 726706 - DNA, 33 bp, Homo sapien
tgcaataaacctgcaagggggctgttagtatcc

SEQ ID NO: 726707 - DNA, 33 bp, Homo sapien
gtgttcacacattcacacttctccatagtgact

SEQ ID NO: 726708 - DNA, 33 bp, Homo sapien
gtgttcacacattcacccttctccatagtgact

SEQ ID NO: 726709 - DNA, 33 bp, Homo sapien
ggttacagatgccaacaccgatgcagtgaaaaa

SEQ ID NO: 726710 - DNA, 33 bp, Homo sapien
ggttacagatgccaacgccgatgcagtgaaaaa

SEQ ID NO: 726711 - DNA, 33 bp, Homo sapien
gtcaacagtaggctatcagtaattgtgttttga

SEQ ID NO: 726712 - DNA, 33 bp, Homo sapien
gtcaacagtaggctattagtaattgtgttttga

SEQ ID NO: 726713 - DNA, 33 bp, Homo sapien
ttaggaattctatatgaacttttcaggaataca

SEQ ID NO: 726714 - DNA, 33 bp, Homo sapien
ttaggaattctatatgtacttttcaggaataca

SEQ ID NO: 726715 - DNA, 33 bp, Homo sapien
aaccaacctcaaattacatcagtcagagcacag

SEQ ID NO: 726716 - DNA, 33 bp, Homo sapien
aaccaacctcaaattagatcagtcagagcacag

SEQ ID NO: 726717 - DNA, 33 bp, Homo sapien
aaagtaatagactgcccatgattaaagtcttca

SEQ ID NO: 726718 - DNA, 33 bp, Homo sapien
aaagtaatagactgcctatgattaaagtcttca

SEQ ID NO: 726719 - DNA, 33 bp, Homo sapien
cttctggcccatcgtaagtgtctcattatatgt

SEQ ID NO: 726720 - DNA, 33 bp, Homo sapien
cttctggcccatcgtaggtgtctcattatatgt

SEQ ID NO: 726721 - DNA, 33 bp, Homo sapien
tcaggctctgtaaacagactagcatttgaatcc

SEQ ID NO: 726722 - DNA, 33 bp, Homo sapien
tcaggctctgtaaacatactagcatttgaatcc

SEQ ID NO: 726723 - DNA, 33 bp, Homo sapien
tgggaactaagaatcacactgccttagtgatct

SEQ ID NO: 726724 - DNA, 33 bp, Homo sapien
tgggaactaagaatcatactgccttagtgatct

SEQ ID NO: 726725 - DNA, 33 bp, Homo sapien
ttttatcataatatagaagatcactaaggcagt

SEQ ID NO: 726726 - DNA, 33 bp, Homo sapien
ttttatcataatataggagatcactaaggcagt

SEQ ID NO: 726727 - DNA, 33 bp, Homo sapien
acagatgaagtacagaatcactgcatattgaca

SEQ ID NO: 726728 - DNA, 33 bp, Homo sapien
acagatgaagtacagagtcactgcatattgaca

SEQ ID NO: 726729 - DNA, 33 bp, Homo sapien
gaatatattcatatacaacaataatgtgacata

SEQ ID NO: 726730 - DNA, 33 bp, Homo sapien
gaatatattcatatacgacaataatgtgacata

SEQ ID NO: 726731 - DNA, 33 bp, Homo sapien
gatccactcactcctacctataatccattagga

SEQ ID NO: 726732 - DNA, 33 bp, Homo sapien
gatccactcactcctatctataatccattagga

SEQ ID NO: 726733 - DNA, 33 bp, Homo sapien
agaggcctgcaaacaacaggtacctcataagtt

SEQ ID NO: 726734 - DNA, 33 bp, Homo sapien
agaggcctgcaaacaataggtacctcataagtt

SEQ ID NO: 726735 - DNA, 33 bp, Homo sapien
tgagtgatagggtcagaagaacacttactttca

SEQ ID NO: 726736 - DNA, 33 bp, Homo sapien
tgagtgatagggtcaggagaacacttactttca

SEQ ID NO: 726737 - DNA, 33 bp, Homo sapien
attttaaaattgaaaaatgtgcaacatctactt

SEQ ID NO: 726738 - DNA, 33 bp, Homo sapien
attttaaaattgaaaagtgtgcaacatctactt

SEQ ID NO: 726739 - DNA, 33 bp, Homo sapien
tatatcctagcatctacagagaggaatgatttg

SEQ ID NO: 726740 - DNA, 33 bp, Homo sapien
tatatcctagcatctatagagaggaatgatttg

SEQ ID NO: 726741 - DNA, 33 bp, Homo sapien
gtcactgctttctgcaagttttgactgtggaaa

SEQ ID NO: 726742 - DNA, 33 bp, Homo sapien
gtcactgctttctgcaggttttgactgtggaaa

SEQ ID NO: 726743 - DNA, 33 bp, Homo sapien
agaagacagtcgagctaaaagatgggaagataa

SEQ ID NO: 726744 - DNA, 33 bp, Homo sapien
agaagacagtcgagctcaaagatgggaagataa

SEQ ID NO: 726745 - DNA, 33 bp, Homo sapien
cctggccaaatcttgacgttaatatatctgttt

SEQ ID NO: 726746 - DNA, 33 bp, Homo sapien
cctggccaaatcttgatgttaatatatctgttt

SEQ ID NO: 726747 - DNA, 33 bp, Homo sapien
ctcatactcacatttaaagtcatttcttcaggg

SEQ ID NO: 726748 - DNA, 33 bp, Homo sapien
ctcatactcacatttagagtcatttcttcaggg

SEQ ID NO: 726749 - DNA, 33 bp, Homo sapien
gtaacaataagtgcccaaaagtaaaaagtatag

SEQ ID NO: 726750 - DNA, 33 bp, Homo sapien
gtaacaataagtgcccgaaagtaaaaagtatag

SEQ ID NO: 726751 - DNA, 33 bp, Homo sapien
gttcatacacctagagactccttctatctgaag

SEQ ID NO: 726752 - DNA, 33 bp, Homo sapien
gttcatacacctagagtctccttctatctgaag

SEQ ID NO: 726753 - DNA, 33 bp, Homo sapien
gaagaataatgaataacagaactggccgaaata

SEQ ID NO: 726754 - DNA, 33 bp, Homo sapien
gaagaataatgaataatagaactggccgaaata

SEQ ID NO: 726755 - DNA, 33 bp, Homo sapien
acattttgtgggtgcacaacgaataaatgaaaa

SEQ ID NO: 726756 - DNA, 33 bp, Homo sapien
acattttgtgggtgcataacgaataaatgaaaa

SEQ ID NO: 726757 - DNA, 33 bp, Homo sapien
ctggtacatctactcactcatctatctatggat

SEQ ID NO: 726758 - DNA, 33 bp, Homo sapien
ctggtacatctactcattcatctatctatggat

SEQ ID NO: 726759 - DNA, 33 bp, Homo sapien
ttgtcattgctttgtacgtgtgaataaacttta

SEQ ID NO: 726760 - DNA, 33 bp, Homo sapien
ttgtcattgctttgtatgtgtgaataaacttta

SEQ ID NO: 726761 - DNA, 33 bp, Homo sapien
agacaaatttggccacagaacagctgggtattt

SEQ ID NO: 726762 - DNA, 33 bp, Homo sapien
agacaaatttggccacggaacagctgggtattt

SEQ ID NO: 726763 - DNA, 33 bp, Homo sapien
attgattggacatagaaggtaatggagagaaga

SEQ ID NO: 726764 - DNA, 33 bp, Homo sapien
attgattggacatagagggtaatggagagaaga

SEQ ID NO: 726765 - DNA, 33 bp, Homo sapien
gtaaaacctaaaggaaaaaagcaatgaggcaaa

SEQ ID NO: 726766 - DNA, 33 bp, Homo sapien
gtaaaacctaaaggaataaagcaatgaggcaaa

SEQ ID NO: 726767 - DNA, 33 bp, Homo sapien
gtgaaaacaaaacagggatttttatatcagagg

SEQ ID NO: 726768 - DNA, 33 bp, Homo sapien
gtgaaaacaaaacaggtatttttatatcagagg

SEQ ID NO: 726769 - DNA, 33 bp, Homo sapien
taatttcaggtttgacaaaatgtaacaaatcaa

SEQ ID NO: 726770 - DNA, 33 bp, Homo sapien
taatttcaggtttgacgaaatgtaacaaatcaa

SEQ ID NO: 726771 - DNA, 33 bp, Homo sapien
acagaaaacttttgggaaatcctgctttaaggc

SEQ ID NO: 726772 - DNA, 33 bp, Homo sapien
acagaaaacttttggggaatcctgctttaaggc

SEQ ID NO: 726773 - DNA, 33 bp, Homo sapien
gcctggttcagattcaagaggtgaggaatcagt

SEQ ID NO: 726774 - DNA, 33 bp, Homo sapien
gcctggttcagattcaggaggtgaggaatcagt

SEQ ID NO: 726775 - DNA, 33 bp, Homo sapien
ctcaaatcttccttcccacatccttaaaaatct

SEQ ID NO: 726776 - DNA, 33 bp, Homo sapien
ctcaaatcttccttcctacatccttaaaaatct

SEQ ID NO: 726777 - DNA, 33 bp, Homo sapien
tctcagtgtgcaatgaagcgctgggaaggttgt

SEQ ID NO: 726778 - DNA, 33 bp, Homo sapien
tctcagtgtgcaatgaggcgctgggaaggttgt

SEQ ID NO: 726779 - DNA, 33 bp, Homo sapien
gttaggaatcatgagaagtctggactgagaaat

SEQ ID NO: 726780 - DNA, 33 bp, Homo sapien
gttaggaatcatgagaggtctggactgagaaat

SEQ ID NO: 726781 - DNA, 33 bp, Homo sapien
ttatctctaggggttccaaaaattgggcaagat

SEQ ID NO: 726782 - DNA, 33 bp, Homo sapien
ttatctctaggggttcgaaaaattgggcaagat

SEQ ID NO: 726783 - DNA, 33 bp, Homo sapien
agggtgctgcactaacaattctcactcccctgt

SEQ ID NO: 726784 - DNA, 33 bp, Homo sapien
agggtgctgcactaacgattctcactcccctgt

SEQ ID NO: 726785 - DNA, 33 bp, Homo sapien
gccttcccttcaagaaactaaagacctatcttt

SEQ ID NO: 726786 - DNA, 33 bp, Homo sapien
gccttcccttcaagaacctaaagacctatcttt

SEQ ID NO: 726787 - DNA, 33 bp, Homo sapien
acactgaatccataggacacatagatacgaata

SEQ ID NO: 726788 - DNA, 33 bp, Homo sapien
acactgaatccataggtcacatagatacgaata

SEQ ID NO: 726789 - DNA, 33 bp, Homo sapien
tcttttttgcattcaacttataatttatgtctg

SEQ ID NO: 726790 - DNA, 33 bp, Homo sapien
tcttttttgcattcaagttataatttatgtctg

SEQ ID NO: 726791 - DNA, 33 bp, Homo sapien
ctgaactagttagcgacccattcctccaaaaca

SEQ ID NO: 726792 - DNA, 33 bp, Homo sapien
ctgaactagttagcgagccattcctccaaaaca

SEQ ID NO: 726793 - DNA, 33 bp, Homo sapien
gactaggaatggcatgcaagtcacaaatgtatc

SEQ ID NO: 726794 - DNA, 33 bp, Homo sapien
gactaggaatggcatgtaagtcacaaatgtatc

SEQ ID NO: 726795 - DNA, 33 bp, Homo sapien
agagccgtataagaaaatcaaagtccttatcag

SEQ ID NO: 726796 - DNA, 33 bp, Homo sapien
agagccgtataagaaagtcaaagtccttatcag

SEQ ID NO: 726797 - DNA, 33 bp, Homo sapien
atgaaacttctcctagccaaggtccttaagaaa

SEQ ID NO: 726798 - DNA, 33 bp, Homo sapien
atgaaacttctcctagtcaaggtccttaagaaa

SEQ ID NO: 726799 - DNA, 33 bp, Homo sapien
cagaccctgaactcaacgtgtcggctggagcca

SEQ ID NO: 726800 - DNA, 33 bp, Homo sapien
cagaccctgaactcaatgtgtcggctggagcca

SEQ ID NO: 726801 - DNA, 33 bp, Homo sapien
tggagccacccagatcaataaactgattcatct

SEQ ID NO: 726802 - DNA, 33 bp, Homo sapien
tggagccacccagatcgataaactgattcatct

SEQ ID NO: 726803 - DNA, 33 bp, Homo sapien
ggctattactgtatgccagaaagtgtttgggag

SEQ ID NO: 726804 - DNA, 33 bp, Homo sapien
ggctattactgtatgctagaaagtgtttgggag

SEQ ID NO: 726805 - DNA, 33 bp, Homo sapien
agaaacaggagaaagacggaaaaatagaaggaa

SEQ ID NO: 726806 - DNA, 33 bp, Homo sapien
agaaacaggagaaagatggaaaaatagaaggaa

SEQ ID NO: 726807 - DNA, 33 bp, Homo sapien
agatatttaatcttggccatgttttcaaatata

SEQ ID NO: 726808 - DNA, 33 bp, Homo sapien
agatatttaatcttggtcatgttttcaaatata

SEQ ID NO: 726809 - DNA, 33 bp, Homo sapien
gactggcgaagtaagacaaggccatttagagtt

SEQ ID NO: 726810 - DNA, 33 bp, Homo sapien
gactggcgaagtaagataaggccatttagagtt

SEQ ID NO: 726811 - DNA, 33 bp, Homo sapien
cgtcaatatccaaggcacaggtaaggtttgata

SEQ ID NO: 726812 - DNA, 33 bp, Homo sapien
cgtcaatatccaaggcgcaggtaaggtttgata

SEQ ID NO: 726813 - DNA, 33 bp, Homo sapien
gtcttccttttctgaccacttctgatgataact

SEQ ID NO: 726814 - DNA, 33 bp, Homo sapien
gtcttccttttctgactacttctgatgataact

SEQ ID NO: 726815 - DNA, 33 bp, Homo sapien
tcttcttaaaactatcactttttcaatgtcacc

SEQ ID NO: 726816 - DNA, 33 bp, Homo sapien
tcttcttaaaactatcgctttttcaatgtcacc

SEQ ID NO: 726817 - DNA, 33 bp, Homo sapien
ttgatctgcctgttgacctaatgggctccatct

SEQ ID NO: 726818 - DNA, 33 bp, Homo sapien
ttgatctgcctgttgatctaatgggctccatct

SEQ ID NO: 726819 - DNA, 33 bp, Homo sapien
gcaaagtgttttgaaagaatagagtccacagtc

SEQ ID NO: 726820 - DNA, 33 bp, Homo sapien
gcaaagtgttttgaaataatagagtccacagtc

SEQ ID NO: 726821 - DNA, 33 bp, Homo sapien
atgaccacaggtcctgaatctttctcccataat

SEQ ID NO: 726822 - DNA, 33 bp, Homo sapien
atgaccacaggtcctgcatctttctcccataat

SEQ ID NO: 726823 - DNA, 33 bp, Homo sapien
gctaattcctgttgcaacggcaaataagaggta

SEQ ID NO: 726824 - DNA, 33 bp, Homo sapien
gctaattcctgttgcagcggcaaataagaggta

SEQ ID NO: 726825 - DNA, 33 bp, Homo sapien
tgctgggaaagtgcacaatctttatacgaaatc

SEQ ID NO: 726826 - DNA, 33 bp, Homo sapien
tgctgggaaagtgcacgatctttatacgaaatc

SEQ ID NO: 726827 - DNA, 33 bp, Homo sapien
attctgaatttgtgaacgattacacccaggtta

SEQ ID NO: 726828 - DNA, 33 bp, Homo sapien
attctgaatttgtgaatgattacacccaggtta

SEQ ID NO: 726829 - DNA, 33 bp, Homo sapien
cctaatctgatggccccaggctcatggcccagg

SEQ ID NO: 726830 - DNA, 33 bp, Homo sapien
cctaatctgatggccctaggctcatggcccagg

SEQ ID NO: 726831 - DNA, 33 bp, Homo sapien
taacttcaaattgcaacgaacagagttggggga

SEQ ID NO: 726832 - DNA, 33 bp, Homo sapien
taacttcaaattgcaatgaacagagttggggga

SEQ ID NO: 726833 - DNA, 33 bp, Homo sapien
aaaggtgtgtaagagaacctggctgcagtggga

SEQ ID NO: 726834 - DNA, 33 bp, Homo sapien
aaaggtgtgtaagagagcctggctgcagtggga

SEQ ID NO: 726835 - DNA, 33 bp, Homo sapien
ctttttttgtatacacagatgttgagtctgcaa

SEQ ID NO: 726836 - DNA, 33 bp, Homo sapien
ctttttttgtatacacggatgttgagtctgcaa

SEQ ID NO: 726837 - DNA, 33 bp, Homo sapien
tcctttccaatctggacggcttttacttatttt

SEQ ID NO: 726838 - DNA, 33 bp, Homo sapien
tcctttccaatctggatggcttttacttatttt

SEQ ID NO: 726839 - DNA, 33 bp, Homo sapien
aactaagtaaaatggaaagaaatatcaagcctg

SEQ ID NO: 726840 - DNA, 33 bp, Homo sapien
aactaagtaaaatggagagaaatatcaagcctg

SEQ ID NO: 726841 - DNA, 33 bp, Homo sapien
gcagttctttccacacaattctctctctctccc

SEQ ID NO: 726842 - DNA, 33 bp, Homo sapien
gcagttctttccacacgattctctctctctccc

SEQ ID NO: 726843 - DNA, 33 bp, Homo sapien
tctgacaggtactagtcaagaagttatagtgct

SEQ ID NO: 726844 - DNA, 33 bp, Homo sapien
tctgacaggtactagttaagaagttatagtgct

SEQ ID NO: 726845 - DNA, 33 bp, Homo sapien
gcagtattatgaaaaactgtcaatatgacactg

SEQ ID NO: 726846 - DNA, 33 bp, Homo sapien
gcagtattatgaaaaattgtcaatatgacactg

SEQ ID NO: 726847 - DNA, 33 bp, Homo sapien
caaatgccttattgggaaaattaatgacattat

SEQ ID NO: 726848 - DNA, 33 bp, Homo sapien
caaatgccttattgggtaaattaatgacattat

SEQ ID NO: 726849 - DNA, 33 bp, Homo sapien
ggaagaggatgacaagaatgaaggtggtgtaga

SEQ ID NO: 726850 - DNA, 33 bp, Homo sapien
ggaagaggatgacaaggatgaaggtggtgtaga

SEQ ID NO: 726851 - DNA, 33 bp, Homo sapien
tattcatccattccacaaacatggatcagctcc

SEQ ID NO: 726852 - DNA, 33 bp, Homo sapien
tattcatccattccaccaacatggatcagctcc

SEQ ID NO: 726853 - DNA, 33 bp, Homo sapien
ttccatgtctgttaaaacacacgggttgaaatt

SEQ ID NO: 726854 - DNA, 33 bp, Homo sapien
ttccatgtctgttaaagcacacgggttgaaatt
